United States Patent Application Publication US 2004/0123343 A1 - sequence listing, part 31

SEQ ID NO: 85833 - DNA, 593 bp, Oryza sativa
  Clone ID: PAT_MRT4530_84932C.1
cgttcttttttttccacggtttttttttttgtcactcaaaaaccttcctaactcctattcataattactgttgtgtggatgatacaacaaaaacaagccaatcgttaggggctacatcagtcgttgtacaaacgaatgacgaatcaaattgattagttacaactttggcattcacctatccctatgtattgaaacagatgtcaatctccagtccgtagtagctgtggtagtcagttcaaaaggctccggaaaacaaaaccagggctcgcatcattgctctggaccagcctgatcggctaacgcaccatcggcttgtcgcacatcaaaaccttcctgctagcatacgggccttctgcggtgtcacgcatgatggatcgccatcccatggcggttgttatctctttgacatcctgtacaacttgttttaggtcacgaatgtaagccctaccgcctggtctgagtattcgatccatctccagcaagatacttgagatgttacatcttttctgttccttcgagaataggctaaacgcatggagcagatcatatgtccttggatatgtatcaaatggttcacaccaatcaagagccac

SEQ ID NO: 85834 - DNA, 255 bp, Oryza sativa
  Clone ID: PAT_MRT4530_84933C.1
atggtttcttctcttctttcatacggcggctgccgctgctctgcgcgtgatgttgatggtgacgtagcggccggccacccggggggcgtgtacgcgtggcggtgcgcgtcggcggtaggcggtgcggtgcggatgggttgtcgtctcgtttcgtcgtccgtggaattcggcggtcacctcagctgccggcgccgcggcggccgtggccccgtgtggtcgtctgcgtccggcgggggtaacgcgaggatgggctag

SEQ ID NO: 85835 - DNA, 173 bp, Oryza sativa
  unsure (1)..(173): unsure at all n locations
  Clone ID: PAT_MRT4530_84934C.1
cccacgcgttcgcccacgcctgcgacatatagatgctattgctgcgattaacgcgacgccgaaanancncnaacagcgccngcataaacagacccgtcgctcccatggttacgacagtttggccaggataaccaagttgaccagttgccttcctatgcatggattgttacatg

SEQ ID NO: 85836 - DNA, 366 bp, Oryza sativa
  Clone ID: PAT_MRT4530_84935C.1
cccacgcgtccgaaccactcctcttccacctcttctcccatcgtcggcggctatcaggaggatcgacaccgttgccggacccgggcgcacgtcctcactcggagcaccccggtcgtcctcgccctcgagcttccgccgccgccaccgctgccgtccccgagctcccgcccccggcgacttctccccttccaccaccgtgagggggccctctctcctctctctctctctccccgacgacgaccttgaatgacgaagtgagactgtggaagttgaggcggactcggtggctgtgcgcaagtggatctggacgtcgttgaggatcgacgccggtgacgtgcgcaagtggatcttggcgtcacggccacc

SEQ ID NO: 85837 - DNA, 614 bp, Oryza sativa
  unsure (1)..(614): unsure at all n locations
  Clone ID: PAT_MRT4530_84936C.1
atcaccanngagcgngggaaactaaggggatnactatgggttncatgtntaccattnttncattgtgccttggnctncttnttttnttncaaggnncatggnacaatnntaattngggggaagnccacttnaaagncnacgnggatttaggggagaccaagatagncgnnatcaatggggntttgagcacctnaccgnccttgaggcaacacaccagcagagatntgaagctggattcactgagtactacaacattgagggangaaatgagntncgntgngccggagggagcgngaggggcttagnnngnnagagcangggnttanttttaccaatggatgntaatggtnacaagnttgnntacatnnnncaaggggggggagtgtttgggatggcactgnctggtttgncagagacgttttcagttaagttaantttttccttttgagnaagaggtggnaaaaagnttggttgagggnttaaattattaattccaaaaaaaggaagagaagaggaccaagnaanttttaacaaattnccaatcaaggngatagttaannnngagnngnccagttgggannagnnncattggnttatataaaaaatgggngatt

SEQ ID NO: 85838 - DNA, 2400 bp, Oryza sativa
  Clone ID: PAT_MRT4530_84937C.1
atgacgctaataccgacaaccagcgagatcggggagttaatcgccaagatcaaaagcaaaacggtaccaactgacgagatcaaaactcccgatctctcgcttccggtcgagatccaggacgagatcattgttcgagaagccgggctcccgaaccaagcgacccctcatcatcgtcatcatcatcttcagaccaacctccccaacgacgtcaacatcgcgggctaccttttgccccaggaggcagatgcagggcattcacgcccgaactctgagatgtgtggtggcccgagaagttccaaccagggaacctacaaacgccacgcaatcgaggacgacctacatgctttaactcagaaccaaggtgaatcattgagggactacattcggcacttcaacgagtgtaggaatacgatccccgagatcaccgatgcttctgttatccatgcattcaaatcaggtgttcgagatcgatacaccacccaggagctggcgacacgacgaatcacatccgcccgaaagctgttcgaaatcattgacagatccactcatgcaaatgatgcattaagatgcaaagagggaaaaagcaagacgggcgaagagaagaggtcgagtaacaaggatgcaccaaaatcaagcaagaagagaagtcgtaaaaatgggaagcgcaaaccctcaggagaagtccttgccgctgagcgaacggagattcgcacccgaccgaaaacaggccatacgagaacagctcgacaaacttctcaaagatggcttcatcggggaggttctccaccccgagtggctcgccaatccaataatgatcagcatggccaaggtacacttggcagtcagcttggtaaaaacgtcgaagcctacgttgacgacattgtcatcaagaccaagacaggcgattcactaatcgacaacctaagggaaacgttcgacaatctccgcagatatcgcatgaagctaaacccggagaagtgcacgttcggagtaccatcggggaagctactcggcttccttgtctcaggacgagggatcgagtccaaccccgagaagatcaaggcaatcgagaacatgaagtcgcccacaaggctcaaggagaagcaggataaattcaagtggacccaagaggccgagaacacgttcatcgcgctcaaatgctacttgtcaaaccctcatgtactcgttgctcctcaaattaatgaagaattattcctatatatcgctgctacgccttatcctgtgagtacggttatcgtcgtagagagggaaaaagtacaacatcctgtgtactgtgtcagcgaggccctccatgacgcaaaaactagatatccgcatattcagaaactgctctacgctatggtcatgacatcaagaaagctacgccactacttccaagctcacaaggttactgtcgtctcctccttcccttttggggaggttgtcagaaacaaagacgtcgtcgattgttttactaaatgggtagtcgagctaagccagtttgatgtacacttcgtaccaaggacagccatcaagtctcaagtcttagctgacttcgtagccgactggactatccccgacgatagaccggccagccaaatggataacaaaacttggactatggcgttcgacggtgcactcaacagccaaggagcaggagccggattcatcttgacatctccttccggagatcaattcaaccatgcaatccacctcaacttccgggcaacaaacaacacagccgagtacgaaggcttactcgcaggaataagagcagcagctgcacttgatgccaagcgactaatcgtgaaaggagattctgaactagttgcgaaccaagtacacaaagaatataaatgctctaaccccgagtttgccaaatacctcgccaaagttcaaaaacatgaacgcaggttcgacggtatcaaaccctcagtcaaggatacacacaacgaaagtaccacagccaacaccgacaacccaccgggggctgcagaagtcacatgcgtcaatgcaaacattgagacaacggacgactggcgtattccactaataaatatcctggaatcagacgagctaccggacgacgacatggaggcagagaaactatcccgtcaggccaagatatactgcatgatcggcagagatctatacaaaaaggccccaaacggtatcctcctcaagtgcgtctcttctgacgacggacaagctcacctcctcgatatccatgaaggcatttgcggatcacacgctggcggacgcaccttggtcggcaaagccttaaaagacgcctgtgacatcgtgcaacgatgtgaaccttgccagttctttagcaagcacaccaagttgccagcacaagcgctccagactatccctttgacatggccgttctcatgctag

SEQ ID NO: 85839 - DNA, 2127 bp, Oryza sativa
  Clone ID: PAT_MRT4530_84938C.1
atgacgacatcagatcggttcgtaggatatgtcgaagctaatccgaatgaaccatttgtgctacacctcctggaagactacgagtcctattcggagtcaccacgggatgtaaacgtggttgacaacactgaaacaagcgcgtccacagcagcgagaacactcactcagcagctacgaaccttagatgcgatattgagtgaaagtcctttcgacccggtcacgaaccccgacgtcaaccaatgggctatgcggctgcgagagacaatgactaacctcaatgtcgcatttgccgaagcagctgtcaacccggagcagcatgaggacggaggaccaaccgcaggagatgcaaacggagaaaatcccaacgggacacgtccctccggtgaccactcaccccgaggaagacgagatcctactccaccgcgtcccgcgaaccgcgatcttcgcgatcatttggactatcggcggagggacaggagagatcgcgacaacaaccggtgtcgttctccttcacgccgtggcgataacaccgccgcccaacgacatcgccaccacactcctccgcggcagagaagggacgacagtcgaggaggcgccccaaatgaagatcaggatcgacgggcccacagcggccaccgcaatgacgctaataatgacaaccggcgagatcagggagctaatcgccgagatcaggagcaaaactgtggcaaccgacgagatcgaaactcccgatctcccgctctcggtcgagatcgaggacgagatcatcgttcgagaagccgggctcccgaacccagcaacccctcatcgtcgtcatcatcatcatcagaccagcctcctcgattacgtcaacatcgcgggccaccttttgctataaggcacagatgcagggcattcacgctcgaacttcgagatgtgcggtggcccgagaagttccgaccaggtgcaatagagaagtacgatgtaagcacagatccgaaagaatttctgcaagtctactccacaatcctatatgccgctagcgcagacaacaacatgctggcaaattacttgccagctgcgttgaagggatctactcgttcatggctggtccatctcccgtcccgctcgatctcatcatcggaagacttgtggcagcagttcgtcgccaacttccagggaacctacaaacgccacgcaatcgaggacgacctacacgctttaactcagaaccaaggtgaatcgtcgagggactatattcggcgcttcaatgagtgcaagaatatgatccccgagatcaccgatgcttctgttatccgcgcgttcaaatcaggtgtccgagatcgatacaccacccaggagctggcgacacgacgaatcacgtctgcccaaaagttgttcgagatcatcgacagatgcgctcatgcagatgatgcattaagacgcgaagagggaaagagcaagacgagcgaagagaagaggtcgagtaacaaggatgcaccagaatcaagcaagaagagaagtcgtaaaagtgggaagcgcaaaccctcgggagaagtccttgccgctgagcaaacggacatggttgagcagtgcagtgtgacaagcggagcctcgacattgttctactcaaaatgccaggaccaaaagggacaatcactatccagggcaatgctaaattggcagtgcagtgtgacaagcggagcctcgacatggttgagcatactcccaacccacccaccacaaccgagcagcccaagaaaatatcgtatgaagctaaacccggagaagtgcacgttcggagtatcatcggggaggctactcggcttccttgtctcaggacaagggatcgaggccaaccccgagaaggtcaaggcaatcgagaacatgaagttgcccacaaggctcaaggaagttcagcggttgatgggatgcatggcttcgctaagccgcttcgtcgcaaggatgggagaacaaggacaagctttcttcgccgtactcaagaagcaggaaaaattcaagtggacccaagcggccaagaacgcgttcatcatgctcaaacgctacttgtcaaacccactgtactcggttctcctcaaattaatgaagaattatttctatatatcgctgctacaccttattctgtga

SEQ ID NO: 85840 - DNA, 1524 bp, Oryza sativa
  Clone ID: PAT_MRT4530_84939C.1
ctaaggtgccgcaggcgcggccgcgccgacattctccgccgcctggggctcctccacgaggccctcgtcgtcgtcgactgcttcttctccagcacgagcgtcgccgaggaggagtacctccgtggccatcgctgacggtggcgtcgcctgactcgcctccagggcaggaacatgggcgtgctgcagagagcaccccatgactccgccggacaacttcaccgaagatgatgaatgtatccagccgcgacgcctgtcttgctgagggaaaaagctggggaggcggtgccggtgctcgtcgtcggcggagccgcccccaacgcccccaacgccgccgccgccgccgccgctgccgctgccgcctccgccgcctccaagtcccgatccctcggcgagcagctccatcccgaggacggctgatctggtgggcgcgggggggcaggggacctcgaagacaaagttgacggcatcctcatccgagaggatgtggcgtcccgctcccgctcgcgcgccgagggtcttgtcgacgacgtcttcaacgggggccgcgtcctcgggcttgtcggagccgttgcctccgggaggcgcggtggtgttgggatcgtcgacctccgcgaagagctcacggacgccttcgagaggatcctcgatgggcggatcgctcgccgtcacccgaactcgccgtgcttctatcgcgagcgggggaacgcgtgcacgagcaatacggagagtggtttccccggcgaactcccgtttgagggggaaccgcaccgaggaaggccgaggtgctctgcccttgccgcgcccgcgtccatcgacgggcagtgaagcgcccgcaccgattcctatccgattcatttctcgaaatggtggaggcgtggagcggaggggaggggaggagggtgttcttggcgtggcgaggaagcgggaggaagaggcttcgaacggtggcggtggcgccgccgccgatttcttgcaaaagcggccatgcgcccgcgtgaacaccggcgactcgtcctcccattcccccacaacctccgccttgcctttccccgcgccgccaccaccatcgccaccggcgccatcccttcccctcgtcgccacctccacctccaccttgccgacctcacacgacctctcgtctcgccgcgccgcgaccaggccaaccccggcccgacgagtagctcggtctcggtcgccgccgtccgccgagcgcaccacccgctcctccgagcccggctgatagagggggcgagggcatggccgacggcgccggcaccgggagatcggggggaagaggagaagaccgggacgaacaagcacgggctcgtgcccgaagacctgggtctcctcgacatcctcgacgacaagcacacgcaagcgcgcccgcgaactcgacacgagttctcgtctcgccgcgtcccggccccaatcggcgccaaccccgccgatcatctcggttggcggcgccgccgcgctcgccacccgacgcgtaccgacttcctcccgtcctccgaggcccgttga

SEQ ID NO: 85841 - DNA, 547 bp, Oryza sativa
  Clone ID: PAT_MRT4530_8493C.1
tagcgtggtcgcggccgaggtactaataaatcataaattaaaatagatagaaaccaacctggctcacgccggtttgaactcaaatcatgtaatcttttaaaggtcgaacagacctaaaattctatcttctgccccagaattctagattaattcaacatcgaggtcacaatcaaatttatatatatgaactttacaaatttattatgctgttatccctaaggtatcttattttaataaccctaaattaaggttcaaatatacataaataaatggtgtaaaatactaaagatttaagattttagctgtcaccccaacaaaaaattttatttaataaaaattaaatccacattaatattattattcaattaaaatttaaagatctaaagggtcttatcgtcccatttttaaattttagctttttaactaaaaaataaatttcacttaattgaattaataaagcttacttcttgttaaaccattcattctagacctcaattaaaagactaattactatgctacctttgtacctgcccgggcggccgctcga

SEQ ID NO: 85842 - DNA, 2648 bp, Oryza sativa
  unsure (1)..(2648): unsure at all n locations
  Clone ID: PAT_MRT4530_84940C.1
ttttttttttttcctttatttttgaaaatgaatgagggagatngtagagctagggataacaagtgaatgaaataacaaatggatacagcaattacaacatacacctccaccccacgtataattatggaatatataagggggcgtatttttcctgctggcagctattctgttcattgccaatacaaaagtgtagctccacagaagtcaaaccatacatttcattttctgtagaaaaaagaatggttacatcaaggggctctcctccaatatacaacttctcatcatgctatcaccaaaacagggcaaaaaaatatcatatataaatgaaaagaaaacattatggtataccaaaactctactttccactagaggagcttgctggttcgtcgctttggaccaccagggaagagcttcattatccatccaagcacccgttcaacaacctcatctccttcatcagcatacaaagttgcatcattgatggagcgtgtgtcgatcggctttggaaggacattctcgttagccatcctttgagaagataacagctcaagtctgtgagtctgaatctccagcttttgcgttagatccttgttcaattccttcagcttggagcaattggatgattcaattctcaaagctcgcagcaactcttctcgctccactgccaactctgacatcaaggagttgatattgtcgatcattctaagctgatcatgtgggatgctagaagacacctcttctaaataagtaaaatcagccacattattggaccgcgatacagatgtttcaccatcttctactgtgtcaatggcactggtaagggtttctgaagagctgctttcccctgtatctagatcttctgttgcagttgatgcatctcttttatcagctgaaggtttttctataatattgaccttctcagtcacagaagtattcctcaatttagagtgtaggagtttcttttcttcttgaagagcctcaacagtagattgaagatgttgacgctccttctctagactagaaactttgcgcctgtatgaagaaatctcagagctcaaaccctcaatttccttttcaagctttaactcacttgacctcagtctaagagccttatcttcaagtagaatgacttctgctgcaagaactttggccctctcatctgcagcattgcattctagctgggcattagcatattccgttctgacagactcaagtgccagcagttgagcttgaatttcgttctgcaatctctccatgtcagatgtcaggttgctgataacttgtgcctgttggttgaacttatcagtcaaagctgagttgtctgtggccaaagtttgagccaattcttgagatttctcaagagtacgttgtaaggcgaacttctcttttgtcaaatcctcaatgagctgctctagtgcagcaaaatcatcatctttcccaggaattgtgaagttttggaacatttgagtactatggtgcagattccgttcatctttggaaggaaaggaatcagtacgaatggaatttccatatgatcccttctcgttgttatattcttgtcttcctgattttagagaaccatccacatcattgcttccagcggattgttgatttggtggctgaaaaaatgaactctcagaattcgagttgccaaatggtttactagcctttgcaggctccacgtatgggacttcagttgttggagctctttgtactccaatagaatcaagaaaagatggccgagatcgattgtatgtagttggataaccagatgacataaaaggatcctgtttatcaaaacaaacaggtgtggaatttgatgtattccaagaattattgaaggcacttccatactcccggctgctggcatacgctaagccatctgcttgggaagagtctttagaggtggctcggaaccgaccaaagatatcattgtttgcagagtaaccctgactttgcgtgccttctaactttccaaaaaggctgccagatgaatatgaactagactgctcagtgtcacttacttccctcaagactggatttcttccctgactcagcaagacctcatctgaagaatgggagacctcatctgagtttccaaaggcactcaatttagattttaaagtcacgtccttgtcaggactatgttcctcccttttccgagcagcatcgcctctccaatcctcattatgcccattaactaagtcagagaagctcaagttcccataaatcttgctccctccaacactactgacatcatgcgatggggcaggattactaacactgactggcacatttacaggggcaggtccatttgacaagggctcgtcacctctggaataactcgttgggccattctcgtagactggtggcacagatgatgtgcttgttgtgttcacatccacgtccgataccaacttgtctcccgagttagtactggtggcatttggaggagggttctctagtgtatcaggaacaggcgccgttgcctggtctgcagtttcagcagccttcttcgccgccttgttcttcttcttacggtactccgccagcagcttcttccccgcgtggagatccttcttccgcgaggacgacgacgacgccgcaccggcggcggcggaggacgacgacacctgcgccgacgccat

SEQ ID NO: 85843 - DNA, 358 bp, Oryza sativa
  Clone ID: PAT_MRT4530_84941C.1
aaaccaaaaatttgaatcgttttattttgggacggaagattccctccagaacatttaacaaggcccttggtccaaaccaaatacatatttagggggggaaagcaaaaaaggggtgggttttccagcgcacttaaaagggccagcttcactcggggggggggtctccgggccccagcttacaacggaagcaaggggtattcaccggggatcggtttctaacccttattatggcaaaaaaaagcgcccatcttgaggagcctcggctgggggcctctcgtttttaggagacagggctagcagaaatgccccatttttcctttgcctactgggcgagaatacgggcgctgctgaatttgcc

SEQ ID NO: 85844 - DNA, 167 bp, Oryza sativa
  Clone ID: PAT_MRT4530_84942C.1
aggatcccccccatgcctccaccgagactccaaccggagcgccgaccgcagcagaccccgcttgtgccacaccagccagccacggctcctcttactcgcaccacgccgctcccaccgccatcatcatgcctacttcctaccgctcctaccatgccaacccgcgctag

SEQ ID NO: 85845 - DNA, 361 bp, Oryza sativa
  unsure (1)..(361): unsure at all n locations
  Clone ID: PAT_MRT4530_84943C.1
ggcgcttggtgccgccgccccttgcccaccgccagctcgtcctctcccctactaggccagctccgccttgtcctcctcaggccactgctgccatctcatcctcggccggggcgccgccgctcgccagccctcaattgggtcgccgctggctagtccaccaggccgccggcagcccgtcctcgcccattgacagccgccggttccccgtcgccgccacatctatcttcgatcgtcttcgctagctgcctgccgcggcgctggtttcacggctcanacggctccgtcggtggcaggtatgttctctngtccccttgatagctaggggaaaactaatgtgtncctaagaaaaactaattatcca

SEQ ID NO: 85846 - DNA, 201 bp, Oryza sativa
  Clone ID: PAT_MRT4530_84944C.1
atggggaccgtgttttccttgaaccagatcttacatgttgagaacgacaattgtgcactcaagttcctgtgccacttatgtgatggcaagcgaggggaggaggaggccgacgtaggtcaaaggtggaggtggaagagacaaataaatcttattgatggttctatgtccttacgagaaactggatactatgcaaacaactag

SEQ ID NO: 85847 - DNA, 892 bp, Oryza sativa
  Clone ID: PAT_MRT4530_84945C.1
gcggcccggaaacccccagatctttccgctcctcctcctcgtcgtcgtcttcctcctctttcctcctcctccccgtctctccctctccgcttctctctcccaccaaccccccgcccccacccatggcgctcgcatccggcacgtcctgcgccctccccggcgccgcgcgcccccacctcgccgtgtccccctctccgcccgcctcctcgatccgtttctgcagaggcggctcccgcggaggcagggccgtcgtctccctccgcgcctccgtgcctccagcagcagcggcagcaacaacatctggtagcattgcacctgcaatttcattgactgaaaaggctttgaagcatctgaataaaatgagggctgaacggaatgaagatctctgtttgagaattggagttaggcaaggtggatgttctggcatgtcttacaccatggagtttgaagatcgatccaatgccagccctgatgattcagttgtagaatatgatggctttgcaatagtctgcgacccgaagagccttcttttcatgtttggaatggagctggactacagtgacgcccttatcggtggtggattcgccttccagaacccaaatgcaacaaagacatgtgggtgtggcaaatctttcgccaccggaaaagaaacagagagcacagcaacagcctgcaacaactaagctagaaacatataggtggaaatgccatatatatagctcacccttggcaaaatgttctatggatataccacagatgaatactcgaaactcagaagtgtaacgattttcattacagtttgtgtgtatcactgtatccaattggacaaattactgctcgatagaattcaaagatagttaccatgagcaaaaaaaaaaaaaaaaatttgcgg

SEQ ID NO: 85848 - DNA, 378 bp, Oryza sativa
  Clone ID: PAT_MRT4530_84946C.1
aaaccagcaacggaggatggcaacaacagcatttacacatctaactatacttaacacatacaattatccggtgacataatacgtctccagtacccacttagcatgcatttactgctttatcaacaaaagcgtgatgctcaatctaggaacatgaatccacagacatgccttatgtgcatggctagagactagcctcgatgaactagttattagctgctctcaacactcactactgagctaagcatacgttgatcacttctagatcaagtgagacagcatcccagacatacttatcataagagtagcgcttgatgatattgtcccaggctgatatgatctatccagagaagactagcgttgccagtccgccctatatca

SEQ ID NO: 85849 - DNA, 1404 bp, Oryza sativa
  Clone ID: PAT_MRT4530_84947C.1
aacctccatcaggtgagaaggggagatgcgagtaataaaagggaagtaatggacggagaccggccatgtcggggatggtgtccgtcgtacgtccatgccacacctttgcatgggtcttgcacgcttttatggcttagtagcatgaagacctttgctttccccaacccttcttctttaaatccaccctcaccatcgggtacgaataattcagcaagcaaaattctggtaatcaccttgccgacagtgacagttgccatcgtagctgcaatttccctttgtatctggaatgtgcgtcaaattcatgcaaatttgccagctgatacaactgaggattttgaaagtgtcaagtcaggcctgttatctctggcatcgctgcaagtggcaaccgataacttccacaaaagcaagaagattggtgaggggggattcggtgaagtttatcagggactactgtccgggcaagaagtggccgtgaagaggatggccaaggactctcaccaggggctacaagagctgaaaaatgagctaattcttgtcgccaaacttcatcacaagaatcttgttcgtctcgttgggttttgcctcgaaaaaggggagagactgctcgtctatgagtatatgccaaacaaaagcctcgacacccttctttttggtactaaacatttggtgaaaaaagatacagagcaaaggaaacggttagactgggccacacgatttaagatcatagaaggtaccgctcggggactccaatatcttcaccaggactctcagaagaagatcgtccaccgtgatatgaaggcaagcaatattttgctagatgctgacatgaaccctaagattggggactttggcctcgccaagctcttcgagcaggaccaaactcgagaagtcacaagccgcattgctgggacattcggttacatgcctcctgagtacgtgatgtgcgggcagtactctacaaaatcagacgtgttcagtttcggcattctcgtaatagagatagtgacgggccaaagaaggaacagtgggccatatttctctgagcaaaatggtgtagatatattgagcatagtatggaggcactgggaagaggggacaacagcagagatgatcgaccattccttgggaagaaactacaatgaggctgaggtggtaaaatgcatcaacatcggactcctatgtgtccagcaaaaccctgtagatagacctacaatggcggatgtcatggttttgcttaacagcgacgctacttgctctctgccggctcctgcacctaggccaacatctttgattgatggaagctctgtttgtgttgtttcatattcaaactatttgttctcgatttgcaatccatagcatccaagttcaattagtgaagagttttgagggactattactcctcgg

SEQ ID NO: 85850 - DNA, 618 bp, Oryza sativa
  Clone ID: PAT_MRT4530_84948C.1
atgaccgggcagagccttttagcgcagccggcaaataatttgccaagacgtttcgtctgcgccagtgacatagagaactgtggagtagacttgcagaaattcttctcgggcgtggcccatgaccgcgatgccttcgtggaggtcgatccgaagaggacgatgaagacgaagaagagggatcgcttgggtcaggagcccgagttctcaaacgatgatcacgtccacgatctcgactcggatgaggagattgggagtttcgatctcgtcggtcgtcgttattcctttcttgtctccgaggactgttttccgatcccggtcgttgtcgtcgcgtcggtcgtcacgaggtcgacggtcgcgattcccgttggagatgttccttcggccatcgtcccgctctcgtcgaagctgggagcgaggacgatgctgtcggtgcggatcgccatcctcacgacgaggagaacgatggtcacatcttggaggggagcggtcgccggtacgccttccgtcggggttttcatcctccgcatctccggtaggccgctctccgtctctgttcggctttgggccgcctgcggcttcagcaaacacggtgttgaggttggtcacggtctcccgtag

SEQ ID NO: 85851 - DNA, 1134 bp, Oryza sativa
  Clone ID: PAT_MRT4530_84949C.1
atggagaacggaacatcgacggccccaacacctgggacgaaccctcaagcggctgagtttcaccctccgtgtgaaaaatcgaagccgacaaggacaaccaccctgaaaccgagaacttggtgtcccatacataagacaaccaagcatgctctcgaggactgcccggtgatactccacgtgcaagctgaactctacacctgttgggaacgggggatacaacgcacttcaccaacgagtaccacctactgcctgattcacagatctagagtgcatgatctcaccaactgcagaatcttcctcaggaccctcaaaccagcgcatcatcgcgtccagcagccacgagttcaaactccgtgtgttgccaaggaaccagatgcggctccgatcccgaatcggtttgtgggatttgtcggcgcaaacgagccatccgtgttacacctcttagaaggctacgagtcctcctcgcagtcgcctagagatgtaaacgtggtcgacaacactgagacgagcacgtccgccgctgtgagaacgccagctcatcagttgcagaacctagacgcgatattgaggaaaagcccttttgatccggtaacaaacccagatgccagccgatggacagagcgactacgggagaccgtgaccaacctcaacaccgtgtttgctgaagccgcaggcggcccaaagccgaacagagacggagagcggcctaccggagatgcggaggatgaaaaccccgacggaaggcgtaccggcgaccgctcccctccaagatgtgaccctacaccaccgcgccatgaagatggtgaccttcgcgaacatctaaacggacgtcggcgtaacaggagagaacgcaacgagaacgagtgccgccgacatcgttctcctcgtcgtgaggatggcgatccgcaccgacagcatcgtcctcgctcccagcttcgacgagagcgggacgatggccgaaggaacatctccaacgggaatcgcgaccgtcgacctcgtgacgaccgacgcgacgacaacgaccgggatcggaaaacagtcctcggagacaagaaaggaataacgacgaccgacgagatcgaaactcccaatctcctcatccgagtcgagatcgtggacgtgatcatcgtttga

SEQ ID NO: 85852 - DNA, 142 bp, Oryza sativa
  Clone ID: PAT_MRT4530_8494C.1
ccctcctactaatatcaatgtcaagaagctacatcaagaggagaaaaacatctattcacaagatgttgctgaagaggacatgtccaatgagtctttggagggaagccagaaggatgaggacctatttcttcatgagaaataa

SEQ ID NO: 85853 - DNA, 4276 bp, Oryza sativa
  Clone ID: PAT_MRT4530_84950C.1
attgagtccgctaattggtctatttgaggaagagggaagtggtccttggggcacgccttgttgaggtcggtgaagtcgacgcacaacctccacttcctgttggctttgcgtaccattactggatttgcgagccactctggatggatgacttctcttatgaagccagctttgagaagtttgtccagctcttctcatatggcttgttttcgatcgggtgcgaatcaccgcagtttctgcttaactggcttggcgttgggtcacaccattagtttgtgctcaatcacctccctgggtactcccggcatgtctgacggttgccaagcgaacatgtccgcattgtctcggaggaaggtgatgagcgcgagttcggttttgtcggggttggcgctggacaacgtgatgatcttgatggtgccatctggttttggtgtcttcttgattttgctcactttcttggggttctcggttgtggcgggtgggttgggagtatgctcgactatgtcgaggctccgcttgtcgcactgcaccaccaacttggcgttccccaggatattgattgtccctttcggtcctggcagtccctttcggtcctggcattttgagcacttagtatgcataatccgaggctgccataaacatcgcgagtgctgttctcccaatgatggcattgtacgcggtgtcgaattccgcgacatcaaaggtgatctgctctattcagaagttctcggcgtgtccgaaggtaacatgcagcgtgatctttcccaacggtttagacgatgattccagggtaattccgtgtaagggttgatctgtgggcgtcaggttgcttcgaggtattcccatcgcatctaaagtgctggcgaagagtagactgatcgagctcccgccgtcgatgagaactcttgccaccttaatgttccgaatagtgggctccaacacaatcggatatctgccaggtgtagttgcgaagatgtgggaaacatgcaaatcatactccgggaaggcggagttagagttgtcggtggtggcttcttttgcagtctccgtactcgctttcctctttcgattgctagttgtttcgtgagctcctttttgatgacgtagcaatcttccaaggcgtgattgcttgtcatgtggattgggcaccatggcttgcgagagtcgtcgccctgagggttggagcgcctggacggttctacttgctctgcggcaaggacctctccagaagacttgcgcttcccgcttttgcgacttctcttcttgcttgactctggtgcgtctttatcagtcgacttcttcttctcgtctcccgctttgctctttccctccttgcgtctcagagtgtcgtctgcgtggatgtgatccggcgcgttgccaactcttgggtggtgtaccgatctcggacgccagacttgaatgctcgaatgacagaagcgtcggtgatctcgaggatcgtatttctgcactcattgaagcgcagaatatagtcccgcaatgattcgcctgggttctgggttagtgcatgtaggtcgtcctcgatcgcgtggcgcttgtaagtcccttggaagttggcgacgaattgctgccataaatcttcccatgaacagattgagtttggcgggagatggacaaaccatgaccgggcagagcctttcagcgcggccggcaaataatttgccaggacgttgtcgtctgcgccagcggcatagaaaactgtggagtagacttgcagaaattcttctgggtctgtacttccatcatatttcccgatcgatcccggtcagaacttctcgggccaccgcacgttgtgaagtgcgggtgtgaatgccctgcatccattgcctgggacagggcatggcccacgatcgcgatgcctttgtggaggtcgatccgaagaggacgatgaagacgaagatgagggatcgcttggatcaggagcccgacttctcgaacgatgatcacgtccacgatctcgactcggatgaggagatttggagtttcgatctcgtcattcgtcgttattcctttcttgtctccggggacagttgtcccgatcccggtcgttgtcatcgcgtcggtcgtcacgagttcgacgatcacgattcctgttggagatgtgatgttggcggcgctcgttctcgttgcgttccctcctgttacgccgacgtccgtttagatgttcgcgaaggtcgccatcttcacagtgcggtggtgtagggtcacgtcttggaggggagcggttgccggtaggccttccgtcggggttttcatcctctgcatctccggtaagtcgctctctatctctgttcggctctgggccacctgcggcttcagcaaacgcggtgttgaggttggtcacggtctcacgtagccactctgcccatctgctggtgtctaggtttgttaccggatcaaaagggccttccctcaatatcgcgtccaggttccgcaactgatgagctggtgttctcgcagcggcggacgagctcgtctcagtgttgtcaaccacgtttacatctctaggcgactgcgaggaggactcgtagccttctaagaggtgtaacacggatggcttgtttgcgtcgacaaatccaacaaaccgatccaggaccggagccgcatctggttccttggcaacacacggagtttgaattcgtggccgctggacgcgatgatgcgctggtttgagggtcctgaggaagaccctgcagttggtgagatcatgcactctagatctgtggatcggacagtaggtggtactcgttggtgaagtgcgttgtatcccccgttcccaacaggcgtagagttcagcttgcacgtggagtatcaccgggcagtcctcgagagcatgcttggttgtcttatgtatgggacaccaagttctcggtttcagggtggttgtccttgtcggcttcgatttttcacacgaggggtgaaactcagccgcttgagggttcctcccaggtgttggggctgtcgatgttccattctccaccggagtgggaggaattgtcggcggggcattgtttctctcagtcgtagccgtacctttctcgttcccgatgacgattgggccagtcgagattggtgtaacgatgtagatcggaacgacaatagatccgacttgagtccacaccagcggtgtcgaggtagaaactccttgattggcgctggtaacgaggctattgtcggggagtcttgaagtcatactggtggatccttgagcaccaagtccccctaccgaattggcgatgccgatgagaccgtagtcgaggaattcgacgagatctcccagcgagttggctccggggactccggcttcataaactttggtgggagtgttggcgatgagatgcgatgccctttgactctccctaggggtcccttttatatcgtgggataccttgaccctcaagtaagacttgaagatatgtaaaccgacacgatatactggagattttaccctttccgagtaggacttattggcgcgctccccctgccacctcagcaccaccattccgttggacgacggcgccagcgactccactgtagttgcatcatcaacatcactatcatacagtataatatcatttggaacatctgttgtgcaagcagtaatttttccatgaaaaacttcaggccctgacagaatattgatctcgacagtgccctccaaggcttccttaacagaagcagatacaagctccacctcactgagcctactctccaaggtttcactcacaatcatagacttacgagtgtaaaccttcatctcaagcaatcctttactaaattctttgtcattgcactcttcattttccttaatcttcaaatttatctcaaaaaagatttcaccatggaaaacaattcctctagttgggcccgtgagaattatattttcattcttcagagaaagtacattcaacgagctagtcaacatgtggtccttgttgataattgaatccgtaaagcgcattggaccatattgcgtctccttgtcgaggtcgaaggtggtgaggtcgcggaagcaggcgcgggtgtagtagctgattcctgtcttggggtcgtgctcccaatacttggccgccaaagcactgctcctcgcccgcctctccttcacctccggcgtgtccagaaacgacggcgcccgaggccgcggccgccggggcttctggctctcctcccgccgcctctgcttcgccgccgctgccgcatcctcgtcgtcgtcctccacgaacaatggaagatcaaagctgtcctcttgctgctccgccat

SEQ ID NO: 85854 - DNA, 273 bp, Oryza sativa
  Clone ID: PAT_MRT4530_84951C.1
atgccggccgccgcccctcgcgtggcctctgccgcctccggatccgcctcagcgacgaggggcgtgcgggtggcgagggacaaaagcggcggagggaagctggaggagcggacggccgttgcagttgcagttgcgtgcttgctgattcgagtcgttggctttattagctactgcaatgtgctgaactctgctgtgttcttgagtgggcaggtgaaagtggtggtggtggatccgcagcgcctgcgcatggcggccttcgagccccatcggtaa

SEQ ID NO: 85855 - DNA, 746 bp, Oryza sativa
  Clone ID: PAT_MRT4530_84952C.1
tttttttttttttttcactcaagaaaaacagaagtcaacagtgaccataaatctcctaaaagcttccactgacaaatttttttatgagtttttttttagtacttcatcttctagagttgcttaatagtatagttataacgacaaattcatgtcagaacaccccacagttacaacagaagctatccccctattcccctgaatgattagctcaaactatcctagtgcgcaaaggtaatggtcaaaactcaaaagtaataaaaggcaggaaactatagaacctagcgttgtctacatatttatagcttcaaaatgggaggtgaacagaggcatcttggaagcaatcaactgttttactcagcattcagaagttgcctttgacgattccactgtttctgtgatctcctgaagaagttctttagaaatagcagctgggtcgagctcatagctatctttagggacatttggagcttcttcccctgacatcctataaaagggcacctcatgtgaaaacctaaacatctcttctttgggaattttcttgatggcattcaggtcctggatttcgctgaaatactgttcgaaacccagcaaccttggaccaagggaatgacagaaatgccaagatcctcgtcatactcatccagtacctcaactacatcatagggcagggagaaactttatctggagtatcttcatcccagttcagggaccaattcgatacacagcccagagttacctttctgtgg

SEQ ID NO: 85856 - DNA, 400 bp, Oryza sativa
  Clone ID: PAT_MRT4530_84953C.1
gacatgcaaagagtgaagccattataatataatatataatgttcatcatatggtctatttcaaccaatatgaatgatcaatttgagatcaatgcttccagaaaaaatgcatatggacagttcaatgactaacctacagagttaactagtttaccaaaattttctatgacaagcataaatcatgctctattgctcttccccatgttcttctttcgtttcttcaagtagtgccaaaacaaccatgattgtgtggctaattatgcagaaagtatacattccaagcagaagtcatggtttagggcattttttcgaagctactttgcaaaaataaacaagaacacctcacaagaaaatgtctatttccttttcgctcatctcatatacatgctcccgtgcctcag

SEQ ID NO: 85857 - DNA, 316 bp, Oryza sativa
  Clone ID: PAT_MRT4530_84954C.1
tacccaatcgccgcctaatctccctcgatagatcgatggccgcgtcggcgcgggaccagaccaccagctgtctgcggcaccgccccttgccgggatgagctcgtccgccgcgatcgcgactccggtggccgcatcaccatgcgccgcaccgtcatgagcgcgccccagagcatctggtatggaccagaccgtcccaagttcctgggccctgctttcggggcagactccttttcacctgtccggagagtttccggtagacttcggttgggacacggcggttgctaccggcctacctggagacgtcttgcttggatca

SEQ ID NO: 85858 - DNA, 344 bp, Oryza sativa
  Clone ID: PAT_MRT4530_84955C.1
cgcgtgccgtcgccgccgcgctcgccacgccacgccgcgccacgccgagcgcgcgcacagcaatggagctctcgcttgcctccgcgaagccctcgcctcgcgccgccgccgccgccgaggaggcggcggttgcatcgtagtcactgatgtcaatgcgggggaggaggaggagggaggaagataactgtgtcgggtaccagatcctgccggcagggcggatacggttacaccatcaatggtgccacgagggggaagaaggaacagtatactgcctgcgtgcttttaatggagggacctcggcggcaggcgagaggactaccaccaggtggtcggatgcccgcatg

SEQ ID NO: 85859 - DNA, 3765 bp, Oryza sativa
  Clone ID: PAT_MRT4530_84956C.1
atggggaaaagctccgccgacttgtccgcctcctcggagtcggccgtgctcctgcacggcgacctcgacatttggataaccgaggccaagtgcctccccaacatggacatcatgtcggagcggatgcgccgcttcttcaccggctacggcgcctgcggctcctcgtgcggcggcaccggcgacaacgcgcgccgggccggcggcggcgtcaggcccaagaagatcatcaccagcgacccctacgtctccgtctgcctcgccggcgccaccgtcgcgcagacgcgggtcatccccaactccgagaaccccaggtgggaggagcgcttccgcgtcgaggtcgcccacgccgtctccaggctcgagttccacgtcaaggacaacgacgtcttcggcgcgcagctcatcggcgtcgcctccctccccgtcgacaggatcctctccggcgcccccgccgagggctggttccccatcgacggccactgcagcagcaaccccatgcggccgccgccggagctccgcctctccgtccagtacaggcccatcgacgacaaccccctctacaggggcggcgccggcgccgtccccaacgcctacttccctctccgccgaggtggcggcgtcaccctctaccaggacgcccacgtcgccgacggcggcctcccggccatccagatcgccggcggaagggcgtacgagcacggccgatgctgggaggacatctgccactccatcgtggaggcgcaccacctcgtgtacatggtcggatggtccatctaccaccccgtcaagctcgtcagggagcccacccgggcgctccccggcgagacgccatcgacgctcggcgagcttctcaagaaaagggctcgcgagggcgtccgcatcgtcatcttgctctgggacgacaagacgtcgcatgacaagttccttctcaaaacggatggtgtcatgcatacacacgacgaggagaccaaaaagtttttcaggcattcaggtgttcactgtgtgctggttcctcgctatgccagcactaagcttagcattttcaagcagcagaaatgtgtgcttgttgatacacaagctactgggaacaaccgcaaaatcactgctttcattggtggtctagacttgtgcgacggcagatacgatacacctgaacataggcttttcaaagatcttgataccgctttcaacaaggacttccataatcctacatttcctgttaattcatatggaccaagacagccatggcatgatttacactgcaagattgagggccctgctgcctttgatatactgacaaactttgaacagcggtggagaaaagcaaccaaatggaaggtcaatcttaagaaagttgcaagttggcatcatgacacgctgataaaaataaaccggatgtcctggattgttaccccagctgcagatgaggctaatgcacatgtttgtgaagaaaaggacccagaaaattggcatgtgcaggtgttcaggtcaattgattcaggttctgtaaaggggttcccaaaaattgttcaggaggcagagtctcagaatcttgtctgtgcaaagaatctaaagatcgacaaaagcatacacagtgcatatgtcaaagcaatcaggtctgcgcagcacttcatatacattgagaaccagtatttcattgggtcatcgttcttatggtcctcacataaaagcgcaggtgctgataacttaatacctgtggagctggccttgaagattgcaagcaagatcaaggcaaatgagcagttcgcggtgtacattgtcctaccaatgtggcctgaaggcatcccaaccgcggcaccgatgcagcaaatcctcttttggcagggattggttgaagctcaccctcaagattatctgaatttctactgcctcggcaagcgcgaggtcgccgccggtgacagcatgtcccagacgagcttatgcaatgacaactccactctgcgctcggcacagaagctccggagattcatgatctatgtgcactcgaaagggatggtggtggacgacgagtacgtcatcatcggatcggccaacatcaaccagaggtccatggaaggctgcagggacaccgagatcgccatgggcgcctaccagccacactacaagtggtctgctgatcacggccaaggccctcctcgtggacaggtgtacgggtacaggatgtcgctgtgggcggagcaccttggggcggtggaggagtgcttcgggcggccggagacgggggagtgcgtgaggcgggtgagggagatggcggaggagaactggagggcgtacgtgtcgccggagatggaggagacgaaggggcacctgatgtgttacccgttgaaggtggacaaggacggccgcgtccgctctctccccggccacgactgcttccccgacgtcggcggcaaggtcctcggcactcaaacctcgctccccaatgccctcaccacctactcagctcgatgctgccgcggaggagacgacgccttctccgacgatctcccctccaatccaatccaacccaaatcatccctcctcccctctcgccgccgcccgccgccaagcccagccccagccgcccgcctcctggagccgtcggcgtacggccgcctcctcctggccgcgtcgaggacccgcgcgctggcgctgggcaagctcctccactcccacatgctccgcgccgcctacaggccgggcctcttcctgcgcaacaacctccttgccctctactgccgctgcggcgacatgcgccacgcccgcctcctgttcgacggaatgccgcgcagggacgccgtctcgtggaacacgctcatcgccggctactccggcctgggctcttgccgcctggccctcgacgcgttccgggacgctcgggccagcggggatggtgtggataggttcacgttcgccgcggcgcttgcctcgtgcgcccgcgtgggggactggagggacgggcgggtggtgcacgggctggccgtggtgagcgggcttgcacggaccgcgttcctgaccaattcggtcattgacatgtatgccaaatgtgggatgattgatgaggtgaggctgctgttcgatcgagccgaggaacggggcgaggcttcttggaacctgctgttgtcagcgtacgtgaggatggggtggccagaggtggcagtgaatgtgcttgtttggatgcaccggtcgggggtgaagctggacagttttgctttgggtggcatcctcaaggcttgctctgagctaggtgattcagaggatgttcggaggatgctgcacagttgtgtggttaaggttggtttggacttggatgtgttcgtcgggagtgcaatggtggacatgtacgcgaagaatgggggattggaggaggcgatcaagaacgagcactttgagaaggcactatacttgtttagggagcttctctacaccagaaaagggacagatcaattcaccatatcaatcaaaactggtcttgatcaatttactgtctctggcaattcccagattgctatgtacaggaatataggtgatcttaaggcttcaaaacagacatttgagcagatttcatgtctggacactttctcatggtccgctatgatcctgagctatgcggttcatggctatgaaagcaaggccctagagctctttgagaaaatgaagaatcttggtgtcatgatgaatgagagtgcttctcttgctgctcttattgcttgcagccatcaggggctgggagatgaaggtctcagaagggcaatgatggcatag

SEQ ID NO: 85860 - DNA, 597 bp, Oryza sativa
  Clone ID: PAT_MRT4530_84957C.1
atatatttaatagaatatatctacatatgtagcatgcatcacaattatcatgaaaatatatagagaaggtacaatatcacaaatggtcttcatcaacatggtaacatgccgccgccgactcgtccacgaagatggacatctcgcgtcctctgacagattaatctgcaagacgctttatcgacgacatcgaccgcgtcctctacgacggcaacgaccgcgacaccgacgacggcatcgatcacgtcatctatgacgacaaagactgcatcaatccggcatcaccattgtgatgaccgctacatggtgcggaaggaccaaccgaagtgggtgcaagatgctaacaattacagtttcgtcttcacaccatggcgtaaatattttttttcgccttcggctatttgcggctacatcaactaccatgaccaccatgactacaactactacatgatcagctacatcgacgaacgtctacaacaaaaatcattgacgggaatagaggagagtcaagggacgacacagaaggggacgcaggcaccaggtggaggaccgtccatcagagatgcaattgatgatggtgagttaaagaagatgaagaaa

SEQ ID NO: 85861 - DNA, 210 bp, Oryza sativa
  Clone ID: PAT_MRT4530_84958C.1
cataaacaagccatcttatgtgtcactgaacaacattacacagggcacactggcaagatgatgaccagtaattcacacagccaaacatacagtgattgaacccatcacactggatggcctattttatttatttgttcatcacagataggcatgctggtgcatgctacggtcactaatcccttgatcttagcagttgcaggggttgcactt

SEQ ID NO: 85862 - DNA, 198 bp, Oryza sativa
  Clone ID: PAT_MRT4530_84959C.1
cacaaataataattgccgataggaacaagggataataatttcaacaaatggtcacctaattgggaaggtccttttcgtatccatcgatatgtgcctaagaatgcctatctgcttgaaggttttgatgcagagttttatggaaaagcacttaatggaaaatatctgaagaaatattatccaagtgtttggattaattaa

SEQ ID NO: 85863 - DNA, 146 bp, Oryza sativa
  Clone ID: PAT_MRT4530_8495C.1
atgaagctagctagcacgggggagccaaggagggtccgggagcttcggcttacaagggaactggagctcggggggatcgacgttgacgaggtcgcaagaggcgccattgcttgggtggggtggggttgtggcccacaggaaggagg

SEQ ID NO: 85864 - DNA, 449 bp, Oryza sativa
  Clone ID: PAT_MRT4530_84960C.1
cccgggctgcaggaattcggcacgagggagagaactagtctcgagttttttttttttttttttccctttccggacttgtcgtccaaaagatagttggattcttgaagcattatcacggtccaggggtcagcctctcggctgctgctacgcaccgtactatactccagtaccgagtatgtacgttatgtggtggcagtggcgacgctgcgttacatctgtacagaaaacctgatttgcttgttcgattagttgggcacacggtggcttgcaccaaggtttaacccacttgggcttttgcaccgctgcggaattagaaccctaaccttgaccgcgagaacagaagaggtgagctaactaggaagctaaacgcgtcggattagaacagcaaaatggtcgtcgtcgttgcatggagtcgcgttggcgtttgcatgcgtgctgacttgactagc

SEQ ID NO: 85865 - DNA, 456 bp, Oryza sativa
  Clone ID: PAT_MRT4530_84961C.1
ctatgacgacgcatgcacgcctacgtacagtcttgtatgcctcttgatcagccgccctcctttttttttttttttgttaacaatggcataatctccaatttggggggtttagtaagcaactgctcttgacattgtgttggttagggtataaacacacatgcacacagtacacggttcgccatagaggctctgagggagaaggacgaggaagagagattgtggtggtgatgaccgaatctttaatacgtgtctaaaaactaattcaaatgaaaatccattgcgaggcggttcagatctcaccttggccgacccgcccttcccttaccggaagccgaggtatcgactccccaccgcccccacggtccccgatcccccaacgccgatgcgccccgtggcggcgcggacggggggagggatggccccgcgaaggctgatggttccaacgcgcgctgctcg

SEQ ID NO: 85866 - DNA, 459 bp, Oryza sativa
  Clone ID: PAT_MRT4530_84962C.1
tcgcggacgcgtgagcggacacgatcccgtacgcgtgggctgacatagctggaccggcgcgcacactacaacggtacgaacgcaatcaagagcggcaccgggggacagagactcgacgtccaatatcgcctcgccaaatggagtagcgaagggagggctgatccgaacgactgaatgcgcacaggagcgcgctaactacaacaactgggtcgtgcttatggaaccccacgacaagaagctcaatgaggactaacataacctgggctgcaagagagacgtacgtgcactaacgtgctggtgcgatgagtatgttcaatcatatagaaaggaactataagtgtgcactgcccgtgatgcatgcatgcacatgcatgcactgggggcgtgcgcatcataatcactatatctgacacgtacgctatgctgactacaaaacgctagtgcatgtacgattatatt

SEQ ID NO: 85867 - DNA, 537 bp, Oryza sativa
  Clone ID: PAT_MRT4530_84963C.1
atgcagtacccatcattctctccacgccgcacgccctcgatagaggcgaagtctacagcaacggtgggcaaggacgacggcgacggcttccttctcttctcccccactcctcctctctcttctccttctttcctgacggctatagagggtttagcggcaacagtgggcaagaacgatggcaaaggcttcctcctcttctcccccactcctcgatcctctcccctctcctccctcctgaaggcggtagagggtgcgtccagctggggagggcggaggagacgcgcaacagcagcagcgacggcgggcaaagggcttgggcagcgcgggagggtggaggagggaagcgacggcgatggtggttgtcgcctgtgcggatcggatggcggcggccctcaccccacacagcggagctatgatgatgactggcagcggcgatgggaggggcggacccagccacccctacgtccccacgataacgacaaagatgaggacgaggatgaggacaacgatgacaaggaggagagcagaggcggcttc

SEQ ID NO: 85868 - DNA, 270 bp, Oryza sativa
  unsure (1)..(270): unsure at all n locations
  Clone ID: PAT_MRT4530_84964C.1
agacgttccttcgtacgcttcaccggagtgggtggagacgagacgcgagcaaacccaaaaccctcgcggcgacgcatggccgccggctccggcgccctccgccgccgcacgncgnctcttcgncggtggccgctcctgcgtactcgtccntggccctgcgccaaggcggtggcgcgctccaccctncacgtcgcacggcgggcgccgctccgtcgatccaggcgcctcnttgtccgcgtattctccgcgggaggatacgcgcgtggcctn

SEQ ID NO: 85869 - DNA, 306 bp, Oryza sativa
  Clone ID: PAT_MRT4530_84965C.1
atggcgacgagctcgagagggcgcaaaggaggatcagggcagagggacttgggaaatcaaagttcgcagtggcggcaacggcgatggggagcgcaacggatacgtgataagaggtccaagttgagctccctccacatcgcccctctccgagatgccatcgaggcccaccgccattgcctagctcctctaccgttggccgtcgtccttctctatgtctaccgccgtcgtcctagggagatagggaagagaggaaaaccaggagacccggtatcagagccactaccagatttgggacctaccctgtag

SEQ ID NO: 85870 - DNA, 625 bp, Oryza sativa
  unsure (1)..(625): unsure at all n locations
  Clone ID: PAT_MRT4530_84966C.1
ctcagagacatcccttcctggcccaggattgtgacctgtcacgaccgacaatgggaaatctttcacttgcatcgttcgctttgacacctgaggtggagctggcatacttcaaccatggaggcatcctcccctacgtcatccgcaacttggcacagaactaagacagatgacacctgatttgcccgtgacaacagatgtcaggcttgtctcgccccagggtggatgtacggtctagttcaatgtagagagttcgcgatggatctcatggcctttgtcaattcagtctgataaataaactgtgaaataaaagccgcaacagacaggtaccgccagcaggtgtgagcgcttgattgaggaacagttttgactgctgcttggttgtggtgacgagccatgttgcggaacagactatcctgaaattcctgtttcataggtgtgtagggctgggtgtaaatgatcttggttgtgctacacttgcttatgctctctattctctaccgctaaagttccatttgctattttggtgtctctgaatctttatagtgggtcggtacagattatgtggcnatgatatgatcagttctcnggtagtcttgctcgtgtggaaaaaaaaaaaaaaaaaaaa

SEQ ID NO: 85871 - DNA, 217 bp, Oryza sativa
  unsure (1)..(217): unsure at all n locations
  Clone ID: PAT_MRT4530_84967C.1
atctatttttttattctattctccattcagctaacttcctttgctctatcttcttctcctttgttcttgtaattttcctattgcatgcctatgatctaaacttgatgacaacaccatgcaaatctattatattatcaagacaggtttgaaaggangcaccacgtttggtttagagcaaagaaattctcacattaatcgtagaaataagaaaattaca

SEQ ID NO: 85872 - DNA, 475 bp, Oryza sativa
  Clone ID: PAT_MRT4530_84968C.1
gcacgaggccacctgctccccctccaggctccgtgcggaggctccgcagccgtgaagctccgggacgcggtcgccgccgcgatgacggccttctccggcggcggcgccgggaagcgggagctcgtctcgtcggagcgtggccggaggattttcgcaggtgagaatcgcgttatcgcgcggcgctttaaaatggtccactccaaacgcgatttttttttttcgcgaacccccgccttttttttattctttttttatctccttttctcctcttttttttcgtttgctcgcggcggcggctcaagctagcgcggtgcggttcttgtatagcgagcgggattagcggggggtgggggtggggcccacgggtcagggtgggacagcgactttttttgaagttttgtgctttattacttctttttttcacttttaacctcggattagtccgttatttgctttattacgactttcgtatatg

SEQ ID NO: 85873 - DNA, 936 bp, Oryza sativa
  Clone ID: PAT_MRT4530_84969C.1
atggatatgacccttggagtcaaaatgcccttgtttcttgagaggaataagtctatttcgcatccctcatcttttatccttgatcgaatcgcctcctccaaccgcaaaatcgggtataacacatcccccatctttgaaaaccggtgcaaatcaactcattcggtggtgtcggaagtagttttcataggtggggctcacatgacaatgaggagaggaagaattatacttgggccggaaaaagtacatctaaggtccctcatcttgtcatcggattacaaaattatcccccaatcgcaaaaccagatatatgggatccctcaacttataaaaccgggtcactttgggtccctagacggttttgacccggttttatccgacgtggcagctgagtcagcatgggtcccgtatgtcagccgacccgcgggtgcgaggtgggagagagggagggcggccgatgctggggcggcgacggccaatgcgggagaaggggagacggtgtctcgtcctaccgccacaacgacgccgtccattccttcctccttgctaaggcctctggctctgatttcgtcttctcccttctccgccgcatcctctcgttctccccacccgccgactccctcttccgccaacgccgtccactcctaccctcctccgccacatcctcataacctcgccagcggatggttgaagatgaagtggctggggtcggatgccccgcggtcatcccgcgcggcggtattgtcttctagatctggttttgagcttgattgtgctagctcttgtgtcaggctggtgattccactgccgaggagcttgccactgccacccaggtccagggtgattaattacatgcctattgctcgcggtgagaagcgctcggttgaggctgtgaaggtcaccgatgagatgaaggcgttcaaggcctacgctaattaa

SEQ ID NO: 85874 - DNA, 441 bp, Oryza sativa
  Clone ID: PAT_MRT4530_8496C.1
gttccaaaggcaatctgattaattatcaatcttctcacatgagataaataggtaaaggccatttagaattcatgaatttaatgaaaaaaatatcaagcctctgaaattcctgcaaaattcatacatttcgaacaggcttaagataccagcctatatgttggcaggggatttattttttctctttgaataagttgacatacgccagacagacaagtgtcttccatgcatggaacagtgcctctgatgttaaactccctttcctgctcctatcaaagcggcattgcctcgatgagattattgtggaatctttattgtttcacaataatttgcaacccatgcatgagcactttccaaaactcggagctcgccgacaagtagatctttggccatttcttttctgaatggatgcatgctcctagaggcagggccatcaacaatttc

SEQ ID NO: 85875 - DNA, 1731 bp, Oryza sativa
  Clone ID: PAT_MRT4530_84970C.1
atgcccaactttgctcttcctttcacagttgagaccgacgcctctgataaaggaatcggggttgttctgctacaaaatgatcatcccatagcttttttgtctcgtgctttgggtcctcgccatcacggattatctacttacgaaaaggaaagtttagctattatgcttgctgtagagcattggcgcccatatcttcagcatgcagagttttgcatacgtactgaccaccgtagtttgtccttcttgactgaccagcgtttgtctactccttggcaacagaaggcagtcacacagcttccagggttgcgttaccgcactgtgtataggtacgggactttgaatacggcggccagtccctgatcagtattggcaagtggtttctttggatttcatcgaaggccttcctcgttccgcgtcattcaattgcatcttagttgtggttgacaagttctctaagtattcacttgctgtggccttgacacatcctttcacagctcttgaggtggctgaatcttatgtgcaaaatatacatcgactgcatggtttacctcaagttatcatctctgatcgggatcgcattttcactagcacattgtggacaactctttttcgattggtaggttcccaattaaagatgagttatcataccaacgcatcaagcagctctttgcgtggcctggattgcgtgcagatgtggtccgatttgtgcaaagttgcgatatctgtcagcacgccaaatcagaacatgtgcggtatccagggtttttgcaaccattgccggttcctgatcagtcttggccagtggtttctttggatttcatcgaaggccttccccgttccgcatcatttaattgcatcttagttgtggttgacaagttctctaaccgctggctgaccctcgctgagtactggtataatacctcctttcactcttcgttgggtaccacaccttttgaggttctctatggccacaaaccgcgctactttggtttaacagcagctgcagcttgtccatcttcggaccttgctaattggctaacagaacgtgaccacatgctatccttgattcgggagcatttgcagcgggctcaactacgaatgaagtctcaggctgatgctaagcgctctgaaagagagtttgctgtgggcgattgggtgtatatgaagctgcagccctttgtccagcaatcagttgtcactcgcactaatcgcaagctttctttccggttctatggtccatttcaggtgcttgcgcgcgtcggccaggtggcttatcgtctggcgcttcctgcatctagtttgattcattctgtggtgcatgtttctcaactcaagaaggcattggctcctactgaaacagttcaatctcaattgccggttttccttgctgatcaagatgcttctccaactcctcttcgcattttggatcggcgttttgttcgtaagggagccaaactggtggaatttgttcaggttacttggtctggaccagatgctgaggtgatcacctgggagaatgctcaagaattgcggcatcgctttccatcggctgaagcttggggacaagcttcgtctcaatggggggagaatgtcacggcatcgtcatcgtcatctcctgttcctcatcagacaagcgatgcagcttctccgtcggaccaagatgggctcagaaagtcgcattgtgaacgacggcccaatgcggcctataacaggagtgagtggacccagtag

SEQ ID NO: 85876 - DNA, 234 bp, Oryza sativa
  Clone ID: PAT_MRT4530_84971C.1
tttgttgtttaccacaactttttaaggatggaatcaagtagcaagactttgaccccagactacaaatcagcgacaatcttttaaaaaacctatttgattttggcacatgactggcaagaatggcatagaatgtaaaacaacatgcacgcaacctctgtaacctaaaggggaactactgtacatgatacatgtcagtgttcgattgaagaaccactatacagttacaacggttga

SEQ ID NO: 85877 - DNA, 408 bp, Oryza sativa
  Clone ID: PAT_MRT4530_84972C.1
gggccgcctttttttttttttttttttgggggggggggaggaattgattgatggtttaaaaagggagttgggaaaaagagtagataaaggaattgaaaggaatagacaacaagggagaggggctatattatgtggggttggataggacgcaaaaagagaaagttgaacatggccgagtaaagagaggggcgtgagtgaggaacgggtaaggaaggtggaggttttgggggaaagagggagtgaaagggacaatcgcagagtggtgattagagtttagaggtaagggtggatacggggggacaggggaagcatggggttgaagatcatagaggcaatgcaggaaaaaggggaggtgttgggaagggaaaagaataggggaggggaggaaatggggtgtaaggggagata

SEQ ID NO: 85878 - DNA, 8244 bp, Oryza sativa
  Clone ID: PAT_MRT4530_84973C.1
ttactgaatattaatctgaaaattaagcttatttattgaggctacatctcaccaccatgaaaagactcaaattttacttagggactaacttatagcttgaataccaacaaagcaggtttatccaatatttgagactaattgatgccgacctatcatattaccattgtgcttcatctttggagaaccccgtgtcacttcttatacaatttcgtaacaacagccaagttccgaaagatgcaacttctgctaaacaatatactgtaggcggtggacatgctacaaaccgaaaccgaaagcgggtgctttcaaagaagtagacaggttcaacgagaagcatatcaaaattggccggcaggacgatcactcgtagccatttccgcatctatgcaacactctaaggtataccccatagatccatcgacatgactcctacgtaacggcagtactaccacggtgaatggtgaagcgatctcctctggaaaaagaagagtttcaagcactattaacctattcgcctggattagaaccctacaacaacaacgaaaaactcccaacaaagagatggttgtatgaatcgattgctccatctgcttcatcttattgttcataaaggaaggaatgtgagtatctaaatactgtaaggtattccatccttgtcttcccagcaggttgctcagtactcccaacaagaacacggaactcctcggacagatacaggtgccgcacattaaactttgttaacttctccttgataatatcctcatagttcacgacatggatagctgcctctctgtatgactttttgtcaaaccagtatttcatggcatagaaattttgagcatcagttaagatatgaaaaatgattttttttgggtcctttgaactgttcactgttgagttgataacaaccgaagcagcaaggatgttcttagatagtatgacatagtgcctaccatgtgcagcactaaatttgcgagcagaagaatcatttgaacccagtgaagaggatgtgaaatactctaatgtcaacctcatagatagacagtgatgactcttaggcaacgtctgagcaccaaggttgtagaggaatgcactctgcttcatatgaaagtgagcttcatcctcagtcatgtcaagtatctgacgaagtttcctgtcaacatttcgacaatctacagtgcaagattttgctctagctattgtttgctccatctgctccatcttcttgttgataaaggacggtagatcagcatcaacagtcgatacactaagaaccctctcatggtcttgtatgttttgcttcattagcacagtaagttcctcctgtccttcaagcttcgcaatgcttggataatatgagcgtgccacaaatagttggtcttttagccttttcacaatggagtccttcatgactactttgtgttctctggaccagagacagtagctaccaaattcaagttgacaagccttctcattttccacttcatctgtgtttgtgcctttgtctagtctctttctaactttgctaacctctcttgtgccttgagttgactccttcacagcctctgatgggtcaacttttggtgagggaagaacttttggtttagtgctaatacgggaggtgtgtcgatcagtttgcttatgcttctgcagccctccgctgttaactttgggcgtcttctttggtgcatcctgattcagtccattgacagtaccgtcaccatccgccttctccacgtgatggaactcaggcaaaacaacctcctgtcggcgccgctcatccgtcgtgacgtaccccataatcatgtagcagccattcttcttgtacaccagaaaattgccttccagattgtccaacatctcgacgacacattctcttttcgacccattgaagtgcttgacaacatcctccaacgaaaccccattgcgtccttcaaccagttctagtattgcatcctctgtggcaccgattgcggcagtagaatttacaccttgcccgtctatcttttgtagtttacttgctggctcatcaccacaaatcaatgacccatcagtttggcctctccttgtcaaagggcttgcatcacaaacatctgcgccaacttcacctccattggaggtggtctttggtgcctctgatgtcttggactggatcccatcagtaggaacagtaccaaaaacttgatccgacaatccaagtccctcaattgccaagaatgtctggatcatctcataagttacctcctcacaaaacctactccagtccatctcacatccatctcgagcagcatcaagtatgtaggaaatgactgttttctcttttattggtactgctctgcggtaatgcaaatggatcgcaactttctggaacgaaaacttcattttctgccacaattcccatgaacaaaatttcgcgccacccaaactccttgggagattattttgtgtaggttttggagcagcaggtatactttctacagccgataaatcatccacaggaagattcaattcttttgccaattgtgtgatattttggatgaaaatactgccgtaatgcgagatgaagtgctggttaacaccatcaatattagccaacctagctatggtgctaggcctgaacttcgcaaagtttcttagtgtctgatcaccacatatagcgtacggcgccgttccaatatcttgtgcaagttgcatcctgacattcaagagtacttggtagattttcaattcatcctcagaaattttttcagattctgatgggcccaaaggatttaagccctcttctttacactgtgaaccaccatgcccctctagctcaatcatctctgcagtcagctgtaaaaacagcgatgctccatcccctttatcagcagtggatagaaacttgtacccattaggactaacactgatggatctaaatgtatcatggacagtctccttcaaataattgtagccattaattaacagtacagcattgacaaaacgatactccgaaatgatggtaccatgtgctaaaagcaggccgccaagagctttccaccagtttggtggatagtcttttccccgcccatgcaatggaagtttatcaaaattgttttcaactattttcttgacacgtgatccacggagaacatcaataggcaaattaaggccccaccgtccaccacaggacttaatgcaggacagcaacaagaaggattcttttgacaaatccctctcgttttttgtccttgtgcaattttcacaattaccacagtcagtggtgcggtcttcgccaaagtactgcagcaagaattttctgtgacatgtagcaagcaggcaatatttttgtgctgccatgaaggactccatgatggcttttcgatgagtttgacttttagcttcagcacaatagaaatcagatttcataaaatcacttctttggtaatatagccagcagactgaaggcagtccatctcttccacaacgcccactttcctggtagtaggattccaggctctttggacatccataatgtattacacatctaacatctggcttgtcgattcccattccaaaagcaatggtagccaccatcacaagtacttcatctctaacaaacgatctatgtgattcctctctagctttatttcccattctaccatggtaaatgctggacttgattccagcagcaaccaatgcctcatgcacagtacagttctttgagacatccttcacaagttcattgataaaggccatagaccggttgcatgatttcacgccatagaaaaggttaggacgatcaaatgatcctaccacaatgtgaggaatgcgcagggtcaaggaagtggcaatgtctccacgtaccctttgtgtggctgttgcagttaaagcgacaaagggaacacccactagaaggtcacgcaacatatgcaactgtttgtactccgttctgaaatcgtggccccattctgatatgcagtgtgcttcatcgacagccaacaagcagattccggcagcctgcaagttactccaaaaccttgaaggaagtgagacagctttctctggtgtcatgtacagaacatcgaatgcgcctttttcagcctgaccgctaacagagatgtctgtttgggtgctgccaaggtattcagacttcacgccatgctgctttaagctcatgacctggtcttgcatcaatgacagaagagggctgacaacaacagctgtcttctttgtaacaagtggtgggatttgataacagatcgacttgccgctgccggtggccatgacgaccaagcaatcccggccttccaggaccttctgtatgatctcccgctggtacgaacggaaccccgagaagccgaaatacgtagaaatgtacatagacagatcagaaagttctaactggatacgttgtcgagcaaggcctctgtatgattttgggttcacaatgctaccagtggagattgcctgaggtcctcctcgctcaagtaaagccaatgcaagatcgtgctcattccaactccgaagcccagacgctatcttctttagcgtgtccagtttaatgtcccgcaaccatgacgggacaaacttcaccaccaggaacacaaagcgcgatacatatgccttccaggtgccatggtcacaacccagaagaatgtgcccatccaatacacccgccatgaaatccatatggtttcccaccactcgtggccttcttgacaggaaagacaatttcatgacaggagaagttctttccgctccccagagcagactaccacagaagaagagcatgttggccatggcgtaaccttggagtgtgcttgaaactggtccagggtctttcatactctcttctcgagctgatagcagcagcgtaggcaaggtctcctcatacaatacctggaccagaagaggtccacctgcaacacacaggagtcccccaccaagcatcgcaacttgatgcgccatacatgcagcgctggatagtggcgtgcgtcctgattttaactgtggagggccactggaagagaatccatttgcaagtttgtcagcccactcaatgacttgcttcaggattacctcactcacaaagtaggtgtcatggaatgttcgacaagttctcaggtaaatgaaaccaggagccatgggaagctgaagaccttggccggtgattgcatctcccattaaggcaccaactccacggtttgcagtaaagtcagacccactgcacgaggaccgtagaaaggatgagaagcaactttggatgagctgtgcaactgcatctttatctctgccgaatggagaacgcagacaagagaggatgataaagtcatgccatcttctgactttctgtgtccataaggctgctatgatgggcatacttggccaggaactgccccctgcgcagttctctagtgcctggccactgatcgcatggatatactctgaactcttatcaagcttaaatgtaattgttaagctgaccagcgcagccattggtaaaggaagcattggtggtacaccacgtggatagcagctgggaatctgaatgccagcagatgcgagaatttcctttatttctgcttcgatggaatgaagagaagcaccaggactaggccattcagttccattcatcgggaccattttccagattcctcgtgtaatttctgctaagaagtagctaacaattgctgcaatagaagctggcaagaagtccacaagatctctcaaacttgtagtcaagtctcggctggaaaaccgtccatgagcacatgctgtaagaacagcttcaagaacaaaaggaacagcttctaaaaattcccatgcaggaactgttggcctttggtaatcatctggtgtacttacagaggaaccactgacactactgctagaagtggatgaaagattgccagatgatacaacaggtttgttcatttttctgcaaatcatactcaaaatcttgtttgcaacttgatgaacaggatttttgttgcaaagaccagaaagggttgaagctatgcaagcttgattctgaaaataccaagcccttaacttggggaaagaatcaatataaagtggttgagcaggaacctcatttaatggacctatgttgttgctagagtttctactactggcagatgaatttgcaaagtcaatatggttattgcgcattaacagcaggtagtccagagtaagctccaatctaactgagcctccacgtccagctagacagtattcttgtgggggtttataaaatttccacagtcgaagaagacaaagaaatgcacaagagaagaccgaataaactgatatttcaccaacaatggcaggcttgtggttagatggaggtggtatggacccaaaaacttcacagattggcattaaagctgcagcaacatctggaaccattccatacaaagaaataatgtggatagcatcaccataagaaataccaagcaagagtgcatttaatgtagacatctgagcaaggtagtggctcatgctgccctgtgttgaggaatttgagggcaatggaggtgataatagcttgaccaccatgcggaccacatattcctggatattccaaccacaaacaaatgatgcaccacaaagaatttttgcagcagctgatttttcctcctctgaaccatttaatgctatgtgatataacctatccaattctgtggtgcttgaagcaggagtagcaatcagagcatcaataagtggacctgaaagtggtgctccttgcataaagtttaaccagggggattcttggggtaatgtcgcatctttcaaatgcccagatgatacaacatagccgggccataagtaagaagatgtatcaatcaaattccttgaaatacaggcttcaactataagatgtagcatattcccaacagtttttgtcgaagagtcattttggcccatcatgccagggttgccacctccagacttatagttggccttaaatgctgctgcttttgaggctgcagcattggctgcatttaccactgatgaaggaggtactagaagtcctgaatactggatcaaatcctggagtgatgatacaagtcctgatgtttttggaagacttttgcttccttgagctccatggacatcagtttcttctttaagaattgcaccaattgataatggaataagagctaatagcatgcatagtcttgaatctagatgaggaattggtccttcgagaggttctctagcccgctgtacaaggcgaagggcagaaatccaaagagctttaaaggtttcctgccaactcgcctcattaattgcttggagtgtcttggtcatttctttcagaacctcgatagcagatatggcgcttagatgttttccatcaattgcattctcaacatatatgtcaaatataacccagcatgcagctctcccagctccagtaaactggcccagcatggagccaccatatttcatgttaccaagaacacccaaaagccttttgttgtttggttgataggctgtattgctaaccatgttcaggaatatcaagcgcagaaatgattggatcttcctatcagcaaccatcataatcaacacatctaaagccataacagtgttcttccggcgtagttgtgcacggtgctcgttttgcttctcagttgaaacccctttgacatctaagtccatatcctgtggcccttcaatagcgtaaatgctcccctgctcctctgtcagcccggatggaaagccacagtcttcaagtgtgcaatcgatcagtttggtgattacaaacatcataaagaaaatgatgacatgtccattgtcgattccagaaaatccataaatctttgacagttgcaaagcatcatcgatggactttgttatcttgtctcgattaggcccggcctccatggagagaaaggaggatgtgacgttacttctcagcaactccaggtagagccggtacgcctcaggctgcgcccgccgctgcggcagcaccctcggggtgaggagcgcgaggacgtggagcgggcagaggaggcgggaggccacggcgtggccgacgagcttccacagcgagggggagttgtgcgcgaagcagaggttggagacgaggatcccggcgaggtccgcgctggggagccccgccccctccccggcgacgacgcgggccacctccaccgcccacaccagcggctggtccccacgcgcctccgacgccttcagcgccgccatcaccctcctctccagctcccctcccccgcccccggcgggcaccat

SEQ ID NO: 85879 - DNA, 1320 bp, Oryza sativa
  Clone ID: PAT_MRT4530_84974C.1
atggtcgccggtctcggtgagggtggaagggagaggagcgatggccgccggtcccgcgcgaacaatatcgtcggcacaaccttctccctttccgtgcgacgccgtaggagagccgaggtaggggagcacgggaagagagcgacgggggagcatgggggagggtcggagccggactgtcgtcacctcacagccgccgaccacacatgcttgctcacgcgttgccgtcgccaccgccgagtggcccctcgtgcgcgcgcggcgccgttaggcatggagtgcggcggcgtggtccgggcatggacgacgtcgatgagtaggagggtgacgcgcgtggcacgtacggctgaaggagctccgcctctgccgccggccgctcgttctgcctccgccgccgaccgccccgggagctctgcctccgccacccgccgcccggggagctccgcctccgccgtcggccgcctgcccgctccgcctctgccacccgctgtttggggagctccgcttcccctcagccgcccactgcccgggaagctccgcctccgccgttggtcgccctctctgccttcatctctaccgcctgccatctaccgccagcactcaagcaagctccgcctgctcccgcccttgcccacccgccgccagtatcggtgccgccatgctagtgagctgctgggactgattgatcctttttcgggaagctgggacgaggatttattgcaacaaatattctgggaggaagatgtacaagtcatcaaaacaatcccggtgcacgtggagctggaggatacattagcttggcattttgatccgaggggctgtttctcagttagatctgcgtataaagtgcagaaagaggctgaaaggagaagtagaaggagaggcagtgcaggaagttcgaatggggagaatgagacgggggtttcttggaggaagctttggaagatgggcataccggggaagatcaaacattttctttggcgcctcagccataacagtttggccatgcgttgtaatctgaagcgcagaggatggagatggataccagcagctataggggcgacaagtgaaagggggataatgaaggtagagtttgaaacagactcgcttctgctgaagtctgcactccaggagaactcctttaatctctctgccatggggggtgtgattctggagattaagaatgtcatttctagcaggtatagagtttcagtcggcaataattttttccacactggtaaaattgatgagttcgagaagaaacgagtagaaagagggtgtgagtcggctattattttgccgcttactacacacagtttctga

SEQ ID NO: 85880 - DNA, 317 bp, Oryza sativa
  Clone ID: PAT_MRT4530_84975C.1
ctcttttaaaaataggtaaaggtgttaaactttattatattggcggtgaagtatttgcagaatgtttaagtgacagtgctatatttgttcaatctcctaattgcaattatatgtataaatggcatccagctactgtatgtaaaattccgcctggatgtaatttaaaaatattcaataatcaagaattcgccaatcttcttacagagaatgtaactaaaggttttgaagctgtttattcactaacaaatatgtgtactatacgaatgagttttgtcaaaggatggggtgctgattatcgtcattaaactaattcctct

SEQ ID NO: 85881 - DNA, 1491 bp, Oryza sativa
  Clone ID: PAT_MRT4530_84976C.1
tttgtgttgacagcggagaaagcagtgtaatcggggcccgccaccgcagccgcctccacctccaccacctcctctcttcccggcgccaatggccgcgtcgtgaagcgcagcagcagcagcagcagcggagacagcggcagaagctttgcctaaggttgggatcctccctattcgcgcgcgtctttgatttgtcgcgtaaagttgtaatccgtacttcggatggccggctcaatcgccgcctcggcgttcttgccggggtcgccggcggccgcgccgcccaagagcgtcctgggcgagcgcccggacagcctggacgtccgcggcatcgccgcgaagccgggctcctcgtcgtcggccgccgccctgagggccggcaagacgcgcacccacgccgccatccccaaggtgaacggcggcagttcggcgctggcggatccggagcacgacacgatgtcctcctcctcctcctccgcggcgccgaggacgttctacaaccagctccccgactggagcatgctcctcgcagccatcacgaccatcttcttggccgcggagaagcagtggacgctgctggactggaagccgaagcggcccgacatgctcaccgacacgttcggtttcggcaggatgatacatgaggggctcatgttcaggcagaacttctcgattaggtcctatgagatcggggccgataggacggcgtctatagaaacgctgatgaaccatttgcaggaaaccgcactgaatcatgtgaagagcgctgggctgctaggagatggttttggctcaacgccagagatgagtaaacgagacttgttctgggttgtcagccaaatgcaggcaatcgttgagcgttatccgtgctggggtgatactgtcgaagtagatacatgggttggtgctcatggtaaaaatggaatgcgcagagactggcatatacgtgattctgtaacaggccatacaatattgaaggctacaagtaaatgggttatgatgcacaagcttacaaggaggctagcaagaattcctgatgaagtacgtactgaaatagagccatacttttttgagcatgcttctattgtagatgaagacaaccagaaacttccaaaactgccagatattgaaggtgctaatgtagccaaatatgtccggacaggcctgactccacgatgggccgaccttgatatcaatcagcatgttaataacgttaaatacatagggtggatcctagagagcgcaccaatctccattctggagaaacatgagctggcaagtattgtcctggattacaagagggagtgtggccgagacagcgtgctgcaatcacacactaccgtgtacactgactgcaacaagcactctggacaaaccactttgcactgtgagcatttgctgagcctggaatcaggacctaccatcgtcaaggccaggaccatgtggaggccaaaaggaaccaggccccaagagagtatcattccgtcttcgtcgtga

SEQ ID NO: 85882 - DNA, 129 bp, Oryza sativa
  Clone ID: PAT_MRT4530_84977C.1
gtagattacacacgttccctgagttcgatatccttttgggtcacccgaaggtgaagtgctacatcggcatgagaggggactgcccgacttggcacaaggagcgggtgaaaccagaggtgggcatgttcg

SEQ ID NO: 85883 - DNA, 2492 bp, Oryza sativa
  Clone ID: PAT_MRT4530_84978C.1
ggccgcttttttttttttttttgcaatcaaatcaagcatcctgaaacctgagattgtcatgtgaaataatccttttttatgttatggtatactcaagttcttttaatgcagtatagatactttataattgtgatccttccaagatgttgacatagcatgtatgttactcacattctgataactgcttctcaatgagaattcagtgagccatatttgattgtaaaaaaaaaaaaaaaaatcgaccttattatctctttccttccccaccttctctcctctctccgctgcgcgttaattcctctccctcagtccctctctccggccccctcctcccccaccggcgacgccgcttcccctacccttcagccagcgcgccctccctctccccccaccgacgacgtcgcttcccctaccactcacccagggcgcccttcccttcccttggcagccggcgtctcagccgcggtgccctccccctggctcctcggcggcgtcctcaccctcttctccgccacaacacaacggacggtatcgacagcctcggcggcggcacctctcctcgtagaagcggcgtcctcgcctcccatgaccagtggcgtcgcttatttagttttttgttgtgcagtactgtgctgggctggtgggctgcttctcctccgctctgtgggctcgctggtgggctgcggctgctatctgggccggcctgctgctgctttgggtgggctgcctcgtcactaatccaatccgggctgctttggatgggctgctccacaaacaaggttccccttcccaagccttgcttgaggatccctccgccggagtagggattagggagggaagaacaggaggcggcgattcaccatgaaggcgctcattcttgttggaggcttcggcactcgccttcggcctttgacgctcagtttcccaaagcctcttgttgatttcgcgaacaagcccatgattctgcatcagattgaggccttgaaagaagttggagtaacagaagttgttttagccatcaactaccgaccggaggtaatgctcaatttcctgaaggactttgaggataagcttggcatcacaatcacgtgttcccaagagactgagcccttgggaactgctggccctcttgctctagcaagggacaagcttgtggatggatctggtgagccattctttgtcctcaacagtgacgtcataagtgaatacccttttgctgagctcataaaatttcacaagaaccatgggtggcgaggcaacaattatggtcaccaaggtggacgaaccatcaaaatatggtgttgtggttatggaggaggtcactggaatggtggaaaaatttgttgagaaaccaaaaatatttgtaggcaacaagatcaatgcgggaatttacttgttgaatccatctgtcctggaccgcatcgagctgaagccaacttcaattgagaaagaggtctttcctcgaattgcatctgatgcaaagctctttgctctggtccttccaggtttttggatggatgttggccaaccaagggattacattacaggcttgcgcctttatctggattcacttaggaagagatcaaccaacaggttagccactggagcacacattgttgggaatgtgctagttcacgagagtgccaagattggcgaaggctgtctgattggtcctgatgttgctatcggtcctggatgcgtcgtggaggatggtgtgaggctttcccgttgcacggtgatgcgtggcgtgcacattaagaagcatgcttgcatatcaaacagcattattggatggcactcaactgttggacaatgggcacggatagaaaatatgactatcctgggagaggacgtacatgtaggtgatgaggtctataccaacggcggtgttgttctcccgcacaaagagatcaagtcaagcatcctgaagcctgagattgtcatgtgaactaaccctccttttatgttatggtatactcaagttcttttaatgcagtatctttagtttatacctgtgatccttccaagatgttgacctagcatgtgtgttactcacattctgaaaactgcttctcaatgagaattcagtgtgccatatttgattgtaccttcatttggaccatccagtaaagttctcaaccctgcaccaagaggaccagaagaaactctttttcctataaaagaagaggatcagccttgtactttgttctttttgaaacaaatatatactgctatatggaacagacccatgatgtattgcacaatttgtagcaaatgatgcaaagtggataataataaggatcaggcagatccatataaactataggccaattatttgtacaagctcatcgcaaaaactagaaaaagaaaaataaaagtagaactactggtatgtaaggatgaaacggcaatttgctcatgctgctgtgctgagcttcgcagttgcggttgtgatttgtggtggtgatttcgatcaaaaaaaaaaaaaaaaa

SEQ ID NO: 85884 - DNA, 774 bp, Oryza sativa
  Clone ID: PAT_MRT4530_84979C.1
atggctgacaagaccctctgtgaattcgctgctccctctgctgacaatgtggccactgggtcgcaaatcaacatggcagacgtgaatttcgatctgaagtccagccttatcacgatggcgcaggctagcccgttctgtggcaagcctaaggaggatgccaacacacatctgcaacagttcctggagatctgcagcatgcacacaatgaagggggtgattcagaagatccacattaacgtgccgttgttggatgccatgcaagtgccaacatacgcacgttatctcaaggatatactcaacaacaaaaggccgctcccaacaactgaagtggtcaagctgacagagcagtgcaacaatgtcatactccacaagctcccggaaaagaagaaggatccggggtgtcccacgatcatctgctcgattaggacacataaattcgaccaagtcctctacgagttaggagcaagtgtaagcgtcatgcccaaagacgtcttcgacaagctcaacttcatggtgttggcaccaacaccgatgcacctgcagttgaccgactcatcggtccgctacctagctgggatagcggaagatgtaccgatcaagattcgggatttctttatcccggtcgacttcgtggtgctcgacatggacactaaaaaggagacgccgctcattttggggagtccattccttagcaccgcggatgccaacattgatgtaggaacaggaagcatccgtttccgtatcaacgggaaggaagaaaaatttgagttttag

SEQ ID NO: 85885 - DNA, 2925 bp, Oryza sativa
  Clone ID: PAT_MRT4530_8497C.1
atggcccctcgcaagccaaaccgtgcttcggctaaagggccggatcccggccgagtcgatgacgacagcaccgcctttctgggggtctctcttgtggacgacgtcgagctggcgaagctggtccgctctggggcgttggttgaggggcaggctttcgccccagggaaagccgtggtgccgaaacctatcgacaatcggacggtggtattcgccgtcttttttgaggctgggctacggttcccctgcaacgtgttgttgccggagatccttcgcctcttccaggtggaacttccacagctgagcccatcggcgcttgtttgggtcgctatcttcgactgggcgcgccggacttccgggtttgagcctaacgccgagctcttcggcgccatatttttcgccaccgtgaactcgaaaacggctagttctgacgcggcgaaagccctccggtgccggcgtagggcgatcgcaccgaactggaaacccaagatcgccgtggacggcactatggaggctcggttcgttctgctgcgcaaggtttgctcccgccttagctgccgtgacttggtggaggaattctgtatgcttcgcatctttcccctctcccagtcatggcaagtcacggttgatcaaggcgaagaggtcgacggtttgccgaacctgatacttcctgagggggcgaacatgttgatccttgaccaggttgaaaccgaagcccgcaggatgatcggcgatgtgtcaatcgttgagtatagccagctgctaacacgacaagcggctgggcgggcgaaccgggtttacaacggcgaattgcctcctcgagcaaacccccacaaagccgacgatgatgcagggccttcacggaagcgaatgcgcggacaagtgaagcttgcccccaggaaacgaagggctcctgcttcgtcggactccgatgccgacgacgaggacgatgccgaagaacgcgacggcgagggggaagcagaggaggaggaggaggccgtggccgataaggccgcgaacgaggcggtcggagaccgcgtcgacaccctcggctacactcctaccccaagtccaggtcccaacgagaccggggtggagtcgaacagctccccccttcgacggaaggatttggaaggggcgaaggccctagttgcgttctcctcaggcaaggcagcgaagggaggtccggtgcagaagatctctaaaaaggaaagactcgtcgacatcgcccgcgttttcagcgacgacgaatcttctgacgggactccaacttcgcccgctggccgcagtttagacctttcgactgctcccctcgctccgctcagcgttgctggggcaggcggtaatgccgccgccggggcttcagcctccgccgaacggatcgtgtcggctgcggcgagggtcttcgggagccctctgcgtgagccagctatttcgccgctagtcaaggcgaaggggaagtgtgcggccgccgaagcatctgtctctgagtattcccttgcggcgccccacttcgcccctggtgatttcgagactcgggcgaaccttgttccctttgtggagggagtgagcaaccttgtcttgcccgtcggcaccccgagcttgttcaccgaacttaatgagttcgacgaggggtgttccgccattaaaagcctagcggttcggattcttgcggctcactgtttgacggagcgaaccgtacgggcccgttttgacggttttaagagccgtctttgggccaaggacgacgaaataagccgcaagaacctggaggtggaggccctgaccaacaccctcaaggaaacgaagaccgaggtcaaacgccttcagtctgagctggataaggggaaagaggccagggctgaggttgatcgcctcaaggccgaactggagaaggagaaggcccattcgacagtgttgattgactactacaaccttactgagccgaagatggaggctcttcgcctgaaggctagtacggccgaagcgagcgccgcggaggagtcgcagcggttttcacaggagatggcgaagaccaccgaatccgcgagaactgcttgtcaaacgctccgcctcgcccttaccgacatgggcgcgaaagtgcgaggggttcctgccgaggatgcatcagccttcgacttctccgagtggacccagcaggctggcggatcggtttcggactgcgccatcgcgtacggcgattgctgtgcgcgtgtatcagcggccttcaccttaggccttttgcaacattttggctacgagcacgtcgccgagttccctacctatgcgaagggggactgggagattagtgcgcagaacatttcgcccgctcttcacgcgtggcgaaaacagttttggcagaaggacggccggtccgctgccaaggcgcgccttctggagcaactagcgaaggcggaggcggcagaccggcgcgaaggagaggacgcagcgggcgaagagggtggaggcaatgcccaggatcacccagagggggttcgccgaaagtcgtgcattcagcccccttccgggagctggcaaagtcgaaacgagaaatttgtggcattgaagggtctgccgaaggtgcgatgtccatttcggcctgtttatcgcgaaatggagataaacggtcgcagctacaaggttttcaaggttgccaactggctgcgggcgcaccccgggcgaaccttagaagattacgatcttgttcattcaagacgtttggaggatatggctcgcttttggcgaaaccatcagaagactaaacgtcaggaaatgatctttcagcgtcgttatagtttagtctgtgtttcgccgcctactactcttaaggttgtgtatgatattagtagtgaagacgaacctagttcgcctgtccattccttagggagggatagtgattatgggggcgaagatgtaatttacttgtaa

SEQ ID NO: 85886 - DNA, 489 bp, Oryza sativa
  Clone ID: PAT_MRT4530_84980C.1
aagtagcatcaatcattctaggcttctagcttattctcatacatgtagctagagggatgctatatctgaacagttatgagtcagccggtagaggcacgcgaatggttggaacaaggtagaggtcattctttcttcgaacggtagcacctagctcctctgtcatgtccaacttggttgacgaaatgccattgccgaggagcttccagtcaaaatgatagagtagtgaggcgagagcgagttccatgattgcttctgcaaatgttatgcctgggcacattcttcgccctgctccaaatggtatgaactcaaaatctgttcctttgaaatctatatgaccatcttcaaatcgctcaggtttgaatgtttcagggtcctcccaatactttggatctctattaattgaccacacattcacgagcacagtggtaccaacgggaacatcgtacatcataaccttacatgtcttctggcattctctcgggagaagca

SEQ ID NO: 85887 - DNA, 106 bp, Oryza sativa
  Clone ID: PAT_MRT4530_84981C.1
gcacgagggttaaattcaactcaatacaactccatactacatgaatcctcgataatcctgtcttcgcaggacaatcttgtgaagtgcaatcctttctttgtttgct

SEQ ID NO: 85888 - DNA, 368 bp, Oryza sativa
  Clone ID: PAT_MRT4530_84982C.1
atggtgggagagcgccggcgcggggtatcgctgcgtgcacgatatcaccgctggtgcagcaacgccgatgtggggacgcgcggagaagttggccggagcgcaagggcgccagcgaaggggagcggaggaagacggcgcgcggcgagcgccgagcggagcgagagaggaatgcagtgtggagagggtggggaaaagggaaaggggatcagatgggtccggcgtgctccgccgctgctccacctacttcactgccgctccgcgctcctctatcgtgcaaggagctccaaggagtccgtccgccgctgcttcatctcttccatcgccattctgcctcctccgccgctccgcctcgtctaccgctgcgagga

SEQ ID NO: 85889 - DNA, 222 bp, Oryza sativa
  Clone ID: PAT_MRT4530_84983C.1
aattatatcctttattcgcataaaatataaaacagtgaggataaacagaacaatatgccagaatgtctcaaacgtgaagcaggaagcatgcatacatgcattccgaacagatgaacccactatactataacttcactatgaaccgaacaacaccaacgatggtaacgctccctcaaccaaccatctccagaagattaaaacgcacaatggaatggcaagcac

SEQ ID NO: 85890 - DNA, 458 bp, Oryza sativa
  Clone ID: PAT_MRT4530_84984C.1
tgtgccttcccccggaccagcaacgcatgatctttttcggcaagcatcttttggaccgcaggacccttgctgactacaacatacagaaggagtcaacgctgcaccttgtgctccgtctcaagggaggcatgcaaatcttagagaagactgtgaccggcaagaccatgaccctggaggtggagtcttctgataccatcgacaatgtcatggccaagatccaggacaaggagggcattacctcggaccagcagagcctcatctttgctggcaagcagctggaggatggcaggaccctcgctgactacaacatccagaaggagtccaccctgcaccttgagctccggcttcgtggcggcatgcagatctctgtcaagaccctcacaggctagaccatcaccctggaggctgagagcgtcgacaccatcaacaacgtaaaggtcaagatccaggacaaggag

SEQ ID NO: 85891 - DNA, 258 bp, Oryza sativa
  Clone ID: PAT_MRT4530_84985C.1
atggaactagatgacccactgatcttgatacatgaagtgtccaaccttcatgctgtggcgaaagtgttggagttagctctgaagaagcaaaggcctctgcttattgttgcagaggatttagaaagtgaggcattgggtactctgattattaacaagctttgtgcaggcattaaggtttgtgcagtcaaagctcctgggtttggggagattgttagcacaagaacaaaggttttgggactagtttttcatttccattag

SEQ ID NO: 85892 - DNA, 2340 bp, Oryza sativa
  unsure (1)..(2340): unsure at all n locations
  Clone ID: PAT_MRT4530_84986C.1
atggcgtacaacgacgacgagcagactgctccgacgagcaccgccaccgagccggcgaggccgacggtggggatcacgggccaactggtgaagcaagtgcgtctcaacaagtaccacaacgacgtcgcgtccatggcaccccatgaccaggagctgctgctcgagctcaggggctcctcctcgtccaccgacagggcgggcctggacctcgtcgccgtcatcgacgtcagcggcagcatggacggggacaggatcgacaaggtgaagaccgccctgcagttcgtcatccgcaagctcagcgacctcgaccgcctctgcatcgtcaccttttgcaccaacgccacccgcctctgcccgctgcgcttcgtcacggcggccgcgcaggccgagctcaaggccctcgtcgacggcctcaaggcctacggcgacaccaacatgaagggcggcctcgagaccggcatgagcgttgtcgacggccgcagtctggccgccggccgcgccgtcagcgtcatgctcatgtccgacggctaccagaaccacggcggcgacgccagggacgtccatctcaagaacgtccccgtctacaccttcagcttcggcgcgagccacgactccaacctgctggaagcgatcgcgcgcaagagccttggcgggacgttcaactacgtcgccgacagcgccaacctcacggggcccttctcccagctccttggcggcctcctcaccatcatcgcccaggacctcgagctcaccgtcacgcggttccatggcgaggtcaccatcaagagggtggtctgggtggacgcggggacctacccgcagaccaccgccagcgacggctcctccgtcacagtcagcttcggcaccctttacagcgcagaggcgcgcagggtcatcgtctacctcgcgcttgctgacaagaccgcctcccctccgtacgacgccaatgtctgcttggcacagtacagattcaccttccaggcccagcaggtgacctccaaccccgatctcatcaccataaaacgcagaccgagtgctgcaccaggcgcggcgaggaagccacagccggtggagaacgagctggcccggcggcagcacgccgacatgatcagggcagccagggacatggccgaggccaacaagatggaggacgcgcggaacaagctggaggaggcgcggaaggcactggaggagaatttcaaccaggcggcgaacccgacggtggccatgctcctggaggagctgcggcagctgcgggggctcatggagaggcagggccaagccgacggcgtccggctctacaccacgccgcacatggacacctacctcaagcaggccgagcagttcgagaagaaccccgacgaggcgccgccgcccgccacgaagcacgtcccggagccggatcaggtggtcgatcaagagccgccggcgccgcccgccgaggccgacgtcgtcccggacgtgccgcgagacatggcggcgggggacaggagaacgctgtcggcggcgctgcgggtggcgccggcggtgctgagcctgccggcgttcgtgctcatggctagtgtccggacgtccgggtgggacagcgaccgctacgacctctacgaacagtactacagacgccgatgccaccgagagccgccgccgccaggcccggctcccctccctcctttcgccggcaccgacgccgccgcaccgccgccaggccccggcttcctcccttccttcgccggcgccggcctncacctnccttcctatgcaccgatgcagatgccgccggcgcgtctccgtcgccaggcccggctcccctccctcccttcgtcgatgccggcctccgcctccctccttgcgcgccgatgcagacgccgcgccaccacctccaccgccaggcccgggtcccctttcttcccgcgctgcgcgccggacctccgcctccctccccactgcgcgcgacgctgccgacgccgccgctgcaactcgctggcaggagagagagacatggagagacatgtggatagggttagagatgggtatggttttctcaaggatagaatagatgaagaagcagaagagcaagtagaagaactcatcgacaacttgttccggcgatggtgcaacaacagtgatggtccgaaatccagcaaacacaacggaatagatttatcagggttagaggtgttggcgtacctcctaatgtcagcctcgtcgacggccgcgttcggcaaggagccactcaacacaaaaatcaacaacgcagtttggctatcgttccttgggttccttgcgctggccgccagcgcgctcatctccatggacaatctcttccgccgcatgctctga

SEQ ID NO: 85893 - DNA, 1770 bp, Oryza sativa
  Clone ID: PAT_MRT4530_84987C.1
atggcgtacaacgacgacgagcagactgctccgacgagcaccgccaccgagccggcgaggccgacggtggggatcacgggccaactggtgaagcaagtgcgtctcaacaagtaccacaacgacgtcgcgtccatggcaccccatgaccaggagctgctgctcgagctcaggggctcctcctcgtccaccgacagggcgggcctggacctcgtcgccgtcatcgacgtcagcggcagcatggacggggacaggatcgacaaggtgaagaccgccctgcagttcgtcatccgcaagctcagcgacctcgaccgcctctgcatcgtcaccttctgcaccaacgccacccgcctctgcccgctgcgcttcgtcacggcggccgcgcaggccgagctcaaggccctcgtcgacggcctcaaggcctacggcgacaccaacatgaagggcggcctcgagaccggcatgagcgttgtcgacggccgcagtctggccgccggccgcgccgtcagcgtcatgctcatgtccgacggctaccagaaccacggcggcgacgccagggacgtccatctcaagaacgtccccgtctacaccttcagcttcggcgcgagccacgactccaacctgctggaagcgatcgcgcgcaagagccttggcgggacgttcaactacgtcgccgacagcgccaacctcacggggcccttctcccagctccttggcggcctcctcaccatcatcgcccaggacctcgagctcaccgtcacgcggttccatggcgaggtcaccatcaagagggtggtctgggtggacgcggggacctacccgcagaccaccgccagcgacggctcctccgtcacagtcagcttcggcaccctttacagcgcagaggcgcgcagggtcatcgtctacctcgcgcttgctgacaagaccgcctcccctccgtacgacgccaatgtctgcttggcacagtacagattcaccttccaggcccagcaggtgacctccaaccccgatctcatcaccataaaacgcagaccgagtgctgcaccaggcgcggcgaggaagccacagccggtggagaacgagctggcccggcggcagcacgccgacatgatcagggcagccagggacatggccgaggccaacaagatggaggacgcgcggaacaagctggaggaggcgcggaaggcactggaggagaatttcaaccaggcggcgaacccgacggtggccatgctcctggaggagctgcggcagctgcgggggctcatggagaggcagtacctctacaacaaggagggccgcccctacgccgcctcctcgctcgcctcccacgaccgccagcgcgtcgccaccaggggccaagccgacggcgtccggctctacaccacgccgcacatggacacctacctcaagcaggccgagcagttcgagaagaaccccgacgaggcgccgccgcccgccacgaagcacgtcccggagccggatcaggtggtcgatcaagagccgccggcgccgcccgccgaggccgacgtcgtcccggacgtgccgcgagacatggcggcgggggacaggaggacgctgtcggcggcgctgcgggtggcggcggcggtgctgagcctggcggcgttcgtgctcatggctagtgtccggacgtccgggtgggacagcgaccgctacgacctctacgaacagtactacaggttattgcatgatcacttgcctgttgcgtctaaacatcatgcattcttaacatgcaacaagtctagatgctag

SEQ ID NO: 85894 - DNA, 592 bp, Oryza sativa
  Clone ID: PAT_MRT4530_84988C.1
cacgaggctactacctcacctccagcatccgcattgatgcgctgtcgaaactgcgagcccaagtgaatgagactctggcagcgtccgatggcggcaagctgtcactgaacgacttcataatcaaggcgtctgcgctggcgctgcgcaaggtgcccgcctgcaactcctcctggcatggagactttgtccgccagtacaatgtggtagactgcagcgtggcggtgcagacgcccatcggcctcatggtgccggtagtgcgggacgcagacaccaagggcctggcccagatagcagcggaagtgaagcagctggcagccaaggccaaggatggcaagctgcagcctgacgagttcacaggcggcacattcaccgtctcaaacctgggcatgtatggcgtcacgcagtttgccgccatcgtgaacccgccgcaggcctgcatcctggcagtgggcggggctgagaagcgggttgtgtctggacccagcggcttcgaggagggcactttcatgcaggtcacgctgagctgtgaccatcgtgtggtggacggggccgtgggagcgcagtgggttcaagccttcaagtcatacctgga

SEQ ID NO: 85895 - DNA, 507 bp, Oryza sativa
  Clone ID: PAT_MRT4530_84989C.1
aattgctgtaatggattgggttgatatgttggtttgcaagtcaccagtattttgatgaagactactaagcggattaaattaatgttatattttaatccctgatgcattcataagtccactagttagttaaactattcccatttcgcatcagcttttcaatatctctttttcctgtacgaactgggtggacttcctcgcagaatagaactttgtactaggtaatatgttactgtcaaatgtccggcacactagagttctgcagaagtttttcgtttatcgtgcaagcacgtcttgatatgccatgtactagcatgatatgaataaacttctttgtttggagtcaattagtgttttttttaataaaaattcttcaacactacatagtttttgcattgctggttagataaaattagcttgaggtctttgctacagctttcacccttggacgaaaatattaacttctgacacccatattgacttgataacagaaacaaaaaaaaaaaaaaa

SEQ ID NO: 85896 - DNA, 2370 bp, Oryza sativa
  Clone ID: PAT_MRT4530_8498C.1
atggaggccggcgaagatcatctgcactcggcggagaagctccaacggcaggagggggctgtcgcgacggatgctcggtggggaggggatcttgaggcggcgagaacccacttccgttgtggaggatgcagaggaataccagcggctccgctcgccgtggagaacggcggcggtggccaggatccaccgggcacgacgctaggccttcgccacgggtttcggcagatttggtcgaggggcctcatgccatccgccagcaagcccctcacgggcaagggtgagattggagcttcggccgagaccgtgcaaaccatgtggtatgggccggatcccggccgagtcgatgacgacagtaccgcctttttgggggtttctcttatggacgacgtcgagctggcgaagctggtcagctctggggcgttggttgaggggcaggccttcgccccagggaaagccgtggtaccgaaaccaatcgacaatcggacggtggtgttcgtcgtcttttttgaggcagggctacggtttccctgcaacgtgttgttgccggagatccttcgcctcttccaggtggaacttacacagctgagcccgtcggcgctttttcggattgctattttcgactgggcatgccggacttcggggtttgagcctaacgccgagctttttggcgccatattcttcgccaccgtgaactcgaagatggtgattaccctagctgggacgaagaagaccgtgttcgagagagtgaacttcaacgttcgtcccgagcggtctgatctctggccggtgaacgctgtcatgtcgaagtgggaccgccattggatggctaggtggttctatcacttcatccccttcgaggctggttctgactcggcgaaagcgctccggtgccggcgcagggcgatcgcgccgaaccggaaacccaagatcgccgtggacagcgctatggaggcgcggttcattctgttgcgcaaagtttgctcccgccttagctgccgtaacttggtagaggaattctgtatgcttcgcatctttgccttctcccaggcatggcaagtcacggttgatcaaggcgaagaggttgacgtgttgaccctcgaccaggctgaaaccgaaacccacaggatgatcggcgacgtatcagtcgtcgaggttcctgcttcgtcggactccgacgccgacgacgaggacgatgccgaagaacgcgacggcgaggaggaaggagaggaggaagaggaggaggccgtggccgataaggcctcgaacgaggcgatcgaagatcgcgtcgacacccccggctacactgctacctcaagtcccggtcacaacgagaccggggtggagtcgaacagctccccccttcgacggaaggatttggaaggggcgaaggtcctagttgcgttctcctcgggcaaggcggcgaagggagcgacgacgaatcttctgacgggactccaacttcgcccgctggccgcagtttggacctttcgactgctcctctcgctccgctcggcgttgctggggagccctctgcgcgagccagctatttcgccgctagtcaaggcgaaggggaagtgtgcggccgccgaagcatctgcctcggagtattcctttgcggcgccccacttcgcccctggtgatttcgagacttgggcggaccttattccctttgtggagggggtgagcaaccttgtctttgccgccggcaccccgagcttgttcaccgaacttaatgagttcgacgaggggtgttccaccattaaaagcctggcggttcggagccgtcttcgggccaaggacgatgaaataagccgcaagaacctggaggtggaggccctggccaataccctcaaggaggcgaaaactaaagtcaaacgccttcagtctgagctggataaggggaaagaggccagggccgaggttgatcacctcaaggccgaactggagaaggagaaggcccattcggcggtgctcatcgattactacaaccttactgagccgaagatcgaggctcttcgccagaaggctagcagggccgaagcgagcgccgcggaggagtcgcagcggttttcgcgggagatggcgaagagcaccgaatccgcgagaacggcttgccaaacgctccgcctcgcccttaccgatatgggcgtgaaggtgcggggggtccctgccgaggatgcctcagccttcgacttctccgaatggacccagcaggctggcggatcagttttggattgtgccaccgcgtacggcgattgctgtgcacgtgtatcggcggccttcaccttaggccttttgcaacagttcggctgcgagcacgtcgccgagttccctacctatgcgaagggggactgggagattagtgcgtag

SEQ ID NO: 85897 - DNA, 204 bp, Oryza sativa
  Clone ID: PAT_MRT4530_84990C.1
atgccatgcttgtccatgaggaggtggccggtgcttaggttcggaggagacaatacccgacagtcagggatgaagaatacgacggtcggggtggatatcgcagcacctagggatagaggattcgccacacgaggatcaaggaggcggtgcctagagttcagatccatgtcccccgacctcatggaggccaattccgacggctag

SEQ ID NO: 85898 - DNA, 252 bp, Oryza sativa
  Clone ID: PAT_MRT4530_84991C.1
atggggtcggagacaaataaggaaggtgctagaggcggaggtcaatttgaagtcgtggcaaccacgtgtgaagtcactatcgttgtcggctgcatgaaagaaatgtcggctggacaattctattgcaagggagaggagagagttgacggtggtgcgggcattaaaagaagaggtgcaccacaaaggaagggggtgggtggggagacgttagggatggcaactagcgaacgagcacataggagatctcagtga

SEQ ID NO: 85899 - DNA, 304 bp, Oryza sativa
  unsure (1)..(304): unsure at all n locations
  Clone ID: PAT_MRT4530_84992C.1
accggtaccggnaattcccgggtacgacccacgccgtccgcggnaaacccaaaccctagctcccaaatcccgaccagccgaagcatttccaacggaattcctctgttcggctcctcctcggggttcaaatcgagcttgaatttgtggttttttttggggagggttttttttttctttttggtgttgtttttggatgcgagtgtggcttggcagggttggaggtggtgatgccatgatgcacatgctggtggcccccgatggaggcggcggaggggagatgccgacgacaaacggagaagccgcg

SEQ ID NO: 85900 - DNA, 351 bp, Oryza sativa
  Clone ID: PAT_MRT4530_84993C.1
atgacctcggctaggaacagctgcattcgcattaagtccccgccggtggccatgtcttcagattcactcccgccgtcgccattgccattgctggagcacaggcacgatggaggcgtgcttcacccctgccgccgccgccgccgcctccgcctcccctcgggccgccgcaccgccgtgctcctccgctccggcaccgccgcgtcgtcctcttccgagcgccgccgccggagcccaggcacaatggaggcgtgctccgcccccgccgccgcctcctcttggaccgccgcgctcctccgctccggcaccgccgccgcctcgttgctccgcgtccgcccgcttggccgttgctag

SEQ ID NO: 85901 - DNA, 3109 bp, Oryza sativa
  Clone ID: PAT_MRT4530_84994C.1
gggcttcgaaggcggctgctttctctgcggagggggttgaattcttgcgattcttggaggggggatttgtcctgagtgatttggtatgtgggcagcatgaggaagctcttcttctccgagttgacctcctgcaaggagaccaagctccactccgcgccccactcatggcttcccctcgagaaagggaagctctccaagttcgccggccactccacctcctccatagaatcgctgatgaaaatgccggagccggtggttcttccccacttcaagcctgcggattatgtggacatattggcccagattcatgaggagctggagtcttgccctcctgatgagaagtcgtgcctgtacctgctccagttccaggttttccgcggcctcggcgaggtgaagctgtcgcggaggagcctccagtccgcgtgggagaaggcgagcacgatacacgagaagctgatattcggggcatggctcaagtatgagaagaaaggggaggagccgatatccgacctcctcagctcgtgtggcaagtgctctcaggagttcaagctgctggatttcgtgtcgcagatctccaccgggtcgcatgagataagctatgatgatgagtcggatgtgttttggggctctccggtggtacatttccggataagagatgatatgattgcatgcgatcggcgaaagcttgctgctttgtcgactccgctgtatgcaatgcttaacggtggctttcgggaatcacatcttgaggttattgatatgtctcggaatggcatctcctcgattggtatgcgagcaatcagtaaattcagcttgacaggaaggttaccgtatttatcagcagatgctattttggaaatgcttgattttgctaataagttttgctgcaatggcctcaaggatgcttgtgagcgaaagcttgcttctttcatttgctcgaggcaggatgctatagacttcatggagtgtgctcttgagctgggttgttccatccttgctgctgcatgcttgcaggtgctcctgaatgagcttccagagtgcttgaatgatgaacaagtggttaggatattctcctgtgcaagtaagcagcagcgatccacaatggctggaaatgcttctttctccctatattgccttcttagtgaagtctccatgagcatcaacgcgacatcggatgtcacggtgaccttcttggaaaaattggtggattcagcatcagattctagacagaagcagttggccttgcatcagctggcgtgcacaagacttctaaggaaagattatgctgaagccgagcgcctgttcaatgccgcctttaccgctggacatctctattcagtagtgggtttggctagactggcctctatgaggggtaataagcatttttctctcaagttgcttgattctgtcatgtcatctcgctggccacttggatggatgtaccaagagagagcactatatttggagggtgataacaagttggaaaatcttaacaaggccactgagttggatcctacccttacatacccctacatgtttcgagctgcatctttgatgaaaagacaaagcgttgaagctgcccttatggagattaaccggatcctgggatttaagcttgttctggaatgcttagagctaaggttctgttgctatcttgcacttgaggaccatagagctgctttatgtgatgtccaggcaatcctcactcttgctccagattatcgtatgattggtggtcgggtgtctgcaaagcagctgcgtatgcttgtgatggagaatgttgagcagtggacaactgctgactgttggatgcagctttatgatcgttggtcatctgtggatgatatcggatccctctcggtcatatatcaaatgctggagtcagatgctgctaaaggagttctctactttaggcaatctttgcttcttctcagattaaattgtcctgaggctgcaatgcgcagtttgcagctagctcgtgaacatgctgcaagccaacatgaacagcttgtttatgagggatggatattgtatgataccggccactgtgaggagggactgcagaaagcagaagcatccatcgcaatacaaagatcatttgaagcattctttctgaaagcttatgctttggctgattcgagtcttgacccttcaacttcagcaacagttgtatcacttcttgaagatgcattacgctgcccctctgatagactacggaagggtcaggctctgaacaaccttgggagtgtttatgtggattgcgggaagcttgacctggcagctgaatgctacatcaatgccctaaagattggtcataccagagctcatcaaggccttgccagggtccatttcctcagaaacagcagaactggtgcatatgaggaaatgaccaagctaatagagaaggccaggagcaacgcatcagcttatgagaagaggtcggagtactgtgatcgtgagctaacaaaatcagacctgcagatggtgaccaaactagaccctctgcgtgtatacccctacagataccgtgctgctgtgctgatggacaaccacaaagagaaggaggccatcgcggagctgacaaaagcaatcgccttcaaggcggacctgaacctgctccacctgcgagccgccttccacgagcatgtcggcgacatctcgagtgcactccgggactgccgcgcagcgctctccgtggatcctaaccaccaggagatgctcgagcttcatcaccgggtgaacagccaagaaccctgagccccccattgttgtacatacaggagctctacatagccaaccataccccaagtgtatgttttgtaccatacacagcagatcaatgtaaggatagtagccaatttaggccctccacccccaaaaccaacccaattccttgtgtccttaattagaatatgttgctcatcatagagtcctttttttagtaaattattatatttttgtgattaagcccccctcctaattgtaccctccatgtgccctcccccaaccccatgttcccaacaagttttgactatctcatgtgtaaatgaaaaatggaagaaaaagaatggagaaggtttgtgtcggcgtctgcgcaaaaaaaaaaaaa

SEQ ID NO: 85902 - DNA, 2407 bp, Oryza sativa
  Clone ID: PAT_MRT4530_84995C.1
atggcgagagcacctggtggcgttcgccgaaggagcgggaggaggggcgcgggcggcggcggcgccggaggcggaggcgaggcgctgcggaagggcccgtggatggcggaggaggacgaggttctgctggagcacgtccgcacccacggccccatggactggagctccattcgatccaaaggcctcttgccgcgcaccggcaagtcctgccgcctccgctgggtgaacaagctcaggccaaacctcaagagcggttgcaagtttactgccgaggaagagagggtggtgatcgagttgcaggcgcagttcgggaacaagtgggcgaggatcgcgacctacttgcagggcaggacggacaacgacgtgaagaatttctggagcactcggcagaagcggctcgccaggctcctccgcgggcctctccctgctgcacggcccaacaagcacaacagcggcaagggcaaagcgccctcgtcatcttctctcgactcccaaacagccacgttccaccagagctcggcctccctggatcaagcttcattggagggcaactccctcggctggcaatgccgcgaggctgcaccgttcatgggatatgatcaggcatgctccgggttcttcgctttcgaggggccactgccgctgcagctactaccacccgccgacggcgaggcgagctcgtccaatgcagctcagtcggcgccaccaccgctgctgttcgaccagcctccgtaccctctgatcaacttccccgtggcttgagcggtggtgacaccgctcgcctccgtccgcctcgcctccaccgagaggttctctctgccgccgattcagatttacagggagattatcttgtgatctgtaaacatgtttgggcgtgtaccgaggagtaacaacaccaagtactatgaggttcttggagttcctaaaactgcaagcaaggatgagctaaagaaggcataccggaaggctgccataaaaaaccatcctgacaagggaggggatccagaaaagtttaaagaattatcacaagcgtatgaggttctcactgatcctgagaagagagacatatatgaccaatatggggaggatgctcttaaggatggaatgggaggaggcagtgacttccataatccatttgacatatttgagcagtttttcgggggtggtgcctttggggggagtagctcaagagtacgcagacagagacgtggtgaagatgtggcgcatactttgaaggtgtctttagaagatgtgtataatggatctatgaagaaactatcattatcacgaaatattctgtgcccaaagtgcaaaggaaaagggaccaaatctgaggctccagcaacatgctatggttgtcatggtgtaggaatgaggaatataatgcgacagataggactaggcatgattcaacatatgcagactgtctgtcctgaatgcagaggatcaggtgagatcataagtgacagggataaatgcacaaactgcagagctagcaaagttattcaggagaaaaaggtgcttgaggttcatattgagaagggaatgcaacatggccaaaaaattgtattccaaggtgaagctgatgaagctcctgatacagtgacaggagatatagtatttatcttgcaagttaaggtacatccaagatttaagaggaaatatgatgacctgttcattgagcgcacaatctctttaactgaggcattgtgtgggttccaattcatcctcactcatctggacagtaggcagctcctaatcaaggcaaatcctggcgaaattattaaacctggtcaacacaaggccataaatgatgagggaatgccacaccatggccggcctttcatgaagggccgtctctttgtggaattcaatgttgagttccctgaatctggtgtactctcccgtgaccaatgccgggcacttgagatgatcctaccacctaaacctgggcaccaattatcagatatggacctggatcaatgtgaggaaactaccatgcatgatgtgaacatagaagaggagatgaggcgcaagcagtatcaaaggaagcaggaagcgtacgacgaagatgaggaggaggatgctccaagagtacagtgtgctcaacagtaagaagtgtcactttctggcgcaagtgatgatactccatgtaaactaagtagtttttggtgagactgttcattttagtgtattttgtactagttaaattaaatagtgaatgtctaagttgtgtcgtttgatatataagcttgtgctaacaacataaggctttcttggccttcataagatatactcctacctaggagaaagtggtggatgagcattcgtttctgtttttattggtaatgaacatatttacatgttgtattgaaaaaaaaaaaaaaaaattcctgcgcccggggga

SEQ ID NO: 85903 - DNA, 2026 bp, Oryza sativa
  Clone ID: PAT_MRT4530_84996C.1
atggaccactgccgagccgagcagcgtgatgggtgtacagcactgcaaaaaggcacgatggtcgactcgagcaacatgatggcgactgggatgtgttggggatccgggatgcatttagtggagctggaagcaatacgcgcgcggtatattcctaaggccttgttcagtttagaggggattgaagaggattttattccctctcaatccaaaatcctcttcaatcctctccaaaccgaacaaagccttaaggggattaatcaaacaagacctcactgcatccgcaacggagtggagcctggtgtttttattggacggggcgacctgcccgccccgcgttgtgctatggatcaactatcggcagcggggacatacaacgagcttttgcccccaagaaggccgtcgccggtgaagggatgccactgcaccgcagagttttcgttcacggttcacggagcatcttctgcgatgcagctatggtccatccatcggcgggagcacattgcagagaaagctatcagcggtgaaatatttaattatccatggtcactgaaagagatgattctgacgaaggaatcctccccgtcggcaccacccccgctgccgccgacgctcgccgtggacgtgtccgtcgtactcttcctcttcctcatctacaccaagcactgcaagcaccgctgcctgggcgtggcgcgcggtgtcgccgtgctgggcctcgggttccagccgtcgtcgtcttcgtgcaagcggtgccgctccagcctgagcaactgtgccgtgggagcgctccggtgttccggttcggcgacatgggcgacgctgcgcgacgtggtgagggaccagacgaccgaatgcgccgtgtgccgcggcgcgttcgacaccgccgagctgctccgcgtcctgtcccagtgccagcatgcgttccacccaggctgcatcgacgtgtggctgatgacgcactccgcgtgcctggtgtgccgccgcagcgccgctgatggtgcactccgtgtgcccggtgatagggaatcaacgtttcctagccatgtatcggcgtcaaagggggaggagcgctgcgacatgcgcggatggaagcgtgcatcgcggacacgagcggttgcgcgagcgtggatggaggcgcagccgcgtggggaaaactctaccgatagagaaaccagccgtaccagtgccaccgactttcaagactatggctgacaagacccttcgcgagtttgccgctccatctgctgaaaatgtggccattgggccgcagatcaacatgggagacgtggatttcgacttgaagtccagcctcatcactatggcacaggctagcccgttctgcggcaagcctaacgaggatgccaacgctcatctgcagcagtttccggagatctgttgcacgtacactataaagggcaacttttataatggactcactcccatgtcccgcgatcacctggacgcggcagctggaggagctttcttctccaagacggttcaaggagccgttgatttaatagagaagttggtctccaatatgggttggagtgaggaacgactccagactcgtcagcgaggtatgcataccgtcaaggagatggaattattcgctgccaagctagacctcctcatgaagtgcttggacgaccatgacaaacggcctcaaggcaccgtcttggccttggactcacacgttacgtgtgaggtctacggcaaggcaccgtctagtccttggactcacatgttacgtgtgaggtctacggcaacacgggtcattcttggaatgactgcccggaaacccgtgaggaggcgatgtatatgggcaacaacaataacgggtaccgtccacaaggaggttaggggtggaaccagccacgcccgtactatcaaggagttaactgatatactagctaataccctctatccgatgccctcctggtacttcgagaagacaccccagactgccgagctccttacgacagtccgtcatgaccatacaaccgggctaaatacggaggaataccctccc

SEQ ID NO: 85904 - DNA, 549 bp, Oryza sativa
  Clone ID: PAT_MRT4530_84997C.1
gcacgaggggactacttaaataagactaagggaattaatataattttcagtaaaacctctagtagtcagctggtctgcaagtgcctaggtcctcgcttcttcctttgaagaagaagccgataaccgtgagcgccttgtgttggaaaactcttaagtcccctagcagctagtcgatccgatgtccaaactctattttgactactagccaggctaagaactggcacttcctcagcacctagggtttccacataattaagttgtagttcgatttcgtggagccaaggagctatgccttgtaagctgaggagacagagtagtcactgtggtttgtgagtcttcatgtgattcggtccggttttgtcgggtttaattgcacactttgtatgttgtgtaccaagcaagaagacgacagcaaatttaaattcagatgtatgataagagtattctgtaattgattgcttcatgaggcatgtgttagattttacatatttatattacacctgtctgccaaggtttctcacgatgcaatgatgtgttgaagaaggttta

SEQ ID NO: 85905 - DNA, 544 bp, Oryza sativa
  Clone ID: PAT_MRT4530_84998C.1
gtttgacccccatttccaagttgacccaatataatgaccaaggcatgttctaaagtagctgggaaagttacatcacatgctgcgtgtgcttggcgtcagaagagggctctgtttcttggcaatcctatccgtgtcatcggttactggtgcggcatgcatgttccagtggttgggaaatccaaatgagagactgttcatgtttgatccccatttccaagttgaaccaatataatgaacaaggcatgttctaaagtagctgggaaagttacatcacatgctgcgtgtgcttggcgtcaagagggctctgcaatgccctgaagacgctgtgacattttgattcaatacaatatacacttaggatacagtcatttgttactattagcccaagccatgcgtagaattcaacttgtacacccttttttttcacctcacatgctgtacagttcatctaccatgggcttagttgttttttgtaggcttgtagctgatgtagagcaccataacaatcagttgcaataacaaaatcaatagcattctctctcac

SEQ ID NO: 85906 - DNA, 759 bp, Oryza sativa
  Clone ID: PAT_MRT4530_84999C.1
atgcggcggccggagatggtgttcttcgacgtggagacgacggcggcgtcggcggatgaggggcagcgtagtgtgctggagttcggggccatcgtggtgtgcccccggaggctggtggaggtggacagctaccacacggtgatccggccgggcgacatgtcggcggtgtccaagaggttcgccgctatggtggatgtggacgtggcgtcggcgccgagcttcgatcaggtggcggagcgcatcttcggcgtgctggacgggcgggtgtgggcggggcacaacatccagcgcttcgactgccaccgcatccgcgaggcgttcgcggccatcgggcgggcagcgccggagcccgtggccatcgtcgactccctcaacgtgctggcccacgactttgggcgccgcgccggcgacctcaagatggccaccctcgcctcctacttcggcatcggcaagcagagccacaggagccttgacgacgcccgcatgaacctggaggtgctcaagcgctgcgccaccctcctgctgctcgagtccacccttcccccgggcatgctgcactcctccgccgccggatccatcaccaggaagaggagcaaccaccaagaggagccatcgtcgtcgtctcttgtcaatgtgacgcctagtaaaaggaagcagcggcagggcagcggcggcaaaatcaggcccaaggcagcaaccaccacgcccaagccatgcttccacatgatcctcaggcactccaggaccatcctcagatag

SEQ ID NO: 85907 - DNA, 866 bp, Oryza sativa
  Clone ID: PAT_MRT4530_8499C.1
tcaaggtgtcacgaaccagccaccggttgtaccgtcctcagcattgctggtaagacacttgtaagagcttggtaaggtgctccatttggctgagttgttgaggggcaccattgccatggcgaagtcgtcttccttcggcagatagtctttgccttgaacccttcgcctgagacgcctctggcctggcaaggcactcgtacgactcttcgcctcacgccgttcttgctccatagccttcgccacgggtttcggcagatttggtcgaagggcctcatgccatccttcgaccgtgcaaaccatgtggtgtttcgcccattctcttccttcgccaccgcatacacgccattcgccatggcccctcgcaagccaaaccttgcttcggcgaaagggccggatcccggccgggtcgatgacgacagcaccgccttcttgggggtttctctcgtggatgacgtcgagctggcgaagttggtcagctctggtgcgttggttgaggggcaggctttcgccccagggaaagccgtggtgccgaagcctgtcgacaatcggacggtggtgttcgccgtcctttttgaggcggggctacggcttccgtgcaacgtgttgttgccggagatccttcgcctattccaggtggagcttccacagttgagcccgtcggcgctagtccggatctccatcttcgactgggcgtgccggacctccgggtttgagcctagcgtcgagctcttcggcaccatatttttcgccaccgtgaactcaaagacggtgattaccccagcttgaacaaagaagacagtgttcgggagcgtgaactttaacgttcgccccgagcggtccgatctttggccggtgaatgctgccat

SEQ ID NO: 85908 - DNA, 2378 bp, Oryza sativa
  Clone ID: PAT_MRT4530_849C.1
cggcacgaggtcgatgtgcttgcaccaggtgggatggagcctcgtccacagagaatgggcggatcgggaggctatggatggccgaggctggtgttgttgatgccttcttcttcgttgggtctgagccgaaggatgtgatcaagcagtacatcagtgtcacaggcacaccctcgatgccacagcagtttgcggtggcgtatcaccagtgccgctggagtaccgtgatgaggccgtggttgccccaggcgtggctccgtgcgcggagcctcttgttccggccgccgggctccggcttgtcggcgtaccctcggcgcgcccgcggtactttacatgggatcattcagcatttcctaacccagaggtgatgcaagggaagatagcagataaggggaggaagatggtcaccattgtagacccacatatcaagcgagacagttcgttccacctccacgaggaagctactgctaagggatactatgtgaaagatgcgactgggaaagacttcgatgggtggtgctggcctggggcatcgtcatatcctgacatgttaaaccctgagatacgagagtggtgggctgacaagttctcctatgaaaactacaagggatcaactccaacattgtatatctggaatgacatgaatgaaccatcagtcttcaatggccctgaggtaaccatgccaagggatgcagtacattacggggatgttgagcacagagaactgcacaacgcctacggatactacttccatatggctacagcagatggacttcttaagagaggtgaagggaaagacaggcccttcgttctgtcaagggccttctttgctggaagtcaacggtacggagcaatttggacgggcgacaactctgcagattgggaccaccttaaatcttctattccgatggttttaactcttggtcttactggcatgactttctctggtgcggacattggtggattctttggcaacccagaacctgatcttttggtgcgttggtaccaagtaggagcattttatcctttctttagaggtcatgctcatcatgacaccaagagacgcgagccatggttatttggagagcgaagaactgctctcatgagggaggcaattcatatgcgatattctttgctgccatactattacacactgttcagagaggctagtgtaactggtgttcctgtgatgcgtcctttatggttagaatttcctgatgacaaagagacatataataatggtgaggcttttatggttgggccaagccttttagcacaaggaatttatgaagagggccagaaatcagtgtcagtgtaccttcctggagaggagttatggtatgacttgagaaatggatctccatacaagggtggtgtgtcacacaagctagaagtttcagaagatagcattcccagtttccaaagggcaggcgcaattgtgccaagaaaggatagattcaggcgcagttctactcagatggtgaatgatccatataccctggtgatagcgctcaatagctcaagtgcggcagaaggcgagctttatgtggatgatgggaagagttatgattatcagcaaggggcattcatccatcgtcgttttgtatttgcagacaataagctaacttccatgaatatcgcacccaaaaatcttggaaacaagaaattttcgaccgagtgcgtgattgaaagaattataatccttggggtatcatcgggatcaaagaaggctattgttgaacctggaaatcatgaagtggatattgaattggggcctattagtctacgaagcggttcgagctctgttgcaccaacagtacgaaagcccaatgttcgagttgtagatgattggactataaggatagcatgagatatatccattcacatctgaagcctgatgcttattttcatcgctctcaggtcataaaattaggctagaagcgtagtgctgccttgctcaatgtggtctgtggaagcgcaaaattttatattttgatggcctcaaagatttaccatgtaactggtacgcgtgctgtttttactatctacttcaaattttgatataatttgagacagaaattgctgatgtacatctgtagctttaacactggtttgtgtaccacgatgcatgagatgtgaaattcttgagtaaaaaaaaaaaaaaaaaaaaaaaaaaaaaaaaaaaaaaaaaaaaaaaaaaaaaaaaaaaaaaaaaaaaaaaaaaaaataaaaataaaataaaaaaaaaaataaaaaaaatataataaattaaaaaaaaataattttggggggggcccttttaggagacccaggtttctgttccggggtatggaagttaatagtttttttatggggcccctaaaattaaattcatgggccgg

SEQ ID NO: 85909 - DNA, 376 bp, Oryza sativa
  Clone ID: PAT_MRT4530_84C.1
gatatgagttggagtaagctgatcagatcatactgggttgaacttgatttgtatgccaaaatgtcatcactcatcacaagcattgagcattttgcctttttcttttctggctgtgctggtcaagtttatggaatttgaaaggaccttggcatacatcagttattgcctggcaatcaatatggcaaatttttgatgtatttatggcagctgggtgactgctgcttggggaggtcagccaaaactctttgtgagggttcattattctcacttgtttggtgatctctagcatctccccatagctgttcatccccgatactggttatggattgatatgctgaggttgaatgactttcaactatgcgctgcatggtgtgga

SEQ ID NO: 85910 - DNA, 1416 bp, Oryza sativa
  Clone ID: PAT_MRT4530_85000C.1
atggcggcgtcgctggtgacgtcgctgcgctccctctcggcacacgccctagtgccactcgtcgcgtcggcgctcctcttcgtggtggccgtcgtgctgcggcggcggcggcggccggtgtacctgctgaactacagctgccacctcccggacgtggaccggaaggtgaacctggaggtgtgcgagtacttcggccagcgctgccgccactactccgacgacaccgccgacttcatgcggctcatctaccgcaagtccggcctcggccaggagacgtacgcgccgcccttcatcttctccggcgagttccagaagacgcaggcgttcgcggtgcaggaggcggaggaggggctgtttgccacggtggcgcacctgctggcgaagtccgacgtgcgcccgcgcgacgtcgggttcgtcgtcgtcgcctgctccatgttctcgccggcgccgtcgctggcgtcgatgatcgtgcggcggttcgggatgccgccggggacgaggacgtacagcctcgccgggatggggtgcagcgccggcacggtggggatcgacatggcggcgagggcgctgcgggtgtcgcggcggggcgggtacgcgctggtggtggtgacggagaacatgagcctgaactggtacttcggcgagaacaagcacatgctggtgacaaactgcatcttccgggtgggcagcgcggcggcgctggtgaccgacgtggcggcgcggcgcggcgacgccaagtacgagctggtgcgcacgctgcggacgcaccacggcggcgacgacgcggcgtacaacgccgccgtgcagatggaggacgaggaggggaacgtcggcgtcgcgctcaccaaggacctcgtccgcgtcgccggcgcgggcctccgccagcacatcgccacgctcgcgccgcacgtcctccccgtctccgagctcctcaggtacgtgtggcgggtggcgcgcgcatatgtcgccgggaacccaaaggccgtggcggcgattgtgccagatttccaacgcgcgttcgagcacatgtgcatccactccggcgggaaggcggtgattgacgcggtggtgaagctgatggcgtttgggccacaggtcgtagagccggcgcgcgccacactgcataggttcggcaacacgtcgagcagcctcgtcttctacgagctcgcctactttgaggccaagcgtcgcgtccgtgccggtgaccgcctctggatgcttgccttcggcaccggcttcaaggcttgcagtaacgtctggcgtgcgctccgtgactctgcacccgatgccgacaacccctggaatgcatgcgcccaccgctaccctgctgcgctgccaccgccttcaacgcgtaggtcgagtggcggtgcgcccgcaatggattttacacacttgaaaaatgataagttgccttaa

SEQ ID NO: 85911 - DNA, 344 bp, Oryza sativa
  Clone ID: PAT_MRT4530_85001C.1
atattcgtcggtactccactacataggttgcttctattttatttctacacgatgcaggtaataagtgcgtgtgtttctgcttttgttagttcaggcgtactgcccatgttcatccgattgctgtcctaatcgttcgtgcattcattattagaatcaaacagttggagttagcatgtatgtcttaatctgctcaagaaacttcttgcaacccccaagttttcccccaaattgaagtctgcagttgactgcctaccatttagattctctatttctatttcatcgacttatacatccatcaacattttgttggtagaatgccctcttgaagtactgcccatgttcat

SEQ ID NO: 85912 - DNA, 270 bp, Oryza sativa
  Clone ID: PAT_MRT4530_85002C.1
atgaggagtctagaggacaggtttaatggactaatgatatttgtattagaattattcaaaagagtaaatctcttggtgggagcaacatctgttcctcctacgattggatcttcaaaaagaattgttaggagagctatttcattgctgccgcccactactcttccagctctgccgacaaccacacctacaagagctacagctgaagcaacacatagggcagaggaggcatcacaggacaccaaggccccaagcctcaggttctgtaaatga

SEQ ID NO: 85913 - DNA, 132 bp, Oryza sativa
  Clone ID: PAT_MRT4530_85003C.1
atggaggccctttgccacctaacgggccggcgcaggaagatcatctcggggcccgttttcacgtccttcgacgtgacgcggttgtcattcgacaacagtggtcattgtgttgcatcccgagttctcgcataa

SEQ ID NO: 85914 - DNA, 570 bp, Oryza sativa
  Clone ID: PAT_MRT4530_85004C.1
gtgaacagcgaatggtgcctgacacacaaatatgatattactgttttttccaacacaagagaagccaaatgcgatacatacaaccaagtgtgaaatatgatggcttggacaaggcaggaaatcactgctactaaactaacctaggtatacaatgagactgcaataggggttcttccttcaagaaaggtattagtttgatgacgaatatttggactactccaagtcgcaaaacttaaaaacgcagcgatacaaaagaccagcaaatgtagatagacctcattagaatcaccaagcgtaatctttgctgatttaggagcaatctgatttgatctctgttgaaacgagatccatatattggcgattcctttgtcttgacgtgtgagccaaattgtgtaagcgcaggaggaacgacctgagcagccttccgtaaaacattgacacgatcaccagcatgtgcattgctatattgagtgaagaaggtatgtgcaacacctttattgtcagcacgaacgatcctaccaatcctgtggacataatcctatgtagtcaaggatagctatagttaatgac

SEQ ID NO: 85915 - DNA, 198 bp, Oryza sativa
  Clone ID: PAT_MRT4530_85005C.1
aatctaaaaaaacatctttatatcgtgtacttttttacattggtcattttcacaactaacaacattatattctcacactttaccttaccttcatcataaactcattattggcaataaaaccccaacagatgattcatacacatttcttcacacagagaagcacaattctcttaaacaacaatccatataaaaatttca

SEQ ID NO: 85916 - DNA, 377 bp, Oryza sativa
  Clone ID: PAT_MRT4530_85006C.1
gctattataagagacgaggcgggattacatatgatacggcccacaggttacaacaccgagggttggaagcacattaacccccaaacattatctccccaccagcaggtgtgttgaagacacacgcacacgggatcaggataactccacactggcggagcatggaacagcatggggtatcattcacgccttgacacacacaacattaagccctcagacaacaagaactcctctagcactcgaggccatgatcagccatcctcattctagggggactgagcgccaacctcctagctgaccttttacaacgcgggaagatcctgatggacctcagagaactcaccctggttcatgcccttagccacgttccagtggacgaa

SEQ ID NO: 85917 - DNA, 596 bp, Oryza sativa
  Clone ID: PAT_MRT4530_85007C.1
gggtaaaactggcaggacatttttattcaaattgggatacccccgggggttaaactgggcacacacaaagaggcaggactttatttttttttccgggcaaaaaaacggggacaattaaaaaccaaaaacccccgacggggggaatgccacagggagcagggggggagctgggggaaaacccccatatgggcgggagggttagggccaaaaaaactggggctggagcttgactctgaacgaaaaaaaccctaacaaacggggggagccggagcgggggcacaaaaaccggaacactggtaaaggccgggcagggaaactggggggggaacatcctgagctgggggaaacactggggggggaagaatggggagtttcccagttaaaacacgggggattggaaaaaggggggggccactgggcgggactggggccttaaaaacccaccggaggggctaaacattggggggtgcaaaaagaaaagcgggtgcagctgatattgcctggaaactgggggaacagcatcaaactgggcaaaggccctggttgccgcatttgggaggggagcaaaaaaaaaaaaggtctccctgggggggggg

SEQ ID NO: 85918 - DNA, 1215 bp, Oryza sativa
  unsure (1)..(1215): unsure at all n locations
  Clone ID: PAT_MRT4530_85008C.1
atggtgataccggcgtcgaacatcgtggtagggccctacgcgggggactcgcgggtgaaggaggcggagttcgtcaagagcagcgcgcgcgcgcgggactgccccaaggacgaccgccccgagttcgccgtgctggggcgctccaacgtcggcaagtcctcgctcatcaacgcccttatccgccgcaaggaagccgcgctcacctccaaaaagcctgggaagacccagacgattaatcatttcttggttaacaaaagttggtaccttgtggatttgcctggttacgggatgtatcacaatgacaaaatcatagatggcattgcaaatggagagaaacagagcgagaagtacaattttgcccttgtgttcatcggcttgtttgcggctgcatctcaatctgctcgaacagattggtcttcatttaccaagggttacttcttgaacagagataccttggttggcgtactgctccttgttgatgccagtattccgcctcagaaaattgacatagactgtgccaattggcttggccgtaacaatattggattgacctatgtgttcacaaagtgtgataaatccaagaaaggtaaagggggccggccagaggagaacatcaaagagttccaggagacgatcagttccctgtacccagagcctcctccatggatcatgacgagtagcgttactggattaggccgagatgggctgctcctccacatgtcgcagttgaggaattactgggacaatgaagcaaccatgagtccatgatttgcttagaagagggaagagggaattacaaaccacgagtccttgacccttgccgatatatcttgaattacatgagcttttagtccagttccttctcattctgttgtatgaccctttggtttatagtgggatactaagagaggctntgcgatgtggagcttcttgtaatttcccctcctcagagtctcaggtgtatacatttaacaggttctgcggcggcagggggagcgatctggaactagacaacagttatggtgaaggcagcctaggaaattcaaaggactgtaagcattcaatggcacgaaacttattgccaaaaattctactactagtactgtgcatttcatacatttcgtcgcccgatccgacagactgccggcctggatggttttacacttcatgatggcagtaacaagcactgctagtaattttgatgatgtaaaagaa

SEQ ID NO: 85919 - DNA, 969 bp, Oryza sativa
  Clone ID: PAT_MRT4530_85009C.1
atggattgggtcgagggagagatcagttatctagacttcttcgagaaaaagaaatcaaatggtaccaaagggcaaaagttactgacctcctacgaggggacaacaacaccaagtattaccatatggttgccaatggtaacgaatgaggaaaatgaattcctaacggcacctttctcggaggatgagatccagggagctgtgtttgaaatggaacacaacaaagcccctggtccagatggtttcccggcggagttctaccagaatttttgggaggccatcaaagatgatttgatgaatctatttcgggatttccatacaaagaagggggtacgtcaaggtgatcccttatcacctatattatttaatattatagctgacatgttgactgtacggattaatagagccaaagaggatggtcaaattgcaggagtagtaccacatctaattaatgatggtctctctaccttgcaatatgccgatgatatggttctctttatggatcatgacctagaaaaagctcgtaacatgaagttgttgctttttgtctttgagcaattatcgggtcttaagataaatttccataaaagtgaattatattgctttggtgaagcgaaagattttgaaaacgaatacatggaactctttggttgttccactggtcaatttccatttcggtatttgggtatccctattcattataggagattaagaaatgccgattggaaggaggttgtagaacgctttgaaaagcatctaagcagttggaaaggaaaactcctatctactggaggacggctaacattgattaattcggtgctaagtagcttcccgttgtatatgatgtccttctttgccataccaagagggatacttacaaagcttgactactttcgctccaggttttactggcaaagtgatggttatatattctcttatccattggcttcgtacatgggctatcctacataa

SEQ ID NO: 85920 - DNA, 299 bp, Oryza sativa
  Clone ID: PAT_MRT4530_8500C.1
aaaaaaaaaaaaaaaaaaaaaaaaaaaaaaaaaaaaaaaaaaaaaaaaaaaaaaaaaaaaagaaaaaaaaaaaaaaagaaaaaaaaaaaaaaaaaagaagatttgggaaggttctaaattgttccaatggtggcgtcctctttccatgcaggtggctggggttttttttagggtgccctttgtttaaatctctttgggtcgccgtttttctttggccttgcgggggttaccccttttgtcccccgtttgtatttccctgggggcccttccccttttcctttcctgaagggggcgccctt

SEQ ID NO: 85921 - DNA, 2094 bp, Oryza sativa
  Clone ID: PAT_MRT4530_85010C.1
atgtggagatcaccggcggcgggcgccgggcgagatgttgacggcggcgccgatggagccgaagcagcagcgggtgagcgtgccgccgtaggtgcagtagacagagttctaatgactacggaatgggaatccaaatatcctttggtttctgtccaagcattagacagaggtctatcagaccacacaccattgctactagacactggatcagcagctttttcggggaaccatgcacaattcaaacttgaacttggctgctccttcgggatgattttcgtgaccgtgttgtggaaatctagaataagccagttaaggaacaataagatgagtgctttgagaaaacatcttcgaggttgggcggctcacaccagtggttcttacaaacaagaaaaaaataccgtacaaaatatcattgatgagttagacatcacaaccgagatcagttatccagacttcttcgagaagaagaaatcaaatggtaccaaagggcaaaagttagcaaaagttactgacgtcctactaggggacaacaacaccaagtattaccatatggttgccaatggtaagaaaaggaaaaagcgtatttttttcctcgatcaggacgaagggaaaatagaaggtaatatagcattgaagtcctatattactaaattctataaaaatctttttgggccacctgaggatacttactgtacactagatgaatctagaattgaggatattccgcaggataagatccggggagctgtgtttgaaatggaacacaacaaagcccctggtccagatggtttcccggcggagttctaccagaatttttgggaggtcatcaaagatgatttgatgaatctattccgggatttccatgtgggtgatttaccattgtttagtctcaattttgagataattacacttcttccaaaagttcatgaggcaaaccatatacaacagtacaggccaatatgtcttttgaatgtcagtttcaaaattttcaccaaggtcgcaacaaatagaattaatttcgtggcagaccatgtggtgagctcttctcaaatagcctttatgagaggacggaatatcctagagggagttgtcgtccttcatgaaactgtacacgaattacatcgtaaaaaactaaatggggtaatttttaaagtagatttcgaaaaagcctatgataaagtcaattggcctttcctcttacaaactctacatatgaaaggtttctcgcctaagtggatctcttgggttgagtctttcatttctggaggaagcgtagtggtaaaggttaatgacgaagttggacatttttttcagacaaagaagggggtacgtcaaggtgatcccttatcacctatattatttaatattatagctgacatgttgactgtactgattaatagagccaaagaggatgggcaaattacaggagtagtaccacatctaattaatgatgatctctctatcttgcaatatgccgatgatacggttctctttatgggtcatgacctacaaaaagctcgtaacatgaagttgttgctttttgtctttgagcaattatcgggtcttaagataaatttccataaaagtgaattatattgctttggtgaaggaaaagattttgaaaacgaatacatggaactctttggttgttccactggtcaatttccatttcggtatctgggtatccctattcattataggagattaagaaatgctgattggaaggaggttgtagaatgctttgaaaagcgtctaagcagttggaaaggaaaactcctatctaccggaggacggctaacattgattaattcggtgctaagtagcctcccgttgtatatgatgtccttctttgccataccaatagggatacttacaaagcttgactactttcgctccaggttttactggcaaagtgatggtcaaaaaaaagttatatattctcttatccattggcttcgtacatgggctatcctacagaagcctggttcgcaggatatggtagttgcggcatgtcaacatttggagaaggtggtcaaggagttttttacccagggatatgggtggcgaactagttttagaattggtggtccttaa

SEQ ID NO: 85922 - DNA, 1063 bp, Oryza sativa
  Clone ID: PAT_MRT4530_85011C.1
catggatggatggccctctatctgagtcagctgcatctcatctgcattccttcctcgtggcgatgacgatggtacgcatcatcggcccaagtccagctcaatcctcctcaccaacaccaagacgaccacgacctcctcgccctcgccgccgcccaccgaccatgggctccgccgccgcttcttctcaaacctccgtcgtgcttggctgcggcgccgtctccgcggactacctcgccaccgtcgcctccttccccaaccccgacgacaagatccgaagcctaacgctcaaggtccagggaggcggcaacactggcaatgccttgaccgccgctgctcgtttgggccttcgcccaaggatcatatccaaggtatccaatgacccacaaggaagaaatattctcaaggagctgcaagatgatggggtcgacacctctcatatcctggttgcagaggaggggaattcacctttcacctatataattgttgacaaccagacgaaaactcgtacttgtattcacactcctggttatcctcctatggtccctgaagagctcacacaagaaaacttgtttgccgctttagacggtgctgacattgtatattttgatgtcagattgcatgaaactgctttactagttgctgaagaggtaatattttcctggcacaaaattttatcttcttatagaggatcttgcaaatataaatgcctactctctgtttttaatattttttttgggtaggggcactcaaatttcccatttgcgtttagtggaaactattagagttcttagaacatgaattgtcacttactaaaagtttattccagttctatacaacttaatgggcaactgataccatacataggaatgttttttttcctattcggaattccactctttctacatgtatgtctggggatatcactatgaataggaaagctgccatgtccaattcgttaatatataacatatgcagtgtcaatgccatgtgtaagccttttttctacacacctgtagcatttttttgttttggtcaagggtacgcctagtagtgagattgagct

SEQ ID NO: 85923 - DNA, 2542 bp, Oryza sativa
  Clone ID: PAT_MRT4530_85012C.1
atggcaggattgcgcaaggggatacgagacggtcatgctcaacatcgagttcttcaccttcgatgagatatgtcgacttctccatgtgatgcatatgagatacatgactataattttggaagagtcgaatctaagttaccattctatgatggtaagtatgattctgttgcatatattgattgggagctagcagtagacaatgaatttgacaaatatgatttttctgatgctcaaatgattgtggctgctagtaataagttgacctcttctacattattttggtggagttatgtgattaacaaacctgaaacttgggatgaatgtaaaatcttattacagatgtacacttcttgagaaatgagaacatctgaaacaaggtgatagaactgttaaggagtacatccgagaatttaaagtttgtatcatctacagtgctctaaaagaatgcaatgagaaaacaatgcgtagatttttcaatgggcttaattcagaagttcaggttttgcttgctaatatgacatataatcatattggacatctattcatgtttgctcatagtattgagagtcagatcatatcaaagctgaggacgcataagcaatcttttgtctctctcgttactaacgttttgcagggagatcagcacatacaacaaaaggaggagaatggtgtacttgagaagaaagaggatgaagcacctatgatgtctgaagaaagtttgcaaggtaaattaaatggtgctgagataaatgaagtagagcaacaattagtggaaccaattgctgagatgcctttgtcacaagttgatttacttgttgttccttgtgataaagaagagttgtgtgataatgcttcacttatatccatgctacaactagtaaatgaacatgctattcctaccgttaattcttactatgttgattttaagcatgttgttcacgatgctaatgaagtagaggaacatgaaatgatatcttgtctaaatactttggtctatgttatgtttgatgatttttgtgagctcgataatttgaaggagaaattatttgctaagtctgatttgccatgtccaactaatgctatttttcatatctttggcgaatacaatgatagaggaatatatttggtgcacagagttttcatctattcggatttagagagacatgtttatgtggataaaacttgcaagctagagagatatgttattgctaatcatattacttcgactttctctagttttcattggatgaaacaggttgtttaaatggactacacgatgagcaccatatggaaaaccgaggacggttttccgtgaagaagaggaggatgatgtgaccatgactaccatggatgcaaccattgctcacatcatggatgaataagaaaacattatggtcaaggcatccaagtgctggaatcctgttcggccacctactacactactgatttcaaacggccgccgaatctgcatacgacctccgtttttgacccgtgagtacttgattgaacgctctcggagtcctctttcgaatccagcctcattgcctaattccattctagttatccgcggatgaagaaaaaaggaataggattgatctgcactggcaagatcaacaacccacggagaggtgtatcgatcgctaaggcgctcaccaaggtcgcaacaaatagaattaatttcgtggcggaccatgtggtgagctcttctcaaacagccttcatgagtggacggaatatcctagagggagttgtcgtccttcatgaaactgtacacgaattacatcgtaaaaaactaaatggataatttttaaagtagatttcgaaaaagcctatgataaagtcaaatggcctttcctcttacaaactctacatatgaaaggtttctcgcctaagtggatctcttgggttgagtctttcatttctggaggaagcgtagcggtaaaggttaatgacgaagttggacttttttttcagacagagaaggtggtacgtcaaggtgatcccttatcacctatattatttaatattatagctgacatgttgactgtactaattaatagagccaaagaggatgggcaaattgtaggagtagtaccacatctaattaatgatggtctctctatcttgcaatatgccgatgatacggttctctttatggatcatgacctagaaaaagctcgtaacatggagttgttgctttttgtctttgagcaattatcgggtcttaagataaatttccataaaagtgaacttgactactttcgctccaggttttactggcaaagtgatggtaaaaaaaaagtatcgtcttgctaaatggaacatactgtgccgccccaaggtacaagggggattaggaattcatgatttggaaattaagaatatggctctacttagtaaatggttattcaagttgctctccacgaaaggggtttggcaatagttgatgtgtaataagtatctcggtgataaacctctttctcaagctcaatggaaggcaggggactcacacttttggtctagcctcatgaaggtgaaacgg

SEQ ID NO: 85924 - DNA, 3753 bp, Oryza sativa
  Clone ID: PAT_MRT4530_85013C.1
atggcgaggaaagctgacgcgacagtggctggtgacgatagggaggttggtgaggctggccgacagtgggcgccggtgcagcaatacccacgcgccgacggagcatttaagaactcggcacattgcggtggcgacggcggcagcggcagtggcggcgacgacgctgggtggactggctccaaaggagatgacgttgagatgaggatcgacagtgatcgccgccggcgtctcaccttggctccagtttcttcctccgtggaaaatcgggatggggacgacgacgatggtgttaatacctcgcatgagattgccgatgaggctgtcatcgaaactaggcagagtgggagagacaatggtggtcacaggcaagcaacaagtgatggtggaggccatggacgaccggctcgatctgatgaagcttcgctagtacaggagttctggagcgagggaagaaacttccggccagggttccagggccatggccgtgatgagcaacctcgaagggatgcaggcaatcaaggtgtccctgttcatcaagccctaatagaaagtactgtaaaacaagacattcaagccggccgaggagaaacagctgccctttcatccaagaatagtgtggaggtaacaacggcaaaagccaagaaacctcgtccacttcactgtttcaggtgcaagggtagtggccatttgttggatggctgcaaaactgtccttgactgttttatatgtaacaagaaagatgcacatgtgccgaatagatgtcctattctaaaggaaccaaaacctactgctgctttatttggattcagtgaacagaacatgggtttcttgccgatacaggagtttgatatgaagttgaagccgccgaaacctgcgccaatggctttggtgaccattctcggtggtcatttagcagctagtgccgtgcagaatgagttggcacgcctcatccgagccgattggaattgggaggctgtgccacatggtgacaattcataccttgtgactttcccgtctgaggaggaactcaaccggatggatgatgttgaattcaggttaaagaatcacggtgtatctatcacaatccaacagtggcagcaagattccgatattataccggtgtatcagctcgacgaggtgtgggtgcacatcactggagtgctgcactcttggcgacactatctttgtttctgggctttgggcactgtagttggaaccacacaagaggtagatatgctgacctttcgtaagaagggcattattcgggtcaaagtgggagttcttagccgtgcggatctaccaattaagactgatatcgtcttcggcaagattggatatcatatcactttctctcttgaggaagaagggttccagccggctgtgcatgtggtagatgagcccacaggtggtggtgatgaaggtgcagaagagggaggggattctaaggaagacaacaatacaaatcacattgtaaagaaacacaaaagcaactcttccacaactacacaacctgatcaggggtctggtccaacgccaatgcagttggcgttaacgccttttggacctctcaagtcgtctccatctcgtcggcctgtggtgatggacttggtagggctgcagctgcagcatcctgatgtttcacaggagatcagtccagcaggaatctcaccacctgctactccccgatcggttggcctagagaatatgcgtatgaacgcagctgaggtgcaggagatcgaggcagtgccgcgcacgctaccagcaacagagatacaatctaatagaaagcaacatgttgtcccggtggcacatccgattagtaagcaacaaaacccatcaccaggcttgatggatggtcatctttcagtgccactagtgaagaagtgcagtgtaggcaatactgttgctccatttgggagcacaagtaaggtgcgcatgggcactgtttcagcaccactgagttcgcagcaaacgacacaaggaaactatgaagaatggccggtgttatcctctcctggagattgcaatggtcttcgccgaagtggtcgttcgaatgctgaacagatcagcggaattgcgatgacggatgaggattcactcagtaaggcaatgaggcgaaaagctatttgcaacctagatggtccagtgaaggagttggctgtgattaattctccgtcgagctctgacactacaccagcttctcccccacaaagcatattttggaatagcagaggtctcggtgacttggctaaataccgatatgtggcagaatgtataaaggagcacaatttagattttgtcgcacttatggaaacaggtaagagtgatatgtcaaagacgaatctaaaccgtctatctgggggtgtagatttcgtttggcattgtctcccacctcgcggcagatccggcggaattatacttggggtgaaagcatctacctatgatttgtctttgattgtcgaaggcgaattttatgttaaattccacctggtcaataaggaagacaaattcaaatggattttaatggcagtctatggaccggcacaagatgaattcaaatctagttttctagcggagttagttcgttcctgtcaacaaaatccgctacccacccttatagggggtgactttaatattcttaggagcagcttggaaaagaacaatgacagattcaatgaccgatggccttttcttttcaatgctgttattgacagctttgatctaagaggaattgctttgacgggaagacaatttacttgggctaactctctaccatccccaacatatgagaaattagacagagttctaatgactacggaatgggaatccaaatatcctttggtttctgtccaagcattagacagaggtctatcagaccacacaccattgctactagacactggatcatcagctttttcagggaaccgtgcacagttcaaacttgaacttggctggttccttcgggatgattttcgtgaccgtgttgtggaaatctggaataagccagttaagggccgcaaccctgttcaaagatggaacaataagatgagtgctttgagaagacatcttcggggttgggcggctcacaccagtggttcttacaaacaagaaaaaaataccgtacaaaatatcattgatgagttagacatcacagccgaggtacgagaattaactgatagtgagagagagcatcttgctcaatctagagatcagttatccagactttttcgagaagaagaaatcaaatggtaccaaagggcaaaagttactgacgtcctactaggggacaacaacaccaagtattaccatatggttgccaatggtaagaaaaggaaaaaacgtatttttttcctcgatcaggacaaagggaaaatagaaggtaatatagcattgaagtcctatattactaaattctataaaaatctttttgggccacctgaggatacttccatcacactagatgaatctagaattgaggatattccgcaggtaacgaatgaggaaaatgaattcctaacggcacctttctcggaggatgagatccggggagctgtgtttgaaatggaacacaacaaagcccctggtccagatggtttcccggcggagttctaccagaatttttgggaggtcatcaaagttgatttgatgaatctattccgggatttccatatgggtgatttaccattgtttagtctcaattttgggataattatacttcttccaaaagttcatgaggcaaactgtatacaatag

SEQ ID NO: 85925 - DNA, 416 bp, Oryza sativa
  Clone ID: PAT_MRT4530_85014C.1
cccagaagaatgcaggttcaataggttggaggcttttgagccaattcagagtgtgaggtttcaagctggcacacttgagtttttcgatgtctttaataaccatttgcaaggtcccgaattatctgtggtccgtggagttattgaacttaaaggccttttactaccccattacactaatggtgcatttttagtatatatcatccaagggagaggtataacagggccaactttcccaggctgtcctgagtcctaccaacaccagttccaacattaaggccaagcccaattgaccgaaagtcaaatccaaatctaaaagttcaaggatgaacatcaaaggatccaccgtttcaaacaaggagatgtaattgcattgcctgctggagtagctcattggtgctacaatgatggagaagtgc

SEQ ID NO: 85926 - DNA, 1278 bp, Oryza sativa
  Clone ID: PAT_MRT4530_85015C.1
atgaagttgttgctttttgtctttgagcaattatcgggtcttaagataaatttccataaaattgaattatattgctttggtgaagcgaaagattttgaaaacgaatacatggaactctttggttgttccactggtcaatttccatttcggtatctgggtatccctattcattacaggagattaagaaatgccgattggaaggaggttgtagaacgctttgaaaagcgtctaatcagttggaaaggaaaactcctatctaccggaggacggctaacattgattaattcggtgctaagtagcctcccgttgtatatgatgtccttctttgccataccaagagggatacttacaaagcttgactactttcgctccaggttttaatggcaaagtgatggtcaaaaaaaagtatcgtcttgctaaatggaacatactgtgccgccccaaggaacaagggggattaggaattcatgatttggaaattaagaatatggctctacttagtaagtggttattcaagttgctctccacggaaggggtttagcaacagttgatgcgtaataagtatctcggtgataaacctcttcctcaagctcaatggaaggcaggggactcacacttttggtctagcctcatgaaggtgaaatgggactttctccgttttggatcctttataattaaagatggctcccaaattaggttttgggaagacaaatggttgggcaattcaaccttgaaagaacattatccttgcctttacaacatagttaggcataagcacgctacagttgcacaagtcttcgaaaacaatcctccatctttttcatggcgaagagaccttataggatcaaaactagcagcgtggaataatttattaccgcgcatcactggttttcatttaactcaggagcaagatgagtttcattggaacttaacctcaaatggggagttctcggtgaagtctcattatctagctctaattcacagcaatgttcccaacattaataaccgtctttggaaattaaagatacccctaaaagttaagatttttctttggtacttgcgccgtggagtggtgttaacgaaggacaatttgataaaaaggaaatggcaaggcaataagaactgttgtttttgttgcaatgacgagacaattagacatcttttcttcgaatgccattatctaaaaaataccgtaagtacgtcccccataggcaccaatcaaaatgttaatcttcgtgatatttttattatttttggaaattttaatattaaaagtga

SEQ ID NO: 85927 - DNA, 450 bp, Oryza sativa
  Clone ID: PAT_MRT4530_85016C.1
atgctcacgcagcagcagcagcggtgcgcgcgccgcctacgcgctcactctcacggcgaggagagcgagaagcttggcgcgcgccgcggggcgcggggggccgggagaagagaaaggaaaagagacgcgagagctcggcttttgaggcgggggcctgccagttttttggctgtcgcgatcgatcacacattcgcacactcatcactcactcagcagcgtcgcgtccgcccgccgcggcgccgcgccgagtggagggatgtatcaagcgtcggtctcctactctcccctccccctctcgtggctaaatatcgcctaaacccccggatatcgcggggggcggtggacgctcggtgcgcccgtggaacggagggacagagggggcaggtcgctgccatgtggggccatcagcgcgttagcgttaagctgggcccacatgtctgtgacaggtag

SEQ ID NO: 85928 - DNA, 768 bp, Oryza sativa
  Clone ID: PAT_MRT4530_85017C.1
atgtgtccaacggtcgaaaagtttaaaacaggtccgaagtccgaacctcgtgtttcaggatatctacaacgaatgcttgggtcgggacggagggggagggtcgccgatctccatccggcgagcaaggggatcctgaggaccgatcggactattggagaggaggggctaagtcgtctccacaacagtgaactgtctccgagccaaaacagaacgaacgcccaaacaggcaaaccacgaactcgaaccctagaaaccctgaccatggactcgggaggcggaggaggggcatcgcacaaggcagcgtcgggctccgcaccctcgggggcggcggccgcgaaccccacggcgatgctctccgccctgatgagcaagcgcgccaagctccaggaggagctccgctccatagagcgccaggtttatgaaatggagacaacctacctacaagagtctaatcaattcggaagtgtgctaaagggttttgaatcattcttatcatcgtcaaagaacacttccaatctcaagcgctccaggaagttccaggctgatgagaggctgttctccctgtcatcggttacatctccagcggtcgatgaacatatggctggacgagatgatggaagagaatatggatcaggtcgttcgaaaggtgcaaccactcctgcaaacgggcaaggaaaaccaaagaagggaggtcgccctggagggagagacggcaagagaatacggccatcaaatgatccagatctggacgacgaagaggacttctaa

SEQ ID NO: 85929 - DNA, 1143 bp, Oryza sativa
  Clone ID: PAT_MRT4530_85018C.1
atgaataaatataatttttgcagaatttatcttctcttctaagcctcttaaaaattcaaactggtttccaatgagtctatcttctcctaatttctccgacctgggcccacttgacggtgtcacaagctagctccaacacccacaatgaacgagagagagtgatcggctctgggcgtgcgcgacgcgtggccgagacgtggcaacgccgagccgagcctccttctcttcccagccacatcgcccatcctcactcctcactccagtgccgaccaaaccgagagaacaagctctagctgctttcctcgccttcgatctcaccgccggctgtgatgaagacgacgctcgtcctcgcctacgagtcttcgccaaccctatctcttccacgttccatactcacctcaccatacggaaaatttctccttttgatttcatcctctctcgtgcagcggatcgacgggaacgccgacgtgccctcaagagctccagagcgcgctccaaacgtcgctgtggtggcatcgtcgccgtcgccaccgatctggaccaagccgggccatgccatcgcgccatcgtcttcgcctcgtactcctctccatttcccctcaagaaccacgaagaatggtgctacgagtgtggagatcggccaccgtcttcttcacctccggttgccgtcgccattgtcgtttccgcctcctccgttcttggtgccgattgagccgtcgccgttcacccgggaggttcttgccgtcgccaagccgttctgcaagccaccgctgccgccaagaccacggcaaccttcgctagactcatggcgagcattcttgaggctttagtgtcgcattcatgcactttattcatctagatccagcccctaaagtcacatgcaccaccacccgaaaccatctttcgctcggacccgccgccggcgctactccgatgtccactaatcgagaaaatgtacaaactctgcagagtctaaaaactaatcgattagccgtgctcgtggttacgagcggcatgtggatatgtattgagtatagtcttgtgtttattcttctaaatgctgaaatttaccttcaaattatattgagatttgagaatgatctccttgctgccatggatggcaatgaggtgaatatttataca

SEQ ID NO: 85930 - DNA, 363 bp, Oryza sativa
  Clone ID: PAT_MRT4530_85019C.1
atgagtttgggccttgctgctctccatgaccgaatggaaaattggggggaatgccgccccatcctcctccttgagcaggccatgggggcatgttgctcatcggggcagcaggggacgaagacgcagcagcaggggtcggagtcggtgcagcagccgaaatcgacgcagcggaggtggaaatcggaggcagcggggttcgatgcggtggtgatggggaacctggacgcgatgatggagcaggcgccgccggtctcttcagtccaagctgcttccccgcgcgattcttgcctcctctgccacctccgcgccgccgtgaatcggacgccggcggcggatccatgcctgctcgatctggtgccgtaa

SEQ ID NO: 85931 - DNA, 2667 bp, Oryza sativa
  Clone ID: PAT_MRT4530_8501C.1
atggcccctcgcaagccaaacccagcttcggcaaaaggaccggatcccggccgggtcgatgatgacagcaccgcctttttgggggtttctctcgtggacgacgttgaactggcaaagttggttagctctggggcgttggttgaggggcaggctttcgccccggggaaagccgtggtgccgaagcctgtcgacaatcggacggtggtgttcgccgtctttgttgaggcggggctacggtttccgtgcaacgtgttgttgccggagatctttcgccttttccaggtggagcttccgcagctgagcccgtcggcactagttcggatctccatctttgactgggcgtgtcggacttccgggtttgagcccagcgccgagctcttcggcgccatatttttcgccaccttgaactcgaagacggtgattaccccggctggaacgaagaagacagtgttcgggagcgtgaactttaacgttcgccccgagcggtccaatctctggccggtgaacgctgccatgtcgaagtgggaccgccattggatggcgaggtggttctatcacaccatccccttcgcagctggttctgactcggcaaaagccctccggtgccggcatagggcgattgcaccgaaccggaaacccaagatcgccatggacggcgctatggaggcgcggttcatcctactgcgcaaggtttgctcccgccttagctgccgtgacttggtggaggagttctgtatgctttgcatctttcccctctcccagtcatggcaagtcacggtcgagcaatgcgaagaggctaacggtttgccgaacttggttcttcctgaggggacgaacaggccttcgcgaaagcggatgcgtggacaagtgaagcttgcccccaggaagcgaagggttcctgcttcgtcggactccgacgccgacgacgaggatgatgccgaagaatgtgacggcgagggggaaggagaggaagaagaggaggtggaagctgtggctgataaggccgcgaacgaagcgatcgaagaccgcgtcgacacccccggctacactcctaccccaagtccaggtcacaacgagaccagggtggagtcgaacagctccccccttcaacgaaaggatttggaaggggcgaaggccctagttgcgttctcgtcgggcaaggcggcaaaaggaggtctggtcaagaagatctcaaaaaagaagggactcgtcgacatcgctcgcgtttttagcgacgatgaatcttctgacgagactccgacttcacctgctggccgcagtttggacctttcaactgctcaccttgctccgctcggcgttgctagggcaggcggtagcgccgccgccggggcttccgcctccgccgaacggatcgtgtcggctgcggcgagagttttcgggagccctgtgcgcgagccagctatttcaccgctggtcaaggcgaaggggaagtgtgtggccgccgaagcatctgcctcggagtattcccttgcggcgccccacttcgtccctggtgacttcgtgacccaggcggaccttattccctttgtggagggagtaagcaatcttgtcttgcccgccggcaccccgagcctgttcaccgaacttaacgagttcgacgaggggtgttccaccattaaaagtttggcggttcggattcttgcgactcactgctcgacggagcgaaccgtgcgggcccgttttgacggttttaagagccgtcttcgggccaaggatgatgaaataagccgcaagaacttggaggtggagtccctggcccacaccctcaaggagccgaaaactgaagtcaaacgccttcagtccgaactggacaaggggaaagatgcctgggccgaggttgatcgcctcaaggccgaactggagaaggagaaggcccattcggcggtgctcatcgattactacaaccttactgagccgaagatggaggctcttcgccagaaggctagcagggtcgaagcgggcgccgcggaggagtcgcagcggtttttgcgggagatggcgaagaccaccgaatccgcgagaacggcttgccaaacgctccgcctcgcccttaccgacatgggcgcgaagttctggcagaatgatggccggtccgctgccaaagcgcgccttctggagcaactggcgaaggcggaggcggcagatcggggcgaaggagagggtgccgcaggcgaagaggttggaggcgatgcccaggatcacccagagggcgttcaccggaagttgtgcattcggtccccttccgggagctggcgaagtcaaaacgagaaatttgtggcattgaaggacctgccgaaggtgcgatgtccatttcgtcctgtttatcgcgaaatggagataaacggtcatagctataaggttttcaaggttgccgactggctgcgggcgcaccccgggcgaatcttagaagattacgaccttgttcattcaagacgtttggaggatatggctcgcttttggcgaaatcatcagaagacgaaacgtcaggaaatgatctttcagcgtcgcaacagtttggtctgtgtttcgccccctactcctcttaaggttgtgtatgatattagtagtgatgacgaacctagttcgtctgaccattccttagggagggataatgattacaggggcgaagatgtaatttacttgtaa

SEQ ID NO: 85932 - DNA, 1387 bp, Oryza sativa
  Clone ID: PAT_MRT4530_85020C.1
gtctattgctgttccctagattctgtccaagttattctctagtagactttcagcaataaagactgattagtacaagttaagtggttcatcttccctgcttgctccaaatcaggtggccaagaccacatcatgctcagatctgcacgagccatggaatgttacctcatcactgcttctcagccatgaccttgaccagctcttcagcatcatcaatcgccttcgaacacctgtgtgctaacagggaggacttcccaacctggtaggccactcctgatgccttcacctgttcttctatcttgccaaaggaggccacctcttggtgtgcatacaccacactgggtacagttcataatctaagtgaccttttcctgcgatgaattcaacacaggcaatggatcttcttcagctttatgtgcaagcatgggtccgggtatagcatccccagttgtgtggacacgcttaacatttgtcatcaacaacgtccagaatactctgctctccaccagctgcaggctccacagttaacttgacacaactaccagaggcgtcaaccccaactaccattgtcttaagcatgaatttcattttctgcttctccagcatatgcttgaatggcttcctaatttgtccatccattgatgggacaatgtcagaggcaaattcgacaacactaacctcagacctggcccgttccagaaagaaccgtctctaaacctatgtatccagctccaacaatcaccaatttctttggtatttctgaaagaaaagagcaccagtaggcagtaggtgacaatctttttctcatctattgtaacttcagggagagattttacatctgaacaagtggcaatcattatattcttccctttgaagattgtgctacgttaccgtgcaagtccacaggtacttctgaagggtacaggaacttccaaaaacctctggcatactcaaccttgttcttttttagcaggcacattgtccttttgtgccatcatggcagccaaatctatttgataatttaatcccatggtgtgcaaaataagactttgcctcactatgaatgcagtaaagcggaataggggatgcatccaacgttgaggcaggtgcccccgagcttgcccctcttctcgatgcaggtggtcttgagccctagctgcgccgccttgatggcggccacgtacccgcccggcccgccgccgatcaccacgacgtcgctctcctcccccgccgccgccgccgcgtaccccctccacgcggacgcccacgccgccgccggcgcccgccgcagcagcgccgcctccgccgcgcgcctcctcgccaagctcgccatcgccatctcgcgggctcctcctcgctatgttttttttttctttttttcttaatctat

SEQ ID NO: 85933 - DNA, 298 bp, Oryza sativa
  Clone ID: PAT_MRT4530_85021C.1
agctggcgtccgtgctgcgcgcactgggggcgcaccatatgtactggcgaggtgcacgggcatgatggactatatggactcccaccgttacagtttcgtccacctctccgagatcgccgccttgcactgcagccccacgccgacgcacggcggtaagggccgcgactccaaggaccattacgcctgttcggaggcggcactgacggaggcatctcggatgtacaactccaacagctactgcaagatctcggcgccggatgttcaccgggtgcttggtcagctttgatacaagtgctcc

SEQ ID NO: 85934 - DNA, 423 bp, Oryza sativa
  Clone ID: PAT_MRT4530_85022C.1
atggaatcatggaaggatgtagcagtgtggtatagagatgagctcgacgttgcgcaagatgacgaggaaaagaaaaatagcagacaacctccatcaccggcggactccacactatcctctgcggccagccacatggagcacgatgtgcaaaccttcatgcgtgaagttgaaggagagtatgcagatgcaaatcagagtgtcattttcttactttcttgttctatcaatgtcgccgacgtggagcagccgctggttgttgctattggcctagcgtccggcagcgaggcccaaagcagtgccttcacctcaaccgtcgctggccaccgctcgtcggccaccgccatcaaccgccacggtgtcgtcgtcctcctccatggtgtgtcgctgatatgtgggctgcacgatgcgggatgtggggtgtga

SEQ ID NO: 85935 - DNA, 5928 bp, Oryza sativa
  Clone ID: PAT_MRT4530_85023C.1
atggctggtgaagaaaagagcgatggaagcgttgttgacccaaagaatatcatcactgtcacgcttgaagatttatctgaggatcaacggcaagaggtactgcggcaacacgacgaggagttgaaaaaactactcgctgcctaccaaaagacacggaacggcgtcgttaaaaagcatccatattttcaatccacatacagtaatcatcctttgccgctagcgagtatcggggttcctcgtgggccggtacaagatgcatgtgttgatgcagttccgttacaaacatatgttgcacctacacatccagttaattcgattcaaccttctgcaaatttcagagatcaattggctagtgtgcttagggagtttggtttagaacctaagggcagagcacgagcatatcaaaaaccataccctgattattttgatacaactccataccctcggggttttagagttcctgaatttgttaaatttactggggaggatggtagttctacatttgagcatgttggacaatttttagcacaaagcagtgaggtacagtcagatgtttttagagttaaattatttcctttatcattatctggtactgctttcacttggtttacatctcttgctcctaattctatcaccacatgggctcaattagaacagaaattccacgattacttttatagtggtgagactgaacttagactttcagatttaacaatggttaagcagaaatatggtgagtctgtttcagattatattaggaggatcagaaatgtaaagaatcgttgttttagtttaactatagccaaaaaagatttagcagaccttgctttttcaggcttgctcgctcatcttaaggagaaattagatggccaggagtttttaggtattaatcagatacaatcggcgattaatgatggccggttgacaatcaaggacggtggcaagatgaagcttgacagtgatccttttcctgtcaatgtgatagagtttgcaaataagaagatgctcattcggtcacatcagaccgaatccgctgaaggaaaaaatgttgttgttaatgatagtgtgcccccaaggatgataaagccaaaaaatccagaagtgggagtatggaaggttaataagggtaagaagccagttctaaaaccaaggccgaggccgacatttaaacagttgttagaaaaatatacttctcaaaagaacactaacgtgtttagtcggcttggaggtgctaagcgtcctagatcttctcctggacacagttatggtgatcaaggttattggcatggagaatcatatgtacaacaaccttatttcggaatggggccaatgcattggggttatccgcctccagtgtatcctcagtttccttcatggggttgtgatccttgggctccatatcctgttgtgccagtgactcattttcagcaaggatggaatgcaccagtggccattggtggagaacatttatacaaccagagaggacgagaagctagagcaagtgatgctattgtaatcaacggtggtgataataatttgtctaagaggaagaggctcacagtgccagcaagaagcaattcactaaaaaataacatggcaagcaatagtatcaagagtggttcacaacgcatgtgggtgccaattcgacctagagatgatgccggggcgtcagttgcacatgaaggtggtgaggttggtcctagtagtgtggttgtgagccgagctgtggccactttggatgagtcaagagctgctggtcctctaaaaattggtgatgttgttattgagaagccggagttagcagcagctgctattgaagaactgaagacacgtggagttggcagcagcagtcagggacagcttgcagatggtgcgtcgccgggatcttcagttcagggagtggtgtgccaaccatgtggtttgggtagcagtagagacacttggcagcagctaggaaagagcggcagcaacacacactatggcagaaatcagcagccgacaggtttttggcgagagaagcgacagcaggaggatgctggtgttgggagcagcagttctgtgcagcaaacagtaggcgtgcagcagcgtgcaagcagctcggggggcaaccgtagcaagaggttggcgccggggactgtaccgcagccacagtggtgtcctccagggattaaacatacacaaaagcgacgactgcagaggttgcgggcattagaaatcagagaacaaaaggaggagaaggcacgtgatgagtggtttaatcgggataggccaatggtgctcacagataaaacatggaaggatagacgcattgaaaatgaaggcaatgctgatgctaatgaggacgttgatgttatttctgaaagtaaacagaatgtgcctagtgattgcatggatattaacatggtgtttgagttgcctgctgaatttcgagcgcctgagatggaggttgcagagctcgttcttggtccaaagaatgcgattttcgagaagcccgagaaatcaggtgagcatttgaagcctttgtttattaaaggacatattgatggtaagcctattggtcgcatgttagttgatggtggtgccggtgttaatgtgatgcctctttcggtcttttctaaattgggccgaaaggaaagcgagttaatgaagacaaacatggggcttagtgggttttctggagaattatctgaggctaagagtgttatttctatggaactcactgttgggaacaaaacaatacctactgctttctttgttgttgatgttaagggtaggtacaatattctgttagggcgtgattggatacatgcgaattgttgtattccctccacattacatcagtgtttagttcagtgggttgacgacgaggtggagaagcttggtcaggggttttcgtcagctgatccacttgaggaggttgatattggtgatgggagtattcctagacctacatttattaatgcaaacatgggggctgaccagaagagcaaggtatgtaaattacttagagaatttgttgattgctttgcttggagttataatgagatgcctggtttgagtagggatttagttgagcataggttgcctattaaatctggttttcggccgtataaacaaccccctagacgttttaattctgatatgtatgaccgtatcaaacaagaaattgatcggttattgaaagctgggtttattcggccttgtcgatatgcggagtggatctctaatatagtgcctgttgaaaagaaaaatacgggtaagattagagtgtgtgtcgattttagaaatttaaataaagctactccaaaagatgaatatcctatgcctatagccgacatgttagttaatgatgcttctggacataaagtaattagctttttagatggcaatgctggttataatcagatttttatggccgaagaagacatgtttaagactgcttttcgttgcccgggacttgttggtttatttgagtggatggttatgacttttggattaaagaatgccggcgctacatatcaacgtgctatgaatttaatttttcatgatttgttaggcattgttgtagaagtatatatagatgatgtggttgttaaatcggacgggtttgatagtcatttggccgatttacgactggcttttcaaagaatgcgccggtatagattaaaaatgaatcctctcaaatgtgcttttggcgtgtcggctggtaagtttttaggctttataattcatgagcagggcatagagatagatcctaaaaagctgggggcagaacagtgggaggcttttaataacattaaacgatatttgttgagtcctccggtgcttcgggcgcccaagtccggtgtgccgttcagattatatgttgttgcacaacaaagggtgatcggtgcggtcttgacgcaagaagacgatgggaaggagtatgttgtggcttatttgagccgtcgtttgcttgacactgaaagcagtggtagaattgggaagtgggcttatgcactaatagaatttgatttattatatgagccgttgcgtgctatgaaaggccaagtggttgctgattttatcgttgatcatatggttaaagatgtcgattttgttagtgtgtgtccatggaaactttattttgatggatcggtttgtgggaatgggcaaggtattggtatagttttgttttcaccaaatgatatgatttatgagacatcggtccatttagaatattcttgcactaataaccaagttgagtatgaggctttattgtttggtttacaaagtttggtagatatgggtgtgagggatattgatgcttttggggattcacgtttagtagttgagcaagttaatggtgaattcaattgttttgatggactactgaatagttatttggaccgatgtttggatataattaaatcgcttcacacttttactattcgtcacatatctagagaggataatgttagagcaaatttcttagcacagcaggcgtctggctatcatgtgaacaggggagtgttttttgtaacaaataagccggcgtttgttactgttggagttgattcggttggaggtgtaatcagtactgtaacaatggacacaattaacgatctgaccgaacaaggtaatactggttcggtccaacaacagggaataaccgggtcagtaggagatgagttaggtgattggaggagtcctttagttaattatttgagagacccaagtcaatcgagggataggaaagttcggcgacaagctttaaaatatactttgttagatgatgagttgtatcgccgaactatagatggtttacttttaaagtgtttaggtcctgatcaatctaaagtagccatgggagaggtacatgaaggaatttgtaggacgcaccagtcggctcataagatgcaatggctattaaagagagcgggtttttattggccgactatgctagaggattgttttcgttattataagggctgtgaggcatgtcaaagatttggaaatattcagttagcacctgcagctatgctacatcccattgttaaaccgtggccatttagaggatggggtttagtttttgttggtgagatacatccttcatcttctaaaggtcatcgcttcgtcctagtagctactgattatttctctaaatggacggaagcggttcctttgaaaaatatgactcataaagaagtgattaattttgtattagagcatattattcatagatttggcataccccaaactttaactactgaccaaggggcttctttcatgtcacatcaatttagtgagtttgccgaatcttttagaattaaattgctgaattcgtcgcctttttatgctcaagctaatggacaggccgaatctagcaacaaaattttgattaagcttataaaaaagaaggtagaggagcatccaagaaggtggcatgaggtgttgtcagaggctttatgggctcatcggatatctaagcatggtgcgactcaagtaacaccgtatgagctagtctatgggcagaaggccgtgttacttgtggaggttaatttacaagctcttagaatagccagacaaaatggtttgtcggctgtagattataggaatttaatgatggacaggatagatgacgtcccagaggaaagattgaaggccttgagacatattgagaaagaaaaattaagagtagctagggcttataataagaaggtgagagaaaaatcatttcagataggtgagttggtatggaaaacgattttgcccattggaactaggagtagcaaatttggcaagtggtcaccgagctgggaaggtccttataaagttgtagagattgttcctggaaattcatattttgtgcagtctttgcagggggataagttgcctaaagctttgaatggaagatatttgaaaaaatattatcccagtatatggtag

SEQ ID NO: 85936 - DNA, 4779 bp, Oryza sativa
  Clone ID: PAT_MRT4530_85024C.1
atggctggtgaagaaaagagcgatggaagcgctgttgacccaaagaacatcatcgctgtcacgcttgatttatctgaggatcaacggcaggaggtactgcggcaacacgacgaggagttgaaaaaactactcgctgcctaccaaaagacacggaatggtgtcgttaaaaagataattcctgagcatccatattttcaatccacatacagtaatcatcctttgccgcaagcgagtatcggggttcctcgtgggccggtaccaaatgcatgtgttgatgcagtaccgttacaaacatatgttgcacctacacatccagttaattcgatgcaaccttctgcaaatttcagagatcaattggctagtgtgcttagggagtttggtttagaacctaagggcagagcacgagcatatcaaaaaccataccctgattattttgatacaactccataccctcagggttttagagttcctgaatttgttaaatttactggggaggatggtaggtctacatttgagcatgttggacaatttttagcacaaagcagtgagatacaatcggcgattaatgatggccggctgacaatcaaggacggtggcaagatgaagcttgacagtgatccttttcttgtcaatgtgacagagtttgcaaataagaagatgctcattcggtcacatcagaccgaatccgctgaaggaaaaagtgttgttgttgatgatagtgtgcccccaaggatgataaagccaaaaaaaaaatccagaagtgggagtatggaaggaagaggctcacagtgccagcaagaagcaattcaccaaaaaataacgtggcaagcaatagtaccaagagtggttcacaacgcatgtgggtgccaattcgacctagagatgatgccggggtgtcagtttgcacaagaaggtggtgaggttggtcctagtagtgtggttgtgagccggactgtggccactttggatgggtcaagagctgctagttctctaaaaattggtgatgttgttattgagaagccggacttagcagcggctgctattgaagaactgaagacacgtggagttggcagcagcagtcagggacagcttgcagatggtgcgtcgccggaatcttcagttcagggagtggtgtgccaaccatatggtttgggtagcagtaggggcacttggcagcggttaggatggagcagcagcaacacacactatggcagaaatcagcagccgacaggtttttggcgagtgaagcgacagcaggaggatgctggtgttgggagcagcagttctgtgcagcaaacagtaggcgtgcagcagcggtttggagctgaaactttggcgaatcagtgcagtgcaagcagctcggggggcaaccgtagcaagaggttggcgccggggactgtaccgcaaccacagtggtgtcctccagggattaaacatacacgaaagcgacggctgcagaggttgcgagcattagaaatcagagaacaaaaggaggagaaggcacgtgatgagtggtttaatcgggataggccaatggtgctcacagataaaacatggaaggacagacgcattgaaaatgaaggtaatgctgatgctaatgaggacgttgatgttatttctgaaagtaaacataatgtgcctagtgattgcatggatattaacatggtgtttgagttgcctgctgaatttcgagcgcctgagatggaggttgtagagctcgttcttggtccaaagaacgccattttcgagaagcccgagaaatcaggtgagcacttgaagcctttgtttattaaagggcatattgatggtaagcctattggtcgcatgttagttgatggtggtgccggtgttaatgttatgcctctttcggtcttttctaaattgggccggaaggaaagcgagttaattaaaacaaacatggggcttagtgggttttctggagaattatctgaggctaagggtgttatttctatggaactcactattgggaacaaaacaatacctactgctttctttgttgtcgatgttaagggtaggtacaatattctgttagggcgtgattggattcatgcgaattgttgtattccctccacattacatcagtgtttagttcagtgggttgacgacgaggtggaggtaattgaagcggacaattcagcttgcattgctttgacagaagcgccggttgattggcaacacggtgatatgcgatgtttgacagaagacaatattaagtggctgcaaaagcgcactgagcaatatcgttcaggaaagaacgatatgcatgagactattgaggatttcgataacgtgcagaagcttggtcaggggttttcgtcagctgatccgcttgaggagaagagcaaggtatgtaaattacttagagaatttgttgattgctttgcttggagttatactgagatgcctggtttgagtagggatttagttgagcataggttgcctattaaatctggttttcggccgtataaacaaccccctagactttttaattctgatatgtatgaccgtatcaaagaagaaattgatcggttattgaaagctgggtttattcggccttgtcgatatgcggagtggatctttaatatagttcctgttgaaaagaaaaatacgggtcagattagagtgtgtgtcgattttagagatttaaataaagctactccaaaagatgaatatcctatgcctatagccgacatgttaattaatgatgcttctggacataaagtaattagctttttagatggcaatgctggttataatcagatttttatggccgaagaagacatgtttaagactgcttttcgttgcccgggatttgttggtttatttgagtgggtggttatgacttttggattaaagaatgccggcgctacatatcaacgtgctatgaatttaatttttcatgatttgttaggcattgttgtagaagtatatatcgatgatgtggttgttaaatcggacgggtttgatagtcatttggccgatttacgactggcttttgaaagaatgcgccggtatggattaaaaatgaatcctctcaaatgtgcttttggcgtgtcggctggaaagattgaatcgtttgttcctttgcttcggttgaaacatgaaaacgaatttagctggggggcagaacagcgggaggcttttaataacattaaacgatatttgttgagtcctcaagtgcttcgggcgcccaagtctggtgtgccgttcagattatatgttgctgcacaacaaagggtgatcggtgcggtcatgacgcaagaagacgatgggaaggagtatcttgtggcttatttgagccgtcgtttgcttgacactgaaagcagtggtagaattgggaagtgggcttatgcactaatagaatttgatttattatatgagccgttgcgtcgtgctatgaaaggccaagtggttgctgattttatcgttgatcatatggttaaagatgatatagatgtcgattttgttagtgtgtgtccatggaaactttattttgatggatcggtttgtgggaatgggcaaggtattggtacagttttgttttcaccaaatgatatggtttacgagacatcggtccgtttagaatatccttgcactaataaccaagttgagtatgaggctttattgttcggtttacaaagtttggtagatatgggtgtgagggatattgatgcttttggggattcacgtttagtagttgagcaagttaatggtgaattcaattgttttgatggactactgaatagttatttggaccgatgtttggatataattaaatcgcttgacacgtttactattcgtcacatatctagagaggataatgttagagcaaatttcttagcacaacaggggtctggctatcatgttaacaggggagtgttttttgtaataaataagccggcgtttgttactgttggagttgatttggttggaggcgtgatcagtactgtaacaatggacacaattaacaatatgaccgaacaaggtaatactggttcggtccaacaacagggaataaccaggtcagtaggagatgagttaggtgattggaggagtcctttagttaattatttgagagacccaagtcaatcgagggataggaaagttcggcgacaagttttaaaatatactttgttagatgatgaattgtatcgccgaactatagatggtttacttttaaagtgtttaggtcctgatcaatctaaagtagccatgggagaggctaatggacaggccgaatctagcaacaaaattttgattaagcttataaaaaagaaggtagaggagcatccaagaaggtggcatgaggtgttgtcagaggctttatgggctcatcggatatctaaacatggtgcgactcaagtaacaccgtatgagctagtctatgggaatttaatgatggacaggatagattacgtcccagaggaaagattgaaggccttgagagaaattgagaaggaaaaattaagagtagctagggcttataacaagagggtgagggaaaaatcgtttcaaataggtgaattggtatggaaaacgattttgcccattggaactaggagtagtaaatttggcaagtggtcaccgagctgggaaggtacagcacgtgggctttgcatgcatggagaggctttgttgcgtcaggatgtgtatcgtgccggagttccatgcatggcgatgtgtcgttgggctgagaaggttttgctctgcttgcatgatggagatggaggcccatgcacggcgctgtgttgctgttag

SEQ ID NO: 85937 - DNA, 504 bp, Oryza sativa
  Clone ID: PAT_MRT4530_85025C.1
atggcgacgacgccggcgccgacgaccggaagacgcgccgccgcctccacaagcaaggcgcagctcctcccaccgcgccgcctcctcgttaccaacctcgtcggcgccgtctccacctacagaaacacggcagaggagaagaggagaagcttctcgcgactggtggcgctggtgtccgcggcggcgggagatgcggatgggcgtcgtcgcggtgccagccttcgccgccgcgacgaggaagacgacagcgacgatgacgacaggaaggaggaggccgtggagctcgagatgctgcgcagcgagcggcgcgccgtgaggctgccgaggtcgcactcgacggggcaatcgctggttgcgtcggcggccgccgccgccgagtccggcgaccacaatcggttcacgctgcggctgccgcaacacggcaggcggcggccgactatggagccacgcgacgcgacgctggcggagggcggcggcaagccgacggggcgcgactcgaggtaa

SEQ ID NO: 85938 - DNA, 394 bp, Oryza sativa
  Clone ID: PAT_MRT4530_85026C.1
tttttgtttttttaattttttggtgtgcatcctcaaccaatataccattatatagtatctgggtctgtcttgctcacagcaacaatttatcatgtacagaatatgctatgcaattgttcctagttgctagctggggaacacacaattcctaggaagatcaccagtcccgttcacaatcacaactacttagaccacatcctgaaggaataaattcatcatccagcaatcgggtgattcataccaccacgctttgaagagaggcaaactggagtgcagcttttcttgattgctccaagggaactgtctcagttcagttcagggatgcggttggtatatccaactccctgaaatttttgcgtatggtccataggatctcagcgcatcgcctaatgct

SEQ ID NO: 85939 - DNA, 4872 bp, Oryza sativa
  Clone ID: PAT_MRT4530_85027C.1
atggctggtgaagaaaagagcgatggaagcgctgttgacccaaagaacatcatcgctgtcacgcttgaagatttatctgaggatcaacagcaggaggtactgcggcaacacgacgaggagttgaaaaaactactcgctgcctaccaaaagacacggaatggcgtcattaaaaagcatccatattttcaatccacatacagtaatcatcctttgccgcaagcgagtatcggggttcctcgtgggccggtacaagatgcatgtgttgatgcagttccgttacaaacatatgttgcacctacacatccagttaattcgatgcaaccttctgcaaatttcagagatcaaatggctagtgtgcttagggagtttggtttagaacctaagggcagagcacgagcatatcaaaaaccataccctgattattttgatacaacttcataccctcggggttttagagttcctgaatttgttaaatttactggggaggatgataggtctacatttgagcatgttggacaatttttagcacaaagcagtgaggtacagtcagatgtttttagagttaaattatttcctttatcattatctggtactgctttcacttggtttacatctcttgctcctaattctatcaccacatgggctcaattagaacagaaattccacgattatttttatagtggtgagactgaacttagactttcagatttaacaatggttaagcagaaatatagtgagtctgtttcagattatattaggaggttcagggatgtaaagaatcgttgttttagtttaactatagccgaaaaagatttagcagaccttgctttttcaggcttgttcgctcatcttaaggagaaattagatggccaggagtttttaggtattaatcaggtgttacaaaaagctttgattcaggaaaaccgtgctaaagaagttaaacaatatagccggtttaaagatggcaaaaatagagataaagaaaaacatgcggttaatactttggattgtagtgatgaggatttggctagtgacgaagatactgacatatgtgtagccgaatgggtgcatacatctaaaacaaaaccttttatacaatcggcgattaatgatggccggttgacaatcaaggacggtggcaagatgaagcttgacagtgatccttttcctgtcaatgtgatagagtttgcaaataagaagatgctcattcagtcacatcagaccgaatcggctgaaggaaaaaatgttgttgttcatgatagtgtgcccccaaggatgataaagccaaaaaatccagaagtgggagtatggaaggttaataagggtaagaagccagttctaaaaccaaggccgaggccgacatttaaacagttgttagaaaaatatacttctcaaaagaacactaacgtgtttagtcagcttggaggtgctaagcgtcctagatctcctcctgggcacagttatggtgatcaaggttattggcatggagaatcatatgtacagcaaccttatttcgcaatggggccaatgcattggggttatccgcctccaatgtatcctcagtttccttcatggggttgtgatccttgggctccatatcctgctgtgccagtgacttattttcagcaaggatggaatgcaccagtggccattggtggagaacatttatacaaccagagaggccgagaagctagagcaagtgatgctattgtaatccacggtggtgataataatttgtctaagaggaagaggctcgcagtgccagcaagaagcaattcaccaaaaaataacatggcaagcaatagtatcaagagtggttcacaacgcatgtgggtgccaattcgacctagagatgatgccggggcgtcagttgcacatgaaggtggtgaggttggtcctagtagtgtggttgtgagccgggctgtggccactttggatgagtcaagagctgctggtcctctaaaaattggtgatgttgttattgagaagccggagttagcagcagctgctattgaagaactgaagacacgtggagttggcagcagtagtcagggacagcttgcagatggtgcgtcgccgggatcttcagttcagggagtggtgtgccaaccatatggtttgggtagcagtagaggcacttggcagcggctaagaaggagcagcagcagcacacactatggcagaaaccagcagccgacatgtttttggcgagagaagcgacaacaggaggatgctggtgttgggagcagcagttctgtgcagcaaacagttggcgtgcagcagcggtttggagatgaaactttggcgaatcagtgcagtgccagcagctcggggggcaaccgtagcaagaggttggcgccggggactgtaccgcagccacagtggtgtcctccagggattaaacatacacaaaagcgatggctgcagaggttgcgggcattagaaatcagagaacaaaaggaggagaaggcacgtgatgagtggtttaatcgggataggccaatggtgctcatagataaaacatggaaggatagacgcattgaaaatgaaggcaatgctgatgctaatgaggacgttgatgatatttctgaaagtaaacagaatgtgcctagtgattgcatggatattaacatggtgtttgagttgcctgctgaatttcgagcgcctgaaatggaggttgcagagctcgttcttggtccaaagaatgcgattttcgagaagcccgagaaatcaggtgagcacttgaagcctttgtttattaaaggacatattgatggtaagcctattggtcgcatgttagttgatggtggtgccggtgttaatgttatacctctttcggtcttttttaaattgggccaaaaggaaagcgagttaatgaagacaaacatggggcttagtgggttttctggagaattatctgaggctaagggtgttatttctatggaactcactgttgggaacaaaacaatacctactgctttctttgttgtcgatgttaaggaagacagtattaagtggctgcaaaagcgcactgagcaatatcgttcaggaaagaacgatatgtatgagactattgaggatttcgatgacgtgcagaagcttggtcaggggttttcatcagctgatccactggaggaggttgatattggtgatgggagtattcctagacctacatttattaatgcaaacatgggggctgaccagaagagcaaggaaagattgaatctgcttcgggcgcccaagtccggtgtgccgttcagattatatgttgctgcacaacaaagggtgatcggtgcggtcctgacgcaagaagatgaagggaaggagtatgttgtggcttatttgagccgtcgtttgcttgacactgaaagcagaattgggaagtgggcttatgcactaatagaatttgatttattatatgagccgttgcgtgctattaaaggccaagtggttgctgattttatcattgatcatatggttaaagatgatatggatgtcgattttgttagtgtgtgtccatggaaactttattttgatggatcggtttgtgggaatgggcaaggtattggtatagttttgttttcaccaaatgatatgatttatgagacatcggtccgtttagaatatccttgcactaataaccaagttgagtatgaggctttattgtttggtttacaaagtttggtagatatgggtgtgagggatattgatgcttttggggattcacatttagtagttgagcaagttaatggtgaattcaattgtcttgatggactactgaatagttatttggaccgatgtttggatataattaaatcgcttgacacttttactatttgtcacatatctagagaggataatgttagagcaaattttttagcacagcaggcgtctggctatcatgttaacaggggagtgttttttgtaataaaaaagccggcgtttgttactgttggagttgattcggttggaggcgtaatcagtactgtaacaatagacacaattaatgatctgaccaaacaaggtaagactggttcggtccaacaacagggaataaccgggtcagtaggagatgagttaggtgattggaggagtcctttaattaattatttgagagacccaagtcaatcgagggataggaaagttcagcgacaagctttaaaatatactttgttagatgatgagttgtatcgtcgaactatagatggtttacttttaaagtgtttgggtcctgatcaatctaaagtagccatgggagagcatattattcatagattcggcataccccaagctttaactactgaccaaggagcttctttcatgtcacatcaatttagtgagtttgtcgaatcttttagaattaaattgctgaatttgtcgccttattatgctcaagctaatggacaggccgaatctagcaacaaaattttgattaagcttataaaaaagaaggtagaggagcatccaagaaggtggcatgaggtgttgtcagaggctttatgggctcatcggatatctaagcatggtgcgactcaagtaacaccgtatgagctagtctatgggcaggaggccgtgttaactgtggaggttaatttacaagctcttagaatagccagacaaaatggtttgtcggctgtagattataggaatttaatgatggacaggatagatgacgtcccagaggaaagattgaaggccttgagacatattgagaaagaaaaattaagagtagctagggcttataataagaagaacaacatgggtttgggctatatcaagaccaatggatcatgcagagatgaggctggttgttttgacgccgaagcttatacggaagggaatacaaggtggcacgcatgtcagctgagataa

SEQ ID NO: 85940 - DNA, 1126 bp, Oryza sativa
  Clone ID: PAT_MRT4530_85028C.1
aaaatatactttgttagatgatgagttgtatcgccgaactatagatggtttacttttaaagtgtttaggtcctgatcaatctaaagtagccatgggagaggtacatgaaggattttattggccgactatgctagaggattgttttcgttattataagggctgtgaggcatgtcaaagatttggaaatattcagttagcacctgcagctatgctacatcccattgttaaaccgtggccatttagaggatggggtttagtttttgttggtgagatacatccttcatcttctaaaggtcatcgcttcgtcctagtagctactgattatttctctaaatggacggaagcggttcctttgaaaaatatgactcataaagaagtgattaattttgtattagagcatattattcatagatttggcataccccaaactttaactactgaccaaggggcttctttcatgtcacatcaatttagtgagtttgccgaatcttttagaattaaattgctgaattcgtcgcctttttatgctcaagctaatggacaggccgaatctagcaacaaaattttgattaagcttataaaaaagaaggtagaggagcatccaagaaggtggcatgaggtgttgtcagaggctttatgggctcatcggatatctaagcatggtgcgactcaagtaacaccgtatgagctagtctatgggcagaaggccgtgttacttgtggaggttaatttacaagctcttagaatagccagacaaaatggtttgtcggctgtagattataggaatttaatgatggacaggatagatgacgtcccagaggaaagattgaaggccttgagacatattgagaaagaaaaattaagagtagctagggcttataataagaaggtgagagaaaaatcatttcagataggtgagttggtatggaaaacgattttgcccattggaactaggagtagcaaatttggcaagtggtcaccgagctgggaaggtccttataaagttgtagagattgttcctggaaattcatattttgtgcagtctttgcagggggataagttgcctaaagctttgaatggaagatatttgaaaaaatattatcccagtatatggtagggagcttga

SEQ ID NO: 85941 - DNA, 351 bp, Oryza sativa
  Clone ID: PAT_MRT4530_85029C.1
atgtccagtgccctaagtcttgaggaatatgaagtagttgtttggtcccatatcaaactggcaaatgacaacacatcccttgtccccaacaaaatggggcaattgggcttacgcgacaggcggcggcgcgcggcagggaggagcggcggctcgggccagcgcgcggtggagtcgggcgcgggcaggcgcggcgcggcggccccgaggagcagcggctccgtcgacgcggcggcgcggcggccctgcggagcggcggttccgtcggcgcggtggcacggcggccccgcgaccgaggagcggcggaaaggagcggcgcggctctgtcggcgcgtcggcgcggcggctccgtag

SEQ ID NO: 85942 - DNA, 618 bp, Oryza sativa
  Clone ID: PAT_MRT4530_8502C.1
atggaggcgttcggcgggttcttcgtggacgagaagccggcgcgggtggagaacatcttcctcgagttcctcaggcggttcaaggaggcggatgcggcggaggcgttctacgagacggagctggaggcgatgcggtcgcgggagtccaccaccatgtacgtcgacttcgcccacgtcatgcgattcaacgacgtcctccagaaggccatctccgaggagtatctcaggttcgagccgtacctccggaatgcgtgcaagaggtttgtgatggagcagaggactggcgagaaccgtgcaccaatcatctctgatgatagccctaacaaggacattaacattgccttctacaacataccaatgctgaagaggttgagggagcttggaacagcagagattggtaagctcacggctgtaatgggggtggttacacggacaagtgaggtccggcctgagttactgcaaggcaccttcaagtgccttgactgtggaaatgttgtaaagaatgttgagcagcagttcaagtatactgaggttgtaactgtgaaccttatgttctacttttttctctcatgcaatgtgtctaatgaaaggtttctgctccttaacttcagccaataa

SEQ ID NO: 85943 - DNA, 1037 bp, Oryza sativa
  Clone ID: PAT_MRT4530_85030C.1
cggacgcgtgggcggacgcgtgtatagcactgcctctcctccaagctagcagctcagctaagctccattactacccagcttctcctcatccctctcaagatcaagaactcatcaagaagcctgcgacctcaccggaatcaaatcgtcagtggcggcgtggtcgctgtgacgatggagaagtgcaggtcggtgccgcacgagcactcggcggcgtactacggctgcggcggcgggtacgactacgaggacgtgagcggaggcggcggcggcgccgccgcgaagtcgtacagcttcaacgggccaagcgcccgcgatgacccggaggcgaagcggcggcggcgggtggcggcgtacaacgtgttcgcgacgcaggggaggctcaagtccaccgtccggagcagcttcaagtggatcaagtccaagttctccgacatccgctacggtggcctctgaactgatgaacctaccctgcatatatgcatatatacatatatatgataatatatctatctatgtatgtatactgctacatatatgatacagacttgcatgcatgcatagctaaattaagttgaagctgatatgtgcatgtttgaggagctatgatgaactgtgtgtgtgagtgatctactgatcttgagttgccttatgaagttatggtcaactgccagatcggtgctatgtgttttcacttttttttttgggtcttatgagttgagaaagaagagggggaggaatttgaagaacttgcagtggttgtatcctgcttaatttgcaaattaagttgtatcaactatcaagccaaaaaaaaaaaaacaaaccacggggggggcccgggcccattccgcctaatgaggtggattcccgccctcctgcgcgggttaaaacgtgtggctggaaaccctgggttccaattatggctgaagcaatccctttgcgttggtatgcgaagagcccccacccctccacggtgaccctaaggagtgaccccctgacggattacccgggggggggtcccggaacgcactcccgcccag

SEQ ID NO: 85944 - DNA, 625 bp, Oryza sativa
  Clone ID: PAT_MRT4530_85031C.1
aattaaattgctgaatttgtcgccttattatgctcaagctaatggacaggccgaatctagcaacaaaattttgattaagcttataaaaaagaaggtagaggagcatccaagaaggtggcatgaggtgttgtcagaggctttatgggctcatcggatatctaagcatggtgcgactcaagtaacaccgtatgagctagtctatgggcaggaggccgtgttaactgtggaggttaatttacaagctcttagaatagccagacaaaatggtttgtcggctgtagattataggaatttaatgatggacaggatagatgacgtcccagaggaaagattgaaggccttgagacatattgagaaagaaaaattaagagtagctagggcttataataagaagggggataagttgcctaaagctttgaatggaagatatttgaaaaagtatgatgctatattatctggagagcagcagcagcagattgatggcttggaagattcatgcatgatgaacaacatgggtttgggctatatcaagaccaatggatcatgcagagatgaggctggttgttttgacgccgaagcttatacggaagggaatacaaggtggcacgcatgtcagctgagataa

SEQ ID NO: 85945 - DNA, 430 bp, Oryza sativa
  unsure (1)..(430): unsure at all n locations
  Clone ID: PAT_MRT4530_85032C.1
ttttttttttttaanttttttnanntnntntaaagaaagattacaagtgtatgccgtttatttatctctgttttcttttcctggttttaagtacagtttacagccttctctacttcccaaacaaatgtaccgggcagatcatatatacttccttcgtttcacaatataaggtcattctagtattttccatatttatattgatgttgatgaatcatcaacatcaatataaatatggaaaatgctagaatgacttatattgtgaaaggagggagtactaattaatcagcaancattttatcatctgtccatntcaccagcttcaaagctaactttgtctaatgctctagtacatggacaagttggcatagttcttttaatctatggcagccatcttttgtgtttntcaacctgtccacacctcatggatcag

SEQ ID NO: 85946 - DNA, 687 bp, Oryza sativa
  Clone ID: PAT_MRT4530_85033C.1
atggcagaagctaacgatgaagcgaaatcagattcagaggcagagctacatcttactgttgttctatgtacagataagaagggaaaattgaaaccaagaagagcatcatctcaaattctagagaagcctaaagatgtagatgggcctgaaaataagagcaaccctgaagggcaagtatctgatagttcagactctgattataggcagcctatagagcaaaatagctctgataatgatgaggaagctgaacaactttggaaatttgcaaaggaaatcaagagaaacatcagggcaaggaagctaggagtgcatagcaaccaggctggactcttaagggcagcggctgagcttatccctagagtagaacataggatatgtgcaaggcatatatatgcaaactggaggaaaaggtacactaatcagaagcttcagaaaaagttttggaactgtacaaagtcatcttgtagggagcttttcaactacaatagagcaaagctagcacaagacacccctcaaggagctaaggacatgatgaccaccgcacttgaacattggagcagggcattctttcagctagggtccaattgtgaatccgttaataacaacatgtgtgagtctttcaacaactctatcatggattcaaggttctttccagtcatctctatgaatgaggacaaaggcagataa

SEQ ID NO: 85947 - DNA, 187 bp, Oryza sativa
  Clone ID: PAT_MRT4530_85034C.1
gtttgatcttgcatccatggagtcgggctacggcttccgcttctccgacgacgacgtggtgggagtcggcgagctcgctgacggtgggggagcggctgagcgcggctgtcctggcgatcgccgccattgccgtggacgagttctacggggtcacctacatgctcatctacctagtccagctgaacga

SEQ ID NO: 85948 - DNA, 1378 bp, Oryza sativa
  Clone ID: PAT_MRT4530_85035C.1
atggattgaacatatacacggccgtcacacatctgtctccttccctcgtctcctcagcaatgattcggtccagaaacttgcagagatcctctgctagtacttgcacagagcctcagaccgagcactgaggaagcttaacatctgcctatcttctttctagttcttcccttctttctctctgttgttgcagtcttgcagctgcgccgatttcgtgttctacgaggcaatggcatcctctgctcctgcttgggtcccctacgagccaacgagagattgctctcaagggctgtgcagcatgtactgcccccagtggtgctacttcatcttccctccgccgccgcccttcgacgtcgccggcaccagcgccgacgactcctccggccctgtcttctcccctctcgtcattgcaatcatcggcgttctggccagcgccttcctcctcgtcagctattacaccttcatctccaagtactgtggcaccgttagctccctcagggggagggtcttcggctcgagctccggtggcgctgcttatggcggcggtgccggtagcggcggccgccacggccacgggcagtcgaggagccacgagtcatggaacgtctcgccgccgagcgggctggacgagaccctgatcaacaagatcacggtgtgcaagtaccggcgcggtgatgggttcgtccacaccaccgactgctcggtctgcctcggcgagttcagtgacggggagagcctccggctgctacccaggtgcagccatgccttccaccagcaatgcatcgacacttggctcaagtcacactccaattgccccctctgccgcgccaacatcaccttcgtcaccgtcgggttggcgtcgccggagccggagggctgtgctccaggcgagactggaggtgacaatacacacgaggtggttgtggtgatggatggcttggaaaatctttgtgaagagcagcaggaggcagtgagcagggccagcactgccgatgatgatcacgatgcgaaggacgtcgcagaggggatggaggaggccaatggcgcagccgagatcagagaagaaggctcgccgccaaagaggggcgcgtcgtcgtttgatcttcaccgtgacaaccgcatgtgcatcgccgacgttctgcaggaatccatggaagacgagctgacggcagccagggagagtggcctcctcgcaggcggcgctggcacgtcaagacggtgccatggcgagaacagcaagggaaggggaggccgcagccgacgtgcattgcagctgcaggacgccatggaggctctgccggggaagagattgccctccggtgggagatcctgcttcagcagcaagagcggcaggggaaaagattcagatcatccaatgtga

SEQ ID NO: 85949 - DNA, 1016 bp, Oryza sativa
  Clone ID: PAT_MRT4530_85036C.1
tccaaatcgcgcacgtcctccccttatgatggcgactccctcatttcactcctgatcacttccataccctcaccttgccgcctctcccctcctcccctccctgttactgcatctccccttctcttccctcgtcacatctcacccctcgtgtaatcggtcaccaaaagaacaaggagagatagagatgagccattgtagtaatctcatccaaattctcctggatgaagtattcatcgaatgacgccaaagattttttttttcaatggcacaactagtacacgatcattacatgaataatcatgaacaaaagtgtgttgggtctgtgtttggacaccaagtacttgatcggaatactgaccactggagactgtacattgactacttatcagaagaacctatgtatggccctgtttattttaagagcatgtttagaatgagatgacctctttcttttacgcataatgcatgttgtggaagaatatgataattattgtgcaaaaaagaaatgcatccggtacacttgaattatcatgtttgtaaaagattacaacagtattccaaatgttgagttatggagtagcgtcagatgcgatagatgaatatgttcatattggaggaagtactactacatgaagtctaaaatggctagttaaagctataggagaagttttcagagaggagtatttgaggacacaaaacgagaataacatagctagattacttgcaattggggaaggcgaaatatttctagtaatgttgagctctatatattgtatgcactaaagtaggataattgctttgctgcatggcaaggtatatacggtgcgcatgtgtgggagcctactattattttaaaagttggtgccgtacatgatctatggttttggcatgcttttttggtttaccctgatctcacaatgatattaatttttttttcaatggttgcggtgtttttgcaaagcttgctgaaggcaaatcttctaaagttaattatatcatcaacatgcataactata

SEQ ID NO: 85950 - DNA, 150 bp, Oryza sativa
  unsure (1)..(150): unsure at all n locations
  Clone ID: PAT_MRT4530_85037C.1
ttctaataccttgtctaatgttggctaattgttggtgctcatcaattttgatggttattgattgtgtaccgactttccggtatgctggacttcaagctgtgcagctttgagtctgggccaactgnntactatncacagatactataatat

SEQ ID NO: 85951 - DNA, 1545 bp, Oryza sativa
  Clone ID: PAT_MRT4530_85038C.1
atgagacccatcttcttcccgcacgaattctttcgcccccgggcccccgccgccgtcgcgcgtgacgacgaagccgagggcacgaaacccatcttggcgccgcacgagctttttcaccacgaggctccggccgccgccgccgccaccgtcgtgcgtgatgaggagtccgacgaggagcccatcgtaggcatcgtggggctcgagatgtccgacttccaggtgatcggcgagctcggcgggggcttgtacaacgtggtctacaaggcgcggctgcgccggtgcccccacggcggcgtgttcgcgctcaagaccccgtactacgacctcggcgggagggaggaggacgaggcggtggcggcggtgctccggcgcgtggagggtctggagcacgtcgtccggtgccatgccatgttccgccgcaacgagtccctgcgcgtcgcggtgttcgagcacatgaacggcggctcgctggaccgcgccctgtcccgccgcggcgggcgcgggctgccggagcccgccctcgccgaggtggccgcggcgtgcctcgccgcgctgcggggcctccactcccgcggcgtcgtccacctccacctcaacccgttccacatcctcgccgacgccgacgggaacatcaagatctgcgacttcgacgacgcgaaaatcatcccgccgggccccggctcgaccgtctactccggcatcggcttcggctcgccggagtacatgagccccgagcggtgcgcgcccatggccatggccggcgcgcgcgtcgcccgcgccgccgacgtctggagcctgggcatcaccgtcctgcatctctaccagggatactgccccgcccggcctctcccgtcgaagaggacgctggagaggctcagctacgagatcagccacggcgagccgccgtcggtgccggacgaggacacgagggcgtcgatcgagctgcgcgggttcgtgtccgcgtgcctgcagaagtgcgtgtgcacgcgcgccacggtggcggagctgctcaaccacccgttcgtcgccgaacgggacgtcgcggagtcgcgccgcgtgctgaaggaggccagcacccagtgcaacggccgcgccaaagcctgccccgtcttccagcttccgtccttctcactcgccgagctctccctcgtcgacgcgtcctcgcgccgcgcgtcgaacctcctcacgctcggatccacggaggaggatcagcaggaagcggacggcgccgaggaccccgccctggtgttcgacgtcgacgacgagggggagatgagcgtgctcctggctgcggcggcggagtacgcgcggcggatgcggcatgtgggcatgcaggtggtggcgatgacgtccaggtatccagaggtgggctttggggaggcgtcgttcacggaaccgtccccgaccaacggccgcatccgctaccactcgccctcggcggccgagctactcccggccgatgaactcgtggccaccggcccctccgccgcggatgccgtgaggatgcgccgcttctcggccgctgttggcgcgctgcagaagtag

SEQ ID NO: 85952 - DNA, 370 bp, Oryza sativa
  Clone ID: PAT_MRT4530_85039C.1
atgtgggccccacatggcatcttctccatttcttcttcttcctcccctcccttctctctttctttctccctctcccctacggccgtccgcggggagcgagcgacggcggcggccgtgggctggagctgaagcggcgggctggagtccatgtcacgccgctcgcaccaccaccacccgcaccacccagcggacggcatcgagacgtcggcggcggccgagcgacggctgtggcagcccgcgggcggcggctgtgggcggcagcgggagggcaggcaggcgggcgggcgggcaaggtctgcggcggctcacggcagtgggaggacgaggggaacggcggcgggcgggagaagcaggccacggcggtgacttc

SEQ ID NO: 85953 - DNA, 742 bp, Oryza sativa
  Clone ID: PAT_MRT4530_8503C.1
atggctaggtggttctatcacaccatccccttcgaggctggcacttactcggcgaaagccctccgttgccggcatagggcgatcgcgcctaactggaaacccaagatcgccgtggacggcgctatggaggcgcggttcgttctactgcggaaggtttgctcccgccttagctgccgtgacttggtggaggaattctgtatgcttcgcatctttcccctctcccagtcatggcaagttacagttgatcaaggcgaagaggttgacggtttgccgaacctgattcttcctgaagggacagacacgttgaccctcgaccaggctgaaaacgaggcccgcaggatgatcggcgacgtgtcggtcgtcgacttgcccctaggagaggaggaagaggaggaggccgtggctgataaggccgcgaacgaggcgatcgaagaccgcgtcgacaccctcggctacactcctaccccaagtcctggtcacaacgagaccggggtggagtttaacagctcccaccttcgacggaaggatttggaaggggccaaggccctagttgcgttctcctcgggcaaggcggcgaagggaggtccggtgcagaagatctctaaaaagaaaggactcgtcgacatcgcccgcgttttcagcgacgacgaatcttctgacgggactccaacttcgcccgctggccgcagtttagacctttcgactgctcccctcgctccgctcggcgttgctggggcaggcg

SEQ ID NO: 85954 - DNA, 537 bp, Oryza sativa
  Clone ID: PAT_MRT4530_85040C.1
atggcatcttctccatttcttcttcttcctcccctcccttctctctttctttctccctctcccctacggccgtccgcggggagcgagcgagcggcggcggcgggagctagctggagcggcggcggccgtgggctggagctgaagcggcgggctggagtccatgtcacgccgctcgcaccaccaccacccgcaccacccagcggacggcatcgagacgtcggcggcggccgagcgacggctgtggcagcccgcgggcggcggctgtgggcggcagcgggagggcaggcaggcgggcgggcgggcaagggcggcggcggctcacggcagtgggaggacgaggggaacggcggcgggcgggagaagcaggccacggcggtgacttcgaaaccgcgcgacagaaccgcgtggccccacggcgaggcggaaccactcgaggagaggaacgaggaagagcacgccgccgaggaggtcgcctcacgccgtcaccccccgccccccacccgacgcggccgtccaccgagaggagaagcaccatga

SEQ ID NO: 85955 - DNA, 279 bp, Oryza sativa
  Clone ID: PAT_MRT4530_85041C.1
atggtcgcacgaatgaaaaaattacaggctcaatcacacatgagtgataaaattactcacagccagccacatgaagcacgatgtgtaaatgtaggacctgtgcaatccattaattcagataaggttcacggaagaggtatggctgttggtggaggtgaagagttttggttaccaactgggtggctcactaacgagtatggcggtggcctcggctcatcaatggccgaggtggagaaggaggaggaaataaatactctccaatcagtcctattagagtag

SEQ ID NO: 85956 - DNA, 469 bp, Oryza sativa
  unsure (1)..(469): unsure at all n locations
  Clone ID: PAT_MRT4530_85042C.1
gttggagaactgctgtctctttcattaaatctatttctctctctttctttgacacatggaatgactacgatgctgtcttcttcttgtgctcgagggcggtggttggggggcagacactgggactacgacgtggacgcaggggagaaagcgtcgtcttctgctgttccgcctacttggcgccgccgtacggggaaggagggctaagcgggaaagctgggccgcttggtatcctgatcatgggtgcaccaatggactccaacctcatgaacgtgcggtcgcatgtcacggcgacggacacgaccagaagcacgtgtgaccaggtgattactctgggggacaaggacgagcctaaaccggccgatggtgctgcgactagcaatgacacgctcaaggatgcttgctcatcccgagagcctgcttaacagnaggatcaccggccactacagctgcacagagaatggccacatgg

SEQ ID NO: 85957 - DNA, 505 bp, Oryza sativa
  Clone ID: PAT_MRT4530_85043C.1
gcacgagggtcgtcaactacgcctactccttcctccgccgcaactgcaggcagggcgacaagatgctcgccatccccaggagccaactcctcaaagtcggcatgtcctacgagatctgatcgatctctcatgcatcccccatccattccttccttaattattgctttcatttcttcttccttgttcattatttcaatctcgatccatctactcttcttcatttcttctctgctactcccactggttatggttagtactagcagctaagctagcttcataactataagtgcctttattgatgcatgcatgccagtatatatagtgatcatatatatacatacacatatactagcggaggagtatgtaactagttgctagtattgctgattgataattaattgtacaattggatgcatgggatgggagaccactgaattgatccaggttcttcctacatgtttgtatgtatgtatgcttgcacagatatattgatcatatgattgtc

SEQ ID NO: 85958 - DNA, 309 bp, Oryza sativa
  Clone ID: PAT_MRT4530_85044C.1
gccagccgttcaggccgccttgccgacggaactggggcactacatgggctgccgttggtgcgcccacacgcatacagccaaaggtctacctctagcttcatcaggtacgggttgaggaacaaaggccagctcatacaatgattggtgcacaaacaatagagcaggtacctattcaactgggatgtgaagcgcactctgcgtacaagtgtcgaacaaggatgaatttatgtttagatgcttgataaatttcggatttgtgacgagaatactcccgatgggaaactatctcaatgatttatatggacatga

SEQ ID NO: 85959 - DNA, 420 bp, Oryza sativa
  Clone ID: PAT_MRT4530_85045C.1
atggatagggatagctggcgtgaaggggcagtcgctggaatagagccactttttcccaatagagccactttagtcccggttcttaaccctaacctggtatcgccgccgccacgccacgccgcgccgcacgccacgccacgccacgccgccgccgccacgccacgccgccgccgccacgccacgccgccgccgccgtcgccacgccgccgccgccgcgccaaccgccgccccgatgccgccacaccgccgttaacgaacgagaacgagaacgatcgaacgaacgagagcgagaacgaacacgtcaacgtacgttgccgcgagaacgtgaacgataacgagaacgtgaatgagaacaagcgaacgaacgtgaatgagaacgagcgaacgaacgtgaacgagcgaacgaacgtgaacgagtga

SEQ ID NO: 85960 - DNA, 168 bp, Oryza sativa
  Clone ID: PAT_MRT4530_85046C.1
atggcaactgtggagagcgcccactacatcaagacagagcacctcgtccctctatctgagcagcaactggtggactacgccgacatcgccttgaaccacacatctaggagggcattggagtggattgccgagaatgacgggatcaccatgcagttagactatccatag

SEQ ID NO: 85961 - DNA, 522 bp, Oryza sativa
  Clone ID: PAT_MRT4530_85047C.1
acgggaaaaactcttacattaaaaactatggatgccaaccagcaatgaccagtatagacgatttggttacaaatgtaagagatacattgggttatcgcacctactagaaaagactagaaggctaatagctaggataaggctagaagtcctactagaatactaatctaaccaattaaaaactaatacaaacatattacatgctgaaattcggataacatgtttgataatcttcatcttgagacgaatttcccttttagcataagcaccttcatcctccaaacaacctcatgcagacaaactattgtgcgccaattagtcacttggactataaaattgtaacacccttgattcagaagaggtagatcatatttcaaatttgccatcggcaataaatcctaaatctatggtatcaattggtgtgtgaaccaaaccgagatgcgaaacctggtgcacaaacttcaaactcgccatgggaataaaatcctgaatcttctatatgaaactcttgtactgaaaacgaaa

SEQ ID NO: 85962 - DNA, 1436 bp, Oryza sativa
  Clone ID: PAT_MRT4530_85048C.1
gaggggagcacgcgccgaagcgacagcgcgaggtcgagcaggtgaagcgagtggggagggagggagatggcggggggcgggggcgcggggagtaaggtgtcggtcgccgccgtgcagttcgcctgcaccgacgtcgagtccgagaacgtcgacaccgcggagaggttgataagagaagctcataagaaaggagcaaacattgtccttgttcaggaactgtttgaggggcagtacttctgtcaagctcaaaggttggacttctttcaacgtgctaagccttataaagggaacccaactataatcaggtttcaaaaacttgcaaaggagctggaagttgtaatacctgtcagcttttttgaggaggcgaacaatgcacattacaattcagtagccattattgatgctgatggcactgatcttggcctgtaccgcaaatcacatattccagatggaccaggttatcaagagaaattttatttcaatcctggtgacaccggcttcaaggctttcaaaacgaagtatgctacaattggtgttggaatttgttgggatcagtggttcccagagtgtgcaagggccatggtgcttcagggggctgaaattttgttctatccaactgcaattggttctgagccccaggataataacctagattcccgagaacactggaagcgcgtcatgcaaggacatgctggtgctaacctggttccccttgttgcttctaacaggataggaagggaaaccgttgagactgagcatggtgaaagcactataacattcttcgggaattcattcatagcagggccaaccggtgaaattgtgaagcttgcaaatgacaaagatgaagacgttcttgtagcagagttcgacttggacgagatcaagtctaccaggcatggttgggggatatttagggaccggcgtcctgatctatataaagtgcttctaacattggatggcgagaaatcatgataaggtccacctttgtggagtcatctatccttgaaaaggtacatgagctccacaacattgggaggacatacacagggtccataaatgctgccactacaatcatggtagatcacccctcttcccttctcaggaatctctgttgtacacggcttctctgtgtttgctgcttagtgatttttcaccaatttccgattccacaataaaatgctcgtggtgtgtcgttctggcagacaattgagaatataacatattaaaacctctatgttatgcaccacaatgtttcttttttttttgaggggtacaccacaatgtttctcgaatcattttgtttttgaaactgggtttcttgaaacatttcgatctgaaacggagtttctgataacattattgtgctgctgctcaatatttttcgtgccggattcctgcaatggatcataactagaagaataaaaaaaaaaaaaaaa

SEQ ID NO: 85963 - DNA, 640 bp, Oryza sativa
  Clone ID: PAT_MRT4530_85049C.1
ttcaaacggttgagctcctccagtgcaacatcctagttctccatcaaaatgtcagttgccagctttccccacagggcactcaagctcctctcaatgtttgtgcacagagcacggtattgatgcaagtactgagcagcaaatgagtaattcccacagtcaaactgaaatttggcatactgatacagagtctcaatctgatcaggaccaatctgctggttctggtggatgttgtcgatggcctcgccgagcgaggtgagcctggagacgacctcggcgcggcgcttgaccatgtcctcggggacgtcgtcggtgccgtagcgcgacttgtggatgtccatggcgtagtcgaccatgttggtgccccggaggaggcggatcttcgcctcgaggatctcctcctccgggtagaggtgccgctcctgcaggaactccagcagcgggagcaccaggtggcagtccaggtgccccgccatccgcgccgtcaggtcgtgctccgccatggccgcttccccgcctcccctctccggtggattggtgcgcgtaggcgctagggtttttagggttcgcgggttggtggcgcggaaggcggaagagcggggaatacacgggactggggtgagtgggtttgtttcctggccgg

SEQ ID NO: 85964 - DNA, 225 bp, Oryza sativa
  Clone ID: PAT_MRT4530_8504C.1
gcgcaaagttttgcaagttctgaagcaccaatcaagtttctggcattttggaagtcgcatctgttgtaaacctggtcttgtttcttaatttcgttgcagcttacagtttaaaacattaaatttgtcgaacacttggacaaagagctctctggtttgtaccatgggagtgaggattatgtattcgctcctatattggttatcatgctggcactattttctgctgtt

SEQ ID NO: 85965 - DNA, 359 bp, Oryza sativa
  Clone ID: PAT_MRT4530_85050C.1
ggctatggaagtggaggctaaaaagatgaggcgagaggtagctgctatggagaaggaagttgctgctatgcgtcttgacaaggatcaagaaaacaaggctaagcggcctggaaatttcaaaggacctggaaccacttctcaggcgcctcatggaagcagaaatgcaccacggggtgggttgactcggaaccttcaataacatacctctaacaccagtcagcatgaatttcttcgatagtttcggatttccctttgtatttgttcctctgttcgtattaattttgggattgagatagcacagatgaccctgcgacacctagattggggaaagagtaggcttgcatctgacatcggctttg

SEQ ID NO: 85966 - DNA, 450 bp, Oryza sativa
  Clone ID: PAT_MRT4530_85051C.1
atgggcgacaacaacaactgcgtggctacggtgactacgacaatagtaaaggcttcaaggggagaggatccactcgtcccagtctcaggagcgatgctggtgaaggaaaggcaagggatggcagtggaggtgcaggatccaccgccccgccctgcgatgggtggatctatagagggtggtaaaggagtgctgaggagaggcggcaacggcttctggggcagcgacgatgacattggactgtgccggcgacgacgacagtacgaatgggagctcaggtcaggccatgacccgggcagtggtgtgtcacgcttgacggctgtggcacagatctggcaaagagatcggccgataagccttatatcaatgcagatccaacaactggcccaacaatggtgcagatatggtgtcaacgtgagcagcagggtggctgtggtactgatccaacaatga

SEQ ID NO: 85967 - DNA, 441 bp, Oryza sativa
  Clone ID: PAT_MRT4530_85052C.1
cccgcccaacattaccatgggccaccatggatccgtgttagcaagtgacatgatgcaaacgtttggcatgggttagctccacaaccaatgttcatgttcccaccaatggcagctcctgcaagcacaaatgtgtgcatgcagctacataggcatgatccctcagtccactgtggcaccagttgccagatgatcagagcaatgcaacaagttatttgtgctggactcggcacagcagatgatgaagatggcgatcagatccatacatgtgcaacatggcccctggtgcaactgtccaactctcttcctgtggttgttttgatcaacgttggttacatggtactctagtaataaggtgttgcatactatgcgtggtgccaacactagaaataagaaccttgaatgaaaatgatgcatgcatgtttgcaggactggcaaaaaaaa

SEQ ID NO: 85968 - DNA, 225 bp, Oryza sativa
  unsure (1)..(225): unsure at all n locations
  Clone ID: PAT_MRT4530_85053C.1
ccacattcaaatattatagttgaagcggggtagtagaatccaacaacaatgaagatcattttcgtatttgctctccttgctattgttgcctgcagtgcctgtgcgcggntgttgggcgccagatggctgttgctgttgtccatagtctaatgagttctgggcatgatgatggaaattgatggggggggtggggntagtttgttgcttgatgtgttatcctaagat

SEQ ID NO: 85969 - DNA, 1178 bp, Oryza sativa
  Clone ID: PAT_MRT4530_85054C.1
ggccagtgtacaagggtaagctacctgatgggagagtaatagctgtgaaacaactttctcaatcatctcatcaggggaaaagtcaatttataaccgaggttacaacaatttcttctgtgcaacacaagaatcttgtgaaattgcatggcttctgcattgacaacaatgcacccttgctagtttatgagtaccttgaaaatggaagcctagatcaagcactcttcagtgacagcaacttaaacctagactgggtaatgcgcttcgagatcattttaggaatagcaagaggcctaatttatcttcatgaagagtcaagtatacgcattgtgcatagagacatcaaagctagtaatgttctacttgacactaatctcgttccaaagatctctgactttggacttgccaaactctatgatgaaaatcaaactcatgtgagcactagaattgcgggcacattgggttatctagctcctgagtatgcaatgagaggccatttgtcagaaaaggctgatatttttgcattcggagtggtcatgctggagactgtcgctgggcgaccaaacaccgacaactccctcgaggaaagcaagatctgtctccttgaatgggcatggggcctgtatgaaaaggatcaagcacttggaattgttgacccaagtctcaaggaatttggcaaggatgaagcttttagagccatatgtgttgcacttgtctgcactcagggctcaccgcaccagcgaccgccaatgtcgaaggttgtggcaatgctgactggagatgtcgatgtggctaaggtggtcaccaagccgagctacatcactgagtggcagcttaggggtggtgggaacagcagcaacaccactagcagctacgcatggtctagcaaccctgagttgagtaggcaaaaagagatcactgaagtttctctccaggtgaggtgaatttaatgtagaaaatctatgggccatctatattggtttgaaatgacgatattgtaactccttttttttacataattttgtaattttgtgtcgatgtgagttattgcaaacaatggaattacttatcctgaatctttcctggtaacaaaagtttgctcctaataatttgtaaatggtgaataactgtggtgtattcactactcaaaaaaaaaagttaatagataaccttttatctgt

SEQ ID NO: 85970 - DNA, 399 bp, Oryza sativa
  Clone ID: PAT_MRT4530_85055C.1
atggtagtggacaagctccgcctgcgcttctggaggacggagaacggcagcgtggccatgcccacggcgaagttgaagaccttgcggttagcggcgacgccgccgccggtgggggagaaggaagactgcgcgggcgtggccactgccatgcaggagattcctagcagcccgcgtggggagacggagctgctaggctgccgtggccagcttgggtgccgtcgggcgtcggaggaggagggagttgggggtggcggcagcggcggccatcgcagcggaatggagaagagagtggttcatcggggaccagcaaccggtgttgaagaagaagagaggatcaaaccaactggcacgcctttgaacccaagagcaagatttagcacctgcactggaattaagtag

SEQ ID NO: 85971 - DNA, 1479 bp, Oryza sativa
  Clone ID: PAT_MRT4530_85056C.1
actagtggatccccgggctgcaggctatgtctcccgcttttctagtctggcttgacattttgtggtgggggcatcatccctttcactctcaagtgcttcagatttcagtcaatccacactgtaatccccattgctagtatctctctctcgctctctctccgcctttaaaataggctcttgtggattgttgagaaagttaagtgcccctgttgcaaggttctttgaggcttcgatcccgataagcgttcgaactggtcggcctccacctattctgtgatttggcttcaaagccagccaaaaaaggtctaattctccggccacaagaagatgtcaaggtacctgaagcagtacgagaaggaacacatgaagatggccatgttgaggcaggaggagacattcaagcagcaggttcaggagctgcaccggctgtaccgagtacagaagctactgatggacgccggctctgcaatcacaatgcaaggcatcagttgcatacctgaagacgattatcatgcagaggagaacgaggcagggtcgagcaggccatggcacaccttccctgggagcgacaatgacaagccacaggctcacactagtgttcttgaagagagcgagctggacctgacgctagcgatcgggaggacgacgacgaccaagaaggaggcgccgtcgtctagcgtggactcgaggacgagcaactcgtcgtcgtcgacggagtccggcagcaccaactgcagggcggtgatgccgcaccggccatctcggttggggtcgtcgtcggcggtgaaggttgttgctggtggccccggtgttgggacgacgcagcagcatttggacctggagcagcaggacgcgctgaagcagcctccttggctccacccttggccagggcggtccaacccagctgatgcactggcaacccgcagttcccagatgtcgctctactacgtacccggacagggaggacttaagtatgacggttgtgagaaggggaaatgtccgaactgccccgcaaccgtctttgggagagcatctggagcgtcgatgccaaaccctaggatcaacggcgatcagaggggttcgcccgaacctaggctgggccctcctggcctggccttcgatgttggcggtatagaatcgacatttaacagccgccaacagtcgttgatctaccatccgacttccaccgagaacaaggagccgactgcgaagtctattgggtttactcccacatcggcccaatatgaccgggtggcccatggttggtggactgggctgcgcactctaacaagagattgttgggcccgatgtgtgacgacggtggagattgttgagtttagtctcacatcggtaattgatgatgggagagcacgacttaaaagtgttatgctgaaggacaaaactggatgcaacggttgcaaacttgatgatactcaacgcatctcctcatacaaattatgccccatcgacaagacctga

SEQ ID NO: 85972 - DNA, 109 bp, Oryza sativa
  Clone ID: PAT_MRT4530_85057C.1
cgactaatggttggatatgttagcagcgattttgggaaggggcctttctaacatctcatggcttcagtacccgcaatgcatgaccgtgacaatgttgaggccttccgcc

SEQ ID NO: 85973 - DNA, 2385 bp, Oryza sativa
  Clone ID: PAT_MRT4530_85058C.1
ctgcaggaattcggcacgagggcgaatcgctcctcctcctcctctccggctctctctctctttcctccatccgaaacctccaaaggcaggcgagggcgaggcgaggcgagggctatcaatggagtcgcgaggcgagggcgatggcgaaagagcctcaatccggcgagggcgaaggcgagtaatggggtcggagggcgagggcgagggcgaaggcgaaggcgaggaggtgaagtgggcgatgctcttcaccctcccgatcccggtcaccgacgaggagcttcctccgaccagagacctggccatgagcaagcagccgccgccgctcatctcctttctctgccttccgcagcggagcctcggcgaggccgcccactgcttcgttgagatagtctgcgcggattctgctggtcggcttctcttgagcgccaagccgcggccagcaccggccgcaaccacctctgctgctctgcctcctcgtcaaggcgtcatcatcatctgcgacgccacaaacctcaaggtcatgcgcctcccgctgccagtcggcgcgacttgtgatgacaacgagcgcgggttcccatgcctggcggtactcagcgatccgcgcgacgaggaggatggcgatgcctacatcgttgttctactccatgcggacgcgagcggagccttccaggaggttctctgctatgaatccaagaccggaggagtactcgacacacagacccatgaccaggactggagcgacacggagacccacgaccaagactggagtgagaagttgctgtcctgcaattcgcagcagccaccgaggggttggcacagacacagccacagccaccgtgcgatacctctcgatggcgaggtctgttggattgatgctgcttatggtttggtgctatgtgaagttctgttggaggatcccaggcttcggtacgtccagctcccagaaggctgcacgatggatgaagacgatgacatggggtcgcctgctgttgtagagaagcttaggagacgttgtattggtgttagtgatggcaaacttagataccttcagatagacagttcaggacagtcgattgccgtgtggaccttgatgactcttaaggatgtcacattttgggagcatacattctcagtcgatttagtatctcttcgtgctgataagagtttccaggaagcaggactgaacccacacatattcccctcagtggcaggcattcatcctatcgacactagtaccattttcttagtgcagaactcaatcatattttctgtcagctcagatacaacaacttcttctatcaaagttggtgatcaccacaagttcctgctcaacgagaatgagatcactccgagtctgtttctccttccgtggctggttcatgacccagcagacctgcttccccaagagacaccaccgagatcaaattgttcaaagagatggcttcgtgcccttaaactaaagcaagcactcaagagggggatcgtgtggctgagtgataaccatgaagttgtaactcacgttggagatgtaatagattttcttaccattcctgctggcggttcctttagatctgcagctatttgtgtcaagaaggttggttcctattgttcgaaaacagggaagatattgaaatttcacaattcgaggttacatgcaaatgatccggtcaaggcattgccaatggaagatttccaaatcatcaatgacgtggatgaagatgtcgagtcattgtcaatggaaggtatccacatcgtcaaaaacgtcaatgaagctagaaggtttatcaatcagtggattagctgccagcaaccacatagttgtataatggatgtggctaagtctgtgggtgtggaagagtgcattaatatcttgacgtaccttgggggtgaaaatgccacgttcatgctgatgaattccccgacattccttgagaaaaccggcaacaacttacgcaagtcttctgatttgaaggagtgggtctacctaaaagagtagcagccatttactggagacttatctgactgtataagaggaagacagatacacggagcagaacctctcatgctgcaatgtagatgcggtctagaggaagacagaactacaggagcctccacttgttcattcgtctcttcagaaatttttgttgcttctgatcgaatgacgcagaattggttgccttctttttgtaaagatagtagataggcacatgctcagaagccaaaagaaagccgtcaacttttttgttttcctgttactatgtgttggccattatgccgtgaagtttacaactgctgaaatttccactaggtagaatgtgcgcctgaacattttgtgttctgaaattaatttgctgtagtttccacggttaaaaaaaaaaaaaaaaa

SEQ ID NO: 85974 - DNA, 1407 bp, Oryza sativa
  Clone ID: PAT_MRT4530_85059C.1
atggggtcttcggccgagccgccgccgccgtgccacgtcgtggcggtgccgtacccggggcgcggccacgtcaacgcgatgctgaacctgtgccgcatcctcgccgcgcgcgacggcgtcaccgccaccgtcgtcgtcaccgaggagtggctcggcctgctcggcggcgcggcggccgcggcggcggagggcggcgtccgcctcgaggccatccccaacgtcgtgccctccgagcacggccgcgccggcgacatgctcgggttcgtgcgggccgtgtacaccaggatggaggcgccgttcgagcgcctcctcgaccgcctcgctctcggcgcggcgccgccgccgcccgccgccatcgtggccgacacgttcgtgctgccgtgggcggtcggcgtcggcaaccggaggggcctgccggtgtgcgtcctctcgccgctcagcgccaccatgttctccgtgcactatcacttcgaccgcctgcccacggccaccgacatcgccgatggcgatgaggtcggaaactacattcctgggctgaaatcgatcaggtttagcgatcttgagcccacacacacgaacaagaacatggtagacctcatcctcgaagcctactcccatgccagaaaagcacagtgcgtcatcttcacctccttctacgagctcgagagcaacgccatggacgctctccggcgagacctcccttacccggcgttctcggctggcccttgcatcccatacatggcgctccaagctgacgaacaccacgccggcgacgaggaagaagagccatacatggcgtggctggacgcgcagccggtgggctcggtgctgtacgtctccctcgggagcttcctctcggtgtcacggccgcagctcgacgagatcgccgccggcctcgccgacagcaaggtcacgttcttgtgggtgctccgcggcgactccggcgcgcgagacatcctccgcggcggcggcggcatggtggtgccgtggacggaccagctgaaggtgctgtgccacccttccgtcggcggcttcttcacccactccggcatgaactcgacgctggaggcggtgcacgccggcgtgccgatgctgacgctccccatagcgttcgaccagccgatcgtcgcccggctcgtcgccgacgagtggaggatcgggtacggcctcagggagaacggggacggcggcggctgcagcggcgtcgtcgggagggaggagatcgccgcggcggtgaggaggctgatggtgatggattccgatgcggcggcggcggaagaggcgaaggagatgaggaggagagcttcgctgatgcgagaggcctctcgcgccgcggttcaagagggtggttcttcctacagagacgtgacgtctctgatcaactacatttcagagttcaagaactga

SEQ ID NO: 85975 - DNA, 2172 bp, Oryza sativa
  Clone ID: PAT_MRT4530_8505C.1
gtggagcttccacagctgagcccgttggcgcttgttcggatcgctatcttcgattgggcgtgccggacttctgggtttgagcctaacgccgagctcttcggcgccatattcttcgccaccgtgaactcaaagacagcgattaccccggctgggacgaagaaaacagtgttcgggagcgtgaactttaacgttcgtcccgagcggtccgatctctcaccggtgaacgctgccatgtcgaagtcggaccgccattggatagctcggtggttctatcacaccatccccttcgaggctggctctgacttggcgaaagcccttcagtgccggcgcaaggtgatcgcgccgaaccggaaacccaagatcgccgtggatggtgctatggagacgcggttcgtcctgctgcgcagggtctgctcccgccttagctgccgtgacttggtagaggaattctgcatacttcgtatctttcccctttcccaggcatggcaagtcacggttgatcaaggcgaagaggttgacggtttgccgaacctgatccttcctgaggggacgaacatgttgaccctcgaccaggctgaaaacgaggcccgcaggatgatcggcgacgtgtcggtcgtcgagtatagccagctgctaacacgacaagcggctgggcgggcgaaccagcttgcccctaggaagcgaagggtccctgcttcgtcggactccgacgccgacgacgaggacgataccgaagaacgcgacggcgaggagaaaggagaggaggaagaggaggaggccgtggctgataaggccgcgaaagagacggttgaagaccgcgtcgatacccccggctacactcctaccccaagtccaggtcacaacgagaccggggtggagtcgaacagctccccccttcgtcggaaggatttggaaggggcgaaggctctagttgcgttctcctcgggcaaggtggcgaagggaggtccggtgaagaagatctctgaaaagaaaggactcgtcgacatcgcccgcgttttcagcgacgacgagtcttctgacgggactccaacttcgcccgctggccgcagcttggacctttcgactgctcccctcgctccgctaggcgctgctggggcaggcagtaacgccgccgccggggcttcagcctccgccgaacggatcgcgtcgactgcggcgagggttttcgggagccctctgcgtgagccagctatttcgccgctagtcaaggcgaagtgtgcggccgccaaaacatctgcctcggagtattcccttgcagcgccccacttcgcccctggtgatttcgagactcgagcggacctttttccctttgtggaggggattcttgtggctcactgttcgacggagcgaaccatgcgggcccgttttgacggttttaagagccgtcttcaggccaaggacgatgaaataagccgcaagaatttggaggtggaggccctggccaacactcttaaggaggcgaaaactgaagtcaaacgccttcagtccgagctagataaggggaaagaggccagggccgaggttgatcgactcaaggccgaactggagaaggagaaggcccattcggcggtgctcactaattactacaatcttactgagccgaagatggagctcttcgccagaaggctagcagggccgaagcgagcacccacggaggagtcgcagcggttttcgtgggagatggcaaagaccgccgaatccgcgagaacggcttgccaaacgctccgcctcgcccttaccgacatgggcgcgaaggtgcggggggtccctgccgaggatgcctcagccttcgacttctccgagtggacccagcaggctggcggatcggtttcggactgcgccaccgcgtacggcgattgctgtgcgcgtgtatcggcggccttcaccttaggccttttgcagcagttcggctgcgagcacgtcgcggagttccctacctatgcgaagggggaatgggagattagtgcgcagaacatttcgcccgctcttcgtgcgtggcgaaaacagttctggcagaaagacggccggtccgctgccaaggcgcgccttctggagcaactggcgaaggcgaaggcggcaggtcggggcgaaaaaaagggcgcggcgggcgaagaggttggaggcgatgcccaggatcacccagaggtgtga

SEQ ID NO: 85976 - DNA, 1840 bp, Oryza sativa
  Clone ID: PAT_MRT4530_85060C.1
tgcagtgctcgattcgatagtgacaagaggaaaagcgcggctctctccgtctccggcggcggtgacgcgaggaggaggaggaggaggagcccgcgccgccgggccaagccatcatggacgaggagcagctgcgcgcgctgctccgcgacctggacgcgctcaagcagcgccccgaccccgccgccatcgatcggatgcgagagcgcgtggcgggaatggtgaccccggccgccgctgcacggtccaagatcaaggatatgagctcggaggtggtggacagcaatccctacagcaggctcatggcgctgcagcgtatggggatcgtggacaactacgagcgcatccgtgattactccatcgccatcgttggtataggtggcgttggtagtgttgctgctgagatgctcactagatgtggcattggtcgccttttgttgtatgactatgatacagttgaactggccaacatgaataggttgttctttcgcccagaccaggttggaatgaccaagacagatgctgctgtgcagacactatctggaataaatcctgatgttacgttggagagctattcattaaatattactacagtgaaaggatttgaaacatttttaggaagtctcaaagccagaagctctgatgggcgtaacactggagttgatcttgttttgagctgcgttgataactatgaagctcgtatggttgtaaaccaggcatgcaatgaacttggccagacatggatggagtctggtgtctcagaagatgctgtttctggtcatatacagttgctggttcctggtgaaacagcatgttttgcatgtgctcctccattggttgttgcatccggagtggatgagcgcacattaaagcgggaaggtgtttgtgctgcctctttaccaactacaatgggtgttgttgctggtctccttgtccagaatgctctgaaatatttgttgaagtttggacaagtttccccttacttgggatataattcacttaaggattatttcccaacaatggaaatgaaaccaaatccacagtgttcaaatccagcatgtgttcagagacagaaagaatatatgcagtcaaaacctgctagagatgcagcagcaaaagctaagatggaagctgaagcatcagcagcagatgaatgtccggtccatctagataatgattggaatattagtgttgtcgatgacagtgacacagtgacaccaagcattctaagcactggagctgatagcctcccagaaggccttgtccgcgaactcccaactgcagattcctaccaagaaccagttgctccagttacatccggggctattgatgacgaccttgaggagcttcagcgccagcttgatgccctaaactcgtcttaatgttttgtaaaagctggaccgtcatcattaacttggtttctaccaaagctcaacactgggttagaaaaccaacctgggtactgatgcttgtgtttactccgacagagttacccatttcagtggatatagcttctgttcataccaaagaggttgaagggttttaagttacttacctgtactgttttgagcttttgtgtacaattttgccttgagttaatgtagattttatgaggctggaaaattcactgttaactaatgtggacgctctgctaattaccgataatagttcaaaaagaaaagtagaaggcattcgtccagaactgtgatgtcatgctgtaataggcttttgccagtgctgtccgtaaacctcaataagcttagctagttgtgtacttgtgtgtctcggcaaaatatcttgcgtatcctgtcagtttttctattataaaatctaaacttttgct

SEQ ID NO: 85977 - DNA, 1660 bp, Oryza sativa
  Clone ID: PAT_MRT4530_85061C.1
ttttttttttttttttttttatagaaaaaaattccattcctccatttgtgaaggaaaagaatagaaaaaaataataaactccaccccaagtggttgttttttttcttttggtttttcttgtttcaacaacatagtttaattttccgtttttttttttttttttttgaaccacttaaaagatactatattagatttggaattcaacaagttgaaggtttcactgtatttacatataagaagaatggatccatgttacatatcagtagagaaacgcctagggtcttccggctagctccacaaggtgatgggctagccggcttgggttcgaagcctcacctcttctatttatttgatattaggtccttccctaatattcatgtttttttatgttgcataccagtacatgacacaacagacttatgacagaaaatgagccagagtaactgactcaaattaatgtgctggtaataggcagcgaacaataagcaaattcaattcaagataccgaccggtactcaatgagatgaaaggatttgatttgatatggttcagggagatggagaggtggcgaggaggaagacatggatggcatgcataagaccagaggcatcgggagatcggcagctaggagggacgtacttggccgcgtgttccatggtatactcgccgatctcagctgcctcgccaccgcagcgcagccacagggcctccatgtagctcgtgtgtgcgaaataggcctccgcctccactacctctcctgatcctccctcaactaccacggtcactttgcgccgctcatacacacccaggtgggtgccctcgagggcatcgaggtcaactagggcgcggggggacacggcgtagagctcgccggagacgagatggctaccggaggatgaacttggcctggggaggaggaacggaacagagtagggccccacaacaagcgaggccggggtggcggtggaggcagcaccaaccaagggggaaccggaggcggcgaggagagggtggttggggaaaccacgcttcagggtgccgtacacgaacaccattgtcgccgcctccactcctccccctccattgctcaatttctgctccactggagtttggacgctcctcatctttactcaccgaggaggaagagtcgggcggcgccggtggtggcgaggggcggcgccggtggagcgagtgaagccttcggctccttcggctgcgtgctcagcgaggagagcgccgcgacgctctggggaagacggctgcacggatggcggggagaggcggcggcgcgtctggccggcggtggcggatggtgaggggagacggcggcgcggatggcggggagagacggcggcgcggatggcgaggggagatggcggggagaggcggcggcgcgtctgggcggcgccggcggatggcgacggcggcgcggatggcgggggagacggcgacgcggatggcgaggggagagacggcggcggcttggtcgccagtcgtccctcccttcaccttctcgctcgctcggtcaagacggaagacgtcgtatggttcaatccaggggcaaaaacctataacaagcaacaattttcataagccagcaacagcatatttcagcaccaacaccaagcagttcccaacaacagcaaagcagaagatttga

SEQ ID NO: 85978 - DNA, 4623 bp, Oryza sativa
  Clone ID: PAT_MRT4530_85062C.1
atggacgaggagcagctgcgcgcgctgctccgcgacctggacgcgctcaagcagcgccccgaccccgccgccatcgatcggatgcgagagcgcgtggcgggaatggtgaccccggccgccgctgcacggtccaagatcaaggatatgagctcggaggtggtggacagcaatccctacagcaggctcatggcgctgcagcgtatggggatcgtggacaactacgagcgcatccgtgattactccatcgccatcgttaacagtgtagagggctggtggttgtcctcatcaccggctgtcatcgcttcttgtcgccgaccgccgtcgcccctcgtcgtggcctccggccgccgtcggaacccgtcgctgctagtcgcgggcctccggaacccgtcgctgctcgtcgctggcctccggctggcgccgctcgtcacgggcctccggccgccgtcgcccctcgttgtaggcctccggacgtcgtcgaccctggtcgcgggcgcctccgcctgggttgtagggcgccgtcgcctgggtcgctcggtgtctgtttccccgatccggatctggatcgggagtcattgggctcagcacatgcgtcttcatatgcgtggtcagcgtctttgggatgttttatctggtgagctaccttttcctccttgccctattgctccaactatgccttcacttgcaagtcaagctactgatgacgatagagcaaaggctaaagagcagtttgatgatgccatggaaaattatcagagtcagtttgctttatacaaggcttggttggatgaggatgctcgagcttctgctattcttgtagctagtatggagattcatcttactggtgaggtggttactcttacttcagctcatctcatgtggacacacctacgtgatcgttatgctcctactagtgatgctctttaccttgctatggtgcgtcaggagcagtccttgcaacagggggatagtacggtggatgagttctatacacagttatcctctatttggcgtcagcttgattctttgggaccggctatttgtcatacctgtcagtgctgtcagcgtcagcgttctcacatggatcttcgtcggatctacgattttttcacacgcctccgatccgagtatgagtccactcgtgcacagttacttgctcgacatccgcgtgttactatcatggaagctcttacggagattcgttctgaggacattcgtcttcgagaggcggttgtgccatctggtaggggtcaccttcacttcacctattatgataaagatggacatgtggagtcattttgcttcaggaagaaggatttacgtcgtggcaattcttcgaagggtactagtggttcttctcagaagagtgctggaggttcagattcacaggaaattcttatgttacttcgtcgccttactgcttctgctgcgacaggttctgttggttctgtggctctaccttctgcacagtttggttctgctgttcttggttcttcatcttctactgagggaccatcttctgctccaggtactattccatggattctagattctggtgcttccttccatatgactcatgatagatctagtctttcatctatatgttctcctttagttcctactactgttcatactgtcgatggtactcctcttgctgttgttggtcgcgggactctttctacttcttccttcagtgtccctgctgtttcttacgttcccaaattggccatgcaactcatgtcagccggccaacttacggatcatggctgtcgtgtaattcttgattctgactcttgttgtgtccaggatcgtcacacgggtctcctggttggtactggccctcgccgccgtgattctcagcgtctttgggaccttgactggcttcgtcttcctttcgctgcgcctgctagtcttcttgcttccgctgcttcctctatggtgtcttttgctcagtggcatcataggttgggacatctttgtggttctcgtctgtcggctttagttcgtcgtggtcttttagggtctgtgttaggtgatgtctctttagatcaatgtcaaggttgtaagcttggaaagcaaatacaacttccctatcattctagtgagtctgtatctaagcgtccttttgatcttgttcattctgatgtgtggggcccagctccttttgtttccaaaggaggtcatcgctattatatcatatttatagatgacttttctcgtcatacttggatttacttcatgactcatcgctccgaagttttggctatttataaatcttttgctcgcataattcgcactcactttgattctcccatccgcgtgtttcgtgctgattccgctggtgagtacctttctatagagttgcgcgtttttctttccgagcagggtactctttctcagttttcttgtccgggtgctcatgctcagaatggtgtagcggaacgtaaacatcgtcatcttcttgagactgctcgtgctcttatgattgcttcttctgttcctcctcatttttgggctgaggctgtttccactgctaattacttgaccaacatccacccttcttctgctctacagggtgggattcctattgagcatctttgtggtcagcctcctgattattctaatctgcgtcttttcggttgtgcttgctatgtgcttcttgcaccacaggatcgctatggttatgttgctacagttcttgctgaacctcgttcttatcgtgatgctgttgtccatcaggaatggcaacatgcgatggcagaggagcttgctgcacttgagcgtactggtacttgggatcttgttcccttaccttctcatgcttgtcccatcacttcttctgctcatcattggaatatatcgcaacttgatgtcaagaatgcttttctcaatggggaattgcatgaagaggtttacatgcggccacctcaaggctattcagttccagagggtatggtttgtcgtcttcgacgctctctttatggcctcaagcaggctcctcgtgcttggtttcaacggttttcctctgttgtcctggaagctggtttctcagctagtgctcatgatcctgctctctttgttcacacttcaccccacagtcgcacaattctacttctctatgtggatgatatgctaatcacgggtgaagatgcggagtttattacttttgttaaagcacgtctcagtgagcagtttcttatgactgatcttggtcctcttcgttattttcttggcattgagatttcccctactcctgagggatttcatctctcaagccaaggttattctgatgctacttgggccagtgattcctccgatcgtcgatctctttttgctttttgtgtttttcttggtggttccctcattgcttggaagactaagaaacaaacaacagtttctcgttctagtgcagaggctgagttaagaactatggcccttttgacagcagaggttacttggctacgatggttacttgaggattttggtgtttttgtgacttcaccgacttctttattgtcagacaatacaagtgctattagtattgctcgtgatcctataaaacatgagcttactaagcatattggtgtggatgcctcgtatacccgcacacagggtataggtggcgttggtagtgttgctgctgagatgctcactagatgtggcattggtcgccttttgttgtatgactatgatacagttgaactggccaacatgaataggttgttctttcgcccagaccaggttggaatgaccaagacagatgctgctgtgcagacactatctggaataaatcctgatgttacgttggagagctattcattaaatattactacagtgaaaggatttgaaacatttttaggaagtctcaaagccagaagctctgatgggcgtaacactggagttgatcttgttttgagctgcgttgataactatgaagctcgtatggttgtaaaccaggcatgcaatgaacttggccagacatggatggagtctggtgtctcagaagatgctgtttctggtcatatacagttgctggttcctggtgaaacagcatgttttgcatgtgctcctccattggttgttgcatccggagtggatgagcgcacattaaagcgggaaggtgtttgtgctgcctctttaccaactacaatgggtgttgttgctggtctccttgtccagaatgctctgaaatatttgttgaagtttggacaagtttccccttacttgggatataattcacttaaggattatttcccaacaatggaaatgaaaccaaatccacagtgttcaaatccagcatgtgttcagagacagaaagaatatatgcagtcaaaacctgctagagatgcagcagcaaaagctaagatggaagctgaagcatcagcagcagatgaatgtccggtccatctagataatgattggaatattagtgttgtcgatgacagtgacacagtgacaccaagcattctaagcactggagctgatagcctcccagaaggccttgtccgcgaactcccaactgcagattcctaccaagaaccagttgctccagttacatccggggctattgatgacgaccttgaggagcttcagcgccagcttgatgccctaaactcgtcttaa

SEQ ID NO: 85979 - DNA, 3615 bp, Oryza sativa
  Clone ID: PAT_MRT4530_85063C.1
atgtcgtctttatccggcactgtgtctgttcctcattgcccagttctttttgatggttgcaactacagccattgggctcagcacatgcgtcttcatatgcgtggtcagcgtctttgggatgttttatctagtgagctaccctgtcctccttgccctattgctccaactatgccttcacttgcaagtcaagctactgatgacgatagagaaaaggctaaagagcagtttgatgatgccatggaaaattatcagagtcagtttgctttatacaaggcttggttggatgaggatgctcgagcttctgctattcttgtagctagtatggagattcatcttactggtgaggtggttactcttacttcagcccatctcatgtggacacacctacatgatcgttatgctcctactagtgatgctctttatcttgctatggtgcgtcaggagcagtctttgcagcagggggatagtacggtagatgagttctatacacagttatcctctatttggcgtcagcttgattctttgggaccgactatttgtcatacctatccgtgttgtcagcgtcagcgttctcacatggatcttcgtcggatctacgattttctcacacgtctccgatccgagtatgagtccactcgtgcacagttactttctcggcatccgcgtgttactatcatggaagctcttacggagattcgttctgaggagattcgtcttcgagaggcgggtattctaccacttccttcttcagtgttagctgttcgtactgtggcttcttcggcttcttcgacaccggctgttcattctacagtttcttcctcttcttcatcggcgcgtcctcctaccacagttgtaccatctactaggggtcaccttcactgcacctattgtgataaagatggacatgtggagtcattttgcttcaggaagaagaaggatttacgtcgtggcaattcttcgaagggtactagtggttcttctcagaagagttctggaggttcagattcacaggaaattcttatgttacttcgtcgccttactgcttctgctgcgacaggttctgttggttctgtggctctaccttctgcacagtctggttctgctgttcttggttcttcatcttctactgagggatcatcttctgcttcagttcctactactgttcatactgccgatggtactcctcttgctattgttggtcgtgggactctttctatttcttcctttagtgtccctgctgtttcttacgttcccaaattggccatgcaactcatgtcagccggccaacttacggatcatggctgtcgtgtaattcttgattctgactcttgttgtgtccaggatcatcgcacgggtctcctggttggtactggccctcgccgccgtgattctcagcgtctttgggagcttgactggcttcgtcttccttccgctgcgcctgctagtcttcttgcttccactgcttcctctacggtgtcttttgctcagtggcatcatcggttgggacatctttgtggttctcgtctgtcggctttagttcgccgtggtcttttagggtctgtgtcaggagctgtctctttaaatcaatgtcaaggttgtaagcttggaaagcaaatacaacttccctatcattctagtgagtctgtatctaagcgtccttttgatcttgttcattctgatgtgtggggcccagccccttttgtttccaaaggaggtcatcgctattatatcatatttatagatgacttttctcgtcatacttggatttacttcatgactcatcgctctgaagttttggctatttataaatcttttgctcgcatgattcgcactcactttgattctcccatccgcgtgtttcgtgctgattctgctggtgagtacctttctagagagttgcgtgtttttctttccgagcagggtactctttctcaattttcttgtccgggtgctcatgctcagaatggtgtagcggaacgtaaacatcgtcatcttcttgagactgctcgtgctcttatgattgcttcttctgttcctcctcatttttgggctgaggtttatagtcgtaaacctcgtatccaggagccttctctggatgcttctccggttgctcctcctcgatacaattttcgtgatcgtaatttagttacgattcgtccagaggatcgctatggttatgttgctacagttcttgctgaaccttgttcttatcgtgatgctgttgtccatcaggaatggcaacatgcgatggcagaggagcttgctgcacttgagcgtactggtacttgggatcttgttcccttaccttctcatgctcgtcccatcactggtaagtggatctataaggtcaagactcgctctgatggaactcttgaacgctataaggctcgccttgtggcgcgtggtttccaacaagaacatggtcgtgactatgatgaaacttttgctcctgtggctcacatgactactgttcgaacacttcttgcaatagcttctgctcgtcattgcaatatatcgcaacttgatgtcaagaatgcttttctcaatggggaattgcatgaagaggtttacatgcggccacctcaaggctatttagttccagagggtatggtttgtcgtcttcgacgctctctttatggcctcaagcaggctcctcgtgcttggtttcaacggttttcctctgttgtcctggatgctggtttctcagctagtgctcatgatcctgctctctttgttcacacttcaccccgcagtcgcacaattctacttctctatgtggatgatatgctaatcacaggtgacgatgcggagtttattacttttgttaaagcacgtctcagtgagcagtttcttatgactgatcttggtcctctttgttattttcttggcattgagatttcctctactcctgaaggatttcatttctctcaagccaagtatattcaggatcttctggatagggcctctctcactgatcaacgcacagttgaaactcccatggagcttaatcttcatctttctgccactgatggtgaaccgttagctgatcccactcgctatcgtcatattgtagggagtcttgtttatcttggtgtcactcgtcctgatatttcatactctgtgcacattctgagccaatttgtttctgcccccacacaaattcactatagtcatcttcttcgtgtcctccgttatcttcgtggaactatctcgcgttgtcttttctttccacgctccacatctttacaacttcagggtaattctgatgctacttgggccagtgattcctccgatcgtcgctctctttctgctttttgtgtttttcttggtggttccctcattgcttggaagactaagaaacaaacagcagtttctcgttctagtgcagaggctgagttaagagctatggcccttttgacagcagaggttacttggctacgatggttacttgaggattttagtgtttctgtgacttcaccgacttctttattgtcggacagtacaggtgctattagtattgctcgtgatcctatcaaacatgagcttactaagcatattggtgtggatgcctcgtatacccgcacacaggtacaggatcaggtggttgctctttag

SEQ ID NO: 85980 - DNA, 234 bp, Oryza sativa
  Clone ID: PAT_MRT4530_85064C.1
atgtcccaacctatgatgccactgagcaaaagacaccatagaggaagcagcggaagcaagaagactagcaggcgcagcgaaaggaagacgaagccagtcaaggtcccaaagacgctgagaatcacggcggcgagggccagtaccaaccaggagacccgtgtgacgatcctggacacaacaagagtcagaatcaagaattacacgacagccatgatccgtaagttggccggctga

SEQ ID NO: 85981 - DNA, 1724 bp, Oryza sativa
  Clone ID: PAT_MRT4530_85065C.1
atggtgggagccaacaaggcgagggagctgggaggtggtagaaccagttgggcgcggggctgcagcaagacgagggagatgggtggtgccggcttatccacccctgggaacttgaagagggcaagcagaggtggtgacctccagatctcgttccctttggccgcttcttgcagctcggtggggaatcagattagacctagtcggacggagggtggcagggaggcatggcaacgtgggtcggctcaagttcagcgtggctttcgggatatgtaccgtggcgggcttgaccgcttcaagaaggctcaggccttggagccattctccgttcaatccggttcggcggccaagaatgtacctgcagcggcgagaacagctaaaggaccgccggctccattgacactgccacagaattcacatgttggaaccagccagagtcacctgagtccgcaaggtgccagtttgagggtggccgggcaagagaccggggcgccggggcatgctgggacccaggtcggtggtgggcaatcagcgtggcagccacctgactgggcgatagagccgcgccctggggtttactatcttgaggtgttgaaggatggggatgtcattgatcggatcaatctggagaagaagaggcatatatttgggaggcaggtacctgcatgtgatttcgtgttggaccatcagtctgtatcgcggcagcatgctgctgttgttccacacagaaatggaagcatatatgttattgatttaggatcagttcatggcacatttgttgcaaatgagagactaactaaagacaaccctgttgaacttgaagttgaccccaatgatgaagatgctgtggtcgcatacaacacaatacttaaccgctatggtattagtaaatcagacttatccagatcaaaagattcttcgggagatgcctctggtgcaaatgatgataacgagccagctggaaggcccttgaagagaagtaaaaaactaagagtatcatttagagatcaagttggaggagaacttattcaagtggttgggatttcagatggcgcagatgttgaaactgaaccaggtccagtaggggtgaaggaaggcagtcttgttgggaaatatgaatcccttgtacaggttactgtcattccaaaaggaaaggagcaaccttcaccaaaggaaagtgcatcccccagtggggtaacagataagctaaaacaggttcttaccaaagttaaaagcacagcaaaaggtggaatttatgatgatctttatggggatactgttccacaactattgggcccatcttgggcatacaggtcggatgaccaggcagaaaaagtcaaagctgctgatgaaaagaagtctagtgggaatatggatacaaattcagctgatgataatgatgacttgtttggtgacttgtgactgttggcgttttccattagtcccgagaaatggatctcctgaaaatgcttaagagcagaagtattttgttctgtcgggggtattttgctttgttctgcatgattgtatcctgctgcaaattaaggtatcacagcgccggagggtgactcaaagaccagaagcgaaaattgtcacgtcagatgaactatgtaatactttatacatctttttgtcagaacaccgctgtgtgatggatttccatgtttgttggtaaattgatatcccatccaattgggatttgcccccaaaaaaaaaaaaaaaaaaaa

SEQ ID NO: 85982 - DNA, 162 bp, Oryza sativa
  Clone ID: PAT_MRT4530_85066C.1
atgatggtcctactagctacattgtcggcccacaagaggatgggcctccttgctacattgtcggcccacaagaggatgggcctactacaaaggcggcccactggatcggatttgctgaaacaggagctcaccggcgtcactgctcgtgttttgtggtgttga

SEQ ID NO: 85983 - DNA, 186 bp, Oryza sativa
  Clone ID: PAT_MRT4530_85067C.1
atggcgcccgcgctggccttggctattgctgtcgtcggggacagtaaacagccgccgccggtcacccctactctacctccaccgcatgtcgccaaggagaccttctgtgtccgtgccatggccttctccattaggtatcagtcgtcatatatcagacttggtacccacaagtaccaaagtctataa

SEQ ID NO: 85984 - DNA, 490 bp, Oryza sativa
  Clone ID: PAT_MRT4530_85068C.1
aacaacaaagttttttttcctttttttttaaaaaaaagagcaaattgctcatgcaggcaacagctaggatggattctgattaaccaagctagaaaccggcgacgaagagggaggagaaccagatgacgaggtcgtcgccgagctggagctcgtcgagcccggccacggcggcggccaccacggcgccgccgacgtggaggcggcagagcgggcacgtccgccgccggcagtagagcgccagccaccggtcgacgcagtcccggtggaacgcgtgcccgcacggcagccgccgcacctcctccccgtccctgaaccccgatatgcacacgcagcaccccgccgccgccgcctgcccgccgccgacgccgtcgccgtcccgccagcaccggcactgccctccgtcgtcgtcgccgtcaccttccgccgccgccttcttcccggacagcgccgacgacaggagcgccatgacatggctcaccaccaccaccat

SEQ ID NO: 85985 - DNA, 529 bp, Oryza sativa
  Clone ID: PAT_MRT4530_85069C.1
tcatcttgaaccatgatgttcctcttgatctagtatggtgtctttgagaatcgttcatctctgctccccaacgtcgtcaatttcttcagaacagtgtagagggctggtggttgtcctcatcaccggctatcatcgcttcttgtcgccgaccgccgtcgcccctcgtcgtggcctccggctgccgtcggaacccgtccgctgctagtcgcgggcctctggaacccgtcgctgcttgtcgcgggcctccggccgccgccgctcgtcgcgggcctccggccgccgtcgcccctcgttgtaggcctccggccgtcgtcgacccctggtcgcgggcgcctccgcctgggttgtagggcgccgtcgcttggtcgctcggtgtctgtttccccgatccggatctggatcgggaggtataaaaaaaacgaaaaaaaaagaagaaaagaaaaaggcttctctggctctgctactgttgtgctctgatcgcacgtggtggctctatattttgggctgaggcaaaaaaaaaaaaaaaaaa

SEQ ID NO: 85986 - DNA, 768 bp, Oryza sativa
  Clone ID: PAT_MRT4530_8506C.1
atggcggcggcttcaggccataatgcgcgcctgcttgcgctcgcgctcgcgctcctgctcgccgcgctgcacctgcacggcgtggtgtgtgaccccagccatactcacttcgccatggtgtcgcgcaatgcgccgtcgtggaggcccgatcgcggtggacaagggaagccggcgccgtcgccggaggacttcctgaacgagaacctgcaggcgctgtacccggtgatccaggcgttcaaggcgaccatcaccagcgacccgcgcggcgtgacggcgtcgtgggtcggccccaacctctgcgacagctacttcggcggcgacatgtacaagggcttctactgcgagcacccgccggcgccgccggggcaacacgccaagggggatcgtcggcaacgacatcaccggacccatcccgctctccctcggctgcctggggctcgtcgaggagctcaacctcgccgggaaccagctaccgggaagctgcagaacctctccctctccgacaactacttccactccgtcggccgccgccattgcctcgagctcgtccggagcaaggtgctcgacgtgcgcctcaactgcatccccaacttcccccaccagcggccggcgctcgagtgcgcccgcttctacgccgacccgccgcagcactgccccttcgtgccgcacatcccctgcgacctgccgggcttcaggccgccggcggcggcgttgccttcggctgtggcagctgaagaaggcggcggcggcggaggtggtggcaactga

SEQ ID NO: 85987 - DNA, 1266 bp, Oryza sativa
  Clone ID: PAT_MRT4530_85070C.1
atgtaccgtggcgggcttgaccgcttcaagaaggctcaggccttggagccattctccgttcaatccggttcggcggccaagaatgtacctgcagcggcgagaacagctaaaggaccgccggctccattgacactgccacagaattcacatgttggaaccagccagagtcacctgagtccgcaaggtgccagtttgagggtggccgggcaagagaccggggcgccggggcatgctgggacccaggtcggtggtgggcaatcagcgtggcagccacctgactgggcgatagagccgcgccctggggtttactatcttgaggtgttgaaggatggggatgtcattgatcggatcaatctggagaagaagaggcatatatttgggaggcaggtacctgcatgtgatttcgtgttggaccatcagtctgtatcgcggcagcatgctgctgttgttccacacagaaatggaagcatatatgttattgatttaggatcagttcatggcacatttgttgcaaatgagagactaactaaagacaaccctgttgaacttgaagttggtcagtcacttcgctttgctgcatcaaccagaacctatatcctacgaaagaatagcgctgcctttttcccaactcatagtcttccatcagatgtcagtctgccatctccaccagaccccaatgatgaagatgctgtggtcgcatacaacacaatacttaaccgctatggtattagtaaatcagacttatccagatcaaaagattcttcgggagatgcctctggtgcaaatgatgataacgagccagctggaaggcccttgaagagaagtaaaaaactaagagtatcatttagagatcaagttggaggagaacttattcaagtggttgggatttcagatggcgcagatgttgaaactgaaccaggtccagtaggggtgaaggaaggcagtcttgttgggaaatatgaatcccttgtacaggttactgtcattccaaaaggaaaggagcaaccttcaccaaaggaaagtgcatcccccagtggggtaacagataagctaaaacaggttcttaccaaagttaaaagcacagcaaaaggtggaatttatgatgatctttatggggatactgttccacaactattgggcccatcttgggcatacaggtcggatgaccaggcagaaaaagtcaaagctgctgatgaaaagaagtctagtgggaatatggatacaaattcagctgatgataatgatgacttgtttggtgacttgtga

SEQ ID NO: 85988 - DNA, 3702 bp, Oryza sativa
  Clone ID: PAT_MRT4530_85071C.1
atgtcgtctttatccggcactgtgtctgttcctcattgcccagttctttttgatggttgcaactacagccattgggctcagcacatgcgtcttcatatgcgtggtcagcgtctttgggatgttttatctagtgagctaccctgtcctccttgccctattgctccaactatgccttcacttgcaagtcaagctactgatgacgatagagaaaaggctaaagagcagtttgatgatgccatggaaaattatcagagtcagtttgctttatacaaggcttggttggatgaggatgctcgagcttctgctattcttgtagctagtatggagattcatcttactggtgaggtggttactcttacttcagcccatctcatgtggacacacctacatgatcgttatgctcctactagtgatgctctttatcttgctatggtgcgtcaggagcagtctttgcagcagggggatagtacggtagatgagttctatacacagttatcctctatttggcgtcagcttgattctttgggaccgactatttgtcatacctatccgtgttgtcagcgtcagcgttctcacatggatcttcgtcggatctacgattttctcacacgtctccgatccgagtatgagtccactcgtgcacagttactttctcggcatccgcgtgttactatcatggaagctcttacggagattcgttctgaggagattcgtcttcgagaggcgggtattctaccacttccttcttcagtgttagctgttcgtactgtggcttcttcggcttcttcgacaccggctgttcattctacagtttcttcctcttcttcatcggcgcgtcctcctaccacagttgtaccatctactaggggtcaccttcactgcacctattgtgataaagatggacatgtggagtcattttgcttcaggaagaagaaggatttacgtcgtggcaattcttcgaagggtactagtggttcttctcagaagagttctggaggttcagattcacaggaaattcttatgttacttcgtcgccttactgcttctgctgcgacaggttctgttggttctgtggctctaccttctgcacagtctggttctgctgttcttggttcttcatcttctactgagggatcatcttctgcttcaggtactattccatggattctagattctggtgcttccttccatatgactcatgatagatctagtctttcatctatatgttctcctttagttcctactactgttcatactgccgatggtactcctcttgctattgttggtcgtgggactctttctatttcttcctttagtgtccctgctgtttcttacgttcccaaattggccatgcaactcatgtcagccggccaacttacggatcatggctgtcgtgtaattcttgattctgactcttgttgtgtccaggatcatcgcacgggtctcctggttggtactggccctcgccgccgtgattctcagcgtctttgggagcttgactggcttcgtcttccttccgctgcgcctgctagtcttcttgcttccactgcttcctctacggtgtcttttgctcagtggcatcatcggttgggacatctttgtggttctcgtctgtcggctttagttcgccgtggtcttttagggtctgtgtcaggagctgtctctttaaatcaatgtcaaggttgtaagcttggaaagcaaatacaacttccctatcattctagtgagtctgtatctaagcgtccttttgatcttgttcattctgatgtgtggggcccagccccttttgtttccaaaggaggtcatcgctattatatcatatttatagatgacttttctcgtcatacttggatttacttcatgactcatcgctctgaagttttggctatttataaatcttttgctcgcatgattcgcactcactttgattctcccatccgcgtgtttcgtgctgattctgctggtgagtacctttctagagagttgcgtgtttttctttccgagcagggtactctttctcaattttcttgtccgggtgctcatgctcagaatggtgtagcggaacgtaaacatcgtcatcttcttgagactgctcgtgctcttatgattgcttcttctgttcctcctcatttttgggctgaggtttatagtcgtaaacctcgtatccaggagccttctctggatgcttctccggttgctcctcctcgatacaattttcgtgatcgtaatttagttacgattcgtccagaggatcgctatggttatgttgctacagttcttgctgaaccttgttcttatcgtgatgctgttgtccatcaggaatggcaacatgcgatggcagaggagcttgctgcacttgagcgtactggtacttgggatcttgttcccttaccttctcatgctcgtcccatcacttgtaagtggatctataaggtcaagactcgctctgatggaactcttgaacgctataaggctcgccttgtggcgcgtggtttccaacaagaacatggtcgtgactatgatgaaacttttgctcctgtggctcacatgactactgttcgaacacttcttgcaatagcttctgctcgtcattgcaatatatcgcaacttgatgtcaagaatgcttttctcaatggggaattgcatgaagaggtttacatgcggccacctcaaggctatttagttccagagggtatggtttgtcgtcttcgacgctctctttatggcctcaagcaggctcctcgtgcttggtttcaacggttttcctctgttgtcctggatgctggtttctcagctagtgctcatgatcctgctctctttgttcacacttcaccccgcagtcgcacaattctacttctctatgtggatgatatgctaatcacaggtgacgatgcggagtttattacttttgttaaagcacgtctcagtgagcagtttcttatgactgatcttggtcctctttgttattttcttggcattgagatttcctctactcctgaaggatttcatttctctcaagccaagtatattcaggatcttctggatagggcctctctcactgatcaacgcacagttgaaactcccatggagcttaatcttcatctttctgccactgatggtgaaccgttagctgatcccactcgctatcgtcatattgtagggagtcttgtttatcttggtgtcactcgtcctgatatttcatactctgtgcacattctgagccaatttgtttctgcccccacacaaattcactatagtcatcttcttcgtgtcctccgttatcttcgtggaactatctcgcgttgtcttttctttccacgctccacatctttacaacttcagggtaattctgatgctacttgggccagtgattcctccgatcgtcgctctctttctgctttttgtgtttttcttggtggttccctcattgcttggaagactaagaaacaaacagcagtttctcgttctagtgcagaggctgagttaagagctatggcccttttgacagcagaggttacttggctacgatggttacttgaggattttagtgtttctgtgacttcaccgacttctttattgtcggacagtacaggtgctattagtattgctcgtgatcctatcaaacatgagcttactaagcatattggtgtggatgcctcgtatacccgcacacaggtacaggatcaggtggttgctctttag

SEQ ID NO: 85989 - DNA, 1381 bp, Oryza sativa
  Clone ID: PAT_MRT4530_85072C.1
tcctcctcccccaagcttctcaaccctagccgcaacgcaaaccctccactcctcctctccccttagcccccccccccctaacgccgccgcaaattaaccgacgtcgacgatgatgcagactgccgggcgccgccgccaccgatgggtcaaggagtgggttccgcaggatctgatgggatcccttgcagttgccggctgcttgaattccatgggagaggataggttgtcagctctcaaatccagggacaaggaacaagaagcagaactggcaaaacctgaaccaaccaccgaggttctcttcctgtgcagctatgagggctgcgggaaaacttttgttgatgcaggggctcttaggaaacatgctcatgttcacggggagaggcagtatgtgtgtcactatgccggttgcgacaagaaatttttagacagctctaagctgaagaggcattttcttattcatacaggagagaagaactttgtctgccctcatgaaggctgtggaaaggttttggctttctcattggattttaatttaaaggcacacatgaaaacacattctgtggataactatcatgtgtgcaagtacccagaatgtgctcgaaggtttacacaggaatcaaaattaagggctcatatcaagcaacagcatgaaaagggtggtctccagaatccaggtgggtctgcaacaaaccgcagtggtctagcagaccactcccataatagtcacacaccgaaaccgtcagcagctccacccactccctcagctgatcgcccatacgtctgtccttatgatggttgtgccaaggcatacattcatgagtacaaacttaacctccatctgaagaaagagcaccctaatcactaccaggatgccggtgctcaagccgcctcttcgaagatgtcgaagcgaagaagcaagccctccttgacggccaagatgccactgcccaaggtccctaagcgcaggggttacacagagccataccaacctcctgttagtgttgtcgaagagcaccagtggccgaggaatgtgctgtacgaggacgatagcgaggagactgaggaagagggagataatgttggggacggggcgaggtacagagctgctagcagcgacgacgatgaggagactgaggacgaagaatgagctgctcagatcagtcgttttttcatccagtgcttgtgcatatgatttacaaaatcttagcttttgggttatagttttgcatacatgtacaatattcaaaataaggctgggtagttggtcagaattgagaattaccccccttccttctgaattatgcaggttggtaatgttgggctgctcccattaatcaaattcaaaaggacaaatcacagaaaacaaaaaaaaaaaaaaaag

SEQ ID NO: 85990 - DNA, 156 bp, Oryza sativa
  Clone ID: PAT_MRT4530_85073C.1
ggctgggagccgacacggtgcgggtaatctggggggccggtgactgacaacgaagggggagacagcacccggggggatgcggaccggagcgcggcacaggcacagcaccaatgagacgagcccgctgcatgggaggcctggcagatgacaggggac

SEQ ID NO: 85991 - DNA, 135 bp, Oryza sativa
  Clone ID: PAT_MRT4530_85074C.1
atgtcgggtgatcaagccgacgacgttcgcgaggttgggcatgacgactctgcatttgtcgagatcgttctcgataatgcggtgtacttgaccacgacctactcgaaagagaacagagcgagcccccagcgttag

SEQ ID NO: 85992 - DNA, 336 bp, Oryza sativa
  Clone ID: PAT_MRT4530_85075C.1
atgtcgctcgaagtctccacagccgtcctcgtcatcgtcatcgccgtcgccatcactcacagccgccgccaccagagctgccccttccatcgtcgttgtcggagcggcggtgaggccagggcgaatccggcgaggcgggggaggggggcaccatgccgccgacgccttgaggaggaagagaggaggaaggggaaggaggttggccggggagagaggagggggatggaggtgaggccggacggcggctcgggagcaagagtcgctaaggtgtcgtggagagttggactcaagcgcgtgtacgactgtaaggaaaaaagaataggtgaaggggattag

SEQ ID NO: 85993 - DNA, 562 bp, Oryza sativa
  Clone ID: PAT_MRT4530_85076C.1
aaaagaaggggcccccaaattcatggggggtataggaggggcaatatataccccccacagggggggaaaaaaactgaaaagggaaaacgggttcaggcgaaaacattggaaattcgttttgaatcacaggggaaacaaactaaaacgggggccttccaaaccttttttttgaaaaaacgtttattttgccagtttttgcctaggggggggggaaatcctatttaactctgacatacgggaagggggggaacatgttttttcaaaaataaaagtctaccgaaacattggggggtttaaaaggggggggctcctaccgaataaaggggaaaaactttgggactacccaaaaaaaaagcttttcctaaactttttgccaatggggaaccttgggcaccagggggggggattcgtcaacaccagttttgcaccaaggggaccagttgggaaaaaaaaaaaaaaggacccttatgccatcctggggaaaatttaaagcaaatgggggggttggcatttataaaaaccggggcaccaaaagatcggcaaatttctgattttggctttg

SEQ ID NO: 85994 - DNA, 4810 bp, Oryza sativa
  Clone ID: PAT_MRT4530_85077C.1
tttttggttcttaccaatacaagcctcttattcaaagttacaaatgtgcacgacaagttgacaacaaaaaaagcgagaattatatccttattttgaaatttgaattataggggcagacggtgagcccattttagtttcttgcgaagttgaagttgccacaggtagtcctgatgaagaagagggtgccactgaaccctagcctggaagcggcctcgtcgaacagcaaaaagttgttctccatctggaacgcgcccacggtcaccgcgctccgcgccgccctcccgccgtcgacgaacgccaagcacgccgtgtcgcccgccacctgcgccagcgagttcgacccgaacaccgtccagttccggccgccggacgtcacgaggtcgatcggcgccaccgcgtagccgaccctggtgaaccccagcgcgctgctgttgaagcagagctcgaacggggccacgctcggcatgcgcgttatcctcgccgtcgccttggcgaacgcggcgacgaacgggcggtacacgtcgcgccgcaggacggtgtacggcgcggccgtgtcgagcgtcacgccgccgccgcggctgagcgcgccgggagggaggtggaccgcctcttggttcatggcgatgccccggagcttgatgctgtacgccgaggggttcgtcgggctccgggccaggtcggtgtaggagaggacggtgctcgcgtcgaacagcgtcggcggcatcaggttgtacggcccgccgccgaagaacgcgacgccgggcgcggccgccgtgctcggcaggcagacggcgaactgccgcttaagcgacagcttcgagtagagctgggtcggcaggctcaccccgccacggccgaggcccgcgtcgccggccgccatggccggtaacgacctgaggaggctgcccggcgcgcatgacgagacgacgccccggacggtgacctcggaggtcagcgtcttgccgtcggtggcgttggcgacgatgtcagcgagcgtgaggtcgccgacggcgcgttcgcccgtcaccggattcgtcgggcgggcggtgcacgcgcgtcctccgttgttgcaggacttgtgcgcccccgacgcggcggcgcactcgccggaggagcacgggacggtggggtgggagggtgagcacggtgaccacagtagctgtccggagaggtcaagcaggtagttcttgttggagatggagagcgtgtggagcccagtcttggtgtccttggtgatcggagctaccaaggcttggattgcaggagatggagaagcttgcaaatagtcgaaggggaaaatggccaatccatttaggacaagaatctgttgattctcgaaacggcccagagcaaaggcctgttcgaattcgccatccaacaaaaactcttcaagagtccgaggaggtatgaggttctccagcaccaatttatccttgtccacacttcttgtgccaccaagttcccaggaaaattttaaccaacgaagctccaccatatcccgcaagttagctttcctagcatcttctagccgctcaacattttcaagatgtctaacttccagctcacgacaacgcagtctcccaagctccactatactcccagcaatttgccttccgatttcctctaagccactttgatcatcatcaggtccaaatattctttgcttcatcaccttccagcagtcatcaggtgataaaacatccaaattgatatgatcggcctcatgcacagggcatattttccgctgatttgcaagacaaccagtgtgtagtacttgcactacacttccattgcgtgtagttactataatcttgctacccttgccgccatgttgtaacatctgcttcaacttttccaaattttctccatattcttcccagagatcatctagaccaatcaagtatctcctattggcaagttcttttatcagattatcttgtacaaactgcaagttgcagttgtctaggctgatacttctgtttgctcctctgatgatagctttcccaattttgagcagatcaaaatcctctgaaacataaacccagattttcatatcaaagacacggacccttttgtctgcaaaaactgcttgggctaaggttgtcttccctagtccaccaagcccaacaattggaataattgagatatcctccttggcttcagttttcaatagaaggctgattattttttctgtttcagcatccctccctagcattccaatctccatatcatcactgacagtaaaagtttcgttgcttctactcccttttgcatgtggttcatgacgcacaagattgagcatcttgccatccttttctattgcaactattttatccctcaagttcttcatgttgcgtgctatggtcattttctggaggagcggattgttccaggaaaagtataacttgagcttggattgatggttcctgatgagctgagcagcatcgaattcatccagcacgtcctcaacgtcgtaggcgacggacttaactttggagagccaccgccgtgccactgctccatcttttcctacttggcgcaccttatcgtcagcatcttgcatcacagcaaccagatctctcatcttctccttcatgtcattcacatcatccttgaacctccacagcagagtggcctcctccactgcgaggtcgccaagcttgctggcgacccgtctcgccacggaactcacaatcatctctccaaccccgctcatggcctcgaagctaccagccagcgattccaacaccaggaaatcgaggcgccgccagccactgcacttccgccagcttagtagtctggacgcggcctcatcgaacagcaacaagttacgttgtacgttctccatctggaacgcccgcacggtcaccgcgctcatcgtcgctgcccaaccacagtcgacgaacgccaagcacgccgtgtcgctctcgccacggtatcgatcctcggtggcgtcgccttccttggcgtcgcaggacggtgcagtgtagggcgcgcgcggccacgtcgagtcatgacatgagcacgccgacgcctggagggaggcggccggacttcttcttggttgacggagatgccccggaggtagatgctgttcgtcgaggggttcattggtcgtggcgcctgtgacggcgaactgccgcttgagcgacagcttcgagtaccacggccgaggccagaggacgcccctgacggagcttccagcctttctaggcaaatgagctgccccagccattcgggcaatatttccaagttctcccacgagcacaaatatagctctctgagggagacgaagctttgaaggatgtctggaaaggtcctcagcccactcttcatccttgtccacatttctcgtgccaccaagtccccatgacaaagttagttcccgaaggtcagtcatatcacgcaacttagcttcccttgcattgtccagccgctcaacattttcaagatgttgaattcccagtgcacgacaacttagtttcccaagctccacttttgttcctgaaataacatcaagcagcgtgaggctagccatgtcgctgatactatctggcatgtctcgcagactttgaccattatctcgtgcttcaatgtatccaagggctatccattgctggatcaagcgatcagtgtccatgacgaaaccttgcccgagagcatttgccaccagtggtagtcctccacacttctcggcaatttgccttccaatttcctctaagccattttggccatcatcaggcccaaatactctccgcttcatgacgctccagcagtcgtaaggtgataaaacacccaaattgatatgatcaggctcaggcaccggacatactttccgttcatttgcaagataaccagtgtatagtacttgcactacgcttccactacgtgtagttgctataatcttgctaccctttccgccatgttgtaacatctgcttcaacttttccaaattttctccatattcttcccagagatcatctagaacaatcaagtatcttctgttggcaagttcttttttcagattattgtttacaaactgcaagttgcagttgtccaggttgatacttctgtttgctcctctgatgatagccttcccaattttgagcaggtcaaactccttggaaacatagacccagattcgcaaatcaaagacattgacccttttgtctgcaaaaactgcttgggctaaggtagtcttccctagtccaccaagcccaacaattgggatgattgagatatcctccttagcttcagtgttcaacagaaggttgattattttttttgtttcggcatccctccctagcattccaatgtccacgtcaccatcatctgcaaaagtttcattgtctctactcccttctgccactagttcacgatgcacatgatgaagcttaatgctatccttttttattgagactattttctccctcgagttcttcatgttgcgggctatggtcatcttccggagaagcggattgttccgggaaaggaataacttgagcttgggttgatggttcttgatgagctgagcagcatcgagctcatccagcacgtcctcaacgtcgtaggcgacggacttgagtttgttgagccaccgccgttccgcctctccatcttttcctccctggcgtgctttgccatcaacatcttgtatcacagcctccagatctctcatcttctcctccatgtcgtccacgtcgtccttgaatctccacagcagagtggcctcctccaccacaagctcgctgagcctgctggcgacccgattcgccacggaactcgcaatcatccctccaatcccgctcat

SEQ ID NO: 85995 - DNA, 993 bp, Oryza sativa
  Clone ID: PAT_MRT4530_85078C.1
cccacgcgtccgtgccactgcaacctagagctctactagctagcttagcttagcttagctactaatcatctctgaattaatctcagtgatctacttactactcatgccaagcctgaatcactacagatacttagctgctgttgttcttgatagagccatctcatcatcttcctcttcctcttcttctaccttgccttcaacctcaaagatgaagattggcaaggctcccgagcttctgaagaaggcggcgacgattgtgaggagcaaggccagcacagtcagggccaggctcctcatcgtcgcctccctccgccgaaggatggccatgatcggcgccatatcgcaccggatccatgctctgatagtggagaaggagaaggccagggtggactactaccacaagaacaagaaccatgacggcaacaaggccctcgtgatgcgaaaggttgtagtccatgatgagatggtgatcgccgacgaccatgatcgtcatctctctgaactggcaatgttcgatcaagaggatcatcatggctacagcactgatcactggactcactcgctcttcaacgatgatgacacttgttacagtgatgatcaagacgactgtggtgatgatgatggcgatgatgacgagccgtcggtcatcgatataatcaggagcaaccgggaggacgaagggctggagttcaacatagacgatgagatcgatcaggctgctgatatgttcatcaggaggattcgcagtcggatgagccggagcgtttagactttgtgtgcatgattttgttcatgttctactggcactgatgtatgtgggagatcactagtactgacaaagtgacaatagatgaaaggtgacataccgtatagttaaccagggatgaaaggacaattaacgtatggttatatatgttagcaactaagcaacaccttatgatgtgacacaagagtgtgtctcctctaatgaaatatgttaccatttttggatgt

SEQ ID NO: 85996 - DNA, 1066 bp, Oryza sativa
  Clone ID: PAT_MRT4530_85079C.1
atgaccatagcacgcaacatgaagaacttgagggataaaatagttgcaatagaaaaggatggcaagatgctcaatcttgtgcgtcatgaaccacatgcaaaagggagtagaagcaacgaaacttttactgtcagtgatgatatggagattggaatgctagggagggatgctgaaacagaaaaaataatcagccttctattgaaaactgaagccaaggaggatatctcaattattccaattgttgggcttggtggactagggaagacaaccttagcccaagcagtttttgcagacaaaagggtccgtgtctttgatatgaaaatctgggtttatgtttcagaggattttgatctgctcaaaattgggaaggctatcatcagaggagcaaacagaagtatcaacctggacaactgcaacttgcagtttgtaaacaataatctgaaaaaagaacttgccaacagaagatacttgattgttctagatgatctctgggaagaatatggagaaaatttggaaaagttgaagcagatgttacaacatggcggaaagggtagcaagattatagcaactacacgtagtggaagcgtagtgcaagtactatacactggttatcttgcaaatgaacggaaagtatgtccggtgcctgagcctgatcatatcaatttgggtgttttatcaccttacgactgctggagcgtcatgaagcggagagtatttgggcctgatgatggccaaaatggcttagaggaaattggaaggcaaattgccgagaagtgtggaggactaccactggtggcaaatgctctcgggcaagtaatgtctgaacataggacggttgaggcatggacagatataagggatagaaagattgttttggatttcaaagcagatcatcagcaagacactatagagcgcctaatgttgagctattactatatgaagcgagaattcaaaatgtgctttacatatttggcagccttttcgaagggtttcgtcatggacactgatcgcttgatccagcaatggatagcccttggatacattgagcacgagataatggtcaaag

SEQ ID NO: 85997 - DNA, 2922 bp, Oryza sativa
  Clone ID: PAT_MRT4530_8507C.1
atggcccctcgcaagccaaacccagcttcggcaaaaggaccggatcccggccgggtcgatgatgacagcaccgcctttttgggggtttctctcgtggacgacgtcgaactggcgaagttggtcagctctggggcgttggttgaggggcaggctttcgccccggggaaagccgtggtgccgaagcttgtcgacaatcggacggtggtgttcgccgtcttttttgaggcggggctacagtttccgtgcaacgtgttgttgccggagatccttcgccttttccaggtggagcttccgcagttgagcccatcggcgctagttcggatctccatctttgactgggcgtgccggacttccgggtttgagtccagcgccgagctcttcgacgccatatttttcgccatcatgaactcgaagacggtgattaccccggctggaacgaagaagacagtgttcgggagcatgaactttaacgttcgccccgagcggtctgatctctggccggtgaacgctgccatgtcgaagtgggaccgccattggatggcgaggtggttctatcacaccatccccttcgcggctggttctgactcggcaaaagctcttcggtgccggcgtagggcgattgcgccgaaccggaaacccaagatcgccgtggacggggctatggaggcgcggttcgtcctgctgcgcaaggtttgctcccgccttagctgccgtgacttggtggaggagttctgtatgcttcgcatctttcccctctcccagtcatggcaagtcacggtcgagcaatgcgaagaggctaacggtttgccgaacttggttcttcctgaggggacgaacatgtcgaccctcgaccaggctgaagccaaagcccgcaggatgatcggcgacgtttcggtcgtcgagtatagccagctgctaacacgacaagcagctgggcgggcgaaccgggtttacaacggcgaactgcctccccgggcgaatccccaaaaagccgacgacgatgtagggccttcgcgaaagcggatgcgtggacaagtgaagcttgcccccaggaagcgaagggttcctgcttcgtcggactccgacgccgacgacgaggatgatgccgaagaacgtgacggcgaggaggaaggagaggaagaagaggaggtggaggctgtggctgataaggccgcgaacaaggcgatagaagaccgcgtcaacacccccggctacactcctaccccaagtccaggtcacaacgagaccggggtggagtcgaacagctctccccttcgccgaaaggatttggaaggggcgaaggccctagttgcgttctcgtcgggcaaggcggcgaaaggaggtctggtcaagaagatctcaaagaagaagggactcgtcgacatcgctcgcgttttcagcgacgacgagtcttctgtcgagactccgacttcacctgctggccgcagtttggacctttcgactgctccccttgctctgctcggcgttgctggggcaggcggtagcgccgccgccgaagctgccacctccgccgaacggatcgtgtcggctgtggcgagggttttcgggagccctgtgcgcgagccagccatttcgccgctggtcaaggcgaaagggaagtgtacggccgtcgaagcatctgcctcggagtattcccttgcggcgccccacttcgcccctggtgacttcgagacccgggcagaccttattctctttgtggagggagtaagcaatcttgtcttgcccgtcggcaccccgagcctgttcaccgaacttaacgagttcgacgaggggtgttccaccattaaaagtttggcggttcgggggaaagaggcctgggccgaggttgatcgcctcaaggccgaactggagaaggagaaggaccattcggcggtgctcatcgattactacaaccttactgagccgaagatggaggctcttcgccagaaggctagcagggtcgaagcgagcgccgcggaggagtcgcagcggttttcacgggagatggcgaacaccgccgaatccacgagaacggcttgccaaacgctccgcctcgcccttaccgacatgggcgcgaaggtgcggggggtccctgccgagtatgcctcagccttcgacttctctgagtggacccagcaggctggcggatcggtttcggactgtgccaccacgtacggcaattgctgtgcgcgcgtatcggcggcctttaccttaggccttttgcaacagttcggctgcgagcacgtcgccgagttccctacctatgcgaagggggactgggagattagtgcgcagaacatttcgcccgctcttcgcgcgtggcgaaaacagttctggcagaaggatggccggtccgctgccaaagcgcgccttctggagcaactgacgaaggcggaggcggcagatcggggcgaaggagagggcgcggcaggcgaagaggctggaggcgatgcccaggatcacccagagggggttcgccgaaagttgtgcattcggcccccttccgggagctggcgaagtcaaaacgagaaatttgtggcattgaaggacctgccgaaggtgcgatgtccatttcggcctatttattgcgaaatggagataaacggtcgcagctataaggttttcaaggttgccgactggctgcgggcgcaccccgggcgaaccttagaagattacgaccttgttcattcaagacgtttggaggatatggctcgcttttggcgaaaccatcagaagactaaacgtcaggaaacgatctttcagcgtcgttacagtttagtctgtgtttcgccccctactcctcttaaggttgtgtacaatattagtagtgatgacgaacctagttcgccttatcattccttagggagggatagtgattatggggatgaagatgtaatttacttgaattgtatcgtgttgtga

SEQ ID NO: 85998 - DNA, 300 bp, Oryza sativa
  Clone ID: PAT_MRT4530_85080C.1
atggccccgtgttttatgctactgctaggagcatgcctcctagggtgtaacctccgccacctggaagccaaccctagctcgccaaccgtcaccagaggcatgccaccgaatcatgctggcagttggaacggagagggccaaggagggttggctcacttcggaggaagagtcactcgagttcgacgtggtgatggcaagcgtggggctcgagctcgagcgagatgttgccaaggacttaaggctcggggagctgaggcaccttgccatgatgtcgatggtgcaactcgacacaaggagtag

SEQ ID NO: 85999 - DNA, 452 bp, Oryza sativa
  Clone ID: PAT_MRT4530_85081C.1
gttctccatctggaacgcccgcacggtcaccgcgctcatcgtcgctgcccaaccacagtcgacgaacgccaagcacgccgtgtcgctctcgccacgctcggcatgcacggtatcgatcctcggtggcgtcgccttccttggcgtcgcaggacggtgcagtgtagggcgcgcgcggccacgtcgagtcatgacatgagcacgccgacgcctggagggaggcggccggacttcttcttggttgacggagatgccccggaggagaggatgctgctcacgtcggacggcgtcggcggacagcggcatcagattgtacggcccactcccgaagaaggacacgccacgccggacgtggcgcctgtgacggcgaactgccgcttgagcgacagcttcgagtaccacggccgaggccagaggacgcccctgacggagcttccagcctctgatagatgcta

SEQ ID NO: 86000 - DNA, 1099 bp, Oryza sativa
  Clone ID: PAT_MRT4530_85082C.1
acgggaagtaatatatatatttaattactgcacattacatatattaattagactagagagatgacataatatttttcattacaaattacaaataagctcaaaatacacaaagatttgcacaagatttacatctgtccctgcagcaaccaaaaccatggggactcccttcagatcttcgcattacgtacgcaccatgtaattcaagctccgtatacatgactcgtatgtgtacatgatcgatggcgccatggcggcgaggcgatgggccaccgcgtgatcgagctcgcgcgcggcctcgccggcgttcgtgctctgggcgcgcgtggcgcgacgcggcgcggcgcggcgtggacgggacgaacgttcgaccgatcacggggcggattccgtcatgtaggggagcagcgcgacgtggttctggcggcgcagctgctcgtagaagcgcctgatgaactcctccgcctcgtcgtccacggcctcgccgccgccgccgccgtcggcgtggccgtagtcgccgtcctcctcctcctccgacgagtagttggagacccgcacggagtagccgccggtggtgcccagcagcggcgagagccccggcgtgctgcactcgtcccccggtgcgagcagctcatcccgcaccatgaaccccggcgaggacggcgccggggaggacgccgccgccgcggcgtatccatagtactcgatcctctgcaacgccgctgccgccgtcgcgctcgcgccggcgtcgacgacgtcgtcctccgcgctgaggcaagggaagtaggcgagccgccgcctcgacgccgcacctccatgcacgacgtcggggctgttgctgcacgagaactcgtactcccgccgccggcgcagcgcgccgccgccgccgccgccgtggtggtgggagaggaggctggccaccgagcgcgcgacggcgcggttccggcgcttgagccgcatggcgagctgcatgccgagcagcagcctccgcttggagatcacccctttcctcaccatgaagaacaccgcccgcaggtatccccacatcctcctcgccgccgactccacctccattgccaagaaaagcttcccaagaatcaag

SEQ ID NO: 86001 - DNA, 1086 bp, Oryza sativa
  Clone ID: PAT_MRT4530_85083C.1
acggctgactaatatagcgataatatttgtcttgggagtacagttaatggccagcaaggaaagcaatcactcgatccatgagcttgacggccttgctgctgccgtacttgcggacgaagaaggcgtggccctcgccttctgactcgaaccaatccacctctccgccccacccacttcgcttcacggcgtcgtagtacgcacgttcccttggtcttatcgggtcctccgacgccgcgcagaccagcatcctctcgcacgccagcttcgtcaggctcggcgcgccggccgccatggggttcatccgcggatcgtccagcccgcccttcgcgtcggggaagatgatcgaccacctcttcttgacgctttcccagaattcctccggctccccttccatcctcgtctcgccgcagaacgaagggtggagcaagattgtgccctctatgcgcgccggtaccgcggcgtccaggccacgcacgcccacggcgatggtcatgttgtgggctatgttcccgccagcgctgacgccggccaagaagactcggccggtgtcgccgtgctcggacagccatgggtcggccccggacaacgcccagttgagcgccgcccaggagtcgtcgtacgccgccgggagcaggtgctcgggagcgaggcggtagtcgacggagacagcgattaaacgggccctggcgacgatatcgttgatgttgcggtggcgcttagggcagctagctgacccgacgacgaagtagccgccgtggaagaagacgaggatggggagcttcgtcttgccgtcgtcatcggtagcagcctggatgagtggtaggtagaggcgcacgaagacgccggtgacagcgtcgatgacgacgtctttggaggtgacgccggtgtcggcgtcgaagccggcgggcacggtctccatgtcgccggtacggtcggcgtggccatccttgtataatcggaagctaccggcgtcgacgaggatctcgctgctgctcgaatccattgcgcagctcccttcaagaaaggtagtagctcccaaatcgagccacgcggacgcgtgggcgcacgcgtgggcgtacgcgtggg

SEQ ID NO: 86002 - DNA, 1373 bp, Oryza sativa
  unsure (1)..(1373): unsure at all n locations
  Clone ID: PAT_MRT4530_85084C.1
tcgcttagagaagcatctgcgcgccgccggggcacgcccgccgcgccacgccggagtcgaacacgacgcggccgggatccatgctctcctctccgacaacgaccgcctncgcgcgcaggtaatctcattaaccgagaagctgcaagacaaggagacgtcgccgtcgtcggcgaccatcaccaccgcggcgcaggaggtcgaccagccggacgaacacacggaggccgcgtcaaccaccggcttcgccaccgtcgacggcgcattggcggcgccaccgcccggccaccagcagccgccgcataaagatgatcttgtgaatggccagcaatggcgccgccgccggcgccatggccccgttcttcccgcccaacttcctcctccagatgcagcagcctctccccctccaccaccagcacctccaggaccacgcccatggcggccacggcggccaccacctcctccctcctcctcctccctccctctcccccttcctccccgacctcgccatggacgcgccgccgccgccaatgtacgaggcgagcggcggcgatggcggcggcggaggggcggcgtcggaggatgaggaggatgggtgtggagggggagggggtgggggtggtggggagaagaagaggaggttgagcgtggagcaggtgaggacgctggagcggagcttcgagtccgggaacaagctggagccggagcggaaggcgcagctggcgcgcgcgctggggctgcagccgcggcaggtggccatctggttccagaaccgccgcgcgaggtggaagacgaagcagctcgagaaggacttcgacgccctccgccgccagctcgacgccgcccgcgccgagaacgacgccctcctctccctcaactccaagctccacgccgagatcgtggcgctgaaggggggagcggcggcggcggggggaggagggagcagctgcaggcaggaggcggcgtcggagctgatcaacctcaacgtcaaggagacggaggcgtcgtgcagcaaccgcagcgagaacagctccgagatcaacctcgacatctccaggccggcgccgccgccgccgccgccgccggccaacgagagccccgtcaaccgaggcatcccgttctacgcctccatcggccgcggcggcgcaggcggcgtggacatcgaccagctgctcctccgcggcggccactcgccgtccccggctgccgtgacgacgccgccgccgcccaagatggagctcgggattacaggcaatggcggcggcgcggacgccgccgccgccggcgcgggcagcttcggcggcctgctctgcggcgccgtcgacgagcagccgccgttctggccgtgggccgacggccaccaccacttccattaa

SEQ ID NO: 86003 - DNA, 1365 bp, Oryza sativa
  Clone ID: PAT_MRT4530_85085C.1
atggcggctcatcctttccccctccccttcctcccgcagtgcacatcaattctctgtgatgcagatacggataatctgtggttagccagtggtaatgctcaaagctccgctgctgttcggtcaaggttgcttgctgcagaaagagaggaagcaaaagctgtgctatcactatttttaagacagaaaggtttgagaagtatactggctgcacgaattgccaataaggcagatggtttcattgaacacctagtttcaaagctccacattacttacagatcacgatatgctgaaggaagggagctcagcacaccggagattagagatgctttgattccatatctggaagccctttctaaagaacatggagatggtttggttgaggtggtggagaatttccccgatccatttgctatggaacgggaagccttgtcttcttcaatggttcttacgcccacaagctcaaataaacacaaggcaatcgctcgggtaagcgcaccaacctcagggggagcccttcctgagctagttctctatctactggaccttggcatggatcatgaagagatcaagaatgtcgtgcggaaattcccagcatttgcatattacaatgtggatcgcaaaataaaacctctggtggcgctgctacttgagcttggtgtgccaaggtcaaacataccaggaatcatcaagaagagacctcagctatgtggaatcagcctgtcagataatctgaaacctatgatgacctatttggaaaacgtgggtatcaacaaagataagtggagcaaggtgctttcccggttccctgcacttctcacatatagcaggcagaaggtggagacaaccgtgagctttctcactgaactaggagttcctaaggaaaacattggcaagattctgacgcgatgtcctcatatcatgagctacagtgtcaatgacaatctcaggccaactgctgaatacttccagtcaatcggtgcggatgctgcgtctcttattcagaaaagcccacaggcttttggtctgaacattgaggcaaagctaaaaccgatcacagaatttttcctggagagagacttcaccatggaggaaatcggcactatggcgaatagatttgggattattcacactctcagcatggaagataatctgcttcccaaatatgaatatttcctgacaatgggatacccaaggaacgagctagtgaaatttccacaatacttcgggtacagtttagaacagcggataaagcctcggtatgctcggatgattgattgcggagtgaggttgattttgaaccagctgttgtcagtttcagatagcagatttgaagatattctacggaagaggatggatggaatatga

SEQ ID NO: 86004 - DNA, 490 bp, Oryza sativa
  Clone ID: PAT_MRT4530_85086C.1
aaaaccacggatcacaatggatgcaactaaatgggtttccgtcgcacaaatgggacttgaattgctgatgagtgaattgcttgttttttgggacctttttggaacgcatccggataccttgtgtttctcgattgggggtttaatgcctgaacttgggccaagtggctctttattgcttgctgaggagaaatggaccggctgtgggtggttttgggcccagggctccggggggctatgccctgtttaatgatgtgccaaaaagtgtttgggttgggtttactgctgcaagatgcatggtttggtttttggtcccccctcccgccttggtttgcgacatgacatgggttgcctagaacttgagtgtgtgtggcctttggttttgtactcgaggttctaccccctcggtcttcttcttaagagatatgttacggtgtagcattccccaacgggtaaagatccaatgctcctcaatcaaaaaaaaaaaaaaaaa

SEQ ID NO: 86005 - DNA, 723 bp, Oryza sativa
  Clone ID: PAT_MRT4530_85087C.1
cgcactcgccgccgctgccgttcccgatcccaagtcccagaccaaacaatgtcgacgcctagccagaagaagaggaggagtaaggggaaggacggcgcggtggcgccggtgggactgaggcttaatcgcctgggtcgtgcttctcctcgcgaggccgccgggaagccggtgtaccttgcggtggagcacgacgatgaccaggaggtgcccgcgcactccatcgtcgagctcggcggcggcggcggcggcggcggcgaagcccaccttgtgcttcacaacgtccgcgggatgtccttcgccaccgtggagtcgcgctacgggccccggatcgtaggcgtcggcggcaagttgttcaccacggtgtacgaccccaagacctcgatggagatccccggccccttcctcgtcgagcctaagctccggcccgtcctcatcccgcggggcagcaagctgtatgcgctctcccgaaccccttccgtcgtgcccggcctcgacttcctgccctggttcgtgtacctcgacctcaactacgtcttggtcgcccctcacgacgcgagaaccatgggatggcaccgcttgccgccgccgcccatcttccctgtccgcctcaacccgctcgagtaccgtgacccgccggaggtccgcgtcgcctcctacgccgtggtcggctcccacatactgctcttcgtgcagcaagacaagggcacctgcgcctttcgacat

SEQ ID NO: 86006 - DNA, 350 bp, Oryza sativa
  Clone ID: PAT_MRT4530_85088C.1
tttttggggttttttattttttggggtttttttttttttttttttttttctcaagctcacattttttggattggcaccacacagcagggttttaatgaaggccacagcccccatatgggatatcaacacacgcattttagcctacccgcctttacgaatctaacaaattggagtagcccattgacgtgacaatggctcaaagcaagcttgagaatcatatcctgaagggaaatccctcagccgggggccttaagctcaacccggcggcgggagaggtcattttaataaacagccttctccttctcctttggcagctggtatggcgtgagccgcggcctgcggcaacccaa

SEQ ID NO: 86007 - DNA, 531 bp, Oryza sativa
  Clone ID: PAT_MRT4530_85089C.1
tcagaaattacggcgtaggaatgaccagttgagcctcttgatgcgaacgatgcggttgagctcctcgcgaacggagacgagcagcacgtacgcctcacgtgcgccctccacctccacgtccaccacgtgctccaccgtgccggagtcggggtcgtagtagccgccgccgccgtcgaccacccgcacctcgccgccgtcgaccaccgccacctccttctccgtcgtcaccgtgagcagcagcacggccccgtcgtcgtcgacgtactccacgcaccgcaccgcctcgcggacgccgccgccgtcgtggagcgccgccggcaccgtcctctcctccatcagcgggaacacctcgccggcgatctccaggcactcgcgcgcgtcctcctcgtcgtcgtcagggacgaggcggcggcgacaatcctcgcgcgagaagaagagcggcttcccgtcgtactccacgcagtcgcgcacgacgccgccggacgtcgcgacgcgccacctcgtcagctgcggagcgtacagggacgccat

SEQ ID NO: 86008 - DNA, 1278 bp, Oryza sativa
  Clone ID: PAT_MRT4530_8508C.1
atggcggcggcttcaggccataatgcgcgcctgcttgcgctcgcgctcgcgctcctgctcgccgcgctgcacctgcacggcgtggtgtgtgaccccagccatactcacttcgccatggtgtcgcgcaatgcgccgtcgtggaggcccgatcgcggtggacaagggaaggcgttcaaggcgaccatcaccagcgacccgcgcggcgtgacggcgtcgtgggtcggccccaacctctgcgacagctacttcggcggcgacatgtacaagggcttctactgcgagcacccgccggcgccgccgggtgcaacgacgccgaaggacaacaccacgctcaccatcgcgtccatcgacttcaacggctacggcctcggcgcgcccagcctctccggcttcgtcgacgcgttcccggacctagcgctcttccacgccaactccaacaacttctccggcgaggtccccgacctcaccggcctcccgtacttctacgagctcgacctctccaacaacaacttctccggcgcgttcccggccaccgtcgtcccgctcggccgcctcctcttcctcgacctccgcttcaaccgcttcgtcggcacggtgccgccgccggtgttcgacctcaccgtcgtcgcgctcttcctcaacaacaacggcttctacggcaacatcccggacaacttcgggagcaccacggcggagtacctggtggtggccaacaaccagttcaccggcccgatcccgcgctccatctacaacacgtcggcgaacctctccgaggtgctcttcctcaacaaccacctctcgggatgcctcccctacgagatcggattggtggaggggctcaccgtgttcgacgccggcggcaacgacatcaccggacccatcccgctctccctcggctgcctggggctcgtcgaggagctcaacctcgccgggaaccagctgtacggccacatccccgacgtgctctgcgcgctggccaagaccgggaagctgcagaacctctccctctccgacaactacttccactccgtcggccgccgccattgcctcgagctcgtccggagcaaggtgctcgacgtgcgcctcaactgcatccccaacttcccccaccagcggccggcgctcgagtgcgcccgcttctacgccgacccgccgcagcactgccccttcgtgccgcacatcccctgcgacctgccgggcttcaggccgccggcggcggcgttgccttcggctgtggcagctgaagaaggcggcggcggcggaggtggtggcaactga

SEQ ID NO: 86009 - DNA, 219 bp, Oryza sativa
  Clone ID: PAT_MRT4530_85090C.1
ggataaaacgggatgcttacttgatgccaaatagagtgtttaaatttgacatcgccagaatcccctaggtattaccaaaggttcaaaatggcagcacagagccaagcaaccagagcaccctcaaaagctcaagcattttagctctggaccattctcgtggccatcctgggatactcccaacatctcccttttcgcctcttcctcgcaaccaagggaatg

SEQ ID NO: 86010 - DNA, 333 bp, Oryza sativa
  Clone ID: PAT_MRT4530_85091C.1
tcaactaacaggacctattcctgcttctcttggcaacctttcatcgttggcaatcacggcgatctcaacttcctttctactgtttccaattgtagaaagctttctacccttcaaatggaccttatcagccatcaattgctctcctatcatgagcttcgtgcaaccgatgatttcagtgatgataacatgttgggcttcggaagctttggaaaagtttttaggggacaattgagcaacggtatggtggttgccataaaagttatacaccagcatctggaacatgccatgagaagctttgacaccaagtgtcacgtgctccgaatggctcgacat

SEQ ID NO: 86011 - DNA, 1364 bp, Oryza sativa
  Clone ID: PAT_MRT4530_85092C.1
ccccgggctgcaggaatcggacgaggcgcgcggctccccggcctccgctccccgcccccggttaacctcacaaaaataattaaaaaaaatacccccaaactttgcaaaaatttttctccccaaatccacccagaaatccttcatccccaatcttctcaattcgcgaattcatcctctccagcaatcgccccccagtttttgttttctctttctctctctcgattttgtgtttcttgaggtgtttctttgtggccttctcgtcgccattcttggttggattagggttagggttcgtcgggatgagggtgcacgaggaggcgtcggaagacaaggagcgggaggtggaggaggcgccggacctgatgccgctgtctccgccgccgaccgccgccgccactgccgccgtggttgcggtggcggggcagcggctggtggtgggctacgccctgaccaagaagaaggtgaagagcttcctccagcccaagctgctctcgctcgccaggaagaagagcattcattttgtatcaattgatgagactcgtcctctctctgaacaaggcccgtttgatattatattgcacaagcttactgacaaggagtggcagcaagttttggaggattatcgtgaagaacatccagaagtaactgtccttgatccacctaatgctattcaacatttgcacaatcgccagtcaatgcttcaagaagttgctgatttgaacttatcaaatgcctatggtgaggtttgcactccacgacagctggttatcatgaaagacccattgtctataccatctgcagttgccaaggctggactaacgttgcccttggttgccaaaccattggtagttgatggaacatcgaaatcccatgaactatctcttgcatatgtggagacatccttgtcaatgcttgatcctcctctggttctccaggaatttgtcaatcatggtgggatcttatttaaggtatatgttgttggtgaaacaatacgtgttgttcgccgattttctcttcctgatgtaaacatctatgatctggaaaacaatgatggcatcttccgttttccgagagtttcctgtgctacaaatactgcagaagatgcagaagttgacccttctattgctgaacttcctccaaagccgcttctagagaaacttgggagggagcttcggcgcagactgggtcttagactgtttaacttcgatatgattagagagcatggaagaaaggatcggtactatgtcattgacatcaactattttcctggatatgggaaaatgccaggctatgagcatatattcattgacttcctactcagccttgtgcaaaacaagtacaagaggcgtttaagcgggagctga

SEQ ID NO: 86012 - DNA, 414 bp, Oryza sativa
  Clone ID: PAT_MRT4530_85093C.1
gctctcaattaattattgagcttagatagttaagacacattctatacagattgagcggatgctagaccgtgagttgaaagaggagtagtttggttacagacttgcaggcaaaagaagcatggagaaacaaaaaaaaatctgcttggagaggtctccttccatccttagctccgtagcacatcgtattctcacatgaatatgccaaattgccaacctgttctctagattgccatggttttgctgcctgtttgcacatcgtatcctgggcggcaaaggctgggagtgacggcgagtcaaggatgtcggtcgctggcagagggggtgatggaggcgacgtccagcgatcaccagcggcggcacgcgtgtgtggggattaggggcagctcaagagtgatgtagatcttctcggcgctg

SEQ ID NO: 86013 - DNA, 2643 bp, Oryza sativa
  Clone ID: PAT_MRT4530_85094C.1
atggcgcttgttcgattgccagtatggattttcgttgcggcgttgttgatcgcttcgtccagtactgtgccttgtgcttcctctccaggtccgatcgcgagcaagagtaacggcagcgaaaccgacctcgctgcattgctggccttcaaagcccagctctccgattctaacaacatccttgccggcaattggaccaccggaacgccgttctgccggtggattccactggggctcacagcgtgtccatacctccaagttattgccatgccttataatttattcgagggtgttttgccaccatggctgggcaggttgaccaatcttgatgccatctccttgggtgggaataactttgatgctggccccatcccaactaaacttagcaacctcaccatgctgacagtcttagatttgacgacgtgcaacctaacaggaaacatccctacagatattgggcacctaggccaactttcatggttgcatcttgcgatgaatcaactaacaggacctattcctgcttctcttggcaacctttcatcgttggcaatcctgctactgaaaggaaacttgctggatggatcattactatcgacagttgatagcatgaactcactaacggcagttgatgttactaaaaacaatctacacggcgatctcaacttcctttctactgtttccaattgtagaaagctttctacccttcaaatggacctgaattatatcaccggaatcctcccagactatgttgggaacctgtcgtcacagctgaaatggttcacgttatctaacaacaagttaactggcacgcttccagctaccatttcaaatttaactgctcttgaggtgatagatctttcacataaccaactgcgcaatgcaattccagaatcaatcatgacgattgagaatctccaatggcttgacctaagtggaaatagcttgtctggcttcatcccatcgagtactgcacttctaaggaacattgtaaaactgttccttgaaagcaacgaaatttctggctccataccaaaggacatgaggaacctcactaatctagagcaccttctattgtctgataacaaattaacgtcaactataccaccaagcttatttcatcttgataaaatcgtcaggctagatctttctcgaaacttcttgagtggtgcactgccggttgatgtagggtatttgaagcaaattaccatcatggatctctctgacaaccacttttctggtagaatcccatattcgacaggacaacttcagatgttaacacacctgaatctatcagctaacggattctatgattctgttccagactcttttggtaatttaactggcttgcaaactttggacatatcccataacagtatttctggtaccatcccaaactacttggctaattttacgacccttgttagcttgaacctatctttcaacaaactacatggtcaaataccggaaggaggtgtctttgcaaacatcactttacaatacttggtggggaactcagggctatgtggtgctgcccgtttaggattcccaccatgccaaaccacctcccccaacagaaataatggtcatatgctaaaatacttgctacctactataatcattgtagttggagttgtagcttgttgcctgtatgtaatgattagaaagaaagctaaccatcaaaatacttctgctggtaagcctgaccttatcagccatcaattgctctcctatcatgagcttcgtgcaaccgatgatttcagtgatgataacatgttgggcttcggaagctttggaaaagtttttaggggacaattgagcaacggtatggtggttgccataaaagttatacaccagcatctggaacatgccatgagaagctttgacaccaagtgtcacgtgctccgaatggctcgacatcgcaacctgataaagattctgaacacttgttccaacctggactttaaagcactggtacttcagtacatgcccaagggtagcttagaagcactcctgcactcagaacaagggaagcaattaggctttctcgagaggttggatattatgctagatgtgtcaatggcaatggaatacctgcatcatgagcactatgaggtggtcttacactgcgatttgaagcctagcaacgtactatttgacgatgatatgacggcacatgtggcagactttggtattgcaaggttgttgttaggtgatgacaactccatgatctcagctagcatgccaggaacagttgggtacatggcaccagagtatgggactctaggaaaagcgtcacggaagagtgatgtgttcagttacggcatcatgctgcttgaagtgttcactgcgaaaagacccacagatgctatgtttgtgggagaactgaacatcaggcagtgggttcaacaggcgtttcctgcagagcttgtccatgtggtggactgccaacttctacagaatggttcttcttcttcttcaagtaacatgcatggcttccttgtgccagtgttcgagctgggtttgctctgttcggctcactccccagagcaaaggatggcgatgagtgatgtggtcgtgacactgaagaagattaggaaggactatgtcaaattgatggcaaccacagtgagcgttgtgcagcagtga

SEQ ID NO: 86014 - DNA, 1494 bp, Oryza sativa
  Clone ID: PAT_MRT4530_85096C.1
atggcgtcgccgccgcagcccgggccgtacatgccggacctgccggcggtgccggcgtggctgaacaagggcgacaccgcgtggcagctggtggcggcgacgttcgtcggcatccagtcgatgcctgggctggtggtgatctacggcagcatcgtgaagaagaagtgggccgtcaactccgccttcatggcgctgtacgcctacgcgtccacgcttatcgtgtgggtgctcgtcggcttccgcatggcgttcggcgaccggctgctcccgttctgggccaaggccgggccggcgctgacgcaggacttcctggtgcaacgcgcggtgttcccggcgacggcgcactacggcagcgacggcacgctcgagacgccgcgcaccgagccgttctacgcggaggcggcgctggtgctgttcgagttcgagttcgcggccatcacgctggtgctgctcgccgggtcgctcctggggcggatgaacatcaaggcgtggatggcgttcaccccgctctggctcctcttctcctacaccgtcggcgcgttcagcctctggggcggcggcttcctctaccagtggggcgtcatcgactactccggcggatacgtcatccacctctcctccggcgtcgccggcttcaccgccgcctactgggtgggcccgaggctgaagagcgacagggagcggttctcgccgaacaacatcctgctcatgatcgccggcggcgggctgctgtggttgggctgggccgggttcaacggcggcgcgccgtacgcccccaacgtcaccgccacggtcgccgtgctcaacaccaacgtcagcgccgcgacgagcctcctcacctggacctgcctcgacgtcatcttcttcggcaagccctccgtcatcggcgccgtgcagggtatgatgacggggctcgtctgcatcacgcccggcgccgggctggtgcacacgtggtcagcgatgctgatgggcatgttcgccggcagcgtcccgtggttcacgatgatgatcctgcacaagaaatccaccttcctcatgaaggtcgacgacaccctcgccgtcttccacacccacgccgtcgccggcatcctgggcggcgtcctcacgggcctcctcgccacgccggagctctgcgctctcgattgcccgatcccgaacatgcgcggcgtcttctacggcagcggcatcggccagctcgggaagcagctcggcggcgcgctgttcgtcaccgtctggaacctcatcgtcaccagcgccattctcctctgcatcggcctcttcatcccgctccgcatgtccgacgaccagctcatgatcggcgacgacgcggcgcacggggaggaggcctacgctctgtggggggacggtgagaagttcgacgtgacgcggccggagacgacgaggacgggaggtgcaggcggcgcgggcagggaggacaccatggagcagaggctgaccaacatgggagccaggggtgtcaccattcagttgtag

SEQ ID NO: 86015 - DNA, 185 bp, Oryza sativa
  unsure (1)..(185): unsure at all n locations
  Clone ID: PAT_MRT4530_85097C.1
gttgctcttcgccgtttcttggattgtttcatgctgtcgggcccgccctttatttgttccgcgcgatctgatctttttatgttgcatgttttggtttcttggtgcccgctnccgatgggctcttgcgctttgctggcctcttctttttcttgcttcgcgggccttggcgttgtctttttttgcga

SEQ ID NO: 86016 - DNA, 276 bp, Oryza sativa
  Clone ID: PAT_MRT4530_85098C.1
atgggtcgcaaaaatgtagtaactgtcgtggaagcacgtcgaagttgcagatcgcacacacacggattaattaaattaaccagtattatagaaggacgagaaattaaccaggttttaaggttgcggttcaagaggaaaaagtacttagaaaattcttatccaagggcaaaagcggcagctgaaagtctgaaacaaccatacttaactgctacgagggctgagattcgcattgaaacattgaacctcggcgtcaagaaaaagggttcatttatagaa

SEQ ID NO: 86017 - DNA, 727 bp, Oryza sativa
  unsure (1)..(727): unsure at all n locations
  Clone ID: PAT_MRT4530_85099C.1
ccggccgggattcccaactcgattgctgcgcttccctcagatccagcgcctgcccaagcctacgcgggatgccaccgccgccgccgccgcagccgcagccgacgacgacagcgacgacgtcggcgaacggggggaaggtgaccccgaacctgacgatggacgccgagggcacgcggctgctcaacctcaccgtgctgcagcgcctcgaccccgccgtcgaggacatcctcatcaccgccgcccacgtcaccctctacgacttcaacatcgacctcaaccagtggagtcggaaagatgtggaggggtcgctgttcgttgtgaagaggaatactcagccgaggttccagttcatcgttatgaacaggcgtaacacggataatctggtggaggatctattgagtgattttgaatatgaacttcaacctccgtatttgttgtaccgcaatgctgcccaagaagtaaatggtatctggttctacaatcaacatgactgcgaagctgttgcaagtctttttggaagaatactgaacgcatatgccaaagtgcctccaaaaccaaaagtgccttccacgaaaagtgagttcgaggaattggaggctgtgcctacatctgcagccatagatggtccccttgaaccttcgncagcgaccaccactatagtttctgatgctcctgatngatccctggntaattacttcagtagtgctgctagcattggcagtgtctc

SEQ ID NO: 86018 - DNA, 1983 bp, Oryza sativa
  Clone ID: PAT_MRT4530_8509C.1
atggcccctcgcaagccaaaccctgcttcggcgaaagggccggatctcggccgaatcgatgacgacagcaccgcctttttgggggtctctcttgtggacgacgtcgagctggcgaagctggtcagctttggggcgttggtcgaggggcaggctttctccccagggaaagccgtggtgccgaaacctatcgacaatcggacggtggtattcgccgtcttttttgaggcagggctacggtttccctgcaacgtgttgttgccggagatccttcgcctcttccaggcgtgccggatttccaggtttcagcctaacgccgagctcttcggcgccatatttttcgccaccgtgaactcgaagacgtgggactgccattggatggctaggtggttctatcacaccatccccttcgaggctggcactgactcggcgaatgcccaccgttgccgacgtagggcgatcgcgcctaaccggaaacccaagatcaccgtggacggcgctatggaggcgcggttcgttctgctgcggaaggtttgctcccgccttagctgccgtgacttattggaggaattctgtatgcttcgcatctttcccctctcccagtcatggcaagtcagagttgatcaaggcgaagaggttgacggtttgccgaacctggttcttcctgaggggacgaacaggccttcgcgaaagcgaatgcgcggacacgtgaagcttgcccctaggaagcgaagggttcctgcttcgtcggactccgacgctgacgacgaggacgacgccgaagaacgcgacggcgaggaggaaggagaggaggaagaggaggaggccgtggccgataaggccacgaacgacgcgatcgaagaccgcgtcgacacccccggctacactcctaccccaagtccctatcacaacgagaccggggtggagtcgaacagctccccccttcgacggaaggatttggaaggggcgaaggccctagttgcgttctcctcgggcaaggcggcgaagggaggtccggtgcggaaggtctctaaaaagaaaggactcgtcgacatcgcccgcgttttcagcgactacgaatcttctgacgggactccaacttcgcccgttggccgcagtttggacctttcgactgctcccctcgctctgctcggcgttgctggggcaggcggtaacgccgccgccggggcttcagcctccgccgaacggatcgtgtcggctgcggcgagggttttcgggagccctctgcgtgagctagctatttcgccgctagtcaaggcgaaggggaagtgtgcggccgccgaagcatctgcctcggagtattcccttgcggcgcccaacttcgcccctggtgatttcgagactcgggcggaccttattccctttgtggagggggtgagcaaccttgtcttgcccgccggcaccccgagcttgttcaccgaacttaatgagttcgacgaggggtgttccgccattaaaagcctggcggttcgggttcttgtggctcactgttcgacgaagcgaactgtacgggcccgctttgatggttttaagagccgtcttcgggccaaggatgacgaaataagctgcaagaacctggaggaggaggccctggccaacaccctcaaggaggcgaaaactgaagtccaacgccttcagtctgagctggatacggggaaagaggctagggccgaggttgatcgcctcaaggccgaactggagaaggagaaggcccattcggcggtgctgaatgactactacaaccttactgagccgaagatggaggctcttcgcctgaaggctagtagggctgaagcgagcgccgcggaggagttgcagcggttttcacaggagatggcgaagaccaccgaatctgcgagaacggcttgccaaacgctccgcctcgcccttaccgacatgggcgcgaaagtgcggggggtccctgctgaggatgcatcagccttcgacttctccgagtggacctag

SEQ ID NO: 86019 - DNA, 416 bp, Oryza sativa
  unsure (1)..(416): unsure at all n locations
  Clone ID: PAT_MRT4530_850C.1
tttttnaataagtactcctttggatcattcatcttataggagggtcgtataccatctacgtgcgttggaggatttcgacttacgtgcggccgaaacgggattacaacttgtatgcggcccatattttttgtgccgttatgggctttctctttcctgcggtccaagaacggggcgcaggggatctcagcttacatgaggcccactattgttgggccggaagggaagtggactcgcgtgcggctcatgttggttaggctcatgggctctccggtcatccagccgccgacgccgacgccgacgccgaagccgacgggcgcctcggcgacgttgaagacaagcctcgccatggccctcctccccgaggagccgtcgccgccgccattgacgcatgagtggccgtacgtggtcgtcccaaa

SEQ ID NO: 86020 - DNA, 331 bp, Oryza sativa
  unsure (1)..(331): unsure at all n locations
  Clone ID: PAT_MRT4530_85100C.1
nnnnnnnnnnnnnnnnnnnnnnnnnnnnnnnaaagnnnannnncccgggacgggancaancnggaganagnccagcagcaananngangggncgnaaaaagaagganacacacagagcaggcaggaaaggangncaangggancnaaaaaccagccccnnnncagaggcagnngaagnanacaggacgcggngncaagggggcccggggaaaaaacagccnaaaacccgccgangggcaaccacnaaaccaaacaacanaagcgaacacggagcannnangaagnggaacaggcnncgagcnnngggaggacgccncgccangcancagca

SEQ ID NO: 86021 - DNA, 1446 bp, Oryza sativa
  Clone ID: PAT_MRT4530_85101C.1
atgcagggcgaagagtatatgctgaagggggacgacttcgccaaagcaaagctcgggccgaagaagcctttccggcccatcaagcctaggggctgttgggccgacgatcgcctgacgacccatcaagggcccttgaacctcattacactatgcatcgacaggaaatcagaattttactggaaagctgtagctgatgtgttcaacaccagcgcgccaacaaatggacacaagaggtcagtcaagcaactgaagacacattggggtgatgtgaagagagatataacaaagttctgtggagtatatggtagacttaaagctacctggaagagtgggcaatctgatgacatggtcatgaactcagcccatgcgatattcgaaaaagaaaacaaggacaaacctttcaccttggagtacatgtggagagagaagcatacacttcttcatctaaccaagacacaggaggaaaccattagcaaagagaagcgccctgatggacagaagaaagcaaaggccgggctaaaaggaaaaggaaaagatgctgcaccatctcctttgggcaaccaaccaacaaaagagaagaagtaccagacttacttaaaactgttggagaaagatacttcaaacttcagtgaagcacaccacaagaggcatgaaggagtcctggaccaattagcaaaagaacttgctggggatcattcagatgagtctacagaggctcagcttgaagctgagcttgaggtagagcttgaagctgagctgggggctgaattggaagcagaatcagctggtacctctattcggcgtgggggctacacacggagtcaccattgttcaccgaacagctacaaggcagagcacccgccattcagttcactcatcaagaaggagcaagaaaagatgtggaacgagctttcggggttttgcaaaaatgttgggccatcgtacgtcacccagcacggctatgggaatgggaacaacttgcagatatcatcttctgctccggctacccgtcgacggtcattcgccttcatctccatctgtgcaccgccgcagcctccagagcaaattcgcgaggccgtggtgcctagatctgagcccatcgtgaagggtgacggaggggaagaccaatgggaggagcgatgctgcgtgcacctcaggatatggagggtgatagagatggctggtgcgctgccggcggcggaaaatagcgtgtgcagtggcggcgtggggactttaggtcaggaattggggggcggcggcaacggcggacagggcatgcggcggcgtggggacttgtcaggaatcgggggcggtggtgagggctggtgcggcggtggcggagaggtcgtgcagcggcgcaggatggggcgagatttgggggcggcgatagaagaggagtcgaactctcgaacccgcgcgaaggaaacgagaataagtcgcggctga

SEQ ID NO: 86022 - DNA, 1380 bp, Oryza sativa
  Clone ID: PAT_MRT4530_85102C.1
atggcttcctccgacgccgcggccgcgcaggcggcgacgccgctgctgaaggacgagctggacatcgtgatcccgacgatccgcaacctggacttcctggagatgtggaggcccttcttccagccgtaccacctcatcatcgtccaggacggcgaccccaagaagacgatccgggtgcccgagggcttcgactacgagctctacaaccgcgacgacatcaaccggatcctcggccccagggcctcctgcatctccttcaaggactccgcctgccgctgcttcggctacatggtctccaagaagaagtacatctacaccatcgacgacgactgcttcgttgctaaagacccatcaggaaaggatatcaatgcacttgagcagcacatcaagaaccttctgaacccttccactccatttttcttcaacactttgtatgacccgtaccgtgatggcgctgattttgtccgtgggtaccccttcagcctccgtgagggtgccccgactgccgtttctcatgggctttggctcaacattccagactatgatgcccctacccagcttgtcaagcctcttgagaggaacagcaggtatgtggatgctgttatgacaatcccgaagggcactttattcccgatgtgtggaatgaaccttgcttttgaccgtgacctcatcggtcctgcgatgtactttggtcttatgggtgatggccagcctattggtcgttacgacgatatgtgggcaggatggtgcaccaaggtgattaccgatcacttgggtttgggtgttaagactggccttccctacatctggcacagcaaagcgagcaacccctttgtgaacctcaagaaggaatacaacggcatattctggcaggaggagctgatccccttcttccagtctgcgtccctcccgaaggaggccgacactgtccagaagtgttaccttgagctggccaagcaagtgagggcgaagctcgggaaggtcgatggctacttcaacaagctcgccgactccatggtcacatggattgaggcctgggatcagctgaacccggataccaaagggagctgttgccaccgcaaacggcactgccaagagcaagtgagagggcggtagtataaaaacttcgtttgttcatgtgaactgcttatactgaaataccgaaatacttttggttttgttagtgctgattgaactgagatcgcttcagcgttgtaacttcaaatgtgtcacctccctggacaaccgtcctggctgttctatggtatttacaattttttttttctttttggtgtgatgaaacagttgtaatgtcaggatcgaatcaccttctaattagaataaagatattggttatgtttacataaaaaaaaaaaaaaa

SEQ ID NO: 86023 - DNA, 446 bp, Oryza sativa
  Clone ID: PAT_MRT4530_85103C.1
gttttagtaagatccaaaaatggatctgtcaagacaatcatctgcttgactccaggtacatgagctgacgacaagattttggtttcctcctgggatgctgcttcctatctgagagtggatgtggtgattgtccgtcacagaagaaagtatacagaaattggtagctaacagattcattgccgcatgcgtgcgctaagcctgtaacacaacaccatacgattcttttgtcgcagcatacgtgccccgtaacagccactgatgtatattgacacctcccatttcatttgatcctctagactgcaagtaggaaacggcaggttgcatgctattagctgaagtagtagcggttttgtttcttggtgagctttggatgtgtgtttgtgggaaaacccagaatgataaaagaatataggagtaaggatgcagacatttgtatgcactgtaaa

SEQ ID NO: 86024 - DNA, 356 bp, Oryza sativa
  Clone ID: PAT_MRT4530_85104C.1
cacacgcgtacgtacacccacagctggagccatgaccagagtgagcaccatcatgctcggcgtgaagccccccgaggcggtgccctagtcggtcgcctagcccgtgcccaagcgtgtgcacgtcaatgagccgcccaacgaggagcagggcggtggcatgctcgccgtgctgctgggtttcgccgccacgttcgccggcaacgccaacgggcaggtcaaggacgagttgttcgacaagtacctggagaagagcgaggtcaacaacgagctgaacgtcaagaagaggctggccaactgcggcagcaacttcacgagggcgtacaccggctagttcggcagctaccacttcccctaca

SEQ ID NO: 86025 - DNA, 1443 bp, Oryza sativa
  Clone ID: PAT_MRT4530_85105C.1
atggtgcgtggtgctcggactgcggaagaacctgtgttggaggaggtgcagccttgggaaattgcagttgaggagctcagggtgcacctgcaggatatccaacggaaggtggacgaagatgggaagcagtttcaagaacaactgcagaaccaggccgtacaagctcaagtccacaaagatgaggtaatgcagaacctaaaggttccttattctattcataatgtctcttttatctcagacttcagattgttggatcttaaaggctttgatatcatctttggctgggtggcaattgatcctaccaaagtgcaagctgtaaaaaattggcctgtacctaaatctgtcactgatctcagcggattcttaggtttggctggttactatcggaagttcattaaagattttggtcttatttgcaaaccattatttactgccttgaagaaaactggattcacttggcaagatgagcagcaacaagcctttgcaacaatcaaggataaattggctcatgcgccagtccttgcaatgcctaatttcactcaaccttttatactggaagcagatgctagtggtaccggcctgggtgctgtcttgatgcagaacaaccgacccttggcatattttagtaaagcaattggccctaaggcagctggactctctacttatgacaaagaagcattggctatattggaagcattaaaaaagtggaagcattatttcttgggcacttctctgattattcgaacagaccaagcaagcctcaaatacattaatgagcaacgccttacagaagggattcaacataaattgctaatcaagctcctcagctacgattacaaaatagagtacaagaaaggcaaagaaaacaaggctgctgatgcattatctcgcataccttctgttgctcagttgttttctaccacgataattgttcctacttggatcactgagatcctggccagttatgcaacagacccaaaatgcacagcattggaatctcagctgcgaatcactcctcagggccatcctccttatactctgactagtggcatcttgcgatataagaatcgtctctatgtgggtgctggcatgaagaaggatattgcctcatatgtcaaactctgcccagtttgtcagaaaaacaagtctgaacataatctgcagcctgggttacttcaccctctaccaatccctgagatggcttggacacacatttctatggacttcattgaaggcctccctaaatctgataacaaggatgtcatttgggtcattgtggacagcgccaatacgcttggcgctgaggttgggcgtggcagctacctcagcgccaaccgcattggcgctaagatggcgaatctctgcgccaaccgcgtcggcgctgaggtgccaaacttcagcgccaacgggcctggcgctgagcgccatttccgctggcgttga

SEQ ID NO: 86026 - DNA, 1224 bp, Oryza sativa
  Clone ID: PAT_MRT4530_85106C.1
cgatgttcgttatatgccgatggtgtagccctttttgtaaaaccatccgaagatgagctttcgacactgaaaaagatccttatattctttgcccatgtcactggtctacacacaaacatgagcaaaacggagatacacaacatcttttgttcagatctagaccttgatggaatcttaccgttctttccaggaaatataaaatcattcccctgcaaatatcttggtctacctcttcataccaggaaactgaggaaagttgaactacaaccattggtggataagataggatcgagaatacgaggatggaaaggcagatttttctcttcggctggcagggaggtccttgtcaaatcgaccttgtcagcaacaccaatctacgaccttacagttttaccacaaaatagatggctttatatgcggattaatcgctttagatgatctttccattggaaaggagatggcatggacaatgtcagtgcgggaagctgcctactaaattggaactatgtttgcaagccaaaggattatggtggtcttggaatcctgaatttggaaaaatttacgccagccttcagactgcgctggctctggcttggttggaaagatgattcgaaaccttgggcaaacatggaaaccccatgcaacgacattaatagagccctttttcgagcagggactgtcatttccattggaaatggggagaaaataaaattcttgacagataattggttgcaggggagctctcccaaagaaataacgccttcaatcttccgactagtgaagaggaaatcaaactgtctaaaatgggattttgagagcaatcactggatggcatggaaaaacccgactacttcggtgtcagagattgatgaggtagtgcaaattggaagcaaattacaaaatgtaaccctaacacaaagaagttcagatgatatctcgtggaaatggagttagaatgatcaatactcagcgaaaagtgcttatctagcacaattccaaggaggaaccacccatgcaatgtttaaaccaatttggacaccacaggataaacctaagcagagattctttggatggctgctccttcaccagaagacactcactgccgacaacttattgaagcgacattgttcttgtgattggatctgtggtgtttgtacaagcgcttttgaagacgcaaaccacctagcaaaagaatgcactttcactctttcggtgtggaaccaa

SEQ ID NO: 86027 - DNA, 387 bp, Oryza sativa
  Clone ID: PAT_MRT4530_85107C.1
atggccgccgcctcgctggcggagggcggagggtcctattggaccttggacctcgtggagaaaatggaagaagtccaattttggtccctcagatatgtgtcaagtttcatctgcgtcctaaaccgcaaaaacagggtcacctacctcaccattgtcaagctctcaattcgcgccaaggttgacaagaagagccacgtggtggcgatggaggggatctcaattgatgtcaaccatgtaagaaggaggcaacgcccatgccatggcgggttgggtctagtgaagggcgcatcgactcaaggacctcctactgactggccacaccaagctcctgcctactgccgcttgcctcctcgcttggagcacgttgtgtctagggttgatgagtga

SEQ ID NO: 86028 - DNA, 1500 bp, Oryza sativa
  Clone ID: PAT_MRT4530_85108C.1
acattttttaccctctctaaaagcgaataccatccacttctccttttgatcatccttagacttggatccatcgtaacgacaccggttctctgccttccggaacaggcctcggcactgctccagctaaagggctcgttcaacgtgacggccggtgactactccaccgtctttcgatcatgggtcgccggtgcagactgctgccactgggagggcgtccactgcgatggtgccgatggtcgtgtaacctcactcgacttgggcggccaccacctgcaagctgacagcgtccaccctgcattgttcaggttaacctcactcaaacaccttgatctctctggtaacaacttcagcatgtccaagctcccgttcactgggttccaggagctcactgagctcatgcaccttgacctctccaacaccaatatcgctggtgaggtgccggcaggcatcgggagcattatgaacctcgtgtatcttgacctctccaccaaattctatgctctcgtttacgatgacgaaaacaacatcatgaagttcaccttggattcattttggcagctcaaagcgccaaacatggagacctttctcacaaacctcaccaacctagagcagctccatatgggaatgatggacatgtccagggaaggtgaacggtggtgtgaccacatagccaagtccacacctaagcttcaggttttaagtttgccttggtgctcactgtcaggtcccatctgcgcatcgttgtcggccatgcaatcactgaatactattgagcttcaccgcaatcacttgtcaggttcaataccagagttcttcgctagcttctccaacctctctgttcttcagctatccaaaaacgactttcaaggatggtttcctcccatcatcttccagcacaagaagttgagaatgattgatctttctaagaatcctggcatatctggtaatctgccgaatttctcacaggaaagtagcttggagaatctgtttgtcagtagcacaaacttcacaggtacgattacaagatccatcagcaatctcaaatctttgaagaagttagacctttggtgcaagtggcttctctggaacgcttccttcttcgttaggtagcctcaaatatttggatttgctagaagtgtctggattacagctagtaggatccataccttcatggatctcaaacctaacttctcttacagctctccagttctctaactgtggattgtctggacaagtaccttcttcaataggaaacttaaggaaattgactaaattagcattgtacaactgcactttttacagggaaggtgcctccacagatctttaatttgactcagttgcaatctatgcagctccattcgaacaatttggccggcacggtagaactcacatcattcacaaaagtgaaaaacctatctgtcgtgaatctctcaaacaataaactacttgtgctacattgatggactacttgcagacgaagccgtatcacctatgccgcgg

SEQ ID NO: 86029 - DNA, 682 bp, Oryza sativa
  Clone ID: PAT_MRT4530_85109C.1
ggccgcttttttttttttttttttcggaaaaacaaaagacgatgttgcactggaatagtggtagtaaaacacaaaaggtgataatttaagtgaatgaatcacacgaagccgtaccaaacacaagacgcagtatacatgaaaaatttctatcacacggcacacgtagctatagtaatttcttcagttattctgatggtcgagtccctcggataaaaaacaaactcggtgagaaacaactggttttaatgatcatacactgatacatacacacagtacatatatagcacagcgatcgagcgtcgtctcacgcatcacgtacataccactggctgtgtattaactctgtatgtacgtataatcgtatgtgtgctggcttagtcgcagcacatctcgcagatccagcagcagcacagcgcagcaatacatccttcaatgaagcctttgtctcccctagacttggtgcttcctcgccgcgatttcttcccgccttgctcagctgctcccgctgccgtcgggtaccctggaggcggctggttgttgctgttgttctccatggtgtagtacagagactagcttccttctcgtggagaatgaatcactattgaacagagatggatccagagaagtatgtcttgagataatcccggccgacaatcccaagtcccctatatatcccggccgg

SEQ ID NO: 86030 - DNA, 1645 bp, Oryza sativa
  unsure (1)..(1645): unsure at all n locations
  Clone ID: PAT_MRT4530_8510C.1
aggtacaatggaaggatgcaagaatgttcggttgatccttccctcttatggatgtgatatcagatngtgtcagcaatgcgtcaggctgagattggggacaaattggtgggccgttttccgtttattgaccaacagttacaaagtttggaatcatgcgatctgaacgacaaaacgctgacaaagttggtgatcgctgatcagttcagttgccaccacctccgccgccgccgccttcttcagctgccacagccgaaggcaacgccgccgccggcggcctgaagcccggcaggtcgcaggggatgtgcggcacgaaggggcagtgctgcggcgggtcggcgtagaagcgggcgcactcgagcgccggccgctggtgggggaagttggggatgcagttgaggcgcacgtcgagcaccttgctccggacgagctcgaggcaatggcggcggccgacggagtggaagtagttgtcggagagggagaggttctgcagcttcccggtcttggccagcgcgcagagcacgtcggggatgtggccgtacagctggttcccggcgaggttgagctcctcgacgagccccaggcagccgagggagagcgggatgggtccggtgatgtcgttgccgccggcgtcgaacacggtgagcccctccaccaatccgatctcgtaggggaggcatcccgagaggtggttgttgaggaagagcacctcggagaggttcgccgacgtgttgtagatggagcgcgggatcgggccggtgaactggttgttggccaccaccaggtactccgccgtggtgctcccgaagttgtccgggatgttgccgtagaagccgttgttgttgaggaagagcgcgacgacggtgaggtcgaacaccggcggcggcaccgtgccgacgaagcggttgaagcggaggtcgaggaagaggaggcggccgagcgggacgacggtggccgggaacgcgccggagaagttgttgttggagaggtcgagctcgtagaagtacgggaggccggtgaggtcggggacctcgccggagaagttgttggagttggcgtggaagagcgctaggtccgggaacgcgtcgacgaagccggagaggctgggcgcgccgaggccgtagccgttgaagtcgatggacgcgatggtgagcgtggtgttgtccttcggcgtcgttgcacccggcggcgccggcgggtgctcgcagtagaagcccttgtacatgtcgccgccgaagtagctgtcgcagaggttggggccgacccacgacgccgtcacgccgcgcgggtcgctggtgatggtcgccttgaacgcctggatcaccgggtacagcgcctgcaggttctcgttcaggaagtcctccggcgacggcgccggcgccggcgggcagccacacttatccagcgacgccgacttcagggggtccgccggcgccggcgccggcccgcagccacacgtatccagcgacggcgccgataccttcccttgtccaccgcgatcgggcctccacgacggcgcattgcgcgacaccatggcgaagtgagtatggctggggtcacacaccacgccgtgcaggtgcagcgcggcgagcaggagcgcgagcgcgagcgcaagcaggcgcgcattatggcctgaagccgccgccat

SEQ ID NO: 86031 - DNA, 1220 bp, Oryza sativa
  Clone ID: PAT_MRT4530_85110C.1
atgcgtcggccaccaccgcctccacggggacctcgccgtgggcggcggccatcgtcgacctcgccgctcctcgccctgccaccgagcgccttatccattaccgctaccgtcgtcgccgccgccgccgcagcagcgagaacggtgccagccgtgcaggcacgcgcggccgagctcggcctcgaccgccgtccgcaatgggctcgtcgagctctacctcgcacacggcgagctcgcctccgcgtgggcgctcgtttcttgtacggccatggtgacaagccacgcgaggcacgggttcttgacgaggctgtggtgcttttcttcgccatggcggatgatagtggcgtgtgcatcgacatcgtcgccgccgccgccgtcgcgttctcggcgtgcacgcaaattggagaccttgcgctgggtcgggaggcgcaccggcgcgtcgcggaaaggaaggttgctctgggtttcgtcgcgtggaacgcgctggttgacatgtacacgaagtgcggcgacgcggcggcggcgcaccggtgcttcaggagggatgcccgtgcagaccagcttgttgaagatgttgaaatagatgttgaggaggtaccagacgaggatcatggctccgagctgcatcgtccgcgaaacgccgccggcgacggcgctgccgtccgccttcccgccaccttccgccggtggcgaggccgccgcggccgtcgccaccgccatcttcctcgtcgcggcgccgctgttccacagaagtgggggcgcgagcagcatgcgcccgccgcgaatgccgagcggcagcacgccggcgaccgtgcatcgattgagagacgacagagtcgtcgtcatcggggaagaagaacacgaggcgacatgccgccgccgcggggaggccacccaggctctagaagtggccgccaccacggcctacatctcgccacgccgcgttccacaaccacgcgtccacggtttcttggtcgcaacaatggcgtcgcctcaccggaccaaatcaaatcaatcgatcgaacgccgccctggactctcggaacgcgcgcgcggtggcaggaggacgagacgccatctgctacttgtggaggaggaggggtgcctgcggctgcggcgcgagtgggcggcgaggcgagggtcgggagtgaccggcaaaactaggtctcccgccctccccagtccaaaaagaaaattggggaaaaaaccgaccgcttggccga

SEQ ID NO: 86032 - DNA, 552 bp, Oryza sativa
  Clone ID: PAT_MRT4530_85111C.1
atgtccgacttctgcgaccgctcccgcaccgacgcctgggacttctccgcgttcgtccgcacctacgccgcctacctcgacgaccggctcgagtaccggatgcaggccaagcacggcggtgccgcgcaccagggacgaccgctccgcgagcagctgtacgcgtcccccgggaaccgcttcaactacgacgacttcatcatgagagacgacgaggccacgaacgccgaggccgacaaggcgatggcgctcgtagcgagggagacgccgacgagcgagatgacgctggagcagctcctcgcgaaggcacaactcctcctggcgccgcattgtcttttgctgccagtggcgatggtggtggtggttcttgctcttgagaagaagctgctggtggtggtgcttggaggagcacttgtagaagccggaggggtcggaggacatcaggcttctcgaggagaaggcatccgtgccgtcgtcgtcggagatggtgaagccataggggttggacgacagcttcggcttcttcccaccattgaaatgcccatgagaccgtga

SEQ ID NO: 86033 - DNA, 1203 bp, Oryza sativa
  Clone ID: PAT_MRT4530_85112C.1
cgccatccatgtccttgagtaaaacactccctgaccacctactccaagcgttgacatgccgctgcaaccaaatcttgtgaatcagggcattcataaaacaaatgtaatattgtctcatctgtgtgacaaaaggaacaattcttacttccttgccaattgcgcttggccaggttagcccttgtcaaaactatcccacgacgtaaataccttaggaagatcatgactttaagtggtatttttactttccaaattactttatttatgttgggcacatctgaatgtaccaaggcaagataatgtgacttaactgaaaactctccattctggattaaattctagtggaacttatctcggtcctgagtaagcgctagatttgccattcgtggaacatggttattccatgccactaattttggctcaataagatcccttcgccaagatacattcggagggtagttttgtagcacatttgctatagtatcctgtttattgtataggcaagggtattgttctcacagtggtgcttctctcataatgaatttgccaaaacgtagaaaatcacgcttgaccttcataaggctggcctagaagtatgagtccctagctttccactcgacttgtgacataggttttgagcccaagtacttgttacgaatcaattgttgccatacaccatccatcgtgagtagcttaaataaccacttgctaggaagggcaatgtttttcatatataaatcatgaattcctaaatcccctttgttctttgggtcggcacataatactccacttcatcaaatgacactttttcttttgatcatcacactgccaatagaatctagagcgaaaacaataaagtttcttgagtacacctctcgatattgcgaagaaaaacatcatatacaggggaagactactaagcactgagtttatcaatgttaaacgtcttcccgtggaaagtagtttccctttccagctaccaagtctcttctcatagcgttcttctacccatttccaatcattatttcttagtttcctataatgaataggaaagtagcataacgggaattcgccagaagaacaaccaaagagtttggtatattggtcttccatggttcgagcatcaccaaaatagaacaattcactcttatggaagttaatcttgagacctgagagatgctcaaaagcacaaagcaaaagcttcat

SEQ ID NO: 86034 - DNA, 243 bp, Oryza sativa
  unsure (1)..(243): unsure at all n locations
  Clone ID: PAT_MRT4530_85113C.1
accgtcgagtctctactctgtgcacagcgctctctctcgtgcggcgagacaccgggcagcanccatggcgtcccgacctctcttaacctggcaactttctcctggcgctaccagcgcataacaacagcgacgtccggcctcgacgccgacgcctgcgccgagcgcgacgccatcgtcttccgctcctacgtcgcgctcggctcctaccaggtgagctcagctcccttgcctttcccctcggtc

SEQ ID NO: 86035 - DNA, 267 bp, Oryza sativa
  Clone ID: PAT_MRT4530_85114C.1
ctattgttgttcatttaaaatagaaccaaatatgctgaaactcgtggtagacgaacgcactgtcttcaatatggtgcttctcctgatatgtgttcgatatagacgttcatgtggcttcttgaggtgctctataaggaggaaggtgaccagtgaggagcagaagttgctgaatatttccaggcgatgcatgtattgaaaaaatagcacatgtaaaactttcaggtgatatttgtatcttttggtttttgcattatcaattatcaccat

SEQ ID NO: 86036 - DNA, 168 bp, Oryza sativa
  Clone ID: PAT_MRT4530_85115C.1
atgtctccaagttttacttggaaaccgcttgacctgcgatataaaagggaccccctgggaggacctaagaggaggaatctgatagccaacatcatcaccatagcctacgaagtcggagcctgcggaagccagattgccgagaggagaagtagcgggcgggatgtatag

SEQ ID NO: 86037 - DNA, 145 bp, Oryza sativa
  Clone ID: PAT_MRT4530_85116C.1
aatttaacccaagccaactgagatcaatagactcaaagcatagccaagacagccgagcactggtgtaatctaaggactcagagggtaacagcgactcagagcagtattagggtatatacctagatggcactcaactcagggctgg

SEQ ID NO: 86038 - DNA, 299 bp, Oryza sativa
  unsure (1)..(299): unsure at all n locations
  Clone ID: PAT_MRT4530_85117C.1
ctcgaaccctcgcttgcnacagtttttncccctctcccgacccctctncctcctcgattccggcggcctcgtcgccggcggagggagggagaggggttgtcccccctcccctagtatagtagccgggctagtctcgtnaggtcgggttcttctcgttttncttctcgttggtgtggtatggaggttggagacgacggcggcattgcggatgtagccagtntcggtnatggnaacgcnattacaaccgaagatgatggcggcggcgcggntccagtccgnggcgatggcggtggcggcgg

SEQ ID NO: 86039 - DNA, 474 bp, Oryza sativa
  Clone ID: PAT_MRT4530_85118C.1
gtttcttacttagcctgagctgtgcaatggggctgctccggctaggtagtatcggcggcggacccgagctcgtggcggtggtgtgtgtaggctgcattgggcggacggctatggctgttcaggaagctgaagtccgacgactagtacagtgtactacgtacagggactcccggcagacgattaactagaggtgcgtcgacctacttcgcaggactagctatggtgataatgtttggcatggaactgagaaattacttagcagccaatactagcacatctgtgattgctgctaggatttcagatggctagttgttacggatagattgtaacttaagcttgcctgcactttcatgcgaatgtgcatcagtagatgagatgcaatgttgtggcaacaaacagatcgtacataaccaaaactgctaccgcatattcaattgatcggaatctagtgactactggatccgagttatattc

SEQ ID NO: 86040 - DNA, 796 bp, Oryza sativa
  Clone ID: PAT_MRT4530_85119C.1
ggcagcaaaaaccatttccaattgattacttagaatgtacgaaaaaaaaactagagttgcatacagggcattgcagaaacaaaatagcagtcaagtgaatacacaacaaatggttacacatatcagcacagcgatgcaacagttgattactatatataagcacagcacaagataaaaatggtaaacataaccaagttttttttgctgtcatacaagataatgactgcaaaataatgaagccaagctaccactgaaatgtggtagaaccaatacaacaaactaaacattgagacactgattgtagccatccagacatcaagtaggcacaaggccgacataatcatcataactttctatccgaattaaaacggcgattattgctagaacgatcatgactatgctcaaaagaaaactgaatactgccttgtacttcctggactttcccatgcttcttgtgacacagatatcttgctctttgcactcaccttcagaggatgccttgcaggatgcgtcctcaacttctggagtgcagagtactgatttatcttcgttggagagaatttgagtcgtatcatcagcactctgtgcgtctatggtctcgttatcatattttgcctcctcaatcttgctgtcagaaagctgagactgcatctcttcagatgattcctctagttcattactttcctcacttggtgatgatgagctgttcagcttggcaatggatcgttcctcattgcgagcagagtcaaagtcatatgagctctggagtgatctgagaagcttccttggcgttgtg

SEQ ID NO: 86041 - DNA, 2058 bp, Oryza sativa
  Clone ID: PAT_MRT4530_8511C.1
atggcccctcgcaagccaaaccctgcttcggcgaaagggccggatcccggccgagttgatgacgacagcaccgcctttttgggggtctctcttgtggacgacgtcgagctggcaaagctggtcagctctggggcgttggtcgcggggcaggctttcgccccagggaaagccgtggtgccgaaacctatcgacaatcggacggtggtattcgctgtcttttttgaggcatggctacggtttccctgcaacgtgttgttgccggagatccttcgcctcttccaggtggaacttccacagctgagcccgtcggcgcttgttcagatcgctatcttcgaccgggcgtgccggacttccgggtttgagcctaacgccgagctcttcggcgccatatttttcgccaccgtgaactcgaaaacggtgattaccccggctgggacgaagaagagagtgttcgggagcgtgaactttaacattcgtcccgagcggtccaatctctggccggtgaacgctgccatgtcgaagtgggaccgccattggatggctagggcgatcgcgcctaaccggaaacccaagatcgccgtggacggcgctatggaggcgcggttcgttcttctgcggaaggtttgctcccgccttagctgccgtgacttggtggaggaattctgtatgcttcgcatctttcccctctcccagtcatggcaagtcagagttgatcaaggcgaagaggttgacggtttgccgaacctggttcttcctgaggggacgaacagaccttcgcgaaaacgaatgcgtggacaagtgaagcttgcccctaggaagcgaagggttcctgcttcgtcggactccaacgccgacgacgagaacgatgccaaagaacgcgacggcgaggaggaaggagaggaggaagaggaggccgtggccgataaggccgcgaacgaggcgatcgaagaccgcgtcgacgcccccggctacactcctaccccaagtcccggtcacaacgagaccggggtggagtcgaacagctccccccttcgacggaaggatttggaaggggcgaaggctctagttgcgttctccttgggcacggtggcgaaggaaggtccggtgaagaagatctcccaaaagaaaggactcgtcgacatcgcccgcattttcagcgacgacgagtcttctgacgagactccgacttcgcctgctggccgcagtttggacctctcgactgctccccttgctccgctcggcgttgctggggcaggcggtggcgccgccgccggggcttccgcctccgccgaacggatcgtgtcgaccgcggcgagggttttcgggagccctgtgcgtgagccagctatttcgctgctggtcaaggcgaaggggaaattcttgcggctcactgttcgacggagcgaactgcgggcccgttttgacggtttcaagagccgtcttcgggccaaggatgatgaaataagccgcaagaacttggaggtggaggccctggcccacaccctcaaggaggcgaaggctgaagtcaaacgccttcagtccgaatgggataaggggaaagaggccagggccaaggttgatcgcctcaaggccgaactggagaaggagaaggcccattcagcggtgcttgtcgattactacaaccttactgagccaaagatagaggctcttcgccagaaggctagcagggccgaagcgagcgccgcagtggagtcggagcggtttttgcgggagatggcgaagaccaccgaatccgcgagaacggcttgccaaacgctccgcctcgcccttaccgacatgggcgcgaagcagttcggctgcgagcacgttgccgagttccctacctatgcgaaggggtactgggagattagtgcgcagaacatttcgcccgctcttcgcgcatggcgaaaacagttctggcagaaagacggccggtccgctgccaaggcgcgccttctggagcaactggcgaaggcggaggtggcagatcggtgcgaagaagagggcgcggtgggcgaagaggttggaggcgatgcccaggatcacccagacgtgtga

SEQ ID NO: 86042 - DNA, 700 bp, Oryza sativa
  Clone ID: PAT_MRT4530_85120C.1
ccggccggggaaaaaaaaatcccatctcagtccgccatggacgcggagatggacctcctcgccgacgacgacggcggcgaggccgagaggctggaggccgcggaggcgcaggccgacctcctccgcgatcgcctccgcctcgccgtcatcagcatcgccacctccgaaggaaagaaggcggggatggaggtctccgaccccgtcgtcgcctgcatcgccgatctggcctacaagaccgtagagcagctggctaaggatgttgagttgtttgcacagcatgctggtcgtaaatccatcaagatggaagatgttatactcacagcacatagaaatgagcatctgatgggcctcctgcggacattttctcaagaactgaagggtaaggagccttccagcgagaggaagagaaagaaatcttcgaagaaggacgacaacgtgatgcaaatctgatttaagtcatgagataaatcctcttcccatagaacaaagtggtaggttcaagcaggaaactctgcaagtaactcaggctacccactgatcctgtatttcacacatttagatgtggtatgacacaatgttgtctgtggaaagtggagatccttcacacctgtaaattcactgaggctgttgtgtcaagtagtaaatggcaaaattcagagtttggttcttacacggggatcatgtgctgtcacactttctg

SEQ ID NO: 86043 - DNA, 371 bp, Oryza sativa
  unsure (1)..(371): unsure at all n locations
  Clone ID: PAT_MRT4530_85121C.1
gctcttctttttttcttttaagtgtaaatagccagnaactgatatatttgcaatgtctgggcagtatagattaccaatacttaagtttgaaccaacaagtatangcaaacaaaacaagatatgcagacctacatcaacaggtgnctgcctcacagngcatacataccccgccggtgngctcaggctcaagctcagcctcagcgctcgncaagtacagtagactccaagcccagtcaatggntgcaaccgggcacacggctcacgcgcgngtacgctttccaattcgtcacatctgtcttcatgccaggtacaccacatgagctcttggctcgtggttctactcatgttggataactgcaattgacccaatc

SEQ ID NO: 86044 - DNA, 447 bp, Oryza sativa
  Clone ID: PAT_MRT4530_85122C.1
atggacgcggagatggacctcctcgccgacgacgacggcggcgaggccgagaggctggaggccgcggaggcgcaggccgacctcctccgcgatcgcctccgcctcgccgtcatcagcatcgccacctccgaaggaaagaaggcggggatggaggtctccgaccccgtcgtcgcctgcatcgccgatctggcctacaagaccgtaggtagttccaaactgttggcaacatacataacagagcagctggctaaggatgttgagttgtttgcacagcatgctggtcgtaaatccatcaagatggaagatgttatactcacagcacatagaaatgagcatctgatgggcctcctgcggacattttctcaagaactgaagggtaaggagccttccagcgagaggaagagaaagaaatcttcgaagaaggacgacaacgtgatgcaaatctga

SEQ ID NO: 86045 - DNA, 1056 bp, Oryza sativa
  Clone ID: PAT_MRT4530_85123C.1
atggcgcctcttgcgacctcgtcaacgtcgatccccccgagctccagttcccttgttaagacgacgagccccaagaagtactgcgtgcgccccaataatggcgtcgtgcggccgcgatccgcctccgtcgttgtagtcacgatgcaagcccagattgtggcgcctccggactttcagtgcaaggacaagttcttggtgcagagcgtggtcgtcgacgatggcttgtcagctaaggacatcacctctcaaatgtttctgagagatgagaacaacatggttgaggaggtgaagctgaaggtttcttatgtgatgccacctgaaccagcgatggagattgcagaggagtctgatattccaaagagaattttggtgcctatgcagcggattttggataatgggaggagtggttcggagctgtcaagtggtaatgtctcattgagatcagctgagatggggacagagttgggatcacctcttggacgatttgtgagaaatgaggatatgctgaagactgcaagtcctgttgttgaaacaagagtacatgcaggacctgatgaacaatacctcgagctgtccgctttggttgcaaaattgaccgaagaaaagaagtctgcacttgagcaaaataggaaacttcgagaggagctgatgctacttgttctcaacacaaaattctctaggttatccatagacgacaatggataactggtgattgggctacttagcattattctgggttgtcttgtaaagaaatgagaaatctcatattccagtctagtcagataatttctacagtaaataaagaggtgacgtcgttggggatgcttagttttgttggtcagctgccaaaggatgcagaaaaacaaatgtaccaagtttggtgaggtttactgtttacaagtgtccgatggacaaaaaagggtggtgtttgtgtggcgtcgtagtggtaatctagcttgatccatgatgtatttttaaactaatcattggaaagttactcctattgattgttacgtgtgtggttttccagtattagattttcttaattttatctat

SEQ ID NO: 86046 - DNA, 183 bp, Oryza sativa
  Clone ID: PAT_MRT4530_85124C.1
atggcgacatctaagtgcgtcgtgcgcagaataaaccatttgaaggctgagatggaaggagagggaggtatctcgacaacaccctcaggagagatcacaacgcccaaagcctctgtcaccctaccaccaagcaactactactaccagtatgcgatcttcgccaagctggcgcccctccactga

SEQ ID NO: 86047 - DNA, 1576 bp, Oryza sativa
  Clone ID: PAT_MRT4530_85125C.1
ccgggctgaggaattcggcacgaggcgccttttcctcctccgggctgggcaatggccgaaaccctagtcccgccgcgccgcaccctctctcccccaccagccatggggttcccgggcggctctggcggcgccgaggcccctcccctctcctccgactccggctctcctcggtcgtcctccctctcttttgccggtcgtgccccctgctccaccgtcactctccgtcgagctgagcacaatggatagttgtccgtcgcccattgcaaggacaattgatgacttctgaaataaagcacggtggaaagctatcctgtagcggcatggattctgatggcccccatacttcacttatacatggtcttcctgatgagattgctattctttgcttagcgagagttccacggcgatatcataatgctctcaggtgtgtctcaaagagatggagggcactgctttccagtgaagagtggcactcttgccgcaagaggaacaatttggatgagccttgggtatatgtgatttgtaggagtacgggcatcaaatgctatgtacttgctcctgatcctacaacccgctccttgaaaattatgcaagtcatcgaacccccatgctcgtctagggaaggcatttccattgagaccttagacaagagattatttcttttgggtggttgtagctggctaaaagatgctaatgatgaagtattttgttatgatgcctcatcaaattgctggagcagtgtagctccaatgcctactgctaggtgctattttgtttctgcagctctggacaagaaactatacattactggtggactaggtttgacagacaagtcgccaaattcatgggacatctatgatccagtcacaaactcttggtgtgtgcacaagaatccaatgctcacccctgacattgtaaaattcgtggcattggatggggagttggtaactgttcacaaggctgcctggaacagaatgtactttgcagtcgtcatggacggaacgctctacatgctggagcagtcgctcggcacaaagctgatgatgtggcagaaggagacgaaggagtggatcatgcttggtaggctgtctgacaagcttacaaggcctccttgtgagctcgtaggcattgggagaaagatttacattattggaagagggctgagtatagtgacaattgacctggatactgtcagggcagatggattcttggtgtcctcttccacaggcccattggtggagcatgacttcccacctgagagatgccgggttatcagcatctgaaggcatcagcttaactgtatattgtccggagaaaatgtcacacatgtgaaggtgacatgggttgattgatgcacatatgaaataaggcaatcctccaggcattgtttactcgagagagtgcccgttgctaattggtgtttaattgtttgtagtatttttgctgtatctccgacttgtgtgcgtttgctgtaacaaacgaagtctgaggttcagttgtttatttcacacctatacatattgagataataacttgttcataattcaaaagtataaaaaaacctgtgattgttaaa

SEQ ID NO: 86048 - DNA, 280 bp, Oryza sativa
  unsure (1)..(280): unsure at all n locations
  Clone ID: PAT_MRT4530_85126C.1
gcggncgcgtgggctcgatccctactgcgagagcggggggtaaaaggaacaaacggtgctggaggaaccacagtccctctatcaagacatctacataaagaaccccatatcgcagaatatacaaccgcagcttctttgtgaaatctaatttcatccgaaccatgctaaatttctagggggtcgccgggggaatttgccanctatcattngcttataccctactggctttggagaaactactaccaaaaacaccctgatggcgttgattttcaccagtctt

SEQ ID NO: 86049 - DNA, 778 bp, Oryza sativa
  Clone ID: PAT_MRT4530_85127C.1
attttgttatgatgcctcatcaaattgctggagcagtgtagctccaatgcctactgctaggtgctattttgtttctgcagctctggacaagaaactatacattactggtggactaggtttgacagacaagtcgccaaattcatgggacatctatgatccagtcacaaactcttggtgtgtgcacaagaatccaatgctcacccctgacattgtaaaattcgtggcattggatggggagttggtaactgttcacaaggctgcctggaacagaatgtactttgcaggtatatatgatccattgtgccgcacttggaggggcactgagaatgaaattgccctatgttggtctggatcaacagtcgtcatggacggaacgctctacatgctggagcagtcgctcggcacaaagctgatgatgtggcagaaggagacgaaggagtggatcatgcttggtaggctgtctgacaagcttacaaggcctccttgtgagctcgtaggcattgggagaaagatttacattattggaagagggctgagtatagtgacaattgacctggatactgtcagggcagatggattcttggtgtcctcttccacaggcccattggtggagcatgacttcccacctgagagatgccgggttatcagcatctgaaggcatcagcttaactgtatattgtccggagaaatgtcacacattgtgaaggtacatggggttgattgatgcacatatgaaatagggcatcctccaggcattgtttactcgagagagtgcccg

SEQ ID NO: 86050 - DNA, 114 bp, Oryza sativa
  Clone ID: PAT_MRT4530_85128C.1
gcccaggctaaccacactttggtgctttgggtgcagttttttagcctctgtgataacatcttgcacaatgataaacctaaagtctatgccagttttgtatctgccatgaactag

SEQ ID NO: 86051 - DNA, 1305 bp, Oryza sativa
  Clone ID: PAT_MRT4530_85129C.1
atgctgatgtacttccaggctgcccgacagtcgcatgatgactcccgggatgatcaccgccaactcttaatctggatgatgaggaagaagaagaagatggaggggacgggaggggctagccagtggccagaggggacaggaggggcttcacctcgggaggaagctgcggccgccgtctgcgccgagctccccaccggtcggtcgtcgacttcctctagccgggcccgctttgtctgcggccgctgtcgccgccgcctcctgcctccactgtgccgagccacggaggtcccccctccccccggtcgctgccgcctccggtcctccagccctccggtcgtcggcaaggtggttcgcacatcctcgtcgtcgatggggtcatcgtcggcccgacagcggcgccggtcgtcggcgctgccgactccgccccaccacggccgcctccgactccgccccaccacccgtcgcctctgctcctcttcaccatgccagatccggtgggccgcgccgtcaactctgccccatggcaccgccgacgactctggtgggctgcgccatcgactctgccccaggcgcatcacgactgctaaccgcgtgcacgtgctcgcgggcggcgtcggcgtccatggacgtggagccttgcctagacgacgctctcggccactccttctgctacgccgccgccgccacagccaatgcgcactccttgtcgttccgccacgcatctccggtgccacgctctccgccgaccgcctctcccccatctgcagttgcgccggagagaacaaggagagaagagaagagaaaaagaaaagagacatttatgtgggcccacgggatccgcgacccagatcctcgaccggcggacgcctcctcgacaccgagcagctcttccgccgcggcggggagaagacaaagaagtggcccgtactcatccccgaggaggagctcgccatgtcgttcccgggcatcaagggtaccccactttgtggagtgtccgtgtctccccgaaatccccgtccccggccgcggccgtctctccccgctgctgtacttcgccgccgccgccgtgccaactctgactgcgtttccgagacggtgaggaggctgctgctgctgctgctgttctcgcgaccgaccgagaggcttctcctcctcctcctctgccctacgccgccacgcgctcgctcgatcgagccgctccacgccgccgtcgtcggcagcggccccgccgccgttgggttcgacatggccccaaaggaagctaagaatgcacccaagaacaccttacccaagtacatcccatag

SEQ ID NO: 86052 - DNA, 201 bp, Oryza sativa
  Clone ID: PAT_MRT4530_8512C.1
atggacggcacgaacgacgacggcttgcacagacggcgggtgaccggccccggcgacaacgatgcgagtccatttggttcgtcgccactcgccaagccagcaaggtgcaggcgtgcagctagagcggatctgcggagacggggtggggtttacggaacacgacgagcgacccaacgatccaaaagtgacaaaacgtggaat

SEQ ID NO: 86053 - DNA, 651 bp, Oryza sativa
  Clone ID: PAT_MRT4530_85130C.1
atggccaagatccagccccttccggcagcctcgccgtcggcggagtggcaccatggcgacggcggcggcggcggtgtgcaggggaagcaggcggtgtacacggtgtggatgaagtcgctggtgttcaacggccatggctgcacggtgtacggctccgacggccgcgtcgccttccgcgtcgacaactacggctgcaggggcagccgcgacgtcttcttcatggacaccgccggcaccaccctcatcggaatccaaaccaagagcttcgggatgatgaagagatgggaggcgagccggcaccacggcggcgagaaggagacgacgacggcgacggtgacgacgccgtggttcagagtgcagaggggccgaggtccaggaggagccatggccaccgtgacgctgcatggcggcgtcgggatggcgtacaggatcgacgggtgcccgagcaaatcggagtacaggatcagccgcggcggcggcggcggcggcggcggcgacggcgaggtggtggcggaggtggcgaggaagcagacggcgtcgggggtggtgctcggtgaggacgtgctgacgctgacagtgggcccgggtgcggatcacctcctcgtcttgggattggtcgtcgtgtgtggcctcatcagccgtgctatgtga

SEQ ID NO: 86054 - DNA, 351 bp, Oryza sativa
  Clone ID: PAT_MRT4530_85131C.1
atgtgcggccattgcttggcttcttgcgagacatgcgtgcagagcagagattggttagggaacccgtccatgagcagcttctcctcctactcgacatactcatatgtgcagccgtgtcaatctgggcagatcgattgtgactttgagccactagatctaccgccctcgagctatagcgggaccgagtgctacggatccgaccctctcgagggcggtgccgccagatccactggcctcgagcttcgccctcccgcccactactgtcgttgccacatccaccggaccgccatcgctaccccgccatcggctccctttgtggatctgaaggagggagaagtagaggaggcatag

SEQ ID NO: 86055 - DNA, 199 bp, Oryza sativa
  Clone ID: PAT_MRT4530_85132C.1
catgtattgaagggtcctgcagttatcatgaatgggaacagtacagtgattgtagaaaaagactgtaaagctatcatcaccaagtatggtaacataaaaattgagataagtgctgctccaagcagtgtagaagtattacagactgctggtgttgggctatgcccttctatcttcagcatgctttctatgtgtattgctg

SEQ ID NO: 86056 - DNA, 352 bp, Oryza sativa
  Clone ID: PAT_MRT4530_85133C.1
atgcggccagcggcctgccacctgcggtggagcctgccaggcggcacgcggcggcgtcccggcgggccggcgagtggcggctggagcttggagagggcgagacgcgggggatgccggatgcaccgtgcgcagcggctccgtggctggagcctggagggtggagacgcggcggtggcgacgtgggggatgcgccaggcgggtagctggcgatggggcgcagcgcacagggcgaccggcgccggcgccggcgcgtcgccgcgcccgccccggctggccccggcgctcggccgcctctcaggggacggggagagttgggatgggtggtgaggagacagggcccgccccttcatga

SEQ ID NO: 86057 - DNA, 270 bp, Oryza sativa
  Clone ID: PAT_MRT4530_85134C.1
ctgtcctgcactacaccgtcggctgatctttcctcctggtggcgctccgcgcggaaatcaatttctaaacaagaccgtaagacttttgatgctggagttatcttggtgacctggcttatatggaaggaacgcaatgctagaattttcgacaacaaggccattctggcggcgcacttatgtgcagcgatggaagatgagtggaccacttggggtgcagcagggctgctgtgtccactgcaagccggaagcaacctgatggcgagagagcaa

SEQ ID NO: 86058 - DNA, 305 bp, Oryza sativa
  Clone ID: PAT_MRT4530_85135C.1
gcaagaaagtaggagtagtagtatactcctagcttaaagtttgctctcaacaaattcaggatagtatacgatcaagtactgtactatcctgtgcttaattttggcgttcttgtactgctactcctactatactgtactgtacttagttttggcattcagtatataggtccagaaggaaccagccaccaggaggcaggagcctttttgccttcctttttttggtttaacctgcagttttaataagggcctctgaatctctgacatcttcagtcatgtttttggggtttcattgcttggaattatat

SEQ ID NO: 86059 - DNA, 2758 bp, Oryza sativa
  Clone ID: PAT_MRT4530_85136C.1
ctcgctgactcgactactctttggacttgtgcaagatttctcatttggcagatgagcccttaggtggtgaggcacaaaaattttgaactcttctaggaactcgggatagttacctatgattctctcaaccttttcgagaacttcttcgctggtcttgatttcgttcttataatatttagcaagaacgttcagcaaagcatggaaatcttcgcggctgatatcaggacatgccttcactctctcaacgaaattgtgtgccttgctacgcatctttgctctgcaagggctatatccttggatgaagtgctcgaagacctgtatggcttcaggttggccgtccaatatctcgagaataatttctttgcatttttcaatcgacatgttcctctgcctccttatcttgatcatagatcggacgaaatggctgtatacgtcgtcaggaagctctgacttgacaagtaccaaaaattccatcgtctcgactctgtagggatccctctccgtcctcggccttttggacggaacgccatcgccaggatcaccggcggaagaatccattctatttctccggagcgccgtctgtccgcgtgaaggcgagtagcgcggcgacgccctggaagacgccatcgacgccgccatccgtgtcgccgccaccgaccacccggacgccctccacgcgcgccgggacggcatcgccgagagcctctcaccgccgctccacaagccgcctacgccgcgctctcccctcccgacgccgtgctccgcctcctttcctccctcccctgcgcccccaattccttcatgctcaacaccacgctccgcgccctcgcctcctcccccggctcggcctccgccctcggctaggccaccctcggcttcttctccctcctccgccacgacagcggcaacagcagcggcggcggtggctcgtactcgcctcactcctatcatattcaaatcactgttgacatcatagtagaatcgaaacctttttctactatgtactttcattggactcttcttcacaggacaaacctttccttttggaaaaatagtagtcctgtcgcttgacttaatccccactaaggtgttataaggttgattgtggaccattgactgctcatatttatttatcttctgatttccattcttgttttcagccttggtctctccgggttcattcctctttgccttcagaaactcagcaagaacctgaagcgcgacatcgacatcatcattcctcattaggacctctgcaacctccgcaggcgttgtcagcacctcctcaatcagctgctcgatttctgggtacatggcatggttttcgacattgtggtagttgctagccagaactcggaaagcctctcgagtgcaataccccatgtggatgtgcatgtccatcctgccagggcgcagcagtgctgggtcaagccgctctctgtagtttgttgtgaagacgatgatcctctcctcgccgctggttgaccacagaccgtcgacaaagttgagcagtccagatagtgtcaccttgtcttcgttttcttctcctgaataggtgggcttggcacgcttgatctctccttcgtcccgttgctgcaggtcgatggtgcagtcaatgtcttcaacgacgaggatggaccggttgctcatcccaacgagcagcctccggaggtcagagttggacttgacctcggtgagctcaagatcgtagatgtcaaacttgaggtagttggccatggcggcgatgaggctggacttgccggtgccaggtgggccgtagagcaggtatgcactcttccacttcctgccattcctcccgtagtagcctttcctctttacgatcctctcaagaacgtacatgacggaatgcttgaggctgtgagccatggcgactgtgtcgctgctggaggggtggcgcaggtggacaccggtcaacgcgtcgtactcgatcatgtgcatcttgaggttcctgtgcttgtcgttcatggccttggccgtgtcgatgacgaaggggaggtacgacctgagcgccttctccttgtgcttcttgtggaagctcacctcgaaggacttgacctcgaagcggctgcggcccctcctgttggcggcgccgccgccgccgatgccgtagggggcggcgtgggcggtggcggcggcggcggtgtcgcgggagacgaggcgccaggtgtactcgacgccgtcgtggacgtcgagcatctcctcgccctggtccatggtgatcatgatgccctgggcgtcgtcgacgcggctggcgcggaggcgctgcatgtcggtgttgatccgcgcggcgaggtaggtgcgggcggcgtcgtagatctggttggtggagagcccctccgtctcgtcgatgaccacggtgtgggtcgacgagacgcgcgcccggatgccccgcgccgccgaccggagcatctcgcgcagctcgtcggggaccagctcgctcaccacgccgcgcaccaccatggccgtcccggccacggccgccgccgtcgccatgtacttctcgtagtcgccggaccacgacatgctgagcaagctctggctcctctcctgttcctcgttcgatgaacttctcttcctcattgttgttggcactgggatgaatcagtactgctgaatggggaggcccaggactgcttcacatttttctctcactgggctcggggggggcaagcacagttcgtgctcgtatggtatcaatcgaatccccccctgttgaatgacagggtgcgcagtcgac

SEQ ID NO: 86060 - DNA, 1979 bp, Oryza sativa
  Clone ID: PAT_MRT4530_85137C.1
atggggctcgtcggtggcctcctcggcttcggcgtcggcctccccctcggcatcgccgtcgcctacctcgtctacctccgcttgttcgcccctcgccgccgtctccaggatcctattattagaccactacgcgacttggattctgagacattacagacaactataccagatattccgttgtgggtgaagtgtccagattatgaacgggttgactggattaacaagtttatttttgatatgtggcccttccttgataaggcaatctgcaacacaataagaagtgtaatcagaccaacatttgatcaatatgttggacaatatggaataaaatcaattgaatttgggcacttaacacttggggctcttcctcctacgttccaaggaattaaagtttatgaaatgagagaaaaagagttggtaattgaacctgtgattcggtgggccagcatagcaaatgtaattgtgaaagtgaaggtgcattctttccaagtgtcggctcagcttttagatttacatataatgctgacaccacgtgtgactctgaagcctcttgtgccaagctttccctgctttgcaaacttgtgtgtttcactgatggagaagccacatatcgactttggattcaaattgttgggtggagatgtcatggcaatacctggcttgcatcggtttgtccgggagaaaatatcaaagcaaatcgcaaacttgtatcactggcctaagcttatacaaattcctattttagatgaagcgagtggtgcgacaaagaaaccagttggaatattacatgtaaaggtaattcgagccatgaatcttctcaagatggacttgcttggaaaatctgatccctatgtcaagctccgtttgagtggtgagaaactgccttcaaagaagacgtctattaagatgagcaacctgaatcctgagtggaatgaacacttcagatttatagtcaaggatcctgaaacacaaatccttgagctccgcatgtttgattgggaaaaggtttaaaatgcatgataaactgggtatgcaagtagttcccctccgcttgcttactccttatgagagtaaactgttcacacttgaccttctgaaaagcatggacccaaatgatcctcataacaagaagaacagaggaaagcttgtcgtagagctgacatttgatcccttcagagatgacagcaacagtaccattctgatgtcagatggtgaaggcaatgtcagtgtaaaaagggacgtcccacctagtggagggttgctgttggtttcagtagaaaatgcagaagacgtcgagggaaagcgtcatactaatccgtatgccgtggttcattttaggggagaaaggaaggaaacgaagataatcaagaaaacaagagatccaagatggaacgaagagtttcagttcatggttgatgaggctcctgtggatgataagatccacatcgaagtagtaagcaaacgccgtgggctccggcttcccttccgcaataaggaatcattggggcatgtggatataaacctagtggacgtcgtgaacaacggacggatcaacgaaaaataccatctgatcaactcgaggaacgggatggtacacgtcgagatgaaatggagcactgtatgacaatgattcggtattctgaagagtctcacctgtatgattatacctgtcgctgtacatatacagtcgccatactccgtgtgggccatgtatgttgtaactttagccctaatcctctactctctcgctcttttcgtgatcccttttgggcgctttttagcgtgctgtaacgtcaatgatagtggcgtgatcacttgcttgtaaagtcacgcggcaatgcgttcgttgatctctctttcagtgtttttatcattctttttggctgcctgtatggcacccatcaataaatgagccatcgatcagcgtgctaagtggctcatgcgatgaatatatattactctaaaaaaaaaaaaaaaaa

SEQ ID NO: 86061 - DNA, 615 bp, Oryza sativa
  Clone ID: PAT_MRT4530_85138C.1
atggcgaagtgggcggcggaagcgacggtgatggtggttctggcggtgacggtggcggtggcggtggtggcggcgcaggcgccaccgccggtgcagtgcgatcccgggaagctgtcggcgtgcgcggtcccgatcttctttgggactgcgccgtcgaagtcgtgctgctccaacctgcgcgcgcaggagaaggacgggtgcttctgccagtacgcgagagacccgatgtacgcgtcctacatcaatagcaccaacgcccgcaataccatcgccgcctgcggcatcgcctttcccagctgctaggctgggcttcgatcgccatgatgcgtggcgtatattaaatatatggtgtgtgcttgaataaaggatgtgagtttgaatcagtaagaactatcgatcgattaatgcaccccccgtacgtacgtgtttgatcgatcgatcagctggtgtctcctcactatttatgtgttgagctaagtttccgatcttgtgtggggtggtactatcagtagtagtactactacactactactagtactactactataaacaaatatatatttttgatgtataaaaaaatatacacatatacaattttgtaaaaaaaaaaaaaaa

SEQ ID NO: 86062 - DNA, 276 bp, Oryza sativa
  unsure (1)..(276): unsure at all n locations
  Clone ID: PAT_MRT4530_85139C.1
gttggcttctcctccccctctttaccttttcctcctcggttcggttccgtggttcgtctagggnttagtgggttgagatggcggcgccggatntcgagtaccgctnnttcgtcggcggnctcgtctgggccaccgacgaccgntccctccgaggtcgccttntncacctacggcgagatnctcgactncaagancatnaacgacaggnngacgngtagatgangtgngtttggcttcgnnaccntnttcntcgagnagtccatgcgngatcgtcat

SEQ ID NO: 86063 - DNA, 2562 bp, Oryza sativa
  Clone ID: PAT_MRT4530_8513C.1
gtggatcagcaatggatgtacaccacgggccaatggtcgaaagagtttcttgaaggcgtgcattattttttgagtgtgggcaatgttaacatgcataagggttttatatattgtccatacaaaaagtgcaaaaccagaagaagtattatacatcaagaactattcatgcccacttgtttgagtcggggttcatgcgtagctataattgctggacctcacacggagagtttggggttgcaatggaagaagacgaagaagaagacgagaacattccggactaagctcaatgcggtggattttaagaaaatataacaggtgaggcagacggggctgttgaagataacgacgatgcggataatcttggtcagatgttgcacgacatacacaaggactgcaaaagtgaaaaggaggtccagaaattagagcgtatgtttgcggaccacaaagcgtcgttgtacccaggttgtgaacaggggcaaaaaagttgggtaccacgctgaaattcttgcaatggaaggccaaaaatggtgggagcgacaaggcatttggtgagttattgaaatttgtaaggaacattctttcggagggagatgaattgcccgaaacaacgtacgaagcaagaaggtagtctgccctctagaactggaagtacagaagatgcacgcatgtccgaacaattgtatcctctatcgtggtgaggagtacgagaacatgtcaacatgcccgatttgtaaggcactacgacaaaaaattagacaagatgacccaggtgatgttgacggacaaccttcaaaaaagagagttccaactaagttgatgtgttatttccctataataccatggctgaggcgtttgttcaggaagaaagcgcatgctagaataatgcgttggcacgcagaaaaacatcaacaagacaggatgctgagacaccccaccaatgggttgcagtggcaaaacatcgacagaacatttgaagactttggagaggatacacgaaacatagggttcggtttaagtacggatggcatgaatccattgggagagataagcagcggtcatagcacttggcctataaccatatatatctacagcttccccccttgattatgcatgaagcggaagtacatcatgatgccaattattattcaaggtccaaagcaacctggaaacgatattgatgtgtagctaagaccattggttgaaaatctgaaactgttgtgaagaaagaaggtgcccccgtgtggaacgaggacaaataagattggcctacgagcgttgctgaccattaacgattggcctgcacttagcaacctatccggacagtcaaataatcggtacaaggcttgcacgcactgtatggatgaaactaaaagtacgtatttataacattgtaggaaggttgtttatatgggccgtcatcgattccttattgcaagccaccttgtccggaagaaagcaagcatttcgaatagaaggcagaccaacgtactaagcctaagcatcggaacggaaaaaccgtgtttgctctggtgaaagatctgagagtactatttagaaagggacctggcagccaaccaatagtgagtgaagacggtcacgcggcgatgtagaagaagaagtctattttttagaagataccctgttgggaagtcttgcacctcactaagagcctttacgtcaacctggtaggcttcctaggtttatatgggaagtcgtaagatgcactaaaagcacgtaatgatctcaagcatatgaaacaatgcgacgaccttcattcggaaccgaaggagaaaagaagccattacttgcgtccagccaactacaccctgagcaaggtagagaaggaaagtatgtttgaatgcttgaagagtattaaggtaccgtttggatactccagaacgcaattttgcagaagatcattgatccagacagtttaatagcgtggtgcaatgtcttgtcagctttgagataatctttccaccatcattcttcaatataatgacgcatcttctatgtcaccttgtgaaagagattggtattctcggtcctacatacctacccaacatgtttcctttcaagaggtacatgggcgttcgaaagaagtacattcataatcgttctcgtccggaagcaagcatcgccaaggggtatggaacaggggagggcattgagttttgcgtagaatttattgaagacctttgtccaatcagggtctctgaatcaagtcatgaggggagactgcggggaaatatgactcttggaaggaaaacaataatgaatgtagacaacgatttatttcgtaaagcgcatttcacggttttgcaacaatcttcattggtggctccttaaatcgaggagcacttggcgattgttcgctccaaaaacatcggaaagtccgatgcatgtattacacgccatcacattgatactttccccgcttggcagcgacaacatctcatatgtaacgagacgattgaccaacaactagccttcttggcgagaggactatcttactcaattttgacattgcagggatatgaaatcaatgggtatacgattgaa

SEQ ID NO: 86064 - DNA, 203 bp, Oryza sativa
  Clone ID: PAT_MRT4530_85140C.1
accacggtaatgacattgagggggggtgtagtttcaaacacatctagtcccttttacctatttcagcattatccggagaaggttataactactacaaggtgtgttgtgttgtttcattttaacaaatactcaaatgaaacaccaaagattgcacataaaggtaaaaacatatttcattttaaattccataaaccacttgttat

SEQ ID NO: 86065 - DNA, 262 bp, Oryza sativa
  Clone ID: PAT_MRT4530_85141C.1
atggaacatctcgtgcgcgcgttaattacgctcgccgaccgaagcgccatcaccatatctccaggaaaaacgaaccggctcgtcccgattcgcgtgttactcgaccgagtaaccattgccgatgtgcgtgatttgcgaccgttgggtttctgcccaactgttgagaccggtcccacctgtcaccaggccttaggaagtgacgtcacgcccgaccgcttccctcgaggagggcgatcgccctggcataacgccgggggctact

SEQ ID NO: 86066 - DNA, 1287 bp, Oryza sativa
  Clone ID: PAT_MRT4530_85142C.1
atggcgatcaatgatgcttggcttcactgtctccctcgtgcagatttgatcatcatggatgaacctcccaagaagcatgaaggtatcgcagttgccattcttgaaccccctcccaagaagcaagagcattttgtccttgtggtttactacgttcaaaacactctgggttatcatgtgttggacaccagtaggcatgcatctgagtttgcttttattcacattgcctcggctgtgcttagagatgctctagtattgggagggccatatgatgtcaatgaacagattaccctaagatttgtcaaccatgataacacctccacttgccacaattcccctccaattagagagggttgggtgatgttcttagatttccctctagacctacaaaccgacagaattgtggacaaaccagttgtggaccaaggttcagaggcagggttcttgcgaaggtcatttactccatggttgaggaggtccctctctaaggtggtgattaagaagtactcaagctttggagatgtccagcctgcagatgaggatctgccacttgtgaaccacattcccttgccagaaccatctcctgttcctcaacaagctaatgtttggggaaatgcagatgaagacataggtgagaatgatgaagactcaggggaatggcaaattttccctgcccatcaagtggcacctactatttctttggatgttgcaatggggccactggtcagccagactgaggaagttgtgccttcattcattgtttaccctcagttttggaaactgctcagcatttgtaggactctcctgtgtgggccaagattgcttgggcctcagcccatgtcatctgatgtagtcccataccagctgcctgtccatcatgtttttcaatttgccatgctagcttctgcattgatatgggccaaagaaaactgggtcagccaacaagttatttcagtccaaccgattcaagctatccatcctcaacacacagtttcagtgttgaatcttctcctggacccattccaacaagatgtctctcctgctctacccccaaggcccaaaaggaggactgggaagttgattttgttggattcagaaatacggagaagtgaaagaattaacaagctttctgatggatttatgtcccctgacccaaatttgggtgtgggaaagccaaggggaaaggctagggcaaagagctccaagaagcttaaaatgctggctcaagaaagtggtatcttgctctctctcaaccctttgcctttggaacttaatgatcgtattgcttaa

SEQ ID NO: 86067 - DNA, 345 bp, Oryza sativa
  Clone ID: PAT_MRT4530_85143C.1
aaaaaaaaacccaatttttttttcacaaaaaaaaaaacggagattttcggatcattcttgatgggggaccaattttttcttatattggagggaattaaagattggaaataaaatggaaaaatgttttttttgagaaaaattttttaacctgtaatatttaaaaaaatttatgggcccgaaattttaatttaaagacggggggggccaaaaggagggcgcaaaaccattttattggtgcggccacaaaccccttttataaaaagggaaaactttggcagccttttataataataaaacgcccacccgccgggaaaggggggttttttttttcggcccagggttttt

SEQ ID NO: 86068 - DNA, 379 bp, Oryza sativa
  Clone ID: PAT_MRT4530_85144C.1
ttgcttcgattgcacacaactatggcacttagaacctttgacaatggaaaatcttaagggggtgaggatgtaacatcccagcccaaggcttaataggattaatagaatactcatatcaacaagttgcaacttcttttccggaagtcgatttccaaagaactctagggttaagcgtgcttggcctagagaaattctctatgggtgaccgaccgggaaattcttcccgggtgcacacgagtgaggacaaagtgtgcagaaaagacttgtgttggtctgtgagggcagtttatgacctatgaaagctatcagatgcaagcaggcctagcctgggagaggcgggacgttacaggcgccgcgcggcagaagctcgaagcaaatc

SEQ ID NO: 86069 - DNA, 668 bp, Oryza sativa
  Clone ID: PAT_MRT4530_85145C.1
taacctaccttggaatgcccctcacgatccacagactcagaaaggtccacgtgcagtacctcctagacaggattaaggcaaggctcgcttgatggaagaaaaaattactctcagcagggggagaagagaattagtcatagcagtcttaagttcaatgccgatctatatcatcacagcgctcaagatccacaagcagctcatccaagaaattgacaaagctaggagaaaatttctttgggacagaggcgatgagatccatggaggcaaaggcaaggtgaactagaaaagggtctgcaggccaatcaagtatggtggacttggaatacctgatttgcaaaaaaaacaggacacgcaccctggctgcgatgtctatggtacgagcggaccagcccgaacaaaccatggataggcacgcccacaccctagatgaacaagataaggagctctttgctgcctccaccgaggtcctcgtgggggacggccgaaaggcactcttttgggaatcaacctagacctcgagcaccccccccctaagaacaattgcctcaaatctatacaagcactcaagaaggaagaagcgaatagtggcagaggccctaggaggagataaatggatggatgatatcagacacaacctgaccacaacactcgtcactgaattcttcaaa

SEQ ID NO: 86070 - DNA, 714 bp, Oryza sativa
  Clone ID: PAT_MRT4530_85146C.1
atggcagccgcgaagccggtggagccgctgccgctgctacgagccggcgcggataccgccgccgccgccgctctccggagattccagcttccgccgcagccaccacgcagtgtcagagccaacgctatcagggcctctcctccttcgaacggcgccgggagccccgacgagctacccgccgcgctcctgcccaacgcggcgcggcggcgggacggctgcgggttcagcctcggcgtggacctgggagaagcacgcaccggagtcgccgtcggcaggggcatcaccctcccccgtcccctcaccgttctgaagctgcgtgggcagaagctggagctgatgctgcttgacatagctcagcagcaggaggcggacgagctgatcgtggggctccccgtctccgccgacgggagcgagacgccgcagtccaacaaggttcggagcgtcgtcgggaggctcgccgtccaagcggccgacaggggattgcgggtgtatctgcaggatgagtacgggacaacgatcgacgccctcgagttcatgatctccaggggagtcaagaggtctgcacgtgatgtcaaatctgatgcgtattctgccatgatgattttggagagatatttctcgtcatcaggtcaaggggctaagattgttcttcctaaacaaccacaactacagagcaaattgttagagaagtcaaggcaagatgctcaagtttag

SEQ ID NO: 86071 - DNA, 285 bp, Oryza sativa
  Clone ID: PAT_MRT4530_85147C.1
atgcgggagcgccggtctcgcgctcccaatggcgggagcacgtcggtcctgcacgaccaatacacgcaatcgacccagtcccgcatcgccaaacagcgcgactgcgctggtcatgcttctccaacccgcacgaccatgtccgagccgagcggagttggggacaaggtcctccttgaagttaaccaagaagcagttgctgagagcgggatgactgacgggcagcagcaggagttcgtcattgaggtcaaagacatcgacgcggtgctccctatggccatccattag

SEQ ID NO: 86072 - DNA, 2841 bp, Oryza sativa
  Clone ID: PAT_MRT4530_85148C.1
atggacgtgttggacatgcttgtggttaggtttcatctgaagggggtttttgttttggatgggaaggagaagaaatattgtggtggttcagaggcactgtcatatatagatagagataaggtctctttgcctgagttgtttggacacctgcgagaccattgcaatgtgctggctggaaccttgttgcattggttgtttcctagaaaagatttgcatacaggtctgagagctctatctaatgaccaggcttgcaaagtgatgtgtgattgcattggtgaattggaggttgcagaggtgtatgttgaggagccagagattgtagatctgtgtgatgggtctgatgatgatagtgactatgaggcagagatggaaatagaggtggacagtgaagaagagggttgcaagatggatgttgatggatgtaagggaaaagcagttgttgaggcagttggtagtgcaaataagggtaaatcagtagctgaggctgtttgtactacatatgagggtaaaaaagtggctgaggctgttggtgaggatggtggtactgaatctaagggtaaacaagtggctgaggttgttggtgaggctggtggtggtgcatctaagggtaatgcagataggatgatagtgctataccattctgactcggctcccattgctagtgtcccaccttctgacagtgattctgatagtgaatacactccaggagatgatgctgcctcagatgatgacgaggaggttgctgagatagagaagcactacaaggaggttacgaaaaaggtgaaggcagggcaactagaggatctggatgatttctttttgcaaggccatagggcagaaccaagaatgcaagctgggggtgaagaagatgggaatgagaccccctatgcagacagtgatgaagaagacttagttgaggaagttggtagtgatgggagttcacagttaaaaccaacaattatccaagcttatgctcttggtgagaggaaagtcataaactttgtcaaggatgatgccaagagagttagagcaaggagggacaacaagatggttacttctgttaggatagctgagaagtattcaaacttcatatctgccaacccttcatggccactgtctcacatgaaagcaacagtgcaggaggagatgtttgcagaagcatctgtatccaagctgaagagagcaaagtggcttgtgatgaagaaaaaaatggatgctgtaaagggacaataccagaagctattcaactaccaacttgagctactaaggagtaaccctggcagcactgtggttgtcaacagagaaatcggtttggatccaccagtgttcaaaagaatctatatttgcttagatgcatgtaagaagggattctcagctgggtgcaggagagtaattgggcttgatggatgttttttcaaggggcaaactaatggagagcttctctgtgctatagggagggatgctaacaatcagatgtaccctattgcctgggctgtggttgctaaggagaacaatgaggagtgggattgtgaccttaaagttgggactggggctgattgggtttttatttcagaccaacaaaaggggatacttaatgctgttgagaagtgggcacctgaggctgaacacaggaactgtgctaggcacatttatgccaattggaaaaggcatttccatgacaagaaattccagaagaagttctggaaatgtgcaaaggctcgttgcaggatgttgttcaaccttgctagggcaaagcttgcacaagttacacaagctggtgctcaagcaatcctcaacacacatcctgagcactggagcagggcctggttcaggttaggatttaactgtgactcagttgacaataacttgtgtgagtctttcaataagtggatactagaatctaggttttatccaataatcacaatgcttgagacaattaggaggaaagtcattgttaggataagtgatcaaaaaacaaatggagctagatggagaactgttatatgcccaggaattctaaaaaaactcaatgtgtacatcaatgaatcaaccttttgccatgccatttgcaatggaggtgacagttttgaggttaagcatcatgaacataggtttacagtacacctagacaagaaagaatgctcatgtaggtactggcagctgtcaggattgccctgccctcatgcaatatcctgcattttctatagaaccaataagctagatgactatattgctgaatgttactctgtggaagcatttagaagtacctatgaccactaccttcagcccttagaaggtatgagtgcttggcctcaggatgatagggagccactcaatgctccagggtacataaagatgccagactggcctaagactgctaggaggagagaaatgcatgaaccacctaagccaacaaagatgtccaggtttggatcagtgatgaggtgcacaaggtgccatcaggttggccacaacaagtctagctgtgcaaagaacaatgctcctgctgcaggcacttcttcagctcaaccaatggaaactcaaagtcagcaaatggtgttgtcaaacactccagggagctctgctcaaagtaagaagagaaaggcagccactgttactacaacaagtactaccattcagtccagatcaaaaaaatcgaagaacaaggcacccaacgaaacccaggagctggttagggttaatgctagtgctaaggtatctacggagcatggtggatcagctagggttgatctacatgccatagttccccattcccaaggatctacaactgcatctgtcaaggtcacttctggaagagcatttgtcttagtctcagcttag

SEQ ID NO: 86073 - DNA, 429 bp, Oryza sativa
  unsure (1)..(429): unsure at all n locations
  Clone ID: PAT_MRT4530_85149C.1
ggggtgggattcaattgatcacccgcgccccccccnnnnaccnnnaaaattttccccaaggttctaaccaccaatcaaaccttctacctcaaaccccattttaaaacacaaaaaaaaaaaaataaggggnttngggnnccctatttaaaacccctttacccacaccgctatcggtaaagcataccaacttataccacatacccctacttgccagtataaatgaaatacccgtgaaccggccccccccttaaaaaatcaaccccgggtaaaacacaccccacactataaaacccctataaaaaaaaaaaacggaaaaaactaaaaaattttgggaacaacaaaaaaaaaatttttctgagaaaatcccccccctataccccccaaaaaacaaaaaaccccccggtaaaaaaaaactcccccccccccccc

SEQ ID NO: 86074 - DNA, 616 bp, Oryza sativa
  Clone ID: PAT_MRT4530_8514C.1
gcgtttttaagtaatatatcttattactagatcagatattcatttctatcttgctcagtttctcgtcctcgtcgtcgccgccgtggtcgccatcgccggagctgtccatgctgccgcgggggagacgacggcgacgacgacgcacatcaaggtgtactggcacgacgtggtgagcgggccgagcccgacggcggtgcaggtggcgagggcagcgacgaccaactcgtcggcgagcttcttcggcgccgtggtggtgatcgacgacccgctgacgtcgggccccgacctgaacgcctcgtcgccggtgggccgcgcccagggcacctacgtcagcgccggcaaggacacggtggcgctgctcatgaacatgaacttcgtcttccagtccggcaggtacaacggcagcaccgtcgccatcatgggccgcaacgaggtcttcgccgccgtccgcgagatggccgtcgtcggcggcaccggcgtcttccggtgggcccgcggctacgcccaggcccggacccacaccctcgacatgaagaccggcgacgccaccgttgagtacaacctctacatcaaccactgaactagtcatctttctcatgagttttttttacctttt

SEQ ID NO: 86075 - DNA, 202 bp, Oryza sativa
  Clone ID: PAT_MRT4530_85150C.1
gtcggaaagcacaagtaatattgatcggagagagtacatatgagaacatttgttgatgatcagtagtaattcataccgtacgttataaacacatacgtacataaatactgtagtatgatacgtataattatacgtatttggtattgtatatacgtacgtaccctcttgcgcgccctggagcgaagcgcggcggacgcgtggg

SEQ ID NO: 86076 - DNA, 2606 bp, Oryza sativa
  Clone ID: PAT_MRT4530_85151C.1
tttgggttttttatttttttgggagtaatacccgcagtacaacatccacaaatttcacgccacatatcaaccattctatacaagtgacaactatcgtagtgtcatttccaatttcgttcaataaaaacggggacatgttacacaacgatttccctctcccctagtatttattattcatgaaatctgggcggcatcctgatgacgcgagactacatccttgctctttgcagctccagcttagcgattgtcccaagatgaacttcatcagggccgtcggcgatcctcagtgtcctagcagttgcccatagatgtgatagaactgtgtctgatgagagaccagcaccaccatgaacttgcattgccatgtcaagcactttcagggccatatttggagctgccaccttggccattgcaaggataccacgagctttcttgttcccatgtcggtcaagttgatcggctgcttcaagcaccagaagtctagcctgctccagttctacccggcacttcgccagatctgctaaaaaggaaccatgttgcgcaatcttttttccaaaagtggtcctacttaaggccctctcgaccatcaaattcatgccacgttctgctgcccctattagtctcatgcaatgatgtaatcttccagggcctagtcttccctgagcaatctcaaaaccccggccttccccaaggagaatatttgtggctggaacgcgcacattctcaaaagtaatctctgcatgcccatgaggtgcatcatcgaaaccaaatactaacaacggtctccttatctgcactccaggtgttttgacatcaactaaaatcatcgattgctgtttatgtttaggtgcagaaaaatctgtcttccccattaatacaagaatttggcaccttggatccatagccccactggtccaccatttcgttccatttatcacatagaaatctccttgccttgatattgaacactcgatgtttgttgcatctgaagatgcaacttgtggttctgtcattgcaaatccagaacgaattttcccttccaacaaaggaacaagccactgcttttgttgctccttagtcccatatctcaacaggacctccatgttgcctgtatcaggtggaccacagttaaatatttgtggagcccaaattgaacggcccataatctcacatagatatccatattcaagatttgtgagacctgcacctagcaaaagctcctcagaacttccaggagaaccatgagacatgtcctcaaacagaagctctcttgctctagcagcactgtctagcggaataaacaagttccatagtccctctctctttgctaaggcttttagtttttcttcttctggatgaattgtccaccttgaggtcgaatgtgcgcgtttatagaactcactctccatcgggtatatgtaatcttccataaacttcatcaatttgtttcgaagctgcataaccttttcactaggaacaaattttccttgatcttttgtcgaaattgatccttcatgctttctttggaattcttgcgatgggccatttgaggcatgcatacccctagcaggctgttctctcaggacattttctctatttatgatatcccaggcacggtcaaccatagcattagcaatcttgccagaaaatctagcacgctcaccacctgaagcattaccagagatagagcagtatgcagcgaggtactcttccagtgggggaatgccatctggaatgccagtatattcaaatccaccataagaataacctgtactagttgttgcatcaataatatacggcaaagagctgtatgcaacatcacacatttgattacccaaagtagatagttcccaatcaagtacaccaataactcggtcctctgttggatgaaaaacaagattatcaacacggtaatcaccatgaacaagacctgttccaaatcctgccgatgaatcttcttttggtatatgttctttcaaccaatgagctagatcaagcatcttctggtaacgagcaggcttcccttcaccagtggaagagagatattgcctcccccatctttctacttgtcttttgcaatagttatctcttctcccatacttctgcagtccaattgcagtcacgtcaactttgtgtatagcagccaaagtttcagcagctgcaagatatatagtctttcttttagttggagttactcccgtcaacttgttgtctgggtatattagtccttctagatgctccattatatagaaaggagttccaattacacttgcatcagtgcaaagacagaacaccttagggacaggaacatcagtgtaagtgcccaaagctttgaggacctggaactcgcgctcgacggcgtgggcggactggaggatggcgccgggcggcttcttccgcagcacgtagcgcgcggtgaccccgccgggggcggaggcctcgatgcagtaggtggggttggactggccgtggccgaactgcgtcagggccagcccccgcgccggggaggggaacccggcgacgtgctccgccgcgtagcgcagcagcgccgcctcgtcgatcgcgtgcgcatcgtcgaccggccgcagcagccccgaggtcagcat

SEQ ID NO: 86077 - DNA, 1347 bp, Oryza sativa
  Clone ID: PAT_MRT4530_85152C.1
atggccggccgccggttgctggtggcaacggcggtggtggcggcggcggcggcggtggtcgcggcggcggcgctggaggcgatcaacgtgacgacggtggcgttcgaggagggcctccccctccacagctccacccgcttcgtcttcacctaccagtccacggcccagcacaacttcttcagctcccgcgtccaaccaaccgcacacgaccccacaagcgtactcccaaccctttaccctgcgatggtggaaaggtgttgtttgcacctctgaacattcgacccaggttcttccctgttctaccgacaatgatgcagcccgccagaattagtgctatcagccaagtgtaggcggattccctactcatcattcccatcggccaccgctaagaggaatgatttcgatgcagggtggtgttccgcaaggacaattgcacagctcatggtgtgatgatctgtactgttctggaattgcaaaggctgcattgcgttagtgttgcccagaacatgacgtttcatgaccattggcagcttggctactgtattagtcaactgcatgtagaagttttctggttgcccatccagtttcacctacaggtatgcgccgttcttggcataagtcacgtacctcgccctcctcggctgccgcgtcggcgaccccatcggccagatgctctcctccgccgcctgcaccgccgccgaggacgcgctgctcgcctccgacctcgccgtgatgacgctggagaagcagcaggcgatgcggcggttcagggagcagaacatggtgtactcctactgctacgacacgctgcggtacccggcgccgttcctggagtgcgacgtcgtggagtccgagcgccgccggttcaagggcagcggccacctccgcctcgccttccgccgccgccgccgcacccgccccggatcccggccggcgaggcccaccagggccgccgacatccgctgcctcgtttacccaaacccaaacaccacctcctcctccgcctccgcctccgccgccgtaaaaccctcgccgccaccgccaccgcctccgccgccgcggcggatccgctcctcctctccctgccctgcgctgcgcggggcgtggtcgaggctcgacatggtgctgtgggagctgacggcgatcacggcctacttcctggggctcaggcggacctaccgcctcgcgctccgcatccagcgccgcctcatcggccccaaccaccccaggatccgccacttcgtctacaggcggatttcctactcatcattcccatcggccaccgctaagaggaatgatttcatgcagggtgtgttccgcaaggacattgcacagctcatggtgtga

SEQ ID NO: 86078 - DNA, 296 bp, Oryza sativa
  Clone ID: PAT_MRT4530_85153C.1
ttttctgggggggcattaattcaccgctaattgaacggggggcggctttacccctgcccgggcccggggcatttaccctgggaaggaaggcccaagggggggcaagcccaacatgggggggaaacctgggggggtcggtcggtcctcggggttctgcccctggtcggcgccggtgccgaacttgccggggccgggggtggcgggggcgctgaggagaaggcgccgttgaagggggcgggcggctcgatctcgttgggggggacgccgggctcgatgttgggctgggcgggggcccc

SEQ ID NO: 86079 - DNA, 277 bp, Oryza sativa
  Clone ID: PAT_MRT4530_85154C.1
tccggaatgacccacgcgtccggaatgtcacattatagtaagtactaatactgattgctcaatacttagttatcctgcttgcatttgaaggagtataagctcttgatttatgaaatgctctgtgtggcagtcgcctgttgtctgctggtaaaactaggatgagtataagctgggttacgtagatgttctcacctgactgcaaacatgttttactcttcagcttcaagtctctccttgagttgttaattttccatgtgaatgaattactgtctaccgt

SEQ ID NO: 86080 - DNA, 7845 bp, Oryza sativa
  Clone ID: PAT_MRT4530_85155C.1
atggctatgacaatagggctgacgtcagcacggagggggtgcggcgccggcaagcggggcccactggtcagcggctcaggggagagcggttcaccgtggaccgggaccacgcgggtggtccaccgccgttccacggaaccaacggcccagatcgccctcggggccgatcggacgggcggcgatagaggcggagatgtgggcgcggcggcggttgcgggcgcggtggcgcggcgggaggttggggaagggcccgacaggcttggaaggagaacttcagggtgtgacacccgcccccgggcggagggaggccacgacgcgtcggggcacgacgccgcctcacttacggtgacggcggctcgccccgaggcgcgcttcaggcggcgggtgtccttctgcggcatcccccccgaggaggagggcccatcgatcggccacggccttgaggcggtccacggctccaacatcgtcgggggcctcgggaagccggaggcgtcccgacggtctctacggggagcaggacgctcgaatcaatatcgagcgacgccgggacgagcgccgagctgcccgcatggggaaggcgcctcctcatctggagtgccgcgttcctccccacgagacggccctccccccacgctcagccctggagggactggttgtagggcattcgtggcgagtcttcggaatgtccggtggcccccgaagtttcgccccaacctcacggagaagtatgatggcagcatcaatccctccgagttcctccagatctacaccacgatcatcgtggcggcagggggcgacgaccgggtcatggcgaattatttccaaatggccctcaagggtcaggcgcgcggctggctgatgacccagccccccgacttcatccactcctgggaggacctgtgccagcagttcgtcacgaactttcagggcacatatccccgcccaggagaagaggcggacctacacgctgtgcggtggaaggacgacgagtccctccgctcgtacatacagcgcttctgccaggtccgcaacactattccatgcattccggcccacgcagtcgtttatgcgttttggaatggcatgcggcataaccgcatgctggagaagatcgcctccaaggagcccaagaccaccgccgagctgttcgagctggcggacaaggtggcttggaaggaggcgtgggcctggaactcccccggcaccgctgatgggccctcatgggccccgtgcaagggaaaggccaccggcgataagccaagctccactgctccatccggtgagggccggtcggcagacaagtggtgcttgggtcgacgagagggcaaagcccccgcgaccccagccgatgaccgacgaggggaagcgaagaagaaggcccccaccgatgatggtgataacagcgaggatctggagttccagatacctcagggaaccgtcgccacgctcgacctggggggagggggggcttgcgctcacacctcccgccgaggcttcaaggccataaggcgagagcttctagccaccgtcccaacccacgaagcggctcggaaggcgcactggtcggaggtgaagctcacctttgaccagagcgaccatttgacagtgctcgctcgaggtgggaagttggccctcgtggtctccccgaccattcacaacgttaggatgaagcgagtcctggttgacgggggggccagcttgagcatcatctccccagccgccttcaatgcgctcaaggccccggggatgaagctccagccgtcgctgccgatcatcggcgtgactccgggacacacgtggcccctcggccacgtcgagctcccgataaccttcggcgactccaccaacttccgtaccgagcggatcgacttcgatgtggcggacctcaatctgccctacaacgcggtcctgggcagacctgcgttggtgaagttcatggccgccacccactacgcctacctccagatgaagataccgggccctagtggtcccatcaccgtctttggcgatgtcaaagtcaccctcgcctgcgcggagcagcgcgccgacaacctggcagtggccacggagccacaggccccggaggcctccgcgtcccacgcctccaagaagcgcctcacctcggctgacgaggaaagcgcgctcgtctccttcctgcgggcaaactccgacgtcttcgaatggaagccgtcggacatgcccggggtccctagggaggtgatcgagcaccgcctcgccatgcggctggatgcgcgacccgtccggcaaaaagtgcggtgtcaagccccggagcggcaggccttcatccgagaggaagtggcgcggctcctggaggctgactttatccgcgaggttatccatccggagtggttggcgaacccggtggtcgtcccgaaggccaacggtaagctccggatgtgcattgactacacggacctcaacaaggcatgccctaaagatcccttccctttaccacgcatagatcagatagtcgactccactgcgggatttactctcccgaaatcttcgccggcgcatcaatggagcccgagatcgccgcgccgatttccttcccctccggccgccctctctcactcccaaccctatttaaacgctccccgtgcctccctcctccgtttccgccgtccgccgctcgctctccccgtcggattcgagctcgcgccgtcgtcctctctctccgccgtcgccgccgagctccggttcgccgccgtcgtcgccccggacctcctcccgcttcggcgtcgcctccttcggcttcgccgcgttctcgtcgacctcgtccactcctccgtttcgcccgccgaccgccggagcaccatcgtcctcgtcgacccgagccgcgccgccgcctctctccgcttcggtcgccgttcccgtcgtcgccgtcaacccgggatggccggcagcgtcacccgtcgtggtttggacatgactggtttcgtcttggagctgcggggcatgtgcgtggtcctggggtatccacatggagtggactaccaggccaggccgcttccggagcaggagggggacgatgcagagccccacgctgcttgggaggtcactgcagtgatcctcgctggctctcccgagcggacttcgctgacagtcaccgcgggtggagactctttccccgccgcctgccagagcgccgctctcctcgccatcggcactcttcaccagcgctacccggacgagttgcagcactcgccctaccgctaccaccctcgtcgcggaggagcccgcgaccacgccaccttccgggatgctagctcggaggatgacgctaccatcgtgcacttggcgcgcatggtggaggcgtacgacgcggctcgtatcgacttccatcagatggtgcgccgtgggatggtcgagaacaacttgaagatcctggagctgcgtcaggagaacctgcagctcaagaaggacctagacgcggtggaggcgcagctgcatcagctcaagatcgcccagggagagatctgccgccccaagcgtcgccgcgtctgccgcagccagaagatcaccgcccgcaagagcacctccaggcctgagcttatggtgatgaccaggagaaatgctaacaccggtgatggcaaccaacctgaaggcagcaaccacaaccatcagggcaacccacctccacctcctcccccgcctccacccccaccaccagataccaacgccattctcacccaaatcctcgcccagcaggccaacatgatgactgctttcctccaccacctccaaaatccgccacaacttaatcctccaccaccacccccacaacactctaaactcgccgagtttctccgtatccgcccacctaccttctctagctccaacaaccccgtggatgcgttggattggttgcatgccgtggggaaaaagctagacactgtgcagtgcagcgatgaggagaaagtcatcttcgccgcccaccagctgcatggacccgcatctctatggtgggaccatttccaggctatgcagccggagggacagcctgttacttgggcccgcttcaccgccgctttccggagaacccatgtgcccgccggagtcgtggcccttaagaaaagagaattccgagagttgaagcaaggcaaccgctccgtgatggagtatttgcacgagttcaacaacctggcccgttacactccggaggatgtgcggaaagatgaggagaagcaagaaaagttcctggcaggaatggaccctgagctgtccgtccgtctagtctctggggactatccggatttccaacgtctggtggacaagagcatccgcttggaagccaagcacaaggaactggagtcgcacaagcgccgcttggcgaatttccgcaaccaacagggtgctaaccaaagggtccgctacaccaatccctatccagggggatcctcctcgcagcagcaacaacagcagcagcaacctcgctccgcgcctcgacctcaattcgtggtgcgcgtcccacagccgcagcagcaacagaatcaacaagggactcgagcgccccgtcctcctacgccaactgtgcagcctggtcaaggccgcagggacgcttcaggtccgcagcgtctgtgcttcaactgcttcgagcccgggcactttgcggataaatgcccgaagccaaggcgtcagcaaggccaagcgcctccccgccccaacaacggtggtaaggacgtcagtcggggtcgtgtgaaccatgtgacggccgaggacgtgctgacaactccagacgtcatcgttggtacgttcctcattcattccatccctgctaccattttgttcgactctggagcttcccactcgtttatatctgtgccattcgtggggagaaatcagttgggggtagaaaggcttagaaaccctctgctcatcaccacccctggaggggttatgacagcaaagtattatagccctgccgtccctatagaaattcaggggattccttttccctcggatctgatcctgctagacaccaagaacttggatataggactgtcagaaatccccatcgtcagagagttcggagacgtgtttccggaagaactacctggtatgccgcctaaacgagagattgagttccggatagatcttgctccaggaaccactcctctgtacaagcgaccctaccgtatggcagcaaatgaactggccgaagttaagaaacagttggaagagctgaaagaaaaggggtatatacgtccgagtacttccccctggggtgctcctgtgatttttgtggagaagaaagacaagacgaagaggatgtgcgttgactacagagctctcaatgaagtcaccatcaaaaacaagtaccctcttccccggatcgacgatctgttcgatcagcttaaaggtgccactgtattctccaagattgatcttcgttccggatatcaccaattacgtattcgcgaagaagatattccgaagaccgcattcaccacgcgatacggactgtttgaattcacggtgatgtcgttcggtttaaccaatgcccctgccttcttcatgaacttaatgaacaaagtgttcatggaatacttggataagtttgtggtggttttcattgatgacattctgatatactcacaatcagaggaagaccatcagcaccatctccgtctggtattgggaaagttgcgggaacatcaattatatgccaaacttagcaagtgtgagttctggttgtccgaagtcaaattcttagggcacgtgatatctgctaaaggagttgctgtggaccccgaaacagtgaccgccgtcaccgattggaagcaacccaagacagtcactcaagttcgcagtttcttaggtttggcaggatactaccggaggttcatcgagaacttctccaaaatcgctcgacccatgacacagttgttgaagaaagaagagaaatttgtgtggagcccgcaatgcgagaaggcgtttcaaactctcaaagaaaagttggtttcctcgccagtgttaatcttgccggatactcgcaaggacttcatggtgtattgtgacgcttcgcgccaaggattggggtgcgtactcatgcaggatggtcatgtggtggcctatgcctcacgccagctacggcctcatgaaggcaactaccctacccatgatttggagttagcagcggtggttcatgctctaaaaatctggcggcattatctcattgggaatcgctgtgaaatatatactgatcataagagtttgaaatacatcttcacccagtcggatctgaatcttcggcaaaggagatggttagaactcatcaaagattatgatgtgggaattcactatcatcctggtaaggccaacgtggttgccgacgctctaagtcggaaaagccactgcaacactcttaacgtccgtggcattccactcgaacttaatcaacagatggaagccctgaacctaagcatagttggtcgcggattcttgactacgttggaagccaagcccaccttgctcgatcaaatccgcgaggctcagaagaatgatccagacatgcatggactcctcaagaatatgaaacagggtaaagccgctggtttcacagaggatgaacacggaaccctatggaacggaaatcgagtatgcgttccagataacagagaacttaaacagttgatacttcaggaagctcacgaaagtccttattccatccaccctggcagcacgaagatgtacttagacttgaaggagaaatactggtgggttagtatgaagcgggaaattgcagagttcgtggccctttgtgatgtgtgccagcgtgtcaaggcagagcaccaacgaccggccggacttctccaacctctccaagtacctgaatggaaatgggatgaaattgggatggatttcatcaccggacttccaaaaacccaaggtggatatgattctatatgggtagttgtggatcgattaaccaaggtagctcgattcattcctgtgaagaccacctatggagggaacaaactagccgagctctacttcgctaggatcacagatgggcagaccgagcgtctaaatcagatcctagaagatatgcttcgcgcatgtgtcctagatttcgggaagacctgggataagagtctcccctatgccgagttctcctacaataacagctaccaagccagcatacaaatggcgccttatgaagcgttgtatgggcgcaaatgccggacaccgctcctgtgggaccaagttggggaaagccaagtgttcgggactgatatcctgagagaagctgaagcgaaagtcagaaccattagggataatctaaaggtggcacagtcccagcagaaaagttatgcagataaccgtcgccgtgacctggaattcgcagtggatgattttgtgtaccttcgggtcacgccattgcggggtgtacacaggtttcagacaaaggggaagctcgcacctcggtatgtgggtcctttccgtatcgttgctcgacgcggagaagtcgcttaccagttggagctgcccgcctccttgggcaacgtgcatgatgtgttccatgtgtcgcaactcaagaaatgccttcgagtgccatccgagcaggccgactcagagcaaattgaagttcgcgaagacttgacctacgtggagaggccagtgaagatcctggacaccatggagcgcaggaccaggaaccgggtaatccgtttttgcaaggtccagtggagcaaccacgccgaagaagaagctacctgggagcgcgaagacgagctgaaggcagcccatcccgacctcttcgccaggcccacccgtcatcccctacctcgcgccgcgcccgccgcctcgcccgtgccctag

SEQ ID NO: 86081 - DNA, 1260 bp, Oryza sativa
  Clone ID: PAT_MRT4530_85156C.1
atgaccaggagaagtgctaacaccggtgatggcaaccaacctgaaggcagcaaccacaaccatcagggcaacccacctccacctcctcctccacctccaccaccaccaccagacaccaacgccattctcacccaaatcctcgcccagcaggccaacatgatgactgctttcctccaccacctccaaaatccgccacaacttaatgctccaccaccacccccacaacactctaaactcgccgagtttctccgcatccgcccacctaccttctctagctccaacaaccccgtggatgcgttggattggttgcatgccgtggggaaaaagctagacactgtgcagtgcagcgatgaggagaaagtcatcttcgccgcccaccagctgcagggacccgcatctctatggtgggaccatttccaggctacgcagccagagggacagcctattacatgggctcgcttcaccgccgctttccgaagaacccatgtgcccgccggagtcgtggcccttaagaaaagggaattccgagagttgaagcaaggcgaccgctccgtgatggagtatttgcacgagttcaacaacctggcccgttacgctccggaggatgtgcgggaagatgaggagaagcaagagaagttcctggcaggaatggaccctgagctgtccgtccgtctagtctccggggattatccggatttccaacgtctggtggacaagagcatccgcttggaagccaagcacaaggaactggagtcgcacaagcgccgcttggcgaatttccgcaaccaacagggtgctaaccaaagggtccgctacaccaatccctatccagggggatcctcctcgcagcagcaacaacagcagcagcaacctcgctccgcgcctcgacctcaattcgtggtgcgcgtcccacagccgcagcagcagcagaatcaacaagggactcgtgcgccccgtcctcctccaccgactgtgcagcctggtcaaggccgcagggacgctcaaggtccgcagcgtctgtgcttcaactgcttcgagcccgggcactttgcggataaatgcccgaagccaaggcgtcagcaaggccaagcgcctccccgccccaacaacggtggtaaggacgtcattcggggtcgtgtgaaccatgtgacggccgaggacgtgctgacaactccagacgtcatcgttgagagttcggagacgtgtttccggaagaactacctggtatgccgcctaagcgagagattgagttccggatag

SEQ ID NO: 86082 - DNA, 476 bp, Oryza sativa
  unsure (1)..(476): unsure at all n locations
  Clone ID: PAT_MRT4530_85157C.1
aaaataagggagggggggccattctctggtttctcatattggtgaatctccaagagggtcccaacagtccattggaacggggacacaaaaatagtttctctttttgagggatgcccttagccttcaaaactggttttataagaaacttttacaggccatagcagcaacgcatttgctggcactttatttatttatttatttaggtgttctttatccccattgcccccttaagaggtttccgccccattttaaacgtcttggtggctcttgttttgggggggggggattgccccgaacccatcccctctggtttgcttgggcctctgggcctcttctcttgggttgcggtttgcatttgccggaacttcngttgggggagccccgnagatggaaccccttcctgccctggggcttcccctcgcggtggggttcggcttggttgccttgggggcccttccttttctttgggccttttt

SEQ ID NO: 86083 - DNA, 2607 bp, Oryza sativa
  Clone ID: PAT_MRT4530_85158C.1
atggcgggtggaaatcctcacgatttcttctcccagtcgttcaatgaagctccaacgggccacatggacggctccgactacggcttctcgcaggggtcttcaggatatgggagcagatccacagtccccccgtcacgtcctcctccagcggcgggagggggacgtggcagcagtcgtggagggagaggaggaggacgaggccgtggcaggtcgttgaccaatggcgctggatttggcaggggaatgcgaggatttgttcctcctggctcatcgtctggtcaaggaggcgtccgaggtcatggggcatccatgtcgcacagcgggccacccgccttcaactttggagtcttcggaggaggacggcgagccggtgcctcgtcgtcccaagggacaaatgtgtccgaggacgacggcaacgaagaagacgaagaggactttggtcctgatggtcagcacatgaatacgtatgacaaggcaaattggacagaagaaaaaacttacacattgtgtgaaatagcatgtgaggaaataagggatgggcattgtcctaatggagcatggacaactagagggtaccagaatttgaaggccaaatatttccaaagggctaacctaaggcattcaaccaaacagataaagaatagattcacccatctaaagaattattacagtgcttgggtgtggctgaaccaacaaactggagctggtagaagtgctagtggagaaataattgcatcaaatgcttggtgggaaaaaaaattaaggtatgcagttgtcaaaaatatagctagtttacatgattttagagttttctgtgatattgatttagtgtcaatacaggagaagggggacgccaagaaatttcgccatggcaaccctgagtacttagattttcttatagagatatttcaaggagttgcagttgatggttccacagcatacatccctggttttgaagatgaagatgaagaggaaggagaagaagaagcaggggatgcaggggaggcagctagaggggaaagagctgtaggggatggttatgagaacagccccatgagcaataacagcaggaagagagggagtagcagctatgatgtgtccacagcttctagtcctgggaaaaaaagcaagagcccagtggtgaagctcatgaaggggctgctcaattctttcaactctgattgtgataagtcaaataccctaattactgaacttgttaacagcaagaagttaaaggagcagaagaaagaagaaattgctgagtcattgacaaactgtcagaggttggcagtagagtgtggtgcagcagaagacagtgtggaatacttttgtgccacacagttgtttgcttccaaacataacagagatggtgaaggcagtggtgatgaagatacctctgatgaagatagcagtgatgatgagattgatcttatcatttatattttgaagaaaagagaaatggacaggagaagagcatgtatgcttgccgccatgattggtacgtattacttggaactttactctaataaggctccaagaagggtagcacctgagtctggacatgattgggttatgagaacattagctaatagaactgcttgttacaacatgtttaggatgcacaggccagtttttgagaggttacattctgtgcttgtggaatcatatgagttgaagtccacaaacaacatggattccatggagtgtttgggtctttttttatggatagtaggtgctccccaatcagttaggcaagcccaagacagatttgttaggtctcttaaaacagtacatagtaacttcaaagcagttttgaccactctactgaaacttgcacaagatatcattaggccaaaagatcccttattcacaatagtccataagaaattgctttctcctcagtacacaccatatttggataattgcattggagcaatagatggtactcacatccaagttgtggtgccaaattcagctgctgttcaacataggaatagacataaggagaatagtcagaatgttatgtgtgtctgtgacttcgatatgagatttactttcgtgcttgctgggtggcctggttcggttcatgacatgagggtattcaatgatgcacaaactagatttagtgccaagtttccaaagccacctccaggaaagttttatctcgtagactcgggatacccaaataggccgggttatctagcaccatacaagggtataacatatcatttccaagagtacaacgaaagcacattgccaaggggaaaaagggagcactttaattactgccattcttcgtgtcggaatgtcattgagaggtcatttggggtcttgaagaacaagtggaggattttgtttagtttaccaagctactcgcaggaaaagcaaagcagaattatccatgcatgcatagcacttcataatttcattagagacagtcaaatggctgatacagagttcgacaattgtgaccatgatgaaaattatgatccattgggtggaacctcttctccatctagcgaaccaacaaacgaattggactcgcgtgtcatgaaccaatttcgggactggattgccgatggattgtggtatttgaaaggaatgtaa

SEQ ID NO: 86084 - DNA, 5424 bp, Oryza sativa
  Clone ID: PAT_MRT4530_85159C.1
atggaggtggatgaagtcgggggtcgatggacattctccagggcaaatgaaggctacacgagctgcggcccggtagtcgagatgtcatggcacagggccggtgtcctgctgctaggggctcagtcctgcctgcctgtctcgggggttccggccgtaggtgggattgggtcggtactcttgtctatagctaggatgggttggaaactatgtcacgtcttccgtctgtataccgtggtgatggccggcagcgtcacccgtcgtggtttggacatgactggtttcgtcttggagctgcggggcatgtgcgtggtcctggggtatccacatggagtggactaccaggccaggccgcttccggagcaggagggtgacgatgcggagccccacgctgcttgggaggtcactgcagtgatcctcgctggctctcccgagcggacttcgctgacagtcaccgcgggtggagactccttccccgccgcctgccagagcgccgctctcctcgccatcggcactcttcaccagcgctacccggacgagttgcagcactcgccctactgctaccaccctcgtcgcggaggagcccgcgaccacgccaccttccgggacgctagctcggaggatgacgctaccatcgtgcacttggcgcgcatggtggaggcatacgacgcggctcgtatcgacttccatcagatggtgcgccgtgggatggtcgagaacaacatgaagatcctggagctgcgtcaggagaacctgcagctcaagaaggacctggacgcagtggaggcgcagctgcaccagctcaagatcgcccagggagaggtctgccgccccaagcgtcgccgcgtctgccgcagcctgaagatcaccgcccgcaagagcacctccaggcctgagcttgttcgtcagtccctggcgtggacctgcttcatcgagacccctcgtgccgagcctgcgcccgtgatggtgacgaccaggagaaacgctgttaccggtgatggcaaccaacctgaaggcagcaaccacaacaaccatggcagtccacctccacctccacctcctcctccaccaccaccaccagataccaacgccattctcacccaaatcctcgcccagcaggccaacatgatgactgctttcctccaccacctccaaaatccgccacaacttaatgctccaccaccacccccacaacactctaaactcgccgagtttctccgcatccgcccacctaccttctctagctccaacaaccccgtggatgcgttggattggttgcatgccgtggggaaaaagttagacactgtgcagtgcagcgatgaggagaaagtcatcttcgccgcccaccaactgcagggacccgcatctctatggtgggaccatttccaggctacgcagccagaggggcagcctattacttgggcccgttttaccgccgctttccggagaacccatgtgcccgccggagtcgtggcccttaagaaaagggaattccgagagttgaagcaaggcaaccgctccgtgatggagtatttgcatgagttcaacaacctggcccgttacgccccggaggatgtgcgggaagatgaggagaagcaagagaagttcttggcaggaatggaccctgagctgtccgtgcgtctagtctccggggactatccggacttccaacgtctggtggacaagagcatccgcttggaagccaagcacaaggaactggagtcgcacaagtgccacttggagaatttccgcaaccaacagggtgctaaccaaagggtccgctacaccaatccctatccagggggatcctcctcgcagcagcaaccacagcagcagcaacctcgctccgcgcctcgacctcaattcgtggtgcgcgtcccacagccgcagcagcaacagaatcaacaagggactcgagcgccccgtcctcctacgccaactgtgcagcctggtcaaggccgcagggacgcttcaggtccgcagcgtctgtgcttcaactgcttcgagcccgggcactttgcggataaatgcccgaagccaaggcgtcagcaaggccaagcgcctccccgccccaacaacggtggtaaggatgtcattcagggtcgtgtgaaccatgtgacggccgaggacgtgctgacaactccagacgtcatcgttggtacgttcctcattcattccatccctgctaccattttgttcgactctggagcttcccactcgtttatatctgtgccattcgtggggagaaatcagttgggggtagaaaggcttagaaaccctctgctcatcaccacccctggagaggttatgacagcaaagtattatagccctgccgtccctatagaaattcaggggattccttttccctcggatctgattctgctagacaccaggaacttggatgtgatccttgggatgaattggttggctcaattccaaggagtagtggattgcgcgagacgcactgtcactctgtaccgagggccggagcaaccggttgttttctttgcacccccaacctctgtcaatagatcagaactgcatcagataggactgtcagaaatccccatcgtcagagagtttggagacgtgttcccggaagaactacccggtatgccgcccaagcgagagattgagttccggatagatcttgctccaggaaccacccctctgtacaagcgaccctaccgtatggcagcaaatgaactggccgaagttaagaaacagttggaagagctgaaagaaaaggggtatatacgtccgagtacttccccctggggtgctcctgtgatttttgtggagaagaaggacaagacgaagaggatgtgcgttgactacagagctctcaatgaagtcaccatcaaaaacaagtaccctcttccccggatcgacgatctgttcgatcagcttaaaggtgccactgtattctccaagattgatcttcgttccggatatcaccaattacgtattcgcgaagaagatattccgaagaccgcattcaccacgcgatacggactgtatgaattcacggtgatgtcgttcggtttaaccaatgcccctgccttcttcatgaacttaatgaacaaagtgttcatggaatacttggataagtttgtggtggtattcattgatgacattctgatatactcacaatcagaggaagaccatcagcaccatctccgtctggtattgggaaagttgcgggaacatcaattgtatgccaaacttagcaagtgtgagttctggttgtccgaagtcaaattcttagggcacgtgatatctgctaaaggagttgctgtggaccccgaaacagtgaccgccgtcaccgattggaagccacccaagacagtcactcaagttcgcagtttcttaggtttggcaggatactaccggagattcatcgagaacttctccaaaatcgctcgacccatgacacagttgttgaagaaagaagagaaatttgtgtggagcccgcaatgcgagaaggcatttcaaactctcaaagaaaagctggtttcctcgccagtgttaatcttgccggatactcgcaaggacttcatggtgtattgtgacgcttcgcgccaaggattggggtgcgtgctcatgcaggatggtcatgtggtggcctatgcctcacgccagctacgacctcatgaaggcaactaccctacccatgatttggagttagcagcggtggttcatgctctaaaaatctggcggcactatctcattgggaatcgatgtgaaatatatactgatcataagagtttgaaatacatcttcacccagtcggatctgaatcttcggcaaaggagatggttagaactcatcaaggattatgatgtgggaattcactatcatcctggtaaggccaacgtggtcgccgacgctctaagtcaaaaaggccattgcaacactcttaacgtccgtggcattccacccgaacttaatcaacagatggaagccctgaacctaagcatagttagtcgcggatttttggctgcgctggaagccaagcccaccttgctcgatcaaatccgcgaggctcagaagaatgatccagacatgcatgggctcctcaagaatatgaaacagggtaaagccgctggtttcacagaggatgaacacggaaccctatggaacggaaatcgggtatgcgttccagataacagagaacttaaacagttgatacttcaggaagctcacgaaagtccttattccatccaccctggcagcacgaagatgtacttagacttgaaggagaaatactggtgggttagtatgaagcgggaaattgcagagttcgtggccctttgtgatgtttgccagcgtgtcaaggcagagcaccaacgaccggccggacttctccaacctctccaagtacctgaatggaaatgggatgaaattgggatggatttcatcaccggacttccaaaaacccaaggtggatatgattccatatgggtagttgtggatcgattaaccaaggtagctcgattcattcctgtgaagaccacctatggagggaacaaactagccgaactctacttcgctaggatcgtaagtctccatggcgttcctaagaaaatcgtatctgataggggaagccaattcacctctcacttttggaagaagctccaagaagagctgggtacccgattaaacttcagcaccgcgtatcacccgcagacagatggacagaccgagcgtctaaatcagatcctacaagatatgcttcgcgcatgtgtcctagatttcgggaagacctgggataagagtctcccctatgccgagttctcctacaataacagctatcaagccagcatacaaatggcaccttatgaagcgttgtatgggcgcaaatgccggacaccgctcctgtgggaccaagttggagaaagccaagtgttcgggactgatatcctgagagaagctgaagctaaagtcagaaccattcgggataatctaaaggtggcacagtcccggcagaaaagttatgcagataaccgtcgccgtgacctggaattcgcagtggatgattttgtgtaccttcgggtcacgccattgcggggcgtacacaggtttcagacaaaaggggaagctcgcacctcgctgcccgcctccttgggcaacgtgcatgatgtgttccatgtgtcgcaactcaagaaatgtctccgagtgccatccgagcaggccgactcagagcaaattgaagttcgcgaagacttgacctacgtggagaggccagtgaaaatcctggataccatggagcgcaggaccaggaaccgggtaatccgtttttgcaaggtccaatggagcaaccacgccgaggaagaagctacttgggagcgtgaagacgagctgaaggcagcctatcccgatctcttcgccagttcttccgaatctcggggtcgagattccgtttaa

SEQ ID NO: 86085 - DNA, 1095 bp, Oryza sativa
  Clone ID: PAT_MRT4530_8515C.1
atgggcgcctcctgctcctcccccttcccccctcctccttcacctgccgaatccaacgccccctccgcctccgcgatgcaccacccgcctcaccccgcggccggaggaggaggacccgtcatgccgtacgccgacgccgaccgcaccctccgcgcgctggccggcgcggcggagggcttcggccgccgcgccatcggcgggctccacggcccgctctaccgcgtcacctccctcgacgacgacggccacggcaccctccgccaggcgtgccgcgcccacggcccgctctggatcgtcttcgacgtctccggcgacatccacctccgcacctacctccgcgtcacctcccacaagaccatcgacgggcgcggccagcgcgtgcgcctcctgggcaaggggctccagctcaaggagtgccgccacgtgatcgtctgcaacctccagatcgagggcgggcgcggccacgacgtggacgccatccagatcaagccctcctccgccgacatctggatcgaccgctgcagcctcgccgactgcgacgacggcctcgtggacatcacccgcgggagcaccgacgtcaccgtctcccggtgccgcttctcccgccacgacaagaccatgctggtgggcgccgacccgtcccacaccggcgaccgcggcatccgcgtcaccgtccaccactgcttcttcgacggcacgcggcagcgccacccgcgggtgcggttcgggagggcgcacctgtacaacaactacacgagggggtggggcatctacgcggtggccgccggggtggaggcgcaggtggcgtcgcagtgcaacgtgtacgaggccggggcggagaggaaggcggtgttcaggtacgtgccggagagggcggcggaccgggaggaggcggaggccgggtgggtgaggtcggagggggacgccttcctcaacggggcgcggccgtgcctggtggacggcggcgacgcggcggtgttcaggccggaggagtactacgagaggtggaccatggaggcggcgtcgccggcgctcaaggaggtggtgcagctgtgcgccgggtggcagcccgtgccgaggccaccgggcgagtga

SEQ ID NO: 86086 - DNA, 1692 bp, Oryza sativa
  Clone ID: PAT_MRT4530_85160C.1
atggcgggggggaatcctcacgatttcttctcccagtcgttcaatgaagctccagcgggccacatggacggctccgactacggcttctcgcagggatcttcaggatatggtggatctggcgccgacatccattttgggggagggggatcggggggcctcaatctgaactcccaggccgacgccttccccgatttcgcctcctaccaacagatcattcaaccgggtagccttgggggaatgcgaggatgggttcctcctggctcatcgtctagcgaaggacgcgtccgaggtcatgggacatccatgtcgcacagtgggccacccgcctttgactttggagtcttcggaggaggacagcgagtcggtgcgtcgtcgtctcaagggacatatgtgtctgaggacgacggcaacgatgaagacgaagaggactttggtcctgatggtcagcacatggagaagggggatgccaagaaattttgccatggcaaccctgagtacttagattttcttatagagatgtttcaaggagttgcagttgatggttccacagcatatatccctggttttgaagatgaagatggagaggaaggagaagaagaagcaggggatgcaggggagacagctagaggggaaagagctgtaggggatggttatgagaacagccccatgagcactaacaacaggaagagagggagtagcagctgtgatgtgtccacagcttctagtcctgggaaaaaaagtaagagcccagtggtgaagctcatgaaggggctgctcaattctttcaactctgaaagtgataagtcaaataccctaattactgaacttgttaacagcaagaagttaaaggagcaaaagaaagaagaaattgttgagtcattgacacactgtcagaggttggcagtagagtgtggtgcagcagaagacagtgtggaatacttttgtgccacacagttgtttgcttccaatcataacagagatggtgagggcagtgctgatgaagatatctgtgaggaagatagcagtgatgaggagattgatcttatcatttctattttgaagaaaagagaaatgaacaggagaagagcatgtatgcttgccgatatgattggtgctccccaatcagttaggcaagcccaagaccgatttgttaggtctcttagaacagtacatagtaagttcaaagcagttttgaccgctctactgaaacttgcaaaagatatcattaggccaaaagatcccttattcacaacagtccataagaaattgctttctccacagtacacaccatatttggataattgcattggagcaatagatggtactcacatccaagttgtggtgccaaattcagctgctgttcaacataggaatagacataaggagaagagtcagaatgttatgtttgtctgtgactttgatatgagatttactttcgtgcttgctggctggcctggttcggttcatgacatgagggtattcaatgatgcacaaactagatttagtgccaagtttccaaagccacctccaggaaagttttatctcgtagactcgggatacccaaataggctgggttatctagcaccatacaagggtataacatatcattccaagagtacaacgaaagcacattgccaaggggaagaagggagcactttaattactgccattcttcgtgtcggaatgtcatag

SEQ ID NO: 86087 - DNA, 5106 bp, Oryza sativa
  Clone ID: PAT_MRT4530_85161C.1
atggatgaagtcgggggtcgatggacattctccagggcaaatgaaggctacacgagctgcggcccgatggccggcagcgtcacccgtcgtggtttggacatgactggcttcgttttggagctgcggggcatgtgcgtggtcttgggatatccacatggagtggactaccaggccaggccgctcccggagcaggagggtgaggatgcagagccccacgctggttgggaggcatacgacgcggctcgtatcgacttccatcagatggtgcgtcgtggcatggtggagaacaacatgaagattctggagctgcgtcaggagaacctgcagctcaagaaggacctcgacgcgttggagtcgcagctgcaccagctcaagctcgcccaaggagaggacagccgccccaagcgccgccgcgtctgccgcagccagaagatcaccgcccgcaagagcacctccaggcccgagcttgttcgtcagtccttggcgtggacctgcttcgtcgagacccctcgtgccgagcctgcgcccgtggttcctcaggagggggaagcctccggcgttggtagcacggaggatgcgctgttgctcgccttccgtcctggcccgtcgcagcggagaaatgttagcaccggtgaaggcaaccaacccgaaggcagcaaccccaacccccaaggcaatccacctccaccaccaccaccagacaccaacgccattctcacccaaatcctcgcccagcaggccaacatgatgactgctttcctccaccacctccaaaatccgccacagcagaatgctccaccaccacctccacaacactctaaactcgccgagttcctccgtatccgcccacctaccttctctagctccaacaaccctgtggatgcgttggattggttgcatgccgtggggaaaaagctagacactgtgcagtgcagcgatgaggagaaagtcatcttcgccgcccaccagctgcaggggcccgcatctctatggtgggaccacttccaggctacgcagccagagggacagcctattacttgggcccacttcaccgccgccttccggagaacccatgtgcccgccggagtcatggctctaaagaaaagggaattccgagagttgaagcaaggcaaccgctccgtgatggagtatttgcatgagttcaacaacctggcccggtacgccccggaggatgtgcgggaagatgagaagaagcaagagaagttcttggcaggtatggaccctgagctgtccgtccgtctagtctccggggactatccagatttccaacgtctggtggacaagagcatccgcttggaagccaagcacaaggaactggagtcgcacaagcgccgcttggcgaacttccgcaatcaacagggtgctaaccaaagggtccgctacaccaatccctatccagggggatcctcctcacagcagcaacaacagcagcagcaatctcgctccgcgccccgacctcaattcgtggtgcgcgtcccacagccgcagcagcagcagaatcaacaagggactcgtgcaccccgtcctcctacgccaactgtgcagcccgttcaaggccgcagggacgctcaaggtcagcagcgtctgtgcttcaactgcttcgagcccgggcactttgcggataaatgcccgaagccaaggcgtcagcaaggccaagcgcctccccgccccaacaacggtgggaaggacgtcattcggggtcgtgtgaaccacgtgacggccgaggacgtgctgacaactccggacgtcatcgttggtacgttcctcatccattccatccctgctacaattttgttcgactctggagcttcccactcgtttatatctgtgccattcgtggggaaaaatcagttgggggtagaaaggcttagaaaccctctgctcatcaccacccctggaggggttatgacagcaaagtattatagccctgccgtccctatagaaattcaggggattcctttttcctcggatctgattctgctagataccaagaacttggatgtgattcttgggatgaattggttggctcaattccaaggagtagtggattgcgcgagacgcactgtcactctgtaccgagggccggaacaaccggttgttttctttgcacccccaacctctgtcagaagttcagaacttcatcagataggactgtcagaaatccccattgtcagagagttcggagacgtgtttccggaagaactacctggtatgccgcccaagcgagagattgagttccggatagatcttgctccaggaaccactcctctgcacaagcgaccctaccgtatggcagcaaatcagaacctggcggaattcaagaaacagttggaagagttgaaagaaaaggggtatatacgtccgagtacttccccttggggtgctcctgtgatttttgtggagaagaaagacaaaacgaagaggatgtgcgttgactacagagctctcaatgaagtcaccatcaaaaacaagtaccctcttccccggatcgatgatctgttcgatcagcttaaaggtgccactgtattctccaagattgatcttcgttccggatatcaccaattacgtatccgtgaagaagatattccgaagaccgcattcaccacgcgatacgggctgtatgaattcacggtgatgtcgttcggtctaaccaatgcacctgccttcttcatgaacttaatgaacaaagtgttcatggaatacttggataagtttgttgtggttttcattgatgacattctgatatactcacaatcagaggaagaccatcagcaccatctccgtctggtgttgggaaagttgcgggaacatcaattgtatgccaagcttagcaagtgtgagttctggttgtccgaagtcaaattcttggggcacgtgatatctgctaaaggagttgctgtggaccccgaaacagtgaccgccgtcaccgattggaagcaacccaagacagtcactcaagtccgcagtttcttaggtttggcgggatactaccggagattcatcgagaacttctccaaaatcgctcgacccatgacacagttgttgaagaaagaagagaaatttgtgtggagcccgcaatgcgagaaggcgttccaaactctcaagaaaaagctggtttcctcgccagtgttaatcttgccggatactcgcaaggatttcatggtgtattgtgatgcttcgcgccaaggattggggtgcgtgctcatgcaggatggtcatgtggtagcctatgcctcacgtcagctacggcctcatgaaggcaactaccctacacatgatttggagttagccgcagtggttcatgctctaaaaatctggcggcactatctcattgggaatcgctgtgaaatatatactgatcataagagtttgaaatacatcttcacccagtcagatctgaatcttcggcaaaggagatggttagaactcatcaaggattatgatgtgggaattcactatcatcctggtaaggccaacgtggttgccgacgctctaagtcggaaaagccattgcaatactcttaacgtccgaggcattccacccgaacttaatcaacagatggaagccctgaacctaagcatagttggtcgtggattcttggctgcgttagaagccaagcctaccttgctcgaccaaatccgcgaggctcagaagaatgatccggacatgcatggactcctcaagaatatgaaacagggtaaagccgctggtttcacagaggatgaacacggaactctatggaacggaaagcgggtgtgcgttcccgataacagagaacttaaacagctgatacttcaggaagctcacgaaagtccttattcaatccacccgggcagtacaaagctgtacttagatttgaaggagaaatactggtgggtcagcatgaagcgggaaattgcagagtttgtggccctatgtgatgtgtgccagcgtgtcaaggcagaacaccagcgaccggccggacttctccaacctctccaagtgccagaatggaaatgggatgaaattgggatggatttcatcactggacttccaaaaacccaaggtggatatgattctatatgggtaattgtggatcgactaacaaaggtagctcgatttattcctgtgaagaccacctatggagggaacaaactagcggaactctatttcgctaggatcgtgagtctccatggcattcccaagaaaatcgtatctgataggggaagccaattcacctctcacttctggaagaagctccaagaagagctgggcactcgattgaatttcagcaccgcgtatcacccgcagacagatggacagaccgagcgtctaaaccagatcctagaagatatgctccgcgcatgtgtactagatttcgggaagacctgggataagagcctcccctatgccgagttttcctacaacaacagctatcaagccagcatacaaatggcaccttatgaagcgttgtacgggcgcaaatgccggacaccgctattgtgggaccaagttggagaaagccaagtgttcgggactgacatcctgagagaagctgaagctaaagtcagaatcattcgggataatttaaaggtggcacagtcccggcagaaaagttatgcagataaccgtcgccgtgacctggaattcgcagtgggtgattttgtatatcttcgggtcacgccattgcgaggtgtacacaggtttcagacaaaagggaagctcgcacctcggtatgtgggtcccttccgtatcattgctcgacgcggagaagtcgcctaccagctggagttgcccgcctccttgggtaacgtgcatgatgtgttccatgtgtcgcaactcaagaaatgtcttcgagtgccatccgagcaggccgactcagagcaaattgaagttcgcgaagacttgacctacgtggagaggccagtgaaaatcctggacaccatggagcgcaggaccaggaaccgagtgatccgtttttgcaaggtccagtggagcaaccacgccgaagaagaagctacttgggagcgtgaagacgagctgaaggcagcccatcccgatctcttcgccagttcctccgaatctcggggtcgagattccgtttaa

SEQ ID NO: 86088 - DNA, 2307 bp, Oryza sativa
  Clone ID: PAT_MRT4530_85162C.1
atggacggctccgactacggcttctcgcaggggtcttcaggatatggtggatctggcaccggcatccattttgggggagggggatcggggggcctcgatctgaactcccaggccgacgccttccccgatttcgcctcctaccaacagatccttgaaccgggtagccttgtgttacctccgattcgggcagggagcagatccacagtccccccgtcacgtcctcctccagcggcgggagggggacgtggcagaagtcgtggagggagaggaggaggacgaggccgtggcatgtcgttgaccaatggcgctggatctggcaggggaatgcgaggatttgttcctcctggctcatcgtctggccaaggaggcgtccgaggtcatggggcatccatgtcgcacagcgggccacccgccttcaactttggagtcttcggaggaggacggcgagccggtgcctcgtcgtcccaagggacaaatgtgtccgaggacgacggcaacgaagaagacgaagaggactttggtcctgatggtcagcacatgaatacgtatgacaaggcaaattggacagaagaaaaaacttacacattgtgtgaaatagcatgtgaggaaataagggatgggcattgtcctaatggagcatggacaactagagggtaccagaatttgaaggccaaatatttccaaagggctaacctaaggcattcaaccaaacagataaagaatagattcacccatctaaagaattattacattgcttgggtgtggctgaaccaacaaactggagctggtagaagtgctagtgaagaaataattgcatcaaatgcttggtgggaaaaaaaaattaaggagaagggggacgccaagaaatttcgccatggcaaccctgagtacttagattttcttatagagatatttcaaggagttgcagttgatggttccacagcatacatccctggttttgaagatgaagatgaagaggaaggagaagaagaagcaggggatgcaggggaggcagctagaggggaaagagctgtaggggatggttatgagaacagccccatgagcactaacagcaggaagagagggagtagcagctgtaatgtgtccacagcttctagtcctgggaaaaaaagcaagagcccagtggtgaagctcatgcaggggctgctcaattctttcaactttgattgtgataagtcaaataccctaattactgaacttgttaacagcaagaagttaaaggagcagaagaaagaagaaattgatggtgaaggcagtggtgatgaagatatctctgatgaagatagcagtgatgatgaaattgatcttatcatttatattttgaagaaaagagaaatggacaggagaagagcatgtatgcttgccgccatgattggtacgtattacttggaactttactctaataaggctccaagaagggtagcacctgagtctggacatgattgggttatgagaacattagctaatagaactgtttgttacaacatgtttaggatgcacaggccagtttttgagaggttacattctgtgcttgtggaatcatatgagttgaagtccacaaacaacatggattccatggagtgtttgggtctttttttatggatagtaggtgctccccaatcagttaggcaagcccaagacagatttgttaggtctcttaaaacagtacatagtaagttcaaagcagttttgaccgctctactgaaacttgcacaagatatcattaggccaaaagatcccttattcacaacagtccataagaaattgctttctcctcagtacacaccatatttggataattgcattggagcaatagatggtactcacatccaagttgtggtgccaaattcagctgctgttcaacataggaatagacatgaggagaagagtcagaatgttatgtgtgtctgtgacttcgatatgagatttactttcgtgcttgctgggtggcctggttcggttcatgacatgagggtattcaatgatgcacaaactagatttagtgccaagtttccaaagctacctctaggaaagttttatctcgtagactcgggatacccaaataggccgggttatttagcaccatacaagggtataacatatcatttccaagagtacaacgaaagcacattgccaaggggaagaagggagcactttaattactgccattcttcgtgtcggaatgtcattgagaggtcatttggggtcttgaagaacaagtggaggattttgtttagtttaccaagctactcgcaggaaaagcaaagcagaattatccatgcatga

SEQ ID NO: 86089 - DNA, 4158 bp, Oryza sativa
  Clone ID: PAT_MRT4530_85163C.1
atgtcgtggcacagggccggtgtcctgctgctaggggctcagtcctgcctgcctgtccagggggttccggccgtaggtgggattgggtcggtactcttgtctatggctaggatgggttggaaactatgtcacgttttccgtctgtataccgtggtggctacgcagccagaggggcagcctattacttgggcccgcttcaccgccgccttccggaggacccatgtgcccgccggagtcatggcccttaagaaaagggagttccgagagttgaagcaaggcaaccgctccgtgatggagtatttgcatgagtttaacaacttggcccggtacgccccggaggatgtgcgggaagatgaggagaagcaagagaagttcttggcaggaatggacccggagctgtctgtccgtctagtctccggtgactatccggatttccaacgtctggtggacaaaagcatccgcttggaagccaagcacaaggaactggagtcgcacaagcgtcgcttggcgaatttccgcaaccaacagggtgctaaccaaaggatccgctacaccaatccctatccagggggatcttcctcgcagcagcagcaacctcgctccgcgcctcgacctcaattcgtggtgcgcgtcccacagccgcagcaacagcagagccagcaagggacccatgcgccccgtcctcctacgccagccgcgcagtctggtcaaggccgcagggacgttcaaggtccgcagcgtctgtgcttcaactgcttcgagcccgggcactttgcggataaatgcccgaagtcgaggcgccagcaaggccaagcgcctccctgctccaacaacggtggtaaggatgtcattcggggtcgtgtgaaccacgtgacggccgaggacgtgctgacaactccagacgtcatcgttggtacgttcctcatccattccatccctgctaccattttgttcgactctggagcttcccactcgtttatatctgtgccattcgtggggagaaatcagttgggggtagaaaggcttaggaaccctctactcatcaccacccctggaggggttatgacagcaaagtattatagtcctgccgtccctatagaaattcaggggattccttttccctcggatctgattcttctagacaccaagaacttggatgtgatccttgggatgaattggttggctcaattccaaggagtagtggattgtgcaagacgcactgtcactctgtaccgagggccggaacaaccggttgttttctttgcacctccaacctctgtcagtagttcagaacttcatcagataggactgtcagaaatccccattgtcagagagttcggagacgtgtttccggaagaactacccggtatgccgcccaagcgagagattgagttccggatagatcttgctccaggaaccactcctctgtacaagcgaccctaccgtatggcagcaaatgaactggccgaagttaagaaacagttggaagagttgaaagaaaaggggtatatacatccgagaacttccccctggggtgctcctgtgatttttgtggagaagaaagacaagacgaagaggatgtgcgttgactacagagctctcaatgaagtcaccatcaaaaacaagtaccctcttccccggatcgatgatctgttcgatcagcttaaaggtgccacggtattctccaagattgatcttcgttctggatatcaccagttgcgcatccgtgaagaagatattccgaagaccgcattcaccacgcgatacggactgtatgaattcacggtgatgtcgttcggtttaaccaatgctcctgccttcttcatgaacttaatgaacaaagtgttcatggaatacttggataagtttgttgtggttttcattgatgacattctggtatactcacaatcagaggaagaccatcagcaccatctccgtctggtgttgggaaagttgcgggaacatcaattgtacgccaaacttagcaagtgtgagttctggttgtccgaagtcaaattcttagggcacgtgatatccgctaaaggagttgctgtggatcccgaaacagtgaccgccgtcaccgattggaagcaacccaagacagtcactcaaattcgcagtttcttaggtttggcaggatactaccggaggttcatcgagaacttctccaaaatcgctcgacccatgacacagttgttgaagaaagaggagaaatttgtgtggagcccgcaatgcgagaaggcgttcaaaactctcaaagaaaagctggtttcctcactagtgttaatcttgccggatactcgcaaggacttcatgctacggcctcatgaaggcaactaccctacccatgatttggagttacccgcggtggttcatgctctaaaaatctggcggcactatctcattgggaatcgctgtgaaatatatactgatcataagagtttgaaatacatcttcacccagtcggatctgaatcttcggcagaggagatggttagaactcatcaaggattatgatgtgggaattcactatcatcctggtaaggccaacgtggtcgccgacgctctaagtcgaaaaagccattgcaacactcttaacgtccgtggcattccacccgaacttaatcaacagatggaagccctgaatctaagcatagtgggtcgcggattcttggctgcgttggaagccaagcccaccttgctcgatcaaatccgcgaggctcagaagaacgatccggacatgcatggactcctcaagaatatgaaacaaggtaaagccgctggtttcacagaggatgaacacggaaccctatggaacggaaatcgggtatgcgttccagataacagagaacttaaacagctgatacttcaggaagctcacgaaagtccttattccatccaccctggcagtacgaagatgtacttagacttgaaggagaaatactggtgggttagtatgaagcgggaaattgcagagttcgtggccctttgtgatgtgtgccagcgtgtcaaggcagagcaccaacgaccggccggacttctccaacctctccaagtaccagaatggaaatggaatgaaattgggatggatttcatcaccggacttccaaaaacccaaggtggatatgattctatatgggtagttgtggatcgattaaccaaggtagctcgatttattcatgtgaagaccacctatggagggaacaaactagccgagctctacttcgctaggatcgtgagtctccatggcgttcctaagaaaattgtatccgataggggaagccaattcacctctcacttttggaagaagctccaagaagagctgggtacccgattaaatttcagcaccgcgtatcacccgcagacagatggacagaccgagcgtctaaatcagatcctagaagatatgcttcgcgcatgtgtcctagatttcgggaatacctgggataagagtctcccctatgccgagttctcctacaataacagctaccaagccagcatacaaatggcaccttatgaagcgttgtatgggcgcaaatgccggacaccgctattgtgggaccaagttggggaaagccaagtgttcgggaccgatatcctgagagaagctgaagctaaagtcagaaccattcgggataatctaaaggtggcccagtctcggcagaagagttatgcagacaaccgacgccgtgacctggaattcgcagtggatgactttgtgtatcttcgggtcacgcccttgcgaggtgtacacaggtttcagacaaaggggaagctcgcacctcggtttgtgggtcctttccgtatcattgctcggcgcggagaagtcgcttaccagttggagctgcccgcctccttgggcaacgtgcatgatgtgttccatgtgtcgcaactcaagaaatgtcttcgagtgccatccgagcaggccgactcagagcaaattgaagttcgcgaagacttgacctacgtggagaggccagtgaaaatcctggacaccatggagcgaaagaccaggaaccgggtaatccgtttttgcaaggtccaatggagcaaccacgccgaggaagaagctacttgggagcgtgaagacgagctgaaggcagcccatcccgatctcttcgtcagttcttccgaatctcggggtcgagattccgtttaa

SEQ ID NO: 86090 - DNA, 1710 bp, Oryza sativa
  Clone ID: PAT_MRT4530_85164C.1
tcatactggcaggattgccgatggagaaaatagcgaccataaccttctaagattgtagtcatgatgcaatagtaaactgatagctaattcgttggaactgtattgtttagcattgaagctcattttctgatgatcttgaaccatggtaccagcttgcaagttaatggtcagactaaaaaaagtttgacctgattcctctggaaggaggcctagaagaggcagaggcagcagcgcactgagattgcagatgacaatcaagagagctagattcttaaagctgtccttagtgactccaaaaaattgagttagaccagcaccaactagaccaccactaacacttccagcattagagatggacatcaaagtggcaaacagagttgcttccattcctggtggacacaatttagctgctaacaccaaaactggcataaatgaagcctgacttaggactgtaatgattaacgaatccccaatagagaaccattcatcactgattccaaactgccgattaagcccagtaacaagaagaacctgtgtcattccaagggctgaacctatgatggttgtcgccaggaagattttccttagaggaaccgcctttagaaaatagttataaagcccaacaccaagcaatgaagcaatagatgtaacaagctttacacgtcctagaaattctggcgtgaacccaagcttatttgtgatgaagaaaaacatggcggaatccgacttaggtgttgcttgccagaggaatataaacaaggtgggcaagaaaatgttaggttgctttactgaagtccaaagctgccggatatgctgcttagaggtctcaatgaatcctgaaccagagtgtgacatagcacgttcccctgaagatagacggtgttcatttacaagaactgcaacagcagatgtcatcaggggtaaaaaagctgtaacaccaaagacaaatcttactccataagtatccacaagtgaaccactgaaatatgcactcactattcctccaaaagctgaggatccccaacatagtgactggagagatccagatgtactctgtgattcgccacgagctctctcaacaaccatagaatccaccacaacatctgagaaggcaacagaaagtgatcccagcagaatagagaatgctgcactgtatttactatccaccaatgtagccatcaaaccccatgaaagagcaccaaggaatcctgacagaataaggtatgaccttcgtcgatatccaaagagtgggatggaatcactgataaagccatacaggggcttgatcaaccatggcaaggatgagaagccagatataactgcagtctctgcaggatcaagatgaagatcatcttttaagtaaaaactcacagcaagtcgagcaaggcctaaaaccccttgcacaaaatacacagttgcaactgccatattatctggggatagttccaccccagatattgtgaaatatcttgatctaggcttgctcttgcggatttcatctgtattgggcagcttcttttgccactcatcaaagtatctttcacttgtgtcaactttacttgagcccacctgatatctaggaatgaatccagagcggtggtcggaggcggcgccgcggccgtcgagctcgaccggggggcggcgggggacggcggcggcggcggcctcctcgtcgtacgagtcgccgccgaccgagctaccggaggccat

SEQ ID NO: 86091 - DNA, 1179 bp, Oryza sativa
  Clone ID: PAT_MRT4530_85165C.1
atggcggggggaaatcctcacgatttcttctcccagtcgttcaatgaagctccagccggccacatggacggctccgactacggcttctcgcaggggggaatgcgaggatgggttccccctggctcagcatctggcgatggaggcttccgaggtcatgcggcatccatgtcgcacagcgggccacccgccttcgactttggagtcttcggaggaggaccgcgagtcggtgcgtcgtcgtctcaagggacatatgtggctgaggacgacggcaacgacgaagacgaagaggacttcggtcctgatggtcagcgcatgaatacatatgacaaggcaatttggacagaagaaaaaacttacacattgtgtgaaatagcatgtgaggaaataagggatgggcattgtcctaatggagcatggacaactagagggtaccagaatttgaaggccaaatatttccaaagggctaacctaaggcattcaaccaaacagataaagaatagattcacccatctaaagaattattacgttgcttgggtgtggctgaaccaacaaactggagctgtgtcaatacaggagaagggggatgccaagaaatttcgccatggcaaccctgagtacttagattttcttatagagatgtttcaaggagttgcagttgatggttccacagcatatatccctggttttgaagatgaagatgaagaggaagaagaagaggaagcaggggatgcaagggagacagctagaggggaaagagctgtaggggatggttttgagaatagccccatgagcactaacagcaggaagagagggagtagcagctgtgatgtgtccacagcttcaagtcttggaaaaaaaagcaagagcccagtggtgaagctcatgagggggctgctcaattctttcacctctaaaagtgataagtccaataccctaattactgaacttgttaacagcaagaagttaaaggagcagaagaaagaagaaatggctgagtccttgacacactgtcagaagttggcagtagagtgtggtgcagcagaagacaatgtggaatacttttgtgccacacagttgtttgcttccaaacataacagagttatgtttgagaatattagcactaatgaagcaagatttatgtggttgaagagatggtgccagcataagaatttgtattag

SEQ ID NO: 86092 - DNA, 1975 bp, Oryza sativa
  Clone ID: PAT_MRT4530_85166C.1
atggcgttgcgcgtgctcttcttgatgctgtcggcgttccccgcgagctgcctcgccgtcgctgctccgatcagtcccgacgccgtgccattgctcgccttcaagtcggcgtgcgccgaccctgccgccgcgctcgtctcctggacggaggcctccgacccctgctccgacaggtggcgtggcatcacttgccggaagccttcgccttcgccgccgccgtcgtcacctcctcgcgtccgtcgcgttgttctcgaaggcctccgcctcggcggggatgctggagccgtcgccgcgctcgctggcctccctatgctctcgttccttagcctcaagaacaactcgtttacgggctctctcggtgacgtcgacttctccaccttggcgccgcacctcaagctcctctatctctccggcaatggcttctccgggcggtttccggagtccgtgctacggcttcgccatctgcgccgtctcgacctctctggcaatcggcttacctgcacgattccgccggagataggacaccggctcccttctctcctgacgctgcatcttgcgcgcaactcgctcgtcgggcccttgccggcctcgctgggagcaatggccaggcttgccaagctcaacgtctccggtaaccacctccagggccggatccccaagcgcctcgccgccgtcttccccgcgtcttcgttcaccggcaaccccgaactttgcggtgcccctctgcgccgccggtgcaatgagcagctccacatggtgtacggcggcggcggcagcggcgctgacacgtcacaccaaccgaagagagggaggaggaggagcaatgaccggtggatggtggcgatgatcatggcggcggtgggcgcagcagtggcatcgctggtcgccgcggcactctagctgcggcgtactgtggctgaagaacaagaagccggagaggccgcgcgccagctcacgcaccagctcgatggcgcgggaggagacggtgcgcttcgacggctgctgcgtggagttcgacgtgtgcacgctcatgcggggcgccgcggagatactgggcaagggcgcgacggcgacgacgtaccacgtggccatgggaggcgacgacgtcatcgtggacgacgccggcgtcgtcgaggagggcaaggctggcgaggtggtggtgatgaagaggatgcggcggagggaaggcacgacccgggaggacgagcggcggaagcgggagctcgcgcgggagatgggcacgtggcggcacgccaacgtcgtcagcctttgcgccttctacgcgtcggccgacgagctcctcctcgtcttcgactacgtccccaatggcagcctccacagcctcctcaatgagaaccgaggaccggcgcgtgttccactggagtggcagacgaggttgaagctggcgcaggacgcggcgcaggggcacgcctacctccacggcgtgtccggcggcaagctcgcccaccggcacctcacctcctccaacatcctcgtcgacgccggcggcaacgcgcgcgtctccgacttcgccctgctgcagctgctcgtcccggccccggcggcggacgaggccgcgcagaagcaggacgtgcacgcgttcggggtcgtcctgcttgagatcctgacggggcggtcgccggaggacggcaacgtggacctggcgctgtgggcgcgcacggtggtgcgcgaggagtggacctcggaggtgttcgacgtggagctgctgccgagcaggggcggcgcggaggacgagatggtggcgctcctccatgtggcgctgctgtgcgtcgccgacgaccccggcgagcggccgaggatggcggtggtggccaagatgatcgaggacatcagggacagggggagcaagaggagcaggtactcggcgtcgccgtcgcaggttggccactcctacgagtcatccccttccatctcggaggacaccactaggtccaccaatgcctcaagctcttga

SEQ ID NO: 86093 - DNA, 5415 bp, Oryza sativa
  Clone ID: PAT_MRT4530_85167C.1
atggatgaagtcgggggtcgatggacattctccagggcaaatgaaggctacacgagctgcggcccgatggccggcagcgttacccgtcgtggtttgcacatgactggcttcgtcttggagctgcgaggcatgtgcgtggtcttggggtatccacatggagtggattaccaggccaggccgctcccggagcaggagggtgaggatgtagagcctcacgctggttgggaggtcactgcagtgatcctctccggctctcccgagcggacttcgctggcagtcaccgcgggtggagattccttccccgccgcttgccagaacgccgctctcctcgccatcggcacccttcaccagcgctacccggacgagttgcagcactcgccctaccgctaccacccccgtcgcggaggagccagcgaccacgccaccttccgagacgccagctcggaggatgacgctaccgtcgtgcatctggcacgcatggtggaggcgtacgacgcggctcgtatcgacttccaccagatggtgcgccgtggcatggtggagaacaacatgaagatcctggagctgcggcaggagaacctgcagctcaagaaggacctcgacgcagtggaggcgcagctgcaccagctcaagatcgcccagggagagatctgccgccccaagcgtcgccgcgtctgccgcagccagaagatcaccgcccgcaagagcacctccaggcccgagcttgttcgtcagtccctggcgtggacttgcttcgtcgagacccctcgtgccgagcctgcgcccgtggttccccaggagggggaggcctccggcgttggtagctcggagggtgcgctgttgctcaccttccgccctggcccgtcgcagcgctctccttctctgtttgctggttctgtgtggggttttcagatggtgacgaccaggagaaatgttaacaccggtgaaggcaaccaacccgaaggcagcaaccccaacccccaaggcaacccacctccaccaccaccaccagacaccaacgccattctcacccaaatcctcgcccagcaagccaacatgatgaatgctttcctccaccacctccaaaacccgccacaacagaatgctccaccaccacctccccaacactccaaactcgccgaattcctccgcatccgtccacccaccttctctagctccaacaaccctgtggatgcgttggattggttgcatgccgtggggaagaagctggacacggtgcagtgcagtggtgaagagaaagtcatcttcgccgcccatcagctgcaggggcccgcatctctctggtgggaccatttccaggctgcgcagcccgaggggcagccgattacttgggctcgcttcaccgccgctttccggagaacccatgtgcccgctggagtcgtggctcttaagaagagggaattccgggagttgaagcaaggcaaccgctccgtgatggagtatttgcatgagttcaacaatctagcccgttacgctccggaggatgtgcgggaagatgaggagaaacaagagaagttcctggcaggaatggaccctgagctgtccgttcgtctagtctctggggactatcctgattttcaacgtttggtggataagagcatccgcttggaagctaagcacaaggagctggagtcgcacaagcgccgcttggcgaacttccgcaatcagcagggtgctaaccagagggtccgctacaccaatccctatccagggggatcctcctcgcagcagcagcagcagcagcagcaacctcgcccagcgccccgacctcaattcgtggtgcgcgtcccacagccgcagcagcagcagaatcaacaagggactcgtgcgccccgtcctcctacgccagctgtgcagcccgttcaaagccgcagggacgcttcaggtccgcagcgtctgtgcttcaactgcttcgagcccgggcactttgcggataaatgcccaaagccaaggcgtcagcaaggccaagcgcctccccgctccaacaacggtggccaggacgtcatccgtggtcgtgtgaatcacgtgacggccgaggacgtgctgacaactcccgacgtcatcgttggtacgttcctcgtccattccatccctgctacaattttgttcgactctggagcttcccactcgtttatatctgtgccattcgtggggaaaaatcagttgggggtagaaaggcttagaaaccctctgctcatcaccacccctggaggggttatgacagcaaagtattatagccctgccgtccctatagaaattcaggggattccttttccctcggatctgattctgctagacaccaagaacttggatgtgattcttgggatgaattggttggcacaattccaaggagtagtggattgcgcgagacgcactgtcactctgtaccgaggaccagaacaaccggttgttttctttgcacctccaacctctgtcagaagttcagaactgcaccagataggtctgtcagaaatccccatagtcagagagttcggagacgtgtttccggaagaactacctggtatgccgcccaagcgagagattgagttccgaatagatcttgctccaggaaccactcctctgtacaagcgaccctaccgtatggcagcaaatgaactggccgaagtaaagaaacagttggaagagttgaaagaaaaggggtacatacgtccgagtacttccccatggggtgctcctgtgatttttgtagaaaagaaagacaagacgaaaaggatgtgtgtcgactacagagctctcaatgaagtcaccatcaaaaacaagtaccctcttccccggatcgatgatctgttcgaccagcttaaaggtgccactgtattctccaagattgatcttcgttccggatatcaccaattacgtattcgtgaagaagatattccgaagaccgccttcactacgcgatatggactgtatgaattcacggtgatgtcgttcggtttgaccaatgcacctgccttcttcatgaacttgatgaataaagtgttcatggaatacttggataagtttgttgtggttttcattgatgacattctgatatactcacaatcagaggaagaccatcagcaccatctccgtctggtgttgggaaagttgcgggaacatcaattgtatgccaagcttagcaagtgtgagttctggttgtccgaagtcaaattcttagggcacgtgatatctgctaaaggagttgttgtggatcccgaaacagtgaccgccgtcaccgattggaagcaacccaagacagtcactcagattcgcagtttcttaggtttggcaggatactaccggagattcatcgagaacttctccaaaattgctcgacccatgacacagttgttgaagaaagaagagaagtttgtgtggagcccgcaatgcgaaaaggcgttccaaactctcaaagaaaagctggtttcctcgccagtgttaatcttgccggatactcgcaaggatttcatggtgtattgtgatgcttcgcgccaaggattggggtgcgtgctcatgcaggacggtcatgtggtagcctatgcctcacgccaactacgacctcatgaaggcaactaccctacacatgacttggagttagcagcggtggttcatgctctaaaaatctggcggcactatctcattgggaaccgctgtgaaatatatactgatcataagagtttgaaatacatcttcactcagtcagatctgaaccttcggcaaaggagatggttagaactcatcaaagattatgatgtgggaatacactatcatcctggtaaggccaacgtggttgccgacgctctaagtcgaaagagccattgcaacaatcttaacgcccgtagcattccgcccgagcttagtcaacagatggaagccctgaacctaaacatagttggtcgtggatttttggccgcgttggaagccaagcccaccttgctcgatcaaatccgcgaggctcagaagaatgatccggacatgcatggactcctcaagaatatgaaacagggtaaagccgctggtttcacagaggatgaacacggaaccttatggaacggaaagcgggtatgcgttccagatagcagagaacttaaacagctgatacttcaggaagctcacgaaagtccttattccattcacccgggcagtaccaagatgtacttagacttgaaggagaaatactggtgggtcagcatgaagcgggaaattgcagagtttgtggctctatgtgatgtgtgccagcgtgtcaaggcagaacaccaacgaccggccggacttctccaacctctccaagtgccggaatggaaatgggatgaaattgggatggatttcatcaccggacttccaaaaacccaaggcggatatgattctatatgggtagttgtggatcgattaacaaaggtagctcgatttattcctgtgaagaccacttatggagggaacaaactagcggagctctacttcgctaggatcgtgagtctccatggcgttcccaagaaaatcgtatctgataggggaagccaattcacctctcacttttggaagaagctccaagaagagctgggtactcgattgaatttcagcaccgcctatcacccgcagacagatggacagaccgagcgtctgaatcagattctagaagatatgctccgcgcatgtgtcctagatttcgggaagacttgggataagagtctcccctatgccgagttctcctacaataacagctaccaagccaacatacaaatggcaccctatgaagcgttgtacgggcgcaaatgccggacaccgctattgtgggaccaagttggagaaagccaagtgttcgggactgatatcctgagagaagctgaagctaaagtcagaatcattcgggataatctaaaggtggcacagtcccggcagaaaagttatgcagataaccgtcgccgtgatctggaattcgcagtggatgactttgtgtatcttcgggtcacgccattgcgaggggtgcacaggtttcagacaaaagggaagctcgcacctcggtatgtgggtcccttccgtatcatcgctcgacgcggagaagttgcttaccagctggagttgcccgcctccttgggcaacgtgcatgatgtgttccatgtgtcgcaactcaagaaatgtcttcgagtgccatccgagcaggccgactcagagcaaattgaagttcgcgaagatttgacctatgtggagaagccagtgaaaatcctggacaccatggagcgcaggaccaggaaccgagtaatccgtttttgcaaggtccagtggagcaaccacgccgaagaagaagctacttgggagcgcgaagacgagctgaaggcagcccatcccgatctcttcgccagttcttccgaatctcggggtcgagattccgtttaa

SEQ ID NO: 86094 - DNA, 1119 bp, Oryza sativa
  Clone ID: PAT_MRT4530_85168C.1
atggcttcatcaagggactttgatcacgctgactgcttcgacaactccggcccagtgcatatgatggcgaagaacggcgccggttctcctcgaacggtgcttgactggggcaaggaggagcaccgccgttgcgtcgctgcctgccttgtcaaaggtgtctacatcatagagaatgacagtactaggcgcagggtgcacaccaatgcgcttgcgccaccgtggtgggagaacttcgggtttaacctcctcgatgttattcgagatgactccgatcatgatgtcctgtccattattggcgcaatatacgagcatgtgccacctcttggcgagcccgctcatcctctgtctcctcactatgtggtcgcctttcgtggcaccatgatgtcacaccccaaggcgctcattgatctgtacctcgacgccaagatcatggtgaacaccctcaaagagtccaagcgatcccgcctagcaaacaccgcggttaaaaagcttgttgctaccatagacaagggcatgggaggcgcctgtgcccatggcactgcaggtagctgcattgtttggctcgcgggacactcgcttggtgcttcccttgcgctggatgtggggcgtgccatgatggtggagcaaggctacaacctcccgaccttcctcttcaatccgccacaagtgtcaccgactccagcgatcgatgtgctgctaccgatagagaaggcacaaaaggcaaagagggacatatatgccgtgagctatttcgtgaaggcagggttgggcaaggtcttgaatccccacaaggagcgcatggagaacctcttcaagcggctatcaccatgggcaccggaactatacgtgcacgagagggatgtcatttgcaagggttacatcgactacttcgagcaacggcagcaggtgcaggagcgcttccgtgcagtcgctacgtcagcaatgacgttgtcgtaccgcgacatgttcttttccatgttcggaatggagaaggagcaaccgcaccttctaccatcggcgaggctgtggaagagcactagcaaggacgaggacgcacacgctctgcagcaatggtggaagccgatgggggtgcaagcaatggtggaagccgatgggtga

SEQ ID NO: 86095 - DNA, 2610 bp, Oryza sativa
  Clone ID: PAT_MRT4530_85169C.1
atggcgggtggaaatcctcacgatttcttctcccagtcgttcaatgaagctccaacgggccacatggacggctccgactacggcttctcgcaggggtcttcaggatatggtggatctggcaccggcatccattttgggggagggggatcggggggcctcgatctgaactcccaggccgacgccttccccgatttcgcctcctaccaacagatccttgaaccgggtagccttgtgttacctccgattcgggcagggagcagatccacagtccccccgtcacgtcctcctccagcggcgggagggggacgtggcagaagtcgtggagggagaggaggaggacgaggccgtggcatgtcgttgaccaatggcgctggatctggcaggggaatgcgaggatttgttcctcctggctcatcgtctggccaaggaggcgtccgaggtcatggggcatccatgtcgcacagcgggccacccgccttcaactttggagtcttcggaggaggacggcgagccggtgcctcgtcgtcccaagggacaaatgtgtccgaggacgacggcaacgaagaagacgaagaggactttggtcctgatggtcagcacatgaatacgtatgacaaggcaaattggacagaagaaaaaacttacacattgtgtgaaatagcatgtgaggaaataagggatgggcattgtcctaatggagcatggacaactagagggtaccagaatttgaaggccaaatatttccaaagggctaacctaaggcattcaaccaaacagataaagaatagattcacccatctaaagaattattacattgcttgggtgtggctgaaccaacaaactggagctgtgtcaatacaggagaagggggacgccaagaaatttcgccatggcaaccctgagtacttagattttcttatagagatatttcaaggagttgcagttgatggttccacagcatacatccctggttttgaagatgaagatgaagaggaaggagaagaagaagcaggggatgcaggggaggcagctagaggggaaagagctgtaggggatggttatgagaacagccccatgagcactaacagcaggaagagagggagtagcagctgtgatgtgtccacagcttctagtcctgggaaaaaaagcaagagcccagtggtgaagctcatgcaggggctgctcaattctttcaactctgattgtgataagtcaaataccctaattactgaacttgttaacagcaagaagttaaaggagcagaagaaagaagaaattgctgagtcattgacaaactgtaagaggttggcagtagagtgtggtgcagcagaagacagtgtggaatacttttgtgccacacagttgtttgcttccaaacataacagagatggtgaaggcagtggtgatgaagatatctctgatgaagatagcagtgatgatgagattgatcttatcatttatattttgaagaaaagagaaatggacaggagaagagcatgtatgcttgccgccatgattggtacgtattacttggaactttactctaataaggctccaagaagggtagcacctgagtctggacatgattgggttatgagaacattagctaatagaactgcttgttacaacatgtttagtatgcacaggccagtttttgagaggttacattctgtgcttgtggaatcatatgagttgaagtccacaaacaacatggattccatggagtgtttgggtctttttttatggatagtaggtgctccccaatcagttaggcaagcccaagacagatttgttaggtctcttaaaacagtacatagtaagttcaaagcagttttgaccgctctactgaaacttgcacaagatatcattaggccaaaagatcccttattcacaacagtccataagaaattgctttctcctcagtacacaccatatttggataattgcattggagcaatagatggtactcacatccaagttgtggtgccaaattcagctgctgttcaacataggaatagacatgaggagaagagtcagaatgttatgtgtgtctgtgacttcgatatgagatttactttcgtgcttgctgggtggcctggttcggttcatgacatgagggtattcaatgatgcacaaactagatttagtgccaagtttccaaagccacctctaggaaagttttatctcgtagactcgggatacccaaataggccgggttatctagcaccatacaagggtataacatatcatttccaagagtacaacgaaagcacattgccaaggggaagaagggagcactttaattactgccattcttcgtgtcggaatgtcattgagaggtcatttggggtcttgaagaacaagtggaggattttgtttagtttaccaagctactcgcaggaaaagcaaagcagaattatccatgcatgcatagcacttcataatttcattagagacagtcaaatggctgatacagagttcgacaattgtgaccatgatgaaaattatgatccattgggtggaacctcttctccatctagcgaaccaacaaacgatttggactcgcgtgtcatgaaccaatttcgggactggattgccgatggattgtga

SEQ ID NO: 86096 - DNA, 289 bp, Oryza sativa
  Clone ID: PAT_MRT4530_8516C.1
acaagggaaaagaaatacttttatccctagggaccaaaaaacccataccattcgttcatttgaccaaccccactaggttaaaaaacaaaacactgccttacaaagggggggcccctgctgtccgtaccaaaagggggcccaaaaaacccggccccgggcggaaatttcctcccccccccaaaagggaaacggggggggggcccccccctcccccgggcaaaccccccccgcgggataaatccttttccttttccttaacaggccccccatggccgtttccccttttaac

SEQ ID NO: 86097 - DNA, 6052 bp, Oryza sativa
  Clone ID: PAT_MRT4530_85170C.1
atggcggccggatcttccgcgaccgattccccctcatccggccgctctctcctcctcccaacactacataaacactccccgtgcctccctccttcgtttccgccactcgccgctctctctccccgtcggaatcgagctcgcgccgtcgtcctctctctccgccgtcgccgccgagctccggtccgccgccgtcgtcgccccgggcctcctcccgtttcggcgtcgccttcttcgggttcgccgcgtcctcgccgatctcgtccaccccttcgtttcgcccgccgaccgccggaacgccgccgtcctcgtcgacccgagccgcgccgccgccttcctccgcttcggtcgccgttcccgtcgtcgccgtcgacccggggtgagccatggaccgcccatttcgtttcccccttccctctcctctctcgggcgccgctccgtcgcgccggaggtcgccgccggcgaccatcggggcgcgggtgcgccgcctcccgtcggctgtgccggcgaggccgccttcgggcgcgccccgcggctgccatgtggggcccggccgtcagccgcccgtgtcctcgggtgcggctgacgcgtgggacccacggcgccgggccggcgtaagccgcgtgcacccggtccaccgtggacccacctcggccatataaggaccggtcttcgggcctctgttgcaaagcactaccgtacttccacatgtctagtggggcaaatgaaggctacacgagctgcggcccggtagtcgagatgtcatggcacagggccggtgtcctgctgctaggggctcagtcctgcctgcctgtcccgggtgttccggccgtaggtgggattgggtcgatgtacacctctgatcagagtaaaatctattcgaatagccgcgccctcggttatgggcaagccgagcaatgtacccaaatggccggcagcgtcagccgtcgtggtttggacatgactggcttcgtcttggagctgcggggcatgtgcgtggtcctggggtatccacatggagtggactaccaggccaggccgcttccggagcaggagggtgacgatgcggagccccacgctgcttgggaggtcactgcagtgatcctcgctggctctcccgagcggatttcgctgacagtcaccgcgggtggggattccttccccgccgcttgccagagcgccgctctcctcgccatcggcactcttcaccagcgctacccggacgagttgcagcactcgccctaccgctaccaccctcgtcgcggaggagcccgcgactacgccaccttccgggacgctagctcggaggatgacgctaccatcgtgcacctggcgcgcatggtgaaggcgtacgacgcggctcgtatcgacttccatcagatggtgcgtcgtgggatggtcgagaacaacatgaagatcctggagctgcgtcaggagaacctgcagctcaaaaaggacctagacgcggtggaggcgcagctgcatcaactcaagatcgcccagggagaggtctgccgccccaagcgtcgccgcgtctgccgcagccagaagatcaccgcccgcaagagcacctccaggcccgagcttgttcgtcagtccctggcgtggacttgcttcgtggagacccctcgtgccgagcccacgcccgtggttccccagaagggggaagcctccggcgttggtagcacggaggatgcgctgttgctcaccttccatggtgatgaccaggagaaatgctgccaccagtgatggcaaccaacccgaaggcagcaaccacaacaaccatggcagcccacctccacctcctcctccacctccaccaccaccaccagataccaacgccattcttacccaaatcctcgcccagcaggccaacatgatgactgcttttctccaccacctccaaaatccgccacaacataatgctccaccaccacctccccaacactctaaactcgccgagttcctccgcatccgtccacctaccttctctagctccaacaaccccgtggatgcgttggattggttgcatgccgtggggaaaaagatagacactgtgcagtgcagcgatgaggagaaagtcatcttcgccgcccatcagctgcaggggcccgcatctctatggtgggaccatttccaggctacgcagccagagggacagcctattacttgggcccgtttcaccgccgctttccggagaacccatgtgcccgctggagtcgtggcccttaagaaaagggaattccgagagttgaagcaaggcaaccgctccgtgatggagtatttgcatgagttcaacaacctggcccgttacgccccggaggatgtgcgggaagatgaggagaagcaaaagaagttcttggcaggaatggaccctgagctgtccgtccgtctagtctccggcgactatccggatttccaacgtctggtggacaagagcatccgcttggaagtcaagcacaaggaactggagtcgcacaagcgccgcttggcgaatttccgcaatcaacagggagctaaccaaagggtccgctacaccaatccctatccagggggatcctcctcgcagcagcgacaacagcagcaacaacctcgctccgcgccccgccctcaattcgtggtgcgcgtcccacagccgcagcaacagcagagtcagcaagggacccgtgcgcctcgtcctcctacgccaactgtgcagcctggccaaggccgcagggacgcttcaggtccgcagcgtctgtgcttcaactgcttcgagcccgggcactttgcggataaatgcccgaagccaaggcgacagcaaggccaagcgcctccccgctccaacaacggtggtaaggacgtcattcggggtcgtgtgaaccacgtgacggccgaggacgtgctgacaactccagacgtcatcgttggtacgttcctcattcattccatccctgctaccattttgttcgactctggagcttcccactcgtttatatctgtgccattcgtggggagaaatcagttgggggtagaaaggcttagaaaccctctgctcatcaccacccctggaggggttatgacagcaaagtattatagccctgcggttcctatagaaattcaggggattccttttccctcggatctgattctgctagacaccaagaacttggatgtggtccttgggatgaattggttggctcaattccaaggagtagtggattgtgcgagacgcaccgtcactctgtaccgagggccgggacaaccggttgttttctttgcacccccaacctctgtcagtagttcagaactgcatcagatagggctgtcagaaatccccatagtcagagagttcggagacgtgtttccggaagaactacctggtatgccgcccaagcgagagattgagttccggatagatcttgctctaggaaccactcctctgtgcaagcgaccctaccgtatggcagcaaatgaactggccgaagtcaagaaacagctggaagagttgaaagaaaaggggtacatacgtccgagcacttccccctggggtgctcctgtgatttttgtggagaagaaagacaagacgaagaggatgtgcgttgactacagagctctcaatgaagtcaccatcaaaaacaagtaccctcttccccggatcgatgatctgttcgatcagcttaaaggtgccactgtattctccaagatcgatcttcgttccggatatcaccaattgcgtattcgggaagaagattttccgaagaccgcattcaccacgcgatacggactgtatgaattcacggtgatgtcattcggtttaaccaatgcacctgccttcttcatgaacttaatgaacaaagtgttcatggaatacttggataagtttgttgtggttttcattgatgacattctgatatactcacaatccgaggaagaccatcagcaccatctcctcctggtgttgggaaagttgcgggaacatcaattgtatgccaaacttagcaagtgtgagttctggttgtccgaagtcaaattcttagggcacgtgatatctgctaaaggagttgctgtggaccccgaaacagtgaccgccgtcactgattggaagcaacccaagacagtcactcaagtccgcagtttcttaggtttggcaggatactaccggaggttcatcgagaacttctccaaaatcgctcgacccatgacacagttgttgaagaaagaagagaaatttgtgtggagcccgcaatgtgagaaggcgttcagaactctcaaagaaaagctggttgcctcgccagtgttaatcttgccggatactcgcaaggacttcatagtgtattgtgacgcttcgcgccaaggattggggtgcgtgctcatgcaggacggtcatgtggtggcctatgcctcacgccagcttcgacctcatgaaggcaactaccctacccatgacttggaattagccgcggtggttcatgctctaaaaatctggcggcactatctcattgggaatcgctgtgaaatatatactgatcataggagtttgaaatacatcttcacccagtcggatctgaatcttcggcaaaggagatggttagaactcatcaaggattatgatgtgggaattcactatcatcctggtaaggccaacgtggtcgccgacgctctaagtcgaaagagccattgcaacactcttaacgtccgtggcattccaccggaacttaatcaacagatggaagccctgaacctaagcatagttagtcgtggattcttggctacgctggaagccaagcctaccttgctcgatcaaattcgcgaggctcagaagaatgacccggatatgcatgggctcctcaagaatatgaaacagggtaaagccgctggtttcacagaggatgaacacggaaccctatggaacggaaatcggcgtgtcaaggcagagcaccaacgaccggccggacttctccaacctctccaagtcccagaatggaaatgggatgaaattgggatggattttatcaccggacttccaaaaacccaaggcggatatgattctatatgggtagtcgtggatcgactaaccaaggtagcacggttcattcccgtaaagaccacctatggagggaacaaactagctgaactctacttcgctaggattgtaagtctgcatggcgtccccaagaaaattgtatctgataggggaagccagttcacctctcacttttggaagaagctccaagaagagctgggtacccgattaaatttcagcaccgcgtatcacccgcagatagatggacagaccgagcgtctaaatcagatcctagaggatatgcttcgcgcatgtgtcctagatttcgggaagacctgggataagagtctcccctatgccgagttctcctacaataacagttatcaagccagcatacaaatggcaccttatgaagcgttgtatgggcgcaaataccggacaccgctattgtgggaccaagttggagaaagccaagtgttcgggactgatatcctgagagaagctgaagctaaagtcagaaccattcgggataatctaaaggtggcacagtcccggcagaaaagttatgcagataaccgtcgccgtgatctggaattcgcagtggatgactttgtgtatcttcgggtcacgccattgcgaggtgtacacaggtttcggacaaaggggaagctcgcacctcggtatgtgggtcctttccgtatcactgctcggcgcggagaagtcgcctaccagttggagctgcccgcctccttgggcaacgtgcatgatgtgttccatgtgtcacaactcaagaaatgtctccgagtgccatccgagcaggccgactcagagcaaattgtagttcgcgaagacttgacctacgtggagaggccagtaaaaatcctggacaccatggagcgcaggaccaggaaccgggtaatccgtttttgcaaggtcgagtggagcaaccacgccgaagaagaagctacctgggagcgcgaagacgagctgaaggcagcccatcccgatctcttcgccagttcttccgaatctcggggtcgagattccgtt

SEQ ID NO: 86098 - DNA, 2751 bp, Oryza sativa
  Clone ID: PAT_MRT4530_85171C.1
ttacattcctttcaaataccacaatccatcggcaatccagtcccgaaattggttcatgacacgcgagtccaattcgtttgttggttcgctagatggagaagaggttccacccaatggatcataattttcatcatggtcacaattgtcgaactctgtatcagccatttgactgtctctaatgaaattatgaagtgctatgcatgcatggataattctgctttgcttttcctgcgagtagcttggtaaactaaacaaaatcctccacttgttcttcaagaccccaaatgacctctcaatgacattccgacacgaagaatggcagtaattaaagtgctccctttttccccttggcaatgtgctttcgttgtactcttggaaatgatatgttatacccttgtatggtgctagataacccggcctatttgggtatcccgagtctacgagataaaactttcctggaggtggctttggaaacttggcactaaatctagtatgtgcatcattgaataccctcatgtcatgaaccgaaccaggccacccagcaagcacgaaagtaaatctcatatcgaagtcacagacacacataacattctgactcttctccttatgtctattcctatgttgaacagcagctgaatttggcaccacaacttggatgtgagtaccatctattgctccaatgcaattatccaaatatggtgtgtactgaggagaaagcaatttcttatggactgttgtgaataagggatcttttggcctaatgatatcttgtgcaagtttcagtagagcggtcaaaactgctttgaacttactatgtactgttttaagagacctaacaaatctgtcttgggcttgcctaactgattggggagcacctactatccataaaaaaagacccaaacactccatggaatccatgttgtttgtggacttcaactcatatgattccacaagcacagaatgtaacctctcaaaaactggcctgtgcatcctaaacatgttgtaacaagcagttctattagctaatgttctcataacccaatcatgtccagactcaggtgctacccttcttggagccttattagagtaaagttccaagtaatacgtaccaatcatggcggcaagcatacatgctcttctcctgtccatttctcttttcttcaaaatataaatgataagatcaatctcatcatcactgctatcttcatcagagatatcttcatcaccactgccttcaccatctctgttatgtttggaagcaaacaactgtgtggcacaaaagtattccacactgtcttctgctgcaccacactctactgccaacctctgacagtttgtcaatgactcagcaattgattctttcttctgctcctttaacttcttgctgttaacaagttcagtaattagggtatttgacttatcacaatcagagttgaaagaattgagcagccccttcatgagctgcaccactgggctcttgctttttttcccaggactagaagctgtggacacatcacagctgctactccctctcttcctgctgttattgctcatggggctgttctcataaccatcccctacagctctttcccctctagctgcctcccctgcatcccctgcttcttcttctccttcctcttcatcttcatcttcaaaaccagggatgtatgctgtggaaccatcaactgcaactccttgaaatatctctataagaaaatctaagtactcagggttgccatggcgaaatttcttggcgtcccccttctcctgtattgacactaaatcaatatcacagaaaactctaaaatcatgtaaactagctatatttttgacaactgcataccttaattttttttcccaccaagcatttgatgcaattatttctccactagcacttctaccagctccagtttgttggttcagccacacccaagcactgtaataattctttagatgggtgaatctattctttatctgtttggttgaatgccttaggttagccctttggaaatatttggccttcaaattctggtaccctctagttgtccatgctccattaggacaatgcccatcccttatttcctcacatgctatttcacacaatgtgtaagttttttcttctgtccaatttgccttgtcatacgtattcatgtgctgaccatcaggaccaaagtcctcttcgtcttcttcgttgccgtcgtcctcggacacatttgtcccttgggacgacgaggcaccggctcgccgtcctcctccgaagactccaaagttgaaggcgggtggcccgctgtgcgacatggatgccccatgacctcggacgcctccttgaccagacgatgagccaggaggaacaaatcctcgcattcccctgccagatccagcgccattggtcaacgacctgccacggcctcgtcctcctcctctccctccacgactgctgccacgtccccctcccgccgctggaggaggacgtgacggggggactgtggatctgctccctgcccgaatcggaggtaacacaaggctacccggttcaaggatctgttggtaggaggcgaaatcggggaaggcgtcggcctgggagttcagatcgaggccccccgatccccctcccccaaaatggatgccggtgccagatccaccatatcctgaagacccctgcgagaagccgtagtcggagccgtccatgtggcccgttggagcttcattgaacgactgggagaagaaatcgtgaggatttccacccgccat

SEQ ID NO: 86099 - DNA, 4966 bp, Oryza sativa
  Clone ID: PAT_MRT4530_85172C.1
atggccggcagcgtcacccgtcgtggtttggacatgactggcttcgttttggagctgcggggcatgtgcgtggtcttgggatatccacatggagtggattaccaggccaggccgctcccggagcaggagggtgaggatgcagagccgcacgctggttgggaggtcactgcagtgatcctctccggctctcccgagcggacctcgctggcagtcaccgcgggtggagattccttccccgccgcttgccagaacgccgctctcctcgccatcggcacccttcaccagcgctacccggacgagttgcagcactcgccctaccgctaccaccctcgtcgcggaggagcccgcgactacgccaccttccgagatgctagctcggaggatgacgctaccgtcgtgcatctggcacgcatggtggaggcatacgacgcggctcgtatcgacttccatcagatggtgcgtcgtgggatggtcgagaacaacatgaagatcctggagctgcgtcaggagaacctgcagctcaaaaaggacctagatgcggtggaggcgcagctgcatcaactcaagatcgcccagggagaggtctgccgccccaagcgtcgccgcgtctgccgcagccagaagatcaccgcccgcaagagcacctccaggcccgagcttgttcgtcagtccctggcgtggacttgcttcgtggagacccctcgtgccgagcccacgcccgtggttccccagaagggggaagcctccggcgttgatggtgagaccaggagaaatgctgccaccagtgatggcaaccaacccgaaggcagcaaccacaacaaccatggcagcccacctccacctcctcctccgcctccaccaccaccaccagataccaacgccattctcacccaaatcctcgcccagcaggccaacatgatgactgcttttctccaccacctccaaaatccgccacaacataatgctccaccaccacctccccaacactctaaactcgccgagttcctccgcatctgtccacctaccttctctagctccaacaaccccgtggatgcgttggattggttgcatgccgtggggaaaaagctagacactgtgcagtgcagcgatgaggagaaagtcatcttcgccgcccatcagctgcagggacccgcatctctatggtgggaccatttccaggctacgcagccagagggacagcctattacatgggcccgcttcaccgccgctttccggagaacccatgtgcccgccggagtcgtggcccttaagaaaagggaattccgagagttgaagcaaggcaaccgctccgtgatggagtatttgcacgagttcaacaacctggcccgttacgctccggaggatgtgcgggaagatgaggagaagcaagagaagttcctggcaggaatggaccctgagctgtccgtctgtctagtctccggggattatccggatttccaacgtctggtggacaagagcatccgcttggaagccaagcacaaggaactggagtcgcacaagcgccgcttggcgaatttccacaaccaacagggtgctaaccaaagggtccgctacaccaatccctatccagggggatcctcctcgcagcagcaacagcagcagcagcaacctcgctccgcgcctcgacctcaattcgtggtgcgcgtcccacagccgcagcagcagacgaatcaacaagggactcgtgcgccccgtcctcctccaccgactgtgcagcctggtcaaggccgcagggacgctcaaggtccgcagcgtctgtgcttcaactgcttcgagcccgggcactttgcggataaatgcccgaagccaaggcatcagcaaggccaagcgcctccccgccccaacaacggtggtaaggacgtcattcggggtcgtgtgaaccatgtgacggccgaggacgtgctgacaactccagacgtcatcgttggtacgttcctcattcattccatccctgctaccattttgttcgactctggagcttcccactcgtttatatctgtgccattcgtggggagaaatcagttgggggtagaaaggcttaggaaccctctgctcatcaccacccctggaggggttatgacagcaaagtattatagccctgccgtccctatagaaattcaggggattccttttccctcggatctgattctgctagacaccaagaacttggatataggactgtcagaaattcccatcgtcagagagttcggagacgtgtttccggaagaactacctggtatgccgcctaagcgagaggttgagttccggatagatcttgctccaggaaccgctcctctgtacaagcgaccctaccgtatggcagcaaatgaactggccgaagtcaaggaacagttggaagagctgaaagaaaaggggtatatccgtccgagtacttccccctggggtgctcctgtgatttttgtggagaagaaagacaagacgaaaaggatgtgcgttgactacagagctctcaatgaagtcaccatcaaaaacaagtatcctcttccccgaatcgatgatctgttcgatcagcttaaaggtgccactgtattctccaagattgatcttcgttccggatatcaccaattgcgcattcgtgaagaagatattccgaagaccgcattcaccacgcgatacagactgtatgaattcacggtgaagtcattcggtttaaccaatgcacctgccttcttcatgaacttaatgaacaaagtgttcatggaatacttggataagtttgtggtggtttttattgatgacatcctgatatactcacaatcagaggaagaccatcagcaccatctccgtctggtgttgggaaagttgcgggaacatcaattgtatgccaaacttagcaagtgtgagttctggttgtccgaagtcaaattcttagggcacgtgatatctgctaaaggagttgctgtggaccccgaaacagtgaccgccgtcactgattggaagcaacccaagacagtcactcaagtccgcagtttcttaggtttggcaggatactaccggagattcatcgagaacttctccaaaatcgctcgacccatgacacagttgttgaagaaagaagagaaatttgtgtggagcccgcaatgcgagaagacgttcaaaactctcaaagaaaagctggtttcctcgccagtgttaatcttgccggatactcgcaaggatttcatggtgtattgtgacgcttcgcgccaaggattggggtgcgtgcttatgcaggacggtcatgtggtggcctatgcctcacgccagctacggcctcatgaaggcaattaccctacccatgatttggagttagccgcggtggttcatgctctaaaaatctggcggcactatctcattgggaatcgctgtgaaatatatactgatcataagagtttgaaatacatcttcactcagtcggacctgaatcttcggcaaaggagatggttagaactcatcaaggattatgatgtgggaattcactatcatcctggtaaggccaacgtggttgccgacgctctaagtcgaaaaagccattgcaacactcttaacgtccgtggcgttccacccgaacttaatcaacagatggaagccctgaacctaagcatagttagtcgcggattcttggctgcgctggaagccaagcccaccttgctcgatcaaatccgcgaggctcagaagaatgatccagacatgcatggactcctcaagaatatgaaacagggtaaagccgctggtttcacagaggatgaacacggaaccctatggaacggaaatcgagtatgcgttccagttaacagagaacttaaacagctgatacttcaggaagctcacgaaagtccttattccatccaccctggcagcacgaagatgtacttagacttgaaggagaaatactggtggattagtatgaagcgggaaattgcagagttcgtggccctttgtgatgtgtgccagtgtgtcaaggcagagcaccaacgaccggccggacttctccaacctctccaagtacctgaatggaaatgggatgaaattgggatggatttcatcaccggacttccaaaaacccaaggtggatatgattctatatgggtagttgtggatcgattaaccaaggtagctcgattcattcctgtgaagaccacctatggagggaacaaactagccgaactctacttcgctaggatcacagatgggcagaccgagcgtctaaatcagatcctagaagatatgctccgcgcatgtgttctagatttcgggaagacctgggataagagtctcccctatgccgagttctcctacaacaacagctatcaagccagcatacaaatggcaccttatgaagcgttgtatgggcgcaaatgccggacaccgctaatgtgggatcaagttggggaaagccaagtgttcgggactgatatcctgagagaagctgaagctaaagtcagaaccattcgggataatctaaaggtggcacagtcccggcagaaaagttatgcagataaccgtcgccgtgatctggaattcgcagtggacgattttgtatatcttcgggtcacgccattgcgaggtgtacacaggtttcggacaaaagggaagctcgcacctcggtatgtgggtcctttccgtatcgttgctcgacgcggagaagtcgcttaccaattggagctgcccgcctccttgggcaacgtgcatgatgtgttccatgtgtcgcaactcaagaaatgccttcgagtgccatccgagcaggccgactcagagcaaattgaagttcgcgaagacttgacctacgtggagaggccagtgaagatcctggacaccatggagcgcaggaccaggaaccgggtaatccgtttttgcaaggtccagtggagcaaccacgccgaagaagaagctacttgggagcgtgaagacgagctgaaggcagcccatcctgatctcttcgcca

SEQ ID NO: 86100 - DNA, 1776 bp, Oryza sativa
  Clone ID: PAT_MRT4530_85173C.1
atgcagcgcgacgcgatcgccgccgcccggaacgccggctgctcgagcggccgcatctcgcagccgccgccgccgccgttctactccgccgccaccggaatctacagcagcatccaccctcccgtggcgctccccaccgacccctccctcaccctcgtcgcccacctcttcgcccgcctccccctcgccgacccgggcgcccccaccctcgtcgacgccgccaccgcgtccgcggtgtcccgcgccgacctccgccgcctcgtcgcctccctcgccgcggggctccgccgccgccatggcgttcggaaggggtccgttgtgctgctgctcctcccgaactccgtcgcgttccccgtctcgttcctcgccgtgctcgccgccggcgccgtcgccaccaccatgaacccctccagctcccccgccgagattgccgcccaggcgcgggccaccggcgcatgcctcgtcctcgcctcgcgcgacggcgccgcgaggctcccgcctctcgctgcccccgtcgtcctcgtgcccgaaatcctggaccattccgccgcggccgacgacggcgacgacgaccaacgcgtgttcgccgcgttccgcgccatgctcgacggcggcggcggcgacggcaccgagacggcggtcccggtggtgggccaggacgacgcggtggccatcctctactcgtcggggacgtcggggaggagcaagggggtggtgctgacgcaccgcaacctgatcgccatgacggagctgttcgtccggttcgaggcgtcgcagtaccacgcgcgaggtgctcgcgaaaatgtctacatggcggcgctgcccatgtcccacgtgtacggcctctccctcttcgccgtcggcctcctctcgatcggtgccacggtggtggtgatgaggagattcgacgccggcgacgccgtcgccgccatcgggaggtacaaggtgacgcacatgccgctcgtgccgcccatcatggcggccatggtcagggccgccgcggccggcggcgtgccgccgtcgcaggtggcctcgctggtgcaggtctcgtgcggcgcggctccgatcaccgccgcgctcatccacgaattccttcaggctttcccccacgtcgacttcattcagggttatggcatgacagaatctactgccgtaggaactcgcggatttaacactagcaagcacaaaaagtatacctcggtaggccttttggcccccaacatgcacgccaagattgttcatcttgagagtagttcatgtttgcctccaggcttctcaggggagctatggctccatggcccaggaatcatgaaaggttacttgagtgatgatgatgatgcctgcacgagaaaggatggctggttgcgtaccggagacattgcctactttgatctggatggctacctatacattgtaggccgcttgaaggacacaatcaagtacaaaggatttcagatagctccgggggacttggaagaagttttgatccaccaccctgaaattcttgatgttgctgtgacatctgctgaggatgaagaagctggagagataccagtagcttttgtggtgaggagatctggaagcaacctttcttgtaagcaagtgatggagtatgtggccaagcaggttgctccatataagagagtgaggaaggtggtatttgtggaggcaattcccaagtcacctgctggaaaagttttgaggaggcttctcaggaactcgcatgacactgctgctgctgctacctcttcttgcagtatcagctccaagctctga

SEQ ID NO: 86101 - DNA, 2634 bp, Oryza sativa
  Clone ID: PAT_MRT4530_85174C.1
atggcgggtggaaatcctcacgatttcttctcccagtcgttcaatgaagctccaacgggccacatggacggcttctcgcaggggtcttcaggatatggtggatctggcaccggcttccattttgggggagggggatcggggggcctcgatctgaactcccaggctgacgcctcctaccaacagatccttgaaccgtgtagccttgtgttacctccgattcgggcagggagcagatccacagtccccccgtcacgtcctcctccagcggcgggagggggacgtggcagaagtcgtggagggagaggaggaggacgaggccgtggcaggtcgttgaccaatggcgctggatctagcaggggaatgcgaggatttgttcctcctggctcatcgtctggccaaggaggcgtccgaggtcatggggcatccatgtcgcacagcgggccacccgccttcaactttggagtcttcggaggaggacggcgagccggtgcctcgtcgtcccaagggacaaatgtgttcgaggacgacggcaatgaagaagacgaagaggactttggtcctgatggtcagcacatgaatacttatgacaaggcaaattggacagaagaaaaaacttacacattgtgtgaaatagcatgtgaggaaataagggatgggcattgtcctaatggagcatggacaactagagggtaccagaatttgaaggccaaatatttccaaagggctaacctaaggcattcaaccaaacagataaagaatagattcacccatctaaagaattattacatggcttgggtgtggctgaaccaacaaactggagctggtagaagtgctagtggagaaataattgcatcaaatgcttggtgggaaaaaaaattaaggtatgcagttgtcaaaaatttagctagtttacatgattttagagttttctgtgatattgatttagtgtcaatacaggagaagggggacgccaagaaatttcgccatggcaaccctgagtacttagattttcttatagagatatttcaaggagttgcagttgatggttccacagcatacatccctggttttgaagatgaagatgaagaggaaggagaagaagaagcaggggatgcaggggaggcagctagaggggaaagagctgtagcggatggttatgagaacagccccatgagcactaacagcaggaagagagggagtagcagctgtgatgtgtccacagcttctagtcctgggaaaaaaagcaagagcccagtggtgaagctcatgaaggggctgctcaattctttcaactctgattgtgataagtcaaataccctaattactgaacttgttaacagcaagaagttaaaggagcagaagaaagaagaaattgctgagtcattgacaactgatggtgaaggcagtggtgatgaagatatctctgatgaagatagcagtgatgatgagattgatcttatcatttatattttgaagaaaagagaaatggacaggagaagagcatgtatgcttgccaccatgattggtacgtattacttggaacgttactctaataaggctccaagaagggtagcacctgagtctggacatgattgggttatgagaacattagctaatagaactgcttgttacaacatgtttaggatgcacaggccagtttttgagaggttacattctgtgcttgtggaatcatatcagttgaagtccacaaacaacatggattccatggagtgtttgggtctttttttatggatagtaggtgctccccaatcagttaggcaagcccaagacagatttgttaggtctcttcaaacagtacatagtaagttcaatgcagttttgaccgctctactgaaacttgcacaagatatcattaggccaaaagatcccttattcacaacagtccataagaaattgctttctcctcagtacacaccatatttggataattgcattggagcaatagatggtactcacatccaagttgtggtgccaaattcagctgctgttcaacataggaatagacatcaggagaagagtcagaatgttatgtgtgtctgtgacttcgatatgagatttactttcgtgcttgctgggtggcctggttcggttcatgacatgagggtattcaatgatgcacaaactagatttagtgccaagtttccaaagccacctctaggaaagttttatctcgtagactcgggatacccaaataggccgggttatctagcaccatacaagggtataacatatcatttccacgagtacaacgaaagcacattgccaaggggaagaagggagcactttaattactgccattcttcgtgtcggaatgtcattgagaggtcatttggggtcttgaagaacaagtggaggattttgtttagtttaccaagctactcgcaggaaaagcaaagcagaattatccatgcatgcatagcacttcataatttcattagagacagtcaaatggctgatacagagttcgacaattgtgaccatgatgaaaattatgatccattgggtggaacctcttctccatctagcgaaccaacaaacgaattggactcgcgtgtcatgaaccaatttcgggactggattgccgatggattgtggtatttgaaaggaatgtaa

SEQ ID NO: 86102 - DNA, 5379 bp, Oryza sativa
  Clone ID: PAT_MRT4530_85175C.1
atgtcatggcacagggccggtgtcctgctgctaggggctcagtcctgcctgcccgtcccgggtgttccggccgtaggtggggttgggtcggtactcttgtctatggctaggatgggttggaaactatgtcacgtcttccgtctgtataccgtggtgatggccggcagcgtcacccgtcgtggtttggacatgactggtttcgtcttggagctgcggggcatgtgcgtggtcctggggtatccacacggagtggactaccaggccaggccgcttccggagcaggagggtgacgatgcggagccccacgctgcttgggaggtcactgcagtgatcctcgctggctctcccgagcggacttcgctaacagtcaccgcgggtggagactccttccccgccgcttgccagagcgccgctctcctcgccatcggcactcttcaccagcgctacccggacgagttgcagcactcgccctaccgctaccaccctcgtcgcggaggagcccgcgaccacgccaccttccgggatgctagctcggaggatgacgctaccatcgtgcacttggcgcgcatggtggaggcatacgacgcggctcgtatcgacttccatcagatggtgcgccgtgggatggtcgagaacaacttgaagatcctggagctgcgtcaagagaacctgcagctcaagaaggacctagacgcggtggaggcgcagctgcatcagctcaagatcgcccagggagaggtctgccgccccaagcgtcgccgcgtctgccgcagcctgaagatcaccgcccgcaagagcacctccaggcctgagcttgttcgtcagtccctggcgtggacctgcttcgtcgagacccctcgtgccgagcctgcgcccgtggttccccaggagggggaagcctccggcattggtagcacggaggatgcgctgttgctcaccttccgtcctggcccgtcgcagcggagaaatgctaacaccggtgatggcaaccaacctgaaggcagcaaccacaaccatcagggcaacccacctccacctcctcctccgcctccacccccaccaccagataccaacgccattctcacccaaatcctcgcccagcaggccaacatgatgactgctttcctccaccacctccaaaatccgccacaacttaatgctccaccaccacccccacaacactctaaactcgccgagtttctccgcatccgcccacctaccttctctagctccaacaaccccgtggatgcgttggattggttgcatgccgtgggaaaaaagctagacactgtgcagtgcagcgatgaggagaaggtcatcttcaccgcccaccagctgcagggacccgcatctctatggtgggaccatttccaggctacgcagccagagggacagcctattacatgggctcgcttcaccgccgctttccgaagaacccatgtgcccgccggagtcgtggcccttaagaaaagggaattccgagagttgaagcaaggcaaccgctccgtgatggagtatttgcacgagttcaacaacctggcccgttacgctccggaggatgtgcgggaagatgaggagaagcaagagaagttcctggcaggaatggaccctgagctgtccgtccgtctagtctctggggactatccggatttccaacgtctggtggacaagagcatccgcttggaagccaagcacaaggaactggagtcgcacaagcgccgcttggcgaatttccgcaatcaacagggtgctaaccaaagggtccgctacacaaatccctatccagggggatcctcctcgcagcagcagcaacctcgctccgcgcctcgacctcaattcgtgcctggtcaaggccgcagggacgctcaaggtccgcagcgtctgtgcttcaactgcttcgagcccgggcactttgcggataaatgcccgaagccaaggcgtcagcaaggccaagcgcctccccgccccaacaacggtggtaaggacgtcgttcggggtcgggtgaaccacgtgacggccgaggacgtgctgacaactccagacgtcatcgttggtacgttccccattcattccatccctgctaccattttgttcgactctggagcttcccactcgttcatatctgtgccattcgtggggagaaatcagttgggggtagaaaggcttagaaaccctctgctcatcaccacccctggaggggttatgacagcaaagtattatagccctgccgtccctatagaaattcaggggattccttttccctcggatctgattctgctagacaccaagaacttggatgtgatccttgggatgaattggttggctcaattccaaggagtagtggattgtgcgaggcgcactgtcactctgtaccgagggccggaacgaccggttgttttctttgcacccccaacctcagtcagaagttcagaacttcatcagatagaactgtcagaaattcccatcgtcagagagttcggagacgtgtttccggaagaactacctggtatgccgcctaagcgagagattgagttccggatagatcttgctccaggaaccgctcctctgtacaagcgaccctaccgtatggcagcaaatgaactggccgaagtcaagaaacagttggaagagttgaaagaaaaggggtatatacgtccgagtacttccccctggggtgctcctgtgatctttgtggagaagaaagacaagacgatgaggatgtgcgttgactacagagctctcaatgaagtcaccatcaaaaacaagtaccctcttccccggatcgatgatctgttcgatcagcttaaaggtgccactgtattctccaagatcgatcttcgttccggatatcaccaattacgtattcgtgaagaagatattccgaagaccgcattcaccacgcgatacggactgtatgaattcacggtgatgtcgttcggtttaaccaatgctcctgccttcttcatgaacttaatgaacaaagtgttcatggaatacttggataagtttgtggtggttttcattgatgacattctgatatactcacaatcagaggaagaccatcagcaccatctccgtctggtattgggaaagctgcgggaacatcaattgtatgccaaacttagcaagtgtgagttctggttgtccgaagtcaaattcttagggcacgtgatatctgctaaaggagttgctgtggaccccgaaacagtgaccgccgtcaccgattggaagcaacccaagacagtcactcaagttcgcagtttcttaggattggcaggatactaccggagattcatcgagaacttctccaaaatcgctcgacccatgacacagttgttgaagaaagaagagaaatttatgtggagcccgcaatgcgagaaggcgtttcaaactctcaaagaaaagctggtttcctcgccagtgttaatcttgccggatactcgcaaggacttcatggtgtattgtgacgcttcgcgccaaggattggggtgcgtgctcatgcaggatggtcatgtggtggcctatgcctcacgccagctacgacctcatgaaggcaactaccctacccatgatttggagttagcagcggtggttcatgctctaaaaatctggcggcactatctcattgggaatcactgtgaaatatatactgatcataagagtttgaaatacatcttcacccagtcggatctgaatcttcggcaaaggagatggttagaactcatcaaggattatgatgtgggaattcactatcatcctggtaaggccaacgtggttgccgacgctctaagtcgaaaaagccattgcaacactcttaacgtccgtggcattccacccgaacttaatcaacagatggaagccctgaacctaagcatagttagtcgtggattcttagctgcgctggaagccaagcccaccttgctcgatcaaatccgcgaggctcagaagaatgatccagacatgcatggactcctcaagaatatgaaacagggtaaagccgctggtttcacagaggatgaacacggaaccctatggaatggaaatcgggtatgcgttccagacgttcgggaacttaaacagttgatacttcaggaagctcacgaaagtcgttattccatccaccctggcagtacgaagatgtacttagacttgaaggagaaatactggtgggttagcatgaagcgggaaattgcagagtttgtggccctgtgtgatgtgtgccagcgtgtcaaggcagagcaccaacgaccggccggacttctccaacctctccaagtacctgaatggaaatgggatgaaattgggatggatttcatcaccggacttccaaaaacccaaggtggatatgattctatatgggtagttgtggatcgattaaccaaggtagctcgattcattcctgtgaagaccacctatggagggaacaaactagccgaactctacttcgctaggatcgtaagtctccatggcgttcccaagaaaatcgtatctgataggggaagccaattcacctctcacttttggaagaagctccaagaagagctgggtacccgattaaacttcagcaccgcgtatcacccgcagacagatgggcagaccgagcgtctaaatcagatcctagaagatatgcttcgcgcatgtgtcctggatttcgggaagacctgggataagagtctcccctatgccgagttctcctacaataacagctaccaagccagcatacaaatggcaccttatgaagcgttgtatgggcgcaaatgccggacaccgctaatgtgggatcaagttggggaaagccaagtgttcgggactgatatcctgagagaagctgaagctaaagtcagaaccattcgggataatctaaaggtggcacagtcccggcagaaaagttatgcagataaccgtcgccgtgacctggaattcgcagtggacgattttgtatatcttcgggtcacgccattgcgaggtgtacataggtttcggacaaaagggaagctcgcacctcggtatgtgggtcctttccgtatcgttgctcgacgcggagaagtcgcttaccaattggagctgcccgcctccttgggcaacgtgcatgatgtgttccatgtgtcgcaactcaagaaatgccttcgagtgccatccgagcaggccgactcagagcaaattgaagttcgcgaagatttgacctacgtggagaggccagtgaaaatcctggacaccatggagcgcaggaccaggaaccgggtaatccgtttttgcaaggtccagtggagcaaccacgccgaagaagaagctacctgggagcgcgaagacgagctgaaggcagcccatcccgatctcttcgccagttcttccgaatctcggggtcgagattccgtttaa

SEQ ID NO: 86103 - DNA, 1211 bp, Oryza sativa
  Clone ID: PAT_MRT4530_85176C.1
atatacaattgttctcccaggatgatgcaattcacttaaaagaaccaaatacatagtttaaatatttctctcatgctacatattattactctcagagtctcaagcacaaatttgcaattcattgcagcatcgatttatcaacatttttgtctccctttagtttcatccaaagtaaacaatatgatccacaaatcacgcataatttcaaattcaccaagcaagtatgcaacacgagggtggaacctcttgtaagtcggaaggaagcacatgcgtgcacaataccagatgcagtctgccaatataatgccaaagcaggttacaaaattatgaacacaacctccctgatcaacaataactcttgcataatttacaggccaagtgctacgcaacatgcaaaaagagagaatctgcgtacttcaaaagctaaaaatttagatcaattcttcttttttgagtgcttcacgagccagtcgatgacagagtcaatgtttgtcgagttcttgcatgatatcatgaagcatgccacttctcggtcagtgattgtctttagccccattacgtctgtgaagctttgcttagggaaagcttcaggtttgtcaattttattgccaatgactagtaatgggatcccagtcaaagaaggcttgctcagaagatcatggagctcgcttttggcaatagccatgttctctcgatcggctgcatccacaacatacacaattgcagaaactgcacgacagtatctctcccacatgctacggaatcttggctggcctccaagatcccacaattttattgtgacattacctttggtcacctttctcatgttgaatcctacagtaggaatcatgtcctcactaaagcctcctgtagcaatgacattcacaagcgatgttttcccagcattttgaagccctatcaaggaaagctccatctcttgcttgaaaaaaagactgcggagccagttgaggaaggcttcccagaaccccatggcgtcgtctcctcctcccccctcgcctacgaagcggggaccctgggtggtggtggcggcggtcgccgggagccggggtacggacggcgacgggagcctcaccggtggcggctcgcgcgggtttactttatttggagggcagagcgtgtgggaagggagggacgggggcagcgcggattgggaggagcgagcgacagcgaggcaaggcgagagcgacggc

SEQ ID NO: 86104 - DNA, 2661 bp, Oryza sativa
  Clone ID: PAT_MRT4530_85177C.1
atggcgggtggaaatcctcacgatttcttctcccagtcgttcaatgaagctccaacgggccacatggacggctccgactacggcttctcgcaggggtcttcaggatatggtggatctggcaccggcttccattttgggggagggggatcggggggcctcgatctgaactcccaggctgacgcctcctaccaacagatccttgaaccgggtagccttgtgttacctccaattcgggcagggagcagatccacagtccccccgtcacgtcctcctccagcggcgggagggggacgtggcagaagtcgtggagggagaggaggaggacgaggccgtggcaggtcgttgaccaatggcgctggatctggcaggggaatgcgaggatttgttcctcctggctcatcgtctggccaaggaggcgtccgaggtcatggggcatccatgtcgcatagcgggccacccgccttcaactttggagtcttcggaggaggacggcgagccggtgcctcgtcgtcccaagggacaaatgtgtccgaggacgacggcaacgaagaagacgaagaggactttggtcctgatggtcagcacatgaatacgtatgacaaggcaaattggacagaagaaaaaacttacacattgtgtgaaatagcatgtgaggaaataagggatgggcattgtcctaatggagcatggacaactagagggtaccagaatttgaaggccaaatatttccaaagggctaacctaaggcattcaaccaaacagataaagaatagattcacccatctaaagaattattacattgcttgggtgtggctgaaccaacaaactggagctggtagaagtgctagtggagaaataattgcatcaaatgcttggtgggaaaaaaatattaaggagaagggggacgccaagaaatttcgccatggcaaccctgagtacttagattttcttatagagatatttcaaggagttgcagttgatggttccacagcatacatccctggttttgaagatgaagatgaagaggaaggagaagaagaagcaggggatgcaggggaggcagctagaggggaaagagctgtaggggatggttatgagaacagccccatgagcactaacagcaggaagagagggagtagcagctgtgatgtgtccacagcttctagtcctgggaaaaaaagcaagagcccagtggtgaagctcatgaaggggctgctcaattctttcaactctgattgtgataagtcaaataccctaattactgaacttgttaacagcaagaagttaaaggagcagaagaaagaagaaattgctgagtcattgacaaactgtcagaggttggcagtagagtgtggtgcagcagaagacagtgtggaatacttttgtgccacacagttgtttgcttccaaacataacagagatggtgaaggcagtggtgatgaagatatctctgatgaatatagcagtgatgatgagattgatcttatcatttatattttgaagaaaagagaaatggacaggagaagagcatgtatgcttgccaccatgattggtacgtattacttggaactttactctaataaggctccaagaagggtagcacctgagtctggacatgattgggttatgagaacattagctaatagaactgcttgttacaacatgtttaggatgcacaggccagtttttgagaggttacattctgtgcttgtggaatcatatgagttgaagtccacaaacaacatggattccatggagtgtttgggtctttttttatggatagtaggtgctccccaatcagttaggcaagcccaagacagatttgttaggtctcttcaaacagtacatagtaagttcaaagcagttttgaccgctctactgaaacttgcacaagatatcattaggccaaaagatcccttattcacaacagtccataagaaattgatttctcctcagtacacaccatatttggataattgcattggagcaatagatggtactcacatccaagttgtggtgccaaattcagctgctgttcaacataggaatagacataaggagaagagtcagaatgttatgtgtgtctgtgacttcgatatgagatttactttcgtgcttgctgggtggcctggttcggttcatgacatgagggtattcaatgatgcacatactagatttagtgccaagtttccaaagccacctccaggaaagttttatctcgtagactcgggatacccaaataggccgggttatctagcaccatacaagggtataacatatcatttccaagagtacaacgaaagcacattgccaaggggaaaaagggagcactttaattactgccattcttcgtgtcggaatgtcattgagaggtcatttggggtcttgaagaacaagtggaggattttgtttagtttaccaagctactcgcaggaaaagcaaagcagaattatccatgcatgcatagcacttcataatttcattagagacagtcaaatggctgatacagagttcgacaattgtgaccatgatgaaaattatgatccattgggtggaacctcttctccatctagcgaaccaacaaacgaattggactcgcgtgtcatgaaccaatttcgggactggattgccgatggattgtggtatttgaaaggaatgtaa

SEQ ID NO: 86105 - DNA, 7068 bp, Oryza sativa
  Clone ID: PAT_MRT4530_85178C.1
atggatgaagtcgggggtcgatggacattctccagggcaaatgaaggctacacgagctgcggcccgatggccggcagcgttacccgtcgtggtttggacatgaccggcttcgtcttggagctgcgaggcatgtgcgtggtcttggaatatccacatggagtggattaccaggccaggccgctcccggagcaggagggtgaggatgcagagcctcacgctggttgggaggtcactgcagtgatcctctccggctctcccgagcggacttcgctggcagtcacagcgggtggggactccttccccgccgcttgccagaacgccgctctcctcgccatcggcacccttcaccagcgctacccggacgagttgcagcactcgtcctaccgctaccaccctcgtcgcggaggagcccgcgacttcgccaccttccgagacgccagctcggaggatgacgctaccgtcgtgcatctggcacgcatggtggaggcgtacgacgcggctcgtatcgacttccaccagatggtgcgtcgtggcatggtggagaacaacatgaagatcctggagctgcgtcaggagaatctgcagctcaagaaggacctcgacgcgttggaggcgcagctgcaccagctcaagatcgcccagggagagatcagccgtcccaagcgtcgccgcgtctgccgcagccagaagatcaccgcccgcaagagcacctccaggcccgagcttgttcgtcagtccctggcgtggacctgcttcgtcgagacccctcgtgccgagcctgcgcccgtggttccccaggagggggaagcctccggcgttggtagctcggagggtgcgctgttgctcaccttccgtcctggcccgtcgcagcggagaaatgttaacaccggtgaaggcaaccaacccgagggcagcaaccccaacccccaaggcaatccacctccaccaccaccaccagacaccaacgccattctcacccagatcctcgcccaacaagccaacatgatgaatgctttcctccaccacctccaaaacccgccacaacagaatgctccaccaccacctccccaacactccaaactcgccgagttcctccgcatccgcccacctaccttctctagctccaacaaccccgtggatgcgttggattggttgcatgccgtggggaagaagctagacacggtgcagtgcagtgatgaagagaaagtcatcttcgccgcccaccagctgcaggggcccgcatctatctggtgggaccacttccaggctacgcagccagcgggacaaccgatcacttgggctcgcttcacctccgctttccggagaacccattatttgcacgagttcaacaatctggcccggtacgctccggaggatgtgcgggaagatgaggagaagcaagagaagttcttggcaggaatggaccctgagctgtccgttcgtctagtctctggggactatcctgacttccaacgactggtggacaagagcatccgcttggaagccaagcacaaggagctggaatcgcacaagcgccgcttggcgaatttccgcaatcaacagggtgctaaccagagggttcgctacaccaatccctacccagggggatcctcctcgcagcagcagcagcagcagcagcaacctcgctccgcgcctcgacctcaattcgtggtgcgcgtcccacagccgcagcagcagcagaatcagcaagggactcgtgcaccccgtcctcctacgccagccgtgcagcccgttcaaggccgcagggacgctcaaggtcagcagcgtctgtgcttcaactgtttcgagcccgggcactttgcggataaatgcccgaagccaaggcgtcagcaaggccaagcgcctccccgctccaacaacggcgggaaggatgtcattcgaggtcgtgtgaatcacgtgacggccgaggacgtgctgacaactccagacgtcatcgttggtacgttcctcgtccaatccatccctgctactattttgttcgactctggagcttcccactcgttcatatctgtgccattcgtggggagaaatcagttgggggtagaaaggcttagaaaccctctgctcatcaccacccctggcggggttatgacagcaaagtattatagccctgccgttcctatagaaatccaggggattccttttccctcggatctgattctgctagacacaaagaacttggatgtgatccttgggatgaattggttggctcaattccaaggagtagtggactgcgcgagacgcactgttactctgtaccgaggaccagaacaaccggttgttttctttgcacccccaacctctgtcagaagttcagaactgcatcagatagaactgtcagaaatccccatagtcagagagttcggagacgtgtttccggaagaactacctggtatgccgcccaagcgagagattgagttccggatagatcttgctccaggaaccactcctctgtacaagcgaccctaccgtatggcagcaaatgaactggccgaagtaaagaaacagttggaagagttgaaagaaaaggggtacatacgtccgagtacttccccatggggtgctcctgtgatttttgtggagaagaaagacaagacgaaaaggatgtgcgtcgactacagagctctcaatgaagtcaccatcaaaaacaagtaccctcttccccggatcgatgatctgttcgatcagcttaaaggtgccaccgtattctccaagattgatctccgttccggatatcaccaattacgtattcgtgaagaagatattccgaagaccgcattcactacgcgatatggactgtatgaattcacggtgatgtcgttcggcttaaccaatgctcctgccttcttcatgaacttgatgaacaaagtgttcatggaatacttggataaattcgttgtggttttcatcgatgacattctgatatactcacaatcagaggaagaccatcagcaccatctccgtctggtgttgggaaagttgcgggaacatcaattgtatgccaagcttagcaagtgtgagttctggttgtccgaagtcaaattcttggggcacgtgatatctgctaaaggagttgctgtggaccccgaaacagtgaccgccgtcaccgattggaagcaacccaagacagtcactcagattcgcagtttcttaggtttggcaggatactatcggagattcatcgagaacttctccaaaatcgctcgacccatgacacagttgttgaagaaagaagaaaagtttgtgtggagcccgcaatgcgagaaggcgttccaaactctcaaagaaaagctggtttcctcgccagtgttaatcttgccggatactcgcaaggatttcatggtgtactgtgatgcttcgcgccaaggattggggtgcgtgctcatgcaggacggtcatgtggtagcctatgcttcacgtcagctacgacctcatgagggcaactaccctacgcatgacttggaattagccgcagtggttcatgctctaaaaatctggcggcactatctcattgggaaccgctgtgaaatatatactgatcataaaagtttgaaatacatcttcactcagtcagatctgaatcttcggcaaaggagatggttagaactcatcaaggactatgatgtgggaattcactatcaccctggtaaggccaacgtggttgccgacgctctaagtcgaaagagccattgcaacactcttaacgtccgtggcattccacccgaacttagtcaacagatggaagccctgaacctaagcatagttggtcgcggattcttggctgcgttagaagccaagcccaccttgctcgatcaaatccgcgaggctcagaagaatgatccggacatgcatggactcctcaagaatatgaaacagggtaaggccgctggtttcacagaggatgaacacggaaccttatggaacggaaagcgggtatgcgttccagatagcagagaacttaaacagctgatacttcaggaagctcacgaaagtccttactccattcacccgggcagtaccaagatgtacttagacttgaaggagaaatactggtgggtcagcatgaagcgggaaattgcagagtttgtggccctatgtgatgtgtgccagcgtgtcaaggcagaacaccaacgaccggccggacttctccaacctctccaagtgccggaatggaaatgggatgaaattgggatggatttcatcaccggcctcccaaaaacccaaggtggatatgactctatatgggtaatagtggatcgattaaccaaggtagctcgattcattcctgtgaagaccacctatggagggaacaaactagcggagctctacttcgctaggatcgtgagtctccatggcgttcccaagaaaatcgtatctgataggggaagccaattcacctctcacttttggaagaagctccaagaagagcttggtacccgactaaatttcagcaccgcgtatcacccgcagacagatggacagaccgagcgtctaaatcagatcttagaagatatgctccgcgcatgtgtcctagatttcgggaagacttgggataagagtctcccctatgccgagttctcctacaataacagctaccaagccagcatacaaatggcaccctatgaagcgttgtacgggcgcaaatgccggacaccgctattgtgggaccaagttggagaaagccaagtgttcgggactgatatcctgagagaagctgaagctaaagtcagaatcattcgggataatctaaaggtggcacagtctcggcagaaaagttatgcagataaccgtcgccgtgatctggaattcgcagtggatgattttgtgtaccttcgggtcacgccattgcgaggtgtgcacaggtttcagacaaaagggaagctcgcacctcggtatgtgggtcccttccgtatcatcgctcgacgtggagaagttgcttaccagctggagttgcccgcctccttgggcaacgtgcatgatgtgttccatgtgtcgcaactcaagaaatgtcttcgagtgccatccgagcaggccgactcagagcaaattgaagttcgcgaagacctgacgtatgtggagaagccagtgaaaatcctggacaccatggagcgcaggaccaggaaccgtgtaatccgtttttgcaaggtccagtggagcaaccacgccgaagaagaagctacttgggagcgcgaagacgagctgaaggcagcccatcccgatctcgttgaagtcgaagccgtcgattgggaaaacgagcaaggcaagacacatcatcttgatcatattgaatcccagacgagctgggacccagggtcgggttgccagttcggtctgaatcatcataggccttgggttaaggcagccgcccgggctgaggaagccgctaaggaggaggccgcccgggctcgccaggctgaggcaacagctgctgctggcgcgtcaactgggcccactccctcgggcaaccctcaggcgacagcctccggggaggcacgcgacgtggccgcgggcacatcgcctgggcccacctccccgggcgacgcccaggatcaaacgggtccgggggacatccctgagcccagcacgtcctccggggggccgagccgcatcgccttctctccaaggcggctcttctcctcatcttccgtcgccccgctgagcgccgagcccattctgcaggccttggccgccgcaaacaccgcggtgctggatgggtttagcgcccaagtggaggccctgcgcgcggaacgagcggagctcgaggccgcatgggcacgcgttgaggaggggcggcgctcggtggacgccatggtggaggtgggccgtaaggctcaccgccgccacatctcggagcttgaagcccgcaaggcggcgctggcggagatcgcccgagaggtggaggaggagcgagaggccgccctcatcgccaccaccgcgatgatcgaggcgcaagacaccctccgccttcagcacgcaagctgggaggcggagctgaagaaaaagctcgacgccgcccaaggggtccttgactccgccgctgcccgagagcggcgggtaacggagactgaagcggcgtctcggcggcgcgaggaggcccttgaggcccgtgccatggcgctggaagaacacgccggcgccgtggagaggggcttgacggaccgcgaggccgccgctgttctccgggaggcgacgctggcggcgcacgaggccgcctgcgccgaggaggagtgcgcgctccgcctccgcgaggacgcactcgctgagcgggagcgagctctcgaggaggctgaggccacgaccaaacggctggcggacagcctgtcccttcgcgaggcggcgcaggaggagcaggcgcgccgcaatcttgaatgcgtccgcgccgagagagccgcactggagcagcgggctgccgacctcgaggcgcgggaaaaagagctggacgcaagggcgcgcgtcggtggggcggctgcgggcgaaagcgacttagccgctcgcctcgcggctgccgaacacaccgtcgctgacatgcagcgcgcactagattcctccatcggggaggccgaggccctccgcttggcgggcgagatggggcccgacatgctttgggactcggtctcccgcatggatcgcgccggtcggcaagcgggcctctggaaaggccagacgaggatgcgccccgccaacctggaaggcctcgctccgcacctcaacaggatggcctgggtcctcgaacaactccccgaggagctcgagaagaccatcaagtcatcctcgagggacctcgcccggggggcggtcgaactcgtgctagcgagttaccaggcccgggaccccaacttctccccatggatggcgctggaggagttccctcccgggaccgaggacgatgcgcgcgcgcgcgtccgggatgccgccgaccacatcgtcaacggcttcgagggctcggcccctcggctcgcgttcgcccccagctccgacgaggagggcgatgccagcggtgaggacgacggtggcgacgaggccggcgacccgggcgcgtcagaatga

SEQ ID NO: 86106 - DNA, 870 bp, Oryza sativa
  Clone ID: PAT_MRT4530_85179C.1
ctcgcatcgcatcccatcccatcccatcgcaccgcgcaaaaccctaacccaaaggcaagggagaagaggagcggacgccatggatgcttctcgcgttggcgagctccgcactttcgtggaggcctgcaagaaggacccctccctcctcgccgaccccaacctcgccttcttccgcgactacctcgagagcctgggcgcccacctccccgccgccgccttcaccaaggccacccccaagcccaagccgtcctccatggatgacatcgacgatgaatacgacgacgacgacgacgacgatctcaacatgagggatgccactccggagccggacgagcttgaccaggacatcgtcgagtccgatcttgaacttgaaggagacattgtcgaatctgaccatcaggaccctccgcaaaagatgggagatccttctattgatgtcaccgaggaaaatcgtgatgcctcacaggaggccaaaagcaaggccatggaagcaatgtcagaagggaaactggaagaagctattgaccatcttacaaaggcaatactgctcaatccactctcagctatcatgtatggtactagagcttctgtgtttatcaaaatgaagaaacctgttgctgccatccgtgatgcaaatgctgctctagagattaacccagactctgcaaaaggctacaaaactcgtggaatggcttatgctatgcttggaaaatgggaggaagctgcccatgatcttcacacagcatcgaacatggattatgatgatgagatcaatgctgtgctcaagaaggtggagcctaatgcacacaagataatggaacatcgcaggaaatatgaacggctgcgaaaagagagggaagaaaagagagc

SEQ ID NO: 86107 - DNA, 906 bp, Oryza sativa
  Clone ID: PAT_MRT4530_8517C.1
gggaaattctgtatcttttttttttttttttttgttttttgcagatgttgccatgttggccattcctggtttctggcacaaaacgaaaatcacatcttttattttagatacaacatagaacagatactccaatacagggaacaaaaatttgagaatactgttgatagaagcggtacaactaatgtcccatcaaaggatttttacatccatgaatagcacagaacatatatgtcatccaaaataacagggacaaaacgcagcagaagaagcgggttagatttcttgccattttcgagggagctacttaagccgtcgcaggtttcatctcttcttcaatccgtttaagatcagccaacctttcagtccatgcccgctctctggccactgcagccatcttcctttctgtcctttctgcttcctttctcttaacagcagcagaatattgtgctttgcgcttctttttttcagccatgataaaggccttgcgctgcttgatcctcttcttttccttccttccctgcacactgccttcattcggctggttcgccgggataggctccccaggcttgcacttcacccagtagtacggacctttggggcggaggctggccctcttccgccgggacttgaacccgggccgccgcttcgggaaccgggtgtccatgagcccgctgaagaggccggcccccatggacggcgcctgcgacgcggtggcggcggcggcggagaatgggcggagcccgatcggatccagcagccgaagaagaggcgggggacgaagggggagaggagcagcatgacgcgtcgcgccccggaggagaacccccgccgccgcggaggatagcggcgggagggctcgccggagagctcggaggagcgccatgggagaaaaggttctagaaggtt

SEQ ID NO: 86108 - DNA, 272 bp, Oryza sativa
  Clone ID: PAT_MRT4530_85180C.1
atggtcaaatgggccgcctggcacggcccagcccaagcacggccgtgcctgggccaaggcttgtcgggctggcacggcccgaccgacacaccgggccgtgccgtgccagtccacgggcggcatctacggcccaagcacggcccaatactactcgggccgtgccgggtcggcccgaaggcacgatggcccatcgtgcttcctcacagaaaaagtatatttttggtccctcaactcttctcaccgcggaagtgtttttattcatgaaggcccta

SEQ ID NO: 86109 - DNA, 120 bp, Oryza sativa
  Clone ID: PAT_MRT4530_85181C.1
gccttttgggccatatgttcctgactatgcataccctgctgatgtgcaacgctagactttctatgaaccacctatggagcagttccagagcatgcaccttgcacggccacaaatgcaaac

SEQ ID NO: 86110 - DNA, 378 bp, Oryza sativa
  Clone ID: PAT_MRT4530_85182C.1
atggagataaagctctcggataggcaattgtatctattaattaggatatttcatgtaatttccttagagatatgtttgagcaaaattctgacgcaaagacttatggtatctcagagtttgttagagataactgtcatgtccggcaaggacatattttgtaatctcaggttttcatcatcttgcctagatctcatacttgtctttatgtttaatgctgcatcgtatcttaatatagagtggaatcggagtactagccgatacatgctagatctatctgatcgggaggatgattatctagattttgagctattgaggatgatatttgggactagtttggaagaggcatggattggaaacgttggagaacaacaagattaa

SEQ ID NO: 86111 - DNA, 709 bp, Oryza sativa
  Clone ID: PAT_MRT4530_85183C.1
ggtttttttttttgccttttttttttttttttaccacaacaattggaatggttttcaaattttaatgacgcaagcaattcctcagtgcgattattaaaaccttctgtggtacagccatacagaacagtaaaatcaagaacggaaatacagaacggcctctctaagaccttctggatctgagcttttaaccaaacagaaagcatatgaccaaagcacggtagttcaaggataaaattttcaaagacgtcatttggatggaaacgggtttcttattgcgaccacacttcctcacgaacggcatctattccggatcgaatcgggggatcaggaggaggaggggggtgggttggagtggcggtggaggacgtcgtcgtaggggtcgcggcggccgggggcgtggctgatctggggatcccaggagagctgggagttgaagcggtcgaaggtccagaagccgtaggggcggagcgggaggctccacgccgccttggtgcgctcgcaccgctccttcatccggtacacgtgctcccgctgcgccgcgtcccgcttccccgggtcctccatcatccgcaggatcaggttctccgcgaactccatcacgaaacccatccctacttcctcttcccctcctcctgatctcctctcttcttcttcctcggtcgcggtgggtggtggctgacggctgctgcccgccgggggatccactagt

SEQ ID NO: 86112 - DNA, 589 bp, Oryza sativa
  Clone ID: PAT_MRT4530_85184C.1
cattcttaaccgtctattatcctagcccattcataaaagaaataaaaggtgatcagatcgccaatgcagagagatgtgctccttggaaactttgcagggcaatgccagacccatcatgatcatcaatcctaggagggtttcagttagattcagatcttggggtgctttcatttcctttcatttcacctgcaggtgaggtgagctggacagctcatgcaataaaacgttggaagcaagacaagcccacgcttggcaatgtggatctcaagcccggagagctaccggccgagctaggagctgcctttgacgctacagtggacaactgtgctttcaagcctggctttgggcgcatttgtcccatatgcacagttgcataatgcgtgcaaatgttgttcattgtcctcaatgcatcgtatatcttgggagcttcgataatgctgctaccaatgtgtccttgaaaaacaccttcgaggtgctttcgtgctcgctctcttttttgccaactctgtccaggtttcttttcaaacacaagttatttcagacatttttctataaaatgtctttgaaataaaaaaaaaaaaaaaaaaaa

SEQ ID NO: 86113 - DNA, 5067 bp, Oryza sativa
  Clone ID: PAT_MRT4530_85185C.1
atggcggcgcggaggctgaccagccgcgtcgctgtcgtggacgaggacaggtgcaagccgaacaagtgcgggcaggagtgcaggaggagctgccccgtcgtcaagatcgatctgacattcagggttgttggaagcattgcactcatctctgaagaactctgcatcggctgcggtatttgcgtcaagaagtgcccatttggtgccatcaccatcatcaaccttccaaaggaattggacaaagacaccacccatcgctttggccaaaacagcttcaaattgcacaggctgccggtcccaatacctggtcaagttttgggccttgttgggatcaatgggattggcaagtccacagcacttaacatcttagctggacagatcaagcctaacttgggaagatatgataaaatcagaggaggaggctctctgctatcagataaaagatcagtaagcctgcactttcttggtgatggaattcttggtccctatccatgtgctggtattgcctcatgttcatctatatcaactgttaccccaattgcctcccaaccatggattttggactcaggagcctcctttcatatgtcatttgatgattcatggctcacatcatgccgtctggttaaaaatggtgccaccgttcatacagctaatggaacattgtgtaaggttactcatcaggggtctatctcttctcctcagtttacagtacctaatgtgtcacttgttccaaaactatccatgaacctcatttctgtaggtcaactcacagatacaaattgtttcgttggatttgatgatacttcatgctttgtgcaagatcgccacacaggagctgtcattggcaccggacatcgtcagaaaagatcctgtgggctttatatccttgatagcttgagtttgccttcatcctccactaacacaccttctgtctattctcctatgtgctctacagcttgtaaatccttcccacagtggcaccatcgtttgggtcacttgtgtggctctcgcctagcaactcttatcaatcaaggcgttcttggttccgtccctgttgacactacctttgtttgcaaaggttgtaaacttggtaagcaagtacagcttccatatccttccagtacctccaggtcgagtcgaccttttgatttggttcactctgatgtttggggaaagtccccctttccttcaaaaggaggccacaactactatgttatttttgttgatgattattctagatatacatggatctatttcatgaagcatcggtctcagctaatttctatatatcagtcttttgcccagatgattcatactcagttctctagtgcaattcgtattttccgctcagactccggaggagagtatatgtcaaatgcttttcgtgaatttttggtatctcagggcactcttcctcaactttcttgtcctggtgctcatgctcaaaatggtgttgctgagcgtaaacatcgccacatcattgagactgctagaactcttctcattgcatcatttgttccagctcatttctgggcagaggctatttctacagctgtatatctcatcaacatgcaaccatcttcttctttgcaaggcaggtcccctggagaagtgttgtttggctctcctccccgctatgatcaccttcgagtttttggttgtacttgctatgttttactagccccacgtgagcgcaccaagttgacagcccaatcagttgagtgtgtttttcttggatatagtcttgagcataaaggctatcgctgttatgatccttctgcacgtcgaattcgtatctcccgagatgttacttttgatgagaacaaacccttcttctattcttctactaatcagccttcttctccagaaaattccatctccttcctttaccttccacctattccttcaccagagtctttaccttcatcaccaataaccccatcaccatcgcctatacctccttctgtaccttcaccaacatatgtaccacctccaccaccttccccttcaccctcacctgtatcgcctccaccatcacacatcccagcttcctcatcacctccacatgttccttccactataacattagacacttttcctttccactacagtcgtagacccaaaattcctaacgaatcacaaccctcccaacctacccttgaggatccaacatgttccgttgatgattcatctcctgctccgaggtacaacttgcgtgctcgtgatgctcttcgtgcacctaatagagatgattttgttgttggggttgtgtttgagccatctacttatcaggaggcaattgttttacctcattggaaattggctatgtcagaggagcttgctgcactagagcgtaccaacacgtgggatgttgtcccgttgccatctcatgctgttccaatcacctgtaagtgggtttataaagttaagaccaaatcagatggtcaagttgagagatacaaggctcgccttgttgcgcgaggtttccagcaagctcatggtcgagactatgatgagacatttgctcctgttgctcatatgactacggtgcgtactttaattgccgtggcagctacccgttcttggactatctcacaaatggatgtcaagaatgcttttcttcatggtgatcttcatgaggaggtatatatgcatccaccaccaggtgtggaagctccaccaggacatgtatttcgccttcggcgtgcactttatggtctcaagcaggcccctcgtgcttggtttgcacgcttcagctcagtggtacttgcagctgggttttctcctagcgatcatgacccagcactattcattcatacttcctcccgtggtcgtactttgttgttactctatgtggatgacatgttgattacaggggatgatttggagtacattgctttcgtgaaagggaaactcagcgaacagtttatgatgtctgatttgggaccactcagctactttctagggattgaagtcacctctactgttgatggttactatctttctcaacaccgttatattgaggatcttcttgctcagtcaggcctcactgatagtagaacaactactactcctatggagttgcatgtccgacttcgttccacagatggaactcctcttgatgacccctcacggtatcgacatcttgtgggtagccttgtctatcttactgtcactaggccggatattgcttatgctgttcatatcttgagtcagtttgtcagtgctccgatttcagttcactatggtcacttgcttcgtgtcttacgatatttgaggggcactacaactcaatgcttgttctatgcagcatctagcccgcttcagcttcgcgctttctcggactctacttgggcaagtgatcctattgatcgtcgctctgtcactggctattgtatttttcttggcacttctctcctcacttggaagtccaagaaacaaacagcggtatctcgatctagtactgaggctgaacttcgggctcttgccacaaccacttcagagattgtgtggttgcgttggctactagctgattttggtgtctcttgtgatgtcccgacacctcttttatgtgacaacaccggagctatacaaatcgccaatgatccaatcaagcatgaattgacgaagcatattggcgttgatgcatctttcacacgttctcattgtcagcagtcaacaattgctctccactatgtgccctccgagctacaagtcgctgatttcttcaccaaggcccaaactcgagagcatcatcggttacatcttctcaaactcaatgtggatccacctgattggcatgaaatccttgcgtacttccatgggtctgaacttcagaattacttcaagcgtatggtcgaggataacctcaagcctatcatgaagcctcaggttgagatcatgcacaaaaaccggaattcttttcaagtaagtgtaggccaactacttgaccggaaagatgagaggggtatgaaagatcagctgtgcaacggcctccaattgaacgaagttattgaccgaaaagtggcaaaactttctggtggtgagctccaaagagttggaatagcagcagctgccctgcaaagcgcggatgtttacatgtttgatgagccatcaagttatcttgatgttaagcagaggcttaatgctgcacgagtcataaagtccctgcttagaacaaacagcttcaagaaatttaccatcatttgcctccctaattttgttttcagctatgttatcgtgattgcagatgcccaggaggatgctgagattaagacatatcagcggtacaagtaccctaccatgagcaaaacaattggtaacttcaagctcactgtcatggaaggtgaattcactgattctcagatttttgtgatgcttggtgagaacggaacagggaagaccacattcatcaagatgctggccggggtggagaaaccagacactgtggacggaattgatattgaagttcctgaattttgtgtgtcctacaagccacagaagcttgcatcaacttaccagggtacagtgaggcaatttcttcatgagaaaataagggattcatacactcatcctcagtttgtgtccgatgtcatgaagccactaaaaatgcaacaactcatggaccaggaggttcagcatttatcgtgtggacagctccagagagttgcattatgcatttgtcttggaaagcctgcagatatttatttgattgatgaaccaagcgcatctctcgattcagagcagcgtcttgttgcctcaaaggttatcaaaagatttatcatgcatgcaaagaaaactgcgtttattgtcgagcatgatttcattatggcaacctacttagccgacagggttatcgtctacgagggacagcctgctgttgactgtactgccaatgcaccacagtctttgctatccgggatgaataagttcttatcattgagggaacaagagcgggttcggaaaatggggcgcagcggaacaggaaggaagccatgtttggaccatttcatggaacaagtcttcagactcaaggaattgcagaatgatcagaggtccccagccttttag

SEQ ID NO: 86114 - DNA, 485 bp, Oryza sativa
  Clone ID: PAT_MRT4530_85186C.1
ttcttttttattaaaaaaatttctcttttttttttttcagacatcatcttttttttatgttttttggcggggtgccaaataattaagcaccactcctaaaagtggcaaatagttaatttttccttatttacacaaagggggggcccaaggtccattggctttttggcaaatctttcttgctagcaatactggggtacaagcaaatatgtgtgcccggtgctttttagggttcaaaaatgaaaaaaaagaggggttcagggtcatgcttgctcactttgtgctgggggaacagcccacagtgacttgacccaaacaattaaaattgttaccggctggattaaaaaaaaaaggaaaatcttaaaacaggacccgtgttcgggggcccattttctacccaaccccttttttcaggtacctgctggttgaccaacaatccctttaccccacaaaaattgattccctcccaaacccaaattttttttttt

SEQ ID NO: 86115 - DNA, 426 bp, Oryza sativa
  Clone ID: PAT_MRT4530_85187C.1
atgaccaggaataagccggtctcggcctgctctgcctcgccgtcgtctccgctcggcgctccggccgccgcggcaccaccgccgctgccacgaccttgctccgctcaccgcggccgccgtcgtcaccaccgcagcggcctcgctctgatctgcattgccatggagcagctgcgcctctgcgactgtctccctcccccgcgccacgtatctctctctgcttcgctaccggcacctcgggggcggcctcgatccgccaccgccgggccggccttgctcctgctgcgcgctgccgccgccaatccggcctcaatccgcacagcctccgctctcttcctagggattatgtgcataggtggcaccaccgccgtcgttgccggaattgcaaccgtcgtcatccctggtctctatccgcaccagcacgacgag

SEQ ID NO: 86116 - DNA, 378 bp, Oryza sativa
  Clone ID: PAT_MRT4530_85188C.1
atgcggagacagggagccgtcttatccggaccagaccccccctaccctcaccgggactcctactcctacaagccactgactcgtgggccatggatagcatggccccacctgtcatggagacgtcagctggatggtggctggggttatctcttcccccaccgcgtcgtccccacgggggcccagaaatatctgcacgccgacgccgacgccctcacgctcgcgcgacgtacgcggggtggatctgggccgtccgtggccggatcagcggaggctcagccgtccgatggcgcgggaaggatcattgtcttaagtggtccgcctacaaaaatcgattttcgcaagcgatatcttaggatgtccgcctgcaaaaagttttga

SEQ ID NO: 86117 - DNA, 395 bp, Oryza sativa
  Clone ID: PAT_MRT4530_85189C.1
gaagagacattccggaaaatatagggcgctcagcctaattcggatacatatttgcatgacttattggcgcacacgaactcccaacgttgaattgcctgcctaactccaagagggccctcgcgataacttgaacactttcagagctattcaaaactgaccgaccgcgctagcctacaacaacttttgtactacgcttggtgagtgatctgacactggcgatccaccagagcatcgactctctgctatatgcagggcactgtgctttccatcatgcctttgagcctggcggatgattattatcactgtccttcagacctacatgctgtgagggatatgctatctatcaccaaaataagacatacttggcttactaagctactagtccccggagactc

SEQ ID NO: 86118 - DNA, 6742 bp, Oryza sativa
  Clone ID: PAT_MRT4530_8518C.1
atggattatgatgattctgattttcagagccagaatttccagttagctggtgaagacaacaataaattcccagcaggtctgcggcaatttccactgcccaaacttgacatcgacgaccaactacaaagccacctcagatttgataacctaattgattcagagggactttttagcggacaaggtcacggcaacagttggattgaggttttgtccactggaagtagtgttgttgattttagttctagtgctgctgaatcttgctctataaataggacaaataatgtatggtctgaggcaacatccactgaatctgtggaaatgttattgaagtcagtgggtgaaaatgagatgaccggtaacatggatgagaacgcacatcatcagattagtggaatggacagtaaaactgatccatccaacatgccgtccaaaacaagtgattctcccacaggcaacattatagtaccagctgagaatgataagtctcagagcactcgttcggaaatggcagaagatccttcaaggattcagcctcagcttgagcatatcagacctttctcagtggatgacaaagctgaacaagcagtaggttcaactttatcagacagaaaatctaactatacgctggaatctgtttctgagaggtgcatagtgagtgggaggtcttcttctccaaagaaaacatcagaaagctgtccagatgttggcagctattttgaggtggtccatgatgacgattctttggacaacctcaacatacagtcagatggagtaggttctagaaagttgaataatgaacccttctcagacttggcaccattacagaacatttatactaccagctcatatcactttgagcaggacaatcaagaatcaggagttggtgttaccactcaaggttcagaaatatgccacacgaatgaaaataaagatggacttcatgatttgcaaaatttgtcatgtacaagccagcatttgggttcttcaaacttaactagtgaagttagcaatgaaactttattgtcgggaagttctgatggattactggaggccatcacaaatccagtaaagatgctgcacaggagtgatgacactagtaagagagccagtgctacactgcaatcatctttcttacaagtcgagcatgcatcagaaggcacaaaaggttctattgacaggagcagtgagcccgccatgaagaaatttggtgctagtgaagaacccaattctgctaaatctcaaggtgagccagatttgaaaaattctagtcctcatcttgtcattcctttgccaaccataagtggtgagtttattcagtctccaaaaggaaaacagcttgctcatgttgctggagtttctgaagaaaccacctatcgtccggtggatgatacgaaccatagcactagtgatgactcaaaacttgccatgttggagcagcttcaagattctgttgataatctatctagtggtgttatggaagagaagacaatcagagggcaaatctcagctgtttcagggaacgttgtacatgtagtgaaaagtggtcattgtgaaaaagttgcagtttctaccagtacaacagatgataagtttgagtcaccgggtgatattgtgcctgacaattcttcagcttgtttacctgatgaaaaagacccaagcatcacagttaaccacgaggtgtcattcaaggaaggtgttgtgcctgcattagaagacgatcctgagaaaatgtcctcaatgaatcatgaggagccattgaaggaagatgataaatctactttagaagttggagaacacaataccacatctcctgtttctgagcccttgctgatgggatcaacaggatcagtgaatccgaacattgatactatttgtagcagtggtactgatgctgttgcagaaacaccacaatgcgaagaacaggccacttcttcgggtagtttgaccacaaatgcaactcaggataaactaggtgatcatccagacgcttgtccaccgaaagtcttgactactgggcctttgatgcaacctgaggatcatgaagatttagttgcaccatcctctgtcttgggtgcctcgtctgaaaagggtgaacaaaataacggaaaagttcccttgaatgggatggatgattcgggtgtgcagttacaagataaggtattaagtcatggtggagatcgtactcttgttactgtttcatcagagaataagaatggcttagaacatgggactggtgaaggaagctgcactgatgctacatgtggttcgcctacagtgattagttgcaatgaatcctgtccagaagaagatgggcagggcagtaatgctttgcttcatcacaaacaaaccgaaccacccaaggatcctaaagatcatacagcttcgactaacaattcccatgtctcaaaagaaggttcttccagaaatgtaaaacctactcttacttcggaggagacgcatacagccgaagataaaagtttttcatttgaggttggagctccactaaatataactgagaaagctcatgctcctgcttggagcccattgcctcgacctgaagttgctcagagtcccgaggtaaccactggaattcctaaacctggaaatccatcgaatcatggtagtgatgaaagtaagaatttggcgattgtggagaccagcaaagaacaactatctggaaggaaagtggttggaagtgctgaggggtcttctgtaagctcacatattggtcatatcactaaagccaaaagtacaccactagagcaggaacaacaacatccaactcctgatgtcaatgctttggggcaccaacctttcacagatttacagcatgtgcagctacgtgcacagatatttgtttatggagctctcattcaaggaatgccaccggcagaatcttacatggtgtcagcttttggagaacctgcatgtggtcgtaagcctccatgggggacacttttgcaagctgctttggaaagatataatagtcagaggtcatctttaactggcttggagactcctacaagctcacatataggtagccgtgtgacggaaaaagccagtagaagcacagcggttaaaactgcaccagctagcaaaaagggtggcaaaactgtgttgccagcacatactgctgtgccccttcatttgccaactttaaatatgtctcctcttggtagttctgctttgagcttgccacgaggtactcatctggattttggccaggctgtatcaccagtattcccatacagttcacagacaaggcagcctacttctggtgttgcatcgtggtttccccagagccctggtgggcgcgctgccccctggttggttcaaccacagaatttgatatttgattcatcgatgaaaccgcctgtgccggcaagtgcaaatgaaactgcaaagggagcatcctctaaaaacatatccatttcacaagctgtttcacctgttgcattccctccgaatcaggcgccttctaccatttctccattagcagtcatacctgaggaaaaacagaaggcatcggtttctacttctaagcgtggagctacaccacaaaagtcaagaaaaagaaagaaagctccagcaagtccagaacaacctatcattgcccctctgctcaaaacagatattgcatctgttactcctgccactcagcatacaccaggcttcaccttatccactcattctccaagcaatattttggccagtgggcttgtttctaacacaggcttggtcacccctgtgcctaattatcagattactggtatcaaggatgcagagcaaagaatcttttcagaacagatctctggtgcaatagagcaatcaatgggacaagcaaaaggggcaggtgtgcatgcgatggatgcagttaggcatgctgaaggtatttggagccacttatcaacaaattcgaaaggcaaattacctgcagaagtagaagagaagcttacttcagctgctgctgctgcttctgcagcagtttctgttgcaaaggcagctgctgaagctgctaagatggcctcagaggctgcattgcaggcaaaaatgatggcagaggaagtcctttcttctacctatgcaaattcctctcagaagcatgatgctggtgaatttaaagtcagtaacaacctggctagtttctcaagtttgacacccacatcgtcttggaaaacaaaggatgacatttccaagggttccattatttcagtggcacgggaggttgctagaaagagggttgaagaggcagcagcagctgcaaaacgtgcagaaaacttggatgccattctgaaagctgcagaacttgctgcagaggctgtgttcaaagcaggaaccatcattggtatgggtgaacctttaccttttacccttagtgagctgttggaagctggtcctgatggttactggaaatctgatcaagtgaggaataagaaggctacaaaattggaactacctactgattttagtaaatctggaaggaagcgtggtggcaaagctaaacatgaccatgcaatacagaacttagagccatcttctagtggcaaagggttgcagctagatgtagtgcattcagggaacgtggctgaagatgttcccaccattgctccagtcaatgggaacagaaatgatgcagcaccgaacataatctggaatggcattgaaaagggatctgctgttgaggttttagttcacaagggtgagtctggagtagcttggttttctgccaaagttcttgatataaacaatgatagtgcatgtatcagctacgactctcacactgaagaaactggtcttcgcaaagaatgggtgccattgagacaggaaggggagaaggcacctcaaatccgccttgctcatcctgcaactgtttctagatttaaaggaactaggaagcgccgtagggacacatcaggaaattactcttgggctattggtgatcatgtggacgtattgattgaagatagttggcgagagggaattatttctcgcaaccgtgatggtgatgaaacaaagcttaccgtacaattttcaggaaccagtgattccttagttgttgatgcttggaatcttcgcccatcacttgtttggaacgatgggcagtggatagagtggtcccgagggaagacggttgattgtaataagggtgattctcctcatgagaaacggcaaagaacaaaaggtaatgatcatgtacctattggtggagcagcagcaggcccttctatggatacgagcacaaatgctgcagcaaaaccagaggagccaaagccattggctttatctgatagggacatggttttcaacatcggaaagagggtagttgagagtaaaactgatggtgttgctttcaagcgacctggacttcggaaagaaggatcacgggtagttggtgttccaaaacctggaaagaagaaaaagtttatggaagtaagcaaacactatgatgcagatcaagctgataaaatttctgagggtaatgcatctaccagacctgtgaaacatttggtgccaaatgtgccaagaccacgggaaggtacttctaaagttgaccagaaaggaaagaggataggggagatgagatcgagagtacctaaatctacaaagtctcaggatggtgcaactaacatcattcctggcaagggacctttatccatgtctgccccaagcactggtgttttcgaaagtagtcatacatttataggaagtacaataggttcttccaacaacatgaacctctctgtagaaaagaatagttctgtccatggcgttggccttagatctgaagattcttctgtttctgaaccacacatccaagctgcatctgctgctcctacttccaggaagaatttaaccactactgatcgagctaaaaggaaacttgttccttctatggataattcgaacaggaccacaaacaaaacatctgaaattccagggaagagtgctgattctactgaacccagaaggtcgaaccgccgaattcaaccaacctcacggttactggagggtctgcagagttcccttatagtttccaaagttccaggcgaaaagggtcctaggactaactacagaagtgcttcctcaagagggcgaaaccttggctgagaaaaaggctttgctgcgctgttgttgggataattctcgttttgtacataactggttagctcgatggaggcaaaagaggataggattggagtaaagacttccccggagaagatgtgctcaggtgtattatatgctagcttaagttagtggggtttattttttggatttgtactggacacttgtgttatgtgatgtagagtagacattaatcatccaaaaaccaccgtttaatctgtatggatacagcgaaagagaaattggacacggtttaaactcatcgtctgtggtaaaccatttgacggatgtattaaccttctccgtccttttgtggaattgatggattgctaccttttgttttgacttcaagaattcgtctccagttggaaccctttaaaaaaaaaaatgccacctccagctgcgcgcgttttctccctggggggggcgtgtccacaaacctttatgggggatgcacccccctattacctttctcaaatcgtattggaaagactgggccccataaacgtcggtaaaatctctttcaagagtgtttaaaaatgccgtccttcttcctaaatgtcagtcatatatttgtcctctcacagttttccggaagttgtactctacatctaattgc

SEQ ID NO: 86119 - DNA, 360 bp, Oryza sativa
  Clone ID: PAT_MRT4530_85190C.1
aagagctgtaacatggtcgattacaaaaaggtggctgccatattagagaagtagccctattcctcagagagctattaatcaacattcggacctagacgtgctacgcagaatacgaagaacaaatttctagatactctgatcaaaaggctcagagaagccagctagagctgctaggactgtcctctgcagtaagataatatatgttctttgcctcacaccttgtcatggtatcatgtaataaagcctgcatttggcgcgcattattcatatgaagaagaccatttatcaatatactgtaatattgctaatgttagagtgcctgctacatatgtgttgatattgcagtgttcattctttaac

SEQ ID NO: 86120 - DNA, 203 bp, Oryza sativa
  Clone ID: PAT_MRT4530_85191C.1
atgccgtcctccttggatagagagaagggtgggacctacatgacgaggaccaagtcaaaccggccacgtaggatgaggaccaagtcaaaccagccacgtaggacgaggaccaagtcaaaccggccacagtctcacatcagtgacctttacgtcgtgacgggcgtcatacccgacacagatgagggttgccacccgattgagat

SEQ ID NO: 86121 - DNA, 297 bp, Oryza sativa
  Clone ID: PAT_MRT4530_85192C.1
atggatatacctcaagttgcacaatttctctccaggaatataagaacgaggatgagggtaaagaacatgatgcgtttgatttgttcaaaatgtgccacttcagcgagaaaaaggatggctacacccgaacaacccaagtctgtgcttcaggttgtagctagtgtacttgagcgcaaccacaagaagagtgtgttccttcggaatgttgggatgcacactaagcgatcaaggatgagtgcagaactgaaagctgagaagagggagaatgctaagcttcggttgattgtcagtatctga

SEQ ID NO: 86122 - DNA, 465 bp, Oryza sativa
  Clone ID: PAT_MRT4530_85193C.1
ggtggcgggcagtagcggaggccgcttggggcgccgaggacagcagtagatggcggcaagcaagggcggggtacggaggcagctcagggtgggcaagatggtggcgggaggtggcgaaggctgctcggggcgggcagatggcggcggggtggcggcgtggctgaggcaacaatggggcggcatgtgagcgccgtcgggatggtgcagcactgccggcacatgcctcatcctcgtcgtcggcatccgtgcgtgcgagagagaggtttgagaggggagagagagaggagagagatctgatgggtgggccccatcgattagttgataaaagaattgttgactgaactaccacgtaggaccaaaaccgctctcaaagctatttaagggagttttcatcctgtattgatagttgaaggtgaaagatatcttatttttgagttcaaaaaaaaaaaaaaaaaaaaaaaaaaa

SEQ ID NO: 86123 - DNA, 242 bp, Oryza sativa
  Clone ID: PAT_MRT4530_85194C.1
gcttggcgaacaacaagaccgtgacgatccagccatcaggcgtgaaggacgcggccgtggtcctctccacaaccaagaccaagaagcagaatgccccagcgaagctctaccacagtctgtgatgcgcaaggagttccgcaaaatggctaaggctgtcaagaaccagattttcaaatggaacattttgatacttaaaacaccagttttagcagcagttgatacaaccttttctgaaaattcag

SEQ ID NO: 86124 - DNA, 336 bp, Oryza sativa
  Clone ID: PAT_MRT4530_85195C.1
ttattttgctatgtccttgatgacctcatccatgtcgagcttcttcatcgctgtgaaaggtcttggcatgttcagcagtgatatgaacacttcaccaccttcctcacgaatctccaggcaaccacgtcgtggcacagataccccaggaacaaaactttccagatcctcctttaccttcacagctctgatcttgaactgtctgcattgagtgcttcggcaaccgagctccccggcactgtgttcgtgttcctttcttggcctctctcttggttcgtgttcctttctttcttgccaagtgccaagtgccaaccacggggcaggagttctcggcgccat

SEQ ID NO: 86125 - DNA, 1169 bp, Oryza sativa
  Clone ID: PAT_MRT4530_85196C.1
ggatttcgggtcgatgaacatggacgagctgctgcggagcatctggacggcggaggagagccaagcgatggcgtcggcgtctgcggcggcggcggcggcggaggggggcctgcacaagcaggggtcgctcaccctgccgcgcactctcagcgtcaagacggtggacgaagtgtggcgggacttacaacgagaggcgtcgccgggggcggctgctgctgacggcggcggcggcggcggggagcaccatcagcccaggcggcagccgacgctcggggagatgacgctggaggagttcctggtcagggccggggtcgtcagagagaataccgctgcggcggctgctatggtagctgcggccgccgctccgccggtggctccgcggtcgattccggctgtcaacaacagctccatcttcttcgggaactacggaggcgtcaatgatgctgctgctgccgctgctggtgcgatgggtttctcaccggtggggattggggatccgaccatggggaataggctgatgtccggagtggcagggattgggggtggtgcgatcactgttgctccggtggatacatcagttggacaaatggattcagcgggcaagggggatggggacctgtcatcaccgatggcgccggtgccgtacccctttgagggggtgataagggggaggaggagcggtggtaacgtggagaaggtggtggagcggcggcagaggaggatgatcaagaacagggagtcagcagctagatctcgtgcccggaagcaggcttacacaatggagttggaagctgaagttcagaaactcaaggaacagaacatggaattgcagaagaaacaggaggaaattatggaaatgcagaaaaatttcttcccagaaatgcagaaaaatcaggtattagaggcggtcaacaatccttacggacaaaagaagcgttgcctaagaagaacattgacaggtccctggtaaaatttgagttattgataaccggagcttgacaagacacaccatattttaaccttaaggttcttgtacatattgtcaggatttcaaaactcatctctctgttgtaaattgatgatcaacagagtcgagtgtactagtgcttaacttgccctgtcaccttcaacttacagttctgcaagtcttctatcgtgctcttatgtcc

SEQ ID NO: 86126 - DNA, 488 bp, Oryza sativa
  Clone ID: PAT_MRT4530_85197C.1
ttctcagctttctgagttcatatagctatataaacaagagactttggttaatatttatccaaaatgatgagaaaagactacagacagtcaacacagatggtgttaatatgtatccaagaaaaaaaaaagaattggatatggcgccagtttaaagatggatgtaattttgaattccagagacatgtatagggtacaactccttacacgaacacggtatggtagaaaccaacttggtaaccgaatttttttttaactaaagaacgcgcataatgtgaattatatacactttcttaccttgtcgtccgtaagcttcaaatgtccagaaaagatccctcctttttccccttttactgagccgatagttcactggattggacgggagacgccgccgcgaggggaagagaagatctggagcagccgccgcgtcgaggaaggaggagagggtaagcggcgcgcggaggagcctctgccgaattcctgcagcccgg

SEQ ID NO: 86127 - DNA, 1839 bp, Oryza sativa
  Clone ID: PAT_MRT4530_85198C.1
atggatctgaaggatggcggggggtcggagaggaggggggcggcggcgggtgcgggtgcgggtgcggcgccgctggcgaggcaggggtcgatctactcactgacgttcgacgagttccagagcacgctgggagggatggggggagggctcgggaaggatttcgggtcgatgaacatggacgagctgctgcggagcatctggacggcggaggagagccaagcgatggcgtcggcgtcggcggcggcggcggcggcggaggggggcctgcagaggcaggggtcgctcaccctgccgcgcactctcagcgtcaagacggtggacgaggtgtggcgggacttagagcgagaggcgtcgccgggggcggctgctgctgacggcggcggcggcggcggggagcagcagcagcccaggcggcagccgacgctcggggagatgacgctggaggagttcctggtcagggccggggtcgtcagagagaataccgctgcggcggctgctatggtagctgcggccgccgctccgccggtggctccgcggtcgattccggctgtcaacaacagctccatcttcttcgggaactacggaggcgtcaatgatgctgctgctgccgctgctggtgcgatgggtttctcaccggtggggattggggatccgaccatggggaataggctgatgtccggagtggcagggattgggggtggtgcgatcactgttgctccggtggatacatcagttggacaaatggattcagcgggcaagggggatggggacctgtcatcaccgatggcgccggtgccgtacccctttgagggggtgataagggggaggaggagcggtggtaacgtggagaaggtggtggagcggcggcagaggaggatgatcaagaacagggagtcagcagctagatctcgtgcccggaagcaggcttacacaatggagttggaagctgaagttcagaaactcaaggaacagaacatggaattgcagaagaaacaggaggaaattatggaaatgcagaaaaatttcttcccagaaatgcagaaaaatcagaaattattctctgttggtagggatggggtgcactatagtgcaactaaatgtactaaatacacaatatcaactgaaaaggtaatgattactctgattcatggcaagcaggtattagaggcggtcaacaatccttacggacaaaagaagcgttgcctaagaagaacattgacaggtccctgtttttggtttgactcagaaggatgtatcatgtcagaggagtttatgcccaaaatgatcaacatgggatcacacctgacaaggaaaaacaaaccagaccaatcagatactacagttgagttccatccacgccccgatgttcttctacaaggagctggagaaggtttggtgtttttgcttggaggccaggttaactgcattggtctacaggacagcaccgaatcaagaccagaaaatgacactgttctagtgcagatccaaggaccagccacagttagttcaggcagtgtcactgtccaagcggggccaaattgccgggccaaggaggagcccatccgggacacgaaccactggcgccaacaccccggtgttccctacgcaccgggacatggcgagcccacgccatctctgctcgggctgcgagacacccagcactgtccatttcatggacaatttcagaagcaattcttccctccccggtcatcttccgggaaccagagaagaccgatggctgatctgtcgcctgattggggcagatttggtctggattgggattgtggagtaaccagcgccagaacttttggcaatgatcgagatggaacagcattttga

SEQ ID NO: 86128 - DNA, 4428 bp, Oryza sativa
  Clone ID: PAT_MRT4530_85199C.1
atgatggtgacgaccaggagaagtgctaataccggtgatggcaaccaacccgaaggtagcaaccacaacaaccatggcagcccacctccacctcctcctccgcctccaccaccaccacgagacaccaacgccatccccacccaaatcctcgcccagcaggccaacatgatggctgctttcctccacatccaaaatccgccacaatataatgctccaccaccgcccccacaactctctaaactcgccgagttcctccgcatccgtccgcctaccttctctagctccaataaccccgtggatgctttggattggttgcatgctgtggggaaaaagttagacaccgtgcagtgcaacgatgaggagaaagtcatctttgccgctcaccaactgcaggggcccgtatctctatggtgggaccatttccaggctacgcagccagaagggcagcctattacttgggcccgcttcaccgccgctttccggagaacccatgtgcccgccggagtcatggcccttaagaaaagggaattccgagagttgaaacaaggcaaccgctctgtgatggagtatttgcatgagtttaacaacctggcccgatacgccccggaggatgttcgtgaagatgaggagaagcaagagaagttcttggcaggaatggaccctgagctgtccgtgcgtctggtctccggggactatccggatttccagcgtttggttgacaagagcatccgcttggaagccaagcacaaggaactggagtcgcacaagcgtcgcttggcgaatttccgcaatcaacaggggcctaaccaaagggtccgctacaccaatccctatccagggggatcgtcctcgcagcagcaacagcagcagcaacctcgctccgcgccccgacctcaattcgtggtgcgcgtcccacagccgcagcaacagcagagtcagcaagggactcgtgcgccccatcctcctacgccagccgtgcagcctggtcaaggccgcaaggacgttcaaggtcagcagcgtctgtgcttcaacttcttcgagcatgggcactttgcggataaatgcccaaagccgaggcgccagcaaggccaagcgcctccccgccccaacaacggtggtaaggatgtcattcggggtcgggtgaaccacgtgacggccgaggatgtgctgacaactccagacgtcatcgttggcacgttcctcattcattccatccctgctaccattttgttcgactctggagcttcccactcgtttatatctgtgccattcgtggggagaaatcagttgggggtagaaaggcttaggaaccctctgctcatcaccacccctggaggggttatgacagcaaagtattatagccctgccgttcctatagaaattcagggaattccttttccctcggatctgattcttctagacaccaagaacttggatgtgatccttgggatgaattggttggctcaattccaaggagtagtggattgtgcaagacgcactgtcactcggtaccgagggccggaacaaccggttgttttctttgctcccccaacctctgtcggtagttcagaacttcatcagataggactgtcagaaatccccatcgtcagagagttcggagacgtgtttccggaagaactacccggtatgacgccgaagcgagagattgagttccggatagatcttgctccaggaaccactcccctgtacaagcgaccctaccgtatggcatcaaatgaactggccgaagtcaagaaacagttggaagagttgaaagaaaagggagctctcaatgaagttaccatcaaaaacaagtaccctcttccctggatcgatgatctgttcgatcagcttaaaggtgccactgtattctccaatattgatcttcgttccggatatcaccaattacgtattcgtgaagaagatatccctaagaccgcattcaccacgcgatacggactgtatgaattcacggtgatgtcgttcggtttaaccaatgctcctgccttcttcatgaacttaatgaacaaagtgttcatggaatacttggataagtttgttgtggttttcattgacgacattctggtgtactcacaatcagaggaagaccatcagcaccatctccgtctggtgttgggaaagttgcgggaacatcaattgtatgccaagcttagcaagtgtgagttctggttttccgaagtcaaattcttagggcacgtgatatctgctaaaggagtcgctgtggaccccgaaacagtgaccgccgtcactgattggaagcaacccaagacagtcactcaaattcgcagctttttgggtttggccgggtactaccgaagattcatcgagaatttctccaaaattgccagacccatgacgcagttgctgaagaaggaagaaaaatttgtgtggagcccgcaatgtgagaaagcgttccaaactctcaaagaaaagctggtttcctcgccagtgttaatcttaccgaatactcgcaaggacttcctggtgtactgtgacgcttcgcgccaaggattggggtgtgtgctcatgcaggaaggtcatgtggtagcctatgcctcccggcagcttcggcctcatgaaggcaactaccctacccatgatttggagttagccgctgtggttcatgctctaaaaatctggcggcattatctcattgggaatcgctgcgaaatatatactgatcataagagttttaaatacatcttcactcagtcggatctgaatcttcggcagaggagatggttagaactcatcaaggattatgatgtgggaattcactatcatcctggtaaggccaacgtggtcgccgacgctctaagtcgaaagagccattgcaacactcttgacgtccgtggcattccacccgaacttaatcaacagatggaagccctgaacctaagcatagttagtcgtggattcttggctacgctggaagccaagcctaccttgctcgatcaaatctgcgaggctcagaagaatgatccggatatgcgtggactcctcaagaatatgaaacagggtaaagccgctggtttcacagaggatgaacacggaaccctatggaacggaaatcgggtatgccttctagacgacagagaacttaaacagttgatacttcaggaagctcacgaaagcccttattccatccaccctggcagtacgaagatgtacttagacttgaaagagaaatactggtgggttagtatgaagcgggaaattgcagagttcgtggccctttgtgatgtgtgccagcgtgtcaaggcagagcaccaacgaccggccggtcttctccaacctctccaagtaccagaatggaaatgggatgaaattgggatggatttcatcaccggacttccaaaaacccaaggcggatatgattctatatgggtaattgtggaccgactaaccaaggtagctcggtttattcctgtgaagaccacctatggagggaacaaactagccgagctctacttcgctaggatcgtgagtctccatggcgttcctaagaaaattgtatctgataggggaagccaattcacttctcacttttggaagaagctccaagaagagctgggtacccgattaaatttcagcaccgcgtatcacccgcagacagatggacagaccgagcgtctaaatcagatcctagaagatgtgcttcgcgcatgtgtcctagatttcgggaagacctgggataagagtctcccctatgccgagttctcctacaataacagctaccaagccagcatacaaatggcaccctatgaagcgttgtatggacgcaaatgccggacaccgctattgtgggaccaagttggggaaagccaagtgttcgggactgatatcctgacagaagctgaagctaaagtcagaaccattcaggataatctaaaggtggcacagtcccggcagaagagttatgcagataaccgacgccgtaatctggaattcgcagtggacgattttgtgtaccttcgggtcacgccattgcgaggtgtacacaggtttcagacgaaagggaagctcgcaccttggtttgtgggtcctttccgtatcattgctcgacgcggggaagtcgcttaccagttggagctgcccgcctccttgggcaacgtgcatgatgtgttccatgtgtcgcaactcaagaaatgtcttcgagtgccatccgagcaggccgattcagagcaaattgaagttcgcgaagacttgacctacgtggagaggccagtgaaaatcctggacaccatggagcgcaggaccaggaaccaggtaatccgtttttgcaaggtccaatggagcaaccacgctgaggaagaagctacttgggagcgtgaagacgagatgaaagcagcccatcccgatctcttcgccagttcttccgaatctcggggtcgagattccgtttaa

SEQ ID NO: 86129 - DNA, 158 bp, Oryza sativa
  unsure (1)..(158): unsure at all n locations
  Clone ID: PAT_MRT4530_8519C.1
taacaancggtgatcaatcatgtatanattgcatttgacatacaacagangtgctgnctgtcacagggaaccgtaccatcatgagacagattacagaaagtagctgacaactagaaaactaaagcacaccggcgcggcgcgatggcggcgcctaccgc

SEQ ID NO: 86130 - DNA, 194 bp, Oryza sativa
  Clone ID: PAT_MRT4530_851C.1
aagctttatttttttcacgacgctgaaaatctgagatgctaaatgccttctcgaagctttgcacactcactgtaatatacgtattactgcttgattggtaaactaatatggggatatactgtggtaatcagcagtgaacagtgacctcactactacgtagtcactagtgctctacactatgttacccgaagctt

SEQ ID NO: 86131 - DNA, 3595 bp, Oryza sativa
  Clone ID: PAT_MRT4530_85200C.1
atggttacgccgatggtgacgaccaggagaaatgttaacaccggtgaaggcaaccaacccgaaggcagcaaccccaaccaccaaggcaatccacctccaccaccaccaccagacaccaacgccattctcacccagatcctcgcccaacaagccaacatgatgactgctttcctccaccacctccaaaatccaccacaacagaatgctccaccaccccctccccaacactccaaactcgccgaattcctccgcatccgcccacccaccttttctagctccaacaaccctgtggatgcgttggattggttgcatgccgtggggaagaagctggacactgtgcagtgcagtgatgaagagaaagtcatcttcgccgcccatcagctgcaggggcccgcatccctatggtgggaccacttccaggctacgcagccagcgggacagccgatcacttgggcccacttcaccgccgctttccggagaacccatgtgcccgccggagtcgtggctcttaagaaaagggaattccgagagttgaagcaaggcaaccgctccgtgatggagtatttgcacgagttcaacaatctggcccggtacgctccggaggatgtgcgggaagatgaggagaagcaagagaagttcttggcaggaatggaccctgagctgtccgttcgtctagtctctggggactatcctgattttcaacgactggtggacaagagcatccgcttggaagccaagcacaaggagctggaatcgcacaagcgccgcttggcgaatttccgcaatcagcagggtgctaaccagagggtccgctacaccaatccctacccagggggatcctcctcgcagcagcaacaacagcagcagcaacctcgcccagcgccccgacctcaattcgtggtgcgcgtcccacagccgcagcaacagcagaatcagcaagggactcgtgcgccccgtcctcctacgccagctgggcagcccgttcaaggccgcagggacgcttcaggtccgcagcggctgtgcttcaactgcttcgagcccggacactttgcggataaatgcccaaagccaaggcgtcagcaaggccaagcgcctccccgctccaacaacggcgggaaggatgtcattcggggtcgtgtgaatcacgtgacggccgaggacgtgctgacaactccagacgtcatcgttgaactgcatcagataggtctgtcagaaatccccatcgtcagagagttcggagacgtgtttcgggaagaactacctggtatgccgcccaagcgagagattgagttccggatagatcttgctccaggaaccactcctctgtacaagcgaccctaccgtatggcagcaaatgaactggccgaagttaagaaacagttggaagaattgaaagaaaaggggtatatacgtccgagtacttccccttggggtgctcctgtgatttttgtagagaagaaagacaagacgaagaggatgtgcgtcgactacagagctctcaatgaagtcaccatcaaaaacaagtaccctcttccccggatcgatgatctgttcgatcagcttaaaggtgccactgtattctccaagattgatcttcgttccggatatcaccaattacgtattcgtgaagaagatattccgaagaccgcattcaccacgcgatacgggctgtatgaattcacggtgatgtcgttcggcttgaccaatgctcctgccttcttcatgaacttaatgaacaaagtgttcatggaatacttggataagttcgttgtggttttcatcgatgacattctgatatactcacaatcagaggaagaccatcagcaccatctccgtctggtgttgggaaagttgcggaaacatcaattgtatgccaagcttagcaagtgtgagttctggttgtccgaagtcaaattcttggggcacgtgatatctgctaaaggagttgctgtggaccccgaaacagtgaccgccgtcaccgattggaagcaacccaagacagtcactcagattcgcagtttcttgggtttggcaggatactaccggaggttcatcgagaacttctccaaaatcgctcgacccatgacacagttgttgaagaaagaagagaagtttgtgtggagcccgcaatgcgagaaggcgttccaaaccctcaaggaaaagctggtttcctcgccagtgttaatcttgccggatactcgcaaggacttcatggtgtattgtgatgcttcgcgccaaggattggggtgcgtgctcatgcaggacggtcatgtggtagcctatgcttcacgtcagctacgacctcatgaaggcaactaccctacgcacgacttgaagttagcagcggtggttcatgctctaaaaatctggcggcactatctcattgggaaccgctgtgaaatatatactgatcataagagtttgaaatacatcttcactcagtcagatctgaaccttcggcaaaggagatggttagaactcatcaaggattatgatgtgggaatacactatcatcctggtaaggccaacgtggttgccgacgctctaagtcgaaagagccactgcaacactctcaacgtccgaggcattccacccgagcttaatcaacagatggaagccctgaacctaagcatagttggtcgcggattcttggctgcgttggaagccaagcccaccttgctcgatcaaatccgcgaggctcagaagaatgatccggacatgcatggactcctcaagaatatgaaacagggtaaagccgctggtttcacagaggatgaacacggaaccttatggaacggaaagcgggtatgcgttccagatagcagagaacttaaacagctgatacttcaggaagctcacgaaagtccttattccattcacccgggcagtaccaagatgtacttagacttgaaggagaattactggtgggttagcatgaagcgggaaattgcagagtttgtggctctatgtgatgtgtgccagcgtgtcaaggcagagcaccagcgaccggccggacttctccaacctctccaagtgccggaatggaaatgggatgaaattgggatggatttcatcaccggccttccaaaaacccaaggtggatatgattctatatgggtaattgtggatcgactaacaaaggtagctcgattcattcctgtgaagaccacctatggagggaataaactagcggagctctacttcgctaggatcacagatggacagaccgagcgtctaaatcagatcttagaagatatgcttcgcgcatgtgtcctggacttcgggaagacttgggataagagtctcccctatgccgagttctcctacaataacagctatcaagccagcatacaaatggcaccatatgaagcgttgtacgggcgcaaatgccggacaccgctattgtgggaccaagttggagaaagccaagtgttcgggactgatatcctgagagaagctgaagctaaagtcagaatcattcgggataatctaaaggtggcacagtcccggcagaaaagttatgcagataaccgacgccgtgatctggaattcgcagtggatgattttgtgtaccttcgggtcacgccattgcgag

SEQ ID NO: 86132 - DNA, 150 bp, Oryza sativa
  Clone ID: PAT_MRT4530_85201C.1
atgggaggagattgggtcgagtggagaagtaagaaggaagaaagggagaaaagtcctgggcccacctgctcggccggtcagaccgaccctatgcagccggtcagaccgcctcggccacgccggtcagaccggccctatatgggcggttag

SEQ ID NO: 86133 - DNA, 7187 bp, Oryza sativa
  Clone ID: PAT_MRT4530_85202C.1
cgaggatctggagttccagatacctcagggaaccgtcgccacgctcgacctggggggagggggggcttgcgctcacacctcccgccgaggcttcaagccataaggcgagagcttctagccaccgtcccaacccacgaagcggctcggaaggcgcactggtcggaggtgaagctcacctttgaccagagcgaccatttgacagtgctcgctcgaggtgggaagttggccctcgtggtctccccgaccattcacaacgttaggatgaagcgagtcctggttgacgggggggccagcttgagcatcatctccccagccgccttcaatgcgctcaaggccccggggatgaagctccagccgtcgctgccgatcatcggcgtgactccgggacacacgtggcccctcggccacgtcgagctcccgataaccttcggcgactccaccaacttccgtaccgagcggatcgacttcgatgtggcggacctcaatctgccctacaacgcggtcctgggcagacctgcgttggtgaagttcatggccgccacccactacgcctacctccagatgaagataccgggccctagtggtcccatcaccgtctttggcgatgtcaaagtcaccctcgcctgcgcggagcagcgcgccgacaacctggcagtggccacggagccacaggccccggaggcctccgcgtcccacgcctccaagaagcgcctcacctcggctgacgaggaaagcgcgctcgtctccttcctgcgggcaaactccgacgtcttcgaatggaagccgtcggacatgcccggggtccctagggaggtgatcgagcaccgcctcgccatgcggctggatgcgcgacccgtccggcaaaaagtgcggtgtcaagccccggagcggcaggccttcatccgagaggaagtggcgcggctcctggaggctgactttatccgcgaggttatccatccggagtggttggcgaacccggtggtcgtcccgaaggccaacggtaagctccggatgtgcattgactacacggacctcaacaaggcatgccctaaagatcccttccctttaccacgcatagatcagatagtcgactccactgcgggatttactctcccgaaatcttcgccggcgcatcaatggagcccgagatcgccgcgccgatttccttcccctccggccgccctctctcactcccaaccctatttaaacgctccccgtgcctccctcctccgtttccgccgtccgccgctcgctctccccgtcggattcgagctcgcgccgtcgtcctctctctccgccgtcgccgccgagctccggttcgccgccgtcgtcgccccggacctcctcccgcttcggcgtcgcctccttcggcttcgccgcgttctcgtcgacctcgtccactcctccgtttcgcccgccgaccgccggagcaccatcgtcctcgtcgacccgagccgcgccgccgcctctctccgcttcggtcgccgttcccgtcgtcgccgtcaacccggggtgagccgaggaccgccatttcgtttcccccttccctcccctctctcggccgccgctccgccgtgcctatggccgcctatttatttaaattcccgcgttatcactgttttatttagccatgcctatttacctttgttacgaccttattattgttattgttattattaccttgttcaccctagaaccaacaaaaccccaactagtgaacactctactcatggtactggttttaggctgggctcggggtgcatggttttgatagtagcacctcggccatataaggaccggtcttcgggcctctgttgcaaagcactaccgtacttccacatgtctagtggggcaaatgaaggatacacgagctgcggcccggtagtcgagatgtcatggcacagggccggtgtcctgctgctaggggctcagtcctgcctgcctgtcccgggtgttccggccgtaggtgggattgggtcgatgtacacctctgatcagagtataatctattcgaatagccgcgccctcggttatgggcaagccgagcaatgtacccaaatggccggcagcgtcacccgtcgtggtttggacatgactggtttcgtcttggagctgcggggcatgtgcgtggtcctggggtatccacatggagtggactaccaggccaggccgcttccggagcaggagggggacgatgcagagccccacgctgcttgggaggtcactgcagtgatcctcgctggctctcccgagcggacttcgctgacagtcaccgcgggtggagactctttccccgccgcctgccagagcgccgctctcctcgccatcggcactcttcaccagcgctacccggacgagttgcagcactcgccctaccgctaccaccctcgtcgcggaggagcccgcgaccacgccaccttccgggatgctagctcggaggatgacgctaccatcgtgcacttggcgcgcatggtggaggcgtacgacgcggctcgtatcgacttccatcagatggtgcgccgtgggatggtcgagaacaacttgaagatcctggagctgcgtcaggagaacctgcagctcaagaaggacctagacgcggtggaggcgcagctgcatcagctcaagatcgcccagggagagatctgccgccccaagcgtcgccgcgtctgccgcagccagaagatcaccgcccgcaagagcacctccaggcctgagcttgttcgttagtccctggcgtggacttgcttcgtcgagacccctcgtgccgagcccgcgcccgtggttccccaggagggggaagcctccggcgttggtagcacggaggatgcgctgttgctcaccttccatggtgatgaccaggagaaatgctaacaccggtgatggcaaccaacctgaaggcagcaaccacaaccatcagggcaacccacctccacctcctcccccgcctccacccccaccaccagataccaacgccattctcacccaaatcctcgcccagcaggccaacatgatgactgctttcctccaccacctccaaaatccgccacaacttaatcctccaccaccacccccacaacactctaaactcgccgagtttctccgtatccgcccacctaccttctctagctccaacaaccccgtggatgcgttggattggttgcatgccgtggggaaaaagctagacactgtgcagtgcagcgatgaggagaaagtcatcttcgccgcccaccagctgcatggacccgcatctctatggtgggaccatttccaggctatgcagccggagggacagcctgttacttgggcccgcttcaccgccgctttccggagaacccatgtgcccgccggagtcgtggcccttaagaaaagagaattccgagagttgaagcaaggcaaccgctccgtgatggagtatttgcacgagttcaacaacctggcccgttacactccggaggatgtgcggaaagatgaggagaagcaagaaaagttcctggcaggaatggaccctgagctgtccgtccgtctagtctctggggactatccggatttccaacgtctggtggacaagagcatccgcttggaagccaagcacaaggaactggagtcgcacaagcgccgcttggcgaatttccgcaaccaacagggtgctaaccaaagggtccgctacaccaatccctatccagggggatcctcctcgcagcagcaacaacagcagcagcaacctcgctccgcgcctcgacctcaattcgtggtgcgcgtcccacagccgcagcagcaacagaatcaacaagggactcgagcgccccgtcctcctacgccaactgtgcagcctggtcaaggccgcagggacgcttcaggtccgcagcgtctgtgcttcaactgcttcgagcccgggcactttgcggataaatgcccgaagccaaggcgtcagcaaggccaagcgcctccccgccccaacaacggtggtaaggacgtcagtcggggtcgtgtgaaccatgtgacggccgaggacgtgctgacaactccagacgtcatcgttggtacgttcctcattcattccatccctgctaccattttgttcgtctctggagcttcccactcgtttatatctgtgccattcgtggggagaaatcagttgggggtacaatgtcttagaaaccctctgctcatctaccacccgtggaggggttatgccagcaaagtattatagccctgccgtccctatagaaattcaggggattccttttccctcggatctgatcctgctagacaccaagattttggatgtgatccttgggatgaattggttggctcaattccaaggagtagtggattgcgcgagacgcactgtcactctgtaccgagggccggaacaaccggttgttttctttgcacccccaacctcagtcagaagttcagaacttcatcagataggactgtcagaaatccccatcgtcagagagttcggagacgtgtttccggaagaactacctggtatgccgcctaaacgagagattgagttccggatagatcttgctccaggaaccactcctctgtacaagcgaccctaccgtatggcagcaaatgaactggccggagttaagaaacagttggaagagctgaaagaaaaggggtatatacgtccgagtacttccccctggggtgctcctgtgatttttgtggagaagaaagacaagacgaagaggatgtgcgttgactacagagctctcaatgaagtcaccatcaaaaacaagtaccctcttccccggatcgacgatctgttcgatcagcttaaaggtgccactgtattctccaagattgatcttcgttccggatatcaccaattacgtattcgcgaagaagatattccgaagaccgcattcaccacgcgatacggactgtttgaattcacggtgatgtcgttcggtttaaccaatgcccctgccttcttcatgaacttaatgaacaaagtgttcatggaatacttggataagtttgtggtggttttcattgatgacattctgatatactcacaatcagaggaagaccatcagcaccatctccgtctggtattgggaaagttgcgggaacatcaattatatgccaaacttagcaagtgtgagttctggttgtccgaagtcaaattcttagggcacgtgatatctgctaaaggagttgctgtggaccccgaaacagtgaccgccgtcaccgattggaagcaacccaagacagtcactcaagttcgcagtttcttaggtttggcaggatactaccggaggttcatcgagaacttctccaaaatcgctcgacccatgacacagttgttgaagaaagaagagaaatttgtgtggagcccgcaatgcgagaaggcgtttcaaactctcaaagaaaagttggtttcctcgccagtgttaatcttgccggatactcgcaaggacttcatggtgtattgtgacgcttcgcgccaaggattggggtgcgtactcatgcaggatggtcatgtggtggcctatgcctcacgccagctacggcctcatgaaggcaactaccctacccatgatttggagttagcagcggtggttcatgctctaaaaatctggcggcattatctcattgggaatcgctgtgaaatatatactgatcataagagtttgaaatacatcttcacccagtcggatctgaatcttcggcaaaggagatggttagaactcatcaaagattatgatgtgggaattcactatcatcctggtaaggccaacgtggttgccgacgctctaagtcggaaaagccactgcaacactcttaacgtccgtggcattccactcgaacttaatcaacagatggaagccctgaacctaagcatagttggtcgcggattcttgactacgttggaagccaagcccaccttgctcgatcaaatccgcgaggctcagaagaatgatccagacatgcatggactcctcaagaatatgaaacagggtaaagccgctggtttcacagaggatgaacacggaaccctatggaacggaaatcgacgtgtcaaggcagagcaccaacgaccggccggacttctccaacctctccaagtacctgaatggaaatgggatgaaattgggatggatttcatcaccggacttccaaaaacccaaggtggatatgattctatatgggtagttgtggatcgattaaccaaggtagctcgattcattcctgtgaagaccacctatggagggaacaaactagccgagctctacttcgctaggatcgtaagtctccatggcgttcccaagaaaatcgtatctgataggggaagccaattcacctctcacttttggaagaagctccaagaagagctgggtacccgattaaacttcagcaccgcgtatcacccgcagacagatgggcagaccgagcgtctaaatcagatcctagaagatatgcttcgcgcatgtgtcctagatttcgggaagacctgggataagagtctcccctatgccgagttctcctacaataacagctaccaagccagcatacaaatggcgccttatgaagcgttgtatgggcgcaaatgccggacaccgctcctgtgggaccaagttggggaaagccaagtgttcgggactgatatcctgagagaagctgaagcgaaagtcagaaccattagggataatctaaaggtggcacagtcccagcagaaaagttatgcagataaccgtcgccgtgacctggaattcgcagtggatgattttgtgtaccttcgggtcacgccattgcggggtgtacacaggtttcagacaaaggggaagctcgcacctcggtatgtgggtcctttccgtatcgttgctcgacgcggagaagtcgcttaccagttggagctgcccgcctccttgggcaacgtgcatgatgtgttccatgtgtcgcaactcaagaaatgccttctagtgccatccgagcaggccgactcagagcaaattgaagttcgcgaagacttgacctacgtggagaggccagtgaagatcctggacaccatggagcgcaggaccaggaaccgggtaatccgtttttgcaaggtccagtggagcaaccacgccgaagaagaagctacctgggagcgcgaagacgagctgaaggcagcccatcccgacctcttcgacagttcttccgaatctcggggtcgagattccgtt

SEQ ID NO: 86134 - DNA, 5466 bp, Oryza sativa
  Clone ID: PAT_MRT4530_85203C.1
atgtcatggcacagggccggtgtcctgctgctaggggctcagttctgcctgcctgtcccgggtgttccggccgtaggcaggattgggtcggtactcttgtctatggctaggatgggttggaaactatgtcacgtcttccgtctatataccgtggtgatggccggcagcgtcacccgtcgtggtttggacatgactggcttcgtcttggagttgcggggcatgtgcgtggccctggggtatccacacggagtggactaccaggccaggccgctcccggagcaggagggtgacgatgcggagccccgcgctggttgggaggtcactgcagtgatcctcgctggctcttctgagcggacttcgctgacagtcaccgcgggtggcgattccttccccgccgcttgccagagcgccgctctcctcgccatcggcactcttcaccagcgctacccggacgagttgcagcactcgccctaccgctaccaccctcgtcgcggaggagcccgcgactacgccaccttccgggatgctagctcggaggatgacgctaccatcgtgcacctggcgcgcatggtggaggcgtacgacgcggctcgtatcgacttccatcagatggtgcgccgtgggatggtcgagaacaacatgaagatcctggagctgcgtcaggagaacctgcagctcaagaaggacctcgacgcggtggaggcgcagctgcatcagctcaagatcgcccagggagagatctgccgccccaagcgtcgccgcgtctgccgcagccagaagatcaccgcccgcaagagcacctccaggcccgagcttgttcgtcagtccctggcgtggacttgcttcgtcgagacccctcgtgccgagcccgcgcccgtggttccccaggagggggaagcctccggcgttggtagcacggaggttgtgtggggcatggttatgccgatggtgacgaccaggagaaatgctaacaccggtgatggcaaccaacccgaatgcagcaaccacaaccaccagggcaacccacctccacctcctcctcctcctccaccaccaccaccagacaccaacgccattctcacccaaatcctcgcccagcaagccaacatgatgaccgctttcctccaccacctccaaaacccgccacaacaaaatgctccaccaccacccccacaacactctaaactcgccgaattcctccgcatccgcccacctaccttctctagctccaacaaccccgtggatgctttggattggttgcatgccgtggggaaaaagttaggcactgtgcagtgcagcgatgaggagaaagtcatcttcgccgcccaccagctgcaaggacccgcatctctatggtgggaccacttccaggctacgcagccagagggacagcctattacttgggctcgcttcaccgccgctttccggagaacccatgtgcccgccggagtcgtggcccttaagaaaagggaattccgagagttgaagcaaggcaaccgctccgtgatggagtatttgcatgagttcaacaatctggcccgttacgctccggaggatgtgcgggaagatgaggagaagcaagaaaagttcttggcaggaatggaccccgagctgtccgtccgtctagtctctggggattatccggattttcaacgactggtggacaagagcatccgcttggaagctaagcacaaggagctggagtcgcacaagcgtcgcttggcgaatttccgcaatcaacagggtgctaaccaaagggtccgctacaccaatccctatccagggggatcctcctcgcagcagcaacaacagcagcagcaacctcgctccgcgccccgacctcaattcgtggtgcgcgtcccacagccgcagcagcagcagaatcagcaagggactcgtgcgccccgtcctcctacgccaactgtgcagcctggccaaggccgcagggacgctcaaggtcagcagcgtctatgcttcaactgcttcgagcccgggcactttgcggataaatgcccaaagccaaggcgtcagcaaggccaagcgcctccccgctccaacaacggcgggagggatgtcattcggggtcgtgtgaatcacgtgacggccgaggacgtgctgacaactccggacgtcatcgttggtacgttcctcgttcattccatccctgctacaattttgttcgactctggagcttcccactcgtttatatctgtgccatttgtggggagaaatcagttgggggtagaaaggcttaggaaccctctgctcatcaccacccctggaggggttatgacagcaaagtattatagccctaccgtccctatagaaattcaggggattccttttccctcggatctgattctgctagacaccaagaacttggatgtgatccttgggatgaattggttggctcaattccaaggagtagtggattgcgcgagacgcacggtcactctgtaccgagggccggaacaaccggttgttttctttgcacccccaacctctgtcagaagttcagaacttcatcagatagaactgtcagagattcccatcgtcagagagttcggagacgtgtttccggaagaactacctggtatgccgcccaagcgagagattgagttccggatagatcttgctccaggaaccactcctctgtacaagcgaccctaccgtatggcagcaaatgaactggccgaagtcaagaaacagttggaagagttgaaagaaaaggggtatatacgtccgagtacttccccatgggatgctcctgtgatttttgtagagaagaaagacaagacgaagaggatgtgcgtcgactacagagctctcaatgaagtcaccatcaaaaacaagtaccctcttccccggatagatgatctgttcgatcagcttaaaggtgccactgtattctccaagattgatcttcgttccggatatcaccaattacgtattcgtgaagaagatattccgaagaccgcattcaccacgcgatacgggctgtatgaattcacggtgatgtcgttcggtttgaccaatgcacctgccttcttcatgaacttgatgaacaaagtgttcatggaatacttggataagtttgttgtggttttcattgatgacattctgatatactcacaatcagaggaagaccatcagcaccatctccgtctggtattgggaaagctgcgggaacatcaattgtatgccaaacttagcaagtgtgagttctggttgtccgaagtcaaattcttagggcacgtgatatctgctaaaggagttgctgtggatcccgaaacagtgatcgccgtcaccgattggaagcaacccaagacagtcactcaaattcgcagtttcttaggtttggcagggtactatcggagattcatcgagaacttctccaaaatcgctcgacccatgacacagttgttgaagaaagaagagaaatttgtgtggagcccgcaatgcgagaaggcgtttcaaactctcaaggaaaagctggtttcctcgccagtgttaatcttgccggatactcgcaaggacttcatggtgtattgtgacgcttcgcgccaaggattggggtgcgtgctcatgcaggacggtcatgtggtagcctatgcctcacgtcagctacgacctcatgaaggcaactaccctacccatgatttggagttagccgcggtggttcatgctctaaaaatctggaggcactatctcattgggaatcgctgtgaaatatataccgaccataagagtttgaaatacattttcacccagtcggatctgaatcttcggcaaaggagatggttagaactcatcaaggactatgatgtgggaattcactatcatcctggtaaggccaacgtggttgccgacgctctaagtcgaaagagccattgcaacactcttaacgtccgtggcattccacccgaacttagtcaacagatggaagccctgaacctaagcatagttggtcatggagtcttggctgcgttggaagccaagcctaccttgctcgatcaaatccgcgaggctcagaagaatgatccggacatgcatggactcctcaagaatatgaaacagggtaaagccgctggtttcacagaggacgaacacggaaccctatggaacggaaatcgggtatgcgttccagatgacagagaacttaaacagctgatactacaggaagctcacgaaagtccttattccattcacccgggcagtacaaagatgtacctagacttgaaggagaaatactggtgggttagcatgaagcgggagattgcagagttcgtggccctgtgtgatgtgtgccagcgtgtcaaggcagagcaccagcgaccggccggacttctccaacctctccaagtaccagaatggaaatgggatgaaattgggatggatttcatcaccggacttccaaaaacccaaggcggatatgattctatatgggtagttgtggatcgattaaccaaggtagctcgatttattcctgtgaagaccacctatggagggaacaaactagcggagctctacttcgctaggatcgtgagtctccatggcgttcccaagagaatcgtatctgataggggaagccaattcacctctcacttttggaagaagctccaagaagagctgggtactcgattgaatttcagcaccgcctatcacccgcagacagatggacagaccgagcgtctaaatcagatcctagaagatatgcttcgcgcatgtgtcctagatttcgggaagacctgggataagagtctcccctatgccgagttctcctacaacaacagttatcaagccagcatacaaatggcaccttatgaagcgttgtatgggcgcaaatgccggacaccgctcttgtgggaccaagttggagaaagccaagtgttcgggactgatatcctgagagaagctgaagctaaagtcagaatcattcgggataatctaaaggtggcacagtcccggcagaaaagttatgcagataaccgtcgccgtgacctggaattcgcagtggatgattttgtgtaccttcgggtcacgccattgcgaggtgtacacaggtttcagacaaaagggaagctcgcacctcggtatgtgggtcctttccgtatcgttgctcggcgcggagaagtcgcttaccagttggagctgcccgcctccttgggcaacgtgcatgatgtgtttcatgtgtcgcaactcaagaaatgccttcgagtgccatccgagcaggccgactcagagcaaattgaagttcgcgaagatttgacctacgtggagaggccagtgaaaatcctggataccatggagcgcaggaccaggaaccgggtaatccgtttttgcaaggtccagtggagcaaccacgccgaagaagaagctacctgggagcgtgaagacgagctgaaggcagcccatccagatctcttcgccagttcttccaaatctcggggtcgagattccgtttaa

SEQ ID NO: 86135 - DNA, 294 bp, Oryza sativa
  Clone ID: PAT_MRT4530_85204C.1
atgcggcccaagacgggttcgggtttaatacctcctgtctccctctacatggtcccgcgaccagggagggcaccgtcgtcctgcaacttcttcatggacgcggtggttgagatgagaatgacaacgattccgacatcagaagttccgatcgattacatgagttcatttaagcagaagtcaggggctactgtcaaggttacggataaggacctagggcatcgaatctcaccgcgaacacattcaccacagcctacgaagtcggagcgcacaggagccaagtcgccgggagatcta

SEQ ID NO: 86136 - DNA, 5283 bp, Oryza sativa
  Clone ID: PAT_MRT4530_85205C.1
atggaggtggatgaagtcgggggtcgatggacattctccagggcaaatgaaggctacacgagctgcggcccggtagtcgagatgtcatggcacagggccggtgtcctgctgctaggggctcagtcctgcctgcctgtcccgggggttccggccgtaggtgggattgggtcggtactcttgtctatggctaggatgggttggaaactatgtcacgtcttccgtctgtatatcgtggtgatggccggcagcgtcacccgtcgtggtttggacatgactggtttcgtcttggagctgcggggcatgtgcgtggccctggggtatccacacggagtggactaccaggccaggccgcttccagagcaggagggtgacgatgcagagccccacgctgcttgggaggtcactgcagtgatcctcgctggctctcccgagcggacttcgctgacagtcaccgcgggtggagactccttccccgccgcttgccagagcgccgctctcctcgccatcggcactcttcaccagcgctacccggacgagttgcagcactcgccctaccgctaccaccctcgtcgcggaggagcccgcgaccacgccaccttccgggatgctagctcggaggatgacgctaccatcatgcacttggcgcgcatggtggaggcgtacgacaaggctcgtatcgacttccatcagatggtgcgccgtgggatggtcgagaacaacctgaagatcctggagctgcgtcaagagaacctgcagctcaagaaggacctggacgcagtggaggcgcagctgcatcagctcaagatcgcccagggagagatctgccgccccaagcgccgccgcgtctgccgcagccagaagatcaccgcccgcaagagcacctccaggcccgagcttgttcgtcagtccctggcgtggacttgcttcgtcgagacccctcgtgccgagcctgcgcccgtggttccccaggagggggaagcctccggcgttggtagcacggaggatatggtgatgaccaggagaagtgctaacaccggtgatggcaaccaacctgaaggcagcaaccacaaccatcagggcaacccacctccacctcctcctccgcctccaccaccaccaccagacaccaacgccattctcacccaaatcctcgcccagcaggccaacatgatgactgctttcctccaccacctccaaaatccgccacaacttaatgctccaccaccacccccacaacactctaaactcgccgagtttctccgcatccgcccacctaccttctctagctccaacaaccccgtggatgcgttggattggttgcatgccgtgggaaaaaagctagacactgtgcagtgcagcgatgaggagaaagtcatcttcgccgcccaccagctgcagggacccgcatctctatggtgggaccatttccaggctacgcagccagagggacagcctattacatgggctcgcttcaccgccgctttccgaagaacccatgtgcccgccggagtcgtggctcttaagaaaagggaattccgagagttgaagcaaggcaaccgctccgtgatggagtatttgcacgagttcaacaacctggcccgttacgctccggaggatgtgcgggaagatgaggagaagcaagagaagttcctggcaggaatggaccctgagctgtccgtccgtctagtctccagggattatccggatttccaacatctggtggacaagagcatccgcttggaagccaagcacaaggaactggagtcgcacaagcgccgcttggcgaatttccgcaaccaacagggtgctaaccaaagggtccgctacaccaatccctatccagggggatcctcctcgcagcagcaacagcagcagcagcaacctcgctccgcgcctcgacctcaattcgtggtgcgcgtcccacagccgcagcagcagcagaatcaacaagggactcgtgcgccccgtcctcctccaccgattgtgcagcctggtcaaggccgcagggacgctcaaggtccgcagcgtctgtgcttcaactgcttcgagcccgggcactttgcggataaatgcccgaagccaaggcgtcagaaaggccaagcgcctccccgccccaacaatggtggtaaggacgtcattcggggtcgtgtgaatcatgtgacggccgaggacgtgctgacaactccagacgtcatcgttggtacgttcctcattcattccatccctgctaccattttgttcgactctggggcttcccactcgtttatatctgtgccattcgtggggagaaatcagttgggggtagaaaggcttagaaaccctctgctcatcaccacccctggaggggttatgacagcaaagtattatagccctgccgtccctatagaaattcaggggattccttttccctcggatctgattctgctagacaccaagaacttggatgtgatccttgggatgaattggttggctcaattccaaggagtagtggattgcgcgagacgcactgtcactctgtaccgagggccggaacaaccggttgttttctttgcacccccaacctcagtcagaagttcagaacttcatcagatagaactgtcagaaattcccatcgtcagagagttcggagacgtgtttccggaagaactacctggtatgccgcctaagcgagagattgagttccggatagatcttgcttcaggaaccgctcctctgtacaagcgaccctaccgtatggcagcaaatgaactggccgaagttaagaaacagttggaagagttgaaagaaaaggggtatatacgtccgagtacttccccctggggtgctcctgtgatttttgtggagaagaaagacaagatgaaaaggatgtgcgttgactacagagctctcaatgaagtcaccatcaaaaacaagtaccctcttccccggatcgatgatctgttcgatcagcttaaagaggaagaccatcagcaccatctccatctggtattgggaaagctgcgggaacatcaattgtatgccaaacttagcaagtgtgagttctggttgtccgaagtcaaattcttagggcacgtgatatctgctaaaggagttgctgtggaccccgaaacagtgaccgccgtcaccgattggaagcaacccaagacagtcactcaagttcgcagtttcttaggtttggcaggatactacaggagattcatcgagaacttctccaaaatcgctcgacccatgacacaattgttgaagaaagaagagaaatttgtgtggagcccgcaatgcgagaaggcgttccaaactctcaaagaaaagctggtttcctcgccggtgttaatcttgccggatactcacaaggacttcatggtgtattgtgacgcttcgcgccaaggattggggtgcgtgctcatgcaggatggtcatgtggtggcctatgcctcacgccagctacggcctcatgaaggcaactaccctacccatgatttggagttagccgcggtggttcatgctctaaaaatctggcggcactatctcattgagaatcgctgtgaaatatatactgatcataagagtttgaaatacatcttcactcagtcggacctgaatcttcgacaaaggagatggttagaactcatcaaggattatgatgtgggaattcactatcatcctggtaaggccaacgtggttgccgacgctctaagtcaaaaaagccattgcaacactcttaacgtccgtggcattccacccgaacttaatcaacagatggaagccctgaacctaagcatagttagtcgcggattcttggctgcgctggaagccaagcccaccttgctcgatcaaatccgtgaggctcagaagaatgatccagacatgcatggactcctcaagaatatgaaacagggtaaagccgctggtttcacagaggatgaacacgggaccctatggaacggaaatcgagtatgcgttccagataacagagaacttaaacagttgatacttcaggaagctcacgaaagtccttattccatccaccctggcagcacgaagatgtacttagacttgagggagaaatactggtgggttagtatgaagcgggaaattgcagagttcgtggccctttgtgatgtgtgccagcgtgtcaaggcagagcaccaacgaccggccggacttctccaacctctccaagtacctgaatggaaatgggatgaaattgggatggatttcatcaccggacttccaaaaacccaaggtggatatgattctatatgggtagttgtggatcgattaaccaaggtagctcgattcattcctgtgaagaccacctatggagggaacaaactagccgaactctacttcgctaggatcgtaagtctccatggcgttcctaagaaaatcgtatctgataggggaagccaattcacctctcacttttggaagaagctccaaaaagagctgggtacccgattaaactttagcaccgcgtatcacccgcagacagatgggcagaccgagcgtctaaatcagatcctagaagatatgcttcgcgcatgtgtcctagatttcgggaagacctgggataagagtctcccctatgccgagttctcctacaacaacagctatcaagccagcatacaaatggcaccttatgaagcgttgtatgggcgcaaatgccggacaccgctaatgtgggatcaagttggggaaagccaagtgttcgagactgatatcctgagagaagctgaagctaaagtcagaaccattcgggataatctaaaggtggcacagtctcggcagaaaagttatgcagataaccgtcgccgtgacctggaattcgcagtggacgattttgtatatcttcgggtcacgccattgcgaggtgtacacaggtttcggacaaaagggaagctcgcacctcggtatgtgggtcctttccgtatcgttgctcgacgcggagaagtcgcttaccaattggagctgcccgcctccttgggcaacgtgcatgatgtgttccatgtgtcgcaactcaagaaatgccttcgagtgccatccgagcaggccgactcagagcaaattgaagttcgcgaagacttgacctacgtggagaggccaatgaagatcctggacaccatggagcgcaggaccaggaaccgggtaatccgtttttgcaaggtccagtggagcaaccacgccgaagaagaagctacctgggagcgcgaagacgagctgaaggcagcccatccagatctcttcgccagttcttccgaatctcggggtcgagattccgtttaa

SEQ ID NO: 86137 - DNA, 6041 bp, Oryza sativa
  Clone ID: PAT_MRT4530_85206C.1
atggcggccgggactcccgcgcctgtttccccctcctccggccaccccctccctctcttaaccctatataaaccctccccgtgcctccctccaccgtttccgccactcgccgctctctctccccgccggaatcgagctcgcgccatcgctctctctctccgccgtggccgccgagctccggtccgccgccgttgtcgccccggaccacctctcccctcggcgtcgcctccttcggcttcgccggatcctcgccgacctcgtccacccctccgtttcgcacgccgaccgccggagcaccgtcgaccccgtccacccgagccgcgccgccgccttcctccgctccggtcgtcgttcccgtcgtcgccgtcgacctggggtgagccgtggaccgccgattcgtttcccccttccctcccctctctcggccgccgctccgccgtacatatggccgccgccggcgaccataggggcgcgggcgcgccgcctcccgccgctgcgccggcgtggccgccttcgggcgcgccccgcggctgccgtgtggggcccggctgtcagccgcccacgcccttaggtgcggctgacgcgtgggacccacggcgccggccggtgagagcccgggtgcgcccggtccaccgtggtcgtacctcgggtactataaggattaagctcgggcctctgttgcaaagcactaccgtacttccacatgtctagtggggcaaatgaaggctacacgagctgcggcccggtagtcgagatgtcatggcacagggccggtgtcctgctgctgggggctcagtcctgcctacctgtcccgggggttccggccgtaggtggggttgggtcgatgtacacctctgatcagagtataatctattcgaatagccgcgccctcggttatgggcaagccgagcaatgtacccaaatggccggcagcgtcagccgtcgtggtctggacctgactagcttcgtcttggagctgcggggcatgtgcgttgccctggggtatccgcatggagtggactaccagggcaggccgctcccggagcaggagggtgatgatgcagagccccacgctgcttgggaggttactgcagtgatcctcactggctcacccgagaggacttcgttggcagtcaccgcgggtggagattctttctccgccgcttgccagaacgccgctctcctcgccatcggcactcttcaccagcgctacctggacgagttgcagcactcgccctaccgctaccaccctcgccgcggaggagcccgcgactacgccaccttccgggatgctagctcggaggatgacgctaccatcatgcacctggcgcgcatggtgtaggcgtacgacgcggctcgtatcgacttccatcagatggtgcgccctgggatggtcgagaacaacatgaagatcttggagctgcgtcaggagaatctgcagctgaagaaggacctagacgtagtggaggcgcagctgcatcagctcaagatcgcccagggagaggtctgtcgccccaagcgctgccgtgtctgccgcagccagaagatcaccgcccgcaagagtacctccaggcccgagcttgttcgtcagtccctggcgtggacttgcttcgttgagacccctcgtgccgagcccgcgcccgtggttcctcaggagggggaagcctccggcgttggtagcacggaggatgcgctgttgctcaccttccatggtgacgaccaggagaagtgctgccaccggtgatggcaaccaacctgaaggcagcaaccacaacaaccatggcagcccacctccacctcctccaccaccaccaccagacaccaacgccattctcacccaaatcctcgcccagcaggccaacatgatggctgttttcctccaccacatccaaaatccgccacatcataatgctccaccaccacccccacaacactctaaactcgccgagttcctccgcatccgtccaccaaccttctctagctccaataaccctgtggatgcgttggattggttgcatgccgtggggaaaaatctagacaccgtgcagtgcagcgatgaggagaaagtcgtcttcgccgcccaccaactgcaggggcccgcatctctatggtgggaccatttccaggctacacagccagaggggcagcctattacttgggcccgcttcaccgccgccttccggaggacccatgtgcccgccggagtcatggcccttaagaaaagggaatttcgagagttgaagcaaggcaaccgctccgtgatggagtatttgcatgagttcaacaacctggcccggtacgccccggaggatgtacgggaagatgaggaaaagcaggagaagttcttggcaggaatggatcctgagctgtccgtccgtctagtctccggggactatccggatttccaacgtctggtggacaagagcatccgcttggaagccaagcacaaggaactggagtcgcacaagcgtcgcttggcgaatttccgcaatcaacagggagctaaccaaaggatccgctacaccaatccctatccagggggatcctcctcgcagcagcaacaacagtagcagcaacctcgctccgcgccccgacctcaattcgtggtgcgcgtcccacagccgcagcaacagcagagccagcaagggacccatgcgccccgtcctcctacgccagccgcgcagtctggtcaaggccgcagggacgttcaaggtccgcagcgtttgtgcttcaactgcttcgagcccgggcactttgcggacaaatgcccaaagtcgaggcgccagcaaggccaagcgcctccccgctccaacaacggtggtaaggatgtcattcggggtcgtgtgaaccacgtgacggccgaggacgtgctgacaactccagacgtcatcgttggtacgttcctcattcattccatccctgctaccattttgttcgactctggagcttcccactcgtttatatctgtgccattcgtgggaagaaatcagttgggggtagaaaggcttaggaaccctctcctcatcaccacccctggaggggttatgacagcaaagtattatagtcctgccgtccctatagaaattcaggggattccttttccctcggatctgattcttctagacaccaagaacttggatgtgatccttgggatgaattggttggctcaattccaaggagtagtggattgcgcgagacgcactgtcactctgtaccgagggccggaacaaccggttgttttctttgcacccccaacctctgtcagtagttcagaacttcatcagataggactgtcagaaatccccatcgtcagagagtttggagacgtgtttccggaagaactacccggtatgccgcccaagcgagagattgagttccggatagatcttgctacaggaaccactcctctgtacaaacgaccctaccgtatggcagcaaatgaactggccgaagttaagaaacagttggaagagttgaaagaaaaggggtacatacgtccgagtacttccccctggggtgctcctgtgatttttgtggaaaagaaagacaagacgaagaggatgtgcgttgactacagagctctcaatgaagtcaccatcaaaaacaagtaccctcttccccggatcgatgatctgttcgatcagcttaaaggtgccacggtattctccaagattgatcttcgttccggatatcaccagttgcgcatccgtgaagaagatattccgaagaccgcattcaccacgcgatacggactgtatgaattcacggtgatgtcattcggtttaaccaatgctcctgccttcttcatgaacttaatgaacaaagtgttcatggaatacttggataagtttgttgtggttttcattgatgacattctggtatactcacaatcagaggaagaccatcagcaccatctccgtctggtattgggaaagttgcgggaacatcaattgtatgccaaacttagcaagtgtgagttctggttgtccgaagtcaagttcttagggcacgtgatatccgctaaaggagttgctgtggaccccgaaacagtgaccgccgtcactgattggaagcaacccaagacagtcactcaaattcgcagtttcttaggtttggcaggatactaccggaggttcatcgagaacttctccaaaatcgctcgacccatgacacagttgttgaagaaagaagagaaatttgtgtggagcccgcaatgcgagaaggcgttccaaactctcaaagaaaagctggtttcctcgccagtgttaatcatgccggatactcgcaaggacttcacggtgtattgtgacgcttcgcgccaaggattggggtgcgtgctcatgcaggacggtcatgtggtggcctatgcctcacgccagctacggcctcatgaaggcaactaccctacccatgatttggagttagccgcggtggttcatgctctaaaaatctggcggcactatctcattgggaatcgctgtgaaatatatactgatcataagagtttgaaatacatcttcacccagtcggatctgaatcttcggcagaggagatggttagaactcatcaaggattatgatgtgggaattcactatcatcctggtaaggccaacatggtcgccgacgctctaagtcgaaagagccattgcaacactcttaacgtccgtggcattccacccgaacttaaccaacagatggaagccctgaatctaagcatagtgggtcgtggattcttggctgcgttggaagccaagcccaccttactcgatcaaatccgcgaggctcagaagaacgacccggacatgcgtggactcctcaagaatatgaaacagggtaaagccgctggtttcacagaggatgaacacggaaccctatggaacggaaatcggcgtgtcaaggcagagcaccaacgaccggccggacttctccaacctctccaagtaccagaatggaaatgggatgaaattgggatggatttcatcaccggactttcaaaaacccaaggtggatacgattctatatgggtagttgtggatcgattaaccaaggtagctcgatttattcctgtgaagaccacctatggagggaacaaactagccgagctctacttcgctaggatcgtgagtctccatggcgttcccaagaaaatcgtatctgataggggaagccaattcacctctcacttttggaagaagctccaagaagagctgggtacccgattaaatttcagcaccacgtatcacccgcagacagatggacagaccgagcgtctaaatcagatcctagaagatatgcttcgcgcatgtgtcctagatttcgggaagacctgggataagagtctcccctatgccgagttctcctacaataacagctaccaagccagcatacaaatggcaccctatgaagcgttgtatggatgcaaatgccggacactgctattgtgggaccaagttggggaaagccaagtgttcgggactgatatcctgagagaagctaaagctaaagtcagaaccattcgggataatctaaaggtggcccagtctcggcagaagagttatgcagacaaccgacgccgtgacctggaattcgcagtggatgactttgtgtatcttcgggtcacgcccctgcgaggtgtacacaggtttcagacaaaggggaagctcgcacctcggttcgtgggtcctttccgtatcattgctcggtgcggagaagtcgcttaccagttggagctgcccgcctccttgggcaacgtgcatgatgtgttccatgtgtcgcaactcaagaaatgtcttcgagtgccatccgagcaggccgactcagagcaaattgaagttcgcgaagacttggcctacgtggagaggccagtgaaaatcctggacaccatggagcgcaggaccaggaaccgggtaatccgtttttgcaaggtccaatggagcaaccacgccgaggaagaagctacctgggagcgtgaagacgagctgaaggcagcccatcccgatctcttcgccagttcttccgaatctcggggtcgagattccgtt

SEQ ID NO: 86138 - DNA, 245 bp, Oryza sativa
  Clone ID: PAT_MRT4530_85207C.1
acgtaccggcaccgaatatgcggaacgacccacgcgtccaccgcactcttggatggccaagcgcgctctcggccgatgggctcgcggccatcgatgccgcgcttcgcaacgccgcaagggggctaagatcccggccgttccaaggcagacaggcagggaagccgtccgcccctccgctggatacgcccaggaacgccgccggcgcctgagaccgtcccacgcgcgcgaaagtgacggattttttc

SEQ ID NO: 86139 - DNA, 6051 bp, Oryza sativa
  Clone ID: PAT_MRT4530_85208C.1
aatggagccgagatctccgcggccgtttcctccctctccggccgcgctctccccctctcggcgctatatatttgctccccgtgcctctctcctccgtttccgccgctcgccgctcgctctcgccgtcggattcgtgctagcgccgtcctcctctctctccgccgtcgccgccaaccttcggttcgccgccgtcgtcgctccggacttcctcccgactcggcgccacctccatcggcttcgccgcgtcgtcgtcgaccccgtccgctcctccgtttcgcccgccgaccgccggagcaccgtcgccctcgtcatcccgaaccgcgccgccgcctctcgccgcttcggtcgtcgtttccgccgccctcgtcgtcccggggtgagccgaggaccgccgttcgctttccctcttctctccgctctctcgggcgccgctccgccgcgccggtggtcgccggcggtgaccatcggggagcgggtgcgccgcctcccgtcggccgtgccggcgaggccgccttcggccgcctcccgcggctgccaggtggggcccggccgtcagccgcccgcgcccgcgggtgcggctgacgcgtgggacccacggcgccgaccgccgccagccgcgtgctcccggtccaccgtggacccacctcggccatataaggaccggtcttcgggcctctgttgcaaagcactaccgtacttccacatgtctagtggggcaaatgaaggctacacgagctgcggcccggtagtcgagatgtcatggcagagggttggtgccctgctgctaggggctcagtcctgcctgcctgtcccggaggttccggccgtaggcgggattgggtcgatgtacacctctgatcagagtttaatctattcgaatagccgcgccctcggttatgggcaagccgagcaatgtacccaaatggccggcagcgtcacccgtcgtggtttgcacatgactggcttcgtcttggagctgcggggcatgtgcgtggtcttggggtatccacatggagtggattaccaggccaggccgctcccggagcaggagggtgaggatgcagagccccacgctggttgggaggtcactgcagtgatcctctctggctctcccgagcggacttcgctggcagtcaccgcgggtggagattccttccccgccgcttgccagaacgccgccctcctcgccatcggcacccttcaccagcgctacccggacgagttgcagcactcgccctaccgctaccaccctcgtcgcggaggagcccgcgacttcgccaccttccgggatgctagctcggaggatgacgctaccatcgtgcacctggcacgcatggtggaggcgtacgacgcggctcgtatcgacttccatcagatggtgcgccgcggtatggtcgagaacaacatgaagatcctggagctgcggcaggagaacctgcagctcaagaaggacctcgacgcggtggaggcgcagctgcatcagctcaagatcgcccagggagaggtctgccgccccaagcgtcgccgcgtctgccgcagccagaagatcaccgcccgcaagagcacctccaggcctgagcttgttcgtcagtccctggcgtggacctgcttcgtcgagacccctcgtgccgagcccgcgcccgtggttccccaggagggggaagcctccggcgttggtagcacggaggatgcgctgttgctcaccttccatggtgacgaccaggagaaatgctgttaccggtgatggcaatcaacctgaaggcagcaaccacaaccaccagggcaacccacctccacctcttccttcggcctccgccaccaccaccagacaccaacgccattctcacccaaatcctcgcccagcaagccaacatgatgactactttcctccaccacctccaaaatccgccacaacagaatgctccacctccacctccccaacactctaaactcgccgagttcctccgcatccgcccacctaccttctctagctccaacaaccccgtggatgcgttggattggttgcatgccgtggggaaaaagctggacactgtgcagtgcagtgatgaagagaaagtcatcttcgccgcccaccagctgcagggacccgcatctctatggtgggaccacttccaagctacgcagccagagggacagcctattacatgggctcgcttcaccgccgctttccggagaacccatgtgcccgccggagtcgtggccctcaagaaaagggaattccgagagttgaagcaaggcaaccgctccgtgatggagtatttgcatgagttcaacaacctggcccgttacgctccggaggatgtgcgggaagatgaggagaagcaagagaagttcctggcaggaatggaccccgagctgtccgtccgtctagtctctggggactatccggatttccaacgtctggtggacaagagcatccgcttggaagccaagcacaaggaactggagtcgcacaagcgccgcttggcgaatttccgcaatcaacagggtgctaaccaaagggtccgctacaccaatccctatccagggggatcctcctcgcagcagcaacaacagcagcagcaacctcgctccgcgcctcgacctcaattcgtggtgcgcgtcccacagccgcagcagcagcagaatcaacaagggactcgtgcgccccgtcctcttacgccagccgtgcagcctggtcaaggccacagggacgctcaaggtcagcagcgtctgtgcttcaactgctttgagcccgggcactttgcggataaatgcccgaagccaaggcgtcagcaaggccaagcgcctccccgctccaacaacggtggcaaggacgtcattcggggtcgtgtgaatcacgtgacggccgaggacgtgctgacaactccagacgtcatcgttggtacgttcctcgttcattccatccctgctaccattttgttcgactctggagcttcccactcgtttatatctgtgccattcgtggggagaaatcagttgggggtagaaaggcttaggaaccctctgctcatcaccacccctggaggggttatgacagcaaagtattatagccctgccgtccctatagaaattcaggggattccttttccctcggatctgattctgctagacaccaagaagttggatgtgatccttgggatgaattggttggctcaattccaaggagtagtggtttgcgcgagacgcactgtcactctgtaccgagggccggaacaaccggttgttttctttgcacccccagcctctgtcagaagttcagaacttcatcagataggactgtcagaaatccccatagtcagggagttcggagacgtgtttccggaagaactacctggtatgccgcccaagcgagagattgagttccggatagatcttgctccaggaaccactcctctgtacaagcgaccctatcgtatggcagcgaatgaactggccgaagtcaagaaacagttggaagagttgaaagaaaaggggtatatacgtccgagtacttccccatggggtgctcctgtgatttttgtagagaagaaagacaagacgaagaggatgtgcgtcgactacagagctctcaatgaagtcaccatcaaaaacaagtaccctcttccccggatcgatgacctgttcgatcaacttaaaggtgccactgtattctccaagattgatcttcgttccggatatcaccaattacgtatccgtgaggaagatattccgaagactgcattcaccacgcgatacgggctgtatgaattcacggtgatgtcgttcggcttgaccaatgctcctgccttcttcatgaacttaatgaacaaagtgttcatggaatacttggataagtttgttgtggttttcattgatgacattctgatatactcacaatcagaagaagaccatcagcaccatctccgtctggtgttgggaaagttgcgggaacatcaattgtatgccaagcttagcaagtgtgagttctggttgtccgaagtcaaattcttagggcacgtgatatctgctaaaggagttgctgtggatcccgaaacagtgaccgccgtcaccgattggaagcaacccaagacagtcactcaaattcgcagtttcttaggtttggcaggatactaccggaggttcatcgagaacttctccaaaatcgctcgacccatgacacagttgttgaagaaagaagagaaatttgtgtggagcccgcaatgcgagaaggcgtttcaaactctcaaggaaaagctggtttcctcgccggtgttaatcttgccggatactcgcaaggacttcatggtgtattgtgacgcttcgcgccaaggattggggtgcgtgctcatgcaggacggtcatgtggtagcctatgcctctcgccagcttcggcctcatgaaggcaattaccctacccatgatttggagttagccgctgtggttcatgctctaaaaatctggcggcactatctcattgggaatcgctgtgaaatatataccgatcataagagcttgaaatacatcttcacccagtcggatctgaatcttcggcaaaggagatggttagaactcatcaaggattatgatgtgggaattcactatcatcctggtaaggccaacgtggttgccgacgctctaagtcgaaagagtcattgcaacactcttaacgtccgtggcattccacccgaacttagtcaacaaatggaagccctgaacctaagcatagttggtcgtggattcttggctgcgttggaagccaagcctaccttgctcgatcaaatccgtgaggctcagaagaatgatccggacatgcatggactcctcaagaatatgaaacagggtaaagccgctggtttcacagaggatgaacacggaaccctatggaacggaaatcggcgtgtcaaggcagagcaccagcgaccggccggactcctccaacctctccaagtgccagaatggaaatgggatgaaattgggatggatttcatcaccggacttccaaaaacccaaggcggatatgattctatatgggtagttgtggatcggttaaccaaggtggctcgattcattcctgtgaagaccacctatggagggaacaaactagcggagctctacttcgctaggatcgtgagtctccatggtattcccaagaaaatcgtatctgataggggaagccaattcacctctcacttttggaagaagctccaagaagagcttggtacccgattaaatttcagcaccgcgtaccacccgcagacagatggatagaccgagcgtctaaatcagatcctagaagatatgcttcgcgcatgtgtcctagatttcgggaagacctgggataagagtctcccctatgccgagttctcctacaataacagttatcaagccagcatacaaatggcaccttatgaagcgttgtacgggcgcaaatgccggacaccgctattgtgggaccaagttggagaaagccaagtgttcgggactgatatcctgagagaagctgaagctaaagttagaaccattcgggataatctaaaggtggcccagtcccggcagaaaagttatgcagataaccgtcgccgtgacctggaattcgcagtggatgattttgtgtaccttcgggtcacgccattgcgaggagtacataggttccagacaaaagggaagctcgcacctcggtatgtgggtcctttccgtatcattgctcggcgcggagaagtcgcttaccagttggagctgcccgcctccttgggcaacgtgcatgatgtgttccatgtgtcacaactcaagaaatgtcttcgagtgccatccgagcaggccgactcagagcaaattgaagttcgcgaagatttgacctacgtggagaggccagtgaaaatcctggacaccatggagcgcaggaccaggaaccgggtaatccgtttttgcaaggtccagtggagcaaccacgccgaagaagaagctacttgggagcgtgaagacgagctgaaggcagcccatcccgatctcttcgccagttcttccgaatctcggggtcgagattccgtt

SEQ ID NO: 86140 - DNA, 999 bp, Oryza sativa
  Clone ID: PAT_MRT4530_85209C.1
atggccgtcgagcagtactgcccgccgccacagtccttgctcccgccgccgccgctgccgccggtcgccgttcccaccacctgcggttgcgccgcctgcctccagggctgcttcgttccggtgggggttcaagctgccttcccgcacgccgctgctgggtgcgcgccgccgccgccggtgatgccggtgatgatagtgtaccgcgtcgtgcagcctccgccgccggcagctcacgccacgcgctgccagatcacggagatcgaggacggcggcggcgtggagaccgcgaaagctgtggacggcgacgagccgcagccgttcatccgcacggtgcgcagcactcgtcgcagaaaggcggcggcgatccgccttcccaaggcttttcgagcggcgcttttgccgccaccgccgccgccatgcgcgttggggttcacagctactactacctccttgatgataaggaacatccccaataagttcctgaaggcgaggctgatggctatcctggaccagcactgcgccgacgagaacggcaagtgtcaccgccgcggcggcggcggcggccgcagcgtcgtgaagtctgaatacgacttcttctacgtacccatcgacttcaagttcgtatactactccaatctagggtttctttcctttcatcttgttcttcctgacctgacacggtggttgtgcgcttcttctttctataggactgggttcaacaaggggtacgccttcgtcaacatgacgacggcgaccgcggcgcggcggctccgcgcgttcctccaggaccaccgctgggacgccgccatgtccggcaaggtctgcgacgtcgtgcccgccgccatccaggggctcgacgcgttcgtggcgcacttctcggcgtcgtgcttcccctgccgcaccaaggagttcctgccggtgtggttcgagccgccgcgcgacggcgagcagcagacgaaggcgcacgtggtcggccgcctcgtcgtgcgcccacgctag

SEQ ID NO: 86141 - DNA, 609 bp, Oryza sativa
  unsure (1)..(609): unsure at all n locations
  Clone ID: PAT_MRT4530_8520C.1
ggcggcggcggcgtagtgcggcgcggtcacacgcaggtggtggtaaggacagcgcgcggcgaggtggagcgtcgtgcatcctcttcactcttcagctcaccatgaatagcatccaccgtctccccccatcgaccagctgctggcaacatacgtttctatcagcagctagctgtcctagctagcctcatcagtttagcgcatggatgggagattgggaggcggcactgctcgatgtctctctcaccctcatcttatcgcccgcgtcaacgatatatagcgccaaccaggcaccaaacaaagcagttgttgtgttcctctacatagagattnttacatcatctctgatatgtctcatgtttctggtaattatctcctatcccagtccactttcatgggctntaaagctgcactgccagtaaaatgaggtggatttcaggtgaaggccatctgtggatccaaaatatattgttctttggctaagattttaggttgcaacttcttttccggaagctgatctctaaagaactccgaggttaagcgtgctnggcctagagcaatttagggatgggtgaccgatcgggaaattcttcccgagtgcacatgagtaag

SEQ ID NO: 86142 - DNA, 5991 bp, Oryza sativa
  Clone ID: PAT_MRT4530_85210C.1
atggagcccgagagcgccgcgccggtttccttctcctccggccgccctctctcactcccaaccctatataaaccatccccgtgcctccctcctccgtttccgccgctcgccgctctctctccccgtcggaatcgagctcgcgccgtcgccctctctctccgccgccgccgccgagctccggtctgccgccgtcgtcgccccggaccttctcccgtttcggcgtcgccttcttcgggttcgccgcaacatcgccgacctcgtccacccctccgtttcgcccgccgaccgccggaacgccgccgtcctcgtcgacccgagccgcgccgccgcctttttccgctccggtcgccgttcccgtcgtcgccgtcgacccggggtgagccgtggaccgcccatttcgtttcccccttccctcccctctctcggccgccgctccgccgtgcctatggccgccgccggcgaccataggggcgcgggcgcgccgcctcccgtcggctgtgccggcgaggccgccttcgggcgcgccccgcggctgccatgtggggcccggccgtcagccgcccgcgcctcgggtacggctgacgcgtgggacccacggcgccggccggcgtaagccgcgtgcacccgttccaccgtggacccacctcggccatataaggaccggtcttcgggcctctgttgcaaagcactaccgtacttccacatgtctagtggggcaaatgaaggctacacgagctgcggcccggtagtcgagatgtcatggcacagggccggtgtcctgctgctaggggctcagtcctgcctacctgtcccgggggttccggccgtaggtgggattgggtcgatgtacacctctgatcagagtataatctattcgaatagccgcgccctcggttatgggcaagccgagcaatgtacccaaatggccggcagcgtcacccgtcgtggtttggacatgactggcttcgtcttggagctgcggggcatgtgcgtggtcctggggtatccgcatggagtggactaccaggccaggccgcttccgaagcaggagggtgacgatgcagagccccacgctgcttgggaggtcactgcagtgatcctcgctggctctcccgagcggacttcgctggcagtcaccgcgggtggagattctttccccgccgcttgccagaacgccgctctcctcgccatcggcactcttcaccagcgctacccggacgagttgcagcactcgccctaccgctaccaccctcaccgcggaggagcccgcgactacgccaccttccgggatgctagctcggaggacgacgctaccatcgtgcacctggcgcgcatggtggaggcgtacgacgcggctcgtatcgacttccatcagatggtgcgccgtgggatggtcgagaacaacctgaagatcctggagctgcgtcaggagaacctgcagctcaagaaggacctagacgcggtggaggcgcagctgcatcagctcaagatcgcccagggagaggtctgccgccccaagcgtcgccgtgtctgccgcagccagaagatcaccgcccgcaagagcacctccaggcccgagcttgttcgtcagtccctggcgtggacctgcttcgtggagacccctcgtgccgagcccgcgcctgtggttccccaggagggggaagcctccggcgttggtagcacggaggatgcgctgttgctcaccttccatggtgacgaccaggagaagtgctaatgccggtgatggcaaccaacctgaaggcagcaaccgcaaccaccatggcagcccacctccacctcctcctccgcctccaccaccaccaccagataccaacgccattctcacccaaatcctcgcccagcaggccaacatgatgactgctttcctccaccacctccaaaatccgccacaacagaatgctccaccaccacccccgcaacactctaaactcgccgagttcctccgcatccgcccacccaccttctctagctccaacaaccccgtggatgcgttggattggttgcatgccgtggggaaaaagctagacactgtgcagtgcagcgatgaggagaaagtcatcttcgccgcccaccaactgcaggggcccgcatctctatggtgggaccatttccaggctacgcagccagaggggcagcctattacttgggcccgtttcaccgccgctttccggagaacccatgtgcccgccggagtcgtggctcttaaaaaaagggaattctgagagttgaagcaaggcaaccgctccgtgatggagtatttgcatgagttcaacaacctggcccgttacgccccggaggatgtgcgggaagatgaggagaagcaagagaagttcttggcaggaatggaccctgagctgtccgtccgtctagtctccggggactatccggatttccaacgtctggtggacaagagcatccgcttggaagccaagcacaaggaactggagtcgcacaagcgccgcttggcgaatttccgcaatcaacagggtgctaaccaaagggtccgctacaccaatccctatccagggggatcctcctcgcagcagcaacaacagcagcagcaacctcgctccgtgcctcgacctcaatacgtggtgcgcgtcccacagccgcagcagcagcagagtcagcaagggactcgtgcgccccgtcctcctacgccagccgtgcagtctggtcaaggctgcagggacgctcaaggtcagcagcgtctgtgcttcaactgcttcgagcccgggcactttgcggataaatgcccgaaaccgaggcgccagcaaggccaagcgcctccccgctccaacaacggtgggaaggatgtcattcagggtcgtgtgaaccacgtgacggccgaggacgtgctgacaactccagacgtcatcgttggtacgttcctcattcattccatccctgctaccattttgttcgactctggagcttcccactcgtttatatctgtgccattcgtggggagaaatcagttgggggtagaaaggcttagaaaccctctgctcatcaccacccctggaggggttatgacagcaaagtattatagtcctgccgtccctatagaaattcaggggattccttttccctcggacctgattctgctagacaccaagaacttggatgtgatccttggaatgaattggttggctcaatttcaaggagtagtggattgcgcgagacgcactgttactctgtaccgaggaccggaacaaccggttgttttctttgcacccccaacctctgtcagtagttcagaacttcatcagataggactgtcagaaatccccatcgtcagagagttcggagatgtgtttccggaagaactacccggtatgccgcccaagcgagagattgagttccggatagatcttgctccaggaaccactcctctgtacaagcgaccctaccgtatggcagcaaatgaactggccgaagttaagaaacagttggaagagttgaaagagaaggggtatatacgtccgagtacttccccctggggcgctcctgtgatttttgtggagaagaaggacaagacgaagaggaggtgcgtcgactacagagccctcaatgaagtcaccatcaaaaacaagtaccctcttccccggatcgatgacctgttcgatcagcttaaaggtgccacggtattctccaagattgatcttcgttccggatatcaccagttgcgcatccgcgaagaagatattccgaagaccgcattcaccacgcgatacggactgtatgaattcacggtgatgtcgttcggtttaaccaatgcacctgccttcttcatgaacttaatgaacaaagtgttcatggaatacttggataagtttgttgtggttttcattgacgacattctgatatactcacaatcagaggaagaccatcagcaccatctccgtctggtgttgggaaagttgcgggaacatcaattgtatgccaaacttagcaagtgtgagttctggttgtccgaagtcaaattcttagggcacgtgatatctgctaaaggagttgctgtggaccccgaaacagtgaccgccgtcactgattggaagcaacccaagaccgtcactcaagtccgcagtttcttaggtttggcaggatactaccggaggttcatcgagaacttctccaaaatcgctcgacccatgacacagttgttgaagaaagaagagaaatttgtgtggagcccgcaatgcgagaaggcgtttcaaactctcaaagaaaagctggtttcctcgccagtgttagtcttgccagatactcgcaaggatttcatggtgtattgtgacgcttcgcgccaaggattggggtgcgtgctcatgcaggacggtcatgtggtggcctatgcctcacgccagctacgacctcatgaaggcaactaccctacccatgatttggagttagccgcggtggttcatgctctaaaaatctggcggcactatcttattgggaatcgctgtgaaatatataccgatcataagagtttgaaatacatcttcacccagtcggatctgaatcttcggcagaggagatggttagaactcatcaaggattatgatgtgggaattcactatcatcctggtaaggccaacgtggtcgccgacgctctgagtcgaaaaagccattgcaacactcttaacgtccgtggcattccacccgaacttaatcaacagatggaagccctgaaccttggcatagttagtcgtggattcttggctgcgttggaagccaaacctaccttgctcgatcaaatccgcgaggctcagaagaacgacccggacatgcatggactcctcaagaatatgaaacagggtaaagccgctggtttcacagaggatgaacacgggaccctatggaatggaaatcggcgtgtcaaggcagagcaccagcgaccggccggacttctccaacctctccaagtaccagaatggaaatgggatgaaattgggatggatttcatcaccggacttccaaaaacccaaggtggatatgattctatatgggtagttgtggatcgattaaccaaggtagctcgatttattcctgtgaagaccacctatggagggaacaaactagccgaactctacttcgctaggatcgtgagtcttcatggcgttcccaagaaaatcgtatctgataggggaagccaattcacctctcacttttggaagaagctccaagaagagctgggtaaatcagatcctagaagatatgcttcgcgcatgtgtcctagattttgggaagacctgggataagagtctcccctatgccgagttctcctacaataacagctaccaggccagtatacaaatggcaccttatgaagcgttgtacgggcgcaaatgccggacaccgctattgtgggaccaagttggggaaagccaagtgttcgggactgatatcctgagggaagctgaagctaaagtcagaaccattcgggataatctaaaagtggcacagtcccggcagaaaagttatgcagataaccgtcgccgtgacctggaattcgcagtgggtgactttgtgtatcttcgggtcacgccattgcgaggtgtacacaggtttcagacaaaagggaagctcgcacctcggtatgtgggtcctttccgtatcattgctcggcgcggagaagtcgcttaccagttggagctgcccgcctccttgggcaacgtgcatgatgtgttccatgtgtcgcaactcaagaaatgtctccgagtgccatccgagcaggccgactcagcgcaaattgaagttcgcgaagacttgacctacgtggagaggccagtgaaaatcctggacaccatggagcgcaggaccaggaaccgggtaatccgtttttgcaaggtccaatggagcaaccacgccgaggaagaagctacctgggagcgtgaagacgagctgaaggcggcccatcccgatctcttcgccagttcttccgaatctcggggtcgagattccgtt

SEQ ID NO: 86143 - DNA, 4033 bp, Oryza sativa
  Clone ID: PAT_MRT4530_85211C.1
atggttatgccgatggtgacgaccagaagaaatgctgccaccggtgatggcaaccaacccgaaggcagcaaccacaaccaccagggtaacccacctccacctcctcctccgcctccaccaccaccaccagacaccaacgccattctcacccaaatcctcgcccagcaagccaacatgatgactgctttcctccaccacctccaaaatccaccacaacataatgctccaccacctccccaacactctaaactcgccgagttcctccgcatccgcccacctaccttctctagctccaacaaccccgtggatgcgttggattggttgcatgccgtggggaaaaagctagacacggtgcagtgcagcgatgaggagaaagttatcttcgccgcccaccagctgcagggacccgcatctctatggtgggaccatttccaggctacgcagccagaggggcagcctattacttgggcccgcttcaccgccgctttccgaagaacccatttcaataacctggcccgttacgctccagaggatgtgcgggaagatgaggagaaacaggagaagttcttggcaggaatggaccccgagctgtccgtccgtctagtctccggggactatccggatttccaacgactggtggacaagagcatccgcttggaagccaagcacaaggaactggagtcgcacaagtgccgcttggcgaatttccgcaatcagcagggtgctaaccagagggtccgctacaccaatccctatccagggggatcctcctcgcagcagcaacaacagcagcagcagcaacctcgctccgcgcctcgacctcaattcgtggtgcgcatcccacagccgcagcagcagcagaatcaacaagggactcgtgcgccccgtcctcctacgccaactgtgcagcctggtcaaggccgcagggacgctcaaggtcagcagcgtctgtgcttcaactgcttcgagcccgggcactttgcggataaatgcccaaagccaaggcgtcagcaaggccaagcgcctccccgctccaacaacggcgggaaggatgtcattcggggtcgtgtgaaccacgtgacggccgaggacgtgctgacaactccagacgtcatcgttgaactgcatcagattggactgtcagaaatccccattgtcagagagttcggagacgtgtttccggaagaactacctggtatgccgcccaagcgagagattgagttccggatagatcttgctccaggaaccactcctctgcataagcgaccctaccgtatggcagcaaatgaactggccgaagtaaagaaacagttggaagagttgaaagaaaaggggtacatacgcccgagtacttccccatggggtgctcctgtgatttttgtagagaagaaagacaagacgaagaggatgtgcgtcgactacagagctctcaatgaagtcaccatcaaaaacaagtaccctcttccccggatcgatgatctgttcgatcaacttaaaggtgccactgtattctccaagattgatcttcgttccggatatcaccaattacgtattcgtgaagaagatattccgaagaccgcattcaccacgcgatacgggctgtatgaattcacggtgatgtcgttcggtttaaccaatgcacctgccttcttcatgaacttaatgaacaaagtgttcatggaatacttggataagtttgttgtggttttcattgatgacattctgatatactcacaatcagaggaagaccatcagcaccatctccgtctggtgttgggaaagttgcgggaacatcaattgtatgccaagcttagcaagtgtgagttctggttgtccgaagtcaaattcttagggcacgtgatatcagctaaaggagttgctgtggaccccgaaacagtgaccgccgtcaccgattggaaacaacccaagacagttactcaagtccgcagtttcttaggtttggcaggatactaccggagattcatcgagaacttctccaagatcgctcgacccatgacacagttgttgaagaaagaagagaaatttgtgtggagcccgcaatgcgagaaggcgtttcaaactctcaaggaaaagctggtttcctcgccggtgttaatcttgccggatactcgcaaggacttcatggtgtattgtgacgcttcgcgccaaggattggggtgcgtgctcatgcaggacggtcatgtggtagcctatgcctcacgtcagctacgacctcatgaaggcaactaccctacccatgatttggagttagcagcggtggttcatgctctaaaaatctggcggcactatctcattgggaatcgctgtgaaatctatactgatcataagagtttgaaatacatcttcactcagtcggacctgaatcttcggcaaaggagatggttagaacttatcaaagactatgatgtgggaattcactatcatcctggtaaggccaacgtggttgccgacgctctaagtcgaaagagccattgcaacactcttaacgtccgtggcattccacccgagcttaaccaacagatggaagccctgaacctaagcatagttagtcgtggattcttggccgcgttggaagccaagcccaccttgctcgatcaaatccgcgaggctcagaagaacgacccggacatgcatggactcctcaagaatatgaaacagggtaaagccgctggtttcacagaggatgaacacggaaccctatggaacggaaagcgggtatgcgttccagataacagagaacttaaacagctgatacttcaggaagctcacgaaagtccttattccatccaccctggcagtacgaagatgtacttagacttgaaggagaaatactggtgggttagtatgaagcgggagattgcagagtttgtggccctacgtgatgtgtgccagcgtgtcaaggcagagcaccagcgaccggccggacttctccaacctctccaagtacctgaatggaaatgggatgaaattgggatggatttcatcaccggacttccaaagacccaaggtggatatgattctatatgggtagttgtggatcgattaaccaaggtagctcgattcattcctgtgaagaccacctatggagggaacaaactagcggagctctacttcgctaggatcgtgagtctccatggcgttcccaagaaaatcgtatctgataggggaagccaattcacctctcacttttggaagaagctccaagaagagctgggtactcgattaaatttcagcaccgcctatcacccgcagacagatgggcagaccgagcgtctaaatcagatcctagaagacatgcttcgtgcatgtgtactagatttcgggaagacctgggataagagtctcccctatgccgagttctcctacaataacagctatcaagccagcatacaaatggcaccttatgaagcgttgtacgggcgcaaatggcggacaccgctattgtgggaccaagttggagaaagccaagtgttcgggactgatatcctgagagaagctgaagctaaagtcagaatcattcgggataatctaaaggtggcacagtcccggcagaaaagttatgcagataaccgtcgccgtgacttggaattcgcagtggatgactttgtgtaccttcgggtcacgccattgcgaggtgtacacaggtttcagacgaaagggaagctcgcacctcggtatgtgggtcctttccgtatcgttgctcgacgcggagaagtcgcttaccagttggagctgcccgcctccttgggcaacgtgcatgatgtgttccatgtgtcgcaactcaagaaatgccttcgagtgccatccgagcaggccgactcagagcaaattgaagttcgcgaagatttgacctacgtggagaggccagtgaaaatcctggacaccatggagcgcaggaccaggaaccgggtaatccgtttttgcaaggtccagtggagcaatcacgccgaagaagaagctacttgggagcgtgaagacgagctgaaggcagcccatcccggtctcttcgcca

SEQ ID NO: 86144 - DNA, 5412 bp, Oryza sativa
  Clone ID: PAT_MRT4530_85212C.1
atgggttggaaactatgtcacgtcttccgcccgtataccgtggtgatggccggcagcgtcacccgtcgtggtttgagcatgactggcttcgtcttggagctgcggggcatgtgcgtggtcttggggtatccacatggagtggattaccaggccaggccgctcccggagcaggagggtgaggatgcagagcctcacgctggttgggaggtcactgcagtgatcctctccggctctcccgagcggacttcgctggcagtcaccgcgggtggagattccttccccgccgcttgccagaacgccgctctcctcgccatcggcacccttcaccagcgctacccggacgagttgcagcactcgccctaccgctaccaccctcgtcgcggaggagcccgcgactacgccaccttccgagacgccagctcggaggatgacgccaccgtcgtgcacctggcacgcatggtggaggcgtacgacgcggctcgtatcgacttccatcagatggtgcgccgtggcatggtggagaacaacctgaagatcctggagctgcgtcaggagaatctgcagctcaagaaggacctcgacgcgttggaggcgcagctgcatcagctcaagatcgcccagggagaggacagccgccccaagcgtcgccgcgtctgccgcagccagaagatcaccgcccgcaagagcacctccaggcccgagcttgttcgtcagtccctggcgtggacctgcttcgtcgagacccctcgtgccgagcctgcgcccgtggttccccaggagggggaagcctccggcgttggtagctcggagggtgcgctgttgctcaccttccgtcctggcccgtcgcagcgctctctttctctgtttgctggttctgtgtggggttttcagatggtgacgaccaggagaaatgttaacaccggtgaaggcaaccaacccgaaggcagcaaccacaaccaccaaggcaatccacctccacctccacctccgcctccaccaccaccgccagacaccaacgccattctcacccaaatcctcgcccagcaagccaacatgatgaccgctttcctccaccacctccaaaacccgccacaacagaatgctccaccaccacctccccaacactctaaactcgccgagttcctccgcatccgcccacctaccttctccagctccaacaaccccgtggatgctttggattggttgcatgccgtggggaagaagctagacacggtgcagtgcagtgatgaggagaaagtcgtcttcgccgcccatcagctgcagggacccgcatctctctggtgggaccacttccaggctacgcagccagagggacagccgattacttgggctcgcttcaccgccgctttccggagaacccatgtgcccgctggagtcgtggctcttaagaaaagggaattccgagagttgaagcaaggcaaccgctccgtgatggagtatttgcatgagttcaacaatctggcccggtacgctccgcaggatgtgcgggaagacgaggagaagcaggagaagttcttggcaggaatggaccctgagctgtccgttcgtctagtctctggggactatcctgattttcaacgactggtggacaagagcatccgcttggaagccaagcacaaggagctggaatcgcacaagcgccgcttggcgaatttccgcaatcaacagggtgctaaccagagggtccgctacaccaatccctacccagggggatcctcctcgcagcagcagcagcagcagcagcaacctcgctccgcgcctcgacctcaattcgtggtgcgcatcccacagccgcagcagcagcagaatcagcaagggactcgtgcaccccgtcctcctacgccaactgtgcagcccgttcaaggccgcagggacgctcaaggtcagcagcgtctgtgcttcaactgcttcgagcccgggcactttgcggataaatgcccaaagccaaggcgtcagcaaggccaagcgcctccccgctccaacaacggcgggaaggatgtcattcggggccgtgtgaatcatgtgacggccgaggacgtgctgacaactccagacgtcatcgttggtacgttcctcgttcattccatccctgctactattttgttcgactctggagcttcccactcgtttatatctgtgtcattcgtggggagaaatcagttgggggtagaaaggcttagaaaccctctgctcatcaccacccctggcggggttatgacagcaaagtattatagccctgccgttcctatagaaattcaggggattccttttccctcggatctgattctgctagacaccaagaacttggatgtgattcttgggatgaattggttggcacaattccaaggagtagtggattgcgcgagacgcactgttactctgtaccgagggccagaacaaccggttgttttctttgcacctccaacctctgtcagaagttcagaactgcatcagataggtctgtcagaaatccccatagtcagagagttcggagacgtgtttccggaagaactacctggtatgccgcccaagcgagagattgagttccggatagatcttgctccaggaaccactcctctgcacaagcgaccctaccgtatggcagcaaatgaactggccgaagtaaagaaacagttggaagagttgaaagaaaaggggtacatccgtccgagtacttccccatggggtgctcctatgatttttgtagagaagaaagacaagacgaagaggatgtgcgtcgactacagagctctcaatgaagtcaccatcaaaaacaagtaccctcttccccggatcgatgatctgttcgatcagcttaaaggtgccactgtattctccaagattgatcttcgttccggatatcaccaattacgtattcgggaagaagatattccgaagaccgcattcaccacgcgatacgggctgtatgaattcacggtgatgtcgttcggcttgaccaatgctcctgccttcttcatgaacttaatgaacaaagtgttcatggaatacttggacaagtttgttgtggttttcatcgatgacattctgatatactcacaatcagaggaagaccatcagcaccatctccgtctggtgttgggaaagttgcgggaacatcaattgtatgccaagcttagcaagtgtgagttctggttgtccgaagtcaaattcttaggacacgtgatatctgctaaaggagttgctgtggaccccgaaacagtgaccgccgtcactgaatggaagcaacccaagacagttactcaagtccgcagtttcttaggtttggcaggatactaccggagattcatcgagaacttctccaaaatcgctcgacccatgacacagttgttgaaaaaagaagagaaatttgtgtggagcccgcaatgcgagaaggcgttccaaactctcaaagaaaagctggtttcctcgccagtgttaatcttgccggatactcgcaaggatttcatggtgtactgtgatgcttcgcgccaaggattggggtgcgtgctcatgcaggacggtcatgtggtagcctatgcctcacgccaactacgacctcatgaaggcaactaccctacacatgacttggagttagcagcggtggttcatgctctaaaaatctggcggcactatctcattgggaaccgctgtgaaatatatactgatcataagagtttgaaatacatcttcactcagtcagatctgaaccttcggcaaaggagatggttagaactcatcaaggattatgatgtgggaattcactatcatcctggtaaggctaacgtggttgccgacgctctaagtcggaagagccattgcaatactcttaacgtccgtagcattccgcccgagcttaatcaacagatggaagccctgaacctaagcatagttggtcgcggattcttggctgcgttggaagccaagcctaccttgctcgatcaaatccgcgaggctcagaagaatgatccggacatgcatggactcctcaagaatatgaaacagggtaaagccgcaggtttcacagaggatgaacacggaactctatggaacggaaagcgggtgtgcgttcccgataacagggaacttaaacagctgatacttcaggaagctcacgaaagtccttattccattcacccgggcagtaccaagatgtacttagacctgaaggagaaatactggtgggttagcatgaagcgggaaattgcagagtttgtggctctatgtgatgtgtgccagcgtgtcaaggcagaacaccaacgaccggccggacttctccaacctctccaagtgccagaatggaagtgggatgaaattgggatggatttcatcaccggacttccaaaaacccaaggtggatatgattctatatgggtaattgtggatcgactaacaaaggtagctcgatttattcctgtgaagaccacttacggagggaacaaactagcggagctctacttcgctaggatcgtgagtctccatggtattcccaagaaaatcgtatctgataggggaagccaattcacctctcacttttggaagaagctccaagaagagctgggtactcgattgaatttcagcaccgcctatcacccgcagacagatggacagaccgagcgtctaaatcagatcctagaagatatgctccgcgcatgtgtcctagatttcgggaagacttgggataagagtctcccctatgccgagttctcctacaataacagctaccaagccagcatacaaatggcaccctatgaagcgttgtacgggcgcaaatgccggacaccgctattgtgggaccaagttggagaaagccaagtgttcgggactgatatcctgagagaagctgaagctaaagtcagaatcattcgggataatctaaaggtggcacagtctcggcagaaaagttatgcagataaccgtcgccgtgatctggaattcgcagtggatgactttgtgtatcttcgggtcacgccattgcgaggtgtgcacaggtttcagacaaaagggaagctcgcacctcggtatgtgggtcccttccgtatcatcgctcgacgcggagaagttgcttaccagctggagttgcccgcctccttgggcaacgtgcatgatgtgttccatgtgtcgcaactcaagaaatgtcttcgagtgccatccgagcaggccgactcagagcaaattgaaattcgcgaagacttgacctatgtggagaggccagtgaaaatcctggacaccatggagcgcaggaccaggaaccgagtaatccgtttttgcaaggtccagtggagcaaccacgccgaagaagaagctacttgggagcgtgaagacgagctgaaggcagcccatcccgatctcttcgccagttcttccgaatctcggggtcgagattccgtttaa

SEQ ID NO: 86145 - DNA, 951 bp, Oryza sativa
  Clone ID: PAT_MRT4530_85213C.1
atggccgtgcaggcgcagcgcctcgcccaggctttcccttacgacctccacgcggcggcgagcggcggcgccctgttcctggacgagctcgccggcgagtgcgcgccgcccatggcggcggtggaagggatcgggggcgcggtggtgttcggcggcgacaacggcgagtacgggttcgtggagaggaagcggccgcgcgtggcggcgggtctgttggaggaccagcgcgcggtcctggcgcacgcgatggcggcgccgctgcaggggatcttgcccttcggggatgtggcgggcagggcggcgtgcgccggcgcggcgtccaccagcgggaggaggatggacggtgcgggcggaatctcgcagggccttctttcgcagctctaccaccatggcgtggagatcgacgcgctcgttcggctcgaggccgagcggatgcgcgcggggctggaggaggcgcagcggcggcacgtccgggcgctggtggcggccgcggcgcgcgccacgacggggagggtgcgtgcggcggaggccgagctggagcgcgcgcgctgccgcaacgcggagctggaggagaagctccgccaggtgagcgcggaggggcaggcgtggatgggcgtcgccaagagccacgaggccgtcgccgccggcctccgcgccacgctcgaccagctcctcctccagtccccctgcgccgccgccgccgccgccgcctccgcgggggaaggcgacgccgaggacgcccactcgtgctgcttcgagacccccgccgccgccgccgatgtcgcggtctccacggcgacgtcgtgcaaggcatgccgtgtcgcggaggcgtccgtgctgctgctcccgtgccgccacctgtgcctgtgcggcgcctgcgaggccgccgccgacgcttgccccgtctgcgccgccaccaagaacgcctccgtccatgtcctcctctcctga

SEQ ID NO: 86146 - DNA, 507 bp, Oryza sativa
  Clone ID: PAT_MRT4530_85214C.1
ggccgcgggttttttttttttttttttgtcatagtaattttggtagatgttttaaaagcccatctaccagaaccagtccttttcgcccaaaatgtccgtgaatgcagaaacccccaagacccaaccttcttacttgaggggaatgaaacgagaagagtgcgtggcaccgataccgggtcgaccgtgcttgacgggcttgtatgagatagagaactcagcgaggtagtgaccaaccatctcaggcttgatctcgacctggttgaactccttgccggagtagatgccgatgacgctgccaatcatctcggggacgacaatcatgtctcggaggtgggtcttgacaaggtcgggcttctcgttaggctgagcctcctgcttggccttgcgaagcttcttgatgagacccatggggcggcgcttcagaccactgttgatcctgcggagggcacgagcgtggacaacatcgcgaagctgtttggaggagaggtccaggagctggtcaaggtc

SEQ ID NO: 86147 - DNA, 5946 bp, Oryza sativa
  Clone ID: PAT_MRT4530_85215C.1
atggcggcgcggcgatgcgggagcaggaggcgtcggcgccgtgcagcggcgactcgtgtcgggctcattagccgattggctgataccccatgcatcaaaagaggactagaatctccttcagcatggaagtccccttggttcgtagatatgcaatttcagggttcatacttcgtcagcccagctgatagaacctacaatgcgctaggatttgtgaagcagataaatgtgcagactgctgctgctttggcagaagcccgtgaggtgctggtaagtggcggacaatctgagaacataaattctgggaaggaaaacctggagagtccaaatgctaagaaggaaccaggagcaacaaccaaattgcaagcaaaaatcaagattggcaaaggcttgctaccacctttgccaatggccgcgacggagcacaagccggccggaaggaagacagcggagaaggtggaagaaaagccatctcctccgccattactcctgcttctgctcggtgtctgtttcctgtggggggaaagcccaaggaagcaagcaagactaaaatcagctattgttgttccggagacgagaaagttaagtgtgtttaatcgattgagtaaaggcgaacctggagctccttcatcaatctggcaagaggtgaaaccgagattttggtggcgccagggcagggcacctcttccggccacggcgtccaggcgcccaaccaccggagtaattccagcctggcgtcccttcaatccagcaactttaggccgttgcttgcgttgcctcgctcaagaccacaaaattgcagactgcagagaccctcccagatgctacatttgcaagcgcagtggccacatatcttctggttgcccttcaaaatacaagaacaaaccctcaatattttcctgtatctactccactcatccagcaccaccctccaagcaagaaatccccaatccccttgccttccctccactgactggccacaaagcaccagtgcgcgaaaggcttggccccaaaatggattacatacctgggttgccggagaaccatcctgcttgtggttatgcggtggttgtcgctgacgctgcaatggagcacgaagctatgcggttgtacaaccatggggccgtcatcaaggcccggctgcccaactacgacgtcagcgccaaggagatggcgcaggcgttgcagcagcaagtgggaactcccaactacgacgtcagaaggtgctcgaagatgtctgcatcgtcgaccaaccccaatctccttcctcgggtgtcggtcttcactcttttcccggccggggtagggcaggtgctggagacgggtggcatgcccacgcccagccaggaggtcgcctcggcacctctgggtcgtgtccgccatctgctcattcatcttgacatggtggaggactggaggccattgccggcgaggtcctcaaactccagcggctccacagactccgatgatccaccgaggcggcgcgtgcaccgctttgactggcatttgggctatgaggacggtgtttcgccgccgccgctgcagcctccgcagccgccactgcctgtacggagacttcacgaggagcgcgggcgaccggaacagcggggcattgacttgcgtaaccggctgtcgcagcgagggagccccaaggcggaaacgacggccggtaccgcagccgcaccccccgtggcggcaatcgccacttcgccggccatcgggtgggtcgctccccagccaggcgcccatccaggccgccttctcgccgccggcgctcttgccggtcgcgctcgccaagcaaggggcgtcgtgcggtctcggagagtcgctgtcttcgcgggtgcgcttcccaaggtggtgggggcgacacgggagggggaggacccgatgtttctcgagctggcggtggcggcagcgttccacgcggagaagtcagcgaacgcatctaccctagaagctggggcgtcggttcctattgggtcagcggctcctcttgggccggtggcgcctattgggccagtttctcctgggccggtggcgcctcttgggccggatgggtcagctgcgtcccctggcttgatagcttctcctgggcttgggcttctcgagctggtgggggagcaaatggaaggcacggcgacccagcccatgcaaggaggagttgagccgttttttgctcctctgccaccgccgcttgtggcaacaccgccagtgcgtcgtcgcgggaggccacgcaagaaagttctgcttcccagtcgtcatagcaagcgtctcgaggcacggccatctccggttctaatctcgatgcgagctcaggttcgcattatgaaagagatgagggtccttaagccgggagaaccggtaggtgatgaggcagtggctgagtacatcaagcgcttccaggaccccttgccgacggtcgtggtgcaagggattcgcgcgcttactgggttggacagcggcaagcctctgccgccggatgtgacagaggaggctgatggtgccacgccggaatggtgcacatctctaggagttacttatggttcaagaatgattgaaggcctcaaaattctgaattggaatgtcagagggttgaacaacccggcaaggagagaggctatctgtgaggttgcgaataatgcagatgcgagcatactttgcatccaggaaactaaattagctaacatagaccagtttttagggcgggaaataggtggttcccgactgaggcgttttgaatttctccctgctgatggtgtaagaggtggtgtagcaattttctgggatgacacaaaggtgcaggtcgacaacacacaaattcataccttttccgtttcaattagggcccaagtgataggaggaaatgtcccttttattctcacctccgtatgtgggccttcggaggatgaacataaatcagacttccttgcagaactagaatcgttagtgccgcagccattgctgccctgggttgttttgggagactttaacttgatttgtgaagcaagtgataaaaataatctgaatttagataggagaaggatggggcaatttaggagcactctaaatagatgttgtctcaaggagttcaagctccaaaataggaaattcacatggagcaatgagcaggaagcgcctactctggaaagaattgacaaagttttttgtaatattgatggtgacatcctgttctccaaccacacactgcaagccctctcctcatcctgttcagaccattgccctttgcttcttgctttcactgtaagcccacccaaaagggtagtcttccgctttgaaaatttctgggtctgggtgccgggattcatggaggtagtgcaacaagcctggtcatctcacacttttggtggacatccatttacaaaactcagccacaaattgacagccaccgctaaagctctcaggaagtggagtagaagtctgtttggagagatcaaaatgcaatttcacgtggctcaggaggtgattctccgattggatttggcccaggaagataggatccttactgctgatgaacaccagctcaggaaagacctcaagctaagaattttggggctggcagcagtggcaaagtcgaagaaaaggcagagatcgcgattgacatggctaaaagaaggggatgccaacacaaagtttttccacattcacgcaaactcgaggagaaggaaaaaccacattcaccaactccatacaacaagtgctatcctgacagaacatgaggaaaaaagtgaggcgcttttcaaccatttcaactcaatcctaggcaacaaggaggcgcgaaattgcaccttaaattggaacgcgatcgatctaccacaggttaaccccgatgaactagatgaaccttttacagaggaggaagtttgggccgctttaaagcaaatgcaagcagaaaaggccccaggtccagatggctttaatggaggaaactttggagtactcaacagagcagcaattaccttgcttccaaagaggaacgcccctaccttggtgaccgattttaggccaatcagcctcattcactccgtcgccaagctgatatccaaagttctagcaataaggcttgccaggcagatggatggcctgatctcggttgcacagagcgccttcatcaaaaaaagatgcattcaagacaacttcctgtatgttcggaacatgctcaggaacctaaatgccagcaaaaagccaacactttttttcaagctagacattgctagagcttttgattcggtctcctgggaatatttacttgaactgatgcaaaacatgggttttggcccccggtggagaaattggatctgtttgctcttttccaccgccacttccaaggtagtcctaaatggagaccagggggaatgcattgcacacagacgtggcttgaggcaaggggaccccatatccccctatctctttatcctggctatcgaccccctacaaaggcttctacatctggcgaccgaaggtgggcaactaaccaacatcggaagtcgccatgctagattgaggacttcgctttatgcagatgatgcagctgtttttctcaaccctgtacaaagcgaggtggatgttcttattaccatgcttagggactttggcaaggcaacagggctgcacgtcaatcttggaaaaagtctggtggcaccaattcgatgccaggaagtagatctggacgacgtcttgtgtagtttttcgggggcaagagccagcttcccactgacttacctagggctaccactcactcctggccgcctacgtaaggtgcatttccagcctctccaggataagatcaaaggtcggctctcgggatggaagccatcattgttgtacatgggggggcgccgaattatggtgaactcagttctaagtgccatcccaacttacaccctcacggtgctgaaaccgccgaaacaatctcttcaagaaattgacaaagcaagaaggcggttcctgtgggcaggtaacgagaatatgcatggcggaaaatgcaaggtcaattggcttaaagtttgctcacctgtccggacgccagagaagccttggatagggactgaaacaccctgtgatgaattggataaggatcttttcgcggcatcaacgagagtccagattggtgacggacaaaaggcgagcttttgggaatcaaattggattggtggccaaagactaaaaagtcaagcaccgaatctttataggcattcgaagaggaaaacccgcaccgtccaagacgccctgcaacaaggaagatggattaacgacatcctccacagcctcaccattccccttcttgatgaattcttccatgtttgggaaattttagcccgtaacaccccacaactaacagagggggtacaagactcgattgtttggcaatggacaactaatggggaatatagtgcaaaatccgcgtaccaattccaattcaatggaatggtactcttgccatcaacaaagttgtcttgggaggcatgggctccggtaaagtgcaaaatcttcagttggttggttcttcaaaaccgggtgtggacagctgaccggttacagatcaggggatggccaaataattatttctaccagctatgctttcgaaacctcgaaacaatcgaccatcttctgtttgaatgcctggtctcaaagcaaatttggtttgggattctcacatggctgcaccaagggcacatcatcccaaaatggaacacaagtagaaacctcttagattggtggacacaaggaacaagcgacctggaagcaacaaaacagaaaggactcagaactctcttcttgctcattgcttgggaaatctggaaggaacgaaatgcaagaatctttagagcaaaggaggcgacagtacaccagatgattagtcgtatccaagaggaattaggttggtggagtatggccggcgctaaacacattgggagaatgttgccatga

SEQ ID NO: 86148 - DNA, 1752 bp, Oryza sativa
  Clone ID: PAT_MRT4530_85216C.1
atggatctaccacaggttaaccccgatgaactagatgaaccttttacagaggaggaagtttgggccgctttaaagcagatgccggcagaaaaggccccaggtctagatggctttaatgcactcaacagagcagcaattaccttgcttccaaagaggaatgcccctaccttggtgaccgattttaggccaatcagcctcattcactccgtcgccaagctgatatccaaagttctagcaataaggcttgccaggcagatggatggcctgatctctgttgcacagagcgccttcatcaaaaaaagatgcattcaagacaacttcctgtatgttcggaacgtgctcaggaacctaaatgccagcaaaaagccaacactttttctcaagctagacattgctagagcttttgattcggtctcctgggaatatctacttgaactgatgcaaaacatgggttttggcccccagtggagaaattggatctgtttgctcttttccaccgccacttccaaggtagtcctaaatggagaccagggggaatgcattgcacacagacgtggcttgaggcaaggggaccccctatccccctatctctttatcctggctatcgaccccctacaaaggcttctacatctatcgaccgaaggtgggcaactaaccaacatcggaagtcgccatgctagattgaggacttcgcttgatgcagatgatgcagctgtttttctcaaccctgtacaaagcgaggtggatgttcttattaccatgcttagggactttggcaaggcaacagggctgcacgtcaatcttggaaaaagtctggtggcaccaattcgatgccaggaagtagatctggacgacgtcttgcgtagttattcgggggcaagagccagcttcccactaacttacctagggctaccactcactcctggccgcctacgtaaggtgcatttccagcctctccaggataagatcaaaggtcggttctcgggatggaagccatcattgttgtacatgggggggcgccgaattatggtgaactcagttctaagtgccatcccaacttacaccctcacggtgctgaaaccgccgaaacaatctcttcaagaaattgacaaagcaagaaggcggttcctgtgggtagcccgtgacaccccacaactaacagagggggtacaagactcgattgtttggcaatggacaactaatggggaatacggtgcaaaatccgcgtaccaattccaattcaatggaatggtactctcgccatcaacaaagttgtcttgggaggcatgggctccggcaaagtgcaaaatctttagttggttggttcttcaaaaccgggtgtggacaactgaccggttacagatcaggggatggccaaataattatttctgccagctatgctttcgaaatctcgaaacaatcgaccatcttctgtttgaatgcccggtctcaaagcaaatctggtttgggattctcacatggctgcaccaagggcacatcatcccgaaatggaacacaagtagaaacctcttagattggtggacacaaggaacaagcgacccggaagcaacaaaacagaaaggactcagagctctcttcttgctcattgcttgggaaatctggaaggaacgaaatgcaagaatcttcagagcaaaggaggcgacagtacaccagatgattagtcgcatccaagaggaattaggttggtggagtatggccggcgctaaacacattgggagaatgttgccatga

SEQ ID NO: 86149 - DNA, 1998 bp, Oryza sativa
  Clone ID: PAT_MRT4530_85217C.1
attcatatggggttttatacccgcatgaaacatgaacaaatatggcgttttatattggcatgtaacatgaacagaagaacctacaaattacgaccaagttcacatccaactcccaaacaaaagaggacgacgcaaagttgccaacaacacacatgaactgaagactccgcagcatagggaagcccctgcagggcggtaaatctagtcagtgacccacgcgctgtcctaccatgtatgctgctgacctgctgtcctactacacaaaggcaagacgcccgcggggaagctagctccttttgtcaccggcccgcgcgcggcgtcgcgccgtcgcggcgtggcactcggtttttttggctagaggccgtggcggtggtgccggtgatggtggtggtgaccaagggcgaaatgcatccctgccggagccggagcaggagacggcaccggagcggcaaagatgccggcggcggtggagttgaacggcggcagcatcgaggccggcgccggagcgatggcacccggcggcgagagggcggcggcggcggggtgaggcgggcactggtagcacttggcgaagaggccgaaggtgtcgacctggtggacgaagttggtgatgctcgcccacccgccgaagccgaagccgaccaccagcacccacgccaccacgaacgagtttatcacgtacgcccccgtccatcctccggcgaacctcggcggccgctccaccgcgttctggcgggattgcggggagcggaaggtgaccatgtaggcgagggaggggatgatgtagacggtgaagctgacgaggagggagccgacggcggagttgatggggccgaagaaggggaagatgatggcgaggaaccagatggggaggacgacggggaggcgggcggcggcgcgcttgcagagggaggggcagccgtggaggccgacgagcttctcccagacgaagtagagcggggtgcaggcgaagccgaaggtgatgaactggtggatgagcatgagcaccaccgcggcgtcgcgccacggcgtccgcggcagcagcgccagcgcgttcgagtgcgtcagcagcgcgtccccgaacgcccagtacgccgccgacgccgacggcagcgtcagcgtcagcacgtacaccgtcgccagcaggtagatcgccttgaacttctgcggccgccacatcgcgtgcattatctccacggtgacagcgtggcccccgaaggtgtagaggatgttggtggcccccgtgaagtagagcacgatgcttgtgggcccagagtgcgccacaccctccacctgtccgtggatgagggaggcgacggcgatgtaccaggcggtgtaggtggtcatgaggaggccgaggaaggaccaaatgcggtagttgtggaatgacgggatgaagacggtggtggcgcagcaggcgccgaagatgtacgtccatgtccgcttgtccagatggtcgttgatgtagtagatgttgctggcacacccgatcagttggatcaccgacccgaacagcaaaaacgtgcagttgaaggccagtcccacattcctccagtgcctccccagtagcccatccagcacctcaaaccactggatgacgtggttgcggaagtcgaccttgtcgcgctccttgcgggtgcggtactcgaggtagaggatgctgatgaggtaggcggtccagctgccgaggaggccgtagaagagctggaagaggaggccgctggccatgcccagctgcgcgaacgagtagggcagcgtcagcagcacctgcgccacctggttcgacgcgcagctgaaccacgcgtcgtacgccgaccccccgtgccacagcagccccgacagccgcgtcctcgccgccgtcttctcccccatctccgacgactcctcttccacctctccgccgccgccgtgctgctgctgcagccccagcgcctgcatcgtcgccgcccccggccccttctcgtccgcgtagccgccgccgctgctcccggacgccat

SEQ ID NO: 86150 - DNA, 1002 bp, Oryza sativa
  Clone ID: PAT_MRT4530_85218C.1
atggatctaccacaggttcaccccgatgaactagatgaaccttttacagaggaggaagtttgggccgctttaaagcagatgccggcagaaaaggccccaggtccagatggctttaatggtagtcctaaatggagaccagggggaatgcattgcacacagacgtggcttgaggcaaggggacccctatccccctatctctttatcctggctatcgaccccctgcaaaggcttctacatctggcgaccgaaggtgggcaactaaccaacatcggaagtcgccatgctagattgaggacttcgctttatgcagatgatgcagctgtttttctcaaccctgtacaaagcgaggtggatgttcttattaccatgcttagggactttggcaaggcaacagggctgcacgtcaatcttggaaaaagtctggtggcaccaattcgatgccaggaagtagatctggacgacgtcttgcgtagtttttcgggggcaagagccagcttcccactgacttacctagggctaccactcactcctggccgcctacgtaaggtgcatttccagcctctccaggataagatcaaaggtcggctctcgggatggaagccatcattgttgtacatgggggggcgccgaattatggtgaactcagttctaagtgccatcccaacttacaccctcacggtgctgaaaccggcgaaacaatctcttcaagaaattgacaaagcaagaaggcggttcctgtgggcaggtaacaagaatatgcatggcggaaaatgcaaggtcaattggcttaaagtttgctcacctgtccggtacggtggtttgggggttccgaacttagaaaagtttgccagagctcttcgactgagatggttatggttcgaatggaggacgccagagaagccttggatatggactgaaacaccctgtgatgaattggataaggatcttttcgcggcatcaacgagagtccaaattggtgacggacaaaaggcgagcttttag

SEQ ID NO: 86151 - DNA, 162 bp, Oryza sativa
  Clone ID: PAT_MRT4530_85219C.1
atgcgtgtgctgcacgccgcctgtgcgtgctacggcatatgcgcatcgaggccaaatctagttgtcaacagaaaccagcaaaaacgtaaccttgacacgatcatcatggatgaaccatatggatcctacgacaccatcaccgactctactagagttgcatga

SEQ ID NO: 86152 - DNA, 517 bp, Oryza sativa
  Clone ID: PAT_MRT4530_8521C.1
acacaaggaaaccatggtatttttttagatccaaacgctccaatgagatagagtctcaatcataatgtaagcctgggaactcaaggtgcacccaaataacaaatggcgatataataacatttaaaattcagacatgaacacagaggggccacctcacaagaggcagagctcacattagtacatcaggatgagcaacaagctgacttacacacactgaagccattgaacaccaaatggcgcatttattgacttgtgcagatcattagcatgataaccttccgctttagcagatgccggggttgcacttgcagatggagccacagatgcaggcatgggcagcctcagcagattcagctgcttggtcaaccattaccttaaagagccccttattaggtgcaacgcctaggacagtggttgcagaattggtggtggaggaggtcttggcagacaggtaagggtacattatattgcacacaacgccggatacggagggaccgtggtttcaactttcatctga

SEQ ID NO: 86153 - DNA, 3062 bp, Oryza sativa
  Clone ID: PAT_MRT4530_85220C.1
ggcgacaggcggagcggaggcagcctcccctccaaaataggaaattcacatggagcaatgagcgggaagcgcctactctggaaagaattgacaaagttttttgtaatattgatggtgacatcctgttctccaaccacacactgcaggccctctcctcattctgttcagaccattgccctttgcttcttgcttccactgtaagcccacccaaaagggtagtcttccgctttgaaaatttctgggtccgggtgccgggattcatggaggtagtgcaacaagcttggtcatctcacacttttggtggacatccatttacaaaactcagccacaaattgactgccaccactaaagctctcaggaagtggagtagaagtctgtttggagagatcaaaatgcaatttcacgtggctcaggaggtgattctccgattggatttggcccaggaggataggatccttactgtcgatgaacaccagctcaggaaagacctcaagctaagaattttggggctggcagcagtggcaaagtcaaagaaaaggcagagatcgcgattgacatggctgaaagaaggggatgccaacacaaagtttttccacattcacgcaaactcgaggagaaggaaaaaccacattcaccaactccatacaacaagtgctatcctgacagaacatgaggaaaaaagtgaggcgcttttcaaccatttcaactcaatcctaggcaacaaccaggcgcgaaattgcaccctaaattggaacgcgatggatctaccacaggttaaccccgatgaactagatgaaccttttacagagaaggaagtttgggccgctttaaagcagatgccggcagaaaaggccccaggtccagatggctttaatggtaccttctacaagaaatgctggcatctaattaaataggatatcatggatgttttctagtgtttgtataacctgtcaggaggaaactttggagcactcaacagagcagcaattaccttgcttccaaagaggaacgcccctaccttggtgaccgattttaggccaatcagcctcattcactccgtcgccaagctgacatccaaagttctagcaataaggcatgccaggcagatggatagcctgatctcggttgcacagagcgccttcataaaaaaaagatgcattcaagacaacttcctgtatgttcggaacgtgctcaggaacctaaatgccagcaaaaagccaacactttttttcaagctagacattgctagagcttttgattcggtctcctgggaatatttacttgaattgatgcaaaacatgggttttggcccccagtggagaaactggatctgtttgctcttttccaccgccacttccaaggtagtcctaaatagagaccagggggaatgcattgcacacagacgtggcttgaggcaaggggaccccctatccccctatctctttatcttggctatcgaccccctacaaaggcttctacatctggcgaccgaaggtaggcaactaaccaacatcggaagtcgccatgctagattgaggacttcgctttatgcagatgatgcagctgtttttctcaaccctgtacaaagcgaggtggatgttctaattaccatgcttagggactttggcaaggcaacagggctgcacgtcaatcttggaaaaagtctggtggcaccaattcgatgccaggaagtagatctggacgacatcttgcgtagtttttcgggggcaagagccagcttcccactgacttacctagggctaccactcactcctggccgcctacgtaaggtgcatttccagcctctccaggataagatcaaaggtcggctctcgggatggaaaccatcattgttgtacattgggggggggcgccgaattatggtgaactcagttctaagtgccatcccaacttacaccctcaaggtgctgaaaccgtcgaaacaatctcttcaagaaattgacaaagcaagaaggcggttcctgtgggcaggtaacgagaatatgcatggcggaaaatgcaaggtcaattggcttaaagtttgctcacatgtccggtacggtggtttgggggttccgaacttagaaaagtttgccagagctcttcgactgagatggttatggttcgaatggaggacgccagagaagccttggatagggactgaaacaccctgtgatgaattggataaggatcttttcgcggcatcaacgagagtccaaattggtgacggacaaaaggcgagcttttgggaatcaaattggatcggtggccaaagcctaaaaagtcaagcaccgaatctttataggcattcgaagaggaacacccgcaccgtccaggacgccctgcaacaaggaagatggattaacgacgtccgccacagcctcaccattccccttcttgatgaattctttccatgtttgggaaattttagcccgtgacaccccacaactaacagagggggtacaagactcgattgtttggcaatggacaactaatggggaatacggtgcaaaatccgcgtaccaattccaattcaatggaatggtactctcgccatcaacaaagttgtcttgggaggcatgggctccggcaaagtgcaaaatctttagttggttggttcttcaaaaccgggtgtggacaactgaccggttacagatcaggggatggccaaataattatttctgccagctatgctttcgaaatctcgaaacaatcgaccatcttctgtttgaatgcccggtctcaaagcaaatctggtttgggattctcacatggctgcaccaagggcacatcatcccgaaatggaacacaagtagaaacctcttagattggtggacacaaggaacaagcgacccggaagcaacaaaacagaaaggactcagagctctcttcttgctcattgcttgggaaatctggaaggaacgaaatgcaagaatcttcagagcaaaggaggcgacaacaatgacatcattgaccacatgtaataggcaggggcaaagctaggtaggaagggggagggtgcccaggaaccagttaagaaaaattttttagctacaattcat

SEQ ID NO: 86154 - DNA, 270 bp, Oryza sativa
  Clone ID: PAT_MRT4530_85221C.1
gagccaacacctttttttttactcaaaataaaaaatgggtggggcgggggcagacaaaaacattataatccattggcaccattggcgggattatagaggagggacacaaaaactaaacattatagttaaaaaatgccgaaaaaaacgcgagggaacacgggcacaaatgtatatgggggcgaataaacgcatttataacacgggacattatgacccaggagtaataatttaaaaaaggaagcagcagcaagtaagcaaaccggagggagg

SEQ ID NO: 86155 - DNA, 3297 bp, Oryza sativa
  Clone ID: PAT_MRT4530_85222C.1
atggatttaatccctgttggcgtggatcaggctcaacgtggaatggacctttactcaaaaagctttttgttgtatttggctcctatcagggataagaattactcatacctgatgatctctacatcgtacagttcaacaagtgtgcgctttgtactggacagctccggcaaagtgcagtttctgagctgggaccctggtcactcactgtgggcagtacagtacatcttatctgttcaaggttgcggtcgctatggctcatgtggcccatatggtcattgcgacttgacaggcgtccatacatgcaagtgccttgatggatttgaacctgtctccgataagttcgtgtacatcagtggtataagctttgaggagtgcacagtgttatgcagtaggaactgttcgtgcacagcttatgcttacaccaattcaacaagtttacttccaccccagtgcttgctatggatgggagagcttattgacacagcaaagcttggtgaaaatgatgatgcaagaaaattctcaaacgcagatgcaagaaaatcaatgcttgattggccaacaaggtttaagacaataaagggagtagccaaaggacttctttatctccaccaagattcaagattaacagtagttcacagggatctcaaagctagcaacaaattgctggatgctgacatgagccccaaggtatcagattttggcatggcaatgatttttggtagtgcccaacaacaagcaaatactaaccgattagttggaacatatggttacatgtcacctgaatatgcattggaaggcacttgttcggtgaagtcctatattagcttcggtgtgttacttttgaaaattgtttctggcttaaagatcagccatccacaccgaatcacagactttctcaatctcatagctttccttagcaccgaagatggatctgaacctggatggctttcgcatggagaaaatacgttaagacctttccctccagatatttccctaattccgtgttcaattcatctctgtgcatccgacaaccgccttgtccctggtaagccaatctctcctggtagcaccattatctctgatgatggaacatttgccctgggttttttctccccatccaaccccaagaaacactattatgttggcatatggtacaataacatccccaagttcaccgttgtgtgggtagcgaaccgtgccgcgccaatcactgttccttcatctgcagtgttcaccttgaccaggagctccaacctcaccttgtctgatggcaatggccatgtcctttggacgacaatggccaaaagcagaatcagcatcagctccccccgaaacaccaaaaacatctcaacagaagccatgctagacaacaccggaaacctcattctccggtcattggctgacaatgccatcatatggcagagcttcgaccacccgaccgacactctcctgcctggcatgaacctcaggctcagccacaatacacacccactgcagcgcctcatttcttggaaagacatacgagacccatcccctggtcccttctcctacggtgcagaccccaacaacctgcttcagcgcttcatctggcatggctcggtgccgcaccggcgaagccctgtgtggaacaactacctcctcattggtaaatacatgaacaacctcaattccacgatttacatggcgataaaccatgacagcgatgaggtgtacatgtcctttggcatgccaactggccccttcagtgtgctgatcaggatgaaaataacctacctaggcaaggtaaatatgttaggttggcagagcaacatctcagcatggacaaccctgtactcggagcctgtgcatgactgcaatatctacggctattgcggtcccaacagttactgcgacaacacagatgctgtcccagcatgcaagtgccttgatgggtttgagccaagggaggaggaaaggcggaccaacaacagaagctttttgctgggatgccgccgcaggaaggccctaagatgtcaccatgggaacagtttcttgacttatccgagcatgaaggtccctgacaacttcatctacattcacaaaagaagctttgacgagtgcatggtggaatgcaggagcaactgctcctgtgtggcatatgcttactccaacattagcagcgggattattgatgacacgaggtgcctattgtggacgggggagctcatcgacatggagaaggttacccaaggaggggagaacctctatattcgagctaacagattaaacggtaacaggaaaacaaccgatatcctagaatttgtactaccagctgtggcaagtttgctgatactgatatgcatgcttatttggatctgcggcgttcgaggtaaacaaaggggcgatgagatctacggtggactgatgctgggagatattagcacctcccgtgagctctctgatagaaaagtagattttccaatttttagcttcagagaaattgcttccgcgacaaataatttctctgattccaacatacttggtcatggaggatttggcactgtttacaagggaacaatggatggtgataaggaaattgctgtcaaaaggctcagtaaaggttctgcacaagatgcttcaagaaattcagcgcttgactggacaacaaggttcaagataataaaaggtgttgctcgaggcattctttatctccaccaggactcaagactgacaataattcatagagatcttaaagcaagcaatgtattgttggatgctgatatgcaccccaagatatctgattttggtacagccaggatctttggtgggaacgaacaacaatcaaataccaacagagtggttggaacatatggctacatggcgcctgaatatgcactggaaggcataatatccgtcaaatcagacgtctatagcttcggtgtgctactcctggagattgtgagtggcttgaagatcagcggaatcatagacccaaccacgggccattccaacctcatagcctatgcatggagcttatggaagaacgggaacatgagtacttttgttgacgcctcgatctcggagagttcttcactcaatgaagctctaagatgcatccatatagcgctcttgtcgatacaaaacaacccgaatgctcggccactcatgtcgtgggtggtttcgagcttggataacaaagacatcgagctcccagagcccaaagagcctatgtactttgcacacaggagttatggagctgatggagcaggcgaaagctttgtgaatgacatgagcattgcatcggtggaagcgcgctag

SEQ ID NO: 86156 - DNA, 196 bp, Oryza sativa
  unsure (1)..(196): unsure at all n locations
  Clone ID: PAT_MRT4530_85223C.1
ctccaacctcttcggccttttgttcactataaaaataccttttttccatctatacaacaatnttttttaaatcaacaaccattcttctcacaaccatatttacattcaagaaaccaaaaacatttattttttttcacttttcataactataaactctttatataaatctcacaccttatatacctaaaacaatcta

SEQ ID NO: 86157 - DNA, 420 bp, Oryza sativa
  Clone ID: PAT_MRT4530_85224C.1
atggcgccgtttccgggagacaaggcatcctggcgtggacgaggtagccggccggcgctgggttcctggcggccggtgacgtcggcacctactcgtcagctcggctgccgaagggacggcggagcaggagcggtgccgacgccgcgcgcgctgacttatggtgtcctcgagaaatttggggcaattgatttcaaggggatgctggattgccaggttgattcccacaacatcgccttcctctcattgtctcatacactcattgtagtggtggatgggtatgtagtcgctgctattgtaggattagaaggtccatttggacctgcagctggatatcaccctctgaccctgagctccgggtcccatggcttgagccagaggttatcccgcttgacagggtcccacctgacagggtcatcctaa

SEQ ID NO: 86158 - DNA, 750 bp, Oryza sativa
  Clone ID: PAT_MRT4530_85225C.1
atgtcgtcgtcttcctcctccttcccgacctctcgctcccctttccccgccggcgccggcgccggcaccagcgggggcggaggaggaggaggagggggctccggcggcggaggtgggggtggaagatggagcggcgtgcgcccctggggctccagcggcggcacgtcggtgtcgtcgtcggggaagcggattcagaaggagctgatggacctcaacgcctccgactgctccgccggccctaagggcgacaacctctaccactggctctccaccatcatcggacctcagggatctccgtatgaaggagggatatttttcctcgatattgtattcccaattgactatccgtttaaacctcccatgggtattacaaaagtgatgaacattgagaaaggttttgtccattggaagcctaatgtgcttgggcatcaccttcatcctatgtcaatatactatttgcatagtagtctgcctacacagccctacatgatcacctgcttcatggtaactttcaagacaaggatttatcactgcaatgttgactccactggtaacttgagtatggacattttaagggaaggatggagtcctgctttaactatttcaaaggtgctacttgccattaaagccatcataacaaacccagatccatactgcccacttgtgccgagcattggacatttatacttgactgatagaactaagcatgatgaaatagctgcggagtggacgatgaggtttgcaagatag

SEQ ID NO: 86159 - DNA, 309 bp, Oryza sativa
  unsure (1)..(309): unsure at all n locations
  Clone ID: PAT_MRT4530_85226C.1
gtttcagtcccctcgcatcgccataaccacctcgcccaaatcgaagcacactagagagccacaagacccctcctcccgacacaaacaaccaaccacactacccttcgcgctggtctcgaccaccggagatggccgcctagctagtgtgccggtggcagctggaaggcatgggctgctgcttcagaagaagcgcaggaagcagctggccagtgcagctgtgttctcccgccgctgcaancgccggccgaggccgcgaaccgccgccccgcggcgttgcggaggaggagaggtcaagaggtgctctcgaga

SEQ ID NO: 86160 - DNA, 446 bp, Oryza sativa
  unsure (1)..(446): unsure at all n locations
  Clone ID: PAT_MRT4530_85227C.1
accccaaccttnttgtgtntgcttgtgagggccggacggggagtgaatgatgtgggtgggtggttgaattgaaatgtgggtgcaaatggaaaacaactggtgtggctgtggtggctggtttggcatgggatgatgcccctgtgtgtgttcttgggggctccgagagggggatttggtgcgttggatgaggaggatgagtgtgactgtttgctggccatgagtctggtgatgatggtgtgatggtgggaaaaccccactctgtaagtnccgcatgttttgggcatctgcaatgaccatgttgcgttggatgtgcatgctgtggtgaaaaaatgggaaagttggtgagctgttggttgttaagtagtgttagttttgctcatagttgtatatgttctgttggaaaaccatattaagtccacatttttccgcgccaaaaaaaaaaaaaa

SEQ ID NO: 86161 - DNA, 276 bp, Oryza sativa
  Clone ID: PAT_MRT4530_85228C.1
gccacataaacaaggacaagaactggggcatgccagtataaattgctagccgcaggccatccagtggcgcaaggctattgcttctttgtgacctgcaaggctgcaagtttgcaaatgcacttcaacatactcctttcgtcccataatataaagattttgagtttttatttatattatttgattactcgtcttattaaaaaaaattatgcaaatataaaaaaaacgaaaagttgtgcttaaaatactttggataataaaataagtaaaaaaaaaaaa

SEQ ID NO: 86162 - DNA, 142 bp, Oryza sativa
  Clone ID: PAT_MRT4530_85229C.1
gttgttttttaacaaaacgtcatcacaaatggatgcatggaaaaggcaaagaccattgaataaatgatactgccaacgtaaagggaaaaaacaaatgactaatcagagcggcacttacgggggcaccagaggcacacacaac

SEQ ID NO: 86163 - DNA, 650 bp, Oryza sativa
  Clone ID: PAT_MRT4530_8522C.1
gaggagacccatgttagtctatcgcagcccaatgaaggatttagggttcggtgggtctcatcctcctgacttcctgagtcggagcggcggcggcggcggcgtagtgcggcgcggtcacacgcaggtggtggtaaggacagcgcgcggcgaggtggagcgtcgtgcatcctcttcactcttcagctcaccatgaatagcatccaccgtctccccccatcgaccagctgctggcaacatacgtttctatcagcagctagctgtcctagctagcctcatcagtttagcgcatggatgggagattgggaggcggcactgctcgatgtctctctcaccctcatcttatcgcccgcgtcaacgatatatagcgccaaccaggtccaggaagttattaagttctttgatgatacccatgtagctgaccttcttcgatgatactttgttccccatatctgattggcttgatgttgatatacattgcaatgtgtaggcaccaaacaaagcagttgttgtgttcctctacatagagattttcacatcatctctgatatgtctcatgtttctgttaattatctcctatcccagtccactttcatgggctttaaagctgcactgccagtaaattgaggtggtaagcagccatcgaatcatcc

SEQ ID NO: 86164 - DNA, 468 bp, Oryza sativa
  Clone ID: PAT_MRT4530_85230C.1
atggcgagccttggctactacgacgaccgtggcgcgccgtcgtcctaccgctacgacgcgcggcaggcggcggacggggcggggacgtcgttccacctcttcatcttcctcgccaccgcgtcgctgctcggcgccgcctcgctctactcgcggtgcgagtccgcggtggagagcctgttcgaccaggtccgggtcgtcgtcgtcctgtccccgctgctgctcctgctcgcgatgcagtactgggcggcggccgcgggcggcggcgggcggcggtcggggctctcgtcgctgctcatggcgccgctggtaggggagcacagcggcggcggcggcggctggtacgaccagcgccgcgacggctcctcgccgtggggcgtcgcgctggcgctggcgctcgtgctgctgctcatctcctaccagtcttgcttccaagattggtggttcccgctcgtcaaccgccgccggtga

SEQ ID NO: 86165 - DNA, 2997 bp, Oryza sativa
  Clone ID: PAT_MRT4530_85231C.1
atgcactatagttcaggtgggttggttgggcctgttcaacgtggtgtagtggattgtgcaagacgcactgtcactctgtaccgagggccggaacaaccggttgttttctttgcacccccaacctctgttagtagttcagaacttcatcagataggactgtcagaaatccccatcttcagagagttcggagacgtgtttccggaagaactacccggtatgccgcccaagcgagagattgagttccggatagatcttgctccaggaaccactcctctgtacaagcgaccctaccgtatggcagcaaatgaactggccgaagttaagaaacagttggaagagttgaaagaaaagggagctctcaatgaagtcaccatcaaaaacaagtaccctcttccccggatcgatgatctgttcgatcagcttaaaggtgccacggtattctccaagattgatcttcgttccggatatcaccagttgcgcatccgtgaagcagatatcccgaagaccgcattcaccacgcgatacggactgtatgaattcacggtgatgtcattcggtttaaccaatgctcctgccttcttcatgaacttaatgaacaaagtgttcatggaatacttggataagtttgttgtggttttcattgatgacattctggtatactcacaatcagaggaagaccatcagcaccatctccgtctggtgttgggaaagttgcgggaacatcaattgtatgccaaacttagcaagtgtgagttctggttgtccgaagtcaaattcttagggcacgtgatatctgctaaaggagttgctgtggaccccgaaacagtgaccgccgtcaccgattggaagcaacccaagacagtcactcaaattcgcagtttcttaggtttggcaggatactaccggaggttcatcgagaacttctccaaaatcgctcgacccatgacacagttgttgaagaaagaagagaaatttgtgtggagcccgcaatgcgagaaggcgttccaaactctcaaggaaaagctggtttcctcgccggttttaatcttaccggatactcgcaaggacttcatggtgtattgtgacgcttcgccccaaggattggggtgcgtgctcatgcaggaaggtcatgtggtggcctatgcctcacgccagctatggcctcatgaaggcaactaccctacccatgatttggagttagccgcggtggttcatgctctaaaaatctggcggcactatctcattgggaatcgctgtgaaatatatactgatcataagagtttgaaatacatcttcactcagtcggacctgaatcttcggcagagaagatggttagaactcatcaaggattatgatgtgggaattcactatcatcctggtaaggccaatgtggtcgccgacgctctaagtcgaaaaagccattgcaacactcttggagtccgtggcattccacccgaacttaatcaacagatggaagccctgaacctaagcatagttagtcgtggattcttggctacgctggaagccaagcctaccttgctcgatcaaatccgcgaggctcagaagaacgatccagacatgcgtggactcctcaagaatatgaaacagggtaaagccgctggtttcatagaggatgaacacggaaccctatggaacagaaaccgggtatgcgttccagatgtcagggaacttaaacagctgatacttcaggaagctcacgagagtccttattccatccacccgggcagtacgaagatgtacttagacttgaaagagaaatactggtgggttagtatgaagcgggaaattgcggagttcgtggccctttgtgacgtgtgccagcgtgtcaaggcagagcaccaacgaccggccggacttctccaacctctccaagtaccagaatggaaatgggatgaaattgggatggatttcatcaccggacttccaaaaacccaaggtggatatgattctatatgggtagttgtggaccgattaaccaaggtagctcggtttattcctgtgaagaccacctatggagggaacaaactagccgagctctacttcgctaggatcgtgagtctccatggcgttcctaagaaaattgtatctgataggggaagccaattcacctctcacttttggaagaagctccaagaagagctgggtacccgattaaatttcagcaccgcgtatcacccgcagacagatggacagaccgagcgtctaaatcagatcctagaagatatgcttcatgcatgtgtcctagatttcgggaagacctgggataagagtctcccctatgccgagttctcctacaataacagctaccaagccagcatacaaatggcaccttatgaagcgttgtatgggcgcaaatgccggacaccgctcttgtgggaccaagttggggaaagccaagtgttcgggactgatatactgagagaagctgaagcgaaggtcagaaccatttgggataatctaaaggtggcccagtcccggcagaaaagttatgcagataaccgtcgccgtaacttggaattcgcagtggacgattttgtgtaccttcgggtcacgccattgcgaggtgtacacaggtttcagacgaaagggaagctcgcacctcggttcgtgggtcctttccgtatcattgctcggcgcggagaagtcgcttaccagttggagctgcccgcctccttgggcaacgtgcatgatgtgttccatgtgtcgcaactcaagaaatgccttcgagtgccgtccgagcaggccgactcagagcagattgaagttcgcgaagacttgacctacgtggagaggccagtgaaaatcctggacaccatggagcgcaggaccaggaaccgggtaatccgtttttgcaaggtccaatggagcaaccacgccgaggaagaagctacttgggagcgtgaaaacgagctgaaggcagcccatcctgatctcttcgctagttcctccgaatctcggggtcgagattccgtttaa

SEQ ID NO: 86166 - DNA, 1641 bp, Oryza sativa
  Clone ID: PAT_MRT4530_85232C.1
atgtcgacttccgccagcccgtctgccgcgccatcggccgagtacgcagagcacttgtccaatctagtcgcgattccaagtttgtctcatgagcatcactatttccttggtccgattggcaaccctgaccctactgagtttatcatagctgaaaccaataggattccttttagattggccaacccgaatctaggtcattggaagaataccttcaagtcttggcctgctcttgagaaaacttctcccgagaaaaactggtctgtgtgctgcggccctacaactaactggcaatttctagccgaagccctagaaataaagagacaattccccttgggcaaaatcctcctcggctatctgtaccaaatgttgaacaatgcatcagccaagatagctgtcggctcagtggttggagcaggtggtccatggtggctgctacaaacttggctgaatttagtagccatgaaagctgttaattggccatctgtggcagaagctgagttccccagattagagtcgattacagatgatgatggggtagagcgaacccaccgtaggtgcatgtcttatggagaatatgcattcacaccagctgatgcaggagcaaagctatcaactgaatttctgaaggactggttcttcagcttctacgatggatttcaaaaagatgcccgagtctgggaaatttttactactgccgtcagcccatgcatccttctagtcgtcatccaccagggcagaaacattcaaacctcatacgaattttatcacccaatgagttctgctaggcaatttggaatgggacaaatgccgatcggcttgtactttgtagacaaaatccagtgccgaggtgatataacttcagccttaatgatggatcggctgcttaacatcccaggacctccactaggcagcatcgaaaatatagagctggcaaggttcaggagcaaggcatttgacagatggtggggtgaatggaagctgcatctgttccaccaattggcttccatgtacatgacagacctctttccagatgtcatccctcagacaacagaatcttcccctcctcgcaaaagcaacagcggtaaggacatcgagtatgcttctggccttattccaaacagaggtggaccatctcccatggtcatcggctatcatgcccccaggacctcaagtctgcttcaagggcaactaagagaaccagctgatgctagtaaaaagagacagactaaagcatcggctgttgatacatcggctttggctccgaagaaaaaggccaagaagaagaaatccaagccaaccgatgatttgcctgccttagatccatccatagaacaagccttggatgaggaagagatcgaggaagatgtcgaccaagcggcagccgaactgagtgacttaggagaaaaaacaccatcggcttcacccaaacagactcctccgactcctactactccagctcacttttcaaggaaaaagaaaactatcatgaagaagaaatcaacaccagcaacatctaaaccagctcatccgcctcctcctccttcacctcatgtgcagccgacaccaagtaatcgtactccatcagctgcaggcagccataacattgaagaggaagaacaaccagctgctcctgccatccca

SEQ ID NO: 86167 - DNA, 794 bp, Oryza sativa
  Clone ID: PAT_MRT4530_85233C.1
tgccaaatgttgacacaaatgaattgtttttaccttttcaatgaacagttttttttaatgaaaagctctgtcactcagttatgtatcacctcatttattatcatatgtttttttacattcttgttcacattcactaggtcgtttttagatagtcagtactcctttcgtctagctaagctaaagttgatgttacgatcaagcatcatgggaataatttatcggaagtgcctatgtctcagtctatctgagcgttgtaggttttctgaagagagattcagaccttcatgtctgttgattctgaccgcacaataaacttatgtaacagccttcatgatgcttggagcttgccattgcagataggagttgctctctatctattgtatactcaagtgaactatgcatttttatctggattggcaataacagtcatactaatgccagtgaacaaatggatctctacaagaatagctcacgcgacagaaaagatgatgaaacataaagatgagaggataagttgtgcaggagaactgttagcacatattagaacagtgaagatgtacagctgggagagattattcactcaacgtttggtggaaagaagagaattagaagtgaagcatcttgcgactcgcaaatatctggacgcttggtgtgtctatttctgggcaaccacaccaacattgttctctcttttcaccttttccatatttgctataatgggccactcgctggatgctgccacggtaaaacaatatcctgatgatatgtttggacacatgcaatcagggtaacaa

SEQ ID NO: 86168 - DNA, 5118 bp, Oryza sativa
  Clone ID: PAT_MRT4530_85234C.1
atgtcatggcacagggccggtgtcctgctgctgggggctcagtcctgcctgcctgtcccgggggttccggccgtaggtgggattgggtcggtactcttgtctatgcctaggatgggttggaaactatgtcacgtcttccgtctgtataccgtggtgatggccggcagcgtcacccgtcgtggtttggatatgactggcttcgtcttggagctgcggggcatgtgcgtggtcttggggtatccacatggagtggactaccaggccaggccgcttccggagcaggagggtgacgatgcagagccccacgctggttgggaggtcactgtagtgatcctctctggctctcccgagcggacttcgctggcagtcaccgcgggtggagattccttccccgccgcttgccagaacgccgctctcctcgccatcggcactcttcaccagcgctacccggacgagttgcagcactcgccctaccgctaccaccctcgtcgcggaggagcccgcgactacgccaccttccgggatgctagctcggaggatgacgctaccatcgtgcacctggcgcgcatggtggaggcgtacgacgcggctcgaatcgacttccatcagatggtgcgtcgcgggatggtcgagaacaacttgaagatcctggagctgcgtcaggagaacctgcagctcaagaaggacctagacgcggtggaggcgcagctgcatcagctcaagatcgcccagggagaggtctgccgccccaagcgtcgccgcgtctgccgcagccagaagatcaccgcccgcaagagcacctccaggcccgagcttgttcgtcagtccctggcgtggacttgcttcgtcgagacccctcgtgccgagcccgtgcccgtggttccccaggagggggaagcctccggcgttggtagcacggaggatgcgctgttgctcaccttccgtcctggcccgtcgcagcggagaagtgctaacaccggtgctggcaaccaacccgaaggcagcaaccacaaccacgagggcaacccacctccacctcctcctccgcctccaccaccaccaccagataccaacgccattctcacccaaatcctcgcccagcaagccaacatgatgactgctttcctccaccacctccaaaatccgccacaacataatgctccaccaccacctccccaacactctaaacacgccgagttcctccgcatccgtccacctaccttctctagttccaacaaccccatggatgcgttggattggttgcatgccgtggggaaaaagctagacactgtgcagtgcagcgatgaggagaaagtcatcttcgccgcccaccaactgcaggggcccgcatctctatggtgggaccatttccaggctgcgcagccagaggggcaacctattacttgggctcgcttcactgccgctttccggaggacccatgtgcccgccggagtcgtggcccttaagaaaagagaattccgagagttaaagcaaggcaaccgctccgtgatggagtatttgcatgagttcaacaacctggcccgttatgccccggaggatgtgcgggaagatgaggagaagcaagagaagttcttggcaggaatggaccctgagctgtccgtccgtatagtctctggggactatccggatttccaacgtctggtggacaagagcattcgcttggaagccaagcacaaggaactggagtcgcacaagcgccgcttggcgaatttccgcaatcaacagggtgctaaccaaaggccgcagcagcagcagaatcaacaagggactcgtgcgccccgtcctcctacgccagccgtgcagcctggtcaaggccgcagggacgctcaaggtcagcagcgtctgtgcttcaactgcttcgagcccgggcactttgcggataaatgcccgaagccaaggcgtcagcaaggccaagcgcctccccgctccgacaacggtggtaaggatgtcattcggggtcgtgtgaatcacgtgacggccgaggacgtgctgacaactccagacgtcattgttggtacgttcctcatacattccatccctgctaccattttgttcgactctggagcttcccactcgtttatatctgtgccattcgtggggagaaatcagttgggggtagaaaggcttaggaaccctctgctcatcaccacccctggaggggttatgacagcaaagtattatagccctgccgtccctatagaaattcagggggttccttttcccacggatctgattctgctagacaccaagaacttggatgtgatccttgggatgaattggttggctcaattccaaggagtagtggattgcgcgagacgcactgtcactctgtaccgagggccggaacaaccggttgttttctttgcacccccaacctctgtcagaagttcagaacttcatcagataggactgtcagaaatccccatagtcagggagttcggagatgtgtttccggaagaactacccggtatgccgcccaagcgagagattgagttccgaatagatcttgctccaggaaccactcctctgtacaagcgaccctaccgtatggccgcaaatgaactggccgaagtaaagaaacagttggaagagttgaaagaaaaggggtacatacgtccgagtacttccccctggggtgctcctgtgatttttgtggagaagaaagacaagacgaagaggatgtgcgttgactacagagctctcaatgaagtcaccatcaaaaacaagtaccctcttccccggatcgatgatctgttcgatcagcttaaagaggaagaccatcagcaccatctccgtctggtgttgggaaagttgcgggaacatcaattgtatgccaaacttagcaagtgtgagttctggttgtccgaagtcaaattcttagggcacgtgatatctgctaaaggagttgctgtggaccccgaaacagtgaccgccgtcaccgattggaagcaacccaagacagtcacccaaattcgcagtttcttaggtttggcaggatactaccggagattcatcgagaacttctccaaaatcgctcgacccatgacacagttgctgaagaaagaagagaaatttgtgtggagcccgcaatgcgagaaggcgttccaaactctcaaagaaaagctggtttcctcgccggtgttaatcttgccggatactcacaaggatttcatggtgtattgcgacgcttcgcgccaaggattggggtgcgtgctcatgcaggacggtcatgtggtggcctatgcctcacgccagctacggcctcatgaaggcaactaccctacccatgatttggagttagcagcggtggttcatgctctaaaaatctggcggcactatctcattgggaatcgctgtgaaatatatacggatcataagagtttgaaatacatcttcactcagtcggacctgaatcttcggcagaggagatggttagaactcatcaaggattatgatgtgggaattcactatcatcctggtaaggccaacgtggttgccgacgctctaagtcgaaaaagccattgcaacactcttaacgtccgtggcattccacccgaacttaatcaacagatggaagccctgaacctaagcatagttagtcgtggattcttggctacgctggaagccaagcccaccttgctcgatcaaatccgcgaggctcagaagaacgacccggacatgcatggactcctcaagaatatgaaacagggtaaagccgctggtttcacagaggatgaacacggaaccctatggaacggaaatcgggtatgcgttccagataacagagaacttaaacagttgatacttcaggaagctcacgagagcccttattccattcacccgggcagtacaaatatgtacttagacttgaaggagaaatactggtgggttagcatgaagcgggaaattgcagagtttgtggccctatgtgatgtgtgccagcgtgtcaaggcagagcaccaacgaccggccggacttctccaacctctccaagtaccagaatggaaatgggatgaaattgggatggatttcatcaccggacttccaaaaacccaaggcggatatgattctatatgggtagttgtggatcgattaaccaaggtagctcgatttattcctgtgaagaccacctatggagggaacaaactagccgagctctacttcgctaggatcgtgagtctccatggcgttcccaagaaaatcgtatctgataggggaagccaattcacctctcatttctggaagaaactccaagaagagttgggaacccgattaaatttcagcaccgcgtatcacccgcagacagatggacagaccgagcgtctaaatcagatcctagaagatatgcttcgcgcatgtgtcctagatttcgggaagacctgggataagagtctcccctatgccgagttctcctacaataacagttatcaagccagcatacaaatggcaccttatgaagcgttgtacgggcgcaaatgccggacaccactattgtgggaccaagttggagaaagccaagtgttcgggattgatatcctgagagaagctgaagctaaagtcagaaccattcgggataatctaaaggtggcccagtctcggcagaaaagttatgcggataaccgacgccgtgatctagaattcgcagtggatgactttgtgtatcttcgggtcacgccattgcgaggtgtacacaggtttcagacaaaggggaagctcgcacctcggtatgtgggtcctttccgtatcattgctcggcgcggagaagtcgcttaccagctggagctgcccgcctccttgggcaacgtgcatgatgtgtttcatgtgtctcaactcaagaaatgtcttcgagtgccattcgagcaggccgactcagagcaaattgaagttcgcaaagatttgacctacgtggagaggccagtgaaaatcctggacaccatggagcgcaggaccaggaaccgggtaatccgtttttgcaaggtccagtggagcaaccacgccgaagaagaagctacttgggagcgtgaagacgagctgaaggcagcccatcccgatctcttcgccagttcttccgaatctcggggtcgagattccgtttaa

SEQ ID NO: 86169 - DNA, 1160 bp, Oryza sativa
  Clone ID: PAT_MRT4530_85235C.1
ccatagcaaattcgactaaggatgagcccttgatagccgctgcaacatatttttggtcgaatgcccttaatgctttcctcttcaaccaagggccaatgacaccaactttgctaaatatcacaatgattactggcttggatgtgacttcatcggctaataccatgagcttgaacaccaaaaatacctttgaattcaagaccaagagtattggaggctggttagggtatattgtagcatatatgggcaaaggacatgtcactccccgagagcatgtagcctttctgctgatgtggctggagaaatttctcttttgtggatcaagctgcggccctacaactaactggcaatttctagccgaagccctagaaataaagagacaattccccttgggcaaaatcctcctcggctatctgtaccaaatgttgaacaatgcatcaaccaagatagctgtcggctcagtggttggagcaagtggtccatggtggctgctacaaacttggctgaaattagtagccatgaaaagctgtaatttggcatcttgggcagaagcttgagtcccagaatagaagtcgatacagatgatgatggggtagagcgaacccaccgtaggtgcatgtcttatggagaatatgcattcacaccagttaatgcaggagcaaagctatctactgaatttcagaaggactggttcttcagcttctacgatggatttcaaaaagatgcccgagtctggttcccttatactgactcgatggattttgagctgccatcggactttagattttaggaaatcaattctgagaaatatgatcaatctagggaaatttttactactgccgtcagcccatgcatccttctagtcgtcatccagcaggaaacattcaaacctcatacgaattttatcacccaatgagttctgctaggcaatttggaatgggacaaatgccgatcggcttgtactttgtagacaaaatccagtgccgaggtgatataacttcagccttaatgatggatcggctgcttaacatcccaggacctccactaggcagcatcgaaaatatagagctggcaaggttcaggagcaaggcatttgacagatggtggggtgaatggaagctgcatctgttccaccaattggcttccatgtacatgacagacct

SEQ ID NO: 86170 - DNA, 7806 bp, Oryza sativa
  Clone ID: PAT_MRT4530_85236C.1
atggttatgccgatggtgacgaccaggagaaatgttaacaccggtgaaggcaaccaacccgaaggcagcaaccccaaccaccaaggcaacccacctccacctccacctccacctccaccaccaccaccagataccaacgccattctcactcaaatcctcgcccaacaggcaaacatgatgactgctttcctccaccacctccaaaacccgccacaacagaatgctccaccaccacctccccaacactctaaactcgccgagttcctccgcatccgcccacctaccttctctagctccaacaaccccgtggatgcgttggactggttgcatgccgtggggaaaaagctagacacggtgcagtgcagcgatgaggagaaagtcgtcttcgccgcccatcagctgcagggacccgcatctctatggtgggaccacttccaggctacgcagccagaggggcaacctattacttggactcgcttcaccgccgctttccggagaacccatgtgcccgctggagtcgtggctcttaagaaaagggaattccgggagttgaagcaaggcaaccgctccgtgatggagtatttgcatgagttcaacaatctagcccgttacgctccggaggatgtacgggaagatgaggagaagcaagagaagttcttggcaggaatggaccctgagctgtccgtccgtctagtctctggggactatcctgattttcaacgactggtggacaagagcatccgcttggaggccaagcacaaggagctggaatcgcacaagcgccgtttggcgaatttccgcaatcaacagggtgctaaccagagggtccgctacaccaatccctacccagggggatcctcctcgcagcagcagcaacagcagcagcaacctcgctccgcgcctcgacctcaattcgtggtgcgcgtcccacagccgcagcagcagcagaatcaacaagggactcgtgcaccccgtcctcctacgccaactgtgcagcccgttcaaggccgcagggacgctcaaggtcagcagcgtctgtgcttcaactgcttcgagcccgggcactttgcggataaatgcccgaagccaaggcgtcagcaaggccaagcgcctccccgctccaacaacggcgggaaggatgtcattcggggccgtgtgaatcatgtgacggccgaggacgtgctgacaactccagacgtcatcgttgaacttcatcagatagaactgtcagaaattcccatcgtcagagagttcggagacgtgtttccggaagaactacccggtatgccgcccaagcgagagattgagttccgaatagatcttgctccaggaaccactcctctgcacaagcgaccctaccgtatggcagcaaatgaactggccgaagttaagaaacagttggaagagttgaaagaaaaggggtacatacgtccgagtacttccccatggggtgctcctgtgatttttgtagagaagaaagacaagacgaagaggatgtgcgttgactacagagctctcaatgaagtcaccatcaaaaacaagtaccctcttccccggatcgatgatctgttcgatcagctcaaaggtgccactgtattctccaagattgatctccgttccggatatcaccaattacgtattcgtgaagaagatattccgaagaccgcattcaccacgcgatacgggctgtatgaattcacggtgatgtcgttcggtttgaccaatgcacctgccttcttcatgaacttaatgaataaagtgttcatggaatacttggataagtttgttgtggttttcattgatgacattctgatatactcacaatcagaggaagaccatcagcaccatctccgtctggtgttgggaaagttgcgggaacatcaattgtatgccaagcttagcaagtgtgagttctggttgtccgaagtcaaattcttagggcacgtgatatctgcaaaaggagttgctgtggatcccgaaacagtgaccgccgtcaccgactggaagcaacccaagacagttacccaagtccgcagtttcttaggtttggcaggatactaccggagattcatcgagaacttctccaagatcgctcgacccatgacgcagttgttgaagaaagaagagaaatttgtgtggagcccgcaatgcgagaaggcgtttcaaactctcaaggaaaagctggtttcctcgccagtgttaatcttgccggatactcgcaaggacttcatggtgtattgtgatgcttcgcgccaaggattggggtgcgtgctcatgcaggacggtcatgtggtagcctatgcctcacgccagctacgtcctcatgaaggcaactaccctacacatgatttggagttagccgcagtagttcatgctctaaaaatctggcggcactatctcattgggaatcgctgtgaaatctataccgaccataagagtttgaaatacatcttcactcagtcggacctgaatcttcggcaaaggagatggttagaactcatcaaggactatgatgtgggaattcactatcatcctggtaaggccaacgtggttgccgacgctctaagtcgaaagagccattgcaacaatcttaacgtccgtggcattccacccgaacttagtcaacagatggaagccctgaacctaaacatagttggtcgtggattcttggctgcgttagaagccaagcctaccttgctcgatcaaatccgcgaggctcagaagaatgatccggacatgcatggactcctcaagaatatgaaacagggtaaagccgctggtttcacagaggatgaacacggaaccctatggaacggaaatcggcgtgtcaaggcagagcaccaacgaccggccggacttctccaaccactccaagtacccgaatggaaatgggatgaaattgggatggatttcatcactggacttccaaagacccaaggcggatatgattccatatgggtagttgtggatcgattaaccaaggtggctcgatttattcctgtgaagaccacctatggagggaacaaactagcggagctctacttcgctaggatcgtgagtctccacggcgttcccaagaaaatcgtatctgataggggaagccaattcacctctcacttttggaagaagctccaagaagagctgggcactcgattgaatttcagcaccgcctatcacccgcagacagatggacagaccgagcgtctaaatcagatcctagaagatatgctccgcgcatgtgtactagatttcgggaagacctgggataagagtctcccctatgccgagttctcctacaataacagctatcaagccagcatacaaatggcaccatatgaagcgttgtacgggcgcaaatgccggacaccgctcctgtgggaccaagttggggaaagccaagtgttcgggactgatatcctgagagaagctgaagctaaagtcagaatcattcgggataatctaaaggtggcacagtcacggcagaaaagttatgcagataaccgtcgccgtgatctggaattcgcagtggatgactttgtgtatcttcgggtcacgccattgcgaggtgtacacaggtttcagacgaaagggaagcttgcacctcggtatgtgggtcctttccgtatcgttgctcgacgcggagaagtcgcttaccagttggagctgcccgcctccttgggcaatgtgcatgatgtgttccatgtgtcgcaactcaagaaatgtcttcgagtgccgtccgagcaggccgactcagagcaaattgaagttcgcgaagacttgacctatgtggaaaggccagtgaaaatcctggacaccatggagcgcaggaccaggaaccgggtaatccgtttttgcaaggtccagtggagcaaccacgccgaagaagaagctacttgggagcgtgaagacgagctgaaggcagcccatcccgatctcttcgccacggcaaagggaggtcctgtcaaaaaggtggctaagaagaaaggactcgtcgatgtcgctcgcgtttttagcgacgatgagtcctccgacgggactccgacctcgcccgctggtcgcagcctggatctttcggccgcccccattccttcactcggcgtcgctggagtgggcggtagtaccgccgctggggcttcggcttctgcggaaaggattgtgacggccgcggcgaaagtattcggcagtcctccgcatcagccggttgcgtcgccgctgattgaggcgaagggaaagagagcggtcgctgagacgtccacttcggaatattcgctctcggtaccccgcttcgcccctggcgatttcgagacgcgggcggacctccttccttttgtggagggggtaagcaatcttgtactgcccgccagtgccccgagcttgttcaccgaactgaatgagttcgatgaggggtgtactgctataaaaagcctggctgttcggatcctcgcggctcactgctcaatggagcgaaccgtgcgagcccgacttgatgggttcaaaagccatcttcgggccaaggatgatgaactaggccgtaaaaatttggagatggacgcccttgccaactcccttaaggaggcgaaggctgaaaacaagcggctccaatcggaactggagaaagggaaagaagccagggccgaagtcgatcgcttaaaggccgaactggagaaagagaaggcccacaccgccgtgctcatagattattacagcctcaccgagccgaagatggaggctcttcggcaggaggttcgcaaggccgaagcaagcgctgcagaggagtcgtggcggttttcgcgggagatagtgaaaaccaccgagtccgcgcggacagcgtgccaaacgcttcgcctcgcccgtattgacatgggcgcgaaagtgtggggtgtcccctccgaagatgcatcagccttcgacttctccgaatggacccaacaggctggtggttcggtttccgactgcgccaccgcatacggcgactgctgtgcgcgcgtgtcagcgacctttaccatgggcctcctgcagcagttcggctgcgagcacatcgccgagttccccaagtacgcgaagggggattgggaaatcagtgcgcaagacatttcgcccacacttcgtgcgtggcgaaaacaattttggcagaaggacggccgctccgccgctaaggcgcgccttttggagcagctggcgaaagctgaggcggcggacctttgtgaagatgaaggcgcggcggccagagggggtggaggcgatgcccgggaccatgcagagatcatactggggcgcggcttggcttcggccatgacgctggcaactttcgcacttcttgatttgctcaacacagactttcaacacagtgggccaataaactccttgtctaaatactttggaggccactgttcttgcagcctggtgcgcgccacatagtccctggtgtatttcctttgccatttcttcgccttcggcaaaagagatgcaacaaagtaagggttgaagtaccccggagcggtaaagctgacccgagaccatcttatacttcgtggctctaagttgcaaacgctttgcttttgcttcgtctaccggaagccagccagtttcaaggtgtttcacaaatggggttcgccagtcatatgggtcttcgcccagtttctcctggtcgattgccatgacttccgagctgtccatggacacacttggagcatgtaggacttcgaaaaagatgccaggcgaatgtgggccaccacaagcagcggatttcgccagggcgtctgcttcctcgttctggcttctaggtaagtgttcgaccgttatgccagtgaagtatttttccatgaaccgaacagcctccagatacctcttcattccttcttcttttgcttcgaaggagttgtcaacatgacctgctaccaacttggagtcgattcgaattagcaagcgccggactcctagtgctttcgcctttcttaggcccaggaaaacggcttcgtattctgctgcgttgttggttgtgtcgaactgcagtcttgctgcgtaccgaatcggcacatcattcggcgaaaagaggactgccgcaatacctgcccccctgtgcgaccacgagccatcagagcacatcacccagaattgttcggcgggctcggggtcgagggcaagtaccggtgtccattcagctacgaagtcagctagcacttgagacttgatagcagagcgtgcaacaaaatgcaagtcgaacggggatagctctgccgcccacttgctgagccggcccgtgacttccttgcctcggagtatttcgcccaaggggtactgtgatggcactatgactttgtgggcctggaagtagtgcttaagctggcacgaggccatcactagggcgtaagcgagcttttccatttcgatgtatcttgtcttcgctccttgcagtgcttcggagacgaagtagaccggtttctgtccgaactctgtttcttggacgagtgcagcactgactgccaccggcgaagctgctaagtataatagcagttcgcttcctgggggtgggcttatcagggctggcgggctttgcaagtattgctttagctcgtcgaatgttgcctggcactctggggtccaatcaaactttcccgcgcccaggagggtcttgaagaagggcaaacctctttcggctgcctttgagaggaatcgactgagtgccgcaattcggcctgcaagcttttgtacttcatgtacgcttgacggaggcttcatttgctggatggcatcgattttctcgggattcgcctcgatgccaaggactttgtacaccagtctggcgaaggttgctcctgcattccttaagccgaaaggcatcctgaggtgacaaaatgtgccaaacggagtgatgaaggatgctttggggatgtcaagcgggttcatgtggatctggtggtagtcggaatatgcgtccaggaaactcatgagctcgcatccagctgttgaatccacgagctggtcgatccgtggcaaggggaagtcgtctttcggatacgctttgtttaggtctgagaaatcgacacacatgcgccatttgccatttgacttccgcaccaacactggattcaccaaccactccggatggtcaatctcttggattacccctgccctgagcaatttttgtacctcggctttcgccgcttcttggcggtcggcagacatcttgcgcaacttctgttttcttggcttaatgtccagcttgaccgccaggtgatgcatgatgagatctgccggaacaccccccacctcgtcagggctccaggcgaatgtgtcgatgttcttcttgagcacctctaggatactctcaacttcttcttcgcccatgtcgccccccagtgatacaagctttgtggggtcggcatcatcaatctgcactttcgttatcttgccgtgaggggtgggctttggcatgttcttcggctgttcatgcggttcggtctcaacgctgtgcactgctctgttgattatggctagatcgcttttcgaagcggccgaagactgaagccccttgactactatcacccctgccaggccgggcatcttgagcttgaggtaattgtggtgggaaatggcttcaaacttgttcagggttgcacggccgaagatggcgttgtagttgtacgggatgtcgacgacgtcgaacagtatttgctcttcacgtctgttctcccccgagccaaaggctatcagcaagagtgcttggccgagtacttgaactgcttctccgccgaaaccgcggagtgatgctggtgctggggtaagtgcttgggtaggcaaccccat

SEQ ID NO: 86171 - DNA, 140 bp, Oryza sativa
  Clone ID: PAT_MRT4530_85237C.1
atggatctgtcggccgccgatgccgtcgcacctctagccggcagacccacctctccgccggttgacgtcgccgcgccacaccttcagccggtggccgcactgccagatccctgcagccaatgggcgagcgccgtcacgct

SEQ ID NO: 86172 - DNA, 6047 bp, Oryza sativa
  Clone ID: PAT_MRT4530_85238C.1
atggagcccgagagcgccgcgccggtttccttcccctccggccgccctctcccccttccaaccctatataaaccctccccgcacctcctccgttcgtttccgcctctcgccgcccttcctcctcgccggaatcgagcttgcgccgtcgctctctctctccgccgtcgccgccgagctccggtccgccgccgtcgtcgccccggaccacctcccacctcggcgccgcctccttcggcttcgccgcatcctcgtcgacctcgtccacccctccgtttcgctcgtcgaccgccggagcgcccccgtccccgtcgacccgagccgcgccgccgccttcctccgctccggccgccttttcgtcgtcgccgtcgacctagggtgagccgtggaccaccgcctcgtttccccctttccctcccttctctcggccgccgctccgccgtgcctatggccgccgccggcgaccataggggcgcgcgcgcgccgcctcccgccggccgcgccgccgtggccgccttcgagtgcaccgagcggctgccgcgtggggcccggtcgtcagccgcccgcgccctcgggtgcggctgacgcgtggggcccacggcgccggccggtgcgagcccgggtgcgcccggtccaccgtggacccgcctcggccatataaggaccggtcttcgggcctctgttgcaaagcactaccgtacttccacatgtctagtgggacaaatgaaggctacacgagctgcggcccggtagtcgagatgtcatggcacagggccggtgtcctgctgcaaggggctcagtcctgcctacctgtcccgggggttccggccgtaggtgggattgggtcgatgtacacctctgatcagagtataatctattcgaatagccgcgccctcggttatgggcaagccgagcaatgtacccaaatggccagcagcatcaaccgtcgtggtctggacctgactggcttcgttttggagctacggggcatgtgcgttgtcctagggtatccgcatggagtggattaccagggcaagcagctcccggagcaagagggtgacgatgcagagccccacgctgcttgggaggttactgcagtgatcctcactggctcacccgagaggacttcgttggcagtcaccgcgggtggtgattccttctccgccgcttgccagaacgccgcactcctcgccatcggcactcttcaccagcgctacccggacgagttgcagcactcgccctaccgctaccaccctcgtcgcggaggagcccgcgactacgccaccttccgggatgctagctcggaggatgacgctaccatcatgcacctggcgcgcatggtggaggcgtacgacgtggcccgtatcgacttccatcagatggtgcgtcgcgggttggtcgagaacaacatgaagatcctggagctgcgtcaggagaatctgcagctgaagaaggacctagacgcagtggaggcgcagctgcatcagctcaagatcgcccagggagaggtctatcgccccaagcgtcgtcgcgtctgccgcagcctgaagatcaccgcccgcaagagtacctccaggcccgagcttgttcgtcagtccctggcgtggacctgcttcgtcgagacccctcgtgccgagcccgcccccgttgttcctcaggaggatggagcctccggcgttggcagcacagaggatgcgttgctgctcaccttccatggtgacaaccaggagaagtgctgctaccggtgaaggcagtcacctcgaaggcagcaaccacaacaaccatggcagcccacctccacctcctcctccgcctccaccaccaccaccagacaccaacgccatcctcacccaaatcctcgcccagcaggccaacatgatgactggtttcctccaccacatccaaaatccgccacaacataatgctccaccaccacccccacaacattctaaactcgccgagttcctccgcatccgtccgcctaccttctctagctccaataaccccgtggatgcgttggattggttgcatgccgtggggaaaaagttagacaccgtgcagtgcagcgatgaggagaaagtcatcttcgccgcccaccaactgcaggggcccgcatctatatggagggaccatttccaggctacgcagccagaggggcaacctattacttgggcccgcttcaccgtcgctttccggagaacccatgtgcccgccggagtcatggcccttaagaaaagggaattccgggagatgaagcaaggcaaccgctccgtgatggagtatttgcatgagtttaacaacctggcccggtacgccccggaggatgtacgggaagatgaggaaaagcaggagaagttcttggcaggaatggaccctgagctatccgtgcgtctggtctccggggactatccggatttccagcgtttggttgacaagagcatccgcttggaagccaagcacaaggaactggagtcgcacaagcgtcgcttggcgaatttccgcaatcaacagggggctaatcaaagggtccgctacaccaatccctatccagggggatcgtcctcgcagcagcaacagcagcagcaacctcgctccgcgccgcgtcctcaattcgtggtgcgcgtcccatagccgcagcaacagcagagtcagcaagggactcgtgcgccccgtcctcctatgccagccgtgcagcctggtcaaggccgcagggacgttcaaggtcagcagcgtctgtgcttcaactgcttcaagcctgggcactttgcggataaatgcccaaagccgaggcgccagcaaggccaagcgcatccccgctccaacaacggtggtaaggatgtcattcggggtcgtgtgaaccacgtgacggccgaggacgtgctgacaactccagacgtcatcgttggtacgttcctcattcattccatccctgctaccattttgttcgactctggagcttcccactcgtttatatctgtgccattcgtggggagaaatcagttgggggtagaaaggcttaggaaccctctgctcatcaccacccctggaggggttatgacagcaaagtattatagccctgccgttcctatagaaatccagggaattccttttccctcggatctgattcttctagacaccaagaacttggatgtgatccttgggatgaattggttggctcaattccaatgtgtagtggattgtgcaagatgcactgtcactctgtaccgagggacggaacaaccggtcgttttctttgcacccccaacctctgtcggtagttcagaacttcatcagataagactgtcggaaatccccatcgtcagagagttcggagatgtgtttccggaagaactacccggtatgccgcccaagcgagagattgagttccggatcgatcttgctctaggaaccactcctctgtacaagcgaccctaccgtatggcagctaatgaactggccaaagtcaagaaacagttggaagagttgaaagaaaaggggtatatacggccgagtacttccccctggggtgctcctgtgatttttgtggagaagaaagacaagacaaagaggatgtgcgttgactacagagctctcaatgaagttaccataaaaaacaagtaccctcttccccggatcgatgatctgttcgatcagcttaaaggtgccactgtattctccaagattgatcttcgttccagatatcaccaattacgtattcgtgaagaagatatccctaagaccgcattcaccacgcgatacggactgtatgatttcacggtgatgtcattcggtttaaccaatgctcgtgctttcttcatgaacttaatgaacaaagtgttcatggaatacttggataagtttgttgtggttttcattgatgacattctggtgtactcacaatcagaggatgaccatcagcaccatctccgtctggtgttgggaaagttgcgggaacatcaattgtatgccaagcttagcaagtgtgagttctggttgtccgaagtcaaattcttagggcacgtgatatctgctaaaggagtcgctgtggaccccgaaatagtgaccgccgtcactgattggaagcaacccaagacagtcactcaaattcgcagcttcttaggtttggcaggatactaccagaggttcatcgagaacttctccaaaatcgctcgacccatgacacagttgttgaagaaagaagagaaatttgtgtggagcccgcaatgcgagaaggcgttccaaactctcaaggaaaggctggtttcctcgccggttttaatcttaccggatactcataaggacttcatggtgtattgtgacgcttcgcgccaaggattggggtgcgtgctcatgcaggaaggtcatgtggtagcctatgcctcacgccagctacggccccatgaaggcaactaccctacccatgatttggagttagccgctgtggttcatgctctaaaaatctggcggcactatctcattgggaatagctgtgaaatatatactgatcataagagtttgaaatacatcttcactcaatcggatctgaatcttcggcagagaagatggttagaactcatcaaggattatgatgtgggaatccactatcatcctggtaaggccaacgtggtcgccgacgctctaagtcgaaaaagccattgcaacactcttggcgtccgtggcattccacctgaacttaatcaacagatggaagccctgaacctaagcatagttggtcgtggattcttggctacactggaagccaagcctaccttgctcgatcaaatccgcgaggctcagaagaatgatccggatatacgtggactcctcaagaatatgaaacaaggtaaagccgctggtttcacagaggatgaacacggaaccctatggaacggaaatcggcgtgtcaaggcagagcaccaacgaccggccggacttctccaacctctccaagtaccagaatggaaatgggatgaaattgggatggatttcatcaccggacttccaaaaacccaaggcggatatgattctatatgggtagttgtggaccgactaaccaaggtagctcggtttattcctgtgaagaccacctgtggagggaacaaactagccgatctctacttcgctaggatcgtgagtctccatggcattcctaagaaaattgtatctgataggggaagccaattcacctctcacttttggaagaagctccaagaagagctgggtacccgattaaatttcagcaccgcgtatcacccgcagacagatggacagaccgaggtctaaatcagatcctagaagatatgcttcgcgcatgtgtcctagatttcgggaagacctgggataagagtctcccctatgccgagttctcctacaataacagctaccaagccagcatacaaatggcaccctatgaagcgttgtatggacgcaaatgccggacaccgctattgtgggaccaagttggggaaagccaagtgttcgggactgatatcctgagagaagctgaagctaaagtcaaaaccattcgggataatctaaaggtggcccagtctcggcagaagagttatgcagacaaccgacgccgtaatctggaattcgcagtggacgattttgtgtaccttcgggtcacgccattgcgaggtgtacacaggtttcagacgaaagggaagctcgcacctcggtttgtgggtcctttccgtatcattgctcgacgtggggaagtcgcttaccagttggagctgcccgcctccttgggcaacgtgcatgatgtgttccatgtgtcgcaactcaagaaatgccttcgagtgccgtccgagcaggccgactcagagcagattgaggttcgcgaagacttgacctacgaggagaggccagtgaaaatcctggacaccatggagcgtaggactaggaaccgggtaatccgtttttgcaaggtccaatggagcaaccacgccgaggaagaagctacttgggagcgtcaagacgagctgaaggcagcctatcccgatctcttcgccagttcttccgaatctcggggtcgagattccgtt

SEQ ID NO: 86173 - DNA, 1959 bp, Oryza sativa
  Clone ID: PAT_MRT4530_85239C.1
atggtgcaacaacagcagcagcagcagcacagaatctacatcctacagttcaggaagggcgagcaggatcaggaggtcgcatgcaaggtctcgacgccgcccaaggccggcaccggccgccgtgtcatgtactactaccacgactacggcggcggcggcgccggcaagaacggcaaggcggcgcagcctagggcgttcagcatgcgccgcttctttgggctgctgctgctgtcgttcgtctcggttgggacgctgttcgtggcgcccgtgtcgttcttctccttcgtgcactccgacgagggtggcggtggcgcggccgcggcggcgcggcgtgcggtggaggtcgccgcggcgccgtgctctggcatggggaatgatagcctttgctgtgaccggacgtcgacgcgggcggacatctgcttcgcgcgcggcgacgtgcggatgcactcggcgagcgcgtcgttccagctcgtgtcgtcgtcgtccgggaacgcgacggcggcggcggtggaggaggagaggatacggccgtacacgcgcaagtgggaggcgaacgtcatggcgacgatcgacgaggtgcggctccgtcgcgtgcccgccggcggcgcggcgcggtgcgacgtcgtgcacgacgtgcccgccgtggtgttctccacgggcgggtacacgggcaacgtgtaccacgagttcaacgacgggatcctgccgctgttcgtgacgtcgaaccacctccgccgccgcgtggtgttcgtcatcctcgagtaccacgactggtggatgaccaagtacggcgacgtcgtgtcccgcctctcggcgttcccgccgatcgacttcaccgccgaccgccgcgtgcactgcttcccggaggtgatcgccggcctgcgcatccacggcgagctcaccgtcgatcccgagaagacgccggagggcaagagcatccgccacttccggacgctcctcgacgacgcctaccgcggccgcatccagtacctcgagcggctcgagcgccgcgccgctcgcagccgcaagcgccgcgccgccgcggccaagcccaccaccacctccatcgccctgccgatcatggcgcctccggcgaagcaggcctcgccgtcgccgccggacaggcctcgtctggtgatcgtgtcgcgcacggggtcccgcgtgatcgagaacgaggcggacgtcgccgcgctcgccgcggacgtcggcttcgacgtgcgcgtggtccgccccgagcgcaccaccgagctgtgcaagatataccgggagctcaacgccagcgacgccatggtgggcgtgcacggcgccgccatgacccacttcctcttcatgcgcccgggcaaggtgttcgtccaggtcgtgccgctcggcaccgactgggccgccggcgcctactacggcgagccggcggcgcgcctcggcctccgctacgtcggctacaagatcctccccgaggagagctccctctcccgcgagtaccccaccggcgaccccgtgctcaccgaccccgccggcgtcggcaagcgcggctgggacgtcaccaagaaggtctacctcgatcgccagaacgtccgcctcgacctgccacgcttcagggaggtgctcgtcggagctcaccggcacttggtcgccggcaagcggcggcgccggcaaagagagagccagtgatcgagcaatcaatcgattgatcgtttgcttgatttgacccggtttggttaaccaaattaactactcccatatgctgctctagctcgctctctctctctctctctacacaatttttttttgcttttttttttcttttcttgttgttactcaaacactgacttgacctgacaattctttgcattagattgtgaattgatgtactttgtggttttacacgtttcagttctatgaacttgatgtgaatatatactcaataaagatatcaaattacactgcaaaaaaaaaaaaaaa

SEQ ID NO: 86174 - DNA, 2473 bp, Oryza sativa
  Clone ID: PAT_MRT4530_8523C.1
gcacgagggtcctgtcatcttgtacccggactccgcccaatacgccccacacccctccgctcctgtcctgtcatcttgtacactatcgcgttgctgatctcctcctcgactgcctcgtttcgcgcgaccggagacggccatggcgagcacgccgaacgggctggcgcggatcgagacgcacggggcgaagacgaagaagcacgagaacgggatatgccacgacgacagctcggcgccggtgcgggcgcagaccatcgacgagctccactcgctgcagcggaagcggtcggcgcccaccacgcccatcaaggacggcgcctcctcgcccttcgccgccgccctctccgaggaggagcgccagcgccagcagctccagtccatcagcgcgtcgttggcgtcgctgacgcgtgagaccgggccgaaggtcgtcaggggagatccggcgaggaagggcgaggccgcggcgaagggcgcgccgtcgccgcacccgcagccggtgcaccaccaccacccgcacgtcaccccgaccatcgccgtcagcgacagctccctcaagttcacccatgtgctctacaacctctcgcctgctgagctgtacgagcaggcgatcaagtacgagaaggggtcgttcatcacgtccaccggcgcgctggcgacgctgtccggcgccaagaccggccggtcgccgagggacaagcgcatcgtcaaggatgaggcctccgcgcaggagctttggtggggcaagggttcgcccaacatcgagatggacgagcacactttcctcaccaacagggagagggccgtcgactacctcaactcccttgacaaggtgtttgtgaacgaccagttcctgaactgggacacggagaaccggatcaaagtccgtatcatctcggccagggcgtaccactcgctcttcatgcacaacatgtgcatccggccgacggaggaggagctggaggagttcggcacgccggacttcaccatatacaacgccgggcagttcccctgcaaccggtacacgcactacatgacgtcgtcgacgagcgtagacatcaacctcgctaggagggagatggtgatcctcggcacgcagtacgccggggagatgaagaaggggctcttcggggtgatgcactacctcatgcccaggaggggcatcctctccctgcactccggctgcaacatgggcaagcagggcgacgtcgccctcttctttggactgtcaggtactggaaagactactctgtcaactgaccacaacaggctgctgatcggcgacgatgagcactgctggagtgacactggcgtgtccaacatcgagggtggttgctatgccaagtgcatagacttgtcacaggagaaagagcctgatatttggaatgccatcaagtttgggaccgtgttggagaatgtcgtctttgatgagcacacccgtgaagttgattacaccgacaaatctgtcaccgagaacacgcgcgctgcttaccctatcgagtacatccccaacgccaagataccgtgcgtcgggccacacccgaagaacgtcattctcctggcatgcgacgctttcggcgtcctccctcctgtcagcaagctaaaccttccacagaccatgtaccacttcatcagtggctacactgctctggttgccggcacggaggatggcatcaaggagccgcaggctacgttctctgcttgcttcggtgcagcgttcatcatgctccacccgaccaagtacgccgccatgctcgccgagaagatgcagaagtatggcgccaccgggtggctcgtcaacaccggttggtccggtggaaggtacggagttggcaagcggatcaggctgccgtataccaggaagatcatcgacgccatccactccggtgagctcctcaccgccaactacaagaagacggaggtgtttggcctggagatccccactgaaatcgacggcgtcccgtctgaaatcctcgacccgatcaacacctggacggacaagggcgcgtacaaggagacgctcctgaagctggctggcctgttcaagaagaacttcgaggtgttcgccaactacaagatcgggggagacagcagcctgacagacaagatcctcgctgctggaccaaacttttgagttactgaagaataaaaaatatgcagataaagaacgcgatgaagctagtcagttggttacaataaagaagtgggtctatgcgtgtttgccaatgatgatgacgaaaatgttggatcgatgtgcagctaccggtagagtttagctagcttcctataagtttcatgcgtgtctgttaggttctgtcagtttgtctagcttgatggtgtgtatgcagtatgctccattcccccttcccctgtacacatctctattttctgaattggaatttgaaagcatcttgatttgatcaaaaaaaaaaaaaaaaaaaaaaaaaaaaaataccaaaaaaaaaaaaaaaaaaaa

SEQ ID NO: 86175 - DNA, 2991 bp, Oryza sativa
  Clone ID: PAT_MRT4530_85240C.1
gccaacatgatgactgctttcctccaccacctccaaaatccgccacaacagaatgccccaccaccacctccccaacactctaaactcgccgagttcctccgcatccgcccacctaccttctctagctccaacaaccccgtggatgcgttggattggttgcatgccgtggggaaaaagctagacactgtgcagtgcagcgatgaggagaaagtcatcttcgccgcccatcagctgcagggacccgcatctctatggtgggaccatttccaggctacgcagccagagggacagcctattacttgggctcgcttcaccgccgcttttcggaggacccatgtgcccgctggagtcgtggcccttaagaaaagggaattccgagagttgaagcaaggcaaccgctccgtgatggagtatttgcatgagttcaacaacctggcccgttacgctccggaggatgtgcgggaagatgaggagaagcaagagaagttcctggcaggaatggaccccgagctgtccgtccgtctagtctctggggattatccggatttccaacgtctggtggacaagagcatccgcttggaagccaagcacaaggaactggagtcgcacaagcgccgcttggcgaatttccgcaaccaacagggtgctaaccaaagggtccgctacaccaatccctatccagggggatcctcctcgcagcagcaacagcagcagcagcaacctcgctccgcgcctcgacctcaattcgtggtgcgcgtcccacagccgcagcaacagcagaatcaacaagggactcgtgcgccccgtcctcctacgcaaactgtgcagcctggtcaaggccgcagggacgctcaaggtcagcagcgtctgtgcttcaactgcttcgagcccgggcactttgcggataaatgcccgaagccaaggcgtcagcaaggccaagcgcctccccgccccaacaacggtgggaaggatgtcattcggggtcgtgtgaaccacgtgatggccgaggacgtgctgacaactccagacgtcatcgttgagaagaaagacaagacgaagaggatatgcgttgactacagagctctcaatgaagtcaccatcaaaaacaagtaccctcttccccggatcgatgatctgttcgatcagcttaaaggtgccactgtattctccaagatcgatcttcgttccggatatcaccaattacgtatccgtgaagaagatattcctaagaccgcattcaccacgcgatacggattgtatgaattcacggtgatgtcgttcggtttgaccaatgcacctgccttcttcatgaacttaatgaacaaagtgttcatggaatacttggataagtttgttgtggttttcattgatgacattctaatatactcacaatcagaggaagaccatcagcaccatctccgtctggtattgggaaagttgcgggaacatcaattgtatgccaaacttagcaagtgtgagttctggttgtccgaagtcaaattcttagggcacgtgatttctgctaaaggagttgctgtggaccctaaaacagtgaccgccgtcaccgattggaagcaacccaagacagttactcaagtccgcagtttcttaggtttggcaggatactaccggaggtttatcgagaacttctccaaaatcgctcgacccatgacccagttattgaagaaagaagagaaatttgtgtggagcccacaatgcgagaaggcgtttcaaactctcaaagaaaagctggtttcctcgccagtgttaatcttgccggatactcgcaaggacttcatggtgtattgtgacgcttcgcgccaaggattggggtgcgtgctcatgcaggacggtcatgtggtggcctatgcctcacgtcagctacggcctcatgaaggcagctaccctacccatgacttggagttagccgcagtggttcatgctctaaaaatctggcggcactatctcattgggaatcgctgtgaaatatatactgatcataagagtttgaaatacatcttcactcagtcggacctgaatcttcggcaaaggagatggttagaactcatcaaggattatgatgtggggattcactatcatcctggtaaggccaacgtggttgccgacgctctaagtcggaaaagccactgcaacactcttaacgtccgtggcattccactcgaacttaatcaacagatggaagccctgaacctaagcatagttagtcgtggattcttgactgcgttggaagccaagcccaccttgctcgatcaaatccgcaaggctcagaagaacgacccggacatgcatggactcctcaagaatatgaaacagggtaaagccgctggtttcacagaggatgaacacggaaccctatggaacggaaatcgggtatgcgttccagataaccgagaacttaaacagctgatacttcaggaagctcacgaaagtccttattccatccaccctggcagtacgaagatgtacttagacttgaaggagaaatactggtgggtcagtatgaagcgggaaattgcagagttcgtggccctttgtgatgtgtgccagcgtgtcaaggcagagcaccaacgaccggccggacttctccaacctctccaagtaccagaatggaaatgggatgaaattgggatggatttcatcaccggacttccaaaaacccaaggtggatatgattctatatgggtagttgtggatcgattaaccaaggtagctcgatttattcctgtgaagaccacctatggagggaacaagctagccgagctctacttcgctaggatcgtgagtctccatggcgttcccaagaaaatcatatctgataggggaagccaattcacctctcacttttggaagaagctccaagaagagctgggtactcgattgaatttcagcaccgcctatcacccgcagacagatggacagaccgagcgtctaaatcagatcctagaagatatgctccgcgcattgtattag

SEQ ID NO: 86176 - DNA, 6442 bp, Oryza sativa
  Clone ID: PAT_MRT4530_85241C.1
aagtggttttataaaaagaaaaatccctaaaagtcctttttcccccttcctctattgggccggctcggcccagctccctccctctctctcctctcccctgaggcccatcggccttcccccgcgcgcgcgtcgctgactagcgggcccgcccgccaccctcgctgacgggtggggcccacccgtcatcccctacctcgtgccgcgcccgccgcctcgcccgtgccctagcgccgccgccgccgcggattccgccgcatcccgccggccccgcgcgcaataaagaggggggaaatcactccccgtgattccctgcctctttccccccacttttccctctctctctctcggattcgtttggaaatcctcccgcaaacttcgccggcgtcattgatggagccgagatcgccgcgccggtttccttcccctccggccgccctctctcactcccaacactatttaagcactccccgtgcctccctcctccgtttccgacccttgccgctttctctccccgtcggaatcgagctcgcgccgtcgtcctctctctccgccgttgccgccgagcttcggttcgccgccgtcgtcgccccggacctcctcccgcttcggcatcgcctccttcggcttcgccgcgtcctcgtcgacctcgtccaccccttcgtttcgcccgccgaccgccggaacgccgccgtcctcgtcgacccgagccgcgccgccgcctctctccgcttcggtcgccgttcccgtcatcgccgtcgacccggggtgagccgaggactgccatctcgcttcccccttccctcccctctctcgggcgccgctccgtcgcgccggaggtcgccgccggtgaccatcggggcgcgggcgcgccgcctcccgtcggccgtgccggcgaggccgccatcgggcgcgccccgcggctgccatgtggggcccggctgtcagccgcccgcgccctcgggtgcggctgacgcgtgggacccacggcgccggccggcgcaagccgtgtgcacccggtccaccgtggacccacctcggccatataaggaccggtgttcgggcctctgttgcaaagcactaccgtacttccacatgtctagtggggcaaatgaaggctacacgagctgcggcccggtagtcgagatgtcatggcacagggccggtgtcctgctgctaggggctcagtcctgcctgcctgtcccgggggttccggccgtagatgggattgggtcgatgtacacctctgatcagagtaaaatctattcgaatagccgcgccctcggttatgggcaagccgagcaatgtacccaaatggccggcagcgtcagccgtcgtggtttggacatgactggcttcgtcttggagctgcggggcatgtgcgtggtcctggggtatccacatggagtggactaccaggccaggccatttccggagcaggagggtgacgatgcagagccccacgctgcttgggaggtcactgcagtgatcctcgctggctctcccgagcggacttcgctgacagtcaccgcgggtggggactccttccccgccgcttgccagagcgccgctctcctcgccatcggcactcttcaccagcgctacccggacgagttgcagcactcgccctaccgctaccaccctcgtcgcggaggagcccgcgactacgccaccttccgggacgctagctcggaggatgacgctaccatcgtgcacctggcgcgcatggtggaggcgtacgacgcggctcgtatcgacttccatcagatggtgcgccgtgggatggtcgagaacaacatgaagatcctggagctgcgtcaggagaacctgcagctcaagaaggacctagatgcggtggaggcgcagctgcatcagctcaagatcgcccagggagagatctgccgccccaagcatcgccgcgtctaccgcagccagaagatcaccgcccgcaagagcacctccaggcccgagcttgttcgtcagtccctggcgtggacttgcttcgtggagacccctcgtgccgagcccgcgcccgtggttccccaggagggggaagcctccggcgttggtagcacggaggatgcgctgttgctcaccttccatggtgatgaccaggagaaatgctgccaccagtgatggcaaccaacccgaagacagcaaccacaacaaccatggcagcccacctccacctcctcctccgcctccaccaccaccaccagataccaacgccattctcacccaaatcctcgcccagcaggccaacatgatgactgcttttctccaccacctccaaaatccgccacaacataatgctccaccaccacctccccaacactctaaactcgccgagttcctccgcatctgtccacctaccttctctagctccaacaaccccgtggatgcgttggattggttgcatgccgtggggaaaaagctagacactgtgcagtgcagcgatgaggagaaagtcatcttcgccgcccaccagctgcagggacccgcatctctatggtgggaccatttccaggctacgcagccagagggacagcctattacatgggctcgcttcaccgccgctttccgaagaacccatgtgcccgccggagtcgtggcccttaagaaaagggaattccgagagttgaagcaaggcaaccgctccgtgatggagtatttgcacgagttcaacaacctggcccgttacgctccggaggatgtgcgggaagatgaggagaagcaagagaagttcctggcaggaatggaccctgagctgtccgtctgtctagtctccggggattatccggatttccaacgtctggtggacaagagcatccgcttggaagccaagcacaaggaactggagtcgcacaagcgccgcttggcgaatttccacaaccaacagggtgctaaccaaagggtccgctacaccaatccctatccagggggatcctcctcgcagcagcaacagcagcagcagcaacctcgctccgcgcctcgacctcaattcgtggtgcgcgtcccacagccgcagcaggagcagaatcaacaagggactcgtgcgccccgtcctcctccaccgactgtgcagcctggtcaaggccgcagggacgctcaaggtccgcagcgtctgtgcttcaactgcttcgagcccgggcactttgcggataaatgcccgaagccaaggcgtcagcaaggccaagcgcctccccgccccaacaacggtggtaaggacgtcattcggggtcgtgtgaaccatgtgacggccgaggacgtgctgacaactccagacgtcatcgttggtacgttcctcattcattccatccctgctaccattttgttcgactctggagcttcccactcatttatatctgtgccattcgtggggagaaatcagttgggggtagaaaggcttagaaaccctctgctcatcaccacccctggaggggttatgacagcaaagtattatagccctgccgtccctatagaaattcaggggattccttttccctcggatctgattctgctaggcaccaagaacttggatgtgatccttgggatgaattggttggctcaattccaaggagtagtggattgcgcgagacgcactgtcactctgtaccgagggccggaacaaccggttgttttctttgcacccccaacctcagtcagaagttcagaacttcatcagatagaactgtcagaaattcccatcgtcagagagttcggagacgtgtttccggaagaactacctggtatgccgcctaagcgagagattgagttccggatagatcttgctccaggaaccgctcctctgtacaagcgaccctaccgtatggcagcaaatgaattggccgaagttaagaaacagttggaagagctgaaagaaaaggggtatatacgtccaagtacttccccctggggtgctcctgtgatttttgtggagaagaaagacaagacgaagaggatgtgcgttgactacagagctctcaatgaagtcaccatcaaaaacaagtaccctcttccccggatcgatgatctgttcaatcagcttaaaggtgccactgtattctccaagattgatcttcgttccggatatcaccaattacgtattcgcgaagaagatattccgaagaccgcattcaccacgcgatacggactgtatgaattcacggtgatgtcgttcggtttaaccaatgctcctgccttcttcatgaacttaatgaacaaagtgttcatggaatacttggataagtttgtggtggttttcattgatgacattctgatatactcacaatcagaggaagaccatcagcaccatctccgtctggtattgggaaagctgcgggaacatcaattgtatgccaaacttagcaagtgtgagttctggttgtccgaagtcaaattcttagggcacgtgatatctgctaaaggagttgctgtggaccccgaaacagtgatcgccgtcaccgattggaagcaacccaagacagtcactcaagttcgcagtttcttaggtttggcaggatactaccgaaggttcatcgagaacttctccaaaatcgctcgacccatgacacagttgttgaagaaagaagagaaatttgtgtggagcccgcaatgcgagaaggcgtttcaaactctcaaagaaaagctggtttcctcgccggtgttaatcttgccagatactcacaaggacttcatggtgtattgtgacgcttcgcgccaaggataggggtgcgtgctcatgcaggatggttatgtggtggcctatgcctcacgccagcttcggcctcatgaaggcaactaccctactcatgatttggagttagccgcggtggttcatgccctaaaaatctggtggcactatctcattgggaatcgctgtgaaatatatactgatcataagagtttgaaatacatcttcactcagtcggatctgaatcttcggcaaaggagatggttagaactcatcaaggattatgatgtgggaattcactatcatcctggtaaggccaacgtggttgccgacgctctaagtcgaaaaggccattgcaacactcttaacgtccgtggcattccacccgaacttaatcaacagatggaagccctgaacctaagcatagttagtcgcggattcttggctgcgctggaagccaagcccaccttgctcgatcaaatccgcgaggctcagaagaatgctccagacatgcatggactcctcaagaatatgaaacagggtaaagccgctggtttcacagaggatgaacacggaaccctatggaacggaaatcgacgtgtcaaggcagagcaccaacgaccggccggacttctccaacctctccaagtacctgaatggaaatgggatgaaattgggatggatttcatcaccggacttccaaaaacccaaggtggatatgattctatatgggtagttgtggatcgattaaccaaggtagctcgattcattcctgtgaagaccacctatagagggaacaaactagccgaactctacttcgctaggatcgtaagtctccatggcgttcctaagaaaatcgtatctgataggggaagccaattcacctctcacttttggaagaagctccaagaagagctgggtacccgattaaacttcagcacagcgtatcacctgcagacagatgggcagaccgagcgtctaaatcagatcctagaagatatgcttcgcgcatgtgtcctggatttcgagaagacctgggataagagtctcccctatgccgagttctcctacaacaacagctatcaagccagcatacaaatggcaccttatgaagcgttgtatgggcgcaaatgccggacaccgctaatgtgggatcaagttggggaaagccaagtgttcgggactgatatcctgagagaagctgaagctaaagtcagaaccattcgggataatctaaaggtggcacggtcccggcagaaaagttatgcagataaccgtcgccgtgacctggaattcgcagtggacgattttgtatatcttcgggtcacgccattgcgaggtgtacacaggtttcggacaaaagggaagctcgcacctcggtatgtgggtcctttccgtatcgttgctcgacgcggagaagtcgcttaccaattggagctgcccgcctccttgggcaacgtgcataatgtgttccatgtgtcgcaactcaagaaatgccttcgagtgccatccgagcaggccgactcagagcaaattgaagttcgcgaagacttgacctacgtggagaggccagtgaagatcctggacaccatggagcgcaggaccaggaaccgggtaatccgtttttgcaaggaccagtggagcaaccacgccgaagaagaagctacctgggagcgcgaagacgagctgaaggcagcccatccagatctcttcgccagttcttccgaatctcggggtcgagattccgtttaa

SEQ ID NO: 86177 - DNA, 420 bp, Oryza sativa
  Clone ID: PAT_MRT4530_85242C.1
atggccgttggctcatgcctagcggccggctgtagggggctgccattttgcaggcggcccccttccatcctcaggaagggcggtttaacactatgcagggggccgcttgtaaaagagcaacgagggccctggaaacacattttggagacggcaccccgcacagtgttaaaccgcctctctaagggtgggaagggggccgcctacaaaaagggcggcaagggcggcctggctttttttgcaggcggcctcttgcacagtgttaaaccaccctctctctatgggtggcaagggggccgcctgcaaaatggcatgccccctttgttggccgttacttgtgaggcgacggccgtctgccacgtcattaaaatcgctccctcccagatcagagggtggtgggcaactactattgtaaatttttga

SEQ ID NO: 86178 - DNA, 4485 bp, Oryza sativa
  Clone ID: PAT_MRT4530_85243C.1
atgggttggaaactatgtcacgtcttccgcccgtataccgtggtgatggccggcagcgtcacccgtcgtggtttggacatgactggcttcgtcttggagctgcgcggcatgtgcgtggtcttggggtatccacacggagtggactaccaggccaggccgctcccggagcaggagggtgacgacgcggagccccgcgccggttgggaggtcactgcagtgatcctctccggctctcccgagcggacttcgctggcagtcaccgcgggtggagattccttccccgccgcttgccagaacgccgctctcctcgccatcggcacccttcaccagcgctacccggacgagttgcagcactcgccctaccgctaccaccctcgtcgcggaggagcccgcgaccacgccaccttccgagacgccagctcggaggatgacgctaccgtcgtgcatctggcacgcatggtggaggcgtacgacgcggctcgtattgacttccaccagatggtgcgtcgtggcatggtggagaacaacctgaagatcctggagctgcgtcaggagaacctgcagctcaagaaggacctcgacgcgttggaggcgcagctgcatcagctcaagatcgcccagggagaggacagccgtcccaagcgtcgccgcgtctgccgcagccagaagatcaccgcccgcaagagcacctccaggcccgagcttgttcgtcagtccctggcgtggacctgcttcgtcgagacccctcgtgccgagcctgcgcccgtggttccccaggagggggaagcctccggcgttggtagctcggaggttttattcgtcagctcttcttctctgtttgctggttccgtgtggggttttcagatggtgacgaccaggagaaatgttaacaccggtgaaggcaaccaacccgagggcagcaatcccaactcccaaggcaacccacctccaccaccaccgccagacaccaacgccattctcacccaaatcctcgcccagcaagccaacatgatgaatgctttcctccaccacctccaaaatccaccacaacagaatgctccaccaccacctccccaacactccaaactcgccgagttcctccgcatccgtccacccaccttctctagctccaacaatcccgtggatgcgttggactggttgcatgccgtggggaagaagctagacacggtgcagtgcagtgatgaggagaaagtcatcttcgccgcccatcagctgcaggggcccgcatctctatggtgggaccatttccaggccacgcagcccgaggggcaaccgattacttggactcgcttcaccgccgctttccggagaacccatgtgcccgctggagtcgtggctctcaagaagagggaattccgagagttgaagcaaggcaaccgctccgtgatggagtatttgcacgagttcaacaatctggcccgttacgctccggaggatgtgcgggaagatgaggagaagcaagagaagttcttggcaggaatggaccccgagctgtccgtccgtctagtctctggggactatcctgattttcaacgactggtggacaagagcatccgcttggaagccaagcacaaggagctggaatcgcacaagcgccgtttggcgaatttccgcaatcaacagggtgctaaccagagggtccgctacaccaatccctacccagggggatcctcctcgcagcagcagcagcagcagcagcaacctcgcccagcgccccgacctcaattcgtgctgtgcttcaactgcttcgagcccggacactttgcggataaatgcccgaagccaaggcgtcagcaaggccaagcgcctccccgctccaacaacggcgggaaggatgtcattcggggccgtgtgaatcacgtgacggccgaggacgtgctgacaactccagacgtcatcgttggtacgttcctcgttcattccatccctgctaccattttgttcgactctggagcttcccactcgtttatatctgtgccattcgtggggaaaagtcagttgggggtagaaaggcttagaaaccctctgctcatcaccacccctggaggggttatgatagcaaagtattatagccctgccgtccctatagaaattcaggggattccttttccctcggatctgattctgctagacaccaagaatttggatgtgattcttgggatgaattggttggcccaattccaaggagtagtggattgcgtgagacgcactgtcactctgtaccgagggccagaacaaccggttgttttctttgcacctccaacctctgtcagaagttcagaactgcatcagataggtctgtcagaaatccccatcgtcagagagttcggagacgtgtttccggaagaactacctggtatgccgcccaagcgagagattgagttccggatagatcttgctccaggaaccactcctctgtacaagcgaccctaccgtatggcagcaaatgaactggccgaagtaaagaaacagttggaagagttgaaagaaaaggggtacatacgtccgagtacttccccgtggggtgctcctgtgatttttgtggagaagaaagacaaaacgaagaggatgtgcgttgactacagagctctcaatgaagtcaccatcaaaaacaagtaccctcttccccggatcgatgatctgttcgatcagcttaaaggtgccactgtattctccaagattgatcttcgttccggatatcaccaattacgtattcgtgaagaagatattccgaagaccgcattcactacgcgatatggactgtatgaattcacggtgatgtcgttcggcttaaccaatgctcctgccttcttcatgaacttgatgaacaaagtgttcatggaatacttggataagttcgttgtggttttcatcgatgacattctgatatactcacaatcagaggaagaccatcagcaccatctccgtctggtattgggaaagttgcgggaacatcaattgtatgccaagcttagcaagtgtgagttctggttgtccgaagtcaaattcttggggcacgtgatatctgctaaaggagttgctgtggatcccgaaacagtgaccgccgtcaccgattggaagcaacccaagacagtcactcagattcgcagtttcttaggtttggcaggatactaccggagattcatcgagaacttctccaaaatcgctcgacccatgacacagttgttgaagaaagaagagaagtttgtgtggagcccgcaatgcgagaaggcgttccaaactctcaaagaaaagctggtttcctcgccagtgttaatcttgccggatactcgcaaggatttcatggtgtactgtgatgcttcgcgccaaggattggggtgcgtgctcatgcaggacggtcatgtggtagcctatgcttcacgtcagctacgacctcatgaaggcaactaccctacgcatgacttggagttagcagcggtggttcatgctttaaaaatctggcggcactatctcattgggaaccgctgtgaaatatatactgatcataagagtttgaaatacatcttcactcagtcagatctgaaccttcggcaaaggagatggttagaactcatcaaggattatgatgtgggaattcactatcaccctggtaaggctaacgtggttgccgacgctctaagtcggaagagccattgcaatactctcaacgtccgaggcattccacccgagcttaatcaacagatggaagccctgaacctaagcatagttggtcgtggatttttggccgcgatggaagccaagcccaccttgctcgatcaaatccgcgaggctcagaagaatgatccggacatgcatggactcctcaagaatatgaaacagggtaaagccgcaggtttcacagaggatgaacacggaaccttatggaacggaaagcgggtatgcgttccggatagcagagaacttaaacagctgatacttcaggaagctcacgaaagtccttattccattcacccgggcagtaccaagatgtacttagacttgaaggagaaatactggtgggtcagcatgaagcgggaaattgcagagtttgtggctctatgtgatgtgtgccagcgtgtcaaggcagaacaccaacgaccggccggacttctccaacctctccaagtaccagaatggaaatgggatgaaattgggatggatttcatcaccggacttccaaaaacccaaggaggatatgattctatatgggtagttgtggatcgattaaccaaggtagctcgattcattcctgtgaagaccacctatggagggaacaaactagcggagctctacttcgctaggatcgtgagtctccatggcgttcccaagaaaatcgtatctgataggggaagccaattcacctctcacttttggaagaagctccaagaagagctgggtactcgattgaatttcagcaccacatatcacccgcagacagatggacagaccgagcgtctgaattag

SEQ ID NO: 86179 - DNA, 666 bp, Oryza sativa
  Clone ID: PAT_MRT4530_85244C.1
acaacagaatcttcgttccctcaccaaagcaacaacgtcagggatatcgagtatgccccaggactgatccccaacggaggtgggccatctccccccatcatcggctataatgcccccaagacttcagctcttctccaagggcttatcagagaaccagccgatgctgccaagaaaagaaacaacaaatcatcgactgtaaatatttcagccccggctaagacagctaagacaaagaagactacaccagctgatgatctacctgctctagatccatccagtgaacaagctctggatgaagaaataattgaagatgacgttgatgaggctgcagccgaaaaaaagaaaactgttgtgaagaaaaagccagcagcaatgattcccaagtcggctccaccaaaagtcttccttcgacttaacaattcgatcggctattatccacccaggtcttacctgccatctccgggcttattatctactagacggatacgtatgacccgcgagaatccgttgcatattgtcgatgtgccaggcaagcttgggaaagattaccttccctccgaaagggaacgcgtcggtgaacccgtcgtgccagctgcactcatgaatcagccaacgcgcggcgagagcccattgccatttggcgcacattcaggttctggtcactga

SEQ ID NO: 86180 - DNA, 6049 bp, Oryza sativa
  Clone ID: PAT_MRT4530_85245C.1
atggcggccggatcttccgcggccgattccccctcatccggccgctctctccccctcccaacactatataaacgctccccgtgcctccctccaccgtttccgccactcgccgccctctctccccgtcggaatcgagctcgcgccgtcgttctctctctccgtcgtcgccgccgagctccggtccgccgccgtcgtcgccccggaccttctcccgcctcggcgtcgcctccttcgtctccgccgcgtcctcgccgacctcgtccacccctccgtttcgcccgccgaccgccggaacgccgccgtccccgtcgacccgtgccgcgccgccgccttcctccgctccggtcgccgttcccgtcgtcgccgtcgacccggggtgagccgtggaccgccgttttgtttcccccttccctcccctctctcgggcgccgctccgccgcgctggtggtcgccggcggagaccatcggggcgcgggcgcgtcgcctcccatcggctgtgccggcgaggccgcttcgggcgcgccccgcggctgccatgtggggcccggccgtcagccgcccgcgccctcgggtgcggctgacgcgtgggacccacggcgccggccggcgtaagccgcgtgcacccggtccaccgtggacccaccccggccatataaggaccggtcttcgggcctctgttgcaaagcactaccgtacttccacatgtctagtgggacaaatgaaggctacacgagctgcggcccggtagtcgagatgtcatggcacagggccggtgtcctgctgctaggggctcagtcctgcttgcctgtcccgggggttccggccgtaggtgggattaggtcgatgtacacctctgatcagagtaaaacctattcgaatagccgcgccctcggttatgggcaagccgagcaatgtacccaaatggccggcagcgtcacccgtcgtggtttggacatgactggcttcgtcttggagctgcgcggcatgtgcgttgtcttagggtatccacatggagtggactaccaggccaggccgcttccggagcaggagggtgatgatgcggagccccgcgctggttgggaggtcactgcagtgatcctcgctggctcttctgagcggacttcgctgacagtcaccgcgggtggcgactccttccccgccgcttgccagaacgccgctctcctcgccatcggcactcttcaccagcgctacccggacgagttgcagcactcgtcctaccgctaccaccctcgtcgcggaggagcccgcgactacgccaccttccgggatgctagctcggaggatgacgctaccgtcgtgcatctggcacgcatggtggaggcatacgacgcggctcgtatcgacttccatcagatggtgcgtcgtgggatggtcgagaacaacctgaagatcctggagctgcgtcaagagaatctgcagctcaagaaggacctcgacgcagtggaggcgcagctgcatcagctcaagatcgcccagggagaggtctgccgccccaagcgtcgccgcgtctgccgcagccagaagatcaccgcccgcaagagcacctccaggcccgagcttgtccgtcagtccctggcatggacctgcttcgtcgagaccccttgtgccgagcctgcgcccgtggttccccaggagggggaagcctccggcgttggtagcacggaggatgtgctgttgctcaccttccatggtgacgaccaggagaaacgctgttaccggtgatggcaaccaacctgaaggcagcaaccacaaccaccagggcaacccacctccacctccacctcctcctccaccaccaccaccagacaccaacgccattctcacccaaatcctcgcccagcaagccaacatgatgaatgctttcctccaccacctccaaaatccaccacaacagaatgctccaccaccacctccccaacactctaaactcgccgagttcctccgcatccgcccacctaccttctctagctccaacaaccccgtggatgcgttggattggttgcatgccgtggggaaaaagctagacacggtgcagtgtaccgatgaggagaaagtcatcttcgccgcccaccaactgcaggggcccgcatctctctggtgggaccacttccaggctacgcagccagagggacagccgattacttgggcccgcttcaccgccgctttccggagaacccatgtgcccgctggagtcgtggcccttaagaaaagggaattccgagagttgaagcaaggcaaccgctccgtgctggagtatttgcatgaattcaacaatctggcccgttacgctccggaggatgtgcggggagatgaggagaagcaagagaagttcctggcaggaatggaccctgagctgtccgtccgcctagtctctggggactatccggatttccaacgactggtggacaagagcatccgcttggaagccaagcacaaggaactggagtcgcacaagcgccgcttggcgaatttccgcaatcaacagggtgctaaccagagggtccgctacaccaatccctatccagggggatcctcctcgcagcagcaacaacagcagcagcaacctcgcccagcgcctcgacctcaattcgtggtgcgtgtcccacagccgcagcaacagcagaatcaacaagggactcgtgcgccccgtcctcctacgccaactgtgccgcctggtcaaggccgcagggacgctcaaggtcagcagcgtctgtgcttcaactgcttcgagcccgggcactttgcggataaatgcccaaagccaaggcgtcagcaaggccaagcgcctccccgctccaacaacggcgggaaggatgtcattcggggtcgtgtgaatcacgtgacggccgaggacgtgctgacaactccagacgtcatcgttggtacgttcctcgttcattccatccctgctacaattttgttcgactctggagcttcccactcgtttatatctgtgccattcgtggggagaaatcagttgggggtagaaaggcttaggaaccctctgctcatcaccacccctggaggggttatgacagcaaagtattatagccctgccgtccctatagaaattcaggggattccttttccctcggatctgattctgctagacacaaagaacttggatgtgattcttggaatgaattggttggctcaattccaaggagtagtggattgcgcgagacgcactgtcactctgtaccgagggccagaacaaccggttgttttctttgcacccccaacctctgtcagaagttcagaacttcatcagataggactgtcagaaatccccatcgtcagggagttcggagatgtgtttccggaagaactacctggtatgccgcccaagcgagagattgagttccgaatagatcttgctccaggaaccactcctctgtacaagcgaccctaccgtatggcagcaaatgaactggccgaagtaaagaaacagttggaagagttgaaagaaaaggggtatatacgtccgagtacttccccatggggtgctcctgtgatttttgtagagaagaaagacaagacgaagaggatgtgcgttgactacagagctctcaatgaagtcaccatcaaaaacaagtaccctcttccccggatcgatgatctgttcgatcagcttaaaggtgccactgtattctccaagattgatctccgttccggatatcaccaattacgtattcgtgaagaagatattccgaagaccgcattcaccacgcgatacgggctgtatgaattcacggtgatgtcgttcggtttgaccaatgcacctgccttcttcatgaacttaatgaacaaagtgttcatggaatacttggataagtttgttgtggttttcattgatgacattctgatatactcacaatcagaggaagaccatcagcaccatctccgtctggtgttgggaaagttacgggaacatcaattgtatgccaagcttagcaagtgtgagttctggttgtccgaagtcaaattcttagggcacgtgatatctgctaaaggagttgctgtggaccccgaaacagtgaccgccgtcaccgattggaagcaacccaagacagttacccaagtccgtagtttcttaggtttggcaggatactaccggagattcatcgagaacttctccagaatcgctcgacccatgacacggttgttgaagaaagaagagaaatttgtgtggagcccgcaatgcgagaaggcgttccaaactctcaaggaaaagctagtttcctcgccggtgttaatcttgccggatactcgcaaggacttcatggtgtattgtgatgcttcgcgccaaggattggggtgcgtgctcatgcaggatggtcatgtggtagcctatgcctcccgtcagcttcgaccgtatgaaggcaactaccctacccatgacttggaattagccgcagtggttcatgctctaaaaatctggcggcactatctcattgggaatcgctgtgaaatatataccgaccataagagtctgaaatacatcttcacccagtcggatctgaatcttcggcaaaggagatggttagaactcatcaaagattatgatgtgggaattcactatcatcctggtaaggccaacgtggttgccgacgctctaagtcgaaagagccattgcaacactcttaacgtccgtggcattccacccgcacttaatcaacagatggaagccctgaacctaagcatagttggtcgtggattcttggctgcgttggaagccaagcctaacttgctcgatcaaatccgcgaggcttagaagaatgatccggacatgcatggactcctcaagaagatgaaacagggtaaagccgctggtttcacagaggatgaacacggaaccctatggaacggaaagcggcgtgtcaaggcagagcaccaacgaccggccggacttctccaaccactccaagtacccgaatggaaatgggatgaaattgggatggatttcatcaccggacttccaaaaacccaaggcggatatgattctatatgggtagttgtggatcgattaaccaaggtagcccgatttattcctgtgaagaccacctatggaggaaacaagctagccgagctctacttcgctaggatcgtgagtctccatggcgttcccaagaaaatcgtatctgataggggaagccaattcacctctcacttttggaagaagctccaagaagaactgggtactcgattgaatttcagcaccgcctatcacccgcagacagatggacagaccgagcgtctaaatcagatcctagaagacatgcttcgcgcatgtgtactagatttcgggaagacctgggataagagtctcccctatgccgagttctcctacaataacagctatcaatccagcatacaaatggcaccttatgaagcgttgtacgggcgcaaatgccggacaccactcttgtgggaccaagtaggagaaagccaagtgttcgggactgatatcctgagagaagctgaagctaaagttagaatcattcgggataatctaaaggtggcacagtcccggcagaaaagttatgcagataaccgccgccgtgacctggaattcgcagtggacgactttgtgtatcttcgggtcacgccattgcgaggtgtacacaggtttcagacgaaagggaagctcgcacctcggtatgtgggtcctttccgtatcgttgctcgacgtggagaagtcgcttaccaattggagctgcccgcctccttgggcaacgtgcatgatgtgtttcatgtgtcgcaactcaagaagtgtctccgagtgccatccgagcaggccgactcagagcaaattgaagttcgcgaagatttgacctatgtggaaaggccagtgaaaatcctggacaccatggagcgcaggaccaggaaccgggtaatccgtttttgcaaggtccagtggagcaaccacgccgaagaagaagctacctgggagcgtgaagacgagctgaaggcagcccatcccgatctcttcgccagttcttccgaatctcggggtcgagattccgtt

SEQ ID NO: 86181 - DNA, 6051 bp, Oryza sativa
  Clone ID: PAT_MRT4530_85246C.1
atggcggccgaaatccccgcggccggtttccttcctcctcggccgccctctctccttcccgacgctataaaaacgttgcccgagctccgctcttccgtttccgccgttcgccgctcgctctcgccgtcggtttcgtgctcgcgccgtgctccgctctctccgccatcgccgccgagctccgttccgccgccgccgccgctccggacttcctccttactcggcgacccctccatccgcttcgccgtgttgccgccgaccccgtccgccgctccgctccgtccgccgactgccggagcgccgtcgccatcgtcatcccgaaccgcgccgccgtcttcctccgctccggccgccattctcgtcgtcgtcgttgtcccggggtgagccgaagaccgccgttcgccttccccctttcctcctctctctcgggtgccactccgccgcgccgttggtcgccggcggcgaccatcggggcgcgggtgcgcgccactcccgtcggccgcgccggcgaggccgccctcgggtgcgccctcgcggctgccaagtgggcccggccgtcagccgcccgcgcccgcgggtgcggccgacgcgcgggacccacggcgccgacagccgccagccgcgtgcgcccggtccaccgtggacccaccccggccactataaggattaagctcgggcctctgttgcaaagcactaccgtacttccacatgtctagtggggcaaatgaaggctacacgagctgcggcccggtagtcgagatgtcatacggcagagggttggtgccctgctgctaggggctcagtcctgcctgcctgtcccgggggttccggccgtaggcgggattgggtcgatgtacacctctgatcagagtaaaacctattcgaatagccgcgccctcggttatgggcaagccgagcaatgtacccaaatggccggcagcgtcacccgtcgtggtttggacatgactggcttcgtcttggagctgcggggcatgtgcgtggtcttggggtatccacatggagtggattaccaggccaggccgctcccggagcaggagggtgaggatgcagagcctcacgctggttgggaggtcactgcagtgatcctctccggctctcccgagcggacttcgctggcagtcaccgcgggtggggattccttccccgccgcttgccagaacgccgctctcctcgccatcggcacccttcaccagcgctacccggacgagttgcagcactcgccctaccgctaccaccctcgtcgcggaggagcccgcgactacgccaccttccgagacgccagctcggaggatgacgctaccgtcgtgcatctggcacgcatggtggaggcgtacgacgcggctcgtatcgacttccaccagatggtgcgccgtggcatggtcgagaacaacctgaagatcttggagctgcgtcaggagaatctgcagctcaagaaggacctcgacgcgttggaggcgcagctgcatcagctcaagatcgcccagggagaggacagccgccccaagcgtcgccgcgtctgtcgcagccagaagatcaccgcccgcaagagcacctccaggcccgagcttgttcgtcagtccctggcgtggacctgcttcgtcgagacccctcgtgccgagcctgcgcccgtggttccccaggagggggaagcctccggcgttggtagctcggagggtgcgctgttgctcaccttccatggtgacgaccaggagaaatgttaacaccggtgaaggcaaccaacccgaaggcagcaaccccaaccaccaaggcaatccacctccacctccacctccgcctccaccaccaccaccagacaccaacgccattctcacccaaatcctcgcccaacaagccaacatgatgaatgctttcctccaccacctccaaaacccgccacaacagaatgctccaccaccccctccccaacactccaaactcgccgaattcctccgtatccgcccacccaccttctctagctccaacaatcccgtggatgcgttggactggttgcatgccgtggggaagaagctagacacggtgcagtgcagtgatgaggagaaagtcgtcttcgccgcccatcagctgcagggacccgcatctctatggtgggaccatttccaggctgcgcagccagaggggcagccgattacttgggctcgcttcaccgccgctttccggagaacccatgtgcccgctggagtcgtggctcttaagaaaagggaattccgggagttgaagcaaggcaaccgctccgtgatggagtatttgcatgagttcaacaatctagcccgttatgccccggaggatgtgcgggaagatgaggagaagcaggagaagttcttggcgggaatggaccctgagctgtccgtccgtctagtctctggggactatcctgattttcaacgactggtggacaagagcatccgcttggaagccaagcacaaggagctggaatcgcacaagcgccgcttggcgaatttccgcagtcagcagggtgctaaccagagggtccgctacaccaatccctatccagggggatcctcctcgcagcagcagcagcagcagcaacctcgcccagcgcctcgacctcaattcgtggtgcgcgtcccacagccgcagcagcaacagaatcagcaagggactcgtgcgccccgtcctcctacgccagctgtgcagcctggtcaaggccgcagggacgctcaaggtcagcagcgtctgtgcttcaactgcttcgagcccgggcactttgcggataaatgcccgaagccaaggcgtcagcaaggccaagcgcctccccgctccaacaacggcgggaaggatgtcattcggggccgtgtgaatcatgtgacggccgaggacgtgctgacaactccagacgtcatcgttggtacgttcctcgttcattccatccctgctaccattttgttcgactctggagcttcccactcgtttatatctgtgccattcgtggggagaaatcagttgggggtagaaaggcttagaaaccctctgctcatcaccacccctggcggggttatgacagcaaagtattatagccctgccgtccctatagaaattcaggggattccttttccctcggatctgattcttctagacaccaagaatttggatgtgatccttgggatggattggttggctcaattccaaggagtagtggattgcgcgaggcgcactgtcactctgtaccgagggccagaacaaccggttgttttctttgcacctccaacctctgtcagaagttcagaacttcatcagataggtctgtcagaaatccccatcgtcagagagttcggagacgtgtttccggaagaactacctggtatgccgcccaagcgagagattgagttccggatagatcttgttccaggaaccactcctctgcacaagcgaccctaccgtatggcagcaaatgaactggccgaagttaagaaacagttggaagagttgaaagaaaaggggtatatacgtccgagtacttccccatggggtgctcctgtgattttcgtagagaagaaagacaagacgaagaggatgtgcgtcgactacagagctctcaatgaagtcaccatcaaaaacaagtaccctcttccccggatcgatgatctgttcgatcagcttaaaggtgccactgtattctccaagattgatcttcgttccggatatcaccaattacgtattcgtgaagaagatattccgaagaccgcattcactacgcgatatggactgtatgaattcacggtgatgtcgttcggcttaaccaatgctcctgccttcttcatgaacttaatgaacaaagtgttcatggaatacttggataagttcgttgtggttttcatcgatgacattctgatatactcacaatcagaggaagaccatcagcaccatctccgtctggtgttgggaaagttgcgggaacatcaattgtatgccaagcttagcaagtgtgagttctggttgtccgaagtcaaattcttggggcacgtgatatctgctaaaggagttgctgtggaccccgaaacagtgaccgccgtcaccgattggaagcaacccaagacagtcactcagattcgcagtttcttaggtttggcaggatattaccggagattcattgagaacttctccaaaatcgctcgacccatgacacagttgttgaagaaagaagagaaatttgtgtggagcccgcaatgcgagaaggcgtttcaaactctcaaagaaaagctggtttcctcgccagtattaatcttgccggatactcgcaaggatttcatggtgtattgtgatgcttcgcgccaaggattggggtgcgtgctcatgcaggacggtcatgtggtagcctatgcctcacgtcagctacgacctcatgaaggcaactaccctacacatgacttggagttagccgcagtagttcatgctctaaaaatctggcggcactatctcattgggaatcgctgcgaaatatatactgatcataagagtttgaaatacatcttcactcagtcggacctgaatcttcggcaaaggagatggttagaactcatcaaggattatgatgtgggaattcactatcatcctggtaaggctaacgtggttgccgacgctctaagtcgaaaaggccattgcaacgctctcaacgtccgtagcattccgcccgagcttaatcaacagatggaagccctgaacctaagcatagttggtcgcggattcttggctgcgttggaagccaagcccaccttgctcgatcaaatccgcgaggctcagaagaatgatccggacatgcatggactcctcaagaatatgaaacaaggtaaagccgcaggtttcacagaggatgaacacggaaccttatggaacggaaagcggcgtgtcaaggcagaacaccagcgaccggccggacttctccaacctctccaagtgccggagtggaaatgggatgaaattgggatggatttcatcaccggacttccaaaaacccaaggtgggtatgattctatatgggtaatagtggatcgattaaccaaggtagctcgattcattcctgtgaagaccacctatggagggaataaactagcggagctctacttcgctaggatcgtgagtctccatggcgttcccaagaaaatcgtatctgataggggaagccaattcacctctcacttttggaagaagctccaagaagagcttggtacccgactaaatttcagcaccgcatatcacccgcagacagatggacagaccgaacgtctaaatcagatcctagaagatatgctccgcgcatgtgtcctagatttcgggaagacctgggataagagtctcccctatgccgagttctcctacaataacagctatcaagccagcatacaaatggcaccatatgaagcgttgtacgggcgcaaatgccggacaccactattgtgggaccaagttggggaaagccaagtgttcgggactgatatcctgagagaagctgaagctaaagtcagaatcattcgggataatctaaaggtggcacagtctcggcagaaaagttatgcagataaccgtcgccgtgatctggaattcgcagtggatgactttgtgtatcttcgggtcacgccattgcgaggggtgcacaggtttcggacaaaagggaagctcgcacctcggtatgtgggtccctttcgtatcactgctcgacgcggagaagtcgcctaccagctggagttgcccgcctccttgggcaacgtgcatgatgtgttccatgtgtcgcaactcaagaaatgtcttcgagtgccatccgagcaggccgactcagagcaaattgaagttcgcgaagacttgacctacgtggagaggccagtaaaaatcctggacgccatggagcgcagaaccaggaaccgggtaatccgtttttgcaaggtccagtggagcaaccacgccgaagaagaagctacttgggagcgcgaagacgagctgaaggcagcccatcccgatctcttcgccagttcttccgaatctcggggtcgagattccgtt

SEQ ID NO: 86182 - DNA, 260 bp, Oryza sativa
  Clone ID: PAT_MRT4530_85247C.1
gatcaaaagaactgagcttggaaaaaacattaaacttgtttttatacatctgagacatcacaacaccggctcacacttaacatggcatgcctagatccatccacaattacctaccaatacaccactacctttcacagactacttccatccacaaaaaaacagtgatgagctgccgaccaacactttatttatcttgctccattggcaggcattgctcacactccaacacctgaacaacttctcatttgggggtgaaggcc

SEQ ID NO: 86183 - DNA, 5391 bp, Oryza sativa
  Clone ID: PAT_MRT4530_85248C.1
atggatgaagtcgggggtcgatggacattctccagggcaaatgaaggctacacgagctgcggcccgatggccggcagcgtcacccgtcgtggtttggacatgactggcttcgtcttggagctgcgaggcatgtgcgtggtcttggggtatccacatggagtggactaccaggccaggccgcttccagagcaggagggtgatgacacggagccccgcgctggttgggaggtcactgcagtgatcctcgctggctcttctgagcggacttcgctgacagtcaccgcgggtggcgactccttccccgccgcttgccagaacgccgctctcctcgccatcggcactcttcaccagcgctacccggacgagttgcagcactcgccctaccgctaccaccctcgtcgcggaggagcccgcgactacgccaccttctgggatgctagctcggaggatgacgctaccatcgtgcacctggcacgcatggtggaggcgtacgacgcggctcgtatcgacttccatcagatggtgcgccgcgggatggtcgagaacaacatgaagatcctggagctgcgtcaggagaacctgcagctcaagaaggacctcgacgcggtggaggcgcagctgcaccagctcaagatcgcccagggagagatctgccgccccaagcgtcgccgcgtttgccgcagccagaagatcaccgcccgcaagagcacctccaggcctgagcttgtccgtcagtccctggcgtggacttgcttcgtcgagacccctcgtgccgagcctgcgcccgtggttccccaggagggggaagcctccggcgttggtagctcggaggctctctctctgcttgctggttctgtgtggggttttcagatggtgacgaccaggagaaatgctgttaccggtgatggcaaccaacccgaaggcagcaaccccaaccaccaaggcaacccacctccacctcctcctccgcctccaccaccaccaccagacaccaacgccattctcacccaaatcctcgcccagcaagccaacatgatgaatgctttcctccaccacctccaaaatccgccacaacagaatgctccaccaccacccccacaacactctaaactcgccgagttcctccgcatccgcccacctaccttctccagctccaacaaccccgtggatgctttggattggttgcatgccgtggggaagaagttagacacggtgcagtgcagcgatgaggagaaagtcgtcttcgccgcccaccagctgcagggacccgcatctctatggtgggaccatttccaggctacgcagccaaaggggcaacctattacttgggctcgcttcaccgccgctttccggagaacccatgtgcccgctggagtcgtggctcttaagaaaagggaattccgagagttgaagcaaggcaaccgctccgtgatggagtatttgcatgagttcaacaacctggcccgttacgccccagaggatgtgcgggaagatgaggagaagcaggagaagttcctggcaggaatggaccccgagctgtccgtccgtctagtctctggggactatcctgattttcaacgactggtggacaagagcatctgcttggaagctaagcacaaggagctggagtcgcacaagcgccgcttggcgaatttccgcaatcaacagggtgctaaccaaagggtccgctacaccaatccctatccagggggatcctcctcgcagcagcaacaacagcagcagcaacctcgcccagcgccccgacctcaattcgtggtgcgcgtcccacagccgcagcagcagcagaatcagcaagggactcgtgcgccccgtcctcctacgccaactgtgcagcctggtcaaggccgcagggacgctcaaggtcagcagcgtctgtgcttcaactgcttcgagcccgggcactttgcggataaatgcccgaagccaaggcgtcagcaaggccaagcgcctccccgctccaacaacggcgggaaggatgtcattcggggtcgtgtgaatcacgtgacggccgaggacgtgctgacaactccagacgtcatcgttggtacgttcctcgttcattccatccctgctacaattttgttcgactctggagcttcccactcgtttatatctgtgccattcgtggggaaaaatcagttgggggtagaaaggcttagaaaccctctgctcatcaccacccctggaggggttatgacagcaaagtattatagtcctgccgtccctatagaaattcaggggattccttttccctcggatctgattcttctagacacaaagaacttggatgtgattcttgggatgaattggttggctcaattccaaggagtagtggattgcgcgagacgcactgtcactctgtaccgaggtccagaacaaccggttgttttctttgcacccccaacctctgtcagaagttcagaacttcatcagatagaactgtcagaaattcccatcgtcagagagttcggagacgtgtttccggaagaactacccggtatgccgcccaagcgagagattgagttccggatagatcttgctccaggaaccactcctctgcacaagcgaccctaccgtatggcagcaaatgaactagccgaagtaaagaaacagttggaagagttgaaagaaaaggggtacatacgtccgagtacttccccatggggtgctcctgtgatttttgtagagaagaaagacaagacgaagaggatgtgcgttgactacagagctctcaatgaagtcaccataaaaaacaagtaccctcttccccggatcgatgatttgttcgatcagcttaaaggtgccactgtattctccaagattgatctccgttccggatatcaccaattacgtattcgtgaagaagatattccgaagaccgcattcaccacgcgatacgggctgtatgaattcacggtgatgtcgttcggtttgaccaatgcacctgccttcttcatgaacttgatgaacaaagtgttcatggaatacttggataagtttgttgtggttttcattgatgacattctgatatactcacaatcagaggaagaccatcagcaccatctccgtctggtgttgggaaagttgcgggaacatcaattgtatgccaagcttagcaagtgtgagttctggttgtccgaagtcaaattcttagggcacgtgatatctgctaaaggagttgctgtggatcccgaaacagtgaccgccgtcaccgattggaagcaacccaagacagttactcaagtccgcagtttcttaggtttggcaggatactatcggagattcatcgagaacttctccaaaatcgctcgacccatgacacagttgttgaagaaagaagagaaatttgtgtggagcccgcaatgcgagaaggcgtttcaaactctcaaggaaaagctggtttcctcgccggtgttaatcttgccggatactcgcaaggacttcatggtgtattgtgatgcttcgcgccaaggattggggtgcgtgctcatgcaggacggtcatgtggtagcctatgcctcacgccagctacgtcctcatgaaggcaactaccctacacatgatttggagttagccgcagtagttcatgctctaaaaatctggcggcactatctcattgggaatcgctgtgaaatctataccgaccataagagtctgaaatacatcttcactcagtcggacctgaatcttcggcaaaggagatggttagaactcatcaaggattatgatgtgggaattcactatcatcccggtaaggccaacgtggttgccgacgctctaagtcgaaagagccattgcaacactcttaacgtccgtggcattccacccgaacttaaccaacagatggaagccctgaatctaagcatagtgggtcgtggattcttagctgcattggaagccaagcccaccttgctcgatcaaatccgcgaggctcagaagaatgatccggacatgcatggactcctcaagaatatgaaacagggtaaagccgctggtttcgcagaggatgaacacggaaccctatggaacggaaatcgggtatgcgtcccagataacagagaacttaaacagctgatacttcaggaagctcacgaaagtccttattccatccaccctggcagtacaaagatgtacttagacttgaaagagaaatactggtgggttagcatgaagcgggagattgcagagttcgtggccctgtgtgatgtgtgccagcgtgtcaaggcagagcaccagcgaccggccggacttctccaacctctccaagtaccagaatggaaatgggatgaaattgggatggatttcatcaccggacttccgaagacccaaggtggatatgattctatatgggtagttgtggatcgattaaccaaggtagctcgattcattcctgtgaagaccacctatggagggaacaaactagcggagctctacttcgccaggatcgtgagtctccatggcgttcccaagaaaatcgtatctgataggggaagccaattcacctctcacttttggaagaagctccaagaagagctgggtactcgattgaatttcagcaccgcctatcacccacagacagatggacagaccgagcgtctaaatcagatcctagaagatatgctccgcgcatgtgtactagatttcgggaagacctgggataagagtctcccctatgccgagttctcctacaataacagctatcaagccagcatacaaatggcaccttatgaagcgttgtacgggcgcaaatgccggacaccgctattgtgggaccaagttggagaaagccaagtgttcgggaccgatatcctgagagaagctgaagctaaagtcagaatcattcgggataatctaaaggtggcacagtcccggcagaaaagttatgcagataaccgtcgccgtaatctggaattcgcagtggatgactttgtgtatcttcgggtcacgccattgcgaggtgtacacaggtttcagacgaaagggaagctcgcacctcggtatgtgggtcctttccgcatcattgctcgacgcggagaagtcgcttaccaattggagctgcccgcctccttgggcaacgtgcatgatgtgttccatgtgtcgcaactcaagaaatgtcttcgagtgccatccgagcagaccgactcagagcaaattaaagttcgcgaagatttgacctacgtggagaggccagtaaaaatcctggacaccatggagcgcaggaccaggaaccgggtaatccgtttttgcaaggtccagtggagcaaccatgccgaagaagaagctacctgggagcgtgaagacgagttgaaggcagcccatcccgatctcttcgccagttcttccgaatctcggggtcgagattccgtttaa

SEQ ID NO: 86184 - DNA, 467 bp, Oryza sativa
  Clone ID: PAT_MRT4530_85249C.1
ggcgcgggcggcgtgatctgcgacgcgggcgccggatatcgtgtgtcgaaccgggccgagtcggcactcaggatcttattctttccgacgccgaaacacgggaagcagctgattttggagaccccttcctgactccccgtggcggtcgccaccaccacccctgtacgacgccgccggcgacggcggcagccaaggacgaaaccgaaggacgcacgggccgagcacgaaggagcagccgcgccgcgccgatcacacaaccatcgagcgcgagcccggcagactcaccacctccgccgaggcgcgcccacctagtggcacgccatacgagcacacacgcacgctgtgggactggccccccacgcgcgcacccgatccgtccgatcgtccgcccgtaggaagagagaagggggcgatcgatcgatcgatcgcgccggtgcgcgcgcgcacatggagggggggaaggagag

SEQ ID NO: 86185 - DNA, 1000 bp, Oryza sativa
  Clone ID: PAT_MRT4530_8524C.1
cggcacgagggcccgaccaagtaaacgaccaacccccaacccggccaggtcaaacgcacgccacgcgacgcgacgcagcccagctcaacgataagctcaacccatcgattccgctaagtcaatcctaccgcctcgcctcatctccgtcactttccatttcgccgcagcgatggctccggctccgtctccgactcctctccccctattcctcctcctcctcctcctcgtcggcgtcgccccgctcgccgcggcgcaggggcagaacatccagacgaggttcccgtccacccggacgccggccttcgccacgccgccgccgatcacctcgccgtctccgtcccccggcacgcctacggccaccccgtcgtcgtcgccgccgtcgtcgtcggggaagcggagcgacatcgccgtggccgtggtgagcacggcgctgagcagcttcgcggtgtcgggcctcgccttcttcctgttcctccggcacgggaagaagagggagctcaccgaagcgggcggggccgggcagcattatggtggagcgcagggcggcgcgctcaccgggaagcggccggagagggagccgaagcggccggcgcggggcaacatggtggacgagaacggcctcgacgcgatatactggcgggagttcgagaaggagggcgacggcgggagggggaggaagcccccggcgagccggcgtccaccgcagccgccgccgccccggccgtaccgcgcggagaggaggcaggatgcccacgagtcgtcggctccgtcgccgccgcggtcgaggaagaacaggatagatcaggagccgctcataccgaggggctccctcgactccgcgtccgctgagtttgacgagtcgctgtacgcgcccagcgccggctccacctcgtccttctctgtggccgccgccgaggcgtacgcgcggccaccgtcgacgccggcgatcaccgccgtcagctcggtaccccgctcgtccccatctccggcaccagcccct

SEQ ID NO: 86186 - DNA, 855 bp, Oryza sativa
  Clone ID: PAT_MRT4530_85250C.1
atgtccggatcaccttgggcacgcacccaacggaatgggccccaaaagtggcagttggaacaattgctggccgtggcccatgagctgaaaggcactgctgaaacggtagggcggatacacgccctaccgctgcccattgcagtcggggtgggcgtctctgggtccgagccaaagaacagcgcgcatatcgacctaggagtagaagcgaagcatacctgctctccacgaaagccccgcggcgaggggcgccgtcgatctaagccggtgcagaatcttcgcgccgccgatgccggcatgccgcggagagtacaccggagatccacatcctcctggggttttgacggcgcgtccgcagccagctgctcgccgccggagccggaattggggaagcggcgtcgtcgggggagaagaggaagcgacaagagtacgatacaaaattattcatgtgccaagtcatctctgacagccattattataaccggaaggggatacacgcccagccgatgcccacatttgggatcttttcgctgtattcggtcggggcgggcatacctggccccatcggaaaccggcggcgagggcgccgtcgatctggccggagctgaagtttcccgctgccgtcgccgagactacgcccgccggatcgagagccggctgctcgccattggacgtcgggaagcggcgccctcgacggaggtcgggaggggatcgatgaagtatgagaccaaaattgatggaatgcagacaatattgccaccaaaagatcaccaattgatggcgatctgcgaggccgtgcgggtcacggagcgcgtctgtgggaggagaggcgggcctcacgggtgcggcgggtggtga

SEQ ID NO: 86187 - DNA, 642 bp, Oryza sativa
  Clone ID: PAT_MRT4530_85251C.1
atgggggagataggtgcagaggtggtttacctggcgaggccaatggagggcggcgttggagcagcaggagaggagcccatcggggtagaggaaggcgagcaaggttcagctatggccaacagaggaggccgggcaaatcggaaagaaggggaggacgagctacgaggctggctgatgttgctggcgacgctgacggcgtccatcacgtacgcggcggcgctgaaccctcccggcggcgtctggcaagccgacgacgccgccaaggacttcgtcgccggctacccggtcctcctcgacaagtcgccgtggcgctactacgtcttctactactgcaacgccacctccttcgcgtcgtccgtgtgcatcatcgtcctgctcgccaccaacttctacctgagccataccagtgtcatggtcttcaacgtgctcgtcgccctggacatggccagcttgggcgccgcgttcgtcgcgggctcgtcgagcagcaagcggtttacggctttcaacgcggggctgatggtatgcctcgtcgtgctgttcctcctgtggaaactgaagtttctcatgggtaatgatcaagcaggtcaaaatcctgctagtggaggtgtcgccaatttacaacatggcaacagtgcattataa

SEQ ID NO: 86188 - DNA, 588 bp, Oryza sativa
  unsure (1)..(588): unsure at all n locations
  Clone ID: PAT_MRT4530_85252C.1
gcacgagggttcacagtttcatgaaagaaaagtactctgtcctttgttatgctttattcacaggagggcattatcaatgtagaataaaggttntgcatgttataagaaaaatccttttttcctctatatatacaccccccctcttgtgcatggctcattgtgtctcagctctctccacctgcttgaactgatctctaaagcttagccatatatggagtattcaaatttgcgtcgccaaatcatctttatgaagaaaaatcttttcgatcaggtttcatgccttcacttttgttcctttgagaaatgagatcgtaattaattagtgtattgcactagacactagttgatgttttattgcttctcagttcctgagctgcaatattagatgagatagttaactaggagagagagttagtttcttcagtttttgtcttacatgtaagtatataacaaagtttgattgcacccttggacatcccctgagggcacactgaacccctggagaaaagcattatcaatcaatggtcagatatgtggtcatgtggagcttatatcattcatgcactctgtttcaattgtgaatttcat

SEQ ID NO: 86189 - DNA, 1809 bp, Oryza sativa
  Clone ID: PAT_MRT4530_85253C.1
atggccaagaatggtggtgctcacggtgcagccacattgtttggtctcttggcacttgcatcaatggtgaagctgggatttgttgctgggggtggccatgactatgccatggcattgaggaagagcatcctctacttccaggcgcagcggtccggcgttctccctcctaaccagagggtctcctggagagccagctctggcctctttgatggaaaggccaatggagttgatcttgttggaggttattatgatgcaggggacaatgtcaagtttgggttgccaatggcgttcacggtgaccatgatgtcgtggagcatattagagtacggcaagcagatggcggcggccggcgagctccggaacgccatggacgccgtcaagtggggcaccgactacttcatcaaggcgcacccggagcccgacgtgctctacggcgaggtcggcgacggcgacaccgaccacagctgctggcagcggccggaggacatgacgacgagccgccaggcgttccgcgtcgacccccagcaccccgggtcagacctcgccgccgagaccgccgccggccatggccgccgcgtccatcgtcttccgcggcacctgttcgagttcgccgacaagtaccggggcaagtacgacgccagcatcacggtggcgcgaaactactacggctccttcagcggatacggggacgagctgctctgggcggcggcgtggctgttcgaggcgacggaggacaggtcctacctggagtacctcgccggcaacggcgaggcgctgggcgggacggggtggtccatcaaccagttcgggtgggacgtcaagtaccccggcgtgcaggtcctcgccgccaagttcctcctccagggccgcgccggcgaccacgccgccgcgctgcagaggtacaggcagaacgcggagttctttgtgtgctcctgcgtcggcaagggcgccgtcaacgtcgccaggacccccggcggcatgatgtaccaccagaggtggaacaacctccagttcgtcaccagcgcctccttcctcctcaccgtctacgccgacttcgccgccatctccggccgcggcgccgtccactgccccgccggcgccgcccaaccattcgacatcctcaaattcgtcaaatctcaggtgaattatattttgggtgataatccgagggggacgagctacatggtcgggtacggcgcgagctacccgcggcagggacccgtcgttcgtgagctgccaggaggggtactcgtcgtggtacgggagggaagccggcaacccgaactgctcgacggcgccgtcgtcggcgggcccgacgagtacgacgacttcgccgacgagcgcgacaactacgagcagacggaggccgccacctacaacaacgcgccgctgctcggcgtcctcgcccgcctcgccgcctcctgcggcggcctcaaggaggaggaatacgaacaagaaacggcgactccggtcgtgaaccggacgtcgtcgtcgtcgtcgctgccggcgacggcgacggcgatcgggatcgagcagaacgtgacggggacgtgggcgaggaggcggaggacgtactaccggtacgcggtgacggtgacgaacaggtcgcgggggaagacggtgagggagctgcacctgggcgtgtcggggctccgggggcggctgtgggggctggaggaggcgaggtacgggtacgtgccgccgaggtggctgccggcgctgcggccggggaggagcctcaggttcgtgtacgtgcagccggcgccggcgccggcgaacatctgggtcaccggctacaaactggtctga

SEQ ID NO: 86190 - DNA, 666 bp, Oryza sativa
  Clone ID: PAT_MRT4530_85254C.1
atggccagaccaggccgctgcttgtcgccgccgccatggatgaggctgctgcggcggcgcatggggcacacggaagggtcagcgagtatggatggcgcgcgctcgagctttgcaatttttccccttcccttctctgcttctctcgttgacgcggtggaggcagcgaacggtccgtcatcctggtcgtcggcatcatggtcgtccaaccacgtccaccggcgaactcagagaaagctcgggcaaccggcaatggagacgcccgatggaaagcctgcgagcagcgaggacggcgacggcagggacatcccctatgagtccaaggacaacgaaggtgaaggctcagccaggctaggccgcgtggttttcaaggctggtttcgcctggatctgctcgggaggcatactggatggcgacaacgatgacggctgcagcgaggttctgtggtggcaggataccacggcaacggcaacaaggagtcctgaaacggttttcagcaagcacccttttttagagtccccacaaattcgtggacaacaacctactcacatgatgcatgggtttatttgggaagctttcgattcttcggaagcaactgttgagaatctggagatgctagaaaaaccagcttctaacttctactttattttcttaattctacgattatag

SEQ ID NO: 86191 - DNA, 1900 bp, Oryza sativa
  Clone ID: PAT_MRT4530_85255C.1
gcacgagggcatggccaagaatggtggtgctcacggtgcagccacattgtttggtctcttggcacttgcatcaatggtgaagctgggatttgttgctgggggtggccatgactatgccatggcattgaggaagagcatcctctacttccaggcgcagcggtccggcgttctccctcctaaccagagggtctcctggagagccagctctggcctctttgatggaaaggccaatggagttgatcttgttggaggttattatgatgcaggggacaatgtcaagtttgggttgccaatggcgttcacggtgaccatgatgtcgtggagcatattagagtacggcaagcagatggcggcggccggcgagctccggaacgccatggacgccgtcaagtggggcaccgactacttcatcaaggcgcacccggagcccgacgtgctctacggcgaggtcggcgacggcgacaccgaccacagctgctggcagcggccggaggacatgacgacgagccgccaggcgttccgcgtcgacccccagcaccccgggtcagacctcgccgccgagaccgccgccgccatggccgccgcgtccatcgtcttccgcggcacgtaccctggctacgccaacctcctccttgtgcactccaagcagctgttcgagttcgccgacaagtaccggggcaagtacgacgccagcatcacggtggcgcgaaactactacggctccttcagcggatacggggacgagctgctctgggcggcggcgtggctgttcgaggcgacggaggacaggtcctacctggagtacctcgccggcaacggcgaggcgctgggcgggacggggtggtccatcaaccagttcgggtgggacgtcaagtaccccggcgtgcaggtcctcgccgccaagttcctcctccagggccgcgccggcgaccacgccgccgcgctgcagaggtacaggcagaacgcggagttctttgtgtgctcctgcgtcggcaagggcgccgtcaacgtcgccaggacccccggcggcatgatgtaccaccagaggtggaacaacctccagttcgtcaccagcgcctccttcctcctcaccgtctacgccgacttcgccgccatctccggccgcggcgccgtccactgccccgccggcgccgcccaaccattcgacatcctcaaattcgtcaaatctcaggtgaattatattttgggtgataatccgagggggacgagctacatggtcgggtacggcgcgagctacccgcggcaggtgcaccaccgcggcgcgtccatcgtgtccatcaagagggacccgtcgttcgtgagctgccaggaggggtactcgtcgtggtacgggagggaagccggcaacccgaacctgctcgacggcgccgtcgtcggcgggcccgacgagtacgacgacttcgccgacgagcgcgacaactacgagcagacggaggccgccacctacaacaacgcgccgctgctcggcgtcctcgcccgcctcgccgcctcctgcggcggcctcaaggaggaggaatacgaacaagaaacggcgactccggtcgtgaaccggacgtcgtcgtcgtcgtcgctgccggcgacggcgacggcgatcgggatcgagcagaacgtgacggggacgtgggcgaggaggcggaggacgtactaccggtacgcggtgacggtgacgaacaggtcgcgggggaagacggtgagggagctgcacctgggcgtgtcggggctccgggggcggctgtgggggctggaggaggcgaggtacgggtacgtgccgccgaggtggctgccggcgctgcggccggggaggagcctcaggttcgtgtacgtgcagccggcgccggcgccggcgaacatctgggtcaccggctacaaactggtctga

SEQ ID NO: 86192 - DNA, 342 bp, Oryza sativa
  unsure (1)..(342): unsure at all n locations
  Clone ID: PAT_MRT4530_85256C.1
gtcgacagcctccgcgcggcctcgctgtggaaccggagcttcgactacgccgtccgcctcctcgccaggtcgctcttcaccatcgtcgcgaggatcgcccaagtgttcggcctggagcccaagaacgtcgccaccatggacgacgacgccatgatctcgctcgccaccacccgcctctcatggactaattccttcgtcggcagcgtgcattccttggtctatccttcagatttcgccgcagatacacatactccccggagatcattgctcgatgcaaaatccggcaaggtcttcaatggcggcgaacatgttcgtcggtttctttgtctncaggagccagag

SEQ ID NO: 86193 - DNA, 891 bp, Oryza sativa
  Clone ID: PAT_MRT4530_85257C.1
ttacttttgaaaaggaaaagagatttattgcgtcatcaaggacagtccaccataaaccgggttcacagaagcggtccacgaaaccaacggccgagatctaattgacctaaaattgaccgaatcggacggcagagatcgatccggtctaccacggtctacggctgacgtggcactgcgatcgacaatgatatcatcaccggcggcggcccggcacctcatgctcgccagcgaacaatggcgcggcggcgcaaacggagggcgccaaggcgtagagctcggctcaacgaactcatcggtggctcagacgacggcggcggagagcttcgagtcggtggtgacggtggtcctccagcggtctacgacggaaacggagggcgggacggggacggtggtgaccttgcgaacccgatggtagccttcccgagcgacgacgacgaccggagcgccggcggcgcacagccggacttccttcggcttcggcggcgcacgggctctagtggctaaggtgctacgggcgacggcgagctaaggagaaggtggtggcggagggctaaggggcggtggctaggcccacggcgaccggcggtgagaaggaaagagctagggttttggaaagagaagctaaccaaatcggcatcgaatccgatgatttccaaacgaattagctcaggattacaaaagagaaaaggaagaggagatcgaggggattatttcccctcaattgattcagccggagaaggaacgagcaggtgggccccacctgtcagcgggagacagaggggagggagggactgggccgagcgcgagcaggccgagggaaagggagagagagagaattgggccgactttcggcccaaacctgagaagaagattttaaaacctttttctatt

SEQ ID NO: 86194 - DNA, 1061 bp, Oryza sativa
  Clone ID: PAT_MRT4530_85258C.1
atggcagagagcgcactctgccacacggcgaaggcaaaccgcagcgtggagctcgccgcgagcgcgccctcccccacggcgaaggcggcgtcggtggtgagcccctggatgggcctgaacctgttgttgaggctgtcctccgcgttgatcgcgaaccgcacccgcgagcaattggtggagggagcaagggggggcgggcgctcaccgtggcgaggcggcggagaggtcagggcggtggagggtgagggcgagggcgaagatggtggtgatggcggcgacggcgagcaggcaggcggtgaatctgccggggggcgacgtgtggcatcggcgtcagcctccttgttcttcttcttcctcctcgggctcctccttcgcgtcaggcgcaatgagggcgcggtggagagcgatgggcggccagtgacgatgggagaggcgcgcggcacgatggtggtgcggactgcggaggaggagcgcgtcgattctgtgaaaaatccggcgcacgagtgcacgacggtgagggggcgagagagcgcgaggaggaaatgcgtgggagatgcgggagaaagaggagggaagagcgagacacaggacggtggatgcggcgtgatttcaccatttcaggtgcggggaggagaggagggggagaggtggggtaatctgaggcgttggattggaatcgacaactgttcatcgttttccctagttgaaggccagaaacaaaagagggggaagatgggcgcggtgctccgggttaacgacatcatgagttgttgtccggcaaaatccaccaccatccattcaatgaggtcttggtcaatgagcttggtgcagctagatgaggttggttttgttggatctagctcttcctcctttctactgcttggatttggtcttatttggttcaccctgtagctcccgatctctcgcgcacagccaccgcagactacgcttacacgccaccgtttgcctctctgtctccgcctatgggaacaaccatcagtgaggatgctgccgcctcaaccagcccacttgtgttggcagccgggcacctcttccatcta

SEQ ID NO: 86195 - DNA, 468 bp, Oryza sativa
  Clone ID: PAT_MRT4530_85259C.1
tttgtcgcggtggcggctccggtgggcgtcgtgcattaatgcattgatgcatttcggctgcttttgcgacgaactgtgaatagagcttttatttttctttttctttttcttttggtgtgtaataattaattaattgattgatttcttgatgtgagttttttggttgagatgttgagcaaattcctttgattatgccttgtcaattgctgcattggcatgagcagatgtcaagtaattatactagcttgtaataagctgataaatttagaagttttcaggtagaaaactggaaactgatctttgcattttttttttaaattttgactcctttttgtttagttttcatgctgtgatgacttgtgtatttgagctgtataattttgtcagagctctgttcttgaatctgatttactccctctggacggaggtagtattttgtattatgtgggaagccatggctcaagacac

SEQ ID NO: 86196 - DNA, 200 bp, Oryza sativa
  Clone ID: PAT_MRT4530_8525C.1
tttttggttttttttttttttttggtttttttttttttttttttttttggggaacaacagccattccaattttaaatcgaccctgggtccaggttcacatagacctttaactcatttgaaggatttttgaaactggccattattggaaaccaggcattttaaagccatacattgcttggggatacaagaaccctaacaat

SEQ ID NO: 86197 - DNA, 566 bp, Oryza sativa
  Clone ID: PAT_MRT4530_85260C.1
atgtcccgttatcgaggacctcgttttaaaaaaatacgccgtctgggagctttaccaggactcactagaaaaacacctaaatccggaagtaatctgaaaaagaaattccattctgggaaaaaagaacaatatcgtatggtctgacagaacgacaattacttagatatgtacatatcgctggaaaagcaaaaagttcaacaggtcaggttttactacaattacttgaaatgcgtttggataatatcctttttcgattaggtatggcttcaaccattcccgaggcccggcaattagttaaccatagacatattttagttaatggtcgtatagtcgatataccaagttttcgttgcaaaccccgagatattattactacgaaggataaccaaagatcaaaacgtctggttcaaaattctattgcttcatccgacccagggaaattgccaaagcatttgacgattgacacattgcaatataaaggactagtaaaaaaaatcctggataggaagtgggtcggtctcaaaataaatgagttgttagttgtagaatattactctcgtcaaact

SEQ ID NO: 86198 - DNA, 824 bp, Oryza sativa
  Clone ID: PAT_MRT4530_85261C.1
agtttgacgagagtaatattctacaactaacaactcatttattttgagaccgacccacttcctatccaggattttttttactagtcctttatattgcaatgtgtcaatcgtcaaatgctttggcaatttccccgggtcggatgaagcaatagaattttgaaccagacgttttgatctttggttatccttcgtagtaataatatctcggggtttgcaacgaaaacttggtatatcgactatacgaccattaactaaaatatgtctatggttaactaattgccgggccttgggaatggttgaagccatacctaatcgaaaaaggatattatccaaacgcatttcaagtaattgtagtaaaacctgacctgttgaactttttgcttttccagcgatatgtacatatctaagtaattgtcgttctgtcagaccataatgaaaacgcaatttctgtttttcttgaagacgaatacgatattgttcttttttcccagaatggaatttctttttcagattacttccggatttaggtgtttttctagtgagtcctggtaaagctcccagacggcgtatttttttaaaacgaggtcctcgataacgggacatgaagactcctttttttattgaaatttcattttacacaattaatttcattgtatttacattacagaatacatcgaaattaaaactgaattaaagtaaaggataaacagagtaaaatctactaaaagtaccacaaaaaaatggaatttcatcaacatctgaatttttgtatatatattatttattttattgttttgtatctagcaaaattgtagggtagaacg

SEQ ID NO: 86199 - DNA, 5373 bp, Oryza sativa
  Clone ID: PAT_MRT4530_85262C.1
atggatgaagtcgggcgtcgatggacattctccagggcaaatgaaggctacacgagctgcggcccgatggccggcagcgttacccgtcgtggtttggacatgactggcttcgttttggagctgcggggcatgtgcgtggtcttggggtatccacatggagtggattaccaggccaggccgctcccggagcaggagggtgaggatgcagagccccgcgctggttgggaggtcactgcagtgatcctcgccggctcttctgagcggacttcgctgacagtcaccgcgggtggcgactccttccccgccgcttgccagaacgccgctctcctcgccatcggcacccttcaccagcgctacccggacgagttgcagcactcgccctaccgctaccaccctcgtcgcggaggagcccgcgactacgccaccttccgagacgccagctcggaggatgacgctaccgtcgtgcatctggcacgcatggtggaggcgtacgacgcggctcgtatcgacttccatcagatggtgcgccgtggcatggtcgagaacaacatgaagatcctggagctgcgtcaggagaacctgcagctcaagaaggacctcgacgcgttggaggcgcagctgcatcagctcaagatcgcccagggagaggacagccgacccaagcgtcgccgcgtctgccgcagccagaagatcaccgcccgcaagagcacctccaggcctgagcttgttcgtcagtccctggcgtggacctgcttcgtcgagacccctcgtgccgagcctgcgcccgtggttccccaggagggggaagcctccggcgttggtagctcggaggttgtgtggggcatggttacaccgatggtgacgaccaggagaaatgttaacaccggtgaaggcaaccaacccgaaggcagcaaccacaaccaccaaggcaatccacctccacctcctcctccgcctccaccaccaccaccagacaccaacgccattctcacccaaatcctcgcccagcaagctaacctgatgaatgctttcctccaccacctccaaaacccgccacaacagaatgctccaccaccacctccccaacactctaaactcgccgagttcctccgcatccgtccacctaccttctccagctccaacaatcccgtagatgctttggattggttgcatgccgtggggaagaagttagacactgtgcagtgcagtgacaaggagaaagtcgtcttcgccgcccaccagctgcaggggcccgcatctctctggtgggaccacttccaggctacgcagccagaggggcagccgatcacttgggctcgcttcaccgccgctttccggaaaacccatgtgcccgccggagtcgtggctctcaagaagagggaattccgagagttgaagcaaggcaaccgctccgtgatggagtacctgcatgagttcaacaatctagcccgttatgccccggaggatgtgcgggaagatgaggagaagcaagagaagttcttggcaggaatggaccccgagctgtctgttcgtctagtctctggagactacccggacttccaacgactggtggacaagagcatccgcttggaagccaagcacaaggagctggaatcgcacaagcgccgcttggcgaatttccgcaatcaacagggtgctaaccagagggtccgctacaccaatccctacccagggggatcctcctcgcagcagcagcagcagcagcaacctcgcccagcgcctcgacctcaattcgtggtgcgcgtcccacagccgcagcagcagcagaatcaacaagggactcgtgcgccccgtcctcctacgccagctgtgcagcccgttcaaggccgcagggacgctcaaggtcagcagcgtctgtgcttcaactgcttcgagcccgggcactttgcggataaatgcccgaagccaaggcgtcagcaaggccaagcgcctccccgctccaacaacggtggcaaggacgtcattcggggtcgtgtgaatcacgtgacggccgaggacgtgctgacaactccagacgtcatcgttggtacgttcctcgttcattccatccctgctacaattttgttcgactctggagcttcccactcgtttatatctgtgccattcgtggggagaaatcagttgggggtagaaaggcttagaaaccctctactcatcaccacccctggaggggttatgacagcaaagtattatagccctgccgtccctatagaaattcaggggattccttttccctcggatctgattctgctagacaccaagaatttggatgtgattcttgggatgaattggttggctcaattccaaggagtagtggattgcgcgaggcgcactgtcactctgtaccgagggccagaacaaccggttgttttctttgcacccccaacctctgccagaagttcagaacttcatcagatagaactgtcagaaatccccatagtcagagagttcggagacgtgtttccggaagaactacctggtatgccgcccaagcgagagattgagttccggatagatcttgctccaggaaccactcctctgtacaagcgaccctaccgtatggcagcaaatgaactagccgaagtaaagaaacagttggaagagttgaaagaaaaggggtacatacgtccgagtacttccccatggggtgctcctgtgatttttgtagagaagaaagacaagacgaagaggatgtgcgttgactacagagctctcaatgaagttaccatcaaaaacaagtaccctcttccccggatcgatgatctgttcgaccagcttaaaggtgccactgtattctccaagattgatcttcgttccggatatcaccaattacgtattcgtgaagaagatattccgaagaccgcattcactacgcgatatggactgtatgaattcacggtgatgtcgttcggcttgaccaatgctcctgccttcttcatgaacttaatgaataaagtgttcatggaatacttggacaagtttgttgtggttttcatcgatgacattctgatatactcacaatcagaggaagaccatcagcaccatctccgtctggtgttgggaaagttgcgggaacatcaattgtatgccaagcttagcaagtgtgagttctggttgtccgaagtcaaattcttggggcacgtgatatctgctaaaggagttgctgtggaccccgaaacagtgatcgccgtcaccgattggaagcaacccaagacagtcactcagattcgcagtttcttgggtttggcaggatattaccggagattcattgagaacttctccaaaatcgctcgacccatgacacagttgttgaaaaaagaagagaaatttgtgtggagcccgcaatgcgagaaggcgtttcaaactctcaaggaaaagctggtttcctcgccagtgttaatcttgccggatactcgcaaggatttcatggtgtattgtgatgcttcgcgccaaggattggggtgcgtgctcatgcaggacggtcatgtggtagcctatgcctcacgtcagctacgacctcatgaaggcaactaccctacacatgacttggagttagcagcggtggttcatgctctaaaaatctggcggcactatctcattgggaaccgctgtgaaatatatactgatcacaagagcttgaaatacatcttcacccagtcggatctgaatcttcggcaaaggagatggttagaactcatcaaggattatgatgtgggaatacactatcatcctggtaaggccaacgtggttgccgacgctctaagtcgaaagagccactgcaacactctcaacgtccgaggcattccacccgagcttaatcaacagatggaagccctgaacctaagcatggttggtcgcggattcttggctgcgttagaagccaagcccaccttgctcgatcaaatccgcgaggctcagaagaatgatccggacatgcatggactcctcaagaatatgaaacagggtaaagccgctggtttcacagaggatgaacacggaaccttatggaacggaaagcgggtatgcgttccagatagcagagaacttaaacagctgatacttcaggaagctcacgaaagtccttattccattcacccgggcagtaccaagatgtacttagacttgaaggagaaatactggtgggttagcatgaagcgggaaattgcagagtttgtggctctatgtgatgtgtgccagcgtgtcaaggcagaacaccaacgaccggccggacttctccaacctctccaagtgccagaatggaagtgggatgaaattgggatggatttcatcaccggacttccaaaaacccaaggtggatatgattctatatgggtaattgtggatcgactaacaaaggtggctcgatttattcctgtgaagaccacttatggagggaacaaactagcggagctctacttcgctaggatcgtgagtctccatggtattcccaagaaaatcgtatctgataggggaagccaattcacctctcacttttggaagaagctccaagaagagctgggtactcgattgaatttcagcaccgcctatcacccgcagacagatggacagaccgagcgtctaaatcagatcctagaagatatgctccgcgcatgtgtcctagatttcgggaagacttgggataagagtctcccctatgccgagttctcctacaataacagctatcaagccagcatacaaatggcaccttatgaagcgttgtacgggcgcaaatgccggacaccgttattgtgggaccaagttggagaaagccaagtgttcgggactgatatcctgagagaagctgaagctaaagtcagaatcattcgggataatctaaaggtggcacagtcccggcagaaaagttatgcagataaccgacgccgtgatctggaattcgcagtggatgattttgtgtatcttcgggtcacgccattgcgaggtgtgcacaggtttcagacaaaagggaagctcgcacctcggtatgtgggtccttttcgtatcactgctcgacgcggagaagtcgcctaccagctggagttgcccgcctccttgggcaacgtgcatgatgtgttccatgtgtcgcaactcaagaaatgtcttcgagtgccatccgagcaggccgactcagagcaaattgaagttcgcgaagatttgacctacgtggagaggccagtgaaaatcctgaacaccatggagcgcaggaccaggaaccgagtaatccgtttttgcaaggtccagtggagcaatcacgccgaaggagaagctacttgggagcgtgaagacgagctgaaggcagcccatcccgatctcttcgccagttcttccgaatctcggggtcgagattccgtttaa

SEQ ID NO: 86200 - DNA, 382 bp, Oryza sativa
  Clone ID: PAT_MRT4530_85263C.1
agggaagcagatcgtctgacgttgggcagctaacgtcataggacgtcgggcgtcgatccatcgtccgattggcatttcacggcgctgctgcttctttcgttctgcatcgcacgagcgtggcaaggatggcccattcagcccatttacgagcaactgcggagggacaaaaacgaacgagactgctcgtcaatccaccgtcgcacagaaaaaaaaaagaaaagaaaaaccaatcccggcatggctgcccgccgctctgctgcggctcgccgccttcctcgacgcgggcgtcggcgtcctcgacaatgacggcttctacggcggcggcggcggcggcggcgccaagctggccaaatcgggacgccgccgccgccgccggcgcgca

SEQ ID NO: 86201 - DNA, 6058 bp, Oryza sativa
  Clone ID: PAT_MRT4530_85264C.1
atggcggccgagatctccgcgccggtttccatctcctccggccgctttccctctctcccgacgctatttaaacgtctcccgtgctctcctcctccgtttccgccgctcgccgctcgctctccccgtcggaatcgtgctcgcgccgtcttcctctctctccgccgtcgccgacaagctccggttcgccgccgccgtcgctccggacttcctcccctctcggcgtcgtctccatcggcttcgccgcgttcccgtcgacctcgtccgcgcctccgtttcgctcgccgaccgccggagcaccgtcgccctcgccgtcccgaaccgcgccgccgccttcctccgtttcggctgccgttcccgtcgtcgccgtcgaccggggtgagccgaagaccgctccattcgcttcccccttccctcctctctctcgggtgccgctccgccgcgccggtggtcgccggcggtgaccatcggggcgcgggcgcgtccccctcccgtcggccgtgccggcgaggccgccttcgggcgcgccccgcggctgccaggtggggcccggccgtcagccgcccgcgcccgcgggtgcggctgacgcgtgggacccacggcgccggccgccgccagccgcgtgctcccggtccaccgtggacccacctcggccatataaggaccggtcttcgggcctctgttgcaaagcactaccgtacttccacatgtctagtggggcaaatgaaggctacacgagctgcggcccggtagtcgagatgtcatggcagagggttggtgccctgctgctagggggctcagtcctgcctgcctgtcccgggtgtcccggccgtagggggattgggtcggatgtacacctctgatcagagtaaaacctattcgaatagccgcgccctcggttatgggcaagccgagcaatgtacccaaatggccggcagcgtcacccgtcgtggtttggacatgactggcttcgtcttggagctgcgaggcatgtgcgtggtcctggggtatccacatggagtggactaccaggccaggccgcttccggatcaggagggtgatgatgcggagccccccgctgcttgggaggtcactgcagtgatcctctctggctctcccgagcggacttcgctggcagtcaccgcgggtggagattccttccccgccgcttgccagaacgccgccctcctcgccatcggcactcttcaccagcgctacccggacgagttgcagcactcgccctaccgctaccaccctcgtcgcggaggagcccgcgactacgccaccttccgggatgctagctcggaggatgacgctaccatcgtgcacctggcgcgcatggtggaggcgtacgacgcggctcgtatcgacttccaccagatggtacgccgcggcatggtcgagaacaacctgaagatcctggagctgcgtcaggagaacctgcagctcaagaaggacctggacgcagtggagacgcagctgcaccagctcaagatcgcccagggagagatctgccgccccaagcgtcgccgtgtctgccgcagccagaagatcaccgcccgcaagagcacctccaggcccgagcttgttcgtcagtccctggcgtggacttgtttcgtcgagacccctcgtgccgagcctgcgcccgtggttccccaggagggggaagcctccggcgttggaagcacggaggatgcgctgttgctcaccttccatggtgatgaccaggagaaatgctgctaccggtgatggcaaccaacccgaaggcagtaaccacaaccaccagggcaacccacctccacctcctcctccgcctccaccaccaccaccagacaccaacgccattctcacccaaatcctcgcccagcaagccaacatgatgactgctttcctccaccacctccaaaatccgccacaacttaatgctccaccaccacccccacaacactctaaactcgccgagttcctccgcatccgtccacccaccttctttagctccaacaaccccgtggatgcgttggattggttgcatgccgtggggaaaaagttagacactgtgcagtgcagcgatgaggagaaagtcatcttcgccgcccaccagctgcagggacccgcatctctatggtgggaccatttccaggctacgcagccagaggggcaacctatcacttgggctcgcttcaccgccgcttttcggagaacccatgtgcccgccggagtcgtggcccttaagaaaagggaattccgagagttgaagcaaggcaaccgctccgtgatggagtatttgcatgagttcaacaatctggcccgttatgccccggaggatgtgcgggaagatgaggagaagcaagagaaattcctggcaggaatggacccagagctgtccgtccgtctagtctctggggactatccggatttccaacgtctggtggacaagagcatccgcttggaagccaagcacaaggaactggagtcgcacaagcgccgcttggcgaatttccgcaatcaacagggtgctaaccaaagggtccgctacaccaatccctatccagggggatcctcctcgcagcagcagccgcagcagcagcagcaacctcgctccgcgcctcgacctcaattcgtggtgcgcatcccacagccgcagcagcagcagaatcaacaagggactcgtgcgccccgtcctcctacgccaactgtgcagcctggtcaaggccgcagggacgctcaaggtcagcagcgtctgtgcttcaactgcttcgagcccgggcactttgcggataaatgcccaaagccaaggcgtcagcaaggccaagcgcctccccgctccaacaacggcgggaaggatgtcattcggggtcgtgtgaaccacgtgacggccgaggacgtgctgacaactccagacgtcatcgttggtacgttcctcgttcattccatccctgctacaattttgttcgactctggagcttcccactcgtttatatctgtgccattcgtggggagaaatcagttgggggtagaaaggcttaggaaccctctgctcatcaccacccctggaggggttatgacagcaaagtactatagccctgccgtccctatagaaattcaggggattccttttccctcggatctgattctgctagacaccaagaacttggatgtgatccttgggatgaattggttggctcaattccaaggagtagtggattgcgcgagacgcactgtcactctgtaccgagggccagaacaaccggttgttttctttgcacccccaacctctgtcagaagttcagaactgcatcagataggactgtcagaaatccccatcgtcagggagttcggagatgtgtttccggaagaactacctggtatgccgcccaagcgagagattgagttccggatagatcttgctccaggaaccactcctctgcataagcgaccctaccgtatggcagcaaatgaactggccgaagtaaagaaacagttggaagagttgaaagaaaaggggtacatacgtccgagtacttccccatggggtgctcctgtgatttttgtagagaagaaagacaagacgaagaggatgtgcgtcgactacagagctctcaatgaagtcaccatcaaaaacaagtaccctcttccccggatcgatgatctgttcgatcaacttaaaggtgccactgtattctccaagattgatcttcgttccggatatcaccaattacgtattcgtgaagaagatattccgaagaccgcattcaccacgcgatacgggctgtatgaattcacggtgatgtcgttcggtttaaccaatgcacctgccttcttcatgaacttaatgaacaaagtgttcatggaatacttggataagtttgttgtggttttcattgatgacattctgatatactcacaatcagaggaagaccatcagcaccatctccgtctggtgttgggaaagttgcgggaacatcaattgtatgccaagcttagcaagtgtgagttctggttgtccgaagtcaaattcttagggcacgtgatatcagctaaaggagttgctgtggaccccgaaacagtgaccgccgtcaccgattggaaacaacccaagacagttactcaagtccgcagtttcttaggtttggcaggatactaccggagattcatcgagaacttctccaagatcgctcgacccatgacacagttgttgaagaaagaagagaaatttgtgtggagcccgcaatgcgagaaggcgtttcaaactctcaaggaaaagctggtttcctcgccggtgttaatcttgccggatactcgcaaggacttcatggtgtattgtgacgcttcgcgccaaggattggggtgcgtcctcatgcaggacggtcatgtggtagcctatgcctcacgtcagctacgacctcatgaaggcaactaccctacccatgatttggaggtagcagcggtggttcatgctctaaaaatctggcggcactatctcattgggaatcgctgtgaaatatatactgatcataagagtttgaaatacatcttcacccagtcggatctgaatcttcggcaaaggagatggttagaactcatcaaagactatgatgtgggaattcactatcatcctggtaaggccaacgtggttgccgacgctctaagtcgaaagagccattgcaacactcttaacgtccgtggcattccacccgagcttaaccaacagatggaagccctgaacctaagcatagttagtcgtggattcttggccgcgttggaagccaagcccaccttgctcgatcaaatccgcgaggctcagaagaacgacccggacatgcatggactcctcaagaatatgaaacagggtaaagccgctggtttcacagaggatgaacacggaaccctatggaacggaaagcggcgtgtcaaggcagagcaccagcgaccggccggacttctccaacctctccaagtaccagaatggaaatgggatgaaattgggatggatttcatcaccggactcccaaaaacccaaggcggatatgattctatatgggtagttgtggatcgattaaccaaggtagctcgatttattcctgtgaagaccacctatggagggaacaagctagcggagctctacttcgctaggatcgtgagtctccatggcgttcccaagaagatcgtatctgataggggaagccaattcacctctcacttttggaagaagctccaagaagagctgggtactcgattgaatttcagcaccgcctatcacccgcagacagatggacagaccgagcgtctaaatcagatcctagaagatatgctccgcgcatgtgtcctatattttgggaagacctgggataagagtctcccctatgccgagttctcctacaataacagttatcaagccagcatacaaatggcaccttatgaagcgttgtacgggcgcaaatgccggacaccactattgtgggaccaagttggagaaagccaagtgttcgggactgatatcctgagagaagctgaagctaaagtcagaatcattcgggataatctaaaggtggcacagtcccggcagaagagttatgcagataaccgtcgccgtgacctggaattcgcagtggatgattttgtgtaccttcgggtcacgccattgcgaggtatacacaggtttcagacgaaagggaagctcgcacctcggtatgtgggtcctttccgtatcattgctcggcgcggagaagtcgcttatcagttggagctgcccgcctccttgggcaacgtgcatgatgtgttccatgtgtcgcaactcaagaaatgtctccgagtgccatccgagcaggccgactcagggcaaattgaagttcgcgaagatttgacctacgtggagaggccagtgaaaatcctggacaccatggagcgcaggaccaggaaccgagtaatccgtttttgcaaggtccaatggagcaaccatgccgaagaagaagctacctgggagcgtgaagacgagctgaaggcagcccatcccgatctcttcgccagttcttccgaatctcggggtcgagattccgtttaa

SEQ ID NO: 86202 - DNA, 5626 bp, Oryza sativa
  Clone ID: PAT_MRT4530_85265C.1
atggaacacatcatgcacgttgcccaaggaggcgggcagctccaactggtaagcaacttctccgcgtcgagcaatgatacggaaaggacccacataccgaggcgggcccgcccgccgctctcgctgacgggtggggcccacctgtcatcgccttcctcccgccgcgcccgccgccacgcccgtgccctagcgccgccgccgccgcggattgcgccgcatcccgccgtccccgcgcgcattaaagagaggggaattactccccgcgtttccctctcccgattccccctcttttccctctctctctccctcggattcgtccggattcatcccgcgaagttcgccggcgtcttcaatggcgcccgagatctccgcgcgcggtttcctctctccccggccgcgctctccccctcccgttgctatatattcgatccccgtgcttcgctcttccgtttccgccgctcgccgatcgctctcgccgtcggtttcgtgcccgcgccgtgctcctctctctccgccgtcgccgccgaccttcggttcgccgccgacgtcgctccggtcctccgcccgactcggcgccacctccatcggcttcgccgagtggttgccgaccccgtccgccgctccgcttcgcccgccgaccgccggagcaccgtcgtcatcgtcattccgaaccgcgccgccgctttcctccgctccggccgccgttcttgtcgtcgtcgttgtcccggggtgagccgaagaccgccgttcgctttcccccttctctccgctctctcgggcgccgctccaccgcgccgatggtcgccggcggtgaccatcggggcgcgggcgcgccctcgcggctgccaggtgggcccggccgtcagccgcccgcgcccgcgggtgcggctgacgcgcgggacccacggcgccgaccgccgccagccggacgctgcagcttcggaagatccgctcttcgtggaagttgaagccggcgtttgggaaagcgagcaaggcaagtcacgtcacccttgagcatattgaatcccatctagtcctgaacaaaaggacacggatagagatggatgaagtcgttgcgacgatggatatctctgaggcaaatgaaggctacgcgagctgcggctcgatgtacacctctgatcagagtaaatctattcgaatagccgagccctcggatatgggcaagccgagcaatgttggcctgggttggcttgggacgagctgggacccagcgtcgggttgccagaacgccgcactcctcgccatcggcactcttcaccagcgctacccggacgagttgcagcactcgccctaccgctaccaccctcgtcgtggaggagcccgcgactacgccatcttccgggatgctagctcggaggatgacgctaccatcatgcacctggcgcgcatggtggaggcgtacgacgcgacccgtatcgacttccatcagatggtgcgtcgtgggttggtcgagaacagcatgaagatcctggagctgcgtcaggagaatctgcagctgaagaaggacctagacgcagtggaggcgcagctgcatcagcttaagatcgcccagggagagatggtgacaaccaggagaagtgctgctacaggtgaaggcagtcaccccgaaggcagcaaccacaacaaccatggcagcccacctccacctcctcctccgcttccaccaccaccaccagacaccaacgccatcctcacccaaatcctcgcccagcaggccaacatgatggctgctttcctccaccacatccaaaacccgccacaacataatgctccaccaccacccccacaacactctaaactcgccgagttcctccgcatccgtccgcctaccttctctagctccaataaccccgtggatgcgttggattggttgcatgccgtggggaaaaagttagacatcgtgcagtgcagcgatgaggagaaagtcatcttcgccgcccaccaactgcaggggcctgcatctctgtggtgggaccatttccaggctacgcagctagaggggcaacctattacttgggcccgcttcaccacgtctttccggagaacccatgtgcccgccggagtcatggcccttaagaaaagggaattccgagagttgaagcaaggcaaccgctccgtgatggagtacttgcatgagtttaacaacctggcctggtacgccccggaggatgttcgtgaagatgaggagaagcaagagaagttcttggcaggaatggaccctgagctgtccgtgcgtctggtctccggggactatccggatttccagcgtttggttgacaagagcatccgcttggaagccaagcagaaggaactggagtcgcacaagcgtcgcttggcgaatttccgcaaccaacggggggctaaccaaagggtccgctacaccaatccctatccagggggatcctcctcgcagcagcagcagcagcagcagcctcgctccgcgccccgacctcaattcgtggtgcgcgtcccacagccgcagcaacagcagagtcagcaagggactcgtgcgccccgtccccctacgccagctctgcagcctggtcaaggccacagggacgctcaaggtcagcagcgtctgtgcttcaactacttcgagcccgggcactttgcagctaaatgcccaaagacgaggcgccagcaaggccaagcgcctccccgctctaacaacggtggtaaggatgtcattcggggtcgtgtgaaccacgtgacggccgaggacgtgctgacaactccagacatcatcgttggagtagtgtattgtgcaagacgcactgtcactctgtaccgagggccggaacaaccggttgttttctttgcacccccaacctctgttggcagttcagaacttcatcagataagactgtcggaaatccccatcgtcagggagttcggtgacgtgtttccggaagaactacccggtatgccgccgaagcgagagattgagttccggatagatcttgctccaggaaccactcccctgtacaagcatccctaccgtatggcagcaaatgaactggccgaagttaagaaacagttggaagagttgaaagaaaaggggtatatacggccgagtacttccccctggggtgctcctgtgatttttgtggagaagaaagacaagacgaagaggaggtgcgttgactacagagctctcaatgaagttactatcaaaaacaagtaccctcttccccggatcgatgatctgttcgatcagcttaaaggtgccacgtttgttgtggttttcattgacgacattctggtgtactcacaatcagaggaagaccatcagcaccatctccgtctggtgttgggaaagttgcggcaacatcaattgtatgccaaacttagcaagtgtgagttctggttgtccgaagtcaaattcttagggcacgtgatatctgctaaaggagttgctgtggaccccgaaacagtgaccgccgtcactgattggaagcaacccaagacagtcactcaaattcgcagtttcttgggtttggcaggatactaccggaggttcatcgagaacttctccaaaatcgctcgacccatgacccagttgttgaagaaagaagagaaatttgtgtggagcccacaatgcgagaaggcgttccaaactctcaaggaaaagctggtttcctcgccggtgttaatcttaccggatactcgcaaggacttcatggtgtactgtgacgcttcacgccaaggactggggtgcgtgctcatgcaggaaggtcatgtggtagcctatgcctcacgccagctacggccccatgaaggcaactaccctacccatgatttggagttggccgctgtggttcatgctctaaaaatctggcggcattatctcatcgggaatcgctgcgaaatatatactgatcataagagtttgaaatacatattcactcagtcggatctgaatcttcggcagagaagatggttagagctcatcaaggattatgatgtgggaattcactatcatcctggtaaggccaacgtggtcgccgacgctctaagtcgaaaaagccattgcaacactcttgaagtccgtggcattccacccgaacttaatcaacagatggaagccctgaacctaagcatagttggtcgtagattcttggcaacgctggaagccaagcctaccttgctcgatcaaattcgcgaggctcagaagaatgatccggatatgcgtgaactcctcaagaatatgaaacagggtaaagccgctggtttcacagaggatgaacacggaaccctatggaacggaaatcggatatgtgttccagacgacagagaacttaaacagctgatacttcaggaagctcacgaaagtccttattccattcaccctggcagtacgaagatgtacttagacttgaaagggaaatactggtgggttagtatgaagcgggaaattgcagagttcgtggccctttgtgatgtgtgccagcatgtcaaggcagagcaccaacgaccggccgaacttctccaacctctccaagtaccagaatggaaatgggatgaaattgggatggatttcatcaccggacttccaaaaacccaaggcggatatgattctatatgggtagttgtggatcgattaaccaaggtagctcgatttattcctgtaaagaccacctatggagggaacaaactagccgagctctacttcgctaggatcgtgagtctccatggcgttcccaagaaaatcgtatctgataggggaagccaattcacctctcacttttggaagaagctccaagaagagttgggaacccgattaaatttcagcaccgcgtatcacccgcagacagatggacagaccgagcgtctaaatcagatcctaaaagatatgcttcgcgcatgtgtcttagatttcgggaagacctgggataagagtctcccctatgccgagttctcctacaataacagttatcaagccagcatacaaatggcaccttatgaagcgttgtacgggcgcaaatgccggacaccactattgtgggaccaagttggagaaagccaagtgttcgggactgatatcctgagagaagctgaagctaaagtcagaaccattcgggataatctaaaggtggcccagtctcggcagaaaagttatgcggataaccgacgccgtgatctggaattcgcagtggatgactttgtgtatcttcgggtcacgccattgcgaggtgtacacaggtttcagacaaaggggaagctcgcacctcggtatgtgggtcctttccgtatcattgctcggcgcggaggagtcgcttaccagctggagctgcccgcctccttgggcaacgtgcatgatgtgttccatgtgtcgcaactcaagaaatgtcttcgagtgccatccgagcaggccgactcagagcaaattgaagttcgcgaagatttgacctatgtggagaggccagtgaaaatcctggacaccatggagcgcaggaccaggaaccgggtaatccgtttttgcaaggtccagtggaacaaccacgccgaagaagaagctacctggaagcgtgaagacgagctgaaggcagcccaccccgatctcttcgccagttcttccgaatctcggggtcgagattccgtttaa

SEQ ID NO: 86203 - DNA, 4422 bp, Oryza sativa
  Clone ID: PAT_MRT4530_85266C.1
atgaccaggaggagcgctaacaccggtgatggcaaccaacccgaaggcagcaaccaccaccaccagggcagcccacctccacctccacctcctcctccaccaccaccaccagataccaacgccattctcacccaaatcctcgcccagcaagccaacatgatgactgctttcctccaccacctccaaaatccgccacaacagaatgctccaccaccacctccccaacactctaaactcgccgagttcctccgcatccgcccacctaccttctctagctccaacaaccccgtggatgcgttggattggttgcatgccgtggggaaaaagctagacactgtgcagtgcagcgatgaggagaaagtcatcttcgccgctcaccagctgcagggacccgcatctctatggtgggaccatttccaggctacgcagccagagggacagcctattacttgggctcgcttcaccgccgctttccgaagaacccatgtgcccgccggagtcgtggcccttaagaaaagagaattccgagagttgaagcaaggcaaccgctccgtgatggagtatttgcatgagttcaacaacctggcccgttacgctccggaggatgtgcgggaagatgaggagaagcaagagaagttcctggcaggaatggaccctgagctgtccgtccgtctagtctctggggattatccggatttccaacgtctggtggacaagagcatccgcttggaagccaagcacaaggaactggagtcgcacaagcgccgcttggcgaatttccgcaatcaacagggtgctaaccaaagggtccgttacaccaatccctatccagggggatcctcctcgcagcagcaacaacagcagcagcaacctcgctccgcgcctcgacctcaattcgtggtgcgcgtcccacagccgccgcaacagcagagtcaacaagggactcgtgcgccccgtcctcctacgccaactgtgcagcctggtcaaggccgcagggacgctcaaggtccgcagcgtctgtgcttcaactgcttcgagcccgggcacattgcggataaatgcccgaagccaaggcgtcagcaaggccaagcgcctccccgccccaacaacggtggtaaggacgtcattcggggtcgtgtgaaccatgtgacggccgaggacatgctgacaactccagacgtcatcgttggtacgttcctcattcattccatccctgctaccattttgttcgactctggagcttcccactcgtttatatctgtgccattcgtggggagaaatcagttgggggtagaaagacttagaaaccctctgctcatcaccacccctggaggggttatgacagcaaagtactatagccctgccgttcctatagaaattcaggggattccttttccctcggatctgattctgctagacaccaagaacttggatgtgatccttgggatgaattggttggctcaattccaaggagtagtggattgcgcaagacgcactgtcactctgtaccgagggccggaacaaccggttgttttctttgcacccccaacctctgtcaaaagttcagaacttcatcagataggactgtcagaaatccccatcgtcagggagttcggagacgtgtttccggaagaactacctggtatgccgcccaagcgagagattgagttccggatagatcttgctccaggaactactcctctgtacaagcgaccctaccgtatggtagcaaatgaactggccgaagtcaaaaaacagctggaagagttgaaagaaaaggggtatatacgtccgagtacttccccctggggtgctcctgtgatttttgtggagaagaaagacaagacgaagaggatgtgcgttgactacagagctctcaatgaagtcaccatcaaaaacaagtaccctcttccccggatcgatgatctgttcgatcagcttaaaggtgccactgtattctccaagattgatcttcgttccggatatcaccaattacgtattcgtgaagaagatatcccgaagaccgcatgcaccacgcgatacggactgtatgaattcacggtgatgtcgttcggtttaaccaatgcacctgccttcttcatgaacttaatgaacaaagtgttcatggaatacttggataagtttgtggtggttttcattgatgacattctgatatactcacaatcagaggaagaccatcagcaccatctccgtctggtgttgggaaagttgcgggaacatcaattgtatgccaaacttagcaagtgtgagttctggttgtccgaagtcaaattcttagggcacgtgatatctgctaaaggagttgctgtggaccccgaaacagtgaccgccatcactgattggaagcaacccaagacagtcactcaagtccgcagtttcttaggtttggcaggatactaccgaaggttcatcgagaacttctccaaaatcgctcgacccatgacacagttgttgaagaaagaagagaaatttgtgtggagcccgcaatgcgagaaggcgtttcaaactctcaaagaaaagctggtttcctcgccggtgttaatcttgccggatactcacaaggacttcatggtgtattgtgacgcttcgcgccaaggattggggtgcgtgctcatgcaggatggtcatgtggtggcctatgcctcacgccagctacggcctcatgaaggcaactaccctactcatgatttggagttagccgcggtgtcggacctgaatcttcggcaaaggagatggttagaactcatcaaagattatgatgtgggaattcactatcatcctggtaaggccaacgtggttgccgacgctctaagtcgaaaaagccattgcaacactcttaacatccgtggcattccacccgaacttagtcaacagatggaagccctgaacctaagcatagttagtcgcggattcttggctgcgttggaagccaagcctaccttgctcgatcaaatccgcgaggctcagaagaacgatccggacatgcatgggctcctcaagaatatgaaacagggtaaagccgttggtttcacagaggatgaacacggaaccctatggaacggaaatcgagtatgcgttccagataacggagaacttaaacagctgatacttcaggaagcccacgaaagtccttattccatccaccctggcagtacgaagatgtacctagacttgaaggagaaatactggtgggttagtatgaagcgggaaattgcagagttcgtggccctttgtgatgtgtgccagcgtgtcaaggcagagcaccaacgaccggccggacttctccaacctctccaagtaccagaatggaaatgggatgaaattgggatggatttcatcaccggacttccaaaaacccaaggtggatatgattctatatgggtagtcgtggatcgattaaccaaggtagcccgatttattcctgtgaagaccacctatggagggaacaaactagccgaactctacttcgctaggatcgtaagtctccatggcgttcccaagaaaatcgtatctgataggggaagccaattcacctctcacttttggaagaagctccaagaagagctgggtacccgattaaacttcagcaccgcgtatcacccgcagacagatgggcagaccgagcgtctaaatcagatcctagaagatatgcttcgcgcatgtgtcctagatttcgggaagacctgggataagagtctcccctatgccgagttctcctacaataacagctatcaagccagcatacaaatggcaccttatgaagcgttgtatgggcgcaaatgtcggacaccgctattgtgggaccaagttggggaaagccaagtgttcgggactgatatcctgagagaagctgaagcgaaagtcagaaccattcgggataatctaaaggtagcacagtcccggcagaaaagttatgcagataaccgatgccgtgacctggaattcgccgtggatgattttgtgtaccttcgggtcacgccattgcgaggtgtacacaggtttcagacaaaagggaagctcgcacctcggtatgtgggtcctttccgtatcgttgctcggcgcggagaagtcgcttaccagttggagctgcccgcctccttgggcaacgtgcatgatgtgttccatgtgtcgcaactcaagaaatgtctccgagtgccatccgagcaagccgactcagagcaaattgaagttcgcgaagatttgacctatgtggagaggccagtgaaaatcctggacaccatggagcgcaggaccaggaaccgggtaatccgtttttgcaaagtccaatggaacaaccacgccgaagaagaagctacttgggagcgtgaagacgagctgaaggcagcccatcccgatctcttcgccagttcttccgaatctcggggtcgagattccgtttaa

SEQ ID NO: 86204 - DNA, 393 bp, Oryza sativa
  Clone ID: PAT_MRT4530_85267C.1
ctttccctgctcccatctcaccacgccactccggtcctaccccaatctcaagtgggagaaggcaacagacaccctcgccgccgcggcggacccatccggcggatggcaaactcaaagcggctcccgtactccacggtcggcggcggcgacggcaggaggacgagacaggccgactgacctacctgcacgcggaaggggacagcaacgactcggaggaggtggcccgcgccaccagcgcgctctgactggaacacgcgccggagcaccaccactggcaccaccacagcgtcgctgggcggagcacgttcgcgtttctcgccggggaccacggccgcacgtactatgccctggcggacccgacgcctggcagccccgatacggtccggttcctgc

SEQ ID NO: 86205 - DNA, 479 bp, Oryza sativa
  Clone ID: PAT_MRT4530_85268C.1
ctgtaggtatttcttatgaccacagataaatccgcaagcgcacggaataccactatagcacttcaccttcgagtgaccacaaaaggatatcgaactcagggaacgattaatgggaaggaatacagagctgtcaccacctgtcgtctacctctgccaaatccgtgagataacaacaaacaaagaagaagtttctctgaacccggagcatagtgtaccgacagctctggtgctcctccagaatttctcctagaaagctacacttgtcgaggtagaagttggagagagcgcaaaacttccgggcactcctccagagcttccccccactctctacctattttctaatgtacaacagatacaatagagcctcttgtaattcagctcaaagttgtgtgtattggaatgaagtgagctcatccttttataggctccaaatgacaattacaattatgggaaatatcttaaatgcccttaaccatcat

SEQ ID NO: 86206 - DNA, 5605 bp, Oryza sativa
  Clone ID: PAT_MRT4530_85269C.1
atggatgaagtcgggggtcgatggacattctccagggcaaatgaaggctacacgagctgcggcccggtagtcgagatgtcgtggcagagggttggtgccctgctgcttggggctcagtcctgcctgcctgtcccggaggttccggccgtaggcgggattgggtcgatggccggcagcgtcacccgtcgtggtttggacatgactggcttcgtcttggagctgcggggcatgtgcgtggccctggggtatccacatggagtggactaccaggccaggccgcttccggatcaggagggtgacgacgcggagccccacgctggttgggaggtcaccgcagtgatcctctctggctctcccgagcggacttcgctggcagttaccgcgggtggagattccttccccgccgcttgccagaacgccgctctcctcgccatcggcactcttcaccagcgctacccggacgagttgcagcactcgccctaccgctaccaccctcgtcgcggaggagcccacgactacgccaccttccgggatgctagctcggaggatgacgctaccatcgtgcacctggcgcgcatggtggaggtgtacgacgcggctcgtatcgacttccatcagatggtgcgtcgcgggatggtcgagaacaatctgaagatcctggagctgcgtcaggagaacctgcagctcaagaaggacctagacgcggtggaggcgcagctgcatcagctcaagatcgcccagggagaggtctgccgccccaagcgtcgccgcgtctgccgcagccagaagatcaccgcccgcaagagcacctccaggcccgagcttgttcgtcagtccctggcgtggacttgcttcgtcgagacccctcgtgccgagcccgcgcccgtggttccccaggagggggaagcctccggcattggtagcacggaggctctttctctgtttgctggttctgtgtggggttttcagatggtgacgaccaggagaaatgctgccaccggtgatggcaaccaacccgaaggcagcaaccacaaccatcagggcaacccacctccacctcctcctccgcctccaccaccaccaccagacaccaacgccattctcacccaaatcctcgcccagcaagccaacatgatgactgctttcctccaccacctccaaaatccaccacaacataatgctccaccaccacccccacaacactctaaactcgccgagttcctccgtatccgcccacctaccttctctagctccaacaaccccgtggatgcgttggattggtttcatgccgtggggaaaaagctagacacggtgcagtgcagcgatgaggagaaagttatcttcgccgcccaccaactgcaggggcccgcatctctatggtgggaccatttccaggctacgcagccagaggggcagcctattacttgggcccgcttcaccgccgctttccggagaacccatgtgcccgccggagtcgtggcccttaagaaaagggaattccgagagttgaagcaaggcaaccgctccgtgatggagtatttgcatgagttcaacaacctagcccgttacgccccggaggatgtgcgggaagatgaggagaagcaagaaaagttcttggcaggaatggaccctgaactgtccgtccgtctagtctctggggactatccggattttcaacgattggtggacaagagcatccgcttggaagccaagcacaaggagctggagtcgcacaagcgccgcttggcgaatttccgcaatcaacagggtgctaatcaaaggggccgctacaccaatccctatccagggggatcctcctcgcagcagcaacaacagcagcagcaacctcgccccgcgccccgacctcaattcgtggtgcgcttcccacagccgcagcaacagcagaatcaacaagggactcgtgcgccccgtcctcctacgccaacggtgcagcctggtcaaggccgcagggacgctcaaggtcagcagcgtctgtgcttcaactgcttcgagcccgggcactttgcggataaatgcccaaagccaaggcgtcagcaaggccaagcgcctccccgctccaacaacggcgggaaggatgtcattcggggtcgtgtgaatcacgtgacggccgaggacgtgctgacaactccagacgtcatcgttggactgtcagaaatccccatcgtcagggagttcggagatgtgtttccggaagaactacccggtatgccgcccaagcgagagattgagttccggatagatcttgctccaggaaccactcctctgcacaagcgaccctaccgtatggcagcaaatgaactggccgaagtaaagaaacagttggaagagttgaaagaaaaggggtacatacgtccgagtacttccccatggggtgctcctgtgatttttgtagagaagaaagacaagacgaagaggatgtgcgtcgattacagagctctcaatgaagtcaccatcaaaaacaagtaccctcttccccggatcgatgatctattcgatcagcttaaaggtgccactgtattctccaagattgatcttcgttccggatatcaccaattacgtattcgtgaagaagatattccgaagaccgcattcaccacgcgatacggactgtatgaattcacggtgatgtcattcggtttaaccaatgctcttgcattcttcatgaacttaatgaacaaagtgttcatggaatacttggataagtttgttgtggtgttcattgatgacattctgatatactcacaatccgaggaagaccatcagcaccatctccgtctggtgttgggaaagttgcgggaacatcaattgtatgccaagcttagcaagttcatcgagaacttctccaaaatcgctcgacccatgacacagttgttgaagaaagaagagaaatttgtgtggagcccgcaatgcgagaaggcgtttcaaactctcaaggaaaagctggtttcctcgccggtgttaatcttgccggatactcgcaaggacttcatggtgtattgtgacgcttcgcgccaaggattggggtgcgtgctcatgcaggacggtcatgtagtagcctatgcctcacgtcagctacgacctcatgaaggcaactaccctacacatgacttggagttagccgcggtggttcatgctctaaaaatctggcggcactatctcattgggaatcgctgtgaaatatataccgaccataggagtttgaaatacatcttcacccagtcggatctgaatcttcggcaaaggagatggttagaactcatcaaagactatgatgtgggaattcactatcatcctggtaaggccaacgtggttgccgacgctctaagtcgaaagagccattgcaacactcttaacgtccgtggcattccacccgaacttagtcaacagatggaagccctgaacctaagcatagttagtcgcggattcttggctgcgttagaagccaagcctaccttgctcgatcaaatccgcgaggcttcagaagaatgatccggacatgcatggactcctcaagaatatgaaacagggtaaagccgctggttttacagaggatgaacacagaaccctatggaacggaaagcgggtatgcgttccagataacagagaacttaaacagctgatacttcaggaagctcacgagagcccttattccattcacccgggcagtacaaagatgtacctagacttgaaggagaaatactggtgggttagcatgaagcgggaaattgcagagtttgtggccctatgtgatgtgtgccagcgtgtcaaggcagagcaccaacgaccggccggacttctccaacctctccaagtaccagaatggaaatgggatgaaattgggatggatttcatcaccggacttccaaaaacccaaggtggatatgattctatatgggtagttgtggatcgattaaccaaggtagcacggttcattcccgtaaagaccacctatggagggaacaaactagccgagctctacttcgctaggatcgtgagtctccatggcgttcccaagaaaatcgtatctgataggggaagccaattcacctctcacttttggaagaagctccaagaagagctgggtactcgattgaatttcagcaccgcctatcacccgcagaaagatggacagaccgagcgtctaaatcagatcctagaagatatgctccgcgcatgtgtactagatttcgggaagacctgggataagagtctcccctatgccgagttctcctacaataacagctatcaagccagcatacaattggcaccttatgaagcgttgtacgggcgcaaatgccggacaccgctattgtgggaccaagttggagaaagccaagtgttcgggactgatatcctgagagaagctgaagctaaagtcagaatcattcgggataatctaaaggtggcacagtcccggcagaaaagttatgcagataatcgtcgccgtgacctggaattcgcagtgggtgattttgtgtaccttcgggtcacgccattgcgaggtgtacacaggtttcagacaaaagggaagctcgcacctcggtatgtgggtcctttccgtatcgttgctcgacgcggagaagtcgcttaccagttggagctgcccgcctccttgggcaacgtgcatgatgtgttccatgtgtcgcaactcaataaatgccttcgagtgccatccgagcaggccgactcagagcagattgaagttcgcgaagatttgacctacgtggagaggccagtgaaaatcctggacaccatggagcgcaggaccaggaaccgggtaatccgtttttgcaagctccagtggagcaaccatgccgaagaagaagctacctgggagcgtgaagacgagctgaaggcagcccatcccgatctcctcgccaccgcccgcgcccgcgggtgcggtgacgcgtgggacccacggcgccggccggcgtcagccgcgtgcgcccggtccaccgtggaccgtgagggtgacgcgtgggccccactcccgtggacccgccccacggtccacggtggaccgggcgcacgcggctggcggcggtcggcgccgtgggtcccgcgcgtcagccgcacccgcgggcgcgggcggctgacggccgggcccacttggcagccgcgagggcgcgcccgagggcggcctcgccggcgcggccgacgggagcggcgcgcccgcgccccgatggtcaccgccggcgaccaccggcgcggcggagcggcgcccgagagagaggagggaagggggaaggcgaacggcggtcctcggctcaccccgggacaacgacgacgacgagaacggcggccggagcggaggaagacggcggcgcggctcgggatgacgatggcgacggcgctccgacggtcggcgagcgaaacggaggcgcggacgaggtcgacggcgatgcggcgatgccgagggaggtggcgccgagtaaggaggaagtccggagcggcggcggcggcggaacggagctcggcggcgatggcggagagagcggagcacggcgcgagcacgaatccgacggcgagagcgagcggcgagcggcggaaacggaagagcggagctcgggcaacgtttaaatag

SEQ ID NO: 86207 - DNA, 285 bp, Oryza sativa
  Clone ID: PAT_MRT4530_8526C.1
atgccattctcccccccaagggccgccgcagtgtcacaccgccccttcgccgccctccccctcgctggcggcggcgccatcggtggctgcccgctcctctccgacttcgggcggcgggcaaagaccgacagcgacagcgagctccgcctctgctcccacgtgtggctccccctcccccccgcccccccccggccgccctcggccgcgctcgccagcggccgctccgcccgccgccccctctctctcaggctccctccgccgccgccggccttcggagaggagtag

SEQ ID NO: 86208 - DNA, 2839 bp, Oryza sativa
  Clone ID: PAT_MRT4530_85270C.1
atgtggggccgggtgtctggtggggcccggatgtcagtggtggtgtgggtgttgacttttcatctgggcgtggaagcttctgaaaggggaagaaggaagaacttggaggcgcaagaggagccccccgcccactccgtgatcgtcttgtccgcggcattgaaatatcccacaatacccaacaaaccatgcatgatgaaggtcctgtgcagcctcgccgatagttcctcttcggcaaaatggcgcagcaggaatgtagccctgcagcaagacagtacccgcgacagtttggacttgtcttccgtctatggtccacattgcactgatagtcacgtagggccttctccggctacattgattacctcgccaacgtgggaggctgttgctgagctttcgggtgcagtgacgcggagtgtactttcttcttgtgtgcgctctgggtctgtgtgtgtgtggtggctcttcctcttctcctctccggagagagagagagagagaggcagcctagatccatttgcaggatgggttccatgaagctaagctccaagccggatgcattcacaaggcgagggcaagcatggtactgcacaacagggcttcccagcgatgttcttgttgaggttggggagatgtctttccaccttcacaagttccccctgctttcaaagagtgccatcctgggaagattgattgaggagaattcagacagcgatgaatgtgtcatcaaattgtctgacatccctggtggcgcaaaatcgttcgagttagtggcaaggttctgttatgggctgaagatagagctgtcttcagaaaatgtcgtctacctacgctgcgctgctgaacatcttgagatgacagaagaaacatctggggataatctgattaatcagacagagtcattctttaaccaagtagtcctccgaagctggaaagattccctggaagtgcttcggacttgtgatggccttctcactcataccgacgaccctcatgttgtcacgaggcgagggcaatcattttccccctgctttcaaatagagccatccctcgtagattgattggtgaggattcagagtgcgatgaaaatgtcatcataaagtctgacatccctggtggcgcaaaatcattcgagttagtggcaaggttctgttatgggctgaagatagagctgtcttcagaaaatgtcgtctacctacgctgcgctgctgaacatcttgagatgacagaagaaacatctggggataatctgattaatcagacagagtcattctttaaccaagtagtcctccgaagctggaaagattccctggaagcgcttcggacatgtgatggccttctccctcatgctgaagaccttcacattgtgaagagatgcatcgaatcattggctggcaaagctagcatcgatccggacctcttcggctggccagtctcggaacatagtaccatgcaaagccccgggggaagtgtcttgtggaatggcataagcacgggtgcgaaggttaggaactgcagttcggactggtggtatgatgatgcttcctccctgagcttccctacatacaagaggcttatttcttccatggagtcaagaggcatcaaacaggagatcattgcgggttcgctcacatactacgccaagaagtttctcccagggttgaataggcgtcaaagcaccggaccaatgcccctgccggctgctaccctgtctgatgaagaacagaggcgcctgcttgaagagattgataggatgttgccacttcagagaggtttaatatccacaaatgttttgctctggctgctccggaccgccatgatcctgaaagtcgaccgcgcttgcatttcaaacttggagaaaagggtcgggatgcagctggacgaagccacattggaggatctactgctgccaaacttctcatacaccatggacacgctctacaacgtcgagtgcgttcacaggattctcgaccacttcttggcaatggatcagaccatgggtggcggtggcgcctccccatgcttggatgatgtgatggcatctccttcgttggcaccgatcaccgctgtcgcgaagctgattgatggctaccttgcagagattgcacctgatatcaacctaaagccactgaaattccagtctctggcagctgttttacctgaatatgctcggccactggatgacggtctttaccgcgccattgatgtatacctgaagtcgcatccgacgctgcctgaagctgaacgggagcagctatgccggctgatcgactgccagaagctgtcgctggaggcgtgcacccacgccgcgcagaacgagcggctgccgctgcgggtggtggtgcaggtgctcttcttcgagcagctgcagctgaggacgtcggtggccggctgcctgctcgtctccgacaacctggaggcctcgtcgaggacgctccgcggcggcggcgcggtggcggcgtccggcgaggccgggtgctgggccacggccgccgtgagggagaaccaggcgctccgggtcggcatggacagcatgcggctgcggctgatggagctcgagcgggagtgctccgacatgcgccaggacatccgcaagctcggccgcggccgccgccgcctccgtggcggtggtggcatcgtcgccggtggcaaggacggcggcgggtgggcagcgcgggtgcagcggatgctgacgccgaggatgatgaagctgcagatgtgcagcgcgcagcatgacgccgccgagcagcagcggatgaacaatgagcacaagaaggtggagaaggtggccaagaacaagaagcagctgtccatggacgacggtgacgacgaggaggaggcctga

SEQ ID NO: 86209 - DNA, 5265 bp, Oryza sativa
  Clone ID: PAT_MRT4530_85271C.1
atggacatctctaggacaaatgaaggctacacgagctgtggcccggtagtcgagatgtcatggcacagtgctggtgtcctgctgctaggggctcagtcctgcctacctatcctggaggttccggccgtaggtggggttgggtcggtactcttgtctatggctaggatgggttggaaattatgtcatgtcttccgtccatatgctgtggtgatggccggcagcgtcaaccgtcatggcctggacctgtgtggctttgtgttggagctgcggggcatgtgcattgtcctgggatacccgcatggagtggactaccagggcaagaagctcccagagcaggatggtgacgatgcagagccccacgctgcttgggaggtcactgcagtgatcctcactggctctcccgagaggacttcgttggcagtcaccgcgggtggagattccttctccgccgcatgccagaacgccgcactccttgccatcggcactcttcaccagcgctacccggacgagttgcagcactcgccctaccgctaccaccctcgtcgcggaggagcccgcgactacgccaccttttgggatgctagctcggaggatgacgctaccatcatgcacctggcgtgcatggtggaggcgtacgacgcggcccgtatcgacttccatcatatggtgcgccgtgggttggtcgagaacaacatgaagatcctggagctgcgtcaagagaatctgcagctgaagaaggaccttgacgcggtggaggcgcagctgtttcagctcaagatcgcccagggagaagtctgccatcccaagcgccgccgcgtctgccgcagcctgaagatcaccgcccgcaagagcaccttcaggcctgagcttgttcgtcagtccttggcgtggacctgcttcgtggagaccccttgcgccgagcccgcgcccgtggttcctcaggaggaggaagcctctggcgttggcagcacggaggatatggtgacaaccaggagaagtgctgttgccggcgatggcaaccaacccgaaggcagcaaccccaacacccaaggcggcccacctccacctcctcccccgccaccaccaccaccacctgacaccaaccccatcctcacccaaattctcgcccagcaggccaacatgatggctgctttcctccaccacatccagaatccgccgcaacataatgctccacctccaccacccccgcagcactctaagctcgccgagttcctccgcatccgcccacctaccttctctagctccaataaccccgtggatgccttggattggttgcatgccgtggggaaaaagttggacaccgtgcagtgcaacaatgaggagaaaatcatctttgccacccaccagctgcaagggcccgcatctctatggtgggaccacttccaggctacgcagcctgagggacatcctattacctgggcccgcttcaccgccgcttttcggaggacccatgtgcccgccggagtcatggcccttaagaagagggaatttcgggagttgaagcaaggcaaccgctctgtgatgaagtatttgcacgagtttaacaacttggcccggtacgccccagaggatgttcgggaagatgaggaaaagcaggagaagttcctggtaggaatggaccctgagctgtctgtgcgtctggtctccggggattatcctgatttccagcgtctgcagcagcagcagccgcaacctcgcttcgcgccccgacctcaattcgtggtgcgcgtcccacagccgcagcaacagcagagccagcaagggacccgtgcgcttcgccctcctgcaccagctgtgcagcttggtcaaggccgcatggacgctcaaggtcagcaacgtctgtgcttcaactgcttcgagcccgggcactttgcggacaaatgcccgaagccgcgacgccagcaaggccaagcgcctccctgccccaacaacggtggtaatgacgtcgctcggggtcgtgtgaaccacgtgaccgccgaggatgtgctgacgactccggacgtcatcgttggtacgttcctcattcattccattcctgctactattttgttcgactctggagcttcctactcgtttatatctgtgcctttcgtgggaagaaatcagctgggggtagaacggcctaggaaccctctgctcatcaccacccctggcggggatatgacagcaaagtattatagcccgacagttcctatagaaatccagggaatcccttttccctttgatttgattcttctggacaccaataacttggatgtgatcctcgggatgaattggttggctcaattccaaggagtagtggattgcgcaaggcgcactgtcattctgtaccaggggccaaaacaaccggttgttttctttgcacccccaacttctgtcggcagttcagaacttcatcagataggactgtcagaaatccccatcgtcagtgaattcggtgacgtgtttccggaagaactacccggtatgccgcccaagcgggagattgagttccggatagatcttgctccagggacaactcctctatacaagcggccctaccgtatggcagcaaataaactggccgaagtcaagaagcagttggaagagttgaagaaaaagggagctctcaatgaagtcactatcaaaaacaagtaccctcttccccggatcaatgatcttttcgaccagcttaaaggtgccattgtcttttctaaaattgatcttcgctccggatatcaccaattgcgtattcgtgaagaagatatcccaaagaccgcgttcaccacacgttatggactgtttgaattcacggtgatgtcattcggtctaaccaatgctcctgccttcttcatgaacttaatgaacaaagtgttcatggaatacttggataagtttgttgtggtcttcattgacgacattctgctcagcaagtgtgagttctggttgtccgaagtcaccgattggaagcaacccaagacagtcactcaaattcgcagtttcttaggtttggcaggatactaccggaggttcatcgagaacttctccaaaatcactcgacccatgacacagttgttgaagaaagaggagaaatttgtgtggagcccgcaatgcgagaaggcgttcaaaactctcaaagaaaagctggtttcctcgccagtgttaatcttgctggatactcgcaaggacttcatggacggtcatgtggtggcctatgcctcacgccagctacggcctcatgaaggcaactaccctacccatgatttggagttagccgcggtggttcatgctctaaaaatctggcggcactatctcattgggaatcgctgtgaaatatatactgatcataagagtttgaaatacatcttcacccagtcggatctgaatcttcggcagaggagatggttagaactcatcaaggattatgatgtgggaattcactatcatcctggtaaggccaacgtggtcgccgacgctctaagtcgaaaaagccattgcaacactcttaacgtccgtggcattccacccgaacttaatcaacagatggaagccctgaatctaagcatagtgggtcgcggattcttggctgcgttggaagccaagcccaccttgctcgatcaaatccgcgaggctcagaagaacgatccggacatgcatggactcctcaagaatatgaaacagggtaaagccactggtttcacagaggatgaacacggaaccctatggaacggaaatcgggtatgcgttccagataacagagaacttaaacagctgatacttcaggaagctcacgaaagcccttattccatccaccctggcagtacgaagatgtacttagacttgaaggagaaatactggtgggttagtatgaagcgggaaattgtagagttcgtggccctttatgatgtgtgccagcgtgtcaaggcagagcaccaacgaccggccggacttctccaacctctccaagtaccagaatggaaatgggatgaaattgggatggatttcatcaccggacttccaaaaacccaaggtggatatgattctatatgggtagttgtggatcgattaaccaaggtagctcgatttattcctgtgaaggccacctatggagggaacaaactagctgagctctactttgctaggatcgtgagtctccatggcgttcctaagaaaattgtatccgataggggaagccaattcacctctcacttttggaagaagctccaagaagagctgggcacccgattaaatttcagcaccgcgtatcacccgcagacagatggacagaccgagcgtctaaatcagatcctagaagatatgcttcgcgcatgtgtcctagatttcgggaagacctgggataagagtctcccctatgccgagttctcctacaataacagctaccaagccagcatacaaatggcaccttatgaagcattgtatgggcgcaaatgtcggacaccactattgtgggaccaagttggggaaagccaagtgttcgggaccgatatcctgagagaagctaaagctaaagtcagaaccattcgggataatctaaaggtggcccagtctcggcagaagagttatgcagacaaccgacgccgtgacctagaattcgcagtggatgactttgtgtatcttcgggtcacgcccctgcgaggtgtacacaggtttcagacaaaggggaagctcgcacctcggttcgtgggtcctttccgtatcattgctcggcgcggagaagtcgcttaccagttggagctgcccgcctccttgggcaacgtgcatgatgtgttccatgtgtcgcaactcaagaaatgtcttcgagtgccatccgagcaggccgactcagagcaaattgaagttcgcgaagacttgacctacgtggagaggccagtgaaaatcctggacaccatggagcgcaggaccaggaaccgggtaatccgtttttgcaaggtccagtggagcaaccacgccgaggaagaagctacttgggagcgtgaagacgagctcctcccgcttcggcatcgcctccttcggcttcgccacgtcctcgccgacctcgtccactcctccgtttcgcccgccgaccgccggaacaccgccgtcctcgtcaacccgagccgcgccgccgccttcctccgctccggtcgtcgtttccgccgtcctcgtcgacccggggtgagccgtggaccgaccctttcgcttcccccttccctcccctctctcgggcgccgctccgccgcgtcggtggtcgccggcggcgaccat

SEQ ID NO: 86210 - DNA, 5430 bp, Oryza sativa
  Clone ID: PAT_MRT4530_85272C.1
ctgcttcatttattgtcaaaatataatccttaaaatgttgcttctctattttgtttttgtttgtagatggccggcagcatcacccgtcgtggactggacttgactggcttcgttttggagctgcggggcatgtgcattgtcttggggtatccacatggagtggactaccagggcaggccgctcccggagcaggagggcgacgaggcagagcccgtcgctgcttgggaggtcactgcagtgatcctcttcttctcacctgagaggacttcgctggcagtcaccgcgggtggagattccttctccgccgcttgccagaatgccgctctcctcgccatcggcactctgcaccagcgctacccggacgagttgcagcactcgccctaccgctaccaccctcgccgcggaggagcccgcgactacgccaccttccgggatgctagctcggaggatgacgctaccatcatgcacctggcgcgcatggtggaggcgtacgacgcggctcgcatcgacttccatcagatggtgcgccgtgggttggtcgagaacaacctgaagatcctggagctgcgtcaggagaatttgcagctgaagaaggacctagatgcagtggaggcgcagctgcatcagctcaagatcgcccagggagaggtcggtcgtcccaagcgccgccgcgtctgccgcagccagaagatcaccgctcgcaagagtacctccaggcccgagcttgttcgtcagtccctggcgtggacctgcttcgtggagacccctcgtgccgagcccgcgcccgtggttcctcaggagggggagacctccggcgttggtagcacgaaggatgcgctgctgctcaccttctgtcctggcccgtcgcagcgtcagctctctctgtttgctggttccgtgtggggttttcagatggtgatgaccaggagaagtgctaataccggtgatggcaaccaacccgaaggcatcaacctcaacaaccatggcagcccacctccacctcctcctccgcctccaccaccaccaccagacaccaacgccatcctcacccaaatcctcgcccagcaagccaacatgacggctgctttcctccaccacatccaaaatccaccacagcataatgctccacctccaccaccacccccgcaacactctaagctcgccgagttccttcgcattcgcccgcctaccttctccagctccaataaccccgtggatgccttggattggttgcatgcagtggggaagaagttagacactgtgcagtgcaacgatgaggagaaagtcatctttgccacccaccagctgcaggggcccgcatctctatggtgggaccacttccaggctacgcagcccgaggggcagcctatcacctgggcccgtttcaccgccgctttccggagaacccatgtgcctgccggagtcatggcccttaagaaaagggaattccgggagttgaagcaaggcaaccgctccgtgatggagtatttgcatgagtttaacaacctggcccggtacgccccggaggacgttcgggaagatgaggaaaagcaagagaagttcttggcgggaatggactctgagctgtccgtacgtctggtgtccggggactatccggatttccaacgtctagtggacaagagcatcctcttggaggccaagcacaaagaattggagtcgcacaagcgtcgcttggcgaatttccgcaatcaacagggggctaaccaaagggtccgctacaccaatccctatctagggggatcctcctcgcagcagcaacagcagcaacctcgctccgcgccccgacctcaatttgtggtgcgcgttccccagccgcagcaacctcagggccagcaagggccccgtgcaccccgtcctcctgcgccagctgtgcagcctggtcaaggccacagagacgtacaaggtcagcagcgtctgtgcttcaactgcttcgaacccgggcactttgcggaaaaatgcccgaagccacgacgccagcaaggccaagcgcctccccgccccaacaacggtggtaaggacgtcgctcggggtcatgtgaaccacgtgactgccgaggatgtgctgacaactccagacgtcatcgttggtacgctcctcatccattccatccctgctaccattttgttcgactctggagcttcccactcgtttatatctgtgacattcgtggggagaaatcagttgggtgtagaaaggcttaggaaccctatgctcatcaccacccctggaggggttatgacagcgaagtattatagccctgccattcccatagaaattcagggaattccgtttccctcggatctgattcttctagacaccaagaacttggatgtgatccttgggatgaattggttggctcaattccaaggagtagtggattgtgcaagacgcactgtcactctgtaccgagggccagaacaaccggttgttttctttgcacccccaacctctgtcagtagttcagaacttcatcagataggactgtcagaaatccccatcgtcagagagttcggagacgtgtttccggaagaactacccggtatgccgcccaagcgagagattgagttccggatagatcttgctccaggaaccactcctctgtacaagcgaccctaccgtatggcagcaaatgaactggccgaagttaagaaacagttggaagagttgaaaggaaaggggtatatacgtccgagcacttccccctggggtgctcccgtaatttttgtggagaagaaagacaagacaaagaggatgtgtgtcgactacagagctctcaatgaagttactatcaaaaacaagtaccctcttccccggatcgatgatctgttcgatcagcttaaaggtgccacggtattctccaaaattgatcttcgctccggatatcaccagttgcgcatccgtgaagaagatatcccgaagactgcattcaccatgcgatacgggctgtatgaattcacggtgatgtcgttcggtctgactaatgctcctgctttcttcatgaacttgatgaacaaagtgttcatggagtacttagataagtttgttgtggtcttcatcgacgacattctagtgtactcgcaatcagaggaagaccatcaacaacatctctgtctggtgttgggaaagttgcgggaacatcaattgtatgccaagcttagcaagtgtgagttctggttgtccgaagtcaaattcttagggcacatgatatctgctaaaggagtcgctgtggaccccgaaacagtgaccgccgtcaccgattggaagcaacccaagacagtcactcaaattcgcagtttcttaggtttggcaggatactaccggaggttcatcgagaacttctccaaaatcgctcgacctatgacacagttgttgaagaaagaagagaaatttgtgtggagcccgcaatgcgagaaggcgttcaaaacactcaaagaaaagctggtttcctcgccagtgttaatcttgccggatactcacaaagacttcatggtgtattgtgacgcttcgcgccaaggactggggtgcgtgctcatgcaggaaggtcatgtggtagcctatgcctcccgccagttacggcctcatgaaggcaactaccctacccatgatttggagttagccgcggtggttcatgctctaaaaatctggcggcattatctcattgggaatcgctgcgaaatatataccgatcataagagtttgaaatacatcttcacctagtcggatctgaatcttcggcagagaagatggttagagctcatcaaggattatgatgtgggaatccactatcatcccggtaaggccaatgtggtcgccgacgctctaagtcgaaaaagccattgcaacactcttaacgtccgtggcattccacccgaacttaatcaacagatggaagccctgaacctaagcatagttggtcgcggattcttggctgcgttggaagccaagcctaccttgctcgatcaaatccgcgaggctcagaagaatgatccggacatgcgtggactcctcaagaatatgaaacatggtaaagccgctggtttcacagaggatgaacacggcaccctatggaacggaaatcgggtatgcgttccagataacagagaacttaaacagctgatactttaggaagctcacgaaagtccttattccatccaccctggcagtacgaggatgtacttagacttgaaggagaaatactggtgggttagtatgaagcgggaaattgcagagttcgtggccctttgtgatgtgtgccagcgtgtcaaagcagagcatcaacgaccggccggacttctccaacctctccaaataccagaatggaaatgggatgaaattgggatggattttatcactggacttccaaaaacccaaggtggatatgattctatatgggtagttgtggaccgactaaccaaagtagctcgctttattcctgtaaagaccacatatggaggaaacaaactagctgaactctatttcgccaggatcgtaagtctgcgtggcgttcccaagaaaatcgtatctgatcggggaagtcagttcacctctcacttttggaagaaactccaagaagagttgggtacccgattaaatttcagcaccgcgtatcatccgcagacagatggtcaaaccgagcgtctaaaccagatcctcgaggatatgcttcacgcatgtgtcctagatttcgggaaaacctgggataagagtctcccctatgccgagttctcctacaataacagctaccaagccagcatacaaatggcaccctatgaagcgttgtatggacgcaaatgtcggacaccgctattgtgggaccaagttggggaaagccaagtgttcgggaccgatatcctgagagaagccgaagctacggtcagaaccattcgggaaaacctaaaggtggcacagtctcggcagaagagttatgcagacaaccgacgccatgacctggaattcgcagtggatgactttgtgtatctccgggtaacgccattgcgaggggtacacaggtttcagacaaaagggaagctcgcacctcgattcgtgggtcctttccgcatcactgctcgacgcggagaagtagcttaccaattggagctgcctgcttccttgggcaacgtgcatgatgtgttccatgtgtcgcaactcaagaaatgtcttcgagtgccgtccgagcaggctgactcagagcagattgaagttcgcgaagacttgacctacgtggagagaccagtgaaaatcctggacaccatggagcgcaggaccaggaatcgggtaatccgtttttgcaaggtccaatggagcaaccatgccgaggaagaagctacttgggagcgtgaagaagagctgaaggcagcccatcccgatctcttcgccagttcttccgaatctcggggtcgagattccgtt

SEQ ID NO: 86211 - DNA, 2900 bp, Oryza sativa
  Clone ID: PAT_MRT4530_85273C.1
atgagtagagtgtccactagttggggttttgtttattctagggtgaacaagccgaggggaggggcgcgcggaccgggtccacgggggtggggcccacgcgtcagcctcacggtccacggtgaaccgggcgcacccgggcgcgcaccggccggcgccgtgtgtcccacgcgtcagccgcacctaagggcgcgggcggctggcagccaggccccacgcggcagccgctcggtgcacccgaaggcgaccacgccggcgcagcggcgggaggtggcgcgcccgcgcccctatggtcgccggcggcggccataggcacggcggagcggcggccgagagaggggagggaaagggggaaacgaagcggcggtccacggctcaccccgggtcgacggcgacgacggaaacggcgaccggagcgaaggaaggcggcggcgcggctcgggtcgatggggtcgacggcgttccggcggatggcgaccgaaacggaggggtggacgaggtcggcgagaatgcggcgaagccgaaggaggcggcgccgaggtgggaggtggtccggggcgacgacggcggcggaccggagctcggcggtgacggcggagagagagagcgacggcgcgagctcgattccggcgaggaggaagggcggcgagtggcggaaacggacggaggaggtgcggggagggtttatatagggttggtagtgagagagggcggccggaggagaaggaaaccggcgcggcgctctcgggctccatcaatggcgccggcgagatttgtggggggcaaatccgcccgtttgaacgagagagagagggaaaaatggggggaaagggagagggaatcacggggagtgatttccccctctttattgcgcgcggggacggcgggaggcggcgggattcgcggcggcggcggcgctagggcgcgggcggggcggcgggagcggcgggaggaaggggatgacgggtgggccccacccgtcagcgagggaggtgggcgggcccgcccgtcagcggcgcgcgcgcggggaggaggccgaatgggccgcggggaagaggagagagagggagagagatgggccgagccggcccaagaaggggagggggcttttaggaaatatacaaaaatcctccaagccttatttgacttttaactttgcacattttaattgttgaaggctttcacatgaattttaattattctcggcacaatttcgaggatgtattttagggtcgttttgggacgcgacaactaccagggcaagcagctcccggagcaggagggtgacgatgcagagccccacgctgcttgggaggtcactgcagtgatcctcactggctctcccgagaggacttcgttggcagtcaccgcgggtggagattccttctccgccgcttgccagaacgccgcactcctcgccatcggcacttttcaccagcgctacccggacgagttgcagcactcgccctaccgctaccaccctcgtcgcggaggagcccgcgactacgccaccttccgggatgctagctcggaggatgacgctaccatcatgcacctggcacgcatggtggaggcgtacgacgtggcccgtatcgacttccatcatatggtgcgccgtgggatggtcgagaacaacatgaagatcctagagctgcgtcaggagaatctgcagctcaagaaggacctagacgcagtggaggcgcagctgcatcagctcaagatcgcccagggagagatctgccgccccaagcgtcgccgcgtctgccgcagccagaagatcaccgcccgcaagagcacctccaggcctgagcttgttcgtcagtccctggcgtggacttgcttcgtcgagacccctcgtgccgagcctgcgcccgtggttccccaggagggggaagcctccggcgttggtagctcggagggtgcgctgttgctcaccttccgtcctggcccgtcgcagcgttctctttctcggtttgctggttctgtgtggggttttcagatggtgacgaccaggagaaatgctaacaccagtgatggcaaccaacctgaaggcagcaaccacaaccaccaaggcaacccacctccacctcctcctccgcctccaccaccaccaccagacaccaacgccattctcacccaaatcctcgcccagcaagccaacatgatgaccgctttcctccaccacctccaaaacccgccacaacagaatgctccaccaccacccccacaacactctaaactcgccgagttcctccgcatccgcccacctaccttctccagctccaacaaccccgtgaatgctttggattggttgcatgccgtggggaaaaagctagacacggtgcagtgcagtgatgaggagaaagtcgtcttcgccgcccatcagctgcagggacccgcatctctctggtgggaccacttccaggctacgcagccagtgggacagccgatcacttgggcccgcttcaccgccgctttccggagaacccatgtgcccgctggagtcgtggctcttaagaaaagggaattccgagagttgaagcaaggcaaccgctccgtgatggagtacttgcatgagttcaacaacttggcccgttacgccccagaggatgtgcgggaagatgaggagaagcaagagaaattcctggcaggaatggaccctgagctgtccgtccgtctagtctctggggactatccggatttccaacgactggtggacaagagcatccgcttggaagccaagcacaaggaactagagtcgcacaagcgccgcttggcgaatttccgcaatcaacagggtgctaaccaaagggtccgctacaccaatccctatccagggggatcctcctcgcagcagcagcagcagcagcagcctcgctccgcgcctcgacctcaattcgtgg

SEQ ID NO: 86212 - DNA, 5865 bp, Oryza sativa
  Clone ID: PAT_MRT4530_85274C.1
atggacatctctaggacaaatgaaggctacacgagctgcggcccggtagtcgagatgtcatggcacagggccggtgtcctgctgctaggggttcagtcctgcctacctgtcccggaggttccggccgtaggtggggttgggtcggtactcttgtctatggctaggatgggttggaaactatgtcacgtcttccgtctgtataccgtggtgatggctggcagcatcaaccgtcgtggtctggacctgactggcttcgttttggagctgcggggcatgtgcattgtcctggggtatccgcatggagtagactaccagggcaagcagctcccggagcaggagggtgacgatgcagagccccacgctgcttgggaggttactgcagtgatcctcactggctcacccgagaggacttcgttggcagtcaccgcgggtggagattccttctccgccgcttgccagaacgccgcactcctcgccatcggcactcttcaccagcgctacccggacgagttgcagcactcgccctaccgctaccaccctcgccgcggaggagcccgcgactacgccaccttccgggatgctagctcggaggatgacgctaccatcatgcacctggcgcgcatggtggaggtgtacgacgcggcccgtatcgacttccatcagatggtgcgtcgcgggttggtcgagaacaacatgaagatcctggagctgcgtcaggagaatctgcagctggagaaggacctagacgcagtggaggcgcagctgcgtcagctcaagatcgcccagggagaggtctgtcgcctcaagcgccgtcgcgtctaccgcagcctgaagatcaccgcccgcaagagtacctccaggcccgagcttgttcgtcagtccctggcgtggacctgcttcgtcgagacccctcgtgccgagcccgcgcccgtggttcctcaggaggatggagcctccggcgttggcagcacgaaggatgcgctgttgctcaccttccgccctggcccgtcggagcaagtcgtatggggcatggttatgccgatggtgacgaccaggagacgtgctaataccggtgatggcaatcaacccgaaggtagcaaccacaacaaccatggcagcccacctccacctcctcctccgcctccaccaccaccaccagacaccaacgccatcctcacccaaatcctcgcccagcaggccaacatgatgcctgctttcctccaccacatccaaaatccgccacaacataatgctccaccaccgcccccacaacactctaaactcgtcgagttcctccgcatccgtccgcctaccttctctagctccaataaccccgtggatgcattggattggttgcatgccgtggggaaaaagttagacaccgtgcagtgcagcgatgaggagaaagtcatcttcgccgcccaccaattgcaggggcccgcatctctatggtgggaccatttccaggctacgcagccagaagggcagccttttacttgggcccgcttcaccgccgctttccggagaacccatgtgcccgctgaagtcatggcccttaagaaaagggaattccgagagttgaaacaaggcaaccgctctgtgatggagtatttgcatgagtttaacaacctggcccgatacgccccggaggatgttcgtgaagataaggagaagcaagagaagttcttggcaggaatggaccctgagctgtccatgcgtctggtctccggggactatccggatttccagcgtttggttgacaagagcatccgcttggaagccaagcacaagaaactggagtcgcacaagcgttgcttggcgaatttccgcaatcaacagggggctaaccaaagggtccgctacaccaatccctatctagggggatcgtcctcgcagcagcaacagcagcagcaacctcgctccgcgccccgacctcatttcgtggtgcgcgtcccacagccgcagcaacagcagagtcagcaagggactcgtgcgccccgtcctcctacgccagccgtgcagcctggtcaaggccgcagggacgttcaaggtcagcagcgtctgtgcttcaactgcttcgagcctgggcactttgcggataaatgcccaaagccgaggcgccagcaaggccaaccgcctccccgccccaacaacgatggtaaggatgtcatttggggtcgggtgaaccacgtgacggccgaggatgtgctgacaactccaaacgtcatcgttggtacgttcctcattcattccatccctactaccattttgttcgactctggagcttcccactcgtttatatctgtgccattcgtggggagaaatcagttgggggtagaaaggcttaggaactctctgctcatcaccacccctagaggggttatgacagcaaagtattatagccctgccgttcctatagaaattcagggaattccttttccctcggatctgattcttctagacaccaagaacttggatgtgatccttgggatgaattggttggctcaattccaaggagtagtggattgtgcaagacgcactgtcactctgtaccgagggccggaacaaccggttgttttctttgctcccccaacctctgtcggtagttccgaacttcatcagataggactgtcagaaatccccatcgtcagagagttcggagacgtgtttccggaagaactacccggtatgccgccgaagcgagagattgagttccggatagatcttgctccaggaaccactcccctgtacaagcgaccctaccgtatggcatcaaatgaactggccgaacttaaaggtgccactgtattctccaagattgatcttcgttccggatatcaccaattgcgtattcgtgaagaagatatccctaagaccgcattcaccacgcgatacggactgtatgaattcacggtgatgtcgttcggtttaaccaatgctcctaccttcttcatgaacttaatgaacaaagtgttcatggaatatttggataagtttgttgtggttttcattgacgacattctggtgtactcacaatcagaggaagaccatcagcaccatctccgtctggtgttgggaaagttgcgggaacatcaattgtatgccaagcttagcaagtgtgagttctggttgtccgaagtcaaattcttagggcacgtgatatctgctaaaggagttgctgtggaccccgaaacagtgaccgccgtcactggttggaagcaatccaagacagtcactcaaattcgcagcttcttgggtttggcaggatactatcggaggttcatcgagaacttctccaaaatcgctcgacccatgacacagttgttgaagaaagaagagaaatttgtgtggagcccgcaatgcgagaaggcgttccaaactctcaaggaaaagctggtttcctcgccagttttaatcttaccggatactcgcaaggacttcatggtgtattgtgacgctttgcgccaaggattggggtgcgtgctcatgcaggaaggtcatgtggtagcctatgcctcacgccagctacggccccatgaaggcaactaccctacccatgatttggagttagccgctgtggttcatgctctaaagatctggcggcactatctcattgggaatcgctgtgaaatatatactgatcataagagtttgaaatacatcttcactcagtcggatctgaatcttcggcagaggagatggttagaactcatcaaggattatgatgtgggaattcactatcatcctggtaaggccaacgtggtcgctaacgctctaagtcgaaaaagccattgcaacactcttgacgtccgtggcattccacccgaacttaatcaacagatggaagccctgaacctaagcatagttggtcgtggattcttggctacgctggaagccaagcctaccttgctcgatcaaatccgcgaggctcagaagaatgatccggatatgcgtggactcctcaagaatatgaaacagggtaaagccgctggtttcacagaggatgaacacggaaccctatggaacggaaatcgggtatgcgttccagacgacagagaacttaaacagttgaaacttcaggaagctcacgaaagcccttattccatccaccctggcagtacgaagatgtacttagacttgaaagagaaatactggtgggttagtatgcagcgggaaattgcagagttcgtggccctttgtgatgtgtgccagcgtgtcaaggcagagcaccaacgaccggccggacttctccaacctctccaagtaccagaatggaaatgggatgaaattgggatggatttcatcaccggacttccaaaaacccaaggcggatataattctatatgggtagttgtggaccgactaaccaaggtagctcggtttattcctgtgaagaccacctatggagggaacaaactagccgagctctacttcgctaggatcgtgagtctccatggcgttcctaagaaaattgtatctgataggggaagccaattcacctctcacttttggaagaagctccaagaagagctgcgtacccgattaaatttcagcaccgcgtatcacccgcagacagatggacagaccgagcgtctaaatcagatcctagaagatatgcttcgcgcatgtgtcctagattttgggaagacctgggataagagtctcccctatgccgagttctcctacaataacagctatcaagccagcatacaaatggcaccctatgaagcgttgtatggacgcaaatgccggacaccactattgtgggaccaagttggggaaagccaagtgttcgggactgatatcctgagagaagctgaagctaaagtcagaaccattcgggataatctaaaggtggcacagtcccggcagaagagttatgcagataaccgacgctgtaatctggaattcgcagtggacgattttgtgtaccttcgggtcacgccattgcgaggtgtacacaggtttcagacgaaagggaagctcgcacctcggtttgtgggtcctttccgtatcattgctcgacgcggggaagtcgcttaccagttggagctgcccgcctccttgggcaacgtgcatgatgtgttccatgtgtcgcaactcaagaaatgtcttcgagtgccatccgagcaggccgattcagagcaaattgaagttcgcgaagacttgacctacgtggagaggccagtgaaaatcctggacaccatggagcgcaggaccaggaaccgggtaatccgtttttgcaaggtccaatggagcaaccacgctgaggaagaagctacttgggagcgtgaagacgagccccgcgaacttcgacggcgcatcaatggagcccgagatcgccgcgccgatttccttcccttcgggccgccctttctcactcccaaccttcggcttcgccgtgttctcgtcgacctcgtccactcctccgtttcgcccgccgaccgccggaacgccgctgtcctcgtcgacccgagccgcgccgccgccttcctccgcttcggccgccgtttccgttgtcaccgtcgacccggggtgagccgaggaccgccgtttcacttcccccttctctcctctctctcgggcgccgctccgcgcgccggtggtcgccggcgtcgaccatcggggcgcgggtgcgccgcctcccgtcggccgtgccggcgaggccgccttcgggcgcgcctcgcggctgccaggtggggcccggccgtcagccgcccacgcctcgggggcggctgacgcgtgggacccacggcgccggccagcgtcagccgcgtgcacccggtccaccgtggaccgtgaggctcggccatataaggaccggtcttcgggcctctgttgcaaagcactactgtacttccacat

SEQ ID NO: 86213 - DNA, 360 bp, Oryza sativa
  Clone ID: PAT_MRT4530_85275C.1
atggcttcaccggcaataataaccatcctcgccgtgtccctcctgctgctgctgccgccgttagcgcttggctccatcaccggcggcgatcaacgacgcaaggagccttggattactacgatattgaacggtggcggcagtattgcgggcatggagctgcagcaacgacgacgaggaggccatggattgccggtgatgaccctggtgatggtggacgtaaccctccagtctcccctgcacgagacagaccagggacggaagcctgatgaaatgggcaactgtgccctctgtgcccgagagaaattggtcccttggcagaatatccatgatttggtctgtgtaattttgtgcgaaaattga

SEQ ID NO: 86214 - DNA, 5337 bp, Oryza sativa
  Clone ID: PAT_MRT4530_85276C.1
atgtcatggcacagggccggtgtcctgctgctaggggctcagtcctgcctgcctgtcccgggtgttccggccgtaggtgggattgggtcggtactcttgtctatggctaggatgggttggaaactatgtcacgtctttcgtctgtataccgtggtgatggccggcagcgtcacccgtcgtggtttggacatgactggtttcgtcttggagctgcggggcatgtgcgtggtcctggggtatccacatggagtggactaccaggccaggccgcttccggagcaggagggggacgatgcagagccccacgctgcttgggaggtcactgcagtgatcctcgctggctctcccgagcggacttcgctgacagtcaccgcgggtggagactctttccccgccgcctgccagagcgccgctctcctcgccatcggcactcttcaccagcgctacccggacgagttgcagcactcgccctaccgctaccaccctcgtcgcggaggagcccgcgaccacgccaccttccgggatgctagctcggaggatgacgctaccatcgtgcacttggcgcgcatggtggaggcgtacgacgcggctcgtatcgacttccatcagatggtgcgccgtgggatggtcgagaacaacttgaagatcctggagctgcgtcaggagaacctgcagctcaagaaggacctagacgcggtggaggcgcagctgcatcagctcaagatcgcccagggagagatctgccgccccaagcgtcgccgcgtctgccgcagccagaagatcaccgcccgcaagagcacctccaggcctgagcttatggtgatgaccaggagaaatgctaacaccggtgatggcaaccaacctgaaggcagcaaccacaaccatcagggcaacccacctccacctcctcccccgcctccacccccaccaccagataccaacgccattctcacccaaatcctcgcccagcaggccaacatgatgactgctttcctccaccacctccaaaatccgccacaacttaatcctccaccaccacccccacaacactctaaactcgccgagtttctccgtatccgcccacctaccttctctagctccaacaaccccgtggatgcgttggattggttgcatgccgtggggaaaaagctagacactgtgcagtgcagcgatgaggagaaagtcatcttcgccgcccaccagctgcatggacccgcatctctatggtgggaccatttccaggctatgcagccggagggacagcctgttacttgggcccgcttcaccgccgctttccggagaacccatgtgcccgccggagtcgtggcccttaagaaaagagaattccgagagttgaagcaaggcaaccgctccgtgatggagtatttgcacgagttcaacaacctggcccgttacactccggaggatgtgcggaaagatgaggagaagcaagaaaagttcctggcaggaatggaccctgagctgtccgtccgtctagtctctggggactatccggatttccaacgtctggtggacaagagcatccgcttggaagccaagcacaaggaactggagtcgcacaagcgccgcttggcgaatttccgcaaccaacagggtgctaaccaaagggtccgctacaccaatccctatccagggggatcctcctcgcagcagcaacaacagcagcagcaacctcgctccgcgcctcgacctcaattcgtggtgcgcgtcccacagccgcagcagcaacagaatcaacaagggactcgagcgccccgtcctcctacgccaactgtgcagcctggtcaaggccgcagggacgcttcaggtccgcagcgtctgtgcttcaactgcttcgagcccgggcactttgcggataaatgcccgaagccaaggcgtcagcaaggccaagcgcctccccgccccaacaacggtggtaaggacgtcagtcggggtcgtgtgaaccatgtgacggccgaggacgtgctgacaactccagacgtcatcgttggtacgttcctcattcattccatccctgctaccattttgttcgactctggagcttcccactcgtttatatctgtgccattcgtggggagaaatcagttgggggtagaaaggcttagaaaccctctgctcatcaccacccctggaggggttatgacagcaaagtattatagccctgccgtccctatagaaattcaggggattccttttccctcggatctgatcctgctagacaccaagaacttggatgtgatccttgggatgaattggttggctcaattccaaggagtagtggattgcgcgagacgcactgtcactctgtaccgagggccggaacaaccggttgttttctttgcacccccaacctcagtcagaagttcagaacttcatcagataggactgtcagaaatccccatcgtcagagagttcggagacgtgtttccggaagaactacctggtatgccgcctaaacgagagattgagttccggatagatcttgctccaggaaccactcctctgtacaagcgaccctaccgtatggcagcaaatgaactggccgaagttaagaaacagttggaagagctgaaagaaaaggggtatatacgtccgagtacttccccctggggtgctcctgtgatttttgtggagaagaaagacaagacgaagaggatgtgcgttgactacagagctctcaatgaagtcaccatcaaaaacaagtaccctcttccccggatcgacgatctgttcgatcagcttaaaggtgccactgtattctccaagattgatcttcgttccggatatcaccaattacgtattcgcgaagaagatattccgaagaccgcattcaccacgcgatacggactgtttgaattcacggtgatgtcgttcggtttaaccaatgcccctgccttcttcatgaacttaatgaacaaagtgttcatggaatacttggataagtttgtggtggttttcattgatgacattctgatatactcacaatcagaggaagaccatcagcaccatctccgtctggtattgggaaagttgcgggaacatcaattatatgccaaacttagcaagtgtgagttctggttgtccgaagtcaaattcttagggcacgtgatatctgctaaaggagttgctgtggaccccgaaacagtgaccgccgtcaccgattggaagcaacccaagacagtcactcaagttcgcagtttcttaggtttggcaggatactaccggaggttcatcgagaacttctccaaaatcgctcgacccatgacacagttgttgaagaaagaagagaaatttgtgtggagcccgcaatgcgagaaggcgtttcaaactctcaaagaaaagttggtttcctcgccagtgttaatcttgccggatactcgcaaggacttcatggtgtattgtgacgcttcgcgccaaggattggggtgcgtactcatgcaggatggtcatgtggtggcctatgcctcacgccagctacggcctcatgaaggcaactaccctacccatgatttggagttagcagcggtggttcatgctctaaaaatctggcggcattatctcattgggaatcgctgtgaaatatatactgatcataagagtttgaaatacatcttcacccagtcggatctgaatcttcggcaaaggagatggttagaactcatcaaagattatgatgtgggaattcactatcatcctggtaaggccaacgtggttgccgacgctctaagtcggaaaagccactgcaacactcttaacgtccgtggcattccactcgaacttaatcaacagatggaagccctgaacctaagcatagttggtcgcggattcttgactacgttggaagccaagcccaccttgctcgatcaaatccgcgaggctcagaagaatgatccagacatgcatggactcctcaagaatatgaaacagggtaaagccgctggtttcacagaggatgaacacggaaccctatggaacggaaatcgagtatgcgttccagataacagagaacttaaacagttgatacttcaggaagctcacgaaagtccttattccatccaccctggcagcacgaagatgtacttagacttgaaggagaaatactggtgggttagtatgaagcgggaaattgcagagttcgtggccctttgtgatgtgtgccagcgtgtcaaggcagagcaccaacgaccggccggacttctccaacctctccaagtacctgaatggaaatgggatgaaattgggatggatttcatcaccggacttccaaaaacccaaggtggatatgattctatatgggtagttgtggatcgattaaccaaggtagctcgattcattcctgtgaagaccacctatggagggaacaaactagccgagctctacttcgctaggatcgtaagtctccatggcgttcccaagaaaatcgtatctgataggggaagccaattcacctctcacttttggaagaagctccaagaagagctgggtacccgattaaacttcagcaccgcgtatcacccgcagacagatgggcagaccgagcgtctaaatcagatcctagaagatatgcttcgcgcatgtgtcctagatttcgggaagacctgggataagagtctcccctatgccgagttctcctacaataacagctaccaagccagcatacaaatggcgccttatgaagcgttgtatgggcgcaaatgccggacaccgctcctgtgggaccaagttggggaaagccaagtgttcgggactgatatcctgagagaagctgaagcgaaagtcagaaccattagggataatctaaaggtggcacagtcccagcagaaaagttatgcagataaccgtcgccgtgacctggaattcgcagtggatgattttgtgtaccttcgggtcacgccattgcggggtgtacacaggtttcagacaaaggggaagctcgcacctcggtatgtgggtcctttccgtatcgttgctcgacgcggagaagtcgcttaccagttggagctgcccgcctccttgggcaacgtgcatgatgtgttccatgtgtcgcaactcaagaaatgccttcgagtgccatccgagcaggccgactcagagcaaattgaagttcgcgaagacttgacctacgtggagaggccagtgaagatcctggacaccatggagcgcaggaccaggaaccgggtaatccgtttttgcaaggtccagtggagcaaccacgccgaagaagaagctacctgggagcgcgaagacgagctgaaggcagcccatcccgacctcttcgccagttcttccgaatctcggggtcgagattccgtttaa

SEQ ID NO: 86215 - DNA, 179 bp, Oryza sativa
  unsure (1)..(179): unsure at all n locations
  Clone ID: PAT_MRT4530_85277C.1
cgtgcgcatgtnctggntgnacaatgtgttgaaaaggctancaggtattgctccgnggttctgntctcatggtcgtgtcattgtctgttagccgtgatacctcgtgagcnctgngcaagtgagnaggactgcctctggctgtctggcccagccggncttgttcagtccaaatggaatga

SEQ ID NO: 86216 - DNA, 208 bp, Oryza sativa
  Clone ID: PAT_MRT4530_85278C.1
agtagatctagatcgccgtcaggccgctcgagcagatagaaccagggctctcgctctatccatctattctgctgatgtcgctgccgccgctgcccggagatctgctgtgagggtagactacgactaggtggttacgccgcgtcagcagcgtcgtcggcaatcaggctgtctgtgtctgcagggaaggcaatgtcgctgcgcggatgac

SEQ ID NO: 86217 - DNA, 2974 bp, Oryza sativa
  Clone ID: PAT_MRT4530_85279C.1
agattaaactgtttctccagaataatataaccttgcctgatcttatcactaaaatctgttttacaacacctgatctaatacaaacgatcaagtggcatatagtcacaagtcgcaacacgctcggaagagcagttgaactgatcatcccgttgaggttacactccaaattgaatgatgaggcaacgaataacaaagcagcactcagaaatccatgatggtccaggcatctacaaatgatatatcgcgcaactccatttgagtacaaatgggtccaagccctggcaacaggtgtatggatctcagatgatcaagcctcttaaggggtgttcttggaatataatgaggaaagatgtccaaacagtattctttcaacaattgtaaaggaaggacgcgtgctttttttcggttttttttttttttttttttttttttttttttttttttttttttttttttttttttttttcagcttcaccagaaaagcgttatcttgccttgcctgatatgatcagtagaaactgttttacagagctctttttatcaagagacagaaaacatatggccagaaagcacaagcatacatacacaaacgcaccacacccacttcagagagctatccaccatgatacataacgagtccaatatgccttgcatatacttcattgaattccgccgatacgaactgctcttgtaacatttacaaagataatgctcacttccctaagatggaaccatatagaatttgtgaaaggaaaaaaacttcacaataactgtaggaaaggcttaaaacatccgccgtcgatttggaacaatctcagggctgttgttcttcatcatggcaacaaactcctggtagttaattcttccatcatggtctgtatccacttcagcaattatttctttaattgtcgcttcatcacccatgtcgtactttgtcagagcttcttccaattcatcgactgttatgaacccgctgtggtccttgtcaaaatattcaaatgctttatatatgtgatcttccttctctaatctattcatgtgcatcgttgctgatataaattcaacataatcaatggacccatttccatcaacatcagcaaggtctggatccacttcagcaattatttctttaattgtggtttcatcacccatgtcgtactttgtcagagcttcttccaattcatcgactgttatgaacccgctgtggtccttgtcaaaatattcaaatgctttatatatgtgatcttccttctctaatctattcatgtgcatcgttgctgatataaattcaacataatcaatggacccatttccatcaacatcagccgcttccatcaactgccttaattctgattccgaaattttagtgccaagctttggtagaccagctcttagttcttcaagagttatcgtcccactgttatcagtatctaaagatttgaacatttcctttaaacccacaatctcttcctctgacaagttctctgcaacgaccttcaaggcaaccttcttaagtttgttcattgctctgaactgcttcattctactgatcactgtaatatcaagtggtttatctggggcctctccatcctctctaatccatgggtggttcaaaatttcagcagcagttaaccgctcctttgggtcctgccgaagcatccgcttgaccaagtcttttgcaccactagatatagaaggccatggttcagatgagaagtcgatatgaccttgcagaacagcatcaaatataccgtcctcgttttctgcccagaatggaggaacccctgatagaaggatgtaaaggataactccagcactccatatgtctgcctcagctccatatagtcgttttaggacctcaggagccacataatatgcacttccaacaagatctctgaactgctcaccgggcttgaagaagacggagaggccaaaatcggtggctttgagcggggagtcctcgcgcttgttgaggaagaggaagttctcgggcttgaggtccctgtgcatgacccccatggagtggcagctgtggacgacggagacgatctccctgcagagggcggcggcggcgcgctcggagtagtggcccctggcgatgatgcggtcgaagagctcgccgccctcgcagagctccatgacgaggttgacggagtggcggtcctcgtaggcgccgcgcagctcgacgatgttgcggtggccggtgaggtggtgcatgatgtggacctcgcggcggacgtcgtcgaggtcgtcggggcgggcgagcttgcgggcggcgatggacttgcaggcgtagcgtcggccggtgggcttgtgggtggcgaggtaggtcaccccgaactgcccccgccccagctcccgcccgaaggtgtaggtcgcacggacgtcctccatgggccgccccagcacccgccccaccccatcctccgccgccgcctgctggggcgcctgctggggctggtgccgcggcggcggcggaggctgagatcgcggctgctgcggcggcggtggctggggcttgggcttgggcttgggggcccgggtggtttggtggtggtggtggtgcttgtggtgtggggatggggattgggattgggattggtcgggggattggcggtggcgagaggcgcgggcgcccatcggtggcgagaggggttttggctttggttttgggggtttggattggggggaggaggaggaggagaccatgactttggcattgctctgctctgccgtgctgtattatcaaatcatcgtcgactacagtctcgtagggcgttgggtttgcgcgtggttcccttcccctcccccgcgtgtctccgcgtcggacgccaccattcccctccgcgtggggacgcgcgcgcgcacggtcgccgttgtgtgctgcggcttgcgacacgagaggggaggttgacgggcgatttctggggcggccgtgtcctgcgctcattcgacgccgccgccgccacgaacc

SEQ ID NO: 86218 - DNA, 464 bp, Oryza sativa
  Clone ID: PAT_MRT4530_8527C.1
caatccataatatttgggctatgtagcacctagttgattcatctaaatcacagcttagctagcatatattcttcagatagacctaagcaatctaaccatgcacgcaggaatcgcgcgctcgctcgaaagtaaacgtctagatcaatccaggaactcttctttaagttaatctaaggagagatttagatgaggacgctaacactttccaaaaagccctagctagttacgagtaattttttcgataggtctctagctagttaatcccggggaacaagattctgtgtgcttctcagcagagagaccgcggttttgctcaccatttcccgttttcccctgatcaacagctgccttttctgaataagagcttctgcaggcaactggtaggcgtttccaacttgtccgatctaaaaaccaatggttagcatcagcagcaggggtagtagtaagactggatgactgctgca

SEQ ID NO: 86219 - DNA, 365 bp, Oryza sativa
  Clone ID: PAT_MRT4530_85280C.1
gataagaacaaaggaaaggtacagggaacagtttgcaaatataattagccagatacatccgagatgcagatcaatgcatcatcattatccacatgacccggaaaacaatactttagtggtgctactgatcggtaagaaaacaatactttagtggtgctactaatcggtaatttagttcactgacggcagattttcccaagattaggatcgtttgttacttcagtgtctctctgctgcttcatacagaaagaaataagcattaaaatgtggaaatggtaagataatgaagtggaccggaagtagatgcttagatgcagcatcagcaccagattatataagggacattaagtgttcctgtacatggg

SEQ ID NO: 86220 - DNA, 1256 bp, Oryza sativa
  Clone ID: PAT_MRT4530_85281C.1
ggggcgtgggcgacgacgtcttctcttgctagttgctactgatccgtgctcgtaatcggagattcagagtttcattatatgcagatgttgttgccctttctgtcacccctacatacttaaatcttttcgcttctgtaagtgggatgcacatttatttgcaacactcaaaacaaaaattgtctttaaaaaaaagagagatatacccaatctcctgcaatgaactaaatgtagaggcacgctttacaaattttcctggaaaggtatcaacattgtcatgcaaatatctatcattgcctctgactataaaaagctgaaaaaacgattatcaaccactttttgacaagtttggcttcaaattagctggatggttaggtcgcttcttcacatcgtctagcagaaagacgctagtaaaatcagttcttaatgtcccgcctctctgataccgggtccacttacatctggcagcttttataggttataaactgctctcacaaactaacacaaatcttttctgcacactttgtcctcactcgtgcgcacttgggaagaatttcctgatcggtcgcccatcccaaatctgctccaagctaagcatgcttaaccttagagttctttcgagatcggcttccggaaaagaagttgtggttccaatggaaagatcccgaaaaaccatgagtttatgaatattccctgtgataaaatagacaaaactttttaatgcctgcaccttgatcaccgcaagagatggagagaaaattaaattatggaatgattactggctgcagaacaaaagaccaaatgaaatagctccatctcttttcaagatctcaaaaagaaaaaaacaggagacaaacaatgtttggctctccacactcacagtcacatccagcattgaggagataaaccaacttgtgactaggaggcctcctacaacaagttaccttggatccaaatattcaagatgacaaatgtggaaagggactaccaatggagaatattcagcaaagagttcttacaaaatgcaattccaagaattgattactcacaataattgcaatgcctttcggaggcaaaagctcaatccaagcacaagttctttagacggctcataatacatcaaagagacactcacgaccgataacttattaggaaggcattggccctgcgcatggatctgtcgcctttgcaacgaagctttttaatcgacggatcacttgctcaaagaatgtgaattcatggtaaatgtatggggggaa

SEQ ID NO: 86221 - DNA, 1742 bp, Oryza sativa
  Clone ID: PAT_MRT4530_85282C.1
gcgcgaggcccggcgcccgcgtcgcggcgaccacgtcggcgaggagcgcgagagtgggggccctcctcctgtccgccgtccgcattctcgtcgtgtctggtttgagctgctgctgctgctgctgccggtgggagttgggctgcttgcttgcttggtttgattggtggaggtgggaggagtactggagtaggcgagtagctgtgggttggggtcggcgagggatccgggcggcggggtatggggaacgcgagcggcaaggaaggggaggagaacggccacgtggcggcgggggccgccgccggagtggctggctcggcgggggcagcggcccgggctccgccgccgcttatgccgccggacgccgtgatgcgggagctgcctcccccggtgccctacgtcttcacgccgcaggttccagtagccccactgcatatacctactgaattttctcctgttttcaacaattcatggataaatgaatcggatgaatccaccaataaccatccccaggagaagggaattccaactttgatctcatggagtcaaggaggaaatgaggtgtttgtggaaggatcatgggataactggacatcaaggagggtgttagagaagtctgggaaagaccataccatattgctagttctgccatcaggggtataccattacaggatcatcgtcgatggggaaccgaaatatgtccctgaactacctcatgtggctgatgagggagggcaggttgccaacctcctcgatgtccatgattatatcccagaaagcctgggcagcgtggcaggattcgactctcctccgtcgcctgaacacagctatgatctccagctcccaggtgatgaggagtttgccaaggagccacctatactgccacctcagcttgtaatgtctgttcttggtgatactgataactctgaagaacaaactctgaagccaaagcatgttgtcctcaaccacctgtatatcgagaaaggatggggatcgcagtcgctgcttgctcttggagtcactcaccggtttcaatccaagtatgtaagcttcgtgctgtacaagccgctgcgaaggtcatccacggcgaagcgaacaaagaatggtggttaaactcatggtaactgacaatgtacataagtgaaatgcaggaggtcttgttgtttgatgctgatcaaagcaatcaactttttttttaatttctctctttgtttctttaataagctgttgttgtagcatgatgttttagaagcctgaactctatgagaaaatgagtcaagagagggatgaaaaaaaaagagaatatccctctatgcttacctaaaaaaaaaaaaaaaatttgtgtggtctgagagtaatggtgcatggaaatttgaaaaagcctgtgaattacaaaaatgagatacaaatacccggtgccctggctggtggtgaccgcgcgtcctgatcggatcgccgctgaagcccaggtttatgaggcgtcaccacgacgtcgacgaagaacttcagccgccgccgccgccggagacaaattctcatgtcaccttcttaagatcggagccatcgtttcaactagattagagcctgctaaagcccagcccagtccagcagatcaacgaacagatatcttgccgatgcccaaattgacacaagtcactgagacggcaggatggatggcgactcgagctttcgaagatctccttaatctccttgccgccgcgtacgaaggacacatagagctttga

SEQ ID NO: 86222 - DNA, 123 bp, Oryza sativa
  Clone ID: PAT_MRT4530_85283C.1
atgaggctgccgcgtgggctccactcccgtggacccgacgttgcagcttcggaagatccgctcttcgtggaggttgaagaggacgtttgggaaagtgagcaaggcaagtcacatcatccttga

SEQ ID NO: 86223 - DNA, 265 bp, Oryza sativa
  unsure (1)..(265): unsure at all n locations
  Clone ID: PAT_MRT4530_85284C.1
attaataaaaaaaaaaaccatataaataatctgtataaatttttttgtaaaaattattatataaaaaaaaaagaggttaaagtagtactcctcccaagtattatataattagtgggtatgacctgtaaaaaaaaatcaggctcgtgtgcggttattgttttttatttaaagaggagcattggagaggtagggccacttcaaggatcctcactttcttgaatgaaaaagtttttntggtcttgaagaggccagattataccggacg

SEQ ID NO: 86224 - DNA, 293 bp, Oryza sativa
  Clone ID: PAT_MRT4530_85285C.1
catcgcccgcggggaccgacccggacttactggctcgacccacccacgcggccttgcctgggtgctcttgcatccgttccacacgggggggctcaattaataaatggggtgcggacttagagaggcctactgaaactgcgtaaggctaatctatagcctaagaaaaccatagctagggatgacatgatctacttggctcaacactaggcctaagagcaagcattcatactgcttagctaagacgcttagggagagataattacggaactctacatacgacaggaagatgccca

SEQ ID NO: 86225 - DNA, 447 bp, Oryza sativa
  Clone ID: PAT_MRT4530_85286C.1
aacccgttcggacaaatcccagctttccaggacggggatctgtacctctttgagtcccgcgctattggaaagtacatcctacgcaagtacaagacgagggaagctgacctactccgggaaggcaacttgagggaggcagccatggtggatgtctggaccgaggtggagacacaccagtacaactcggcgatttcaccgattgtgtacgagtgcatcatcaacccagccatgcgtgggatcccaactaaccaaaaggtcgtggacgagagcgcggagaagctgaagaaggtgctggaggtgtacgaggcacgactgtcacagagcacgtacctcgcaggtgacttcgtcagcttcgccgacctgaaccacttcccctacaccttctacttcatggggacaccgtacgcgtcgctgttcgactcgtaccctcaagtcaaggcttggtgg

SEQ ID NO: 86226 - DNA, 252 bp, Oryza sativa
  Clone ID: PAT_MRT4530_85287C.1
atggccactttgcaaattgaaatgttccttccagctgttatgttcaggggtggatccaacgtggtgcagggggacttagccatgcatggcagcggcagccggcttctcggggacggcggcagtggcggtgcctcacgtcacgtgaagctgggctcgcaggggccggatatctcaacgcagtgggcctgggctgcatgggcatgtccgctttctacggcccgtccaatgccggaggccgacatggtggattag

SEQ ID NO: 86227 - DNA, 240 bp, Oryza sativa
  Clone ID: PAT_MRT4530_85288C.1
atggcgctcgtcgcctctccaccaccgccggctgccgtcggcatagctccggccaccgccgcatacgaccgccgctccggcccccttctcttcttcctcttccagctccttctctccctccacggagtgcacagcgaaggcagcggcgagctcaggcacgggcggcggttctcgggtgcgggcgcggcggcgactctcgagcgtgggcgcgcggtgctcgggagcgggcggcggctctag

SEQ ID NO: 86228 - DNA, 591 bp, Oryza sativa
  Clone ID: PAT_MRT4530_85289C.1
atggcggaagagcgagaaatctcgttcgaacaatgggcgacgtttgatgtgaaggaatccacattgaaggagacggtgaagaagggcgtgctgccggcaaaaaaatcatcgggtggcaatcggcctacagtgaggaattctcgacaccgaacattggagaaattgtgcccccatcaaggagagagatcaaagccatccttccagcacgaaggccaaactggccccaatcgggaagatccagactcgatcgagttccagaccatgtattctcagatgtacaaagtcttctcgactgggattgtcatcgattatgggcacaatcttccagtcatcccatacagcctaatgaatcctacgcctccagaaaatgaatctataatctcaaacccccttgctatggctcggcaatctcctcgaaggagcccaagaaataagcaaccaactgggggcccatcaatcaaaacccctcaaaagggtaaaaggtccctatcccttagttttaacgttatgcgttcttacttagaggacctctgtaaacaaaaatattctatacgaagaagagaaaaattggaaaatcgtaccgcgctctga

SEQ ID NO: 86229 - DNA, 465 bp, Oryza sativa
  Clone ID: PAT_MRT4530_8528C.1
atggcgtcccgcggcggccctccttgccctcttgtcctggatgatcctttgtatcagcctcgccatcttcttcttggcctgaccaccaccaccacacacacacatcccaggttcagatttcaaaggccttacatcaagaaagttaacacaaagaagatgcgtggcattggtgagagcggaggcgcagcggaggccggcgagtgggggcgtgacggggagggaggagcttcaatacggcggaactataaaaaggccctaatcccaaccaacacctgcatgaatagtatgcgtaccttcaaggtcaacttttggaggagactgtctcagatgaaggctgatcacgagccgtcagcgagcaacaagagactccctgttattaaccataattacaaaagtaaacggtatgctaccttgacgccccagatgatgaggcagaagatggtgaacaggaggacgaagcactga

SEQ ID NO: 86230 - DNA, 384 bp, Oryza sativa
  Clone ID: PAT_MRT4530_85290C.1
tcgtttaaaccaagcggcgccgaaggaaaggcgagcgccagggccatgccccaaatcgatctcgcctcgagctcgaggccctcgcgcccgcggattccagccgattgaatcccccccacccctaaccccgttctctcggtgctctgctcgttataagcgggtggcctttagccctaggttttttgttcgattgggattttatatatcccgcttggttggggggggggggatccgtttgaatggccggagccggtggtaaccgcggatgttggcggcggcgagcgaccttatcacctcgaccggccaccgtgacgtcgtcgtcaggacagaggaggaaatgaacatgggccttctacacaacttcctgagcgtgcccttcatgtt

SEQ ID NO: 86231 - DNA, 683 bp, Oryza sativa
  unsure (1)..(683): unsure at all n locations
  Clone ID: PAT_MRT4530_85291C.1
agttaaatgcagttcntaatgtccccaatccactggggtcagtgaaagnagtgtccaaagtccaaanncantgtttcatcatttctctattatcttaacatatatcccgcacgcaaagcgcggagcatttagagaatgagcaagacccaaaatggctcctgaagaaatatgtcaaactatcacgttttgtcgcatattttgagtcaaaattttcatcgcatattttataggaataaagtgaaacaaaacagtggtccaaaataaataaaaaagagaatactgagatncaaatggagtgaagggcatggaatggatgatgtgttgttgcctaattgagttaacatgcctgttgagggctggaatgtgctggatgctgccacctggtgtgcccaactgcaccctgccccccgtgtgtgtgccaccgcgtgaccggatgttgtgcnaatctgacctgataacggtgacctgctctcctgtgtggcccaaatggtgtgtgctgatgatggaaaaggtgtgaccgtgtgaaaaaatgcatgagggaatccatttttcaaatttattttagctaaaacttaattaatcatacgctaaatgctgctttgttttgtgtcccgaacacatcctaagttgtattcaccaatccgaccagactagatgttcgtttttataaaaaaaaaaaaaaa

SEQ ID NO: 86232 - DNA, 1279 bp, Oryza sativa
  Clone ID: PAT_MRT4530_85292C.1
cacgaggctcatctcatcatcgcctttcctccgattcgattcaccggtcgaacagatcgagctcactcagctgtgaggtgagtttcttggattggatcatcgatcgtcgtcgtcgtctatggcggtggtgcagatgctgtcgtggctcagctccggggcggcgtggttcgtgttcctgaacgtcatcgtcggcgccatcgccgtcgtgtcgtggctggggcagggcgtgggcgggacgacctcgacgccgtcgtcggcggcgcggcggaggctggcgcgcaccgcgtcgaccgttgtgatggagaggctccggtccgtcgccaacttccccttccagtacctctccggcgactacagcgccacgccgctccacgtccacggcgacgtctcgtcggggtccgattacttctactacccgcgtgaggcagaggaggagttggtggaggccgtcgcggcggcgccgttccggccggagccgccggcgccggtgagggaggtcgtggcggcgacgacgccgtccatggcggcgccacggagctcgcctgtggccgccgcaacagcggcggcgatcaagaacgaggaagaagaggcggaagcagaggaggaggaggagtccatcagcttggacgaggcgtacgcgctggcccagcaggcgcaggcgcgctcgccgcgttccgcaccagatgccgcggcggcggcgaaggcggcggacgccaagccgcggcgggcgcgggcagaggaggtagaggaagggaaggcggaggtgaacgcgcgggccgagcggttcatcaagcagttcagggaggacctcaagctgcagcgcatcaactccatcatcaactacaccaacgcgctgcgccgccgcggcgccggcggcgtcgcggcgaccgcgccggcgccggcacggtagccgcccgcgtttcgctgccgctccgatccactctacacgatccttgtcgcgtggtttcgcttggttagataggggatttgtttgttcattgtgacggatcaacgctacaacacacaacaattttggattgtttacttatacttgtagtacatactactacaaaatttgtgattcaaatatgattcaaatgctgggacatgtctcgtagctcaagaacagaagcgaaaggagacacagtttgcgatccatccgaaggattttcgatcttggatctaggctctgttgagctgcttttattatttgtgattgcaagatcgaatgaatagaagatggcgtcgatcgagccgaaaattaaaaaaaaaaaaaaaa

SEQ ID NO: 86233 - DNA, 883 bp, Oryza sativa
  Clone ID: PAT_MRT4530_85293C.1
gggctccaccaatcatcaattatcatttttttttttacttttggcggtaaatttggtgttcaatatttagaacaatgatcatgaacatcttataatccatgtgaatgacatatctatcagacaactacagaatattatgagacatgtagacaactgtggaatgtaatgaggcatggaaacatgtgtatccaagttttttagctataacaccacagtgactaaccacaccatcctacagttttgtttgttgtgaagccagtgtgtgatgaatcagtgtcaggacgaggagcaggcttctgctgccttggtttagcaggatcaacgaaaataacccatccatccagaaactttgcgttcatctcctgccgagcattctcagcttcttctaaagtagcatatctaacaaaaccgaatcccttggatcttccagaaatcctatctgtaatgacttttgcttcaagtagctgcccaaagggagcaaaggcatttttaagcttctcatccgtcgttaaccttgaaaggccgctgatgaagagcttgggggcggtcagcggcggcacgttgctgacctcggcgccgtcgccgaagacggaggaaaggggcgactcggtgggcaagggggcggacgaggaggaggagcagaaggtggcgcggagtattgaggaggcggcggcggaggaggaagagacgggggtagagccgcggaggaggcggtggagcagcgaggaggagagcgccatggccgccggctaaaaccctacctccgccttggctctggtgcggtgctgcggatatcccccggtccgaccgatctgctgggttcgggttcgacctgaccaggtccgcatagcagagcctcgtgccgaattcctgcagcccgggg

SEQ ID NO: 86234 - DNA, 9731 bp, Oryza sativa
  Clone ID: PAT_MRT4530_85294C.1
tcagatggtggtttctccgaggagtaggctcgtccgtgccgtcgaggatgcctgtggagtggtgttcccgccctttgtcttctctagatggccgatcacccacccaatcaccgcggagaagccatggatgactttgtggcagagttggctcgcatgacactggtggtgggctaccccaatgtgcccgagtattcgactgttctgccgctcagtggtgagttccctcaccgtgttcgcccggaggttcatggctatgtgggtacctgtctcgctaacatggtggttgaggcatccggaggcacagcagatcacacctgtcaggaggcagcatagctgatgatggccagactacggaagcgccacaactacatcttctgcaacacggcgtaccgttttcaccctcgtcgagcaagtggcgatgacgtcagcaccttccgtccgacagccggcgagaacgacaccacctttggtcacatgtgtgccgtgatgaggggtatggacaggatgcactcggatctacgcaaggcgtccaaggccttgaatgacgggaagctcgtgaggatcatagctctgaaggatgaaatcgcgcgcctgaagaaggagaatgcgcagttgaagggtctccccattcccggaggagtccggatccgcaacacgccccgcaagtcgacgacggcacccgtgcgcattcagcttgcgcctaggaacccacctccgcctgcacctccagcagctcctccagttccgcccgcagtttcagaagttcccacagctcctgcagctccagctccagtcccagctcctgtcccagtgtcagctcccacgtccgctctctccttcgctcctgcatcagccgtcaggggtccagccagtggtaacgggggttggttgcctgctactcccagtggcagccacgaccacagcagtagcagttccagtggctcggagccgggcagcggcgagacgtatttgccagagtccaggagccactcagagggacctggcctcttcctccagatggtctacaccaggaatggtagccgtacaacaggcgagggcagcaacggcgaagagcgcaccgacggtgtgcatcccaacagcaactccggcaatggtccgccaccgctccccaaaaatctgacccttgcccaagtaatggctcatcagactcagatgatggcagccatgatgcagcagatgcaccagaggatgcagcagcaagccgagcagcagcagcagcagtttggtccccctcgccctcagtccaagttgccggagttcttacgtgtcaggccacccaccttctccagtaccaccaaccctatggaggcaaacgactggctccacgctatagagaagaagctcaatctcctacagtacaatgatcaggagaaggttgctttcgctacacaccagctccagggtcccgcgtcagcttggtgggacaatcacatggccacccgcccgctaggcacggaagtcacttgggcggagttctgtcgcagcttcaggaaggcgcaggtgcctgacggggttgtggcacagaagaagagggagttccgggcactccaccagggcaacaggacagtgataaagtatctccatgagttcaatcgcctagcgcgatatgcaccggaggatgtccgtactgacgccgagaagcaggagaaattcctagcaggcctggatgacgagctgaccaaccagctgatctctggagactacgccgattttgagaagctggttgacaaagcgatccgtcaggaggatcagcgcaacaaaatggacaggaagagaaaggcagcgcaattccggtccaaccaaggaagccacccgtgaccgcgcgtcacttccggacagcagagtggacctaccaccatgatcgtccgccagcaccgccctttcaactcgagcaacttccaccatggcaccagtggcagccagaaccaccatggaggtcagcccaatcgcagtgcagctccgcgcccaccaatggcaccagcacagtcagctccatctgcgcaagtcaagaaggagactggaacaaagccagggtcctgcttcaactgtggcgagcttggccacttcgctgacaaatgcccgaagccaaggcgtgctgggccaaggtttgtctaggctcgtgtcaaccacgcgtccgcagaggaggcgcaagcagcaccagaggtcgtactgggtacgttttctgtcaactcagtccctgctacagtactttttgattctggtgcaacacattctttcatttcaaagaagtttgtggggatgcatgggttaagaaaagaagagcttagtacaccaatgagggttcataccccaggaaatagttcaacctcggtcagttatagcccttcagtgctaatagaaattcaaagatcaccatttctagccaaccttatccttctcgaatccaaagacttagatgtcattcttgggatggattggctgaccaagttcaagagagtcattgattgtgcgaatcgcacagtcaccttgaccaatgagaagggagaaaccgtggtgtacaagtcaccggcctcaccaaagcagagaatctccttaaaccagattgaagtggaggaacctgtgaccaccgagcagaagagttcgccgaaattggaggatatccccatagtctgcgagtatcccgaagtgttccctgaagatctcactactatgccacccaagagagaatttgaattccggattgatttggcaccaggaactgccccaatttacaagaggccgtagagaatggcagccaacgagctagcagaggtcaagaagcaggttgatgagcagctgcagaaagggtacactcgaccaagtacttcaccttggggtgctccggtcatttttgtggagaagaaggataaagcaaagaggatgtgcgtcgattatcgcgcactcaatgaggtcacaatcaagaacaaatatcctttgccacggattgatgatttgttcaaccaactaaagggggctaaagtgttctctaaaatcgacctgcgatcaggttatcactagttgagaattcgggaagaggatattcccaagacggccttcaccactcgatatgggttgtacgagtgcatggttatgtctttcggacttaccaacgcacctgcattcttcatgaatctgatgaacaaagtgttcatggaatttctggacaagtttgttgtggtattcatcgacgacattcttatctattcaaagtccgaagaagaacatgagcaacatctccgtctggtactcgagaagttgaaggagcaccaattatatgccaagttcagcaagtttgacttttggctgttggaggtcaaattcttgggtcacgtcattacagctcagggcgtggcagtcgatccatcgaatgtggagtcagttaccaagtggaccccacctaagaccgtgtcatagattagaagttttcttggactcgcgggttattatcgtcggttcattgaaaatttctcaagcattgccagacctatgacccagttgcttaagaaagatgagaaatttaaatggacagctgagtttgacaagagttttgaggagctcaagaagaaattagtatccgctccagttctgattctgcccgaccaaagaaaagacttccaagtctattgcgacgcgtcccgccacggactcggatgtgttttagtgcaagaggcccgcgtttcgtcaagtgtgcagcagccccgtcgtcgtcttcgtcctcgcctccgcgtcgtcaagcctcgtgccggctgtgtctcgcccgtgtaccggtgtcggtagtcgttcacgtgtgcgggtggtgaccgtgtagtgtccgtgttagtgtgttcgctcggtagccgcgtggtttccacgtgtgcagcccgcgtggtgtctagtggagtccgtttgtcggctactcgcctcggttgacacacggggtccgcttccgtcgacctgtggaccgtctctgtgtacctggttttctttttatgtgttgttattgcttctttataggcttgtagctttgcttgtgtgcttcgcgtagctttcgtcgttccggaggttcccgaagtgtggttcgcggtcgtcgccaaaggttcggaaggccgttctctctctcttcctctttcaaaacccctaaaacctgttttccggtggggtttgggtgcatgccagttgtgggaagtagcaccctggccactataaggattaagctcgggcctctgttgcaaagcactaccgtacttccacatgtctagtgggtaaggcttagtttgtggctcagtctggttataaacaaaagtacacggatggagatggacgaagtcgggggtcgatggacatctccaggacaaatgaaggctacacgagctgcggcccgatggccggcagcgttacccgtcgtggtttgcacatgactggcttcgtcttggagctgcggggcctgtgcgtggtcttggggtatccacatggagtggattaccaggccaggccgctcccggagcaggagggtgaggatgcagagcctcacgctggttgggaggtcactgcagtgatcctctccggctctcctgagcggacttcgctggcagtcaccgcgggcggagattccttccccgccgcttgccagaacgccgctctcctcgccatcggcacccttcaccagcgctacccggacgagttgcagcactcgccctaccgctaccacccccgtcgcggggcgcccgcaccacgccaccttccgagacgccagctcggaggatgacgctaccgtcgtgcatctggcacgcatggtggaggcgtacgacgtggctcgtatcgacttccaccagatggtgcgtcgtggcatggtggagaacaacatgaagatcctggagctgcgtcaggagaacctgcagctcaagaaggacctcgacgcgttggaggcgcagctgcaccagctcaaggtcgcccagggtgagatctgccgtcccaagcgtcgccgcgtctgccgcagccagaagatcaccgcccgcaagagcacctccaggcccgagcttgttcgtcagtccctggcatggacttgcttcgtcgagacccctcgtgccgagcctgcgcccgtggttccccaggagggggaagcctccggcgttggtagctcggagggtgcgctgttgctcaccttccgccctggcccgtcgcagcgctctccttctctgtttgctggttctgtgtggagtttacagatggtgtcgaccaggagaaatgttaacaccggtgaaggcaaccaacccgaaggcagcaaccccaacccccaaggcaatccacctccaccaccaccaccagacaccaacgccattctcactcaaatcctcgcccagcaagccaacatgatgaatgctttcctccaccacctccaaaatccaccacaacagaatgctccaccaccacctccccaacactccaaactcgccgaatttctccgcatccgcccacccaccttctctagctccaacaatcctgtagatgcgttggattggttgcatgccgtggggaagaagctggacacggtgcagtgcagcgacgaagagaaagtcatcttcgccgcccatcagctgcagggacccgcatctctatggtgggaccatttccaggccacgcagccagagggacaaccgattacttgggctcgcttcaccgccgccttccggagaacccatgtgcctgccggagtcgtggctctcaagaagaaggaattccgagagttgaagcaaggcaaccgctccgtaatggagtatttgcatgagttcaacaatctagcccgttacgctccggaggatgtgcgggaagatgaggagaagcaagagaagttcttggcaggaatggaccccgagctgtctgttcgtctagtctctggagactatcctgattttcaacgactggtggacaagagcatccgcttggaagccaagcacaaggagctggaatcgcacaagcgccgcttggcgaatttccgcaatcaacagggtgctaaccagagggtccgctacaccaatccctacccagggggatcctcctcgcagcagcagcagcagcagcagcagcaatctcgctccgcgcctcgaccccaattcgtggtgcgcgtcccacagccgcagcagcagcagaatcagcaagggactcgtgcgccccgtcctcctactccagctgggcagcccgttcaaggccgcagggacgcttcaggtccgcagcgtctgtgcttcaactgcttcgagcccgggcactttgcggataaatgcccgaagccaaggcgtcagcaaggccaagcgcctccccgctccaacaacagtggcaaggacgtcctccgtggtcgtgtgaaccacgtgacggccgaggacgtgctgacaactccagacgtcatcgttggtacgttcctcgtccattccatccctgctacaattttgttcgactctggagcttcccactcgtttatatctgtgccattcgtggggaaaaatcagttgggggtagaaaggcttagaaaccctctgctcatcaccacccctggcggggttatgacagcaaagtattatagccctgccgttcctatagaaattcaggggattccttttccttcggatctgatcctgctagacacaaagaacttggacgtgatccttgggatgaattggttggctcaattccaaggagtagtggattgcacgagacgcactgtcactctgtatcgagggccagaacaaccggttgttttctttgcacctccaacctctgtcagaagttcagaactgcatcagataggtccgtcagaaatccccatagtcagagagttcgaagatgtgtttccagaagaactacctggtatgccgcccaagcgagagattgagttccggatagatcttgttccaggaaccactcctctgcacaagcgaccctaccgtatggcagcaaatgaactggccgaagtcaagaaacagttggaagagttgaaagaaaaggggtatatacgtccgagtacttccccatggggtgctcctgtgatttttgtagagaagaaagacaaaacgaagaggatgtgcgttgactacagagctctcaatgaagtcaccatcaaaaacaagtaccctcttccccggatcgatgatctgttcgatcagcttaaaggtgccactgtattctccaagattgatcttcgttccggatatcatcaattacgtattcgtgaagaagatattccgaagaccgcattcactacgcgatatgggctgtatgaattcacggtgatgtcgttcggtttgaccaatgcacctgccttcttcatgaacttaatgaacaaagtgttcatggaatacttggataagtttgttgtggttttcatcgatgacattctaatatactcacaatcagaagaagaccatcagcaccatctccgtctggtattgggaaaactgcgggaacatcaattgtatgccaagcttagcaagtgtgagttctggttgtccgaagtcaaattcttagggcacgtgatatctgctaagggagttgctgtggaccccgaaacagtgaccgccgtcaccgattggaagcaacccaagacagtcactcagattcgcagtttcttaggtttggcaggatattaccggagattcatcgagaacttctccaaaatcgctcgacccatgacacagttgttgaagaaagaagagaaatttgtgtggagcccgcaatgcgagaaggcgttccaaactctcaaggaaaagctggtttcctcgccagtgttaatcttgccggatactcgtaaggatttcatggtgtattgtgatgcttcgcgccaaggattggggtgtgtgctcatgcaggacggtcatgtggtagcctatgcttcacgtcagctacgtcctcatgaaggcaactaccctacgcatgatttggagttagcagcggtggttcatgctctaaaaatctggcggcactatctcattgggaaccgctgcgaaatatatactgatcacaagagcttgaagtacatcttcacccagtcggatctgaatcttcggcaaaggagatggttagaactcatcaaggattatgatgtgggaatacactatcatcctggtaaggccaacgtggttgccgacgctctaagtcgaaagagccactgcaacactctcaacgtccgaggcattccgcccgagcttaatcaacagatggaagccctgaacctaagcatagttggtcgcggattcttggccgcgttggaagccaagcctaccttgctcgatcaaatccgcgaggctcagaagaatgatccggacatgcatggactcctcaagaatatgaaacagggtaaagccgcaggtttcacagaggatgaacacggaactctatggaacgggaagcgggtatgcgttcccgataacagagaacctaaacagctgatacttcaggaagctcacgaaagtccttattccattcacccgggcagtaccaagatgtacttagacttgaaggagaaatactggtgggtcagcatgaagcgggaaattgcagagtttgtggctctatgtgatgtgtgccagcgtgtcaaggcagaacaccaacgaccggctggacttctccaacctctccaagtgccggaatggaaatgggatgaaattgggatggatttcatcaccggccttccaaaaacccaaggtggatatgattctatatgggtaatagtggatcgattaaccaaggtagctcgatttattcctgtgaagaccacctatggagggaacaagctagcggagctctacttcgctaggatcgtgagtctccatggcgttcccaagaaaatcgtatctgataggggaagccaattcatctctcacttttggaagaagctccaagaagagctgggtactcggttgaatttcagcaccgcctatcacccgcagacagatggacagaccgagcgtctaaatcagatcctagaagatatgctccgcgcatgtgtcctagatttcgggaagacttgggataagagtctcccctatgccgagttctcctacaataacagctaccaagccagcatacaaatggcaccttatgaagcgttgtacgggcgcaaatgccgaacaccgctattgtgggaccaagtcggagaaagtcaagtgttcgggaccgatatcctgagagaagctgaagctaaagtcagaatcattcgggataatctaaaggtggcacagtcccggcagaaaagttatgcagataaccgacgccgtgatctggaattcgcagtggatgattttgtgtatcttcgggtcacgccattgcgaggtgtgcacaggtttcagacgaaagggaagctagcacctcggtatgtgggtcccttccgtatcatcgctagacgcggagaagttgcttaccagctggagttgcccgcctccttgggtaacgtgcatgatgtgttccacgtgtcgcagctcaagaaatgtctccgagtgccatccgagcaggccgactcagagcaaattgaagttcgcgaagacttgacctatgtggagaggccagtgaaaatcctggacaccatggagcgcaggaccaggaaccgagtaatccgtttttgcaaggtccagtggagcaaccacgccgaagaagaagctacttgggagcgcgaagacgagctgaaggcagcccatcccgatctcttcgccagttcttccgaatctcggggtcgagattccgtttaa

SEQ ID NO: 86235 - DNA, 159 bp, Oryza sativa
  Clone ID: PAT_MRT4530_85295C.1
atggaggagtacgacgacaccgtggcggttgatggcggtggccggcggcgcttgaggcaaaggcactgcttcaggcctcgctgccgtagcatctgcttcagattgatgctgaagaaacgtctggcccatggcgaacgagtctggcttcgattggattga

SEQ ID NO: 86236 - DNA, 5274 bp, Oryza sativa
  Clone ID: PAT_MRT4530_85296C.1
atggatgaagtcgggggtcgatggacattctccagggcaaatgaaggctacacgagctgcggcccgatggccggcagcgtcacccgtcgtggtttggacatgattggcttcgtcttggagctgcggggcatgtgcgtggtcttggggtatccacatggagtggattaccaggccaggccgctcccggagcaggagggtgaggatgcagagcctcacgctggttgggaggtcactgtagtgatcctctccggctctcccgagcggacttcgctggcagtcaccgcgggcggagactccttccccgccgcttgccagaacgccgctctcctcgccatcggcacccttcaccagcgctacccggacgagttgcagcactcgccctaccgctaccaccctcgtcgcggaggagcccgcgacttcgccaccttccgagatgctagctcggaggatgacgccaccgtcgtgcatctggcacgcatggtggaggcatacgacgcagctcgtattgacttccatcagatggtgcgtcgtggcatggtggagaacaacatgaagatcctggagctgcggcaggagaacctgcagctcaagaaggacctcgacgcgttggaggcgcagctgcatcagctcaagatcgcccagggagaggacagccgtcccaagcgtcgccgcgtctgccgcagccagaagatcaccgcccgcaagagcacctccaggcccgagcttgttcgtcagtccctggcgtggacctgcttcgtcgagacccctcgtgccgagcctgcgcccgtggttccccaggagggggaagcctccggcgttggtagctcggaggctccttctctgtttgctggttctgtgtggggttttcagatggtgacgaccaggagaaatgttaacaccggtgaaggcaaccaacccgagggcagcaaccccaacccccaaggcaacccacctccaccaccaccaccagacaccaacgccattctcacccaaatcctcgcccaacaagccaacatgatgaatgctttcctccaccacctccagaatccacctcaacagaatgctccaccaccccctccccaacactctaaactcgccgagttcctccgcatccgcccacctaccttttctagctccaacaaccccgtggatgcgttggattggttgcatgccgtggggaaaaagctagacacggtgcagtgcagcgatgaggagaaagtcgtcttcgccgcccatcagctgcagggacccgcatctctctggtgggaccacttccaggctacgcagccagagggacaaccgattacttgggctcgcttcaccgccgctttccggagaacccatgtgcccgccggagtcgtggctctcaagaagagggaattccgagagttgaagcaaggcaaccgctccgtgatggagtatttgcacgagttcaacaatctggcccggtacgcccctgaggatgtgcgggaagatgaggagaagcaagagaagttcttggcaggaatggaccctgagctgtccgtccgtctagtctctggggactatcctgattttcaacgactggtggacaagagcatccgcttggaagccaagcacaaggagctggaatcgcacaagcgccgcttggcgaatttccgcaatcaacagggtgctaaccagagggttcgctacaccaatccctacccagggggatcctcctcgcagcaacagcagcagcaaccccgcccagcgccccgacctcaattcgtggtgcgcgtcccacagccgcagcagcaacagaatcaacaagggactcgtgcgccccgtcctcctacgccagctgggcagcccgttcaaggccgcagggacgcttcaggtccgcagcgtctgtgcttcaactgcttcgagcccgggcactttgcggacaaatgcccgaagccaaggcgtcagcaaggccaagcgcctccccgccccaacaacggtggccagggcgtcatccgtggtcgtgtgaatcacgtgacggccgaggacgtgctgacaactcccgacgtcatcgttggtacgttcctcgttcattccatccctgctacaattttgttcgactctggagcttcccactcgtttatatctgtgccattcgtggggagaaatcagttgggggtagaaaggcttagaaaccctctgctcatcaccacccctggaggggttatgacagcaaagtattatagccctgccgtccctatagaaattcaggggattccttttccctcggatctgattctgctagataccaagaacttggatgtgatccttgggatgaattggttggcccaattccaaggggtagtggattgcgcgaggcgcactgtcactctgtaccgaggaccagaacaaccggttgttttctttgcacccccaacctctgtcagaagttcagaacttcatcagatagaactgtcagaaatccccgtagtcagagagttcggagacgtgtttccggaagaactacctggtatgccgcccaagcgagagattgagttccggatagatcttgctccaggaaccactcctctgtacaagcgaccctaccgtatggcagcaaatgaactggccgaagttaagaaacagttggaagagttgaaagaaaaggggtatatacgtccgagtacttccccatggggtgctcctgtgatttttgtggagaagaaagacaaaacgaagaggatgtgcgttgactacagagctctcaatgaagtcaccatcaaaaacaagtaccctcttccccggatcgatgatctgttcgatcaactcaaaggtgccactgtattctccaagattgatctccgttccggatatcaccaattacgtattcgtgaagaagatattccgaagaccgcattcaccacgcgatacgggctgtatgaattcacggtgatgtcgttcggcttaaccaatgctcctgccttcttcatgaacttgatgaacaaagtgttcatggaatacttggataagttcgttgtggttttcattgatgacattctgatatactcccaatcagaggaagaccatcagcaccatctccgtcaggtgttgggaaagttgcgggaacatcaattgtatgccaagcttagcaagtgtgagttctggttgtccgaagtcaaattcttagggcacgtgatatcttcaaaaggagttgctgtggatcccgaaacagtgaccgccgtcaccgattggaagcaacccaagacagttactcaagtccgcagtttcttaggtttggcaggatactatcggagattcatcgagaacttctccaagatcgcccgacccatgacacagttgttgaagaaagaagagaaatttgtgtggagcccgcaatgcgagaaggcgttccaaactctcaaagaaaagctggtttcctcgccagtgttaatcttgccggatactcgcaaggatttcatggtgtattgtgatgcttcgcgccaaggattggggtgcgtgctcatgcaggacggtcatgtggtagcctatgcctcacgccagctacgtcctcatgaaggcaactaccctacgcatgacttggaattagccgcagtggttcatgctctaaaaatctggcggcactatctcattgggaatcgctgtgaaatctatactgatcacaagagcttgaaatacatcttcacccagtcggatctgaatcttcggcaaaggagatggttagaactcatcaaggattatgatgtgggaatacactatcatcctggtaaggctaacgtggttgccgacgctctaagtcggaagagccattgcaatactctcaacgtccgaggcattccacccgagcttaatcaacagatggaagccctgaacctaaacatagttggtcgtggatgtttggccgcgttggaagccaagcccaccttgctcgatcaaatccgcgaggctcagaagaatgatccggacatgcatggactcctcaagaatatgaaacagggtaaagccgctggtttcacagaggatgaacacggaaccttatggaacggaaagcgggtatgcgttccagatagcagagaacttaaacagctgatacttcaggaagctcacgaaagtccttattccattcacccgggcagtaccaagatgtacttagacttgaaggagaaatactggtgggtcagcatgaagcgggaaattgcagagtttgtggctctatgtgatgtgtgccagcgtgtcaaggcagagcaccagcgaccggctggacttctccagcctctccaagtgccggaatggaaatgggatgaaattgggatggatttcatccccggccttccaaaaacccaaggtggatatgattctatatgggtaatagtggatcgattaaccaaggtagctcgattcattcctgtgaagaccacctatggagggaataaactagcggagctctacttcgctagggtcgtgagtctccatggcgttcccaagaaaatcgtatctgataggggaagccaattcacctctcacttttggaagaagctccaagaagagcttggtacccgactaaatttcagcaccgcgtatcacccgcagacagatggacagaccgagcgtctaaatcagatcttagaagatatgcttcgcgcatgtgtcctggacttcgggaagacttgggataagagtctcccctatgccgagttctcctacaataacagttatcaagccagcatacaaatggcaccttatgaagcgctgtatgggcgcaaatgccggacaccactcttgtgggaccaagctggagaaagccaagtgttcgggactgatatcctgagagaagctgaagctaaagtcagaatcattcgggataatctaaaggtggcacagtctcggcagaaaagttatgcagataaccgtcgccgtgatctggaattcgcagtggatgactttgtgtatcttcgggtcacgccattgcgaggtgtgcacaggtttcagacaaaagggaagctcgcgcctcggtatgtgggtcccttccgtatcatcgctcgacgcggagaagtcgcctaccagctggagttgcccgcctccttgggcaacgtgcatgatgtgttccatgtgtcgcaactcaagaaatgccttcgagtgccatccgagcaggccgactcagagcaaattgaagttcgcgaagatttaacgtatgtggagaagccagtgaaaatcctggacaccatggagcgcaggaccaggaaccgggtaatccgtttttgcaaggtccagtggagcaaccacgccgaataa

SEQ ID NO: 86237 - DNA, 5490 bp, Oryza sativa
  Clone ID: PAT_MRT4530_85297C.1
atggaggtggatgaagtcgggggtcgatggacattctccagggcaaatgaaggctacacgagctgcggcccggtagtcgagatgtcatggcacagggccggtgtcctgctgctaggggctcagtcctgcctgcctgtcccgggggttccggccgtaggtgggattgggtcggtactcttgtctatggctaggatgggttggaaactatgtcacgtcttccgtctgtataccgtggtgatggccggcagcgtcacccgtcgtggtttggacatgactggcttcgtcttggagctgcgaggcatgtgcgtggtcttggggtatccacatggagtggattaccaggccaggccactcccggagcaggagggtgaggatgcagagccccacgctggttgggaggtcactgcagtgatcctctccggctctcccgagcggacctcgctggcagtcaccgcgggtggagattccttccccgccgcttgtcagaacgccgctctcctcgccatcggcactcttcaccagcactacccggacgagttgcagcactcgccctaccgctaccaccctcgtcgcggaggagcccgcgactacgccaccttccgggatgctagctcggaggatgacgctaccatcgtgcacctggcgcgcatggtggaggcgtacgacgcggctcgtatcgatttccatcagatggtgcgccgcgggatggtcgagaacaacatgaagatcctggagctgcgtcaggagaacctgcagctcaagaaggacctagatgcggtggaggcgcagctgcatcagctcaagatcgctcagggagaggactgccgtcccaagcgtctgccgcagccagaagatcaccgcccgcaagagcacctccaggcccgagcttgttcgtcagtccctggcgtggacctgcttcgtcgagacccctcgtgccgagcctgcgcccgtggttccccaggagggggaaacctccggcgttggagaaatgttaacaccggtgatggcaatcaacctgaaggcagcaaccccaaccaccagggcaacccaccttcaccttctgcttcgcctccaccaccaccaccagataccaatgccattctcacccaaatcctcgctcagcaggccaacatgatgactgctttcctccaccacctccaaaatccgccacaacagaatgctccaccaccacctccacaacactctaaactcgccgaattcctccgcatccgcccacctaccttctcgagctccaacaaccccgtggatgcgttggattggttgcatgccgtggggaaaaagctagacacggtgcagtgcagcgatgaggagaaagtcatcttcgccgcccaccagctgcaggggcccgcatctctatggtgggaccacttccaggctacgcagccagaggggcaacctatcacctgggctcgcttcaccgccgctttccggagaacccatgtgcccgccggagtcgtggccctcaagaagagggagttccgggagttgaagcaaggcaaccgctccgtgatggagtatttgcacgagttcaacaacctggcccgttacgctccggaggatgtgcgggaagatgaggagaagcaagagaagttcttggcgggaatggaccctgagctgtccgtccgtctagtctccggggactatccggatttccaacgtctggtggacaagagcatccgcttggaagccaagcacaaggaactggagtcgcacaagcgccgcttggcgaatttccgcaatcaacagggtgctaaccagcgggttcgctacaccaatccctacccagggggatcctcttcgcagcagcagcagcaacaacctcgctccgcgcctcgacctcaattcgtggtgcgcgtcccacagccgcagcagcagcagaatcaacaagggactcgtgtgccccgtcctcctacgccagccgtgcagcctggtcaaggccgcagggacgctcaaggtcagcagcgtctgtgcttcaactgcttcgagcccgggcattttgcggataaatgcccaaagccgaggcgtcagcaaggccaagcgcctcctcgctccaacaacggtgggaaggatgtcactcggggtcgtgtgaaccatgtgacggccgaggacgtgctgacaactccagacgtcatcgttggtacgttcctcatccattccgtccctgctaccactttgttcgactctggagcttcccactcgtttatatctgtgccattcgtggggagaaatcagttgggggtagaaaggcttagaaaccctctgctaatcaccacccctggaggggttatgacagcaaagtattatagccctgccgtccctatagaaattcaggggattccttttccctcggatctgattctgctagacaccaagaacttggatgtgatccttgggatgaattggttggctcaattccaaggagtagtggattgcgcgagacgcactgtcaccctgtaccgagggccggaacaaccggttgtcttctttgcacccccaacctctgttagaagttcagaactgcatcagataggactgtcagaaatccccatagtcggagagttcggagacgtgtttccggaagaactacctggtatgccgcccaagcgagagattgagttccggatagatcttgctccaggaaccactcctctgtacaagcgaccctaccgcatggcagcaaatgaactggccgaaaagaaagacaagacgaagaggatgtgcgttgactacagagctctcaatgaagtcaccatcaagaacaaatatcctcttccccggatcgatgatctgttcgatcaacttaaaggtgccactgtattctccaagatcgatcttcgttccggatatcaccaattacgtattcgggaagaagatattccgaagaccgcattcaccacgcgatacgggctgtatgaattcacggtgatgtcattcggtctaaccaatgcacctgccttcttcatgaacttaatgaacaaagtgttcatggaatacttggacaagtttgttgtggttttcattgatgacattctgatatactcacaatctgaggaagaccatcagcaccatctccgtctggtgttgggaaagttgcgggaacatcaattgtatgccaagcttagcaagtgtgagttctggttgtccgaagtcaaattcttagggcatgtgatatctgctgaaggagttgctgtggaccccgaaacagtgaccgccgtcaccgattggaagcaacccaagacagtcactcaaattcgcagtttcttaggtttggcaggatactaccggagattcatcgagaatttctccaaaatcgctcggcccatgacacaattgttgaagaaagaagagaaatttgtgtggagcccgcaatgcgagaaggcattccaaactctcaaagaaaagctggtttcctcgccagtgttaatcttgccggatactcgcaaggatttcatggtgtactgtgatgcttcgcgccaaggattggggtgcgtgctcatgcaggatggtcatgtggtggcctatgcctcacgccagctacggccccatgaaggcaactaccctacccatgatttggagttagcagcggtggttcatgctctaaaaatctggcggcactatctcattgggaatcgctgtgaaatatatactgatcataagagtttgaaatacatcttcacccagtcagatctgaatcttcggcaaaggagatggttagaactcatcaaggattatgatgtgggaattcactatcatcctggtaaggccaacgtggttgccgacgctctaagccggaaaagccattgcaacactcttaacgcccgaggcattccacccgaacttaatcaacagatggaagccctgaacctaagcatagtgggtcgtggattcttagctgcgttggaagccaagcccaccttgctcgatcaaatccgcgaggctcagaagaatgatccggacatgcatggactcctcaagaatatgaaacagggtaaagctgctggtttcacagaagatgaacacggaaccttatggaacggaaatcggcgtgtcaaggcagagcaccaacgaccggccggacttctccaacctctccaagtaccagaatggaaatgggatgaaattgggatggatttcatcaccggacttccaaaaacccaaggtggatatgattctatatgggtagttgtggatcgattaaccaaggtagctcgatttattcctgtgaagaccacctatggagggaacaaactagccgagctctacttcgctaggatcagtcaaactgcaggcatggagttgggaacccggctgaatttcagcaccgcgtatcacccgcagacagatggacagaccgagcgtctaaatcagatcctcgaagatatgcttcgcgcatgtgtcctagatttcgggaagacttgggataagagtctcccctatgccgagttctcctacaataacagctatcaagccagcatacaaatggcaccctatgaagcgttgtacgggcgcaaatgccggacaccgctattgtgggaccaagttggggaaagtcaagtgttcgggactgatatcctgagagaagctgaagctaaagtcagaatcattcgggataatctaaaggtggcacagtcccggcagaaaagttatgcggataaccgtcgccgtgacctggaattcgcagtgggtgattttgtatatcttcgggtcacgccattgcgaggtgtacataggtttcagacaaaggggaagctcgcacctcggtatgtgggtcctttccgcatcattgctcggcgtggagaagtcgcttaccagctggagctgcccgcctccttgggcaacgtgcatgatgtgtttcatgtgtctcaactcaagaaatgtcttcgagtgccatccgagcaggccgactcagagcaaattgaagttcgcgaagatttgacctacgtggagaggccaatgaaaatcctggacaccatggagcgcaggaccaggaaccgggtaatccgtttttgcaaggtccagtggagcaatcacgccgaagaagaagctacttgggagcgcgaagacgagcgtcgtcatcgtcttcccgaaccgcgccgccgccttcttccgcttcggccgccattctcgtcgtcgtcgttgtcccggggtgagccgaagaccgccgttcgccttccccctttcctcctctttctcgggtgccactccgccgcgccgttggtcgccggcggcgaccatcggggcgcgggtgcgcgccgttcccgtcggccgcgccggcgaggccgccctcgggcgcgccctcgcggctaccaagtgggcccggcagtcagccgcccgcgcccgcgggttcggctgacgcgcgggacccacggcgccgaccgccgccagccgcgtgcgcccggtccaccgtggaccgagcggcttgttcaccctagaataaacaaaaccccaactagtggacactctattcat

SEQ ID NO: 86238 - DNA, 9826 bp, Oryza sativa
  Clone ID: PAT_MRT4530_85298C.1
atggttatgccgatggtgacgaccaggagaaatgctgccaccgatgatggcaaccaacctgagggcagcaaccacaacaaccatggcagcccacctccacctcctcctccgcctccaccaccaccaccagataccaacgccattctcacccaaatcctcgcccagcaggccaacatgatgactgctttcctccaccacctccaaaatccgccacaacataatgctccaccaccacccccacaacactctaaactcgccgagttcctccgcatccgcccacctaccttctctaactccaacaaccccgtggatgcgttggattggttgcatgcagtggggaaaaagcaagacactgtgcagtgcagcgatgaggagaaagtcatcttcgccgcccaccagctgcaggggcccgcatctctatggtgggaccatttccaggctacgcagccagagggacagcctattacttgggctcgcttcaccgccgctttccggagaacccatgtgcccgccggagtcgtggcccttaagaaaagagaattccgagagttgaagcaaggcaaccactccgtgatggagtatttgcatgagttcaacaacctggcccgttacgccccggaggatgtgcgggaagatgaggagaagcaagagaagttcttggcaggaatggaccctgagctgtccgtccgtctagtctccggggactatccggatttccaacgtctggtggacaagagcatccgcttggaagccaagcacaaggaactggagtcgcacaagcgccgcttggcgaatttccgcaatcaacagggtgctaaccaaagggtccactacaccaatccctatccagggggatcctcctcgcagcagcaacaacaacagcagcaacctcgctccgcgcctcgacctcaattcgtggtgcgcgtcccacagccgcagcagcagcagaatcaacaagggactcgtgcgccccgtcctcctacgctagccgtgcagcctggtcaaggccgcagggacgctcaaggtcagcagcgtctgtgcttcaactgctacgagcccgggcactttgcggataaatgcccgaagccgaggcgccagcaaggccaagcgcctccccgctccaacaacggtggtaaggatgtcattcggggtcgtgtgaaccacgtgacggccgaggacgtgctgacaactccagacgtcatcgttggtacgttcctcattcattccatccctgctaccattttgtttgactctggagcttcccactcgtttatatctgtgccattcgtggggagaaatcagttgagggtagaaaggcttaggaaccctctgctcatcaccacccctggaggggttatgacagcaaagtattatagccctgccgtccctatagaaattcaggggattccttttccctcggatctgattctgctagacaccaagaacttggatgtgatccttgggatgaattggttggctcaattccaaggagtagtgataggactgtcagaaatccccatcgtcagagagttcggcgacgtgtttccggaagaactactcggtatgctgcccaagcgagagattgagttccggatagatcttgctccaggaaccactccgctgtacaagcgaccctaccgtatggcagcaaatgaactggccgaagtcaagaaacagttggaagagttgaaagaaaaggggtatatacgtccgagtacttccccctggggtgctcctgtgatttttgtggagaagaaagacaagacgaagaggatgtgcattgactacagagctctcaatgaagtcaccatcaaaaacaagtaccctcttccccggatcgatgatctgttcgatcagcttaaaggtgccacggtattctccaagatcgatcttcgttccggatatcaccaattacgcattcgtgaagaagatattcctaagaccgcattcaccacgcgatacggactgtatgaattcacggtgatgtcgttcggtttaaccaatgcacctgccttcttcatgaacttaatgaacaaagtgttcatggaatacttggataagtttgttgtggttttcattgatgacattctgatatactcacaatcagaggaagaccatcagcaccatctccgtctggtgttgggaaagttgcgggaacatcaattgtatgccaaacttagcaagtgtgagttctggttgtccgaagtcacattcttagggcacgtgatatctgctaaaggagttgctgtggaccccgaaacagtgaccgccgtcactgattggaagcaacccaagacagtcactcaagttcgcagtttcttaggtttggcaggatactaccggaggtttatcgagaacttctccaaaatcgctcgacccatgacacagttgttgaagaaagaagagaaatttgtgtggagcccgcaatgcgagaaggcgttcaaaactctcgaagaaaagctggttgcctcgccagtcttaatcttgccggatactcgcaaggatttcatggtgtattgtgacgcttcgcgccaaggattggggtgcgtgctcatgcaggacggtcatgtggtggcctatgcctcacgccagctacggcctcatgaaggcaactaccctacccatgatttggagttagccgcggtggttcatgctctaaaaatctggcggcactatctcattgggaatcgctgtgaaatatatactgatcataagagtttgaaatacatcttcactcagtcggacctgaatcttcggcagaggagattgttagaactcatcaaggattatgatgtgggaattcactatcatcttggtaaggccaacgtggttgccgacgctctaagtcgaaaaagccattgcaacactcttaacgtctgtggcattccacccgaacctaaccaacagatggaagccctgaacctaagcatagttagtcgtggattcttggctacgctggaagccaagcctaccttgctcgatcaaatccgcgaggctcagaagaatgatccggacatgcatggactcctcaagaatatgaaacagggtaaagccgctagtttcacagaggatgaacacggaaccctatggaacggaaaccgggagaaatattggtgggttagtatgaagcgggaaattgcagagttcgtggccctctgtgatgtgtgccagtgtgtcaaggcagagcaccaacgaccggccggacttctccaacctctccaagtaccagaatggaaatgggatgaaattgggatggattttatcaccggacttccaaaaacccaaggcggacatgattctatatgggtagtcgtggatcgactaaccaaggtagcacggttcattcccgtaaagaccacctatggagggaacaaactagctgaactctacttcgctaggatcgtaagtctgcatggcgtccccaagaaaattgtatctgatcggggaagccagttcacctctcacttttggaagaagctccaagaagagctgggtacccgattaaatttcagcaccgcgtatcacccgcagacagatgggcagaccgagcgtctaaatcagatcctagaagatatgctttgcgcatgtgtcctagatttcgggaagacctgggataagagtctcccctatgccgagttctcctacaataacagttatcaagccagcatacaaatggcaccttatgaagcgttgtatgggcgcaaatgccggacaccgctcttgtgggaccaagttggggaaagccaagtgttcgggactgatatcctgagagaagctgaagctaaagtcagaaccatttgggataatctaaaggtggcacagtcccggcagaaaagttatgaaaataaccgtcgccgtgacctggaattcgcagtgggtgactttgtgtatcttcgggtcacgcccttgcggggtgtgcacaggtttcagacaaaggagaagctcgcacctcggtatgtgggtcctttccgtatcattgctcggcgtggagaagtcgcttaccagttggagctgcccgcctccttgggcaacgtgcacgatgtgttccatgtgtcgcaactcaagaaatgtcttcgagtgccatccgaacaggccgactcagaccaaattgaagtttgcgaagacttgacctacgtggagaggccagtaaaaatcctggacaccatggagcgcaggaccaggaaccgggtaatccgtttttgcaaggtccagtggagcaaccacgccgaagaagaagctacctgggagcgcgaagacgagctgaaggcagcccatcccgatctcttcgccaggccgccgccggcgaccataggggcgcgggcgcgccgcctcccgtcggccgtgtcggcgaggccgccttcgggcgcgccccgcggctgccaggtggggcccggccgtcagccgcccgcgccctcggcacctcggccatttaaggaccggtcttcgggcctctgttgcaaagcactaccgtacttccacatgtctagtggggcaaatgaaggctacacgagctgcggcccggtagtcgagatgtcatggcacagggccggtgtcctgctgctaggggctcagtcctgcctgcctgtcccgggggttccggccgtaggtgggattgggtcgatgtacacctctgatcagagtataatctattcgaatagccgcgccctcggttatgggcaagccgagcaatgtacccaaatggccggcagcgtcacccgtcgtggtttgagcatgactggcttcgtcttggagctgcggggcatgtgcgtggtcctggggtatccacatggagtggactaccaggccaggccgcttccggagcaggagggtgacgacgcagagccccacgctggttgggaggtcactgcagtgatcctctctggctctcccgagcggacttcgctggcagtcaccgcgggtggagattctttccccgccgcttgccagaacgccgctctcctcgccatcggcactcttcaccagcgctacccggacgagttgcagcactcgccctaccgctaccaccctcgccacgaaggagcccgcgactacgccaccttccgagatgctagctcggaggatgacgctactatcgtgcacctggcgcgcatggtggaggcgtacgacgtggctcgtatcgacttccatcagatggtgcgccgtgggatggtcgagaacaacatgaagatcctggagctgcgtcaggagaacctgcagctcaagaaggacttagacgcggtggaggcgcagctgcatcagctcaagatcgcccagggagaggtctgccgccccaagcgtcgccgcgtctgccgcagccagaagatcaccgcccgcaagagcacctccaggcccgagcttgttcgtcagtccctggcgtggacctgcttcatggagacccctcgtgccgagcccgcgcccgtggttccccaggagggggaagcctccggcgttggtagcacggaggatgcgctgttgctcaccttccatggtgacgaccaggagaaatgctgccaccggtgatggcaaccaacctgaaggcagcaaccacaaccaccaaggcaacccacctccacctcctcctccgcctccaccaccaccaccagacaccaacgccattctcacccaaatcctcgcccagcaagccaacatgatgactgctttcctccaccacctccaaaatccgccacaacataatgctccaccaccacctcccgaacactctaaactcgctgagttcctccgcatccgtccacctaccttctctagctccaacaaccccgtggatgcgttggattggttgcatgccgtggggaaaaagttagacaccgtgcagtgcagcgatgaggagaaagtcatcttcgccgcccaccagctgcaggggcccgcatctctatggtgggaccattttcaggctacgcagccagaagggcagcctattacttgggctcgcttcaccgccgctttccggagaacccatgtgcccgccggagtcgtggcccttaagaaaagggaattccgagagttgaagcaaggcaaccgctccgtgatggagtatttgcatgagttcaacaacctggcccgttacgccccggaggatgtgcgggaagatgaggagaagcaagagaagttcttggcaggaatggaccccgagctgtccgtccgtctagtctctggggactatccggattttcaacgtctggtggacaagagcatccgcttggaagccaagcacaaggaactggagtcgcacaagcgccgcttggcgaatttccgcaatcaacatggtgctaaccaaagggtccgctacaccaatccctatccagggggatcctcctcgcaacagcaacaatagcagcagcaacctcgctccgcgcctcgacctcaattcgtggtgcgcgtcccacagccgcagcagcagcagaatcaacaagggactcgtgcgccccgtcctcctacgccaactgtgcagcctggtcaaggccgcagggacgctcaaggtcagcagcgtctgtgcttcaactgcttcgagcccgggcactttgcggataaatgcccgaagccgaggcgtcagcaaggccaagcgcctccccgctctagcaatggtggtaaggatgtcattcggggtcgtgtgaatcacgtgacggccgaggacgtgctgacaactccagacgtcatcgtcggtacgttcctcatacattccatccctgctaccattttgttcgactctggagcttcccactcgtttatatctgtgccattcgtggggagaaatcagttgggggtagaaaggcttaggaaccctctgctcatcaccacccctggaggggttatgacagcaaagtattatagctctgccgtccctatagaaattcaggggattccttttccctcggatctaattctgctagacaccaagaacttggatgtgatccttgggatgaattggttggctcaattccaaggagtaatggattgcgcgagacgcactgtcactctgtaccgagggccggaacaaccagttgttttctttgcacccccaacctctgtcaaaagttcagaacttcatcagataggactgtcagaaatccccatcgtcagagagttcggagatgtgtttccggaagaactacccggtatgccgcccaagcgagagattgagttccggatagatcttgctccaggaaccactccgttgtacaagcgaccctaccgtatggcagcaaatgaactggccgaagttaagaaacagttggaagagttgaaagaaaaggggtatatacgtccgagtacttccctctggggtgctcctgtgatttttgtagagaagaaagacaagacgaagaggatgtgcgtcgactacagagctctcaatgaagtcaccctcaaaaacaagtatcctcttccccggatcgatgatctgttcgatcagcttaaaggtgccactgtattctccaagattgatcttcgttccggatatcaccaattacgtattcgtgaagaagatattccgaagaccgcattcaccacgcgatacggactgtatgaattcacggtgatgtcattcggtctaactaatgcacctgccttcttcatgaacttaatgaacaaagtgttcatggaatacttggataagtttgtcgtggttttcattgatgacattctgatatactcacgatcagaggaagaccatcagcaccatccccgtctggtgttgggaaagttgcgtgaacatcaattgtatgccaaacttagcaagtgtgagttctggttgtccgaagtcaaattcttagggcacgtgatatctgctaaaggagttgccgtggaccccgaaacagtgaccgccgtcactgattggaagcaacccaagacagtcactcaagtccgcagtttcttaggtttggcaggatactaccggaggttcatcgagaacttctccaaaatcgctcgacccatgacacagttgttgaagaaagaagagaaatttgtgtggagcccgcaatgcgagaaggcgttccaaactctcaaagaaaagctggtttcctcgccagtgttaatcttgccggatactcgcaaggatttcatggtgtattgtgacgcttcgcgccaaggattggggtgcgtgctcatgcaggacggtcatgtggtggcctacgcctcacgccagctacgacctcatgaaggcaactaccctacccatgacttggagttagccgcggtggttcatgctctaaaaatctggcggcactatctcattgggaatcgctgtgaaatatatactgatcataagagtttgaaatacatcttcacccagtcggatctgaatcttcggcaaaggagatggttagaactcatcaaggattatgatgtggggattcactatcatcctggtaaggccaacgtggtcgctgacgctctaagtcgaaagagccattgcaacactcttaacgtccgtggcattccacccgaacttaatcaacagatggaagccctgaacctaagcatagttggtcgcggattcttggctgcgttggaagccaagcctaccttgctcgatcaaatccgcgaggctcagaagaatgatccggacatgcatggactcctcaagaatatgaaacagggtaaagccgctggtttcacagaggatgaacacggaaccctatggaacggaaagcggcgtgtcaaggcagagcaccaacgaccggccggacttctccagcctctccaagtaccagaatggaaatgggatgaaattgggatggatttcatcaccggacttccaaaaacccaaggtggatatgattctatatgggtagttgtggatcgattaaccaaagtagctcgatttattcctgtgaagaccacttatggagggaacaaactagccgagctctacttcgctaggattgtgagtctccatggcgttcccaagaaaattgtatctgataggggaagccaattcacctctcacttttggaagaagctccaagaagagctgggtacccgattaaatttcagcaccgcgtatcacccgcagacagatggacagaccgagcgtctaaatcagatcctagaagatatgcttcgcgcatgtgtcctagatttcgggaagacctgggataagagtctcccctatgccgagttctcctacaataacagctatcaagccagcatacaaatggcaccttatgaagcgttgtatgggcgcaaatgccggacaccgctattgtgggaccaagttggagaaagccaagtgttcgggactgatatcctgagagaagctgaatctaaagtcagaatcattcgggataatctaaaggtggcacagtctcggcagaaaagttatgcagataaccgtcgccgtgacctggaattcgcagtgggtgattttgtgtaccttcgggtcacaccattgcgaggtgtacacaggtttcagacaaaagggaagctcgcacctcggtatgtgggtcctttccgtatcattgctcggcgcggagaagtcgcctaccagttggagctgcccgcctccttgggcaacgtgcatgatgtgtttcatgtgtctcaactcaagaaatgccttcgagtgccatccgagcaggccgactcagagcagattgaagttcgcgaagacttgacctatgtggagaggccagtgaaaatcctggacaccatggagcgcaggaccaggaaccgggtaatccgtttttgcaaggtccagtggagcaaccacgctgaagaagaagctacctgggagcgtgaagacgagctgaaggcagcccatcccgatctcttcgtcagtccttccgaatctcggggtcaagattccgtt

SEQ ID NO: 86239 - DNA, 270 bp, Oryza sativa
  Clone ID: PAT_MRT4530_85299C.1
atggtggataagtgcgacatcacactcgtgccttcacgggtgaagttagacgatccgaatcccaagtcagggcagtttgcactgtcccacccactgcagtccgggctcttcctccaccgccggcgccgcaagatgcaaggcggccgtcggggtctctggagatctcctactcaagaccccttgctgtgcaaggcatctaagaggggttctgcagcagtgagcagcgggcacgaggaggcagggagattggtggcatggatgctaaggtag

SEQ ID NO: 86240 - DNA, 588 bp, Oryza sativa
  Clone ID: PAT_MRT4530_8529C.1
atgtgggtcccacttatcatactcctcttcctccctctcctctctcttctctcttaccgagcagcgcacaggggcggggaggtgggcggcggcgtggtgatgggcaatgggctggaggaggcgcggtgctggcacctgcgggcggtggtgttggcggtggagggtgccaccgggcggcggctacacgccgcagaggccgagctggggctcgccgccgatgaggggatcgacgaggcggaactacggcttgtagaagatcgggtcatagacaatgacccaaccgtggccggagccaaggcagttgctcctttcagggaggagcatggccaacctctcgtggagcgcggtggagatcctcggggacagcaaccatgcgttgtggcgattccgccagccgcccgcggctgcctggcgctggatctaaaatcgatgaaaaaaacaacaaacaatatttcttacatgatagaaaagggagatcttagatctaaatcaataaaaaaagcaacaaccagtaattcttacatgatggaaaatggatatcttagatctaaaccgatgaaaaaactacaaccagtgatacttacatga

SEQ ID NO: 86241 - DNA, 206 bp, Oryza sativa
  unsure (1)..(206): unsure at all n locations
  Clone ID: PAT_MRT4530_852C.1
cgcgaacgctgtaagagataagtcgagagaaccctgngccgtcgccgacgactggggctcgccggcggggcgcgcgtggtgctcttcgtcgtggngngggcggcggctgnggctctaantgccgccgccgatcaattcttcaccatttcaggtgcgccgtttggccgganttnnngnnaccgaggtaccatnttnatttccatcct

SEQ ID NO: 86242 - DNA, 5431 bp, Oryza sativa
  Clone ID: PAT_MRT4530_85300C.1
atggatgaagtcgggggtcgatggacattctccagggcaaatgaaggctacacgagctgcggcccgatggccggcagcgtcacccgtcgtggtttggacatgactggcttcgtcttggagctgcggggcatgtgcgtggtcttggggtatccacatggagtggattaccaggccaggccgctcccggagcaggagggtgaggatgcagagcctcacgctggttgggaggtcactgcagtgatcctctccggctctcccgagcggacttcgctggcagtcaccgcgggtggggattccttccccgccgcttgccagaacgccgctctcctcgccatcggcacccttcaccagcgctacccggacgagttgcagcactcgccctaccgctaccaccctcgtcgcggaggagcccgcgactacgccaccttccgagacgccagctcggaggatgacgctaccgtcgtgcatctggcacgcatggtggaggcgtacgacgcggctcgtatcgacttccaccagatggtgcgccgtggcatggtcgagaacaacctgaagatcttggagctgcgtcaggagaatctgcagctcaagaaggacctcgacgcgttggaggcgcagctgcatcagctcaagatcgcccagggagaggacagccgccccaagcgtcgccgcgtctgtcgcagccagaagatcaccgcccgcaagagcacctccaggcccgagcttgttcgtcagtccctggcgtggacctgcttcgtcgagacccctcgtgccgagcctgcgcccgtggttccccaggagggggaagcctccggcgttggtagctcggagggtgcgctgttgctcaccttccgtcctggcccgtcgcagcgctctccttctctgtttgctggttctgtgtggggttttcagatggtgacgaccaggagaaatgttaacaccggtgaaggcaaccaacccgaaggcagcaaccccaaccaccaaggcaatccacctccacctccacctccgcctccaccaccaccaccagacaccaacgccattctcacccaaatcctcgcccaacaagccaacatgatgaatgctttcctccaccacctccaaaacccgccacaacagaatgctccaccaccccctccccaacactccaaactcgccgaattcctccgtatccgcccacccaccttctctagctccaacaatcccgtggatgcgttggactggttgcatgccgtggggaagaagctagacacggtgcagtgcagtgatgaggagaaagtcgtcttcgccgcccatcagctgcagggacccgcatctctatggtgggaccatttccaggctgcgcagccagaggggcagccgattacttgggctcgcttcaccgccgctttccggagaacccatgtgcccgctggagtcgtggctcttaagaaaagggaattccgggagttgaagcaaggcaaccgctccgtgatggagtatttgcatgagttcaacaatctagcccgttatgccccggaggatgtgcgggaagatgaggagaagcaggagaagttcttggcgggaatggaccctgagctgtccgtccgtctagtctctggggactatcctgattttcaacgactggtggacaagagcatccgcttggaagccaagcacaaggagctggaatcgcacaagcgccgcttggcgaatttccgcagtcagcagggtgctaaccagagggtccgctacaccaatccctatccagggggatcctcctcgcagcagcagcagcagcagcaacctcgcccagcgcctcgacctcaattcgtggtgcgcgtcccacagccgcagcagcaacagaatcagcaagggactcgtgcgccccgtcctcctacgccagctgtgcagcctggtcaaggccgcagggacgctcaaggtcagcagcgtctgtgcttcaactgcttcgagcccgggcactttgcggataaatgcccgaagccaaggcgtcagcaaggccaagcgcctccccgctccaacaacggcgggaaggatgtcattcggggccgtgtgaatcatgtgacggccgaggacgtgctgacaactccagacgtcatcgttggtacgttcctcgttcattccatccctgctaccattttgttcgactctggagcttcccactcgtttatatctgtgccattcgtggaaaaaaaatcagttgggggtagaaaggcttagaaaccctctgctcatcaccacccctggcggggttatgacggcaaagtattatagccctgccgttcctatagaaattcaggggattctttttccctcggatctgattctgttagacacaaagaacttggatgtgattcttgggatgaattggttggctcaattccaaggggtagtggattgcgcgaggcgcactgtcactctgtaccgaggaccagaacaaccggttgttttctttgcacctccaacctctgtcagaagttcagaactgcatcagataggtctgtcagaaatccccatagtcagagagttcggagacgtgtttccggaggaactacctggtatgccgcccaagcgagaaattgagttccggatagatcttgctccaggaaccactcctctgtacaagcgaccctaccgtatggcagcaaatgaactggccgaagttaagaaacagttggaagagttgaaagaaaaggggtatatacgtccgagtacttccccatggggtgctcctgtgatttttgtagagaagaaagacaagacgaagaggatgtgcgttgactacagagctctcaatgaagtcaccatcaaaaacaagtaccctcttccccggatcgatgatctattcgatcagcttaaaggtgccactgtattctccaagattgatcttcgttccggatatcaccaattacgtattcgtgaagaagatattccgaagaccgcattcactacgcgatatggactgtatgaattcacggtgatgtcgttcggcttaaccaatgctcctgccttcttcatgaacttgatggacaaagtgttcatggaatacttggataagttcgttgtggttttcatcgatgatattctgatatactcacaatcagaggaagaccatcagcaccatctccgcctggtattgggaaagttgcgggaacatcaattgtatgccaagcttagcaagtgtgagttctggctgtccgaagtcaaattcttggggcacgtgatatctgctaaaggagttgctgtggatcccgaaacagtgaccgccgtcaccgattggaagcaacctaagacagtcactcaaattcgcagtttcttgggtttggcaggatactaccggagattcatcgagaacttctccaaaatcgctcgacccatgacacagttgttgaagaaagaagagaagtttgtgtggagcccgcaatgcgagaaggcgttccaaactctcaaagaaaagctggtttcctcgccagtgttaatcttgccggatactcgcaaggatttcatgatgtactgtgatgcttcgcgccaaggattggggtgcgtgctcatgcaggacggtcatgtggtagcctatgcctcacgtcagctacgacctcatgaaggcaactaccctacacatgacttggagctagcagcggtggttcatgctctaaaaatctggcggcactatctcattgggaatcgctgtgaaatatatactgatcacaagagcttgaaatacatcttcactcagtcggacctgaatcttcgacaaaggagatggttagaactcatcaaggattatgatgtgggaattcactatcatcccggcaaggccaacgtcgtcgccgacgctctaagtcgaaaaggccattgcaacactctcaacgtccgaggcattccacccgagcttaatcaacagatggaagccctgaacctaagcatagttggtcgcggattcttggctgcgttagaagccaagcctaccttgctcgatcaaatccgcgaggctcagaagaatgatccggacatgcatggactcctcaagaatatgaaacagggtaaagccgctggtttcacagaagatgaacacggaaccttatggaacggaaagcgggtgtgcgttcccgataatagagaacttaaacagctgatacttcaggaagctcacgaaagtccttattccattcatccgggcagtaccaagatgtacttagacttgaaggagaaatactggtgggttagcatgaagcgggaaattgcagagtttgtggctctatgtgatgtgtgccagcgtgtcaaggcagaacaccaacgaccggccggacttctccaacctctccaagtgccggaatggaaatgggatgaaattgggatggatttcatcaccggcctcccaaaaacccaaggtgggtatgattctatatgggtaatagtggatcgattaaccaaggtagctcgattcattcatgtgaagaccacctatggagggaacaaactagcggagctctacttcgctaggatcgtgagtctccatggcgttcccaagaaaatcgtatctgataggggaagccaattcacctctcacttttggaagaagctccaagaagagctgggtactcgattgaatttcagcaccgcatatcacccgcagacagatggacagaccgagcgtctgaatcagattctagaagatatgctccgcgcatgtgtcctagacttcgggaagacttgggataagagtctcccctatgccgagttctcctacaataacagctatcaagccagcatacaaatggcaccctatgaagcgttgtacgggcgcaaatgccggacaccgctattgtgggaccaagttggagaaagtcaagtgttcgggactgatatcctgagagaagctgaagctaaagtcagaatcattcgggataatctaaaggtggcacagtctcggcagaaaagttatgcagataaccgtcgtcgtgacttggaattcgcagtggatgactttgtgtatcttcgggtcacgccattgcgaggggtgcacaggtttcggacaaaagggaagctcgcacctcggtatgtgggtccctttcgtatcactgctcgacgcggagaagtcgcctaccagctggagttgcccgcctccttgggcaacgtgcatgatgtgttccatgtgtcgcaactcaagaaatgtcttcgagtgccatccgagcaggccgactcagagcaaattgaagttcgcgaagacttgacctacgtggagaggccagtaaaaatcctggacgccatggagcgcagaaccaggaaccgggtaatccgtttttgcaaggtccagtggagcaaccacgccgaagaagaagctacttgggagcgcgaagacgagctgaaggcagcccatcccgatctcttcgccagttcttccgaatctcggggtcgagattccgtttaa

SEQ ID NO: 86243 - DNA, 6082 bp, Oryza sativa
  Clone ID: PAT_MRT4530_85301C.1
atggagccgagatcgccgcgccggtttccttcccctccggccgccctctctcactcccaacactatttaagcactccctgtgcctccctcctccgtttccgacccttgccgctttctttccccgtcggaatcgagctcgcgccgtcgtcctctctctccgccgtcgccgccgagcttcggttcgccgccgtcgtcgccccggacctcctcccgcttcggcatcgcctcctttggcttcgccgcgtcctcgtcgacctcgtccaccccttcgtttcgcccgccgaccgccggaacgccgccgtcctcgtcgacccgagccgcgccgccgcctctctccgcttcggtcgccgttcccgtcgtcgcagtcgacccggggtgagccgaggaccgccatttcgcttcccccttccctcccctctctcgggcgccgctccgtcgcgccggaggtcgccgccggtgaccatcggggcgcgggcgcgccgcctcccgtcggccgtgccggcgaggccgccttcgggcgcgccctgcggctgccatgtggggcccggccgtcagccgcccgcgccctcgggtgcggctgacgcgtgggacccacggcgccggccggcgcaagccgcgtgcacccggtccaccgtggaccgtgaggctgccgcgtgggccccactcccgtggacccgggcaaatgaaggctacacgagctgcggcccggtagtcgagatgtcatggcacagggccggtgtcctgctgctaggggctcagtcctgcctgcctgtcctgggggttccggccgtaggtgggattgggtcgatggccggcagcgtcacccgtcgtggtttggacatgactggtttcgtcttggagctgcggggcatgtgcgtggccctggggtatccacacggagtggactaccaggccaggccgcttccggagcaggagggtgacgatgcagagccccacgctgcttgggaggtcactgcagtgatcctcgctggctctcccgagcggacttcgctgacagtcaccgcgggtggagactctttccccgccgcttgccagagcgccgctctcctcgccatcggcactcttcaccagcgctacccggacgagttgcagcactcgccctaccgctaccaccctcgtcgcggaggagcccgcgaccacaccaccttccgggatgctagctcggaggatgacgctaccatcgtgcacctggcgcgcatggtggaggcgtacgacgcggctcgtatcgacttccatcagatggtgcgccgtgggatggtcgaggacaacctgaagatcctggagctgcgtcaagagaacctgcagctcaagaaggacctggacgcagtggaggcgcagctgcatcagctcaagatcgcccagggagagatctgccgccccaagcgtcgccgcgtctgccgcagcctgaagatcaccgcccgcaagagcacctccaggcccgagcttgttcgtcagtccctggcgtggacttgcttcgtcgagacccctcgtgccgagcccgcgcccgtggttccccaggagggggaagcctccggcgttgatggtgatgaccaggagaagtgctaacaccggtgatggcaaccaacctgaaggcagcaaccacaaccatcagggcaacccacctccacctcctcctctgcctccaccaccaccaccagacaccaacgccattctcacccaaatcctcgcccagcaggccaacatgatgactgctttcctccaccacctccaaaatccgccacaacttaatgctccaccaccacccccacaacactctaaactcgccgagtttctccgcatccgcccacctaccttctctagctccaacaaccccgtggatgcgttggattggttgcatgccgtggggaaaaagctagacactgtgcagtgcagcgatgaggagaaagtcatcttcgccgcccaccagctgcagggacccgcatctctatggtgggaccatttccaggctacgcagccagagggacagcctattacatgggctcgcttcaccgccgctttccgaagaacccatgtgcccgccggagtcgtggcccttaagaaaagggaattccgagagtggaagcaaggcaaccgctccgtgatggagtatttgcacgagttcaacaacctggcccgttacgctccggaggatgtgcgggaagatgaggagaagcaagagaagttcctggcaggaatggaccctgagctgtccgtccgtctagtctccggggattatccggatttccaacgtctggtggacaagagcatccgcttggaagccaagcacaaggaactggagtcgcacaagcgccgcttggcgaatttccgcaaccaacagggtgctaaccaaagggtccgctacaccaatccctatccagggggatcctcctcgcagcagcaacaacagcagcagcaacctcgctccgcgcctcgacctcaattcgtggtgcgcgtcccacagccgcagcagcagcagaatcaacaagggactcgtgcgccccgtcctcctccaccgactgtgcagcctggtcaaggccgcagggacgctcaaggtccgcagcgtctgtgcttcaactgcttcgagcccgggcactttgcggataaatgcccgaagccaaggcgtcagcaaggccaagcgcctccccgccccaacaacggtgttaaggacgtcattcggggtcgtgtgaaccatgtgacggccgaggacgtgctgacaactccagacgtcatcgttggtacgttcctcattcattccatccctgctaccattttgttcgactctggagcttcccactcgtttatatctgtgccattcgtggggagaaatcagttgggggtagaaaggcttagaaaccctctgctcatcaccacccctggaggggttatgacagcaaagtattatatccctgccgtccctatagaaattcaggggattccttttccctcggatctgattctgctagacaccaagaacttggatgtgatccttgggatgaattggttggctcaattccaaggagtagtggattgcgcgagacgcactgtcactctgtaccgagggccggaacaaccggttgttttctttgcacccccaacctcagtcagaagttcagaacttcatcagatagaactgtcagaaattcccatcgtcagagagttcggagacgtgtttccggaagaactacctggtatgccgcctaagcgagagattgagttccggatagatcttgctccaggaaccgctcctctgtacgagcgaccctaccgtatggcagcaaatgaactggccgaagttaagaaacagttggaagagctgaaagaaaaggggtatatacgtccgagtacttccccctggggtgctcctgtgatttttgtggagaagaaagacaagacgaagaggatgtgcgttgactacagagctctcaatgaagtcaccatcaaaaacaagtaccctcttccccggatcgatgatctgttcgatcagcttaaaggtgccactgtattctccaagattgatcttcgttccggatatcaccaattacgtattcgcgaagaagatattccgaagaccgcattcaccacgcgatacggactgtatgaattcacggtgatgtcgttcggtttaaccaatgctcctgccttcttcatgaacttaatgaacaaagtgttcatggaatacttggataagtttgtggtggttttcattgatgacattctgatatactcacaatcagaggaagaccatcagcaccatctccgtctggtattgggaaagttgcgggaacatcaattgtatgccaaacttagcaagtgtgagttctggttgtccgaagtcaaattcttagggcacgtgatatctgctaaaggagttgctgtggaccccgaaacagtgaccgccgtcaccgattggaagcaacccaagacagtcactcaagttcgcagtttcttaggtttggcaggatactaccggagattcatcgagaacttctccaaaatcgctcgacccatgacacagttgttgaagaaagaagagaaatttgtgtggagcccgcaatgcgagaaggcgttccaaactctcaaagaaaagctggtttcctcgccggtgttaatcttgccggatactcacaaggacttcatggtgtattgtgatgcttcgcgccaaggattggggtgcgtgctcatgcaggatggtcatgtggtggcctatgcctcacgccagctacggcctcatgaaggcaactaccctacccatgatttggagttagccgcggtggttcatgctctaaaaatctggcggcactatctcattgggaatcgctgtgaaatatatactgatcataagagtttgaaatacatcttcactcagtcggacctgaatcttcggcaaaggagatggttagaactcatcaaggattatgatgtgggaattcactatcatcctggtaaggccaacgtggttgccgacgctctaagtcgaaaaagccattgcaacactcttaacgtccgtggcattccacccgaacttaatcaacagatggaagccctgaacctaagcatagttagtcgcggattcttggctgcgctggaagccaagcccaccttgctcgatcaaatccgcgaggctcagaagaatgatccagacatgcatggactcctcaagaatatgaaacagggtaaagccgctggtttcacagaggatgaacacggaaccctatggaacggaaatcgagtatgcgttccagataacagagaacttaaacagttgatacttcaggaagctcacgaaagtccttattccatccaccctggcagcacgaagatctacttagacttgaaggagaaatactggtgggttagtatgaagcgggaaattgcagagttcgtggccctttgtgatgtgtgccagcgcgtcaaggcagagcaccaacgaccggccggacttctccaacctctccaagtacttgaatggaaatgggatgaaattgggatggatttcatcaccggacttccaaaaacccaaggtggatatgattctatatgggtagttgtggatcgattaaccaaggtagctcgattcattcctgtgaagaccacctatggagggaacaaactagccgaactctacttcgctaggatcgtaagtctccatggcgttcctaagaaaatcgtatctgataggggaagccaattcacctctcacttttggaagaagctccaagaagagctgggtacccgattaaacttcagcaccgcgtatcacccgcagacagatgggcagaccgagcgtctaaatcagatcctagaagatatgcttcgcgcatgtgtcctggatttcgggaagacctgggataagagtctcccctatgccgagttctcctacaacaacagctatcaagccagcatacaaatggcaccttatgaagcgttgtatgggcgcaaatgccggacaccgctaatgtgggatcaagttggggaaagccaagtgttcgggactgatatcctgagagaagctgaagctaaagtcagaaccattcgggataatccaaaggtggcacagtcccggcagaaaagttatgcagataaccgtcgccgtgacctggaattcgcagtggacgattttgtatatcttcgggtcacgccattgcgaggtgtacacaggtttcggacaaaagggaagctcgcacctcggtatgtgggtcctttccgtatcgttgctcgacgcggagaagtcgcttaccaattggagctgcccgcctccttgggcaacgtgcatgatgtgttccatgggtcgcaactcaagaaatgccttcgagtgccatccgagcaggccgactcagagcaaattgaagttcgcgaagacttgacctacgtggagaggccagtgaagatcctggacaccatggagcgcaggaccaggaaccgggtaatccgtttttgcaaggtccagtggagcaaccacgccgaagaagaagctacctgggagcgcgaagacgagctgaaggcagcccatccagatctcttcgccagttcttccgaatctcggggtcgagattccgtttaa

SEQ ID NO: 86244 - DNA, 608 bp, Oryza sativa
  Clone ID: PAT_MRT4530_85302C.1
cagcactggattttcagtttactggtccagttttcttggactataagataaggaaacacagcacgtttgattgaacaaatttataaaatatcctaaaatgtgttgcttgtgaaataaattgtttttcattagattttagaaacaacaaatagaatcataaaagggacagatgtcaaaatgagtcaagggagatgttatggaagaaaacttttatctgcccatctaaactattgcgatatatccactttactcccgaagtaaaatggctatataaagaataaaccaataaaccatctaaataaacccctaaggatagctccaaaagtggttgtcaccatggcacatcacaaggcagatgatgtggtgccggtaacaaattttcaaaaaaaaaaaaaactgttaatcaataaacactcctccgtgtgtacacatctttctcttccctgctgctgcccttctctatatatctgcagcaccgactagctacgtgtcattgatcttgatcttgctttcttaggaacaaatttgttggttaccatgttatgaattatgtcccatagtagcaaaatcattatagagagtgacctaggaagttttgcacagttcca

SEQ ID NO: 86245 - DNA, 12525 bp, Oryza sativa
  Clone ID: PAT_MRT4530_85303C.1
atattggaaggatataaagcagttgcagatccagcagaggaggagaagaaaagccaaagatctttgtcctctcaactcgaggctgtagcagacatgaaatttacatatgttgctacttgccagatatacggaaatctgaaacaagctggtgatcggcgtgcaacagatatcttgaacttgatggtgaattaccccggtctgcgtgtggcatacattgatgaagttgaagagagggatggtgacaaggtgaagaaggtcttttattcagttctagtaaaagctctcgacaatcatgatcaggaaatataccgtataaaattgccaggaccagcaaaattaggtgaagggaaacctgaaaaccaaaatcatgcgatcatttttacccggggtgaagccctccaaactattgatatgaaccaggacaactatttggaggaagctttgaaaatgcggaatttgctggaagaattcaacgaaaaccatggtgtccgtcaacccacgattcttggagtgcgtgagcacatatttaccggaagtgtgtcgtcacttgcatggtttatgtcgaaccaggagaccagctttgtgacaataggacagagggtcctagctaatccattaaaggtacgatttcactatggacatcctgatgtgttcgacaggatttttaacattacaagaggaggcattagcaaggcttcctgtggtataaatttaagtgaagacatttttgctggtttcaactcaacgctaagacgtggaaacgtcacccatcatgagtacatccaagtgggaaagtcgatggccggcagcgtcacccgtcgtggtttggacatgactggcttcgtcttggagctacggggcatgtgcgtggtcttagggtatccccatggggtggactaccaggccaggccgctcccggagcaggagggtgaggacgcggagccccacgctggttgggaggtcaccgccgtgatcctctctggctctcccgagcggacttcgctgacagtcaccgcgggtggagactccttccccgccgcttgccagagcgccgctctcctcgccatcggcactcttcaccagcgctacccggacgagttgcagcactcgccctaccgctaccaccctcgtcgcggaggagcccgcgactacgccaccttccgggatgctagctcggaggatgacgctaccatcgtgcacctggcgcgcatggtggaggcgtacgacgcggctcgtatcgacttccaccagatggtacgtcgcgggatggtcgagaacaatctgaagatcctggagctgcgtcaggagaacctgcagctcaagaaggacctcgacgcagtggaggcgcagctgcaccagctcaagatcgcccagggagagatctgccgccccaagcgtcgccgcgtctgccgcagccagaagatcaccgcccgcaagagcacctccaggcccgagcttgttcgtcagtccctggcgtggacttgcttcgtcgagacccctcgtgccgagcctgcgcccgtggttccccaggagggggaagcctccggcgttggtagcacggaggctctctctctgtttgcgggttctgtgtggggttttcagatggtgacgactaggagaaatgctgttaccggtgatggcaaccaacctgaaggcagcaaccacaaccaccagggcaacccacctccacctcctcctccgcctccaccaccaccaccagacaccaacgccattctcacccaaatcctcgcccagcaagccaacatgatgaatgctttcctccaccacctccaaaacccgccacaacagaatgctccaccaccacccccacaacactctaaactcgccgagttcctccgcatccgcccacctaccttctccagttccaacaaccccgtggatgcgttggattggttgcatgccgtggggaaaaagctagacacggtgcagtgcagcgatgaggagaaagtcgtcttcgccgcccatcagctgcaggggcccgcatctctctggtgggaccacttccaggctacgcagccagagggacagccgattacttgggctcgcttcaccgccgctttccgaagaacccatgtgcccgctggagtcgtggcccttaagaaaagggaattccgagagttgaagcaaggcaaccgctccgtgatggagtatttgcatgagttcaataacctggcccgttacgctccggaggatgtgcgggaagatgaggagaagcaagaaaagttcttggcaggaatggaccccgagctgtccgtccgtctagtctctggggactatccggacttccaacgactggtggacaagagcatccgcttggaagccaagcacaaggaactggagtcgcacaagcgtcgcttggcgaatttccgcaatcagcagggtgctaaccaaagggtccgctacaccaatccctatccagggggatcctcctcgcagcagcaacaacaacagcagcagcaacctcgccccgcgcctcgacctcaattcgtggtgcgcgtcccacagctgcagcagcagcagaatcagcaagggactcgtgcgccccgtcctcctacgccaactgtgcagcctgttcaaggccgcagggatgctcaaggtccgcagcgtctgtgcttcaactgcttcgagcccgggccctttgcggataaatgcccgaagccaaggcgtcagcaaggccaagcgcctccccgccccaacaacggtggtaaggacgtcattcggggtcgtgtgaatcacgtgacggccgaggacgtgctgacaactccagacgtcatcgttggtacgttcctcgttcattccatccctgctacaattttgttcgactctggagcttcccactcgtttatatctgtgccattcgtggggagaaatcagttgggggtagaaaggcttagaaaccctctgctcatcaccacccctggaggggttatgacagcaaagtattatagccctgccgtccctatagaaattcaggggattccttttccctcggatctgattctgttagacaccaagaacttggatgtgattcttgggatgaattggttggcacaattccaaggagtagtggattgcgcgagacgcactgtcactctgtaccgaggaccggcacaaccggttgttttctttgcacccccaacctctgtcagaagttcagaacttcatcagataggactgtcagaaatccccatcgtcagggagttcggagaagtgtttccggaagaactacctggtatgccgcccaagcgagagattgagttccgaatagatcttgctccaggaaccactcctctgcacaagcgaccctaccgtatggcagcaaatgaactagccgaagtaaagaaacagttggaagaattgaaagaaaaggggtatatacgtccgagtatttccccatggggtgctcctgtgatttttgtagagaagaaagacaagacgaagaggatgtgcgtcgactacagagctctcaatgaagtcaccataaaaaacaagtaccctcttccccggatcgatgatctattcgatcaacttaaaggtgccactgtattctccaagattgatcttcgttccggatatcaccaattacgtattcgtgaagaagatattccgaagaccgcattcaccacgcgatacgggctgtatgaattcacggtgatgtcgttcggtttgaccaatgcgcctgccttcttcatgaacttgatgaacaaagtattcatggaatacttggataagtttgttgtggttttcattgatgacattctgatatactcacaatcagaggaagaccatcaacaccatctccgtctggtgttgggaaagttgcgggaacatcaattgtatgccaagcttagcaagtgtgagttctggttgtccgaagtcaaattcttagggcacgtgatatctgctaaaggagttgctgtggatcccgaaacagtgaccgccgtcaccgattggaagcaacccaagacagttactcaagtccgcagtttcttacgacctcatgaaggcaactaccctacacatgacttggagttagccgcagtagttcatgctctaaaaatctggcggcactatctcattgggaatcgctgtgaaatctataccgaccataagagtttgaaatacatcttcacccagtcggatctgaaccttcggcaaaggagatggttagaactcatcaaggactatgatgtgggaattcactatcatcctggtaaggccaacgtggttgccgacgctctaagtcgaaagagccattgcaacactcttaacgtccgtggcattccacccgaacttaaccaacagatggaagccctgaacctaaacatagttggtcgtggatttttggccgcgttggaagccaagtccaccttgctcgatcaaatccgcgaggctcagaagaatgatccggacatgcatggactcctcaagaatatgaaacagggtaaagccgctggtttcacagaggatgaacacggaaccctatggaacggaaagcgggtatgcgttccagataacagagaacttaaacagctgatacttcaggaagctcacgaaagtccttattccattcacccgggcagtacaaagatgtacttagacttgaaggagaaatactggtgggttagcatgaagcgggaaattgcagagtttgtggccctgtgtgatgtgtgccaacgtgtcaaggcagagcaccaacgaccggccggacttctccaacctctccaagtaccagaatggaaatgggatgaaattgggatggatttcatcaccggacttccaaaaacccaaggtggatatgattctatatgggtagttgtggatcgattaaccaaggtagctcgatttattcctgtgaagaccacctatggagggaacaagctagccgagctctacttcgctaggatcgtgagtctccatggcgttcccaagaaattcgtatctgataggggaagccaattcacctctcacttttggaagaagctccaagaagagctgggtacccgattaaatttcagcaccgcgtatcacccgcagacagatggacagaccgagtgtctaaatcagatcctagaagatatgctccgcgcatgtgtactagatttcgggaagacctgggataagagtctcccctatgccgagttctcctacaataacagctatcaagccagcatacaaatggcaccttatgaagcgttgtatgggcgcaaatgccggacaccactattgtgggaccaagttggagaaagccaagtgttcgggactgatatcctgagagaagctgaagctaaagtcagaatcattcgggataatctaaaggtggcacagtcccggcagaaaagttatgcagataaccgtcgctgtgacctggaattcgcagtgggtgactttgtgtatcttcgagtcacgccattgcgaggtgtacacaggtttcagacaaagggaaagctcgcacctcggtatgtgggtcctttccgtatcattgcccggcgcggagaagtcgcttaccagctggagctgcccgcctccttgggcaacgtgcacgatgtgtttcatgcgtcgcaactcaagaaatgtcttcgagtgccatccgagcaggccgactcagagcaaattgaagttcgcgaagacttgacctacgtggagaggccagtgaaaatcctggacaccatggagcgcaggaccaggaaccggcccatcccgatctcttcgccagtccctccgaatctcggggtcgagattccgtttaaggggggtaggcgggcccgcccgccaccctcgctgacgggtggggcccacccgtcatcccctttctcgcgccgcgcccgccgccgcgcccgtgccctagcgccgccgccgccgccgaatccgccgcatcccgccgtccccgcgcgcattaaagagggggaaatcactccccgtgattccctcccttttttccccctctttcccctctctctctccctcggattcgtccgaaatcgcgcccgcgatcttcgccggcgtcatcaatggcggccgagatttccgcggccgattccttcccctccgggcgctctctccctctcccggcgctatttaatcgcttcccgagctccgctcctccgtttccgccgctcgccgctcactcttcccgtcggaatcgagcccgcgccgtcgttctctctctccgccatcgccgccgagctccggtcagtcgccgtcgtcgctccggacctcctcccgtttcggcgtcacccccttcggcttcgccgcgtcctcgccgaccccgtccgcccctccgcttcgctcgccgaccgccggaacgccgccgtcctcgtcgacccgagcccgcgccgccgtcgtcctccgctccggtcgccatttccgccgccctcgtcgtcccggggtgagccgtggaccgccgttcgctttccctcttccctcctctctctcgggtgccgctccgccgcgccgttggtcgccggcggcgaccatcggggcgcgggtgcgccgcctcccgtcggccgtgccggcgaggccgccttcgggcgcgcccgcggctgccaggtgggcccggccgtcagccgcccgcgcccgtgggtgcggctaacgcgtgggacccacggcgccggccgacgccagccgcgtgcgcccggtccaccgtgggccgtgaggctgccgcgtgggccccactcccgtggacccgcacctctgccatataaggaccggtcttcgggcctctgttgcaaagcactaccgtacttccacatgtctagtggggcaaatgaaggctacacgggctgcggttcggtagtcgagatgtcatggcacagggccggtgtcctgctgctaggggctcagtcctgcctgcctgtcccgggggttccggccgtaggtgggattgggtcgatggccggcagcgtcacccgtcgtggtttggacatgactggcttcgtcttggagctgcggggtatgtgcgtggtcttggggtatccacatggagtggactaccaggccaggccgcttccagagcaggagggtgaggatgcagagccccacgctggttgggaggttactgcagtgatcctctctggctctcccgagcggacttcgctggcagtcaccgcgggcggagattccttccccgccgcttgccaaaacgccgctcttctcgccatcggcactcttcaccagcgctacccggacgagttgcagcactcgccctaccgctaccaccctcgtagcggaggagcccgcgactacgccaccttccgagatgctggctcggaggatgacgctcccatcgtgcacctggcgcgcatggtgaaggcgtacgacgcggctcgtatcgatttccatcagatggtgcgtcgtgggatggtcgagaacaacatgaagatcctggagctgcgtcaggagaacctgcagctcaagaaggacctagacgcagtggaggcgcagctgcatcagctcaagatcgcccagggagaggactgccgccccaagcgtcgccgcgtctgccgcagccagaagatcaccgcccgcaagagcacctccaggcccgagcttgttcgtcagtccctggcgtggacctgcttcgtggagacccctcgtgccgagcccgcgcccgtggttccccaggagggggaagcctccggcgttggtagcacggaggctctttctctgtttgctggttctgtgtggggttttcagatggtgacgaccaggagaaatgctaacaccggtgatggcaaccaacccgaaagcagcaaccacaaccaccagggcaacccacctccacctcctcctccgccttcgccaccaccaccagacaccaacgccattctcacccaaatcctcgcccagcaagccaacatgatgactgctttcctccaccacctccaaaatccgccacaacataatgctccaccaccacccccacaacactctaaactcgccgagttcctccgcatccgcccacctaccttctcaagctccaacaaccccgtggatgcgttggattggttgcatgccgtggggaaaaagctagacacggtgcagtgcagcgatgaggagaaagtcatcttcgccgcccaccaactgcaggggcccgcatctctctggtgggaccacttccaggctacgcagccagagggacaacctatcacttgggctcgcttcaccgccgctttccgaagaacccatgtgcccgctggagtcgtggctcttaagaaaagggagttccgagagttgaagcaaggcaaccgctccgtgatggagtatttgcatgagttcaacaatctggcccgttatgccccagaggatgtgcgggaagatgaggagaagcaagagaagttcttggcaggaatggaccctgagctgtccgtccgtctagtctccggggactatccggatttccaacgtctggtggacaagagcatccgcttggaagccaagcacaaggaactggagtcgcacaagcgccgcttggcgaacttccgcaatcaacagggtgctaaccaaagggtccgctacaccaatccctacccagggggatcctcctcgcagccgcagcaacagcatcaacaacctcgctccgcgcctcgacctcaattcgtgcctggacaaggccgcagggacgcttcaggtccgcagcgtctgtgcttcaactgcttcgagcccgggcactttgcggataaatgcccaaagccgaggcgtcagcaaggccaagcgcctccccgctccaacaatggtgggaaggatgtcattcggggtcgtgtgaaccacgtgacggccgaggacgtgctgacaactccagacgtcatcgttggtacgttcctcattcactccatccctgctaccattttgttcgactctggagcttcccactcttttatatctgtgccattcgtggggagaaatcagttgggggtagaaaggcttaggaaccctctgctcatcaccacccctggaggggttatgacagcaaaagagttcggagacgtgtttccggaagaactacctggtatgccgcccaagcgagagattgagttccggatagatcttgctccaggaaccactcctctgtacaagcgaccctaccgtatggcagcaaatgaactggccgaagttaagaaacagttggaagagttgaaagaaaaggggtatatacgtccgagtacttctccatggggtgctcctgtgatttttgtagagaagaaagacaagacgaagaggatgtgcgttgactacagagctctcaatgaagtcaccatcaaaaacaagtaccctcttccccggatcgatgatctgttcgatcagcttaaaggtgccactgtattctccaagattgatcttcgttccggatatcaccaattacgtattcgtgaagaagatattccgaagaccgcattcaccacgcgatacggactgtatgaattcacggtgatgtcattcggtctaaccaatgcacctgccttcttcatgaacttaatgaacaaagtgttcatggaatacttggataagtttgttgtggttttcattgatgacattctgatatactcacactcagaggaagaccatcagcaccatctccgcctggtgttgggaaagttgcgggaacatcaattgtatgccaagcttagcaagtgtgagttctggttgaccgaagtcaaattcttagggcatgtgatatctgctaaaggagttgctgtggaccccgaagcagtgaccgccgtcaccgattggaagcaacccaagacagtcacccaaattcgcagtttcttaggtttggcaggatactaccagaggttcatcgagaacttctccaaaatcgctcgacccatgacacaattgttgaagaaagaagagaaatttgtgtggagcccgcaatgcgagaaggcattccaaactctcaaggaaaagctggtttcctcgccggtgttaatcttgccggatacccgcaaggatttcatggtgtactgtgatgcttcgcgccaaggattggggtgcgtgctcatgcaggatggtcatgtagtggcctatgccttccgccagctacggcctcatgagggcaactaccctacccatgatttggagttagcagcggtggttcatgctctaaaaatctggcggcactatctcattgggaatcgctgtgaaatatatactgatcataagagtttgaaatacattttcacccagtcagatctgaatcttctgcaaaggagatggttagaactcatcaaggattatgatgtgggaattcactatcatcctggtaaggccaacgtggttgccgacgctctaagtcgaaaaagccattgccacgctcttaacgtccgtggcattccacccgaacttaatcaacagatggaagccctgaacctaagcatagttagtcgcggatttttggctgcgttggaagccaagcccaccttgctcgatcaaatccgcgaggctcagaagaatgatccggacatgcatggactcctcaagaatatgaaacagggtaaagccgctggtttcacagaggatgaacacggaaccttatggaacggaaatcgggagaaatactggtgggttagcatgaagcgggaaattgcagagttcgtggccctatgtgatgtgtgccagcgtgtcaaggcagagcaccaacgaccggccggacttctccaacctctccaagtaccagaatggaaatgggatgaaattgggatggatttcatcaccggacttccaaaaacccaaggtggatatgattctatatgggtagttgtggatcgattaaccaaggtagctcgatttattcctgtgaagaccacctatggagggaacaaactagccgagctctacttcgctaggatcgtgagtctccatggcgttcccaagaaaatcgtatctgataggggaagccaattcacctctcacttttggaagaagctccaagaagagctgggtacccgattaaatttcagcaccgcgtatcacccgcagacagatggacagaccgagcgtctaaatcagatcctagaagatatgcttcgcgcatgtgttctagatttcgggaagacctgggataagagtctcccctatgccgagttctcctacaacaacagctaccaagccagcatacaaatggcaccttatgaagcgttgtatgggcgcaagtgccggacaccactattgtgggaccaagttggagaaagccaagtgttcgggactgatatcctgagagaagctgaagctaaagtcagaatcattcgggataatctaaaggtggcacagtcccggcagaaaagttatgcagataaccgtcgctgtgacctggaattcgcagtgggtgactttgtgtatcttcgagtcacgccattgcgaggtgtacacaggtttcagacaaagggaaagctcgcacctcggtatgtgggtcctttccgtatcattgcccggcgcggagaagtcgcttaccagctggagctgcccgcctccttgggcaacgtgcacgatgtgtttcatgcgtcgcaactcaagaaatgtctccgagtgccatccgagcaggccgactcagagcaaattgaagttcgcgaagacttgacctacgtggagaggccagtgaaaatcctggacaccatggagcgcaggaccaggaaccggcccatcccgatctcttcgccagtccctccgaatctcggggtcgagattccgtttaaggggggtaggcgggcccgcccgccaccctcgctgacgggtggggcccacccgtcatccccttcctcgcgccgcgcccgccgccgcgcccgtgccctagcgccgccgccgccgccgaatccgccgcatcccgccgtccccgcgcgcattaaagagggggaaatcactccccgtgattccctcccttttttccccctctttcccctctctctctccctcggattcgtccgaaatcgcgcccgcgatcttcgccggcgtcatcaatggcggccgagatttccgcggccgattccttcccctccggccgctctctccctctcccggcgctatttaatcgcttcccgagctccgctcctccgtttccgccgctcgccgctcactctccccgtcggaatcgagcccgcgccgtcgtcctctcactccaccgtcgccgccgagctccggtcagtcgccgtcgtcgctccggacctcctcccgtttcggcgtcgcccccttcggcttcgccgcgtcctcgccgaccccgtccgcccctccgcttcgctcgccgaccgccggaacgccgccgtcctcctccgctccggtcgccgtttccgccaccctcgtcgtcccggggtgagccgtggaccgccgttcgctttccctcttccctcctctctctcgggtgccgctccgccgcgccgttggtcgccggcggcgaccatcggggcgcgggtgcgccgcctcccgttggccgtgccggcgaggccgccttcgggcgcgcccgcggctgccaggtgggcccggccgtcagccgcccgcgcccgtgggtgcggctaa

SEQ ID NO: 86246 - DNA, 11985 bp, Oryza sativa
  Clone ID: PAT_MRT4530_85304C.1
tcaaggatgatgtgacttgccttgctcgctttcccaaacgccggcttcaacttccacgaagagcggatcttccgaagctgcagcgtcgggagcacgcggctggcggcggtcggcgccgtgggtcccacgcgtcagccgcacccgcgggcgcgggcggctgacggccgggcccacctggcagccgcggggcgcgcccgaaggcggcctcgccggcacggccgacgggagcggcgcgcccgcgccccgatggtcaccgccggcgaccaccggcgcggcggagcggcgcccgagagagcggagaggagagggaagcgagagggacggtccacggctcaccccgggacaacgaggacggcggaaacgacggccggagtggagaaaggcggcggcgcggttcgggatgccgagggcgacggtgctccggcggtcggcgggcgaagcggagcggcggacggggtcgacggcgacgcggcgacgcggaaggaggtgacgccgagtcgggaggaggaccggagcgacgacggtggcgaaacggagctcggcggcgacggcggagagagaggtgcacgacgcgagcacgaatccgacggcgagagcgagcggcgagcggcggaaacggaagagcgaagcacgggggacgattttatagcgccgagagggagagagggcggccggggaggaaggaaaccggccgcggagttctcgggctccattgatgacgccggcgaggattgcgggcgcgattcgaacgaatccgagggagagagagagggaaaagagggggaaacgggagagggaatcacgggggacgtgacactcaggagggggaaacctccggcgttggtagcacggaggatggtgacgaccaggagaaatgttaacaccggtgaaggcaaccaacccgaaggcagcaaccccaaccaccaaggcaatccacctccaccaccaccaccagacaccaatgccattctcacccaaatcctcgctcagcaggccaacatgatgaccgctttcctccaccacctccaaaatccgccacaacagaatgctccaccaccacctccccaacactctaaactcgccgagttcctccgcatccgcccacccaccttctctagctccaacaatcccgtggatgcgttggattggttgcatgccgtggggaagaagctggacactgtgcagtgcagtgatgaagagaaagtcatcttcgccgcccatcagctgcagggacccgcatctctatggtgggaccacttccaggctacgcagccagagggacagccgattacttgggctcgcttcaccgccgctttccggagaacccatgtgcccgccggagtcgtggctctcaagaagagggaattccgagagttgaagcaaggcaaccgctccgtgatggagtatttgcatgagttcaacaatctggcccgttacgctccggaggatgtgcgggaagatgaggagaagcaagagaagttcctggcaggaatggaccccgagctgtccgtccgtctagtctctggggactatccggatttccaacgtctggtggacaagagcatccgcttggaggccaagcacaaggagctggagtcgcacaagcgccgcttggcgaacttccgcaatcagcagggtgctaaccagagggtccgctacaccaatccctatccagggggatcctcctcgcagcagcaacaacagcagcagcaacctcgttccgcgcctcgacctcaattcgtggtgcgcgtcccacagccgcagcagcaacagaatcaacaagggactcgtgcgccccgtcctcctacgccagctgtgcagcccgttcaaggccgcagggacgctcaaggtcagcagcgtctatgcttcaactgcttcgagcccgggcactttgcggataaatgcccgaagccaaggcgtcagcaaggccaagcgcctccccgctccaacaacggagggaaggatgtcattcggggccgtgtgaatcacgtgacggccgaggacgtgctgacaactccagacgtcatcgttggtacgttcctcgttcattccatccctgctaccattttgttcgactctggagcttcccactcgtttatatctgtgccattcgtggggagaaatcagttgggggtagaaaggcttaggaaccctctgctcatcaccacccctggcggggttatgacagcaaagtattatagccctgccgttcctatagaaattcaggggattccttttccctcggatctgattctgctagacaccaagaacttggatgtgatccttgggatgaattggttggctcaattccaaggagtagtggattgcgcgagacgcacggtcactctgtaccgaggaccggaacaaccggttgtcttctttgcacccccaacctctgtcagaagttcagaactgcatcagataggactgtcagaaatccccatcgtcagggagttcggagatgtgtttccggaagaactacctggtatgccgcccaagcgagagattgagttccggatagatcttgctccaggaaccactcctctgcacaagcgaccctaccgtatggcagcaaatgaactggccgaagtaaagaaacagttggaagagttgaaaggaaaggggtatatacgtccgagtacttccccctggggtgcttctgtgatttttgtagagaagaaagacaagacgaagaggatgtgcgttgactacagagctctcaatgaagtcaccatcaaaaacaagtaccctcttcctcggatcgatgatctgttcgatcagcttaaaggtgccactgtattctccaagattgatcttcgttccgggtaccaccaattacgtatccgcgaggaagatattccgaagaccgcattcaccacgcgatacgggctgtatgaattcacggtgatgtcattcggtctaaccaatgcacctgccttcttcatgaacttaatgaacaaagtgttcatggaatacttggataagtttgttgtggttttcattgatgacattctgatatactcacaatcagaggaagaccatcaacaccatctccgtctggtgttgggaaagttgcgggaacatcaattgtatgccaagcttagcaagtgtgagttctggttgtccgaagtcaaattcttggggcacgtgatatctgctaaaggagttgctgtggaccccgaaacagtgaccgccgtcactgaatggaagcaacccaagacagtcacccaaatccgcagtttcttgggtttggcaggatattaccggagattcatcgagaacttctccaaaatcgctcgacccatgacacagttgttgaagaaagaagagaaatttgtgtggagcccgcaatgcgagaaggcgttccaaactctcaaggagaagctggtttcctcgccagtgttaatcttgccggatactcgcaaggatttcatggtgtactgtgatgcttcgcgccaaggattggggtgcgtgctcatgcaggacggtcatgtggtagcctatgcctcacgccaactacgacctcatgaaggcaactaccctacgcatgacttggagttagcagcggtggttcatgctctaaaaatctggcggcactatctcattgggaaccgctgtgaaatatataccgatcataagagcttgaaatacatcttcactcagtcggacctgaatcttcgacaaaggagatggttagaactcatcaaggattatgatgtgggaattcattatcatccgggtaaggctaacgtggttgcctgtcacgtcgtgataaattcatcccgaattaaaaatcattcggacatctccccgccgtcctcctctctctcccgtgccgccggccgcctccagccgcctctccctcctcgccggagcgccgtccggtcgcgccgtcgcctcctatagcatcgcagccgcctcctctcccacggcctaccctccgtttcgcgcggtgaccgccggaggcgcgttcccgccgtcgcctagtggtgtcgccaccactccaccggctccagccatccctgccgcctcgcctgagcgccggccgacgtcgctaccacctctgtcggtgctgcagcgccatcctcttctccggcccggctgcggcgtcgcccgaagtttgccggaacgccgccgccgcgccaaccacccattcctcctcgtcggctcgtcgccccgctgcaccaccacccctcctccgcgcagccgctgctggctgccatcgtcgcttcctcgtcaccgttcgtcctcgccgatcgacgtcccatcggtcgcccggctcgtcgtctcgctgcgccgccaccgtcatcgtcatcgcagcggcgtgttccacgccgtcctcgtctccgtgcagccgctgccggctgccctcgtcgtctcctcgccggccccggtcgtcgtcgtcctcgccctctcgttgttcccgatcgtcgtggcgttcgtccctccgtcaagccgttctcgttcgtcgtcctcgcttcgtcaaggtcgctgcagcccccgtcgtcgtcttcgtcctcggctccgcgtcatcaagcctcgtgccggccgcgtctcgcccgtgtaccggtgtcggtagtcgttcgcttgtgcgtgtggtgaccgtgttagtgtgcccgctcggtagccgcgtggtttccacgtgtgcagcccgtgtggtgtctagtggagtccgtttgtcggccactcgcctcggttgacacacggggtccgcttccgtcgacccgtggaccgtctctgtgtacccggttttctttttatgtattgttattgcttctttataggcttgtagctttgcttgtgtgcttcgcgtagtcttcgtcgttccggaggttctcgaagcgtggttcgcggtcgtcgccgaaggttcggaaggccgttctccctctcttcctctttcaaagcccctaaaacatgtttttcggtggggtttgggtgcatgccagttgtgggaagtagcaccccggccactataaggattaagctcgggcctctgttgcaaagcactaccgtacttccacatgtctagtgggtaaggcttagtttgtggctcagtctggttataaacaaaagtacacggattggagatggatgaagtcgggggttgatggacattccccggcttttcctgggacggggattaatacactagcgttcgggaaaaggcaattttcccggtcgcgacaatatgggtagttgtggatcgattaaccaaggtagctcgatttattcctgtgaagaccacctatggagggaacaagctagctgaactctacttcgccaggatcgtgagtctccatggcgttcccaagaaaatcgtatctgatcggggaagccaattcacctctcacttttggaagaagctccaagaagagttgggtacccgattaaatttcagcaccgcctatcacccgcagacagatggacagaccgagcgtctaaatcagatcctagaagatatgcttcgcgcatgtgtactagatttcgggaagacctgggataagagtctcccctatgccgagttctcctacaataacagctatcaagccagcatacaaatggcaccatatgaagcgttgtatgggcgcaaatgtcggacaccgctattgtgggaccaagttggagaaagtcaagtgttcgggactgatatcctgagagaagctgaagctaaagtcagaatcattcgggataatctaaaggtggcacagtcccggcagaaaagttatgcagataaccgtcgccgtgacctggaattcgcagtggatgattttgtgtatcttcgagtcacgccattgcgaggtgtacacaggtttcagacgaaagggaagcttgcacctcggtatgtgggtcctttccgtatcgttgctcgacgcggagaagtcgcttaccagttggagctacccgcctccttgggcaacgtgcatgatgtgttccatgtgtcgcaactcaagaaatgccttcgagtgccatccgagcaggccgactcagagcaaattgaagttcgtgaagatttgacctacgtggagaggccagtgaaaatcctggacatcatggagcgcaggaccaggaaccgggtaatccgtttttgcaaggtccagtggagtaatcacgccgaagaagaagctacttgggagcgtgaagacgagcgtcggaatcgcgctcgcgccgctttcctctctctccgccgtcgccgacgagttccggttcgccgccgccgtcgctccggacttcctcccccctcggcgtcgcctccttcggcttcgccgcgtcgtcgtcgaccccgtccgctcctccgtttcgctcgccgaccgtcggagcgccgtcgtcctcgtcgtcccgaaccgcgccgccgccttcctccgcttcggccgccgttcccgtcgtcgccgtcgaccggggctgggctcggggtgcatggttttgatggtagcacctcggccatataaggaccggtcttcgggcctctgttgcaaagcactaccgtacttccacatgtctagtggggcaaatgaaggctacacgagctgcggcccgatggccggtagcgttacccgtcgtggtttggacatgactggcttcgtcttggagctgcgaggcatgtgcgtggtcttggggtatccacatggagtggattaccaggccaggccgctcccggagcaggagggtgaggatgcagagcctcacgctggttgggaggtcactgcagtgatcctctccggctctcccgagcggacttcgctggcagtcaccgcgggtggagattccttccccgccgcttgccagaacgccgctctcctcgccatcggcacccttcaccagcgctacccggacgagttgcagcactcgccctaccgctaccacgctcgtcgcggaggagcccgcgactacgccaccttccgagacgccagttcggaggatgacgctaccgtcgtgcatctggcacgcatggtggaggcgtacgacgcggctcgtatcgacttccatcagatggtgcgccgtggcatggtggagaacaacatgaagatcctggagctgcgccaagagaatctgcagctcaagaaggacctcgacgcagtggaggcgcagctgcatcagctcaagatcgcccagggagaggacagccgtcccaagcgtcgccgcgtctgccgcagccagaagatcaccgcccgcaagagcacctccaggcccgagcttgttcgtcagtccctggcgtggacctgcttcgtcgagacccctcgtgccgagcctgcgcccgtggttccccaggagggggaagcctccggcgttggtagctcggagggtgcgctgttgctcaccttccgtcctggcccgtcgcagcgctctccttctctgtttgctggttctgtgaggggttttcagatggtgacgaccaggagaaatgttaacaccggtgaaggtaaccaacccgaaggcagcaaccccaaccaccaaggcaatccacctccgccaccaccaccagacaccaacgccattctcacccagatcctcgcccaacaggccaacatgatgaatgctttcctccaccaccttcaaaacccgccacaacagaatgctcccccaccacctccccaacactctaaactcgccgagttcctccgcatccgcccacctaccttctctagctccaacaaccccgtggatgcgttggattggttgcatgccgtggggaagaagttagacactgtgcagtgcagtgatgaggagaaagtcatcttcgccgcccatcagctgcaggggcccgcatctctctggtgggaccacttccaggctacgcagccagagggacagccgatcacttgggcccgcttcaccgccgctttccggagaacccatgtgcccgctggagtcgtggctcttaagaaaagggaatttcgggagttgaagcaaggcaaccgctccgtgatggagtatttgcatgagttcaacaatctagcccgttatgccccggaggatgtgcgggaagatgaggagaagcaagagaagttcttggcaggaatggaccctgagctgtccgttcgtctagtctctggggactatcctgattctcaacgtctggtggacaagagcatccgcttggaagccaagcacaaggagctggagtcgcacaagcgccgcttggcgaatttccgcaatcaacagggtgctaaccagagggtccgctacaccaatccctacccagggggatcctcctcgcagcagcagcagcagcagcagcaacctcgctccgcgccccgacctcaattcgtggtgcgcgtcccacagcagcaacagcagcagaatcagcaggggactcgtgcgccccgtcctcctacgccaactgtgcagcctgttcaaggtcgcagggacgctcaaggtcagcagcgtctgtgcttcaactgcttcgagcccgggcactttgcggataaatgcccaaagccaaggcgtcagcaaggccaagcgcctccccgctccaacaacggcgggaaggatgtcattcggggtcgtgtgaatcacgtgacggccgaggacgtgctgacaactccagacgtcatcgttggtacgttcctcgttcattccatccctgctacaattttgttcgactctggagcttcccactcgtttatatctgtgccattcgtggggagaaatcagttgggggtagaaaggcttagaaaccctctgctcatcaccacccctggaggggttatgacagcaaagtactatagccctgccgtccctatagaaattcaggggattccttttccctcggatctgattctgctagacaccaagaacttggacgtgattcttgggatgaattggttggcccaattccaaggggtagtggattgcgcgaggcgcactgtcactctgtaccgagggccagaacagccggttgttttctttgcacctccaacctctgtcagaagttcagaactgcatcagataggtctgtcagaaatccccatagtcagagagttcggagacgtgtttccggaagaactacctggtatgccgcccaagcgagagattgagttccggatagatcttgctccaggaaccactcctctgcacaagcgaccctaccgtatggcagcaaatgaactagccgaagtaaagacacagttggaagaattgaaagaaaaggggtacatacgtccgagtacttccccatggggtgctcctgtgatctttgtagagaagaaagacaagacgaagaggatgtgcgttgactacagagctctcaatgaagtcaccatcaaaaacaagtaccctcttccccggatcgatgatctgttcgaccaactcaaaggtgccactgtattctccaagattgatcttcgttccggatatcaccaattacgtattcgtgaagaagatattccgaagaccgcattcactacgcgatacgggctgtatgaattcacggtgatgtcgttcggcttaaccaatgctcctgccttcttcatgaacttgatgaacaaagtgttcatggaatacttggataagttcgttgtggttttcatcgatgacattctgatatactcacaatcagaggaagaccatcagcaccatctccgtctggtattgggaaagctgcgggaacatcaattgtatgccaagctcagcaagtgtgagttctggttgtccgaagtcaaatttttggggcacgtgatatctgctaaaggagttgctgtggatcccgaaacagtgaccgccgtcaccgattggaagcaacccaagacagtcactcagattcgcagtttcttgggtttggcaggatactaccggaggttcatcgagaacttctccaaaatcgctcgacccatgacacagttgttgaagaaagaagagaagtttgtgtggagcccgcaatgcgagaaggcgttccaaactctcaaagaaaagctggtttcctcgccagtgttaatcttgccggatactcgcaaggatttcatggtgtactgtgatgcttcgcgccaaggattggggtgcgtgctcatgcaggacggtcatgtggtagcctatgcctcacgccagctacgacctcatgaaggcaactaccctacacatgacttggagttagcagcggtggttcatgctttaaaaatctggcggcactatctcattgggaaccgctgtgaaatatatactgatcataagagtttgaaatacatcttcacccagtcggatctgaatcttcggcaaaggagatggttagaactcatcaaggattatgatgtgggaattcactatcaccctggtaaggctaacgtggttgccgatgctctaagtcggaagagccattgcaatactctcaacgtccgaggcattccacccgagcttaatcaacagatggaagccctgaacctaaacatagttggtcgtggatttttggccgcgctagaagcccagcccaccttgctcgatcaaatccgcgaggctcagaagaatgatccggacatgcatggactcctcaagaatatgaaacagggtaaagccgctggtttcacagaggatgaacacggaaccttatggaacggaaagcgggtatgcgttccggatagcagagaacttaaacagctgatacttcaggaagctcacgaaagtccttattccattcacccgggcagtaccaagatgtacttagatttgaaggagaaatactggtgggttagcatgaagcgggaaattgcagagtttgtggctctatgtgatgtgtgccagcgtgtcaaggcagaacaccaacgaccggccggacttctccaacctctccaagtgccagaatggaaatgggatgaaattgggatggatttcatcaccggccttccaaaaacccaaggtgggtatgattctatatgggtaatagtggatcgattaaccaaggtagctcgattcattcctgtgaagaccacctatggagggaataaactagcggagctctacttcgctaggatcgtgagtctccatggcgttcccaagaaaatcgtatctgataggggaagccaattcacctctcacttttggaagaagctccaagaagagcttggtacccgactaaatttcagcaccgcatatcacccgcagacagatggacagaccgagcgtctaaatcagatcctagaagatatgctccgcgcatgtgtcctagatttcgggaagacttgggataagagtctcccctatgccgagttctcctacaataacagctaccaagccagcatacaaatggcaccatatgaagcgttgtacgggcgcaaatgccggacaccgctcctgtgggaccaagttggggaaagccaagtgttcgggactgatatcctgagagaagctgaagctaaagtcagaatcattcgggataatctaaaggtggcacagtctcggcagaaaagttatgcagataaccgtcgccgtgatctggaattcgcagtggatgactttgtgtatcttcgggtcacgccattgcgaggtgtgcacaggtttcagacaaaagggaagctcgcacctcggtatgtgggtcccttccgtatcactgctcgccgcggagaagtcgcctaccagctggagttgcccgcctccttgggcaacgtgcatgatgtgtttcatgtgtctcaactcaagaaatgtcttcgagtgccatccgagcaggccgactcagagcaaattgaagttcgcgaagacttgacctatgtggagaagccagtgaaaatcctggacgccatggagcgcaggaccaggaaccgagtaatccgtttttgcaaggtccagtggagcaaccacgccgaagaagaagctacttgggagcgtgaagacgagcttcgtcatcgtcatcccgaaccgcgccgccgcttccctccactccggccgccgttctcgtcgtcgtcgttgtcccggggtgagccgaagaccgccgttcgccttcccccttccctcctctctctcgggcgccgctccgccgcgccggtggtcgccggcggtgaccat

SEQ ID NO: 86247 - DNA, 424 bp, Oryza sativa
  Clone ID: PAT_MRT4530_85305C.1
gtgaaacataaggcggaacttggttccacttttatgtttagaaaaaaagaattgacccagttaataaggatatccggacccaaaaaccatacatccgcatggttaattacaggaaagaccgagtaaaacccatcgtttcactatctaaccatgatggcggcccccaacaacaggacgtggtcgccatgctaaacacaaaagccacccaacagcttgcacaccacataagaggcgttatagttgccaagctagccttccaagcgacccattatcgccgacttgacaaccacatcgacactaaagtcatgaaagtcggcaaagcaaaaagcagttcctacatccaacaatgggcatcagccacgccatcgaggggtcaatgtctttacacggccagtaccacatacttctagggagagactccaac

SEQ ID NO: 86248 - DNA, 5304 bp, Oryza sativa
  Clone ID: PAT_MRT4530_85306C.1
atggatgaagtcgggggtcgatggacattctccagggcaaatgaaggctacacgagctgcggcccgatggccggcagcgtcacccgtcgtggtttggacatgactggcttcgttttggagctgcgaggcatgtgcgtggtcctggggtatccacacggagaggactaccaggccaggccgcttccggatcaggagggagacgacgcggagccccacgctgggtgggaggtcaccgcagtgatcctctctggctcccccgagcggacttcgctggcagtcaccgcgggtggagactccttccccgccgcttgccagaacgccgctctcctcgccatcggcacccttcaccagcgctacccggacgagttgcagcactcgccctaccgctaccaccctcgtcgcggaggagcccgcgactacgccaccttccgggatgctagctcggaggatgacgctaccatcgtgcacctggcacgcatggtggaggcgtacgacgcggctcgtatcgacttccatcagatggtacgccgcgggatggtcgagaacaacatgaagatcctggagctgcgtcaggagaacctgcagctcaagaaggacctcgacgcagtggaggcgcagctgcaccagctcaaggtcgcccagggagagatctgccgccccaagcgtcgccgtgtctgccgcagccagaagatcaccgcccgcaagagcacctccaggcccgagcttgttcgtcagtccctggcgtggacctgcttcgtcgagacccctcgtgccgagcctgcgcccgtgatggtgacgaccaggagaaatgctgctaccggtgatggcaaccaacccgaaagcagcaaccacaaccaccagggcaacccacctccacctcctcctccgcctccaccaccaccaccagacaccaacgccattctcacccaaatcctcgcccagcaagccaacatgatgaatgctttcctccaccacctccaaaacccgccacaacagaatgctccaccaccacctccccaacactctaaactcgccgagttcctccgcatccgcccacctaccttctccagctccaacaaccccgtggatgctttggattggttgcatgccgtggggaaaaagctagacacggtgcagtgcagcgatgaggagaaagtcgtcttcgccgcccatcagctgcagggacctgcatctctatggtgggaccacttccaggctacgcagccagagggacagccgattacttgggctcgcttcaccgccgctttccggagaacccatgtgcccgctggagtcgtggctcttaagaaaagggaattccgagagttgaagcaaggcaaccgctccgtgatggagtatttgcatgagttcaacaacctggcccgttacgctccggaggatgtgcgggaagatgaggagaagcaagagaagttcttggcaggaatggaccctgagctgtccgtccgtctagtctctggggactatccggattttcaacgactggtggacaagagcatccgcttggaagccaagcacaaggagttggaatcgcacaagcgccgcttggcgaatttccgcaatcaacagggtgctaaccaaagggttcgctacaccaatccctatccagggggatcctcctcgcagcagcagcagcagcaacctcgcccagcgcctcgacctcaattcgtggtgcgcgtcccacagccgcagcagcagcagaatcagcaagggactcgtgcgccccgtcctcctacgccagctgtgcagcccgttcaaggccgcagggacgctcaaggtcagcagcgtctgtgcttcaactgcttcgagcccgggcactttgcggataaatgcccaaagccaaggcgtcagcaaggccaagcgcctccccgctccaacaacggcgggaaggatgtcattcggggtcgtgtgaatcacgtgacggccgaggacgtgctgacaactccagacgtcatcgttggtacgttcctcgttcattccatccctgctacaattttgtttgactctggagcttcccactcgtttatatctgtgccattcgtggggagaaatcagttgggggtagaaaggcttagaaaccctctgctcatcaccacccctggaggggttatgacagcaaagttttatagccctgccgtccctatagaaattcaggggattccttttccctcggatctgattctgctagacaccaagaacttggatgtgattcttgggatgaattggttggcacaattccaaggagtagtggattgcgcgagacgcactgttactctgtaccgagggccggaacaaccggttgttttctttgcacccccaacctctgttagaagttcagaacttcatcagatagaactgtcagaaattcccatcgtcagagagttcggagacgtgtttccggaagaactacctggtatgccgcccaagcgagagattgagttccgaatagatcttgctccaggaactactcctctgcacaagcgaccctaccgtatggcagcaaatgaactagccgaagtaaagaaacagttggaagagttgaaagaaaaggggtacatacgtccgagtacttccccatggggtgctcctgtgatttttgtagagaagaaagacaagacgaagaggatgtgcgttgactacagagctctcaatgaagtcaccatcaaaaacaagtaccctcttccccggatcgatgatctgttcgatcaactcaaaggtgccactgtattctccaagattgatctccgttccggatatcaccaattacgtattcgtgaagaagatattccgaagaccgcattcaccacgcgatacgggctgtatgaattcacggtgatgtcgttcggtttgaccaatgcacctgccttcttcatgaacttaatgaataaagtgttcatggaatacttggataagtttgttgtggttttcattgatgacattctgatatactcacaatcagaggaagaccatcagcaccatctccgtctggtgttgggaaagttgcgggaacatcaattgtatgccaagcttagcaagtgtgagttctggttgtccgaagtcaaattcttagggcacgtgatatctgctaaaggagttgctgtggatcccgaaacagtgaccgccgtcaccgattggaagcaacccaagacagttacccaagtccgcagtttcttaggtttggcaggatactatcggagattcatcgagaacttctccaaaatcgctcgacccatgacacagttgttgaagaaagaagagaaatttgtgtggagcccgcaatgcgagaaggcgttccaaactctcaaggaaaagctggtttcctcgccggtgttaatcttgccggatactcgcaaggacttcatggtgtattgtgatgcttcgcgccaaggattggggtgcgtgctcatgcaggacggtcatgtggtagcctatgcctcacgccagctacgtcctcatgaaggcaactaccctacacatgatttggagttagccgcagtagttcatgctctaaaaatctggcggcactatctcattgggaatcgctgtgaaatctataccgaccataagagtctgaaatacatcttcactcagtcggacctgaatcttcggcaaaggagatggttagaactcatcaaggactatgatgtgggaattcactatcatcctggtaaggccaacgtggttgccgacgctctaagtcgaaagggccattgcaacactcttaacgtccgtggcattccacccgaacttagtcaacagatggaagccctgaacctaaacatagttggtcgtggatttttggccgcgttggaagccaagcccaccttgctcgatcaaatccgcgaggctcagaagaatgatccggacatgcatggactcctcaagaatatgaaacagggtaaagccgctggtttcacagaggatgaacacggaaccctatggaacggaaatcgggtatgcgttccagataaccgagaacttaaacagctgatacttcaggaagctcacgaaagtccttattccatccaccctggcagtacaaagatgtacttagatttgaaggagaaatactggtgggttagcatgaagcgggaaattgcagagtttgtggccctgtgtgatgtgtgccagcgtgtcaaggcagagcaccaacgaccggccggacttctccaaccactccaagtacctgaatggaaatgggatgaaattgggatggatttcatcaccggacttccaaaaacccaaggcggatatgattctatatgggtagttgtggatcgattaaccaaggtggctcgatttattcttgtgaagaccacctatggagggaacaaactagcggagctctacttcgctaggatcgtgagtctccacggcgttcccaagaaaatcgtatctgataggggaagccaattcacctctcacttttggaagaagctccaagaagagctgggtactcgattgaatttcagcaccgcctatcacccgcagacagatggacagaccgagcgtctaaatcaaattctagaagatatgctccgcgcatgtgtactagatttcgggaagacctgggataagagtctcccctatgccgagttctcctacaataacagctatcaatccagcatacaaatggcaccatatgaagcgttgtacgggcgcaaatgccggacaccgctcctgtgggaccaagttggggaaagccaagtgttcgggactgatatcctgagagaagctgaagctaaagtcagaatcattcgggataatctaaaggtggcacagtcacggcagaaaagttatgcagataaccgtcgccgtgacctggaattcgcagtggatgattttgtgtatcttcgagtcacgccattgcgaggtgtacacaggtttcagacgaaagggaagcttgcacctcggtatgtgggtcctttccgtatcgttgctcgacgcggagaagtcgcttaccagttggagctgcccgcctccttgggcaacgtgcatgatgtgttccatgtgtcgcaactcaagaaatgccttcgagtgccatccgagcagaccgactcagagcaaattgaagttcgcgaagatttgacctacgtggagaggccagtgaaaatcctggacaccatggagcgcaggaccaggaaccgggtaatccgtttttgcaaggtccagtggagcaaccacgccgaagaagaagctacttgggagcgtgaagacgagctgaaggcagcccatcccgatctcttcgccagttcttccgaatctcggggtcgagattccgtttaa

SEQ ID NO: 86249 - DNA, 181 bp, Oryza sativa
  Clone ID: PAT_MRT4530_85307C.1
atggagctgcgattcaagagccggagctactccactactcgtgtttggcaaaaaaaacttggagatggagctattttcttggagaggagtcctgccaaacaacccctaaagtctggagaacgtgcttcttgttgggctgacataggtctctgtgctcgggagctgttggattgcatggacg

SEQ ID NO: 86250 - DNA, 2009 bp, Oryza sativa
  Clone ID: PAT_MRT4530_85308C.1
atggagaacttctccaaaatcgctcgacccatgacacagttgttgaagaaagaagagaaatttgtgtggagcccgcaatgtgagaaggcgttcagaactctcaaagaaaagctggttgcctcgccagtgttaatcttgccggatactcgcaaggacttcatagtgtattgtgacgcttcgcgccaaggattggggtgcgtgctcatgcaggacggtcatgtggtggcctatgcctcacgccagcttcgacctcatgaaggcaactaccctacccatgacttggaattagccgcggtggttcatgctctaaaaatctggcggcactatctcattgggaatcgctgtgaaatatatactgatcataggagtttgaaatacatcttcacccagtcggatctgaatcttcggcaaaggagatggttagaactcatcaaggattatgatgtgggaattcactatcatcctggtaaggccaacgtggtcgccgacgctctaagtcgaaagagccattgcaacactcttaacgtccgtggcattccaccggaacttaatcaacagatggaagccctgaacctaagcatagttagtcgtggattcttggctacgctggaagccaagcctaccttgctcgatcaaattcgcgaggctcagaagaatgacccggatatgcatgggctcctcaagaatatgaaacagggtaaagccgctggtttcacagaggatgaacacggaaccctatggaacggaaatcgggtatgcgttccagataacagagaacttaaacagctgatacttcaggaagctcacgaaagtccttattccatccaccctggcagtacgaagatgtacttagacttgaaggagaaatactggtgggttagtatgaagcgggaaattgcagagttcgtggccctttgtgatgtgtgccagcgtgtcaaggcagagcaccaacgaccggccggacttctccaacctctccaagtaccagaatggaaatgggatgaaattgggatggattttatcaccggacttccaaaaacccaaggcggatatgattctatatgggtagtcgtggatcgactaaccaaggtagcacggttcattcccgtaaagaccacctatggagggaacaaactagctgaactctacttcgctaggatcgtaagtctgcatggcgtccccaagaaaattgtatctgataggggaagccaattcacctctcacttttggaagaagctccaagaagagctgggtacccgattaaatttcagcaccgcgtatcacccgcagacagatggacagaccgagcgtctaaatcagatcctagaagatatgcttcgcgcatgtgtcctagatttcgggaagacctgggataagagtctcccctatgccgagttctcctacaataacagctatcaagccagcatacaaatggcaccttatgaagcgttgtatgggcgcaaatgccggacaccgctattgtgggaccaagttggagaaagccaagtgttcgggactgatatcctgagagaagctgaagctaaagtcagaaccattcgggataatctaaaggtggcacagtcccggcagaaaagttatgcagataaccgtcgccgtgacctggaattcgcagtggatgactttgtgtatgttcgggtcacgccattgcgaggtgtacacaggtttcggacaaaggggaagctcgcacctcggtatgtgggtcctttccgtatcactgctcggcgcggagaagttgtcacgaccggaaataacccaacgggcattccttacgtgcgtgcattaatccttgtcccaggaggcaaggcccagcacacaaagacaacgaaaaacagcggaagactagggcgaagaccacaggcgcttgacggcaggcacgagctagacaccgaagccttcatcttcaaggagctcctcatctgggcttgggaaaattaagcaagactgagtacaaccaccgtactcaacaagacacacccacaaatgcagaa

SEQ ID NO: 86251 - DNA, 335 bp, Oryza sativa
  Clone ID: PAT_MRT4530_85309C.1
ttgttttataaggttttcaaattggttttagacaataaaattattaatatgatcacccaaaaaagaaaaagaaaagaaaagaaaagcactacaccccacctccctcccgagtgtgccctaacccacctcccatggacccacctcagttaaagtaaactcttcacaatccaccttaggtcatcctatgtgctgattccctaggttttctcacccctctaccatgtgtagaggcaatgcaatgctgttatgaatctgtaacacgactatttctgtgctgtaaaacatcttcggagccattgtttcacggcatatttgcaaacgaaaagtaatttgtg

SEQ ID NO: 86252 - DNA, 241 bp, Oryza sativa
  Clone ID: PAT_MRT4530_8530C.1
ttgttttatcaaaatatgaagcagcagaaattacaaaaatagaaaaagtatgtgagaataataaaaaatgatgaaagggttgaattggggaagagctgaaagatttaatggggggggtggttttaggggatctaggtttaatcagacgggcttgcgacttaatagtttttttttggggcaacttaaattaaagttatgggccgagagtttaaaaggggtagattgggaaaaccttggggtt

SEQ ID NO: 86253 - DNA, 405 bp, Oryza sativa
  Clone ID: PAT_MRT4530_85310C.1
cggacgccacaattaatttgacatattcgagtgccctatacagaggcgcgattaaccagattgcaataaacatggattacctgcttacagcgaactgcatctagggaaacgtaaaacgcgcccggaacctcacaacattcacgattggaatatcgacggacagacacgacttctgctttagcctaacaagaccgatttcgaccgtttcttggggtccggtaaccattgaacagattcaagtgtctggtctgacctggattcctgatttgtaacagcacgctctttcctaatgtatggcgaagaatatccggtcctgcacctatcactgagagatctgacgcctatggcgttcggacgcaggtacgcactgcgagcacttttcatgcctagtgaggatattgggga

SEQ ID NO: 86254 - DNA, 413 bp, Oryza sativa
  Clone ID: PAT_MRT4530_85311C.1
caataatcatttttttttttttttttttttttttttttttttttttttttttttttattttttttttttttttttttttttttttttaaaaggttgtaattccccccccctttttatttttccttttttattacaacatcccattttccctacctaaatccccccccctttttcccccctgaaattcccgacccttcccttcaggccccccaatttttcttattttaagtcgttttaaacctttgcctaaacatgcccaaacctttttcctttttcaaaattttctcccctcccatttccctacacaaaacacacccaaattcttaactttaaaccccgtggcccctaatgactggccctcttcccattaattggcctcccccccctcccccctttccaattataaaaccttt

SEQ ID NO: 86255 - DNA, 1202 bp, Oryza sativa
  Clone ID: PAT_MRT4530_85312C.1
tcactcccaccctacctctcctccgccacccgtcgccggccggggtgtggctcggagccagcgcgccggggcggccggagcccggagggacaacgcaacgatctctctctagctagatcgagctagagctatagcttagctcagctaattataatatatagctaggaattgattaacaattaatggggaagcgcagcgcgccccggtaccccgacgacggcggcggcggcggcggcgggatttgctgcgtgctgtgctggtgctgctgcttcctgttcctgatcgtcgcggcgctcgccggcgcggcggcgtacgccctgttcctgtacaagcccaaggcgccgtcctactcggtgagcaacatgtcggtgtcgcagttcgacttcaactccaacgacctgacgctctacaccaagctggtggccaccgtgcgggccgagaaccccaacgagatgatcggcatcatctacggcgacggctcccggacggtcgtctcctaccgcggcacgccgctgtgctccggccacctccccaccttctaccaggggttcaagaacgtgacggtgatggagatctccatggaagggaggcacggcttcgggtcggggctgcagagcgcgctggaggagagcgagaaggaagggaacgtgccgctcgacgtgttcgtcagcgtgcccgtgtcgctgcggttcggctcgttcgacgtccgggaggtgagggtcaacgtgcactgcgcgctcgtcgtcgacagcatctcacccaagaagaagcccaccatcaagtccgccacctaccagggcaactggagttggggagaaacctcctccccaccaatccatcacgtcaaggcgctgaagagcccgatgctgacgcaggtgctggagtgctccttcaagctcgctgttgtcagagagaggctgccgacgctgtgttcgatccatggtgacgaggcaggtcagcctggactacggcgacgtgcgcaccgcactggagagccccgagctgcagcggcagcatgtcaaccaccggtgcacgccaccgccaagtggctgaagtgggaggtggaggacgagctcgctagcgccgagcaggacaatggcatgatctactacatggcggtgccagtcgacggagtgaccgctgagctgctcgggctgcagcagcggcttgtccggtccacctcgctgcagaacatccagtag

SEQ ID NO: 86256 - DNA, 334 bp, Oryza sativa
  unsure (1)..(334): unsure at all n locations
  Clone ID: PAT_MRT4530_85313C.1
caaaataatttcccaaggtcaatcaaagggtcttttttggtgcttntgtcacatgcctggcaggatttatatcaagccagggaagagcctcctacatctggcagctttcataggatatagactattcctcacagaccaacactagtcttttctgcacactttgtcctcactcgtgcgcacccgaaaagaatttcccgatcggtcacccatcccaaattgctccagggcaagcacgcttaaccttagagttcgagatcggcttccgaaaaagaagttacaacttgttgatatgagtattctattaattctattaagccctgagccaggatatcac

SEQ ID NO: 86257 - DNA, 339 bp, Oryza sativa
  Clone ID: PAT_MRT4530_85314C.1
ctctacattccttatcgacatctaggctctggcaagcatacaagcagacatgctacccacaaccctacacgagccgatggtttagacacctccgacctcaccgaagccacatagacaattcgtcggcacggcatgtgcagcaactgcgctacaggacgcatcttatatttcagacacctgatgagtcgggtgcagtttcgacacccctacctcgaatccgactgtttagtaacgcaagaactgtacgagtaccatcaaaacgtgtacatctatctgtcggccgtcgtgtaggcccgcaactatgaccacgacggcgaggattcggaatgggagggatcc

SEQ ID NO: 86258 - DNA, 511 bp, Oryza sativa
  Clone ID: PAT_MRT4530_85315C.1
ggaacacaaaaaaaacccttttaaaaagcaaaaaaggcccaaaaaaaaggggcccagggggcagctcgcaacaaaacaggaaaaaccggggaaaatatgggccccccaaggaaccacataggaaaaaaggaccccatcaggccatttgggaaaggacccccccatcggggctcggaacatttaaggggcgaaacccttcgcgggaatcataacttttatcctatcaaaaaagcaaatcatcgccgggatgggccggccctatcacggcacaactaataatggatttggaggcggcccaagcacataaggtggggggggaccctcggctaaaaacgggcattgctgtttgttgcaaaaggaaagtctaaaacactaatgggccggctccttgaaaaccctgaccgggccctatgcaaaaaggaggcgggtatgcttgtcaaaaaaggcccaaaattgtttgaaatgctgccccctttgcccatatgtcaaaaacccatggcaagggactttt

SEQ ID NO: 86259 - DNA, 189 bp, Oryza sativa
  Clone ID: PAT_MRT4530_85316C.1
atggccgcccactccgccgccaaatacgcctcgtcccgcccgcgcctctcatccaaaaccaccgcagccatcgtgcgcagcccggccgcccctctacattcgccaaaggtcgccggaactccgcttcctccgcccaagatcgaggacgagcccgtccgcctcttcctgagcgccacccgccgccggtga

SEQ ID NO: 86260 - DNA, 663 bp, Oryza sativa
  Clone ID: PAT_MRT4530_85317C.1
ccggccgggcggatttcccattaaccaaaagccatcgtcctcgcggcgagctcggtgcaaccactgcttccacctaccacttctactactcatacacgcagtgccattggtgtccacctcgatcgatctctcccctcacaatcctctctcacgtacgcaagctagctagctatctagccatgtcgatcagtccacgcttcttggccgtcgccgccgtcctcgccggcgcgatgtactccgccgcgacggtggccgcggacacgccgggcggcagctgcccgtacccgtgcctcccgccgccgatcgccggtggcgcggtgaacagctaccctccgccgccgcccgcggggagtagtagcagcagcagctcaggtggagggcgatggcggcgccggcgggttgtttggcgggacctacccgccgccgccgcccggggtgatgcctggggccttcgctccgccgttcggcggcgggttcccgtacgggccagcgccgccgccgcccaacccgatcctgccgtggttcccgtggtactaccagcacaacaaccccatcaccgggtcgacgacgtcggcggcggcggtgggccggacgccggcgagcatggtcacgacggtggtgttgctcccgctgttcttggttgctcttcttcgtgtgctgtag

SEQ ID NO: 86261 - DNA, 148 bp, Oryza sativa
  unsure (1)..(148): unsure at all n locations
  Clone ID: PAT_MRT4530_85318C.1
ggagcatgtaagcagataaccatattcttgcgttgatttaacaaattgtggggtcacaagaagatgtggatcttggcagggatgacggactattgctctctcggccggcggccgcgttntcttggggggggggggtcttccccccccc

SEQ ID NO: 86262 - DNA, 2957 bp, Oryza sativa
  Clone ID: PAT_MRT4530_85319C.1
atgggcactcttcaccagcgctacccgtacgagttgcaacactcgccctaccgctaccaccctcgtcgcggaggagcccgcgactacgccaccttccgggatgctagctcagaggatgacgctaccatcgtgcacctggcgcggatggtggaggcgtacaacgcggctcgtatcgacttccaccagatggtacgtcgcgggatggtcgagaacaacatgaagatcctggaactgcgccaggagaacctgcagctcaagaaggacctagacgcggtggaggcgcagctgcatcagctcaagatcgcccagggaaaggtctgtcgccccaagcgtcgccgcgtctgccgcagccagaagatcaccgcccgcaagagcacctccaggcccgagcttgttcgtcagtccctggcgtggacttgcttcatcgagacccctcgtgccgagcccgcgcccgtggttccccaggagggggaagcctccggcgtcgctctttctctgtttgctggttccgtgtggggttttcagatggtgacgaccaggagaaatgcggttaccggtgatggcaaccaacccgaaggcagcaaccacaaccaccaaggcaacccaccttcaccttctcctcctcctccaccaccaccaccagacaccaacgccattctcacccaaatcctcgcccagcaggccaacatgatgactgctttcctccaccacctccaaaatccgccacaacagaatgccccaccaccacctccccaacactctaaactcgccgagttcctccgcatccgcccacctaccttctctagctccaacaaccccgtggatgcgttggattggttgcatgccgtggggaaaaagctagacactgtgcagtgcagcgatgaggagaaagtcatcttcgccgcccatcagctgcagggacccgcatctctatggtgggaccatttccaggctacgcagccagagggacagcctattacttgggctcgcttcaccgccgcttttcggaggacccatgtgcccgctggagtcgtggcccttaagaaaagggaattccgagagttgaagcaaggcaaccgctccgtgatggagtatttgcatgagttcaacaacctggcccgttacgctccggaggatgtgcgggaagatgaggagaagcaagagaagttcctggcaggaatggaccccgagctgtccgtccgtctagtctctggggattatccggatttccaacgtctggtggacaagagcatccgcttggaagccaagcacaaggaactggagtcgcacaagcgccgcttggcgaatttccgcaaccaacagggtgctaaccaaagggtccgctacaccaatccctatccagggggatcctcctcgcagcagcaacagcagcagcagcaacctcgctccgcgcctcgacctcaattcgtggtgcgcgtcccacagccgcagcaacagcagaatcaacaagggactcgtgcgccccgtcctcctacgcaaactgtgcagcctggtcaaggccgcagggacgctcaaggtcagcagcgtctgtgcttcaactgcttcgagcccgggcactttgcggataaatgcccgaagccaaggcgtcagcaaggccaagcgcctccccgccccaacaacggtgggaaggatgtcattcggggtcgtgtgaaccacgtgatggccgaggacgtgctgacaactccagacgtcatcgttgtgaccgccgtccccgattggaagcaacccaagacagttactcaagtccgcagtttcttaggtttggcaggatactaccggagcgtgtcaaggcagagcaccaacgaccggccggacttctccaacctctccaagtaccagaatggaaatgggatgaaattgggatggatttcatcaccggacttccaaaaacccaaggtggatatgattctatatgggtagttgtggatcgattaaccaaggtagctcgatttattcctgtgaagaccacctatggagggaacaaactagccgagctctacttcgctaggatcgtgagtctccatggcgttcccaagaaaatcgtatctgataggggaagccaattcacctctcacttttggaagaagctccaagaagagctgggtacccgattaaacttcagcaccgcatatcacccgcagacagatgggcagaccgagcgtctaaatcagatcctagaagatatgcttcgcgcatgtgtcctagatttcgggaagacctgggataagagtctcccctatgccgagttctcctacaataacagctatcaagccagcatacaaatggcaccttatgaagcgttgtatgggcgcaagtgccggacaccgctattgtgggaccaagttggggaaagccaagtgttcgggactgatatcctgagagaagctgaagcgaaggtcagaaccattcgggataatctaaaggtggcacagtcccggcagaaaagttatgcagataaccgtcgccgtgacctggaattcgcagtgggtgattttgtgtatcttcgggtcacgccattgcgaggtgtacacaggtttcagacaaaagggaagctcgcacctcggttcgtgggtcctttccgtatcattgctcggcacggagaagtcgcttaccagctggagctgcccgcctccttgggcaacgtgcatgatgtgttccatgtgtcgcaactcaagaaatgtctccgagtgccatccgagcaggccgactcagagcaaattgaagttcgcgaagacttgacctacgtggaaaggccagtaaaaatcctggacaccatggagcgcaggaccaggaaccgggtaatccgtttttgcaaggtccaatggagcaaccacgccgaagaagaagctacttgggagcgtgaagacgagctgaaggcagcccatcccgatctcttcgccagtccttccgaatctcggggtcgagattccgtttaa

SEQ ID NO: 86263 - DNA, 418 bp, Oryza sativa
  Clone ID: PAT_MRT4530_8531C.1
aggggcgggaaagcacacatagacttatcagattggaagctgacgttgaatagatggcttccacataggcacgctacagaaaataagtgccggagatcaacatgatatacttactattgcactgacagacaaaaggccggacccagagcgacaggtctattttaagaggaaaggcttggtttcaactgaaacttcaaacttatagggggaacacagctaatgagaccaccctgactggtgcccatccgattcactcgaaagaaagggagagaggattctggcagtcattaattttgggggacacgatgaagtacgtcgctcattgggatgatatggaggatctgggtttcctccatagaccagttacccactggaacgcccatgcacagaaccttgtttagttggaacttgactgagc

SEQ ID NO: 86264 - DNA, 5418 bp, Oryza sativa
  Clone ID: PAT_MRT4530_85320C.1
atggatgaagtcgggcgtcgatggacattctccagggcaaatgaaggctacacgagctgcggcccgatggccggcagcgttacccgtcgtggtttggacatgactggcttcgtcttggagctgcggggcatgtgcgtggtcttggggtatccacatggagtggattaccaggccaggccgctcccggagcaggagggtgaggatgcagagcctcacgctggttgggaggtcactgcagtgatcctctccggctctcccgagcggacttcgctggcagtcaccgcgggtggggattccttccccgccgcttgccagaacgccgctctcctcgccatcggcacccttcaccagcgctacccggacgagttgcagcactcgccctaccgctaccaccctcgtcgcggaggagcccgcgactacgccaccttccgagacgccagctcggagcatgacgctaccgtcgtgcatctggcacgcatggtggaggcatacgacgcagctcgtattgacttccatcagatggtgcgccgtggcatggtggagaacaacatgaagatcctggagctgcgccaagagaatttgcagctcaagaaggacctcgacgcgttggaggcgcagctgcatcagctcaagatcgcccagggagaggacagccgtcccaagcgtcgccgcgtctgccgcagccagaagatcaccgcccgcaagagcacctccaggcccgagcttgttcgtcagtccctggcgtggacctgcttcgtcgagacccctcgtgccgagcctgcgcccgtggttcctcaggagggggaagcctccggcgttggtagctcggagggtgcgctgttgctcaccttccgtcctggcccgtcgcagcgctctccttctctgtttgctggttctgtgtggggttttcagatggtgacgaccaggagaaatgttaacaccggtgaaggcaaccaacccgagggcagcaaccccaacccccaaggcaacccacctccaccaccaccaccagacaccaacgccattctcacccaaatcctcgcccagcaagccaacatgatgaatgctttcctccaccacctccaaaatccgccacaacagaatgctccaccaccccctccccaacactccaaactcgccgaattcctccgcatccgcccacccaccttctctagctccaacaatcccgtagatgcgttggattggttgcatgccgtggggaaaaagctagacacggtgcagtgcagcgatgaggagaaagtcgtcttcgccgcccatcagctgcaggggcccgcatctctctggtgggaccacttccaggctacgcagccagaagggcaacctattacttggactcgcttcaccgccgctttccggaaaacccatgtgcccgccggagtcgtggctcttaagaaaagggaattccgagagttgaagcaaggcagccgctccgtgatggagtatttgcatgagttcaacaatctagcccgttatgccccggaggatgtgcgggaagatgaggagaagcaagagaagttcttggcaggaatggaccctgagctgtccgttcgtctagtctctggggactatcctgattttcaacgactggtggacaagagcatccgcttggaagccaagcacaaggagctggaatcgcacaagcgccgcttggcgaatttccgcaatcagcagggtgctaaccagagggtccgctacaccaatccctacccagggggatcctcctcgcagcagcagcagcagcagcagcagcaacctcgctccgcgcctcgacctcaattcgtggtgcgcattccacagccgcagcagcagcagaatcagcaagggactcgtgcaccccgtcctcctacgccaactgtgcagcctgttcaaggtcgcagggacgctcaaggtccgcagcggctgtgcttcaactgcttcgagcccgggcactttgcggataaatgcccgaagccaaggcgtcagcaaggccaagtgcctccccgctccaacaacggcgggaaggatgtcattcggggccgtgtgaatcatgtgacggccgaggacgtgctgacaactccagacgtcatcgttggtacgttcctcgttcattccatccctgctaccattttgttcgactctggagcttcccactcgtttatatctgtgccattcgtggggaaaaatcagttgggggtagaaaggcttagaaaccctctgctcatcaccacccctggaggggttatgacagcaaagtattatagccctgccgtccctatagaaattcaggggattccttttccctcggatctgattctgttagacacaaagaacttggatgtgattcttgggatgaattggttggctcaattccaaggagtagtggattgcgcgaggcgcactgtcactctgtaccgaggaccggaacagccggttgttttctttgcacctccaacctctgtcagaagttcagaacttcatcagataggtctgtcagaaatccccatagtcagagagttcggagacgtgtttccggaagaactacctggtatgccgcccaagcgagagattgagttccggatatatcttgctccaggaaccactcctctgtacaagcgaccctaccgtatggcagcaaatgaactggccgaagttaagaaacagttggaagagttgaaagaaaaggggtatatacgtccgagtacttccccttggggtgctcctgtgatttttgtggagaagaaagacaaaacgaagaggatgtgcgttgactacagagctctcaatgaagtcaccatcaaaaacaagtaccctcttccccggatcgatgatctgttcgatcagcttaaaggtgccactgtattctccaagattgatcttcgttccggatatcaccaattacgtattcgggaagaagatattccgaagaccgcattcaccacgcgatatggactgtatgaattcacggtgatgtcgttcggcttaaccaatgctcctgccttcttcatgaacttaatgaataaagtgttcatggaatacttggacaagtttgttgtggttttcattgatgacattctgatatactcacaatcagaggaagaccatcagcaccatctccgtctggtactgggaaagttgcgggaacatcaattgtatgccaagctcagcaagtgtgagttctggttgtccgaagtcaaattcttagggcacgtgatatctgctaaaggagttgctgtggaccccgaaacagtgaccgccgtcaccgattggaagcaacccaagacagtcactcagattcgcagtttcttaggtttggcaggatactaccggagattcatcgagaacttctccaaaatcgctcgacccatgacacagttgttgaagaaagaagagaaatttgtgtggagcccgcaatgcgagaaggcgttccaaactctcaaagaaaagctggtttcctcgccagtgttaatcttgccggatactcgcaaggacttcatggtgtattgtgatgcttcgcgccaaggattggggtgcgtgctcatgcaggacggtcatgtggtagcctatgcttcacgtcagctacgacctcatgaaggcaactaccctacacatgacttggagttagcagcggtggttcatgctctaaaaatctggcggcactatctcattgggaaccgctgtgaaatatatactgatcataagagtttgaaatacatcttcacccagtcggatctgaatcttcggcaaaggagatggttagaactcatcaaggattatgatgtgggaatacactatcatcctggtaaggccaacgtggttgccgacgctctaagccgaaagagccactgcaacactctcaacgtccgaggcattccacccgaacttaaccaacagatggaagccctgaacctaagcctagttggtcgcggattcttggctgcgttggaagccaagcctaccttgctcgatcaaatccgcgaggctcagaagaatgatccggacatgcatggactcctcaagaatatgaaacagggtaaagccgcaggtttcacagaggatgaacacggaaccctatggaacggaaagcgggtatgcgttccagataaccgagaacttaaacagctgatacttcaggaagctcacgagagtccttattccattcacccaggcagtaccaagatgtacttagacttgaaggagaaatactggtgggtcagcatgaagcgggaaattgcagagtttgtggctctatgtgatgtgtgccagcgtgtcaaggcagaacaccaacgaccggccggacttctccaacctctccaagtgccggaatggaaatgggatgaaattgggatggatttcatcaccggccttccaaaaacccaaggtggatatgattctatatgggtaatagtggatcgattaaccaaggtagctcgattcattcctgtgaagaccacctatggagggaataaactagcggagctctacttcgctaggatcgtgagtctccatggcgttcccaagaaaatcgtatctgataggggaagccaattcacctctcacttttggaagaagctccaagaagagctgggtactcgattgaatttcagcaccgcctatcacccgcagaccgatggacagaccgagcgtctaaatcagatcctagaagatatgctccgcgcatgtgtcctagatttcgggaagacttgggataagagtctcccctatgccgagttctcctacaataacagctatcaagccagcatacaaatggcaccctatgaagcgttgtacgggcgcaaatgccggacaccgctattgtgggaccaagttggagaaagccaagtgttcgggactgatatcctgagagaagctgaagctaaagtcagaatcattcgggataatctaaaggtggcacagtctcggcagaaaagttatgcagataaccgtcgccgtgatctggaattcgcagtggatgactttgtgtatcttcgggtcacgccattgcgaggtgtgcacaggtttcaaacgaaagggaagcttgcacctcggtatgtgggtcccttccgtatcgttgctcgacgcggagaagtcgcctaccagctggagttgcccgcctccttgggcaacgtgcatgatgtgttccatgtgtcgcaactcaagaaatgtcttcgagtgccatccgagcaggccgactcagagcaaatcgaagttcgcgaagacttgacgtatgtggagaagccagtgaaaatcctggacaccatggagcgcaggaccaggaaccgggtaatccgtttttgcaaggtccagtggagcaaccacgccgaagaagaagctacttgggagcgcgaagacgaactgaaggcagcccatcccgatctcttcgccagttcttccgaatctcggggtcgagattccgtttaa

SEQ ID NO: 86265 - DNA, 259 bp, Oryza sativa
  Clone ID: PAT_MRT4530_85321C.1
gcacgaggttcatttttagtactactgatctactgcagtgtgcaaacgccttggattcgagtagtttgattttggagaatgagggctactgcatttctttatcaagtgattagccattgggggtaattgtgtgcatttcaacttctggttcactaactagttcccaataagttagaacacacatatacttgtcaggttattctcgtgaataaaattaaattcttattggtcagatcgaattattactaatttgatgaga

SEQ ID NO: 86266 - DNA, 5847 bp, Oryza sativa
  Clone ID: PAT_MRT4530_85322C.1
atggatgaagtcgggggtcgatggacattctccagggcaaatgaaggctacacgagctgcggcccgatggccggcagcgttacccgtcgtggtttggacatgactggcttcgtcttggagctgcgaggcatgtgcgtggtcttggggtatccacatggagtggattaccaggccaggccgctcccggagcaggagggtgaggatgcagagcctcacgctggttgggaggtcactgcagtgatcctctccggctctcccgagcggacttcgctggcagtcaccgcgggtggggattccttccccgccgcttgccagaacgccgctctcctcgccatcggcacccttcaccagcgctacccggacgagttgcagcactcgccctaccgctaccaccctcgtcgcggaggagcccgcgactacgccaccttccgagacgccagctcggaggatgacgctaccgtcgtgcatctggcacgcatggtggaggcgtacgacgcggctcgtatcgacttccatcagatggtgcgtcgtggcatggtggagaacaacctgaagatcctggagctgcgtcaggagaacctgcagctcaagaaggacctcgacgcgttggaggcgcagctgcatcagctcaagatcgcccagggagaggacagccgtcccaagcgtcgccgcgtctgccgcagccagaagatcaccgcccgcaagagcacctccaggcccgagcttgttcgtcagtccctggcgtggacctgcttcgtcgagacccctcgtgccgagcctgcgcccgtggttccccaggagggggaagcctccggcgttggtagctcggaggttttaatcgtcagctctctttctctgcttgctggttctgtgtggggttttcagatggtgacgaccaggagaaatgttaacaccggtgaaggcaaccaacccgagggcagcaaccccaaccaccaaggcaatccacctccaccaccaccaccagacaccaacgccattctcacccaaatcctcgcccagcaagccaacatgatgactgctttcctccaccacctccaaaacccgccacaacagaatgctccaccaccacctccccaacactccaaactcgccgaattcctccgcatccgcccacccaccttctccagctccaacaaccccgtggatgcgttggattggttgcatgccgtggggaagaagctggacactgtgcagtgcagtgatgaagagaaagtcatcttcgccgcccaccagctgcaggggcccgcatctctatggtgggaccacttccaggctacgcagcccgaggggcagccgatcacttgggctcgcttcaccgccgctttccggagaacccatgtgcccgccggagtcgtggctctcaagaagagggaattccgagagttgaagcaaggcaaccgctccgtgatggagtatttgcacgagttcaacaatctggcccgttatgccccggaggatgtgcgggaagatgaggagaagcaagagaagttcttggcaggaatggaccctgagctgtctgttcgtctagtctctggagactacccggacttccaacgtctggtggacaagagcatccgcttggaagccaagcacaaggagctggaatcgcacaagcgccgcttggcgaacttccgcaatcagcagggtgctaaccagagggtccgctacaccaatccctacccagggggatcctcctcgcagcagcaacaacagcagcagcaacctcgcccagcgcctcgacctcaattcgtggtgcgcgtcccacagcagcaacagcagcagaatcagcaagggactcgtgcgccccgtcctcctacgccagctgggcagcccgttcaaggccgcagggacgcttcaggtccgcagcggctgtgcttcaactgcttcgagcccgggcactttgcggataaatgcccaaagccaaggcgtcagcaaggccaagcgcctccccgctccaacaacggcgggaaggatgtcattcggggtcgtgtgaatcacgtgacggccgaggacgtgctgacaactccagacgtcatcgttggtacgttcctcgttcattccatccctgctacaattttgttcgactctggagcttcccactcgtttatatctgtgccattcgtggggagaaatcagttgggggtagaaaggcttagaaaccctctgcttatcaccacccctggaggggttatgacagcaaagtactatagccctgccgtccctatagaaattcaggggattccttttccctcggacctgattcttctagacacaaagaacttggatgtgatccttgggatgaattggctggcacaattccaaggagtagtggattgcgcgagacgcactgttactctgtaccgaggaccagaacaaccggttgttttctttgcacctccaacctctgtcagaagttcagaactgcatcagataggtctgtcagaaatccccatcgtcagagagttcggagacgtgtttccggaagaactacctggtatgccgcccaagcgagagattgagttccggatagatcttgctccaggaaccactcctctgtacaagcgaccctaccgtatggcagcaaatgaactggccgaagttaagaaacagttggaagagttgaaagaaaaggggtatatacgtccgagtacttccccttggggtgctcctgtgatttttgtagagaagaaagacaagacgaagaggatgtgcgtcgactacagagctctcaatgaagtcaccatcaaaaacaagtaccctcttccccggatcgatgatctgttcgatcagcttaaaggtgccactgtattctccaagattgatcttcgttccggatatcaccaattacgtattcgggaagaagatattccgaagaccgcattcaccacgcgatacgggctgtatgaattcacggtgatgtcgttcggcttgaccaatgctcctgccttcttcatgaacttgatgaacaaagtgttcatggaatacttggataagttcgttgtggttttcatcgatgacattctgatatactcacaatcagaggaagaccatcagcaccatctccgtctggtgttgggaaagttgcgggaacatcaattgtatgccaagcttagcaagtgtgagttctggttgtccgaagtcaaattcttggggcacgtgatatctgctaaaggagttgctgtggaccccgaaacagtgaccgccgtcaccgattggaagcaacccaagacagtcactcagattcgcagtttcttgggtttggcaggatactaccggagattcatcgagaacttctccaaaatcgctcgacccatgacacagttgttgaagaaagaagagaagtttgtgtggagcccgcaatgcgagaaggcgttccaaactctcaaagaaaagctggtttcctcgccagtgttaatcttgccggatactcgcaaggatttcatggtgtattgtgatgcttcgcgccaaggattggggtgcgtgctcatgcaggacggtcatgtggtagcctatgcctcacgccaactacgacctcatgaaggcaactaccctacgcatgacttggagttagcagcggtggttcatgctctaaaaatctggcggcactatctcattgggaaccgctgtgaaatatatactgatcataagagtttgaaatacatcttcacccagtcggatctgaatcttcggcaaaggagatggttagaactcatcaaggattatgatgtgggaatacactatcaccctggtaaggctaacgtggttgccgacgctctaagtcggaagagccattgcaatactctcaacgtccgtagcattccgcccgagcttagtcaacagatggaagccctgaacctaagcatagttggtcgtggatttttggccgcgttggaagccaagcccaccttgctcgatcaaatccgcgaggctcagaagaatgatccggacatgcatggactcctcaagaatatgaaacagggtaaagccgctggtttcacagaggatgaacacggaaccttatggaacggaaagcgggtatgcgttccagatagcagagaacttaaacagctgatacttcaggaagctcacgaaagtccttattccattcacccgggcagtaccaagatgtacttagacttgaaggagaaatactggtgggtcagcatgaagcgggaaattgcagagtttgtggctctatgtgatgtgtgccagcgtgtcaaggcagagcaccagcgaccggccggacttctccaacctctccaagtgccggaatggaaatgggatgaaattgggatggatttcatcaccggccttccaaaaacccaaggtggatatgattctatatgggtaattgtggatcgactaacaaaggtagctcgattcattcctgtgaagaccacctatggagggaacaaactagcggagctctacttcgctaggatcgtgagtctccatggtattcccaagaaaatcgtatctgataggggaagccaattcacctctcacttttggaagaagctccaagaagagctgggtactcgattgaatttcagcaccgcctatcacccgcagacagatggacagaccgagcgtctaaatcagatcctagaagatatgctccgcgcatgtgtcctagatttcgggaagacttgggataagagtctcccctatgccgagttctcctacaataacagctatcaagccagcatacaaatggcaccctatgaagcgttgtacgggcgcaaatgccggacaccgctattgtgggaccaagttggagaaagccaagtgttcgggactgatatcctgagagaagctgaagctaaagtcagaatcattcgggataatctaaaggtggcacagtcccggcagaaaagttatgcagataaccgacgccgtgatctggaattcgcagtggatgattttgtgtaccttcgggtcacgccattgcgaggtgtgcacaggtttcagacaaaagggaagctcgcacctcggtatgtgggtcccttccgtatcatcgctcgacgcggagaagttgcttaccagctggagttgcccgcctccttgggcaacgtgcatgatgtgttccatgtgtcgcaactcaagaaatgtcttcgagtgccatccgagcaggccgactcagagcaaattgaagttcgcgaagacttgacctatgtggagaagccagtgaaaatcctggacaccatggacggcctcctgggcagcctcctcggcttctcggaggcggatgttggcgcactccagatcgcagcagagggggaggaccccttgggggatgagggatgcctccacggagctgagattcagcacccgttggaccaccatcctgaagtcctcagggtcccagtcctatttgcgcccctggtgggtcctcatgatgtcctcgggcccggagtactcccaggcgccccgggcgcgccgctggagcggcgcgatccggcgacgaaggtagtcgccgaacaccatggcccctgtgagcccctgggatcgcaggcccgccaggcggtcaagaacggcgtcgtagccgtctcccagatctaccgtcgaccgccagctggaggcctgcgccgggggctggctcggaagtcggaggcgcgcttcgtcgacgaggggggtgtagaaccagtcgctcttccagtcgtcccactttttgcggaggacgcagggaatgtagcggttcagcacctgcccccgcggctggaagtagcagccaccgactaccgtcggcggcgacaccggctgaacggtgaagaaccaccggaacagccggagagatggccaacgtcattatcgcgttgggggtga

SEQ ID NO: 86267 - DNA, 1025 bp, Oryza sativa
  Clone ID: PAT_MRT4530_85323C.1
atcgaagcggaaagccaatggcggaggcggcatcgtacgaggagcagcggaggcggcaggtggaggcgaacaagcggaagctggaggagctccgcctccaccacctctccgccgccgtccgcgaatccgcctccaagccgtcgccggtgaagcagcggaagaggaaggcgcgtgcgctgccgggcgccggcgaggatgccccgctccggcggtccggccgcgtcgccaacctccccgagaagcccaagtaccgcgacgagttccaagatttcgagaagaggataaggaggtcttatggcggcaagaggagggatttgtccaatcgagtttacgcgaccgacgagcaaagggactacgccatcaacgctgctcaagagctggaagaggagctcggctccgactacccaatcttcgtcaagcccatgcttcagtcccatgtcactggagggttctggctgagcctgccgacgcatttcagccggaagtatctgccgaagcgcgacgagactatccgtttggtggatgaggaggatgatgagtttgacaccctctatcttgccaacaagagggggctcagtggagggtggagggggttttccattgctcataagctagttgatggagattgtttggtgttccaacttatccagcgcacgaagttcaaggtctacataatcagagcaagttcctactatgaaactgacgactgatgtagaggctccaaatatctgtgattggggcccaggttttttagtgaattaggttgccctgaattggagattgctaggccatcttcagtcttttgagtgatgaccaatgttcaaaatattaactacgtattaggttacttatggcctacccctccccagtcttttgatggccaccaatgtcagaagtattaaattggcatataatttccccgctaataggctaagttgttagatttactttgagcttgcccagttcagaaatttgccctatgtaagggatatccttgcaattggtaactgaggatgctttttttt

SEQ ID NO: 86268 - DNA, 11069 bp, Oryza sativa
  Clone ID: PAT_MRT4530_85324C.1
gtggatgaagtcgggggtcgatggacattctccagggcaaatgaaggctacacgagctgcggcccggtagtcgagatgtcatggcacagggccggtgtcctgctgctaggggctcagtcctgcctgcctgtcccgggggttccggccataggcgggattgggtcgatgtacacctctgatcagagtaaaatctattcgaatagccgcgccctcggttatgggcaagccgagcaatgtacccaaatggccggcagcgtcacccgtcgtggtttggacatgactggtttcttcttggagctgcggggcatgtgcgtggccctggggtatccacacggagtggactaccaggccaggccgcttccggagcaggagggtgacgatgcagagccccacgctgcttgggaggtcactgcagtgatcctcgctggctctcccgagcggacttcgctgacagtcaccgcgggtggagactccttccccgccgcttgccagagcgccgctctcctcgccatcggcactcttcaccagcgctacccggacgagttgcagcactcgccctaccgctaccaccctcgtcgcggaggagcccgcgaccacgccaccttccgggatgctagctcggaggatgacgctaccattgtgcacttggcgcgcatggtggaggcgtacgacgcggctcgtatcgacttccatcagatggtgcgccgtgggatggtcgagaacaacctgaagatcctggagctgcgtcaggagaacctgcagctcaagaaggacctggacgcagtggaggcgcagctgcatcagctcaagatcgcccagggagagatctgccgccccaagcgccgccgtgtctgccgcagtctgaagatcactgcccgcaagagcacctccaggcccgagcttgttcgtcagtccctggcgtggacttgcttcgtggaggcccctcgtgccgagcctgcgcccgtggttccccaggagggggaagcctccggcgttggtagcacggaggatgcgctgttgctcaccttccgtcctggcccgtcgcagcagtagacgagcagttagtaggcttgcgcatggtgacgaccaggagaagtgctaacacaggtgatggcaaccaacctgaaggcagcaaccacaaccatcagggcaacccacctccacctcctcctccgcctccaccaccactaccagacaccaacgccattctcacccaaatcctcgcccagcaggccaacatgatgactgctttcctccaccacctccaaaatccgccacaacttaatgctccaccaccacccccacaacactctaaactcgccgagtttctccgcatccgcccacctaccttctctagctccaacaaccccgtggatgcgttggattggttgcatgccgtggggaaaaagctagacactgtgcagtgcagcgatgaggagaaagtcatcttcgccggcccaccagctgcagggacccgcatctctatggtgggaccatttccaggctacgcagccagagggacagcctattacatgggctcgcttcaccgccgctttccgaagaacccatgtgcccgccggagtcgtggcccttaagaaaagggaattccgagagttgaagcaaggcaaccgcttcgtgatggagtatttgcacgagttcaacaacctggcccgttacgctccggaggatgtgcgggaagatgaggagaagcaagagaagttcctggcaggaatggaccctgagctgtccgtccgtctagtctccggggattatccggatttccaacgtctggtggacaagagcatccgcttggaagccaagcacaaggaactggagtcgcacaagcgccgcttggcaaatttccgcaaccaacggggtgctaaccaaagggtccgctacaccaatccctatccagggggatcctcctcgcagcagcaacaacagcagcagcaacctcgctccgcgcctcgacctcaattcgtggtgcgcgtcccacagccgcagcagcagcagaatcaacaagggactcgtgcgccccgtcctcctacgccaactatgcaacctggtcaaggccgcagggacgctcaaggtccgcagcgtctgtgcttcaactgcttcaagcccgggcactttgcggataaatacccgaagccaaggcgtcagcaaggccaagcgcctccccgccccaacaacggtggtaaggacgtcattcggggtcgtgtgaaccatgtgacggccgaggacgtgctgacaactccagacgtcatcgttgaacttcatcagatagaactgtcagaaattcccatcgtcagagagttcggagacgtgtttccggaagaactacctggtatgccgcccaagcgagagattgagttccggatagatcttgctccaggaaccactcctctgtacaagcgaccctaccgtatggcagcaaatgaactggccgaagtcaagaaacagttggaagagttgaaagaaaaggggtacatacgtccgagtacttccccctggggtgctcctgtgatttttgtggagaagaaagacaagacgaagaggatgtgcgttgactacagagctctcaatgaagtcaccataaaaaacaagtaccctcttccccggattgacgatctgttcgatcagcttaaaggtgccactgtattttccaagattgatcttcgttccggatatcaccaattacgtattcgtgaagaagatattccgaagaccgcattcactacgcgatacggactgtatgaattcacggtgatgtcattcggtttaaccaatgctcctgccttcttcatgaacttaatgaacaaagtgttcatggaatacttggataaatttgttatggtgttcattgatgacattctgatatactcacaatcagaggaagaccatcagcaccatctccgtctggtgttgggaaagttgcgggaacatcaattgtatgccaaacttagcaagtgtgagttctggttgtccgaagtcgaattcttagggcacgtgatatctgctaaaggagttgctgtggaccccgaaacagtgaccgccgtcactgattggaagcaacccaagaccgtcactcaagtccgcagtttcttaggtttggcaggatactaccggaggtttatcgagaacttctccaaaatcgctcgacccatgacacagttgttgaagaaagaagagaaatttgtgtggagcccgcaatgcgagaaggcgttccaaactctcaaagaaaagctggtttcctcgccggtgttaatcttgccggatactcacaaggacttcatggtgtattgtgatgcttcgcgccaaggattggggtgcgtgctcatgcaggacggtcatgtggtggcctatgcctcacgccagctacggcctcatgaaggcaattaccctacccatgatttggagttagccgcggtggttcatgctctaaaaatctggcggcactatctcattgggaatcgctatgaaatatatactgatcacaagagtttgaaatacatcttcactcagtcggacctgaatcttcggcaaaggagatggttagaactcatcaaggattatgatgtgggaattcactatcatcctggtaaggccaacgtggttgccgacgctctaagtcgaaaaagccattgcaacactcttaacgtccgtggcattccacccgaacttaatcaacagatggaagccctgaacctaagcatagttggtcgcggattcttggctacgttggaagccaagcccaccttgctcgatcaaatccgcgaggctcagaagaatgatccagacctgcatggactcctcaagaatatgaaacagggtaaagccgctggtttcacagaggatgaacacggaaccctatggaacggaaaccgagtatgcgttccagataacagagaacttaaacagttgatacttcaggaagctcacgaaagtccttattccatccaccctggcagtacgaagatgtacctagacttgaaggagaaatactggtgggttagtatgaagcgggaaattgcagagttcgtggccctttgtgatgtgtgccagcgtgtcaaggcagagcaccaacgaccggccggacttctccaacctctccaagtacctgaatggaaatgggatgaaattgggatggatttcatcaccggacttccaaagacccaaggtggatatgattctatatgggtagttgtggatcgattaaccaagacagatgggcagaccgagcgtctaaatcagatcctagaagatatgcttcgcgcatgtgtcctagatttcgggaagacctgggataagagtctcccctatgccgagttctcctacaataacagttatcaagccagcatacaaatggcaccttacgaagcgttgtatgggcgcaaatgccggacaccgctcctgtgggaccaagttggggaaagccaagtgttcgggactgatatcctgagagaagctgaagcgaaagtcagaaccattagggataatctaaaggtggcacagtcccggcagaaaagttatgcagataaccgtcgccgtgacctggaattcgcagtggatgattttgtgtaccttcgggtcacgccattgcggggtgtacacaggtttcagacaaaggggaagctcgcacctcggtatgtgggtcctttccgtatcgttgctcgacgcggagaagtcgcttaccagttggagctgcccgcctccttgggcaacgtgcatgatgtgttccatgtgtcgcaactcaagaaatgccttcgagtgccatccgagcaggccgactcagagcaaattgaagttcgcgaagacttgacctacgtggagaggccagtgaagatcctggacaccatggagcgcaggaccaggaaccgggtaatccgtttttgcaaggtccaatggagcaaccacgccgaggaagaagctacctgggagcgcgaagacgagctgaaggcagcccatcccgacctcttcgccagtccgccgccgtcctcgccccggacctcctcccgcttcggcatcgcctccttcggcttcgccgcgttctcgccgaccttgtccactcctccgtttcgcccgccgaccgccggagcaccgccgtcctcgtcgacccgagccgcgccgccgcctctctccgcttcggtcgccgttcccgtcatcgccgtcgacccggggtgagccgtgaaccgccgcttcatttccccctttccctcccctctctcggccaccgctccgccgtgcctatggccgccgccggcgaccataagggcgcgggcgcgccgcctcccgtcggctgtgccggcgtggccgccttcgggcgcgccccgcggctgccgtgtggggcccggctgtcagccgcccgcgcccttaggtgcggctgacacgagggacccacggcgccggccggcgtaagccgcgtgctcccggtccaccgtggtcgtacctcggttactataaggattaagctcgggcctctgttgcaaagcactactgtacttccacatgtctactgggacaaatgaaggctacacgagctgcggcccggtagtcgagatgtcatggcacagggctggtgtcctgctgctagggggctcaatcctgcctgcctgtcccgggggttccggccgtaggtggggttgggtcgatgtacacctctgatcagagtaaaatctattcgaatagccgcgccctcggttatgggcaagccgagcaatgtacccaaatggccggcagcatcaaccgtcgtggtctggacctgactggcttcgttttggagctgcggggcatgtgcgttgtcttggggtatctgcatggagtggactaccagggcaagcagctcccggaataggagggtgacgatgcagagccccacgctgcttgggaggtcactgcagtgattctcactggctcacccgagaggacttcgttggcagtcaccgcgggtggagattctttctccgccgcttgccagaacgccgctctcctcaccatcggcactcttcaccagcgctacccggacgagttgcagcactcgccctaccactaccgccctcgtcgcggaggagcccgtgactacgccaccttcagggatgctagctcggaggatgacgctaccatcatgcacctggcgcgcatggtggaggcgtacgacgcggctcgtatcgacttccatcagatggtgcgtcgtgggttggtcgagaacaacatgaagatcctggagctacgacaggagaatctgcagctgaagaaggacctagacgcagtggaggcgcagctgtgtcagctcaagatcgcccagggagaggtctgtcgccccaagcgccgtcgcgtctgccgcagcctgaagatcactgcccgcaagagtacctctaggcccgagctggttcgtcagtccctggcgtggacctgcttcgtcgagacccctcgtgccgggcccgcgcccttggttcctcaggaggagggagcctctagcgttggtagcacggaggatgtgttgttgctcaccttccgccctggcccgtcacagaagtagacgagcagttagtaggcttgcgcatggtgacaaccaggagaagtgctactaccggtgatggcaaccaacccgaaggtagcaaccacaacaaccatggcagcccacctccacctcctcccccgcctccaccaccaccaccagacaccaactccattctcacccaaatcttcgcccagcaggccaacatgatggctgccttcctccatcacatccaaaatccgtcacaacataatgctccacctccaccaccacccccgcaacattctaaactcgcagagttcctccgcatccgtccacctaccttctctagctccaataaccccgtggatgctttggattggttgcatgccgtggggaaaaagttagacaccgtgcagtgcaacgatgaggagaaagtcatctttgccgctcaccaactgcaggggcccgcatctctatggtgggaccactttcaggctacgcagctagaggggcagcctattacttgggcccgcttcaccgccgctttccagaggacccatgtgcccgccgaagtcatggcccttcagaaaagggaattccgagagttgaagcaaggcaactgctctgtgatagagtatttgcatgagtttaacaacctggcccggtacgccccggaggatgttcgtgaagatgaggaaaagcaggagaagttcttagcaggaatggaccctgagctgtccgtgcgtctagtctccggggactatccgaatttccagcgtttggtggacaagagcatccgcttggaagccaaacacaaggaactggagtcgcagaagcgtcgcctggcgaatttccgcaaccaacagggggctaaccaaaggatccgctacaccaatccctatccagggggatcctcctcgcagcagcagcaacagcagcagcaacctcgctccgcgccccaacctcaattcgtggtgcgcgtcccacagccgcagcagcagcagagtcagcaagggacccatgcaccccgttctcctacgtcagccgtgcagcctggacaaggccgcagaaacgttcaaggtcagcagcgtctgtgcttcaactgcttcgagcccgggcactttgcggataaatacccaaagccgaggcgccagcaaggccaagcgcctccccgccccaacaacggtggtaaggatgtcattcggggtcgggtgaaccacgtgactgccgaggatgtgctgacaactccagacgtcatcgttggtacgttcctcattcattccatccctgctaccattttgttcgactctggagcttcccactcgtttatatctgtgccattcgtggggagaaatcagttgggggtagaaaggcttaggaaccctctgctcatcaccacccctggaggggttatgacagcaaagtattatagccctgccgttcctatagaaatccagggaattccttttccctcggatctgattcttctagacaccaagaacttggatgtgatccttgggatgaattgattggctcaattccaaggagtaatggattgtgcaagacgcactgtcactctgtaccgagggccggaacaaccggttgttttctttgcacccccaacctctgtcggcagttccgaacttcatcagataggactgtcaaaaatcccgatcgtcagtgagttcggagatgtgtttccggaagaactacccggtatgccgcccaagcgagagattaagttccggatagatcttgctccaggaaccactcctctgtacaagcgaccctaccgtatggcagcaaatgaactggccgaagtcaagaaactgttggaagagttaaaagaaaaggggtacatacggccgagcacttccccctagggtgctcccgtgatttttgtggaaaagaaggacaagacaaagaggatgtgtgttgactacagagctctcaatgaagttactatcaaaaacaagtaccctcttccccggatcgatgatctgttcgatcagcttaaaggtgccactgtcttttcaaaaatcgatcttcgctccggatatcaccaattgcttattcgtgaagaagatatcccgaaggccgcgttcaccacgcgatatgggctgtatgaattcacggtgatgtcgttcggtctgactaatgctcctgccttcttcatgaatttagtgaacaaagtgttcatggaatacttggataagtttgttgtggtcttcatcgacgacatcctggtgtactcgcaatcagagatctccgtttggtgttgggaaagttgcgggaacatcaattgtatgccaagcttagcaagtgtgagttctggttgtccgaagtcaaattcttagggcacgtgatatctgctaaaggagttgctgtggaccccaaaacagtgaccgccgtcactgattggaagcgacccaagacagtcactcaagtccgcagctttttgggtttggccgggtactaccgaagattcatcgagaacttctccaaaatcgctcgacccatgacatagttgctgaagaaagaagaaaaatttgtgtggagcccacaatgcgagaaagcgttccaaactctcaaagaaaagctggtttcctcgccagtgttgatcttaccggatactcgtaaggacttcctggtgtactgtgacgcttcgcgccaaggattggggtgcgtattaatgcaggaaggtcatgtggtagcctatgccacacgccagcttcggcctcatgaaggcaactaccctacccatgatttggagttagccgctgtggttcatgctctaaagatctggcggcactatctcattgggaattgctgtgaaatatgtactgatcataagagtttgaaatacatcttcactcagtcggatctgaatcttcggcagagaagatggttagaactcatcaaggattatgatgtgggaatccactatcatcctggtaaggccaacgtggtcgccgacgctctaagtcgaaaaagccattgcaacactcttggcgtccgtggcattccaccggaacttaatcaacagatggatgccctgaacctaagcatagttggtcgtggattcttggctacgctggaagccaagcctaccttgctcgatcgaatccgtgaggctcagaagaatgatccagatatgcatgggatcctcaaaaatatgaaacaatgtaaagccgctggtttcatagaagatgaacatggaaccctatggaacggaaatcgtgtatgcgttccggacgacaaggaacttaaacacctgatacttcaggaagctcacgaaagtccttattccatccaccctagcagtacgaagatgtacttagacttgaaagggaaatactggtgggttagtatgaagcgggaaattgcagagttcatggccctttgtgatgtgtgccagtgtgtcaaggcagagcaccagcgaccggccggacttctccaacctctccaagtaccagaatggaaatgggatgaaattgggatggatttcatcaccggacttccaaaaacccaaggaggatatgattctatatgggttgttgtggaccgactaaccaaggtagctcggtttattcctgtgaagaccacctatggagggaacaaactagccgaactctacttcgctaggatcgtgagtctccatggcgttcctaagaaaattgtatctgatcggggaaaccagttcacctctcacttttggaagaaactccaagaagagttgggtacccgattaaatttcagcaccgcgtatcacccgcagacagatggacagaccgagcgtctaaataagatcctagaagatatgctccgtgcttgtgttctagatttcgggaagacctgggataagagtctcccctatgccgagttctcctacaataacagctaccaagccagcatacaaatggcaccctatgaagcgttgtatggacgcaaatgctggacaccactattgtgggaccaagttggggaaagccaagtgttcgggactgataacttgagagaagctgaagcgaaagtcagaaccattcgggagaatctaaagttggcccagtctcggtagaagagttatgcagacaaccgacgccgtgacctggaattcgcagtggatgactttgtctatcttcgggtcacgccgttgcgaggcgtacgtcggtttcagacgaaagggaagctcgcacctcggttcgtgggtcctttccgtatcattgctcgacgcggagaagtcgcttaccagttggagctgcccgcatcattgggcaacgtgcatgatgtgttccatgtgtcgcaactcaagaaatgtcttcgagtgccatccgagcaggccgactcagagcaaattgaagttcgcgaagacttgacctacgtggagagaccagtgaaaatcttggacaccatggagcgcaggaccaagaaccgggtaatccgtttttgcaaggtccaatggagcaaccacgccaaggaagaagctacttgggaacgtgaagacgagctaaagtcagcccatcccgatctcttcgccagttcttccgaatctcggggtcgagattccgtt

SEQ ID NO: 86269 - DNA, 459 bp, Oryza sativa
  Clone ID: PAT_MRT4530_85325C.1
atggccacggatccgagaggtcggcggccgcggcaccacgcggcggtgaacgaagtgctctcgacgctcgccgccgccaacagcaccctcgccgacgtgcagcgccgcctcgacgccgacttccgcgccgcctacccggatcacgcgaatccggtgaagctggtggcgcggctgaagcggatccaggaagaggtagcggcggtcaagggactctgccgcgatctgctcacccagaagcaggagttgatcgacgcaatgcggacaagcctcgcggtgcagcgcagcgccgtgcagcggctgctcgcctcctccgggctgccccccatgtccgaagaggacgccgccaccgacgccaatctcaaccagatcatcgatgagtggacggcgcatgttgggccagacacaggagatgacaaggatgaggataccaaccaaatcttcttcgccgctgtcgtttag

SEQ ID NO: 86270 - DNA, 141 bp, Oryza sativa
  Clone ID: PAT_MRT4530_85326C.1
atggcgctcatacttcaagtaaaacctgaagcaaagagcgtgtcgcacatgcgaaaaggaatggttgcgatgcgatgtggagaagaaagtcgcgggggtggcctttacgccatgaacaaatactgggagtgggagagatag

SEQ ID NO: 86271 - DNA, 401 bp, Oryza sativa
  Clone ID: PAT_MRT4530_85327C.1
tagtggatccccgggctgcagggttcaggctggagctcagtgtccctgaggttttgccccttgctcacttgatactacgagtagtgtttgatgcctgccgttggaaaaagaaaacaatctttgcaagggctaattcagatttctgacgtggctgcaggcgctatcactgctcgatatcttcgccgagaaagtttttgcatgagtttgagagtatagcatgatgagctgacgatgtggcgagtactatatacatatatgtcccgcatgtatgtttctgcttcctgaggattgcagagggaaagaataagagtagtgcaagcaaacataataatgatgtgtataatgttagcgccatgctgattagcagcatttgattatctagtacaagatatactagagca

SEQ ID NO: 86272 - DNA, 361 bp, Oryza sativa
  unsure (1)..(361): unsure at all n locations
  Clone ID: PAT_MRT4530_85328C.1
ccggcaactcggcgcgggcgagacagctggtgcacgtgctccgcgcttaagccatggttggcaggcatctacaagatcttggccccccaantctcactggggttcgtnggtgtccctactaccataaaaccaactttnagctccctgcagcaagactcccatcattctacaacatgaacattcaaaatgggacaagtcgagtctgctactggctaagtcattctatgaccccgagaactggtcactaggctactaaagctagctgtgtgtatgagtgtgtggggttgctaaataactattgttttctttttttaggaagcatatatacatatggtgaataaatgatgaacttcaatgttct

SEQ ID NO: 86273 - DNA, 298 bp, Oryza sativa
  Clone ID: PAT_MRT4530_85329C.1
cagatgtgggttggctgctccaccccctgccggttaggctggggtcggttcaaatccggatcgatttcagaatattccttctggtcagcggttggcgggagaggatggtggcaacatcttcatctctgcccatcattactggtggggagggtctgtgaaaatcaagtctgaaatcgggtaatctataaggggaggcaatgcctaaagtggcgccggttatcaatctgtagggcgaagacacaccctgcgtaacgggatacaacacacatgtcactttttgcaaagcaagaaggaggat

SEQ ID NO: 86274 - DNA, 2796 bp, Oryza sativa
  Clone ID: PAT_MRT4530_8532C.1
atggcccctcgcaagccaaacccagcttcggcgaaaggaccggatcctggccgggtcgatgacgacagcaccgcctttttgggggtctctcttgtggacgacgtcgagctggcgaagctggtcagctctggggcattggttgaggggcaggctttcgccgcggggaaagccgtggtgccgaggcctatcgacaactggacagtggtgttcgccgtcttttttgaggcggggctatggtttccgtgcaacgtgttgttgccgaagatccttcaccttttccaagtggagcttccacagctgagtccgtcggcgctagttcggatctccatctttgactgggcgtgccggacttccgggtttgagcccagcgccgagctcttcggcgccatatttttcgccaccgtgaactcgaagacggtgattaccccagccggaacgaagaagacagtgttcgggagcgtgaactttaacgttcgccccgagcggtctgatctctggccggtgaacactgccatgtcgaagtgggaccgccattggatggcgaggtggttctatcacaccatccccttcgcagctggttctgactcggcaaaagccctccggtgccggcgtagggtgattgcgccgaatcggaagcctaagatcgccgtggacggcgctatggaggcgcggttcgtcctactgtgcaaggtttgctcccgccttagctgccgtggcttggtggaggagttctgtatgcttcgcatctttcccctctcccagtcatggcgggtcacggtcgagcaatgcgaagaggctgatggtttgccgaacttggttcttcctgaggggatgaatatgtcgaccctcgatcaggctgaagccgaagcccgcaggatgatcggcgacgtttcggtcgtcgagtatagccagctgctaacacgacaagcagctaggcgggcaaaccgggtttacaacggtgaattgcctccccgggtgaatccccaaaaagccgacaacgatgcagggccttcgcgaaagcggatgcgtggacaagtgaagcttgcccccaggaagcgaagggttcttgcttcgtcggactccgacgccgacgatgaggacaatgccgaagaacgtgacggcgaggaggaaggagaggaagaagaggaggtggaggccgtggccgataaggccgcgaacgaggcgaccgaagaccgcgtcgacacgcccggctacactcctaccccaagtctaggtcacaacgagaccggggtggagtcgaacagctccctccttcgacgaaaggatttggaaggggcgaaggccctagttgcgttctcgtcgggcaaggcggcgaaaggaggtctggtcaagaagatctcaaaaaagaagggactcgtcgacatcgctcgcgttttcagtgacgacgagtcttctgacgagactccgacctcacctgctggccgcagtttggacctttcgactgctccccttgctccgctcggcgttgctggggccggcggtagcgccgccgccggggcttccgcctccaccgaacggatcgtgtcggctgcggcgagggttttcgggagccctgtgcgcaagccagccatttcgccgctggtcaaggcgaaggggaagtgtgcggccgccgaagcatctgcctcggagtattcccttgcggcgccccacttcgcccctggtgacttcgagacccgggcggaccttattccctttgtggagggagtaagcaatcttgtcttgcctgccggcaccccgagcctgttcaccgaatttaacgagttcgacgaggggtgttccaccattaaaagtctggcggttcggattcttgcggctcactgttcgacggagcgaaccgtgcgggcccgttttgacggttttaagagccgtcttcgggccaaggacgacgaaataagccgcaagaacctggaggtggagtccctggcccgcgtactcaaggaggcgaagactgaagtcaaacgccttcagtccgaattggacaaggggaaagaggcctgggccgaggttgatcgcctcaaggccgaactggagaaagagaaggcccattcggcggtgctcatcgactactacaaccttactgagccgaagatggaggctctttgccagaaggctagcagggccgaggcgagcgccgcggaggagtcgcagcggttttcgtgggagaaggcgaagatcaccgaatccgcaagaacggcttgccaaacgctccgcctcgccttaccgacatgggcgcgaaggtgcggggggtccctgccgaggatgcctcagccttcgacttctccgagtggacccagcaggctggcggatcggtttcggactgcgccaccgcgccttctgcagcagttcggctgcgagcacatcgccgagttccctacctatgtaaggggggactgggagattagtgcgcagaacatttcgccagctcttcgcgcgtggcgaaaacagttctggcagaaggatggccggtccgctgccaaagcgtgcctcctggagcaactaacgaaggcggaggcggcagatcggggcgaagaggaggaagccgcgggcgaagaggttggaggcgatgctcaggatcacccagagggggttcgccgaaagtcatgcattcggcccccttccaggagctggcaaagtcaaaacgagaaatttgtggcaatgaagggtctgccgaaggtgcgatgtccatttcggcctgtttatcgcgaaatggagataaacggtcgcagctacaaggttttcaaggttgccaactggctgcgggcgcaccccgggtga

SEQ ID NO: 86275 - DNA, 601 bp, Oryza sativa
  Clone ID: PAT_MRT4530_85330C.1
ctgcaggaattcggcacgaggctcctctctacgttcctctgccgccatcgctgcgcatctccaaccttagctccaaggagagccagctagctagctgcgtcgtctctactaatctagggtgacgcatggagaaagctagcagctagcttactgtccaatctcactgcttcacaaagaagcttctcttttcttttactgttcaggaggcttcactcttctcggcaacctctccccaatacagactagctggctgtaacgagatggtctcatggccgtgagatcacctcaccgagcattcctagtggccatgattctggtgagcttccttctcggagctgcagccggcatccgcagcacgacgctgtcttcttctcagagcctagcggaggacaagtcgcggctggggtcgacgccgccgagctgccacaaccggtgcaacgcgtgcaacccctgcacgcccgtccaggtggcggcgctgccgggggttagccgcccggcgagcgccgccgaccgagttgatgtcgccgggttcgcgcagtactccaactacaaaccgctgggttggaaatgccgctgcgccggccgcctcttcgacccctag

SEQ ID NO: 86276 - DNA, 1713 bp, Oryza sativa
  Clone ID: PAT_MRT4530_85331C.1
atggcccctcgcaagccgaacccagcctccgtgacgggccctgatcccggtaggattgatgacgataccactgcctatttagcggattcgctcgtggacgaagacgagttggcgaagctggtcacttctggcatgctggtggatgggcaggccttcgccccgggaaaggccgtggtgccgaaacccgacgacaaccggacgatggtgctcgccgtgttctccgaggcgggccttcagtttccgtgcaacatgttgttgccggagatccttcgcctttttcaggtggagctcccccaactgagcccatcggctctcgtccggatcgccatcttcgacagggcttgtcggaccgccgggtttgagcggagcgccgagcttttcggcgtcgtattttatgccaccgtaaattcgaagatggtggtcactccggccgggacaaagaagacggtgttcgtgagcgtgaactttaatgttcgccccgggcgctctgatctctggccggtgaacgccgctatgtcgaagtgggatcgccattggatgtcgaagtggttctaccacgccatccccttcgaggttgggtccgacgcggtgaaagcccttcgatggcggcgcaggccgatcgtgccgaaccagaagcccaaggcgccgtcgatggcgctatggaagcctggtttgccctgctccacaaggcggccgaccgggcgaatcgggtgcacgatggcaaacttcctccccgggcgaagcccttcaaggccgatggcgatgaagcggatgcgcgggcaagcgaagttggcccctcggaagcgaagggcccctgcctccaccgactctgacgccgatgacgaagacaccgtcgaagacaatgacggcgagcaggagggggaggataagggggagacggaagctgcagccgaaaaggctatggatgaggccaccgacacccacaccgagatgcgcagctacatcctaactccaagccctgaccatgtcgaaaccgagaatctggagggggcaaaggcgcttgtttcgatcgcagcggccaaggtgtccaagaagaaagtgctcgtcgatgtcgctcgtgttttcagcgacgacaagtcttcggacgagacccctacttcgcctgctggtcggagcatgggtctctcgaccgctcccggtgctgtggtcgaggtgggcagagtgggtgggagcgttgctgccgggactttagcttctgctgaccgggttgtcaaggccgcggccaggctcttcggcaaccatgtgcgcaaaccggtggcttcaccgcttgccaacgggaaggggaagaaaacagccgctgaaacgtctgctttagagtattctctggcggggccccacttcgtcccttccaatttcgagactcgggtggatcttatccccttcgtcgagggggaaagtaatctcgtctctccggccagcagtccgagcctgttcaccgagctgaatgagttcgacgaaggctgttctgccatcaagagcttggcagtctggattctcgcggcccactgctcgaccgagcgaaccatgtgggctcatattgacggcttcaagaaccatcttcgagccaaggacaatgaactgggtcgcaagagcttggagatggagggcctcgccaacaccctcaaagaggcgaaggctgagaacaagtggctccaagctgagctggagaaggggagtgaggcgaaggcttag

SEQ ID NO: 86277 - DNA, 831 bp, Oryza sativa
  Clone ID: PAT_MRT4530_85332C.1
atggcaagcggaagcggcgagggcaagggcgatatcccaagcgtcgtcctgctcgagctctggggccacgtcgccgacgacgacgacgatgacgacgaccaccggcccgacgccaccaccgccacttccacgacgagcaccggcctcaccatctcggtgaccttgcgcgccgccaccccgccagccctctcgcacctctccgtctactgccctggtctggcggatctggacccccaacccctcggacaagttcgtggcgcccacggtggcgcaaggctttaccgtctcccgagccgcccaagtgaccgtggcttcggagacgacaacattgccatcctgagctgcggcaacgacgactcctcctcctcctcctacgctgtggccgttcttcaaccttggtatcatgtcgacttcaggcttcacctgtgtcgctctacctccgatggaaagccggggagtagttggatctcccatcagttgacagtggaggagccactgatgaggagaacggtgtgccccgtccctgactcggcactgaggaggatcttccatacgactaccaaggtgatcacgctcggaggtgccaaaggcacagttggctgggtcgatctctggcgaggcatccttctctgcgacgtgctcgaagacagccccaagctccgcgacatgccgctgccattgcccgctagggtcaactggccattgttcctcaaccgctgcccgtactattgccgtgacatcgtcgtcagccagagcagggacactatcaagtacgtcgagatggaattcacgaatgggtggccacccagcgatttcgaagctcgcatctag

SEQ ID NO: 86278 - DNA, 1077 bp, Oryza sativa
  Clone ID: PAT_MRT4530_85333C.1
atgatccgtcgcttcctctacatggtcgacatcttcgacaaagccggctacggccctcaaccctacaggctacgccgcatcaacccatcacatctcttcttccccaaggatgcgctgcccgtgccccagtcgtcgtcggcggcgacggtggtggaggacctccccctgcctccgacggagatcaccttctgcgggtcgacggagttcatgcgcaggagcgacgacaagatcgtcggcgtcgaccggactactcgccgcgccatcctctacgaccccgccgagcactccgtccgcgtcttgccctccatgctagcgcccaaattcaacaccaaggcgctcgccatcggcgacgatctctacctcatggatatgacaccttggcctgacaagggtgacgaccgtcagggtcgacggtcggggcattctttcgaggcgctcatccaccgtgaccgacgccccctcaatgggggcaggctggaggacgagtgctactggcggcccctgccgccgcctccgtgcgtgcacgccgccggctacagaggcagcagcggagagatccgtgggtacgcggtggtcggcgacgcccacatcttggtctccacccagagctatggcacctactccttcgccacggccaacaccgcgtggagcaaagctggcgactgggcgctgcccttctgcggccgcgccgagtacgtccccgagcacggcctctggttcggtctctccgccgccaacgatgacgtctttggtgcctgggacctgtcctccaccgtccagcagcagccagtggtggcgcaccgcgggtgcaagggctttgcagtgctagagacgccatacgcctcatacgtcgtgcacctcggcgacggcaaattgtgcatcgctaagctgttcatggtcgcgcgccgcgagacctgcagcgaatcttggtgcgactttgacagggatagaaggttttgcaccatgctcaccggtgtggaggtggtgcgctgcaacggcgacaagcttcacatcatcaagcacaggtcgtgccgttatagctttggtgaacactacatccccacttatgtactctaa

SEQ ID NO: 86279 - DNA, 375 bp, Oryza sativa
  Clone ID: PAT_MRT4530_85334C.1
atggcgatggtcgtcgtctccacggccggcggcaaggtttggggcgatggagaggcagagaacctcctccctcggagcagtggaggaagtgatggacagagtcaaggcaagctcaagaggctgtcaggtgggtccaggtcgtggcaaactaggctaggcacggactccaagacaaaatgtgtgtatgacagcgacaggttctgtgcacagcatggcaatttccaccaccttccatatggagttgacatcgtagtcgcctctgagccgcgcatcagcaatggagctgatgtcacccgccacaactttcatttttatacgttggatgatgtggccctggccttgtattatcggacgctcacccgtgactacctctaa

SEQ ID NO: 86280 - DNA, 2661 bp, Oryza sativa
  Clone ID: PAT_MRT4530_85335C.1
atggctacaagggttaacccgagggtggcggctcgtggaggcgaccagcgccggctgctgcttcgagcgggcgtccaaccagcggcggcggctttgaaggcagctgagcagcggcgcaagtccgacgaggagatcttacaatatgtgaacaagttgtccatatttgttacctctaatttcagatacttgccttatgatgtagatcttactatatgtgaattattttctgtcacgaccggaaatcacccaacaggcgttcctgacgtgcgtgtattattccttgtcccaggaggcaagactgagccacaaactaagccttacccattagacatgtggaagtacggtagtgctttgcaacagaggcccgagcttaatccttatagtggccggggtgctacttcccacaactggcatgcacccaaaccccaccgaaaacaggttttaggggttttgaaagaggaagagagtgctgcctctgtctcagtagaagctggaccaaaacaagctggtatcaactcagatgatcctgcatgggctcactgtttctgcccagacataaccaagaaacatcacctacggtgcaagtattgtgacaaggtctgcactgctggaattacaagaattaagtaccatcttgctggaattaaaggtttcaatactactaagtgtcagaaagttccaagtccagtgcagcaagagatgtttgatttgcttaccaagaagactagtgaaaaggaacagaaaaacaaagaaaaggaagtggccagagctgaagttgacatagaaaattcagattgtgaaagtggcagtgaaggttcagatcatggcaataatgttcttgtggtgaagccaaaggagacaacaggatctagtagctctagatctgtagcaggtggtcatactattgacaagtactacaagcctccttctatagaagaatctgccagtatgacacaaagagtaattaagctaagcaataaggttcaaacagcattgacaactcagaaaagagaagagaggaggaatagaacttgtgagtacatatgtcagtggttctatgaagctagtattccacacaacacagtaacccttcctagctttgctcatatgttagaggccattggacaatttggtagaagtctgaaagggcctagtccctatgagatgagtggatcgttcttacagaaaaggaaggaaaaggtgatggatggattcaaggagcacaaggaatcatgggagctcacaggttgttctatcatgacagatgcatggacagataggaagggtaggggagtgatgaatttagttgtgcatagtgctcatggggtactcttcttagattcagtggaatgctcaggtgacaggaaagatgacaaatatatctttgaacttgtggacaggtacatagaagagataggggaacaacatgttgtccaagtggtgactgataatgctagcgtcaacacaactgcagcaagtctattgacagcaaaaagaccatcaatattttggaatggatgtgctgctcattgcttggatctcatgctcgaggatattgggaagcttggaccagttgaggaaaccattgctaatgcaagacaagtgactgttttcttgtatgctcatactagggtgttggatttgatgagaaagtttcttaacagagacttggttcgctctggggttacacgatttgccacagcttatttgaatctaaaaagcttgttagacaacaaaaaagagttagtaagactatttaaatcagatgagatggagcaattgggttacttgaagcaggccaaggggaagaaagccagcaaagtgatcaaatctgaaaccttttggaaaaatgttgacattgcagttaattactttgagccattggctaacgtgttgagaagaatggacagcgatgtaccatcaatgggattcttccatggtttaatgcttgaggcgaagaaagaaatttctcagagattcgataatgataagagccgcttcatagaagtttggaatatcattgataaaagatgggacaacaagctcaagactccactacacctggctgggtactatttgaacccctactactacttcccaaataagcaagagatcgagagtgatggatcatttagagcagcaaaatggtggctgaaccatggcacaagcacaccaaatcttaggaagttggctgcaaggattttgagtttgacctgcagctcctcagcttgtgagaggaactggtcagtttttgaacaggttcatacaaagaagcgcaacaggctacttcatgaaaggatgcgagatctggtgtttgttaaatttaactccaagttaagaaataagagagagaacaaggatggtgacaatgaattcattactggtgttgtgccttcatcaagtgaaatggatcaacaatgtgcaaaagagtcacagcagcacacaacaccacaagcaccagcaccagctaaaaggaaaaggcctgtgcacgctaagaagaggaaagtcagaagcctacagtctttgatgcgcaatgccccagtgcatcctgaagctccatcatccgactcagaagattgtgatgatggtattccaatgcagacttctgattctgataagtcaccctctccctctccctatgtctctgagaccgatgattga

SEQ ID NO: 86281 - DNA, 1613 bp, Oryza sativa
  Clone ID: PAT_MRT4530_85336C.1
gtaatccgtccagtgctgcctctgtctcagtagaagctggaccaaaacaagctggtatcaactcagatgatcctgcatgggctcactgtttctgcccagacataaccaagaaagcatcacctacgaaagttccaagtccagtgcagcaagagatgtttgatttgcttaccaagaagactagtgaaaaggaacagaaaaacaaagaaaaggaagtggccagagctgaagttgacatagaaaattcagattgtgaaagtggcagtgaaggttcagatcatggcaataatgttcttgtggtgaagccaaaggagacaacaggatctagtagctctagatctgtagcaggtggtcatactattgacaagtactacaagcctccttctatagaagaatctgccaaggccattggacaatttggtagaagtctgaaagggcctagtccctatgagatgagtggatcgttcttagagaaaaggaaggaacaggtgatggatggattcaaggagcacaaggaatcatgggagctcacagtggaatgctcaggtgacaggaaagatggcaaatatatctttgaacttgtggacaggtacatagaagagataggggaacaacatgttgtccaagtggtgactgataatgctagcgtcaacacaactgcagcaagtctattgacagcaaaaagaccatcaatattttggaatggatgtgctgctcattgcttggatctcatgctcgaggatattgggaagcttggaccagttgaggaaaccattgctaatgcaagacaagccaaggggaagaaagccagcaaagtgatcagatctgaaaccttttggaaaaatgttaacattgcagttaattactttgagccattggctaacgtgttgagaagaatggacagcgatgtaccatcaatgggattcttccatggtttaatgcttgaggcgaagaaagaaatttctcagagattcgataatgataagagccgcttcatagaagtttgggatatcattgataaaagatgggacaacaagctcaagactccactacacctggctgggtactatttgaacccctactactactacccaaataagcaagagatcgagagtgatggatcatttagagcagcaaaatggtggctgaaccatggcacaagcacaccaaatcttaggaagttggctgcaaggattttgagtttgacctgtagctcctcagcttgtgagaggaactggtcagtttttgaacaggttcatacaaagaagcgcaacaggctacttcatgaaaggatgcgagatctggtgtgtgttaaatttaactccaagttaagaaataagagagagaacaagggtagagatcctatagagaaggaagtggatgatgttgtggcagatgttgacaatgaattcattactggtgttgtgccttcatcaagtgaaatggatcaacaatgtgcaaaagagtcacagcagcacacaacaccacaagcaccagcaccagctaaaaggaaaaacactaagaagaggaaactcggcggctcggacggctcggacggcgcacgctcgccggcgaacggcggcgctccggcacgaacggaggacaccaacgggtag

SEQ ID NO: 86282 - DNA, 2049 bp, Oryza sativa
  Clone ID: PAT_MRT4530_85337C.1
atggatggattcaaggagcacaaggaatcatgggagctcacagtggaatgctcaggtgacaggaaagatggcaaatatatctttgaacttgtggacaggtacatagaagagataggggaacaacatgttgtccaagtggtgactgataatgctagcgtcaacacaactgcagcaagtctattgacagcaaaaagaccatcaatattttggaatggatgtgctgctcattgcttggatctcatgctcgaggatattgggaagcttggaccagttgaggaaaccattgctaatgcaagacaagtgactgttttcttgtatgctcatactagggtgttggatttgatgagaaagtttcttaacagagacttggttcgctctggggccaaggggaagaaagccagcaaagtgatcagatctgaaaccttttggaaaaatgttgacattgcagttaattactttgagccattggctaacgtgttgagaagaatggacagcgatgtaccatcaatgggattcttccatggtttaatgcttgaggcgaagaaagaaatttctcagagattcgataatgataagagccgcttcatagaagtttgggatatcattgataaaagatgggacaacaagctcaagactccactacacctggctgggtactatttgaacccctactactactacccaaataagcaagagatcgagagtgatggatcatttagagcaggctgcgtgtggggcctcatgcgcatgctttatttccggcgtgatgcaaaattcttattggatacaaagcaagtgagcaggaggcatacgttccgggagctggcagacggaaggcattcagttaagaattccagtgattttgtggaaacagatgatgatgatgatggttccaagagcttgaatcattctgaagaatatgatcttgaatctgtcttggcaaattttttaggtgaaatttataggtgccatggtgaatgcccgcatggtgattgcaagaataaggagaaccttccaggagattcacatcagctcaaagattctgtcgttgaagataaggatcctagacatctcactgaagggagcttgccagacaaagctgcatcaaattttaagaatggaatcaaaccttcagccagcagtaagcaaaagcaacaaaatgacagccagagtgaaatcagtgatcatacaacaggagcatctatcttctatgagaaagccaagaagcatttagcagatatgctaaagaacactagtcaatctgccagctatccgacagcccaagtatcaaaatctttggaaggaatgctttctcaacctcattacaacgtgtcacctcctaggagtgaccataggggaaaatgccacaatgccttctcacctgaagagccagaagtttgtcttgtaaaagctgttgatgtggcggttctagaagaatgtggcatcaaagaagacacccaagaaggtatcatatatgctactgatgaggtagacaccgtgcctgttgaaggagttggcaaattggattgttccaaaacaatttgcaacatacagtgcatcccagcagaacaatacacagacagccccttgccagaaatattagaaggaactgaaggaaaagaacctgttcaaatgttcatgagctctcctgagagcatggttgaaaatttggagcaacaagatccaaaaacacctgaaccaaaatcatcaccaaaattaccagatggttgtcctgagcaaagcaatgagaagaaagaacagccaagtcctgtatcggttcttgattcattcgatgaagatgacagctctcctgaatgcaaaacaatgaaaaaatatgagctgcacgaagtttcctgtgggaccctgtacttcccagataatgaatcaggtgtaaaggcatggatggacattagatcaaagacagaaggaattgtcgtggagatatgggagtttgtgttagatgaattgatagatgaggcgtgccggaggcacacgcccccgcccttctctgtctccgccgccgccgccgccttcgccgccggcgagtag

SEQ ID NO: 86283 - DNA, 4323 bp, Oryza sativa
  Clone ID: PAT_MRT4530_85338C.1
atggagcggttcgagttgggcggcaagtcggtggagggcgtggacatgctccggcggcggcacggggcgtctcgcctcgacttctggtcctttctcgcgctctacgcgctctggctcgttgtcgtggtcccggggcttgacttcaccgtcgaactcatcgtcctcggcgcgctctctgccccccacgtcctcgcgttcgtcataaccgggtgggacttcgatttccagtctttgggagggtactccaaggggatagggctctaaactccccaattgccccaatatagccgccgctacttgtgacacgcttttgtgtcgagggatatacccatcccgcatatagaaggtgcaggtcatggatatcctggcagtaaactcgggcaagttaaagcaagcgaagtcctctggataagaggcgatagtgcccctgcacaaacaaaatactcacgcgagtaggacgagatctactctgacttccgctagaactgggacgcatacacaaagaatgcagaaaacttttgaaagcacgagtaagcaacaaggtgaccgtttgactcttatatcaagggctctgggtatggaacagactttaacattaacagagatgtgggtaagtgtggccgctacatatttgagtatccacagcctacattccagaaattaatgaaggagcagtgcatggaaccattttttgttttccaggttttctgtgttggtctttggtgtctagatgaatattggtactacagtctgtttacacttttcatgctcttcctgtttgagtctactatggcaaagaatagactgaagacattgactgagctaaggcgtgtgaaagttgataatcagattgttgcaacttatcgctgtggaaaatgggttagaatacctgggacagaactactacctggagacattgtgtcaataggccgctcagtaagtggagaagacaggtctgtgccagcagatatgttattgctggctggatctgcaatagtaaatgaagctattctcacaggagaatctactccacagtggaaggtctcagttgctggtcgtggtcctgaggaaacactatctgtaaagcgagataagaatcatatcctatttggtggcactaagatattgcaacatactccagataagtctataaatctccgagcacctgatggtggttgcatagcttttgtattgaggactggatttgagactagccagggaaagttgatgagaactatcttattttcaactgagagggttactgcaaacagcaaggagagtggcctgtttatcctatttttgctattcttcgcagtaattgcatccggttatgtgcttgtcaagggactggaggacccaacaaggagtagatataagcttttcttaagttgttcattgattcttacttctgtgataccccctgaattgccaatggagctctccatagcagtcaatacatctttaattgcattagcccgccgtggtattttctgcacagagccattcaggataccatttgctgggaaggttgacatatgctgttttgataaaactgggacattgacatcggatgacatggaattccaaggtgttgttagtttggaagatgatgaagaattaataacagatgcaaataaattgccactccgcacacaagaagtattgtccagttgccatgcattagtattcgtagataacaaactggttggtgacccccttgaaaaagctgctataaagggcatagactggatctacacatctgatgagaaggccatatctaaaaagtctggtggtcaacctgtaaagattgtacacagataccattttgcttcacacttgaagagaatgtctgttgttgtcagtatacatgagaaatattatgctttcataaagcccaccgctgcgcttgcccaccgccgtttcgcccgtcgctcgttcttcaagaaggatttaagggtgacgcggtggggcggcacgacgcccgccgtcgagaaggtgatgctcgtctccagcaccggcaccacggccgacgtgctgtggcagggcggtgtgccgtccttggagttggtgccgttcgacatcctcaacgaccacgagttcttcctggggcagcacgtcgacgtcgacaccatggcggcggcaacaacaacgatggcgaggcgcgtcagcttcgttgagggtgcaccagagaccattcaggagaggttagttgatttacccgctggatatgtggagacatacaaaaaatacactcgacaggggtcccgagtcctggcccttgcatacaaattgcttccggatatgcctgtaaatgaagctagaagtttggaaagggatcaagtagagagtgacctaacttttgcaggttttgcggttttcaactgtcctataaggagtgactccggtgctgtcttacaagaactggagcaatcttcccatgacttggttatgatcactggggaccaagctttgactgcttgccatgttgctggccaagtgcatatttgttccaaacctgttttaattttgacacgtacaaagactggtggttttgagtgggtttcccctgatgaaaccgacagagctccatacagcgctgaggaggttgccgcggtgtctggatcgcatgatctctgcatcagtggagactgctttgaaatgctacaaagaactgatgctgttatccaagtcattccatatgtgaaggtttttgcacgtgttgctccagaacagaaagaacttgttctgactacattcaaaactgttgggagggttacactgatgtgtggggatggaaccaatgatgttggtgcactaaaacaggctcatgttggcatagctcttttgaatgctgaacctgtccagaaatcagatacaaaatcccaggcatcaaaatctgaaaataaacaagggaagttgaaaaaaccgaaaccttctcaggaaggatcatcatcacaattgacccaaccagctaacagctccgctagagcatccagtagccgccctttaactgcagctgagaggcagagagaaagactgcagaagatgatggatgaaatgaatgaggaaagtgatggccgttcagctcctattgtgaagcttggggatgcttccatggcttcacctttcacagcaaagcatgcctctgttgcccctacacttgacatcatccgccaggggagaagcaccctagtcactacccttcaaatgttcaagattcttgggctcaactgccttgccactgcatacgttctgagtgtcatgtacttggatggtgtcaagctgggtgatgttcaggctactatcagcggggtcttcactgcagctttcttcctcttcatttcccatgctcgtccccttcaaacactgtctgcagagcggcctcatccaaacatattctgtgcatacgtcttcctttccattcttggtcagtttgccatgcacttgttcttcctgatctcagccgtcaatgaagcaaccaagtatatgccagaggagtgcattgagcctgattcagagttccacccaaaccttgtgaacacagtttcatacatggtgaacatgatgatccaggttgcaacctttgcagtaaactacatggggcacccatttaaccagagtataacagagaacaagcccttcaagtatgctctatatgcagcagttgctttcttcacagtgatcacatcagatatgttcagggatctaaatgactacatgaagcttgaacccctgcctgaaggaatgaggggcaaactgatgctttgggctatccttatgttttgtggctgctatggatgggagcggattttgcgatgggcgttcccaggcaagatgccagcatgggagaagcgtcagaaacaggcaattgcaaatcgggagaaaaaacacgaataggatcttgtttttttttccttcacttcaattttttgctccactggcatagtttcaatctaaataggccttaccaaattttgtcagtgccaaattttgataagttttggcatgactaattttggtaaggcaaagttgtgtttggattgaagccaaaataacctaagttcactattgaaatggtctattttcttagatatgccaaaatttggcttcaaaccaaatagatactaaacactattgaaattgcaaaatattggtaagcctaatttaggtctcaaaccaaaccagcccgtagtttaggagaattttgtcggactgtaggccccattactaggagatacatggtcaatatccattctgcttacatgttggatgaagattttaaaaaaaaaaaaaaaaaaaaaaaaaaaaaaaaaaaactcgagg

SEQ ID NO: 86284 - DNA, 369 bp, Oryza sativa
  Clone ID: PAT_MRT4530_85339C.1
atggcatggcctctcaacaccagcaccgaccttcgactcggccccctcgttaagtacagtcatgctatcagctgtaccaattctctgtgtcattgccgcctgcactggccttcatcgcaccatcccggccagcgcgcccgccacaccgtgctatcctggtggctgtcgtctcccctctggtggacggccctcaacgagccgtgcgccgccgcctaccgcctccgctccgcgcgcacctggccgcctaccgtgcgcccggcgactaccgcctcccctccggcggagggccctcagcgagccgtgcgctgccacctgccgcttcccctccggcagaggggagggcgctgctgctgcccgctgtcggcgtag

SEQ ID NO: 86285 - DNA, 1141 bp, Oryza sativa
  Clone ID: PAT_MRT4530_8533C.1
ggaggctcctcagcgaaagaatgggtctggtgtccaagaaggtgtcaagggcttgaaatcactaggagtacgagatctgtcatatcgccttgcttttgtagcaaactcagtgcaggtggcggatggaaggagagaagtcgacatccgggacagggacatagatggagatgacagcgaaagacagaagttcactgaagaagaggaagatgaagttgttaggatgaggaacgttcctgattttttcaataagatagttgatagcatatgtcccactgtctttgggcatcaagaaattaagagagcaatccttctcatgcttttgggtggtgttcacaagataacacatgaagggataaaccttagaggtgacatcaatgtctgtattgttggtgatccaagttgtgcgaagtctcagttcttaaaatataccgctggtattgttccacgatctgtttacacatcagggaagtcctcatctgctgctggtttgacagcaactgttgctaaagaaccagagactggcgaattttgcattgaggcaggagcactcatgttagctgataatggcatctgctgcattgatgaatttgataaaatggacatcaaagatcaggttgctatacatgaagcaatggaacagcaaaccattagcataacaaaagcaggaatacaagcaactttgaatgcaaggacttcaattttggcagcagcaaatcccacaggagggcgttatgacaagtcaaaaccactcaagtataacgtggcattgcctccagctattctttcaagatttgatctggtatacataatgatcgatgagcctgatgaaaacactgactaccacattgctcatcacattgtgagggtccatcagaaacgtgaagaagcacttgcccctgcatttagcacggcagaattgaaacgttacattgcttttgcgaagtccttgaaacctcagctgagttctgaagcaaagaaagttctggttgaatcatatgttacccttcgtagaggagatagtacccctggtactagggttgcttataggatgacagttaggcaactagaggcattaatcaggctttcagaagctattgcccgaagtcatttggaaagagttattatgcagtatggtgtctaa

SEQ ID NO: 86286 - DNA, 3044 bp, Oryza sativa
  Clone ID: PAT_MRT4530_85340C.1
atgccgttgccgccgctgcggccgccgccgaggcggtcgccaccgacgacgatcggggaagcgtacccggacgcgcggggcttcgcgacgctgaagtggatagtgatactgctcctcgtgtcgtgcatgttcgccggtggcctctacgccctgacgcccctcgtatccaaggaccctctctacctcgcccgcgtcccgtggcgtctgccggtggctcgtggaggcgaccggcgccggctgctgcttcgagcgggcgtccaaccagcggcggcggctttgaaggcagctgagcagcggcgcaagtccgacgaggagatcttacaatatgtgaacaagttgtccatatttgttacctctaatttcagatacttgccttatgatgtagatcttactatatgtaatccgtccagtgctgcctctgtctcagtagaagctggaccaaaacaagctggtatcaactcagatgatcctgcatgggctcactgtttctgcccagacataaccaagaaacatcacctacggtgcaagtattgtgacaaggtctgcactgctggaattacaagaattaagtaccatcttgctggaattaaaggtttcaatactactaagtgtcagaaagttccaagtccagtgcatcaagagatgtttgatttgcttaccaagaagactagtgaaaaggaacagaaaaacaaagaaaaggaagtggccagagctcaagttgacatagaaaattcagattgtgaaagtggcagtgaaggttcagatcatggcaataatgttcttgtggtgaagccaaaggagacaacaggatctagtagctctagatctgtagcaggtggtcatactattgacaagtactacaagcctccttctatagaagaatctgccagtatgacacaaagagtaattaagctaagcaataaggttcaaacagcattgacaactcagaaaagagaagagaggaggaatagaacttgtgagtacatatgtcagtggttctatgaagctagtattccacacaacacagtaacccttcctagctttgctcatatgttagaggccattggacaatttggtagaagtctgaaagggcctagtccctatgagatgagtggatcgttcttacagaaaaggaaggaaaaggtgatggatggattcaaggagcacaaggaatcatgggagctcacaggttgttctatcatgacagatgcatggacagataggaagggtaggggagtgatgaatttagttgtgcatagtgctcatggggtactcttcttagattcagtggaatgctcaggtgacaggaaagatggcaaatatatctttaaacttgtggacaggtacatagaagagataggggaacaacatgttgtccaagtggtgactgataatgctagcgtcaacacaattgcagcaagtctattgacagcaaaaagaccatcaatattttggaatggatgtgctgctcattgcttggatctcatgctcgaggatattgggaagcttggaccagttgaggaaaccattgctaatgcaagacaagtgactgttttcttgtatgctcatactagggtgttggatttgatgagaaagtttcttaacagagacttggttcgctctggggttacacgatttgccacagcttatttgaatctaaaaagcttgttagacaacaaaaaagagttagtaagactatttaaatcagatgagatggagcaattgggttacttgaagcagaccaaggggaagaaagccagcaaagtgatcagatctgaaaccttttggaaaaatgttgacattgcagttaattactttgagccattggctaacgtgttgagaagaatggacagcgatgtaccatcaatgggattcttccatggtttaatgcttgaggcgaagaaagaaatttctcagagattcgataatgataagagccgcttcatagaagtttgggatatcattgataaaagatgggacaacaagctcaagactccactacacctggctgggtactatttgaacccctactactactactacccaaataagcaagagatcgagagtgatggatcatttagagcaggtgtgatttcctgtattgacaagttggttgatgatgaagatatccaagacaaaataattgaagaactcaacttgtatcaagatcagcatgggagttttggacacgaaattgccgtaaggcagcgaaagaacaaaaatttcaatccagcaaaatggtggctgaaccatggcacaagcacactaaatcttaggaagttggctgcaaggattttgagtttgacctgcagctcctcagcttgtgagaggaactggtcagtttttgaacaggttcatacaaagaagcgcaacaggctacttcatgaaaggatgcgagatctggtgtttattaaatttaactccaagttaagaaataagagagagaacaagggtagagatcctatagagaaggaagtggatgatgttgtggcagatggtgacaatgaattcattactggggttgtgccttcatcaagtgaaatggatcaacaatgtgcaaaagagtcacagcagcacacaacaccacaagcaccagcaccagctaaaaggaaaaggcctgtgcacgctaagaagaggaaagtcagaagcctacagtctttgatgcgcaatgccccagtgcatcctgaagctccatcatccgactcagaagattgtgatgatggtattccaatgcagacttctgattctgataagtcaccctctccctctccctatgtctctgagaccgatgattgatgactagaagaaatgaagattgcaatatgcctcatattagtaatttagtatccactatccagaattcttgatgacctttgtgttgtactgttgtctttattccagaatgctgtacttttgtgaaactgatgtttcagtattctgttaaccacttagcctgtgatgtaatgtactcctatgaacttgtaatgtactcatttgaactggttatgtatcaattggtaatggttatgaagttatgccaaaaa

SEQ ID NO: 86287 - DNA, 358 bp, Oryza sativa
  Clone ID: PAT_MRT4530_85341C.1
gttttgtggctgctatggatgggagcggattttgcgatgggcgttcccaggcaagatgccagcatgggagaagcgtcagaaacaggcaattgcaaatctggagaaaaaacacgaataggatcttgtttttttttccttcacttcaattttttgctccactggcatagtttcaatctaatatgtagggttggtttggtttgtggcctatataggccttaccaaattttgtcagtgtcaaattttggcaagttttggcatgactaattttggtaaggcaaagttgcgtttggattgaagccaaaataacctaagttcactattgaaatggcctattttcttagaaaaaaaaaaataaaaa

SEQ ID NO: 86288 - DNA, 3507 bp, Oryza sativa
  Clone ID: PAT_MRT4530_85342C.1
atggctgaaaatgtgccatcgaagagtgttaaaatgccaattgactatgctgattggaatgactacaacactagagttgtgtgtgagatttttgctgatcaagtagttgcgggtaatcgtccaaatacccatttatccaattctgggtatgacgaagtcattgagcaatttgcctcaaagacagggctgaggtacactaggcttcaaattaagaacaaatgggataaacttaggattgagtacaattgttggaagaagttgaaatctcaaacaggtttgggatgggatgacgcaaggcaaaccgtcacagctacagcagcacgttggaaacaacttaaagaaatgtcaagtgagagtgaagatggttcatcagatgaagaatatgattgtgatttgcttgccatgcaattgtttgaaactgtgacaagcaatatttcttcaactcgaagaatggcagagagttatcactctctctacatgaataaggctgcgcctaggacatcaagacttagtggaatgggatgggtgcaagaaactttggccacaccaggtgaatgctataggatgcttcgcatgaatggcaacacctttcttgcattacatgatcttttggttgataaatataagttggcacctactgtgcacatgcatacaatggaggcacttgcaatttttctgtacattctaggtgacggttcatcaaaccaaagggcacaaaatcgttttaagcattctggtgagacaatatcaagaaaatttgaagaagtattgtttgctgttgtggagttgggacatgatattgtgcatccaaaggatccaaactttcctactgtccatgatagaattaggaaggatcgtcgtatgtggccacatttcaaagattgcattgggacagttgatggtactcatatccttgcagttgttccagatgaagagaagatcagatatattggtagatctaaatcaaccactcaaaatgtgatggctatttgtgatcatgatatgagatttatctatgcatctattggacaacctggatcaatgcatgacacaaccgtgttatttaatgcattgcgaaccgatataaatatctttccccatcctccccaaggtaatccgtccagtgctgcctctgtctcagtagaagctggaccaaaacaagctggtatcaactcagatgatcctgcatgggctcactgtttctgcccagacataaccaagaaacatcacctacggtgcaagtattgtgacaaggtctgcactgctggaattacaagaattaagtaccatcttgctggaattaaaggtttcaatactactaagtgtcagaaagttccaagtccagtgcagcaagagatgtttgatttgcttaccaagaagactagtgaaaaggaacagaaaaacaaagaaaaggaagtggccagagctgaagttgacatagaaaattcagattgtgaaagtggcagtgaaggttcagatcatggcaataatgttcttgtggtgaagccaaaggagacaacaggatctagtagctctagatctgtagcaggtggtcatactattgacaagtactacaagcctccttctatagaagaatctgccagtatgacacaaagagtaattaagctaagcaataaggttcaaacagcattgacaactcagaaaagagaagagaggaggaatagaacttgtgagtacatatgtcaatggttctatgaagctagtattccacacaacacagtaacccttcctagctttgctcatatgttagaggccattggacaatttggtagaagtctgaaagggcctagtccctatgagatgagtggatcgttcttacagaaaaggaaggaaaaggtgatggatggattcaaggagcacaaggaatcatgggagctcacaggttgttctatcatgacagatgcatggacagataggaagggtaggggagtgatgaatttagttgtgcatagtgctcatggggtactcttcttagattcagtggaatgctcaggtgacaggaaagatggcaaatatatctttgaacttgtggacaggtacatagaagagataggggaacaacatgttgtccaagtggtgactgataatgctagcgtcaacacaactgcagcaagtctattgacagcaaaaagaccatcaatattttggaatggatatgctgctcattgcttggatctcatgctcgaggatattgggaagcttggaccagttgaggaaaccattgctaatgcaagacaagtgactgttttcttgtatgctcatactagggtgttggatttgatgagaaagtttcttaacagagacttggttcgctctggggttacacgatttgccacagcttatttgaatctaaaaagcttgttagacaacaaaaaagagttagtaagactatttaaatcagatgagatggagcaattgggttacttgaagcaggccaaggggaagaaagccagcaaagtgatcagatctgaaaccttttggaaaaatgttgacattgcagttaattactttgagccattggctaacgtgttgagaagaatggacagcgatgtaccatcaatgggattcttccatggtttaatgcttgaggcgaagaaagaaatttctcagagattcgataatgataagagccgcttcatagaagtttgggatatcattgataaaagatgggacaacaagatcaaggctccactacacctggctgggtactatttgaacccctactactacttcccaaataagcaagagatcgagagtgatggatcatttagagcaggtgtgatttcctgtattgacaagttgattgatgatgaagatatccaagacaaaataattgaagaactcaacttgtatcaagatcagcatgggagttttggacacgaaattgccgtaaggcagcgaaagaacaaaaatttcaatccagcaaaatggtggctgaaccatggcacaagcacaccaaatcttaggaagttggctgcaaggattttgagtttgacctgcagctcctcagcttgtgagaggaactggtcagtttttgaacaggttcatacaaagaagcgcaacaggctacttcatgaaaggatgcgagatctggtgtttgttaaatttaactccaagttaagaaataagagagagaacaagggtagagatcctatagagaaggaagtggatgatgttgtggcagatggtgacaatgaattcattactggtgttgtgccttcatcaagtgaaatggatcaacaatgtgcaaaagagtcacagcagcacacaacaccacaagcaccagcaccagctaaaaggaaaaggcctgtgcacgctaagaagaggaaagtcagaagcctacagtctttgatgcgcaatgccccagtgcatcctgaagctccatcatccgactcagaagattgtgatgatggtattccaatgcagacttctgattctgataagtcaccctctccctctccctatgtctctgagaccgatgattga

SEQ ID NO: 86289 - DNA, 2487 bp, Oryza sativa
  Clone ID: PAT_MRT4530_85343C.1
atgcgtccgcgcgtgacttcgacggggacagcccagactcctggcttcgcctctctcctcgtcgtcggacgccaggaggcagtactgcagctggaggctggagcggatggcgaggacctcgccggtcttcacgcggagggactccacgtcgagggcatccaggcgggacaccaccgggttgaactggaagggcacgtcgaggcgctctgcttctttcatgagcgccatggccgtctgggtaatccgtccagtgctgcctctgtctcagtagaagctggaccaaaacaagctggtatcaactcagatgatcctgcatgggctcactgtttctgcccagacataaccaagaaacatcacctacggtgcaagtattgtgacaaggtctgcactgctggaattacaagaattaagtaccatcttgctggaattaaaggtttcaatactactaagtgtcagaaagttccaagtccagtgcagcaagagatgtttgatttgcttaccaagaagactagtgaaaaggaacagaaaaacaaagaaaaggaagtggccagagctgaagttgacatagaaaattcagattgtgaaagtggcagtgaaggttcagatcatggcaataatgttcttgtggtgaagccaaaggagacaacaggatctagtagctctagatctgtagcaggtggtcatactattgacaagtactacaagcctccttctatagaagaatctgccagtatgacacaaagagtaattaagctaagcaataaggttcaaacagcattgacaactcagaaaagagaagagaggaggaatagaacttgtgagtacatatgtcagtggttctatgaagctagtattccacacaacacagtaacccttcctagctttgctcatatgttagaggccattggacaatttggtagaagtctgaaagggcctagtccctatgagatgagtggatcgttcttacagaaaaggaaggaaaaggtgatggatggattcaaggagcacaaggaatcatgggagctcacaggttgttctatcatgacagatgcatggacagataggaagggtaggggagtgatgaatttagttgtgcatagtgctcatggggtactcttcttagattcagtggaatgctcaggtgacaggaaagatgacaaatatatctttgaacttgtggacaggtacatagaagagataggggaacaacatgttgtccaagtggtgactgataatgctagcgtcaacacaactgcagcaagtctattgacagcaaaaagaccatcaatattttggaatggatgtgctgctcattgcttggatctcatgctcgaggatattgggaagcttggaccagttgaggaaaccattgctaatgcaagacaagtgactgttttcttgtatgctcatactagggtgttggatttgatgagaaagtttcttaacagagacttggttcgctctggggttacacgatttgccacagcttatttgaatctaaaaagcttgttagacaacaaaaaagagttagtaagactatttaaatcagatgagatggagcaattgggttacttgaagcaggccaaggggaagaaagccagcaaagtgatcaaatctgaaaccttttggaaaaatgttgacattgcagttaattactttgagccattggctaacgtgttgagaagaatggacagcgatgtaccatcaatgggattcttccatggtttaatgcttgaggcgaagaaagaaatttctcagagattcgataatgataagagccgcttcatagaagtttggaatatcattgataaaagatgggacaacaagctcaagactccactacacctggctgggtactatttgaacccctactactacttcccaaataagcaagagatcgagagtgatggatcatttagagcagcaaaatggtggctgaaccatggcacaagcacaccaaatcttaggaagttggctgcaaggattttgagtttgacctgcagctcctcagcttgtgagaggaactggtcagtttttgaacaggttcatacaaagaagcgcaacaggctacttcatgaaaggatgcgagatctggtgtttgttaaatttaactccaagttaagaaataagagagagaacaagggtagagatcctatagagaaggaagtggatgatgttgtggcagatggtgacaatgaattcattactggtgttgtgccttcatcaagtgaaatggatcaacaatgtgcaaaagagtcacagcagcacacaacaccacaagcaccagcaccagctaaaaggaaaaggcctgtgcacgctaagaagaggaaagtcagaagcctacagtctttgatgcgcaatgccccagtgcatcctgaagctccatcatccgactcagaagattgtgatgatggtattccaatgcagacttctgattctgataagtcaccctctccctctccctatgtctctgagaccgatgattga

SEQ ID NO: 86290 - DNA, 1977 bp, Oryza sativa
  Clone ID: PAT_MRT4530_85344C.1
atggactttttcacgcgacctgccatgtctgtgcttctgcttctcttcttgccgctcgccgccgcccaaccatggcaagtatgccaagacagccggggcaaatacacatcaaacagcacctaccaagccaacatccaatcgctgtcgtccacgctccccgcgaaagccgccgcgcccagcaccggcctcttcgccacccgcgtcgccggaaatgccccagacaccgtgtacgcccttgccttctgccgcggggacatcaccaacgcctccgcctgcgcaggctgcgtggcatccggtttccaggacgcgcagcagctgtgcccgttcaacaaggctgcctccctgtactacgatctctgcctcctccgcttcgccgatgaaaacttcctcgccaccaacaacagcgatgtagtcatgctgatgaactcacagaacttcacggcgagcgtcggctcggtccgcctcctcctcttcacgctgctgaacgccacagccgagtcggcagcgagcagctcgaggaggttcaccacctcgcggttggacgtcagctccctccccacgctgtactgccttatgcagtgcacgcctgacctgacggccggagagtgcgcggcctgcttcgaggatttcccgcggttgacgctccagtacctcgacggtgcgcgaggcggaaggattctcgcgacacgctgcaccatgaggtacgagatctacccgttctactcaggtgacacgatgctgcgtatcatcaacttggcaaccacggtgcccgagatgaacaccacggcaccaactactccggtcaccgtgtatccgcagccagcggggccaggtgatcacaagagtaaggtgtggatcgttgctattgttgctccactactggcaattctgttttgtttcatgctttccattgtatggatcagaagaggtagaaaaggagaggtaaacatgcagaacaatattgctgcagtaaataggctggaagaagacgcacttgtttggagattggaagagaggagttcagagttctctctttttgaattttctgagttgctggaggctacagacaacttcgcagcagagaacaggcttggacaaggaggctttggccctgtatacaagggtcaattgcatgatggggtggaagttgcagttaaaaggcttgcttcacaatcaggacagggtttcactgagttcaaaaatgaagttgaacttatagctaaactacaacacacaaatcttgttaggctgctgggatgctgcattcagggagaggagaaaatattggtgtatgaatatttgccaaacaaaagcttagatttctttatctttgggatagctcaaggtcttctttacttgcacaagcactctcggctccgtgtcatacacagagaccttaaagccagcaacattcttttggaccaggacatgaatcctaaaatatctgattttgggctagcaaaaatttttagctctaataataccgaaggaaacacaaagagggtggtgggaacatatggttacatgtcaccagagtatgcctctgaaggtatctactcgatcaaatctgatgtgtttagctttggtgttcttcttcttgagatacttagcggaaaaaggaattctggtttccaccaatacggagattttcttaacctcctaggctatgcatggcatatgtgggaagaagggagatggcttgatataataggagcgtcaattcctcagacgatccctacagaagggttgaggaagtacatcaacattgcgcttatgtgcgtgcaagagaacgcagatgatcgaccgaccatgtcagatgtcgtagcgatgctaagtagcgagagtgcggttcttcctgaacctaagcacccggcatactacaacctaagggtatcaaaagtacagggatctactaatgttgttcaatcaatcagtgtgaatgatgtaactatcacttccaacccagagggtagatag

SEQ ID NO: 86291 - DNA, 390 bp, Oryza sativa
  Clone ID: PAT_MRT4530_85345C.1
atggcgataaagatgaagggaatattcaaaggcctgaagataatctctcaaatgttcgtgcataaggagcatgagatggaaattgggtaccctacagatgtaaagcatgtggctcacataggtttgggcaccagtgacacatctccaagctggatgaacgaattcacgggaacagaagatttatcaaccggttctctgagcacaactgcaccatcaaggcagacttcttgggcctctttagattttgaacagccaagaagcatgctgccaattgagatcttgccggagaaatctggccaggaggcaccctcctgccctgacatcccaagaggcccaaggaagattcttttaatgattggatggcagtcggcagatgttagacttcagtag

SEQ ID NO: 86292 - DNA, 221 bp, Oryza sativa
  Clone ID: PAT_MRT4530_85346C.1
caggaattgaaccagaaactttgatacaaccactatcccatcttgcacgaagaaacctatgtagtaacaggaatgtcaaaccgaccaattttttccgggcagcaagtacaaagcaggacacacttcttataaaaaaaacagcaccgcatctgaacgagtccatgtatggtcgtgcattagaaaaggtctgacaagaatccgaccctttatctattctggac

SEQ ID NO: 86293 - DNA, 258 bp, Oryza sativa
  Clone ID: PAT_MRT4530_85347C.1
atggagggagctagcaatggagcatttcttccctggaaaaagcaaggccaccaaattaagctaagagcaaccaagggtaaacggacgctggtcctgcggctggggaagcaggcttggatatcaagggcaataattaaaatacagttcaaggatcaagaacctggtcctggcaaaacaagttctgagacccttaaacatgggacaattgtctctgtaaacaatcaacaggacggcagtaacgacattcggacatactaa

SEQ ID NO: 86294 - DNA, 528 bp, Oryza sativa
  Clone ID: PAT_MRT4530_85348C.1
atggctagttggctacgcgcgcccgcggccgcgccctcctcgcccgcggccgcttttgcgcgccgccaccatcgctggacgtacgctgggtttggtttgtttggtttggtggggtgggtgtggcccgtgtgggttgggttgggtggcgcgagcgcggtggcggggtgggcgcgggacacgggtctgaagaactggcatgtggcactgtcctctcgttcatcggccgaggctgaagccccgaatccgcacgaggttggtggcggtggaggccgcgtggtgccattggtcgctgttgccaccaccgtccttgtcatcttgggcataggtggtggatgccgcatgggcgacgacggcgttaggccgatgaacaacaatggtggtcattcaaagcgtcacttcttctccggcttctcctgcaaggcgtcgctgccttcggagatctcactgccggctcactactccgaggggatcgggtaccacacctttgtcgggtcgccagagatctcgccatcccggggcttttgctga

SEQ ID NO: 86295 - DNA, 446 bp, Oryza sativa
  Clone ID: PAT_MRT4530_85349C.1
accactcgttcgagatgctcttcgactaccacgacaactacatgtccaacgtcctgccgtggctgtccatcagcgtgcccaccatcagcacgctggtgtacaggcaggtgttcgagcgcgtgaaggagatcgcgccggtgaggttccggctggacttcgcgcatagccacgcgcagacgaacacgacggacgtgaagacgcacatgcagacgcgcatggccgagctcaaggacctgctgagggagctcatcacgtacgactacacctacgtctacatgtgcgtgctgaaaggcatggacaacggcatgatcgacatcattatcgacctcggtgtaaaatacctcgtctactggcttgacttcaagaagcagctgcagaagtctgagcaatggtacgtgggagtctacagatggatataaataatgtaatcatttatatatcccttt

SEQ ID NO: 86296 - DNA, 1213 bp, Oryza sativa
  Clone ID: PAT_MRT4530_8534C.1
atggcccctcgcaagccaaaccctgcttcggcgaaagggccggatcccagccgagtcgatgatgacagcaccgcctttttgggggtctctcttgtggacgacgtcgagctggcgaagctggtcagctctggggcgttggtcgaggggcaggctttcgccccagggaaagccgtggtgccgaaacctatcgacaatcggacggtggtattcgccgtcttttttgaggcagggctacggtttccctgcaacgtgttgttgccggagatccttcgcctcttccaggtggaacttccacagctgagcccgtcggcgcttgttcgaatcgctatcttcgactgggcgtgccggacttccaggtttgagcctaacgccgagctcttcggcgccatatttttcgccaccgtgaactcaaagacggtgattatctcggctggaacgaagaagatagtgttcgggagcttgaactttaacgttcgtcccgagcggtccgatctctggccggtgaacgctgccatatcgaagtgggaccgccattggatggctaggtggttctatcacaccatccccttcaaggttggcactgactcggcgaaagccctccgttgccggcgtagggcgatcgcgcctaaccgaaaacccaagatcaccgtggacggtgctatggaggcgcggttcgttctgctgcgcaaggtttgctcccgccttagctgctgtgacatggtggaggaattctcgttgaccctcgaccaggctgaaaacgaggcccgcaggatgatcggcgacgtgtcggtcgtcgagtatagccagttgctaacacgccaagaggtctgggcgggcgaaccgggtttacaacggcgaattgcctcctcgggcaaacccccacaaagctgacgatgatgcagggccttcgcgaaagcgaatgcgtggacaagtgaagcttgctcctaggaagcgaagggttcctgcttcgtcggactccgacgccaacgacgaggacgacgccgaagaacgcgacggcgaggaggaaggagaggagaaagaggaggaggccgtggctgataaggccgcggacgaggcgatcgaagaccgcgtcgacacccccggctacactcctaccccaagtcccagtcacaacaagactggggtagagtcgaacagctcccctgtcacgcccggaaattcactaataatttccgaactaatttgtgcataa

SEQ ID NO: 86297 - DNA, 435 bp, Oryza sativa
  Clone ID: PAT_MRT4530_85351C.1
aaccacaaaacccattattttaatccactaatcaagttttatttcatttgggggaaatgatccacaacaactggggcatttaacgcataaaaacacgagctaagtttctagtaaaaaatagcaaaagcccaaaccctcgccatgttatatgggtgaaatcgattggggggccaaatccccaaatttactcaaacttggagggcttggcaacggcctcgggaacctcccaagggcagtttatccccttggggaaaaccaccaggtcccccgccgggatctccaaaaaattcttgccggggccgtgcgggaacacctttacctttccctgaaaaagggagaacgttttcttgggcgaatacctccaagggaacttgtttttttcgcacccccacttgggccactcccggacccccagctcggaaaggggggactcgg

SEQ ID NO: 86298 - DNA, 330 bp, Oryza sativa
  Clone ID: PAT_MRT4530_85352C.1
catcctctgtgaagggacagtccagcccctcaagctgcacggtcaccttcgccaccgcagactgtgcggggagcagccggctggcggagcagacaagcggcgagcaggcgcgctgcgggagaggaagatggcactgacagggagcgggatggggagagcgaggacgccgccgccatcgtcgtccacggccgcagatctcgcgcccgcgccgtcagcggcgtcggcggtgggacgtcgcagccgtcgccgccttccttcttccgtgtcgccgccgccgcctcccgggcctgtcaaatggtccgaccccgaggtcgcatgcgccgccgccgt

SEQ ID NO: 86299 - DNA, 468 bp, Oryza sativa
  unsure (1)..(468): unsure at all n locations
  Clone ID: PAT_MRT4530_85353C.1
attttcagcgttgtaagcacacatggaaatgtattggacatatcgcctcgactctcttatcacaaacctgtgggtaatttaaattccctattttgttagttattttgttaataacttttccccggtgtcttgtttcaaataagcaaaagttactacaaacttaaattactactttcttactgaattttgctttaatgatattattttcatgattgtgcagacaaccaacanagataagatgctccgcagaagatattctcttaacctgccagagcatttgcctgagcatcacgtgattacaagtgcagaacaaaagtgagganaacccatatcaaaggggttttgcttcccacaatccctcnattaaggtttggccaataggtattttcaatggatcctcaaagggtccctaattttggttttcccaaaaagctgganggaaaaaggctggtttcaaggtttcaaggg

SEQ ID NO: 86300 - DNA, 491 bp, Oryza sativa
  unsure (1)..(491): unsure at all n locations
  Clone ID: PAT_MRT4530_85354C.1
ctctaaacatgccagtactatgattatcaaaagcctaaaaaaggccccatttttatgtacagatgtctttcaaagtagcaaaattcgatcgagtttgcgtttctagtgatgtttggttgggaattcatcagaagcttgggctcagaatgttgagcagtgagactctggtgttcaccagagcgcggaacaccttctcgccgatgctctccacgtccgcgatgcaccgtcccaggttgtccaggcgctcgaacgccgccttccgttctctctcgtccgggtccacggcgacgttgggttggggccgcgccgtggcggcggaggaggtggaggaggaggaggcgtcactgtcggcgtgctgcttactggctgaccggcgcttngcccgcgacatccagcgcatcaggtcggtgacccaccatatgcgcagcgacaatggcttggtggtgatgatgtggtgtcttggcgtttccgatggtgtggtgaatttttcc

SEQ ID NO: 86301 - DNA, 1504 bp, Oryza sativa
  Clone ID: PAT_MRT4530_85355C.1
ttttttttttttttttttagtagaacgacgttctttgattttttatccgaagcctaatgctttggctcccatgggaatactagcagtatgctagtagtacgatgatgatgatgatgaaacaaaggaaatggagctctctaaacatgccagtactatgattatcaaaagcctaaaaaaaggccccatttttatgtacagatgtctttcaaagtagcaaaattcgatcgagtttgcgtttctagagatgtttggttgggaattcatcaaaagcttgagctcagaatgttgagcagtgagactctggtgttcacctgaccttcaaataacactgtttactacccatgctcccagctcgaaatagctgcgcattcctccagagtccatacaaatatggaatatggccttggcgagcacggacaagtaaaatatacaagcagctggtgtaataaacaagctgtgacacactgtggaagcagccgtagtccgcggccaggggaacagggggcacgcatcctgtcgggcacccagccaaccagcgctccttctgcacgctcgcgtggtcgtattccagcgccaccaccgcgtggcagcttggcagcttccttccgcctaaaataagcgccacggggactcccgggcttggacctccagaaggtcgcgagatctcgaatccgcacggtcgcggccctcgctccgcgcgaaagcgcgtcgaagcagaccgcgactgcaagcgatcgaactcgataccgtacatggccacgtccggggatccaggaacttcgggttcgcaaacgcaaagcgtggaaactcgagagcgaccacatgaggaatgaactctcaacgctcccttttgcacacgtggttttatctcatagaacgccatccccagagcgcggaacaccttctcgccgatgctctccacgtccgcgatgcaccgtcccaggttgtccaggcgctcgaacgccgccttccgttctctctcgtccgggtccacggcgacgttgggttggggccgcgccgtggcggcggaggaggtggaggaggaggaggcgtcactgtcggcgtgctgcttactggctgaccggcgcttcgcccgcgacatccagcgcatcaggtcggcgacccaccatatgcgcagcgacgatggcttggtggtgatgatgtggtgtcttggcgtcgccgatggtgtggtgaatctcgccggggagggcatccagcagggcgtggcggcgacctcgacacgggccgtggcggcggcgatggagagggacgacacgccggagaagaccgcggccgaggccgaggcgacggccgcggtcgcgtcggcgatggcggcggcgagggcggtcccgtcggccgggaggcccgcgggagggggaggcggtggcttgtcctccacggcgcgcgccttagatgctatcctctggagttttcttcctttatgtgtgcattctcggtccttgtgactcttttctcgcctttttgtgtttgtttttgtcgtgtt

SEQ ID NO: 86302 - DNA, 381 bp, Oryza sativa
  Clone ID: PAT_MRT4530_85356C.1
atggcggccatactgaggcacatgaccgaggcctaccagtggcgcgtcgccaacttcaccaggctgcgtgccctcgccgacctgtacgtcatcgtcaaccgcatcgcagaggtgaacttgccaaggatcaggtcagacgtgcgcgatgcccaggccgtggctctccttcgtggacgcggcgctaccatcatcgagctcgctggcgagatcggggggccatccgtcgacatcttcgccgccttcgtgctccggctcaaccgacttgctgaccacatcggggaccgacttcgttcggtgagggcgcggcagggtctcctcgatgacttcgcatcagtcatcctgaacctactgtttgccaacatcttactcccattcccatga

SEQ ID NO: 86303 - DNA, 234 bp, Oryza sativa
  Clone ID: PAT_MRT4530_85357C.1
atggcggcgagcggtgagaaggtcggtggctggcggctggcggtgaggacaacggccggcgggaagaagctagctcagccatttcatcccccaacccgcgccaaagccagtgctgactcgacggccggatccactcggctgcaagctgctgctgcttcgggctctaggaacggctgctggtgcagggtgttgggcaacgctgtgctcgctgggaagcaccatcgcaccgttgtc

SEQ ID NO: 86304 - DNA, 838 bp, Oryza sativa
  Clone ID: PAT_MRT4530_85358C.1
cccacgcgtccgcccacgcgtccgaaagctcgatcgaccacgtgatcgagctcgatctgctcgccgccggcggtgaccatcagccatgggcaactgcctgcagagcggcggcggcggcgcggcggcgttgggagacgggaagatgagcatgaggaggagagtctgcggcggcggtggtggtggggaggaggaagacgaggctgcagggtcgtcgtcgtcgtcgtcggtgatgaaggtgaagatggtgctgacgaaagccgagctggagtggctcatggcgcagctcaaggccggcgaccgccgcctcgaggacgtgctccaggagatggcccgcaagcgcaaccgcggcctcctcaccaccgccgccgccgccggtgacgcctgcgccgcctgcgccgccggcgccggaggaggcgacggcgccgacgggtgctggcggcccagcctggagagcatcgtcgagggccccgagatgagctccttcagcttcgactactgaactgatcgccagtgtgtcaaagagctagagccttgttaattacgttaattaccttgctaattacgtttagagcacggtaatttttcttgttagcagtgcatggccgtctttgcttgccatggatgaatcatgaatgggatgatcagggaaggataaatttaactcttgtcctaatggctagagttatgagttactacttggagttgtagctaggggtaattaatctaggtcggctccttgctgcttttgagttaatctttgcttaactttttttttcatttttgtatatacagtgtactatctctgagaagtagtagaaatactcttgtagtcttgtat

SEQ ID NO: 86305 - DNA, 839 bp, Oryza sativa
  Clone ID: PAT_MRT4530_85359C.1
gtgtatcgcacagcccactttaggccctgatgggaagataaaggagcctgagagcaatgtgcttttggcttcaatagagaacatgcagtatgctgtgacggtggatgttctacatactgtgttctctgcttttggtactgttcaaaagattgcaatgtttgagaagaatggtggaatgcaggccttaattcaatatccagacatcacaacggcagcagttgctaaacaagctttggaagggcactgcatatatgatggaggttactgtaagcttcatctgtcatactctcgtcatactgatctcaatgtaaaggcacatgatgagagaagcagagactacactgtttcatcagatcctagtgcacaaatgcaagctgcagcgcaagccccaggtcctagcactccaggagtggcatggcaaaacaccgcacccagtgcttccttttatggcagcactgcggcagcgactcctgttggacaagtgccagcttggaatccaaacatgcaggcaggtgcttttggatcggcatcgtctgcatacccaacccaaccaatgatgccaggatcagttccacactatccaggaattggatccagttccggagcactgccagtatcgttccaggcctcacatcagatgccacagtatggtgtacccccagctgctccacaccatgctccaccggctggatgattgcaaataagaaccccggcaaatctgctggttggttgcaaataataacccctccaaatccgtccgacgtggcagcagcaaccagccacagctgagacctccatccaatagaaaccctccctttgattcccccgtatcccggcat

SEQ ID NO: 86306 - DNA, 2283 bp, Oryza sativa
  Clone ID: PAT_MRT4530_8535C.1
atgggccgtcgggcgatcgccggccctatagcccctaggcttgatgggccgggaaggctttttcggccctcgcggggccgaactcgccacggcgaagtcgtcttccttcgacagatactcttcgccttgcacccttcgtctgggacgcctctagcttactcactcctcgtacgacccttcgcctcttgccattcttgctccgtagtcttcgccatgggtttcggcagatttggtcgaagggcctcatgccatccgccaacaagcccctcacgggcaagggtgagaatggagcttcggccgagaccatgcacaccatgtggtatgggaaagccgtagtaccgaagcctgtcgacaatcggacggtggtgttcgccgtcttttttgaggcggggctacggtttccgtgcaacgtgttgttgccggagatccttcgccttttccaggtggagctcccacagttgagcccgtcggcgttggttcggatctccatcttcgactgggcgtgccggacttccgggtttgaacctagcgccgcactcttcggcgctatatttttcgccaccgtgaacttgaagacagtgattaccccggctggaacaaagaagatagtgttcgggagcgtgaactttaacgttcgccctgagcggtccgatctctggccggtgaacgccgccatgtcgaagtgggaccgccattggatggcgaggtggttctatcacaccatccccttcgaggctggttctgactcggtgaaagctctttggtgccggcgcagggcgattgtgccgaaccggaaacccaagattgccgtggacggcgctatggaggcgcggttcgttcttctacgaaaggtttgctctcgccttagctgccgtgacttggttgaggaattctgtatgcttcgcatctttcccctctcccagtcatggcaggttacggttgatcagagcgaagagattgacagtttgccgaagctggttctccttgagggaatgaatatgttaaccctcgaccaggctgaaactgaagcccgcaggatgatcggcgatgtgtcggtcatcgagtatagccagctgttgacacgacaacgtgtaggaccttcgcgaaagcgaacacgcggacaagtaaagcttgcccctaggaagcgaagggctcctgcttcgttggatttcgacgccgatgatgaggacgatgccgaagagcatgatggcgaggaagaaggggaggaagaagaggaggcggaggccgtggctgaaaaggccgcgagcgaggcgatcgaagaccgcgttgatactcctggctacactcccactcccagtccggccacaacgagaccggggtggagtcgaaaagctccccccttcgacaaaaagatttggacggggcgaaggccctagttgcattctcgtcgggcaaggcgacgaagggaggtccggtcaagaagatctctaagaagaaaggactcgtcgacgtcgctcgcattttcagcgacgacgagtcttctgatgggactccgacttcgcccgctggccgtagcctggacctttcgatcgcccccgttcttccacttggtgctgacggagaaggcggtagcgctgccgctggggcttcggcctccgcggaacggatcatgacaactgccgtgagggtcttcggcagccctctgcgtcagccggttgcatcgccgctaatcgaggcgaaggggaagggggcagccgtcgagacttctgcttcggagtattcgcttgtggcgcctcatttcgcccctagcgatttcgagacccgggcggacctccttccttttgtggaggggatccttgcggctcactgttcgacagagcgaaccatgcgggctcgtcttgatggattcaaaaaccgtcttcgggccaaggatgacgaaataggccgcaagaatttggagatggaggccctcgccaataccctgaaagaggcgcaggccgaaaacaagcggctccaatccgaattggagaaagggagagaggctagggctgaggtcgatcacctcaaggccgaactggagaaagaaaaggctcactccaccgtgctaacggattattataacctcactgagccgaaaatggaggctcttcgccaggaggtcagcaaggccgaagcgagcgctgcagaggagtcgcggcggttctcgcgggagatggcgaaaactaccaagtccgcacgaacggcgtgccaaacgcttcgcctcgcccttactgatatgggcgcaaagctttgaggtattgctttagctcgtcgaacgctgct

SEQ ID NO: 86307 - DNA, 1500 bp, Oryza sativa
  Clone ID: PAT_MRT4530_85360C.1
ttaagagaaccgcttgtgaaaatctattttcgcttttcgcaggcggacccttaagagaaccgccagcgaaaagattttttcccaataaaaaaaagcaatcgacatcctgagcagctgttgcaagaggtgactgaaagagcatgcatagttgggggcatatgcaacagtttctgtgaatcgaatgggcctccaattattgctaaaaagaaattccagcccacaaagcatactactatctatctcctctccatctgctttgtctgcatctctgaatctgtatgcaatttcatgcactcttctgtttgctgcagcagttggtgcattgtccattctgcactgtcccatttcaataagagcaagtttaatagtatagcccactactagctccaattcatctatagccaatctaatagctaaggacctgttcactttgatgccattttcaacctgcatatctgaaccatcgtcctcattcctcaacatcacacccatatatgcatgctgctcggtttcccgtttcactaaagagaagacactcaagaagacatgtgtcaacatgcagatgcagagatcaatgccaaaagcctcgagaaagagacctagcaccagcctcctgtctccttccttctgcagcttcatatctgaatttccatggccatatctatctaagctgcttaagctctgagatacgtttggtgggaagattacagcaagtcgaaagctcgctattcctcccccggcctcgccgccttgtccgccccctccgtcgccatccgtattccccgcctttgccgccttgtctgcttcctcagtcgcatcgtccgtctgggagcagacgagtgtggtggcgtccgagcgagcgacgatcttgagcaggagttctggcggtccctgatcgccgcaatgctgtccctccacgacgccatgccgctcgacttcggcctcccggacatggacgtcggcttcggcttgttcggcgtcgacgcggcggcgttcggatacgatggtgttgcctcggatgcggccgccggcttgtcgccggtggtaggtgccggcgatgggagtggtggtggtggtgatgtgttgttgtactgtgacggcggaggcggcggcggcggcggcggcgaggacggcgaggaggagaggcggcggcggctgaggaggaagatctcgaaccgggagtcggcgcggcggtcgcgggcgcggaggcggcagcgggtggaggagctggagcgcgccgcggacgagctccgcgccgagcggcgcgcgctggcgtcgaggctggacgccacggcgcggcgggcgctcgccgtgcgcggcgcgaacgcgcggcaccacgccgaggcgggcgtgctccggcgccgcctcggcgaggcgcagcgcaacgccgccgtgctgatagggctgtcccgcctcctacgctcgacggcgaacggcgcccacggcggcgccgccccggcccagttgtcgaacggcggcgtggcgtcgttgatgacgtag

SEQ ID NO: 86308 - DNA, 558 bp, Oryza sativa
  Clone ID: PAT_MRT4530_85361C.1
atgaccattcaacatgcatcaagaactaaacgtgctatcggaaaaggagataaaaggacggcatccgaaccaagaacacaaatcaatatcaagaggacgatagttcacaagaagcatggcagctgtggacatgatcaaatgaagttgagaactcaaagagcccgaattcgaacaattctccatcgatactcccaaagattcgcatcagagacgcaacagattaacagtaaggcgccgacttctgcaccaaatcagaccaaaacaacagcaactactggaaacaaccagctcagcggcaaaagccggagcggagaccagatcaaacagcgcgtgaaacccaccggaaggtgggttaccgaattgccaaattcagccgcgagaagcctcacctgcggcggcgggggaggaagaagacgcgccgccgcctccgccacccgactcgacaccccgcatctccgcaagaaccctagcagcagcggcggcggcggcagctgtagcagcaagcggcgtcgcgcatctaggcgagggattcgcgcgatttctccacggctttggatc

SEQ ID NO: 86309 - DNA, 615 bp, Oryza sativa
  Clone ID: PAT_MRT4530_85362C.1
atgttaattaaaatcagctccttgcatgcagcctttgacgccatccacagaattgacatgcatggcgacgtggccggacagcatccaagaagcagatcctttgaactaagccaaccaaacaagctgtgtggtttttccactggaaagctacactccccttgcaacttgctgctgctagctgctgttgctgcattcttgcctgaaattaatattacttataacatattagtagtacgtagtacctcgataactgaaagtttgaaagtattcgatcgcaaactctacattcgaatcattttgtggtactatactccaaggtcacctttgtacattgaagtcttgaagcaacaacactggagctatggcgaacgttctgcgatggtctccaagaatcttctagaaactatatctcggacgacttttcaaagtctttggagtcgtcgggaccgggccggtcgaatgccacaacgatttagtgatatcactgcaaaagtttataagattaagatgagtacgtcaagaaagagagagatttatgtcaatcgacaaccagtactcagactaacagaatcgcacaagcgtagttatgtcgttttgatgcaacttgcaggtaga

SEQ ID NO: 86310 - DNA, 485 bp, Oryza sativa
  Clone ID: PAT_MRT4530_85363C.1
cagttgaactagaaggctgtaatgcgtaaatgcaccagcgcagaactgcagacgggcacattaggtttcaggcaatttgcaacgatcaaattgcaaccccatatacacatgtttttggagaagttgaacgctaaaatgcgccaaacagaaacttcccagacatggtttaaacatcaaacatccctatgaaattcattttgctcgtggacgctgatattcatcccccaaaacctactcctatcggttgcctgcgactggaagtccgatggataatcctaccagcattcacaatttaacacctctcagtctctgatatatgtatcgcaaatcattgggcagaaactttgtaagtgtgtcgatgatgatgccggtgacttcttttatgagctcgcaccttccttttctttacaatagtaccccggttctgcgggaactttttgttttttatgtgggccggtgggggaacccaaggtacaagccagggg

SEQ ID NO: 86311 - DNA, 579 bp, Oryza sativa
  Clone ID: PAT_MRT4530_85364C.1
gacgttacccgctcccgcagatcccgggcagtttcgtgaagcccacagtgctttcgccccccgcaccggtggacgacccagttcacggcagagctgctccgccagttcccgccatcgacaaccactggtccaggtccagatgcgctcaaccacatgctgaggatcaatctacagggagagcggcagccgccgacgctgggcacacaccatggcacgaggtgttcacagcaggcattcacggagagggtacattcagagcagcagcaggcaggcagagcacatcaccaggcagttcatggcaaacagtggacatccccaatggcagtaggcaggtgtctgctacatggctaccagggaactggctactagccattcatgtatgtagctagttattggctgttcatgtgtgtgatttggttactaaataatttgtgtttccttttatctggaagcatgtatgatgaataaatgatgaacccagatgttcttctgtttagatctctatgaagatttccttgcaacgcttcattgttttataattttcaaggtgagaaaaaatgagtgtccccatgcccctat

SEQ ID NO: 86312 - DNA, 654 bp, Oryza sativa
  Clone ID: PAT_MRT4530_85365C.1
atgtgggggaaaatcaggcaggaggctgaaataaatacttcttccgaggaaaatatccgtcactcctccgcccgattcgatcccctcctcgccctgccgttctccgtccaaagtgaacaagcaatcttgatggatttgaactcggtgccgggcagcgattcggatacttctatcccaaaaattgatgatgacagtgggggagaatatgtgggattacagcccctggacaatcgtgattccactcgatcatcgccatataaaaatgaccaggaactggccgatgcttttattgctgcctgcgaacgctatgctaagcccttcgcagagaagtggcgattgcctgaagatttggaaaaacgcaaacgacaggatgaatgcaagatgttgaaaataccactacgcatgtatgccaagcaaaaaaatatgccgcctgccgagttagagattatggaactgaaagaatatactctttttgatgaacatgggaaagtatatgcacactacaactttgtggtgaaagattcagatggcactcttacattgttctttgctgagttcattgttttgggtgccaagtttgggagttggaacttaggcatcccacttgtgctcaatatttgggtggccacagtgatgtctgctttccatacgtag

SEQ ID NO: 86313 - DNA, 950 bp, Oryza sativa
  Clone ID: PAT_MRT4530_85366C.1
tgctcggcccattccaaatatagcacttagagcagaattcattaagatttctacttcacctttattatcagagttccttggctggatgcttcaaaggtgccaagaagcagagggattaacagctctggcagatgataatgctcttctcaaggtatcacagtccattaatgcagctcgataccttgagtccacattgacagaatggtgcaatgatgtattctttcttgagatggaaaatatagatggccgtagcgaatgtatcttccaagtggagataaatcaactgaaagattttagagtacaatggactgaaaagatttctaccgtcattttaagggattttgatgcccggtcaagggattatctgaaaaataaaaggcagtggccaggagaaatcagaagggttaacattatccagggcattcgtagaatgtttagactacatgcaaggacggatagctaagctggaagatggtctaaatgtcctggattttgtgactgtgtggagaactgtggcaagtggagtagaccagctgctcttttctggaattttcagtggcagcacaaagtttagtaatggcggggtggaaagacttcatggtgatctgagtatattgtttgctgctttttctgcgtggtgtatgaggcctgaaggcttctttccaagactgtctgagggattgaagttattggatattgatgagaagcagctaagagatggagcttgtacagataacaatcggctgagggagtatggtataaggcgtttgacggctgctgaggttgagaagataataaaaaacagaatctatgagtcgtaatatatataaggactaaggaataacagatagcagggttgaagttcgaaatgagttgtgaaaaaccatgatcacttcgtacggttttatttcatacaaattttattactgtgctaaaaaaaaaaaaaaaaa

SEQ ID NO: 86314 - DNA, 982 bp, Oryza sativa
  Clone ID: PAT_MRT4530_85367C.1
ccggccgggaccccacctcttctctttcccccaccaacaccaaccccacgcgaccacccccaatcctcgatcaaacgccctaggatttcatcgcaagcaaggaaggaggagaccaaatccaatccaatcccccatggccggcgcgtcgaccttcagtggcgacgagacggcgcccttcttcggcttcctgggcgccgcggcggcgctcgtcttctcctgcatgggcgccgcctacggcacggccaagagcggcgtcggggtggcgtccatgggcgtcatgcgcccggagctcgtcatgaaatccatcgtgcccgtcgtcatggccggggtgctcgggatctacggcctcatcatcgccgtcatcatcagcaccgggatcaaccccaaggccaagccctacttcctcttcgacggctacgcgcacctctcctccggcctcgcgtgcggcctcgccggcctcgccgccgggatggccatcggcatcgtcggcgacgccggcgtcagggcaaatgctcaacagccaaaactgtttgtgggtatgatcctcatccttatctttgcggaagcgcttgcactctatggtctcattgttggtatcatcttgtcatctcgtgctggtcaatcccgagcggactaatttatcaggctataatgcctgtaacacttgtctgtcatgaatataatggcatgtcaatattcttttgctgtatctttgtggttacgtactgttgttcagactacgttttcttttgcttatttttgagatagtacaaccaacttataattttgactcaccccagagccatggctacatttgttgcatgggaacatggacttatatggtgctagacgatttggtgaataaacaacaaatttttgtactgaatatttatcacttgtgctatggacacatcgcttgccccaatagaggattgcaggactgtttgtgtgtccaaaaaaaaaaaaaaaaaaaaaaaaaaaa

SEQ ID NO: 86315 - DNA, 332 bp, Oryza sativa
  Clone ID: PAT_MRT4530_85368C.1
gatcgtaaagggcgttttccaccccaaaagctagccatttaggtgagggactcccccacttatatcttaggtcctttgcccttccacaacccttcacacattggtgtctctcagctcttcaccgccccttcaccgtatccgggccctaccgcccacggtccatcaggatcgtaaatgatctttcccaccccaaaagctagccattgaggtgaggggctcccccacttatatcttaggtcctttgcccttccacaaccaatatgggactattcaacaatatagatacactacgtatactgctacccatcttaattttcactacattgtattga

SEQ ID NO: 86316 - DNA, 1428 bp, Oryza sativa
  Clone ID: PAT_MRT4530_85369C.1
atgcgttgctacgggaggaaaagaccgtggaagcgggcgtcgttctatggcagagtccgtaatgtcaacgaaggagtaatcgtggcggagctggtggagcaagacggcgtcaggagctcttgccggcatggcaaggaaaagcttgctggcggcagcaagatgacgacgcacggcttgggagggacagagcggcatggaatgaaacaattcacccaaggccacgacagcgagcctcaaccttgcgtggcccacgagaagcaggcgcaaggccggttcagggtgacggctaggttcttggaacttgaaagacagaaactgaagaggatggggtccaagaagaggatgtcaaggtacgccaagaagcacgaggaggccacgctcaagttcgacgtcgtcgggtacagcctcaacgagggcatggccgccggcgagttcatccggtcgccggccttcgccgtcggggctacgactgggcaatccgcttctaccccaacggcgccacgatgccctaagcctcagcgctcaaatccgatgcaaagatatcgtctggagaaggaagaatcaggctacatcaaggacgattgcctgaaaatcgaattgcggcgcacaagagcgtgctcgcccgtcttcaaggcggagctctatggagggatgaaggagagggaggcccgtagcgtgaccgtggatgacacgcagcctgacgttttcagggctctcccacatttcatgtacaccgactcgttgcccgacatggacggcgttgaagatgccgactatgttgaaatgatcaggcttctactcgtggccgcggatagatatgccatggataggatgaagttgctgtgcgaaagcgtcctcgatgatttacttgatgcggagacagttggaactacgctagctttagctgatcagcatagctgcaacaaccttaaggatgtttgcgttaaatttatggctacttcaaaagggatggatgctgtaatggcaactgaaggctatgataatctcaagagaaattgtccttatgtcttgatagatgtgttggagaagcatgccagcgtagcaaactcgggtgaaaacgttgtggacccacttgttaatctctcactgcccttcatctcccctgcgttcatcgccggctcgccaccgccacccctcttctccaccgcgcggccgaccgtgccccatcgacaccggcgccgcctcgtggccgaccaccgccgggaaccgttccgcagccgccaccccatcgttacggcagacggggaggaggacgagcaccatgttgagcttcagcgtctcggcgatgccctggtcggccacgaggcggcgccggcgtcgatggggcggtcgcagccacgcggtagagagaagaggggcggcggtggcgagccggcgatgaacgcgaggggagatgaagggcagtga

SEQ ID NO: 86317 - DNA, 1062 bp, Oryza sativa
  Clone ID: PAT_MRT4530_8536C.1
atggagggcacgggagagagcggcggaaaaaggaaaaaggtggaggggagtgcggggaagctttattggggctcgggagagacggacgtggccggggtgctcccgatttcgccggcgacgtgggagattcttgcggctcactattcgacagagagaaccgtgcgggcccgttttgacggtttcaagagccgtcttcgggccaaggatgatgaaataagccgcaagaacttggaggtagaggccctggcccacacactcaaggaggcgaagactgaagtcaaacgccttcagtccgaattggataaggggaaagaggccagggccgaggttgatcgcctcaaggccgaactggagaaggagaaggcccattcggcagtgctcatcgattactacaaccttactgagccgaagatggaagctcttcgccagaaggctagcagggctgaagcgagcgccgcggaggagtcgcagcggttttcgcgggagatggcgaagaccaccgaatccgctagaacggcttgccaaacgctctgcctcgcccttaccgacatgggcgcgaaggtgcggggggtccatgccgaggatgcctcagccttcgacttctccgagtggacccagcaggctggcggatcggtttcggactgcgccaccgcgtacggcgattgctgtgcacgtgtatcggtggccttcaccttaggccttttgcagcagttcggctgcgagcacgttgccgagttccctacctatgcgaagggggactgggagattagtgcgcagaacatttcgcccgctcttcgcgcatggcgaaaacagttctggcagaaagacggccggtccgctgccaaggcgtgccttctagagcaactggcgaaggcggaggcggcagatcggtgcgaagaagagggcgcggtgggcaaagaagttggaggcgatgcctaggatcacccagaggtctgaggccctccgccctttccttatatttttgtagttttcctccctcttttgcgtttgctttttgatgatcgaagtctttggcatattattatttcgctcatctcgcat

SEQ ID NO: 86318 - DNA, 387 bp, Oryza sativa
  Clone ID: PAT_MRT4530_85370C.1
aatatgaaaaaatgtgagtgagattggtgcgtgtgtgcaccgtaatgatgcgctgttgaggaaccccaaaccggaataagataaaaaggagaaccactggtgtggattaatacgaaaaattgagggagggaaccctagaattgagacgtgcttaatgggcccacaggaccacctattgctgatttactaaccctctataagaaaccccggacatgaataaaaaaggaacctgttcgggtagtatctcccaatattcaccgaaaaccttggttaaaatacttctaccgagagggttttattggaaagtgttcggaaacatccacggaaagtacaccgatatttctgggttttaacttggcgaccatccaaaaaaaaaaaaaaaaaaaa

SEQ ID NO: 86319 - DNA, 600 bp, Oryza sativa
  Clone ID: PAT_MRT4530_85371C.1
atggccggcgcgtcgaccttcagtggcgacgagacggcgcccttcttcggcttcctgggcgccgcggcggcgctcgtcttctcctgcatgggcgccgcctacggcacggccaagagcggcgtcggggtggcgtccatgggcgtcatgcgcccggagctcgtcatgaaatccatcgtgcccgtcgtcatggccggggtgctcgggatctacggcctcatcatcgccgtcatcatcagcaccgggatcaaccccaaggccaagccctacttcctcttcgacggctacgcgcacctctcctccggcctcgcgtgcggcctcgccggcctcgccgccgggatggccatcggcatcgtcggcgacgccggcgtcagagtttgggcagcaaagtcaatcccatgcatatcaggggttcagcgccatgtctatgtgctatttaaatgcctagcagaaatattcaaatgtctcagggcaaatgctcaacagccaaaactgtttgtgggtatgatcctcatccttatctttgcggaagcgcttgcactctatggtctcattgttggtatcatcttgtcatctcgtgctggtcaatcccgagcggactaa

SEQ ID NO: 86320 - DNA, 513 bp, Oryza sativa
  Clone ID: PAT_MRT4530_85372C.1
cggcacgagggtgtggcgcctcgacgccggcggctgctacctctggcggctcgacctccaggccgcgctcagcctcagcctcggcgccggccgggaatacgcctccgtcgcacggagacgtattctcgtcgcgtactatacccgtatccgtatcctggtcgggcgcagattagggctacctaattacaagattaagagatggaattagattagcagcagagcagcaagatttgcaagtgtaagactatctccaacagtggagacgcaaaaacgatacctatttcttgttttgggtcatgcacagtaagatttttttaggtttgggttgcctcgttggagatagcctaagaaggagaattaactaagccaagtgatgcttctggaatctggaggcatgcaagaagcatgcggctcttttttttttaatttttctatttgcccccccaaatgtatggagatttacctaattatttaatctctatttacccgaaaaaaaaaaaaaaaaaagcggcc

SEQ ID NO: 86321 - DNA, 597 bp, Oryza sativa
  Clone ID: PAT_MRT4530_85373C.1
ccgccggccgccccagggccaagaagcttcctccgcgagtccgcctccgcctctctcctcctcggccggcaacacgccatgatgacgccaacacgacggcggccgaccaatctacactcggagtccggcgagatttctattgggggatgcagaaccactattcctttcctctatggtactggcctgctcatatttaataaacacaaatacgcaactcaagcaggtaagttgtaagagtttccctttctggtggagagtaaacttttgcagaggttcaactataccatattttctatcatgcggttcttcagatttcagtacagttgaaagttgccaaaacaccaccagaacatcagaaacaacgacggttgttgaatgagacgttgaagtttgcctttgtgcacattctgccgcaaaggatctgttcagccgcgagacctgtatgttttacttatttcagcttatggaggcctattcttttgagctaatcgttgacggattcccaagatcctaaatgtttcatccatcatctatatagaaatggcctagtacagatacagttgctgtaatgcgctgcgcttgattttaagttgcttg

SEQ ID NO: 86322 - DNA, 1839 bp, Oryza sativa
  Clone ID: PAT_MRT4530_85374C.1
attgtgtgcgggtctctcggcatactgcggctgcggagaagtcttgggagtgccacagcggacgagaaaggctcttatcttgaaggggagggaggcgcagaatgcatcgcggatcgctcggcgtgctgcggttgcggttatgtctggggctgttctcggtctccgcatcaatcccggttcttgcggcggagccccgcaatgatccgtgcccccacagcttgggctgtcgtagttggtacggttaccggtccgctccctccttctctttgtggtacgctggcggaggttaagccggtgcatgatctgcgcacggtacacggccgagctccagggttcctccgtttgcaaactctccaacacattttccacgggccatgtaaatgtggaagcatcaacgcccatctaaaaggttccggagcggcaacgttgaaagcactccacatttgcttccttcctagttaattgttagctatggtgatttgttgtttgctcagttgattctgctatcaggttgagttgcaaaacaaattgtacatactaggtcatgtatggtgtatagacactcgtttttggctccaacgtttatggtacaggagcattatcagttgagagaaaggaatgatccaaatcaggttgtccaaatgattatgaattctgatggaccaggtggtgtactgactgaattgcaacatcttatgcttgtgcaaattagcagccagattatctcctgtactacttttaagtttgccaaatgtaaattcaggggagcacctatttactgttatataaactcaaaacatcaaccagtctgctaatgtggaaactgacaggcaaccaagcctatcctttgaaatggatgttactccaaacaggaattattctgtgtggcttcactttgcagagattgagaatggaataactgcggaagaggaaagggtgtttgatgtacttatcaatggggatactgcattcaaggatattgatataattcgcatggcaggagaacgttttactgcccttgttctgaataaaactattgttgtcactgggacaacactaacaattgtcttgcagcctcttaaaggaacacgtgccactattagtgctattgaggtctttgagatcattctggccgaaaagaaaactttaactcaagaagtgagcgcattgcgtactgtgaagggttcgcttggtcttcctcttcgattgggctggaacggtgacccctgtgttcctcaacaacatccatggagtggagttgaatgccagtttgatgatatcaaaggccattgggtcattgatgggctaggtcttgacaaccaaggtttgagaggatttataccttctgacatatctaagctacaacatctacaaagcataaacttgagtggtaatagcataaagggcaacattcctgtcaccttgggtactatatcagggctgcaagtgctagatctgtcgtacaacgaacttaatggttctattccagatagccttggtcagctggcatcgttacagatactcttcacggacaatgctggactttgtggaattcccggtttacatgaatgcggcccgcatttatctgtggctgcaaagattggtatggcttttggggtactggtagctatcctatttctagttgtatttgcggcatgctggtggaagagaagacagaacattcgccgtgcgcagaaattagctgcagcaagggaagctccttatgcaaagtctcgaacacaatttacacgggacatgcaaatggcgaagcatcaccgcccacatgaaagctctcggagcggcaacgatgaaagcactccacatttgcttccttcctag

SEQ ID NO: 86323 - DNA, 363 bp, Oryza sativa
  Clone ID: PAT_MRT4530_85375C.1
tggcagctgcgagggcccgcaaattttttttttttttttttgcaagtctgaaaatgattgatattctattcaatggttcttatttctagtgttcgcacacgatagcatgcaacaccttatcactagagcccacgtaaccaacgctcgatcaacaacacccacaccaagagagttgcaagctgacaggggccacgctgcccacgtatggcatctgcatcgcccgcctcatcacctgctgctcccccgccccaccccaaacacctccccgccctgcgctgccgcccccgcccccgctcccccccccccctcccccctccccccccccccatccccaccccatatcccccccccccccccccccca

SEQ ID NO: 86324 - DNA, 402 bp, Oryza sativa
  Clone ID: PAT_MRT4530_85376C.1
gacaccttcaataacttgcaaggataactcaaactacttgaatcagatcagacaaaaacatcataagaatatcacgatgtgtggaggagcactgatcccgaacgactatggcgacaagccgccgccagcgacgtcggagtcgtcggagtgggacgccacaacgaatgatgaagaagaagaagaagcgtggtggcggaggcgactacgactgggaggtcgccttgctggagttcatgggtgaccacggcgactacgacatacgtggaacatccatgtcatcttcctcggcagtgacgtaagactctacagagggatagcttctgcgagtgtgctatcaataccaatcattggatcccatgcttccatcagatatacgggttgtagctttcacttcagctacca

SEQ ID NO: 86325 - DNA, 180 bp, Oryza sativa
  Clone ID: PAT_MRT4530_85377C.1
atgccgttctgcagcttctacgcctccacctccctccagcttcgacgaggaggaagaaacggtagggccccacatgttcggctggtgcccgtaggtccttgtggaggagccggcgacccgacgaggcatgggacagcgaggcggtgggacgtggtcgtcggcgagcagaccagcgggtag

SEQ ID NO: 86326 - DNA, 1480 bp, Oryza sativa
  Clone ID: PAT_MRT4530_85378C.1
cggtctttttcgcaaattccccatccaaaacaccactctcctcctccagtccaggttagggttttgggatggcggatcggcagcagtcggaggagccggaggagcaggtggacctggagggggacgacgacatcatggacgacgacgacgggtaccgccgccaccgccgcgaggactccgacgacccggaggaggaggattccgtgattaggcagggggagggcgacggccgtcgggaagacgcggaagggccggggggtgcgggtggggatcccgccgcgggtggcgaaggaggcgccgatgtgatggacaaggttggcggcgatgccgggcccgaggacgaggaggagaagaggaaatgggacgagttgctcgctctgccgcctcagggctcggaggtgttcatcggtggtctcccacgtgacaccaccgaggatgacctccatgagctatgcgaggcgtttggcgaaatttctgaggtgaggttgatgaaggataaagagacgaaggagaacaaaggattcgcatttgtcaccttcaccggcaaggatggggctcagcgtgctattgaggatctgcatgacaaagaacacaaggggaggacactgcggtgctcattgtcacaggcaaagcacaggctatttgttggcaatgtacccaaggggttgagtgaggacgagctgagaaacataatccaggggaagggcccaggtgttgtgaacattgagatgttcaaggatttacatgatccaagccgtaaccgtgggttcctctttgttgagtattataaccatgcttgtgcagactatgccaagcagaaattgtcagcaccaaactttaaggttgatggtagccagttgaccgtcagctgggctgaacctaagggttcatcatcatcagattcttcttctgcagctgccccagtatacactgtgaaaactatatatgtgaagaacttaccagacaatgcttctaaagagaagattaaggagatctttgaaattcatggagagcctatgatatatggtagaggaccagcaccagctggaatgaggatggtaccaatggtgctccctgacggtcgtctgggatatgttctgtaacaaccaggtggaatccctcctccgcccccaccgcgtcggggtgaccggagggatggtggcagcagaggtggcgaagggagtcatggccggcgatatcgcccttactagctttttcgttcccttggtcctgccgccatccagccatcacgcaatgtgatggatttcttaacctaaagaaacaagatagaagcttgtaaccctgttccagcataacacctgcaattgcgcaagacatgtaccgtcttcttttttcagttatatttatctgtcatgcatgtggtgcttgtgacttgaaaacagtgtcttgaagctttgtatctcgcggtggcgtctgtagtggtaaaccgatggaattggaaaattatctgcagacatac

SEQ ID NO: 86327 - DNA, 3004 bp, Oryza sativa
  Clone ID: PAT_MRT4530_85379C.1
ttaactgctgcctcccttctgtttgagggtgatcttgtcgcctaagctgagggcgattccttgggtcttactccgaattcaaaacaagccacttatcttgttttcatctgatttggcacatttgatttgcctgtctactaataatcgaaaaaaacttcacatctatttctacatcgtcatttctttttatcaaaaagactaacactccaataacagggacaggaggcaaatccggattgaactaaaccttgtcgtccttcaatagctctggagcattatccaactgggaacatcatcccggttctctttcctttctttgatcttttgtacaaaaaagaactttactcaacaattcaatcccactaaagcgtggaatttactaaaaatgatgatacaaccgtgacagagtcatggcccgttaactgcctcccttctgcttgagggtaatcttgtctcctaagctgagtgcgattccctgggtcttggtccttattctgatgtaaccactgagcttgccatcaaactgcttctcgatgctgatatttaccaaagcatcttcaccgaaaacactctttgtcataaaggttagcggcgtccaagcacaacttctgacgtgtttcctttgcgcggtttatgactgtaacatcaagcacaatatcatagtggtgaacagttacatatgctccagcatacacaggatcactgaaccctgttagttgaagaatgcgattcagtctgtttgcgtcatctgcatcttttgtaaattcaccagtagcagccttcaaatcatcttggactgcatcttccaactcaagttggctcattcccctccggctcttcaggtggtagaaatcaatgagatcatcaggctgggcatgagagatctgcgccttggccttcatctcctcagtctctctgaattgtttttcagcaagcatctttgtaaagctctggcggcatgactgcaaccagaccttcctcacatcatcaccagtattgcaaagcaacctcacacagagcacaatcctatcatatgagtcattgtcaatagggtggggaaggtacgaggactgccccaactgcagtatggacaccatgatcagcaaggccccagtagaagccttgtttgcttcagcctttgatggctggacctcctccagcctcagcacaagcttggtgagggtacaggcaacaacagcagctaaaaagaaatcaccagacagaatgagagatctgagattctgtgtggaactcagtgaccctggagcaacagctggagacgaaatggcagtctctgtggcagcactctgtgtggcataagtaccatctgcaagaacaacaggcctcctagaagatactgtgacagagttcaccacaggctgggctggctttgacgcatcagttgattctccttcctcagagacagtgtagaatggcagatcaccaaggcactgcttgatggtggaaatggcactctcaacctcagatagtgaaagggagtactccccaaggatccagagagcacatgagcagacacgggatgcacggatctgataaaatgtatcaatcagcctctgaatcattgacacacggagcttggggttggtctcaatgatctcgcgcacaaacaaaacaacatcaaccgctgcagcaacattagtgtcaccaaggaagtccatgaggaggtggaccaccgatccagccacctctgggtactcgacagcgcaggaatggatcgcctgcaccagcatctgccggtactcaccacccttctcgagatccccggcctgtgtcttaacaacctccttcttgaggtacatcaccacctcctccacatttcggggggtaagcagatcaagcaccaaatcaagcaccttcctcctgacatccacattggggctagatagcgcacgcagcacatccatgaccacatccaccatgacatcacggtgcgaggcacgcagctcgtgcaggcggtcaaggacaataagcttcacattgttgtcgctctgcgacgacagcagctggcagtaggtgttggcagcagcacgcacggcagtgggcgccgacgacagcgacacgagcgcgccggcggactcgtacacgacggcactgttgggcgcggagaggagggagatgataatcttgatataccttcccttgtcagcgcggttgggcgagcggcagaccttgcggatgagatcgacggcagccatctggaggagatcaggccactcggcgacgcgctcggcgttggtgagcaggtacgcgacggcgcgctcctgcgcgcaggcgcagagcatgaggaacccgttccggcgcgcggacgcgtcctgctccccggtgagcgcgcgctcgacgacctcgggcgcgtcggggaggagctggtcgccgtgcgggaggcggtagatggcggagatcgcggagagcgcgtgcctgcggatgaagtggtggcggtggtcgaggttggcgaggatggacgggatgagcggctcgagcagctcgggctcgttgaggcggcagaggaagcgcagcgtgaccccgcggatgtactcgttggggtgctggaggttgttgcggaggttctggcagatgaggatcatctccgggagtaccttgccggaggcgacgtcgcgcttgtcgacgatctcgaggtagaggaggaggagcttctggatggtgtggtcctcggaggggaggacgtagcggacgacggtgatgaagaggtgggggagggtctcgccgttgaggagcagcatgatggcgcgcttcatggcgtcgaccttggcggcgacgtcgctgccctcgaggtcggccttgatctcgttggccatggagggggagcccttgtcgaagtggaccaggagggtgcatggcttctccatggccgccgacgccgccgctgcacggccgccggtggggggtggatctgggggagtggtcggtggatctgggctctgtgcggggatcggatctgggggggagaagcctctctatgcctatg

SEQ ID NO: 86328 - DNA, 3038 bp, Oryza sativa
  Clone ID: PAT_MRT4530_8537C.1
ggaaatttacatggttgcccttacgaaagggacatttacaggggtacataatgttatggaggctcatgggcccctgatgggccgtcgggcgatcgccggccctatagcccctaggcctgatgggtcggaaagactttttcggccctcgcgggagcgaacttgccatggcgaagtcgtcttccttcggcagatactcttcgccttgcacccttcgcctgggacgcctctggcttactcgcacgacccctcgcctctcgccattcttgctccatagcctttgccacgggtttcagcagatttggtcgaagggcctcatgccatccgccaacaagcccctcacgggcaagggtgagaatggagcttcggccgagaccgtgcacaccatgtggtatggtacgcggcgccccctttcgaccgatgctcctgccgaaacctacattgttcctgcaaataaacgtttcctgacccctcaggtgcttcgcccattctcttccttcgccaacgcatacacaccgttcgccatggcccctcgcaagccaaaacctgctttggcgaaagggccggatcccggccgggttgatgacgacagcaccgcctttttgggggtttctcacgtggacgacgtcgagctggcgaatttggtcagctctggggcgttggttgaggggcaggctttcgccccagggaaagccgtggtgccgaagcctatcgacaatcggacggtggtgttcgccgtcttttttgaggcagggctacggtttccgtgcaacgtgttgttgccggagatccttcgccttttccagttgagcccatcggcgctagttcggatcttcatcttcgaatgggcgtgccggacttccgggtttgagcctagcgccgaactcttcggcgccatatttttcgccaccgtgaactcgaaaatggtgattaccccggctggaacaaagaagacagtgttcgggagcgtgaactttaacgttcgccctgagtggtccgatctctggccggtgaacgccgccatgtcgaagtgggaccaccattggatggcgaggtggttctttcacaccatccccttcgaggctggttctgactcggcgaaagcccttcggtgccgtcgcagggcgattgcgccgaaccggaaacccaagatcgccgtggacggcgctatggaggcacggttcgttctactccgtaaggtttgctcctgccttagttgccgtgacttggtggaggaattttgtatgcttcgcatctttcccctctcccagtcatggcaagtcacggttgatcaagacgaagagattgacggtttgccgaagttggttcttcttgagggaatgaacatgttgactctcgaccaggctgaagccgaagcccgcaggatgatcggcgatgtatcggtcgtcaagtatagcgagctgctgacacgacaagcagctggccgggcaaactgggtttacaacagtgaattgcctccccgggcgaacccccacaaagccgacgacgatgcaggaccttcgcgaaagcgaacgcgcggacaagtgaagcttgtccctaggaagcgaagggttcctgcttcgtcggattccgacgccgacgacgaggatcatgccgaagagcatgacggcgaggaggaaggggaggaagaagaggaggtggaggccgtggcgaaaaggccgcaaacgaggcgatcgaagaccgcgtcgacacccctggctacactcctactccaagccctagttgcgttctcgtcgagcaaggcggcgaagggaggtccggtcaagaagatctctaaaaagaaaggactcgtcgacatcgctcgcgtttttagtgacgacgagtcttctgacgagactccgacttcacccgctggccgcagcctggacctttcgatcgcccccattcttccactcggcgctaatggggcaggcagcagcgccatcaccggggcttcagcctccgccgaacggatcatgatggctgcggcgagggtcttcgggagccctctgcgtgaaccagctatttcgccgttagtcaagacgaaggggaagggtgcggccgccgaagcatctgcctcggagtattcccttgcggcgccccacttcgcccctggtgatttcgagacccgggcggaccttattccctttgtggagggagtaagcaatcttgtcctacctgccagcaccccgagcctattcaccgaactaaatgagttcgatgaggggtgttctgctattaaaagcttggtagttcggaacttggagatggaggcactcgccaacacactcaaagaggcgaaagctgaaatcaagcgcctccaatccgagttggagaaaggaaaaaaggctagggccgaggtcgattgcctcaaggccaaactggagaaggggagagaggccatagcggaggttgatcgcctgcaggccgaattgaaggaggaaaaggcccattccgccgtgctgactgattactataacctcactgagccgaagatggaagctcttcgcctgaaggttagcaaggccgaagcgagcgttgtggatgagtcgcagcggttttcgcgggagatggcgaaaaccatcgaatccgcgagaacggcttgccaaacgctccgcctcgcgcttactgacatgggcgcgaaggtgcgaggggtctctgccgaagatgcctcagctttcgacttctccgagtggacccagcaggctggcggttcggtttcggactgtgccactacgtacggcaattgctgtgcgcgtgtatcagcggccttcactttgggccttttgcaacagttcgtctgcgagcacgtcgccgagttccctaactatgcgaagggggactgggagattagtgcgcagaacattacgcctgctcttcgcgcgtggcgaaaacagttctggcagaaggacggcccgtccgctgccaaggcgcggcttttggagcaactagcaaaggcggaggcggcagaccggagcgaagaagaggacatggcaggcgaagagggtggaggcgatgcccaggatcacccagaggtgtga

SEQ ID NO: 86329 - DNA, 4040 bp, Oryza sativa
  Clone ID: PAT_MRT4530_85380C.1
cccacgcgtccggtcgagtcgcaaattccccatccaaaacaccactctcctcctccagtccagtaagcccctcttctcctcccttcccccaattccatccactgctctcaaatctcaatactactactgttctatcgaatcgattcgaaatccacaccgctactacggctaattacgctctctttcttcttctctcgcatcatgccgcgattttcgaatttccctagattttttccgtctcaaagggttagggttttggggatgtccgaccggcagcagtcggaggagccggaggagcaggtggacctggagggggacgacgacaacgacgtcatggacgacgacgaggacgggtaccgccgccgccgccgccgcgaggactccgacgagccggacgacgacgaggaggatcccgaggtcgagggcgatggccacggagacgcggggaccgcggcgggcgaaggaggagcgcatgagatggacaaggccgccggcggcggcggcgatgggcctgaggacgatgacgagaagcggaagtgggatgagctgctcgctctgccgcctcagggctccgaggtgttcatcggcggtctcccccgcgacaccaccgaggaggacctccgtgagctctgcgactcgttcggcgaaatctatgaggtgaggttgatgaaggataaagagaccaaggagaacaaaggattcgcattcgtcaacttcaccgcgaaggaagcggctcagcgtgctatcgaggaactgcatgacaaagaacacaaggggaggacactgcggtgctcactgtcgcaggcaaagcacaggctattcgttggtaatgtacccaaggggttgggtgaggaggagctgagaaagataatccaagggaaggggccaggtgttgtcaacattgagatgttcaaggatttacatgacccaagccgtaaccgtgggttcctctttgttgagtattataaccacgcttgtgcagactatgccaggcagaaattgtcagcaccaaactttaaggttgatggtagccaattgaccgtcagctgggctgaacctaagggttcatcagattcttcttctgcagctgcccagcaaatggggaggtggtctgaatggaaagaggcctactttttcttgaagttggactcttcatgtttggtgtggtcccagtcgcattcttacttttatttctacatggtgaagactatatatgtgaagaacttaccagaaaatgcttctaaagagaagattaaggagatttttgaaaagcatggagaggtcacaaaagtcgttttgccacctgctaaggatgggcataagagagattttggttttgttcactttgctgaaagatcaagtgcactgaaggcagttaaaggaagcgaaaaatatgaatttaatgggcaagtgctggaagtactccatggccaaacctttgggtgactagaaacctgatcactcgttcaagccagcaggagctccaaatttaccacttcctccttatggtgcctacatgggagaatccatatggtgcttatggtggtggtggtcctggattcaaccagcctatggtctatggtaggggaccagcagcagctggtacgaggctggtcccaacggtgctccctgacggtcgtcttggatatgttctgcaacagcctggtggaattccccctccacctccaatgcgacgcggtgaccggagggatggtggctgccgaggtggtgaagggagtcaaggccggcgatttcgcccttactagtttttcttttttttttccgttcccctgtgccgccagccattatgcagtgtgatggatttgttaacttatgaaacaagagagaagcttgtaatcctgttccagcataacacctgcaatagcgtgagacatgtacaaccttttttcttttccaattatagtcatgtaatgcggtgcttgtgacttgaaaacagtgtgttcaagctttgtatttctcgcggcgtctgtagcagtaaaccgatggaagaatttatctcgcagaaataaaattggacctaggaaaagaaccagatgaaatgaggacggtaccaatggtgctccctgacggcaacaatcaggtcaaaccacccctacccccaaattttccacttcctccctatggtggctacatgggagatccatatggtgcttatggtggtggtggtcctggattcaaccagcctatgatctatggtagaggaccagcatcagctggaatgaggatggtcccaatggtgctccctgacggtcgtcttggatatgttctgcaacagcctggtggaattccccctccaccaccaatgcgacgcggtgaccggagggatggtggcacccgaggtggtgaagggagtcatggccggcgatatcgcccttactagtttttcttttttttttccgttcccctgtgccgccagccatcatgcagtgtgatggatttgttaacttatgaaacaagagagaagcttgtattcctgttccagcataacacctgcaatagcgtgagacatgtaccacctttttttttctccaattatagtcgtgtaatgcggtgcttgtgaattgaaaacagtgtgttcaagctttgtatttctcgcggcgtctgtagcagtaaaccgatggaataatttatctgcagacatccagttggacctacaaaaaaaagaaaataacaaaaagtcgggcgacgactccaccgtcgacaacagttttcttcctcgtgccaagttggagtttccaacttacgacggcaaaggcgatccgcttccctggctgaatcgctgtgagacgttcttccgtggccagaagacaccggagtcacgtcgcgtctgcccgctcggcgaactcacgacactttggcgcaccggcacagtggacgactacatcaatagcttcctcgccttggcttgccgcgacgccaaactatccgagaaccagcaggtgcaattgttcacggcaggcctcgtcaatcccctcaagacagatgtagctctctgccggccgagttcactggacgacacgatcatgctcgcccgggcgtatgagcagcgggttcaactcggcacaacggaccccgtgccggctcgctctggccgcacaccacggccttcgctccctgccctgccggcgcccgtgtccgccgcatctgccgcgtctacggcgccggacgccgcgtcatcggcatcgaccagcaaacagcccctggtgtcggctctccctcgcaagcgcttgtcgccggcggagatggcccaacgccgttccgagggcctctgctacaactgcgacgagaagtcatcagcttcccagaggaagctgaggagaacaccgacggcgcatgcgctcacgctagatgagcctagcatctcgctgcatgctctggccggcgtccgcacgcccacattcaacacgatcaaggtgcaggcccgcatcggcgcaacggacctcgtcgccctcctcgactccggctccacacataattttatcagcgacgttgccgcccgccgcgcccgtgttcccctggaaccgcgccacggcctcagcgtcgcagttgcaaacggcgatcgcatcacctcgccaggctgttttccgtcccagcgtgtcaccatcggcgaccacactttcgtcatcgatttctacgcgcttcctctcggcggctacgacgtcgtcttgggtgcccaatggcttggctctctcggaccgacgctctgggacttcgccaagcagtcccttgccttcggctcacccaacaatcgcgcggccaccatcgacggcgcgacgggcgaactcatgtccgagctgctcgacagctttcaggacctcttcaccgaaccacaaggcctaccttctgagcgccatctctgccatcgcatccgcctggaacacggcgtctcagccgtcgcggtgcgcccgtaccgctacgcccacatccagaaagatgagttggagcgccagtgcgacacgatgctacagcaaggcgtgatccgcccgagttcgtcggcgttctctccccggccctactga

SEQ ID NO: 86330 - DNA, 192 bp, Oryza sativa
  Clone ID: PAT_MRT4530_85381C.1
gcgtgatcacagcgatgactataactgaaagggggggattttataaaaatatggccccgtgaccaccaaaaaaactagagaactaaagcatagacacctagacataacgataaacaacgggaggagcggaggccgataggagcacaagcggggctagcgccaggagcagggtaaccacaggaagggaacgga

SEQ ID NO: 86331 - DNA, 193 bp, Oryza sativa
  Clone ID: PAT_MRT4530_85382C.1
ggagccatgaccaggcccaaccaaccaccttgatacaaccaagttttgttttaggttttgacgggcataaaaccattcagaatttaaaatttttttttggaagagggtttatttacttttttttggggcaaaaaaaaacttccctgtttttgcaggccttcatgaggagggctcgtttaattggggctgtgca

SEQ ID NO: 86332 - DNA, 257 bp, Oryza sativa
  Clone ID: PAT_MRT4530_85383C.1
ttttactggcgagacggcagggccggggcggagcgactgcggaaagcttatgtaagtcacaacatagacgaaggacgcaagccttctttccttgactctgtgacatgctcgaccatgcacgccatgcatacactcgtgttgcgccttgccgtgctgacagccatctttattattggtcaagaacaagaccgtggagctggagcgcccaagcacccgcataccctaggcgcatgcggacacgctatactggcgcggcg

SEQ ID NO: 86333 - DNA, 626 bp, Oryza sativa
  Clone ID: PAT_MRT4530_85384C.1
tggcggcgctctaaactagtggatccccgggctgcagggcaaacgagcaccacacaccagcagcagcagcaagtcgatcgatcgtcagcacacacgaccaagatcgagatggcccgtgcacagctggtgttggtcgccctcgtggcagcggctctgctcctggcgggcccacacaccgccgaccgccgcaccgcctgcaactgcctcaagaacgtggccggcagcatcagcggcctcaacgccggcaatgccgccagcatcccctccaagtgcggcgtcagcatcccctacaccatcagcccctccatcgactgctccagcgtgaactaatccgatcgatcgctaccggaggatgacatgcagcgccggccgagatgcagctgtcgtctcacgctttgtatcttgtgttatctgtgtttatgctgaataaaatgagagctagctagctaggtcgatccatcgccatgcatacatggttgatcgcccggccggtcactacgctatctgtttccttaatttattcgtcgatcgactatacgtacctgagagctagagatcagtttgtgtaccatatgcatatgtacttctgcatgtacatggagtactacttgtactacgtgcgtgta

SEQ ID NO: 86334 - DNA, 906 bp, Oryza sativa
  Clone ID: PAT_MRT4530_85385C.1
cccgggctgcaggaattcggcacgaggctcacctgcagcagcaaacgagcaccacacaccagcagcagcagcaagtcgatcgatcgtcagcacacacgaccaagatcgagatggcccgtgcacagctggtgttggtcgccctcgtggcagcggctctgctcctggcgggcccacacaccaccatggccgccatcagctgcggccaggtcaactccgccgtgtcgccctgcctcagctacgcccgcggcggctccggcccgtcggcggcctgctgcagcggcgtcaggagcctcaactccgccgccagcaccaccgccgaccgccgcaccgcctgcaactgcctcaagaacgtggccggcagcatcagcggcctcaacgccggcaatgccgccagcatcccctccaagtgcggcgtcagcatcccctacaccatcagcccctccatcgactgctccagcgtgaactaatctgatcgatcgatcgctaccggccggagggtgtgacatcgcaggccgtacatgcacctgtcgtcgtctcacgctttgtatcttgtgttatctgtgtttatgctgaataaaatgagagctagctagctaggtcgatcgatcgatcgccatgcatgacgagactagctagcattgctgctagatcgatgcatgcatatggttgatcgcccggtcactacgctatctgtttccttaatttattcgtcgatcgactacgtacgtacctgagagctagagatcagtttctgtaccatgcatatgcatatgaacttctgcatgtacatgcagtactacttgtactacgtgcgtgtacgttgtggattatacattatatagacagctccttttggtatacatatacatgttctacaccgaaaaaaaaaaaaaaaaaaaaaaaaaa

SEQ ID NO: 86335 - DNA, 584 bp, Oryza sativa
  Clone ID: PAT_MRT4530_85386C.1
atgacagtcttgaaggaacagcatgaggtctggcaagttaacaaatggtacagctttcgaaggtattattcaaaattttctatcctgaaattacaacggatggtcttagtacagtttgcaatcaaaacacgacgatgaatatatatttctaaatgatcaaaacaggtgtggtacaacccattgaagcatcttacataagttttacaatttcggtgccatcaggagaaaaaaaaaacaagcattatactgctatcaattgatttgtcaaactgccattgtggcgccactgactagctgcgattgtgccacaagctaaaaaaccttcgatgagtggagggcaagatcaggagagtttcatgttcttcaacaggctggtgatgagtgcctccttcgacggtgctcgttgcttgtaatccttcaatagtgcctctgaagccaagctctgcagttctgagctttcctcttccttattcctccctttggtcaactgattgattgccgagctacacaaacacacgccaaagagggctcttgtattcttgcctccagtcaactgtattgtagatgcataatattttctagct

SEQ ID NO: 86336 - DNA, 1512 bp, Oryza sativa
  Clone ID: PAT_MRT4530_85387C.1
atgtccagggcttgcttgctcctcgtcgtcgccgccgtctgcctcgccggccgcgaggcggcggcgttcaactacgccgacgccctcgacaaggccatcctcttcttcgaggcgcagcgctccggcaagctgccgccggggcagcgcgtcgcgtggcgcgccgactccggcctctccgacggctccgccgacggcgtggacctcgccggcggctactacgacgccggcgacaacgtcaagttcggcctgcccatggcgttcacggtgaccatgctgtcgtggagcgtcatcgagttcggcgacatgatgccggcgcgccgctcgtcgttcctcggcggcatcttcggcggcggcggcgtcgcgcagctcgacaacgccagggccgccgtgcggtggggcgccgactacctgctcaaggcggcgacggcgacgccggacaccctgtacgtccaggtcgccgacccgtaccaggaccaccggtgctgggagcggccggaggacatggacacgccgcggagcgtgtacaaggtgacgccccagagccccggctccgacgtcgccggcgagaccgccgccgcgctcgccgccgcctccatcgtcttccgcgtctccgacccctcctactccgccaagctgctcgacgcagctcaactggtgtttgatttcgcggacaaatacaggggatcatacagcgactcgctgagctcagtggtgtgtccgttctactgctcccactcctaccatgatgagctgctgtgggcggcgtcgtggctgcacctggcgtcgccggagaagaaggacgtgtacctgtcgtacatcgggtcgaacggccacgcactgggcgccgagcaggacgacttcaccttcagctgggacgacaagcgcgtcgccaccaaaggattcttgcagagcagagcggacgggctgcagctgtacaaagcgcacactgacaactacatctgctcccttgtccccggagccaacggcttccagtcccagtacacgccagggggtctcctgttcaaagaaggcgacagcaacatgcagtacgtgacatccaccgccttcctcctcctcacctacgccaagtacctctcctccagcgccgccaccgtctcctgcggctccaccgccgtctccccctccaccctcatctccctcgccaagaaacaggtggactacatactcggggcgaatccggcggggatgtcgtacatggtggggttcggggcgaggtacccgcggcacgtgcaccaccgcggcgcgtccatgccgtcggtgcgcgaccacccggcgaggatcggctgcgacgaggggttccgctacctgcactcgccggagccggacaggaacctgctcgccggcgccgtcgtcggcggccccgacgccggcgacgccttcgccgacggccgcgacaactacgcgcaggccgagccgtccacctacaccaacgcgccgctcgtcggcgcgctcgccttcttcgccggagcgcacaagatcttcacgccatga

SEQ ID NO: 86337 - DNA, 778 bp, Oryza sativa
  Clone ID: PAT_MRT4530_85388C.1
gcagcagcaaacgagcaccacacaccagcagcagcagcaagtcgatcgatcgtcagcacacacgaccaagatcgagatggcccgtgcacagctggtgttggtcgccctcgtggcagcggctctgctcctggcgggcccacacaccaccatggccgccatcagctgcggccaggtcaactccgccgtgtcgccctgcctcagctacgcccgcggcggctccggcccgtcggcggcctgctgcagcggcgtcaggagcctcaactccgccgccagcaccaccgccgaccgccgcaccgcctgcaactgcctcaagaacgtggccggcagcatcagcggcctcaacgccggcaatgccgccagcatcccctccaagtgcggcgtcagcatcccctacaccatcagcccttctgtgtactgctccagcgtgaactaatccaatcgatcgctaccggaagatgacatgcagcgccggccgaaatgcagctgtcgtctcacgctttgtatcttgtgtatctgtgtgtaggccgaaataaaatgaaaactagctagctaggtcaatccatcccatggatagatggttgatagcccgggcggtcactacctatgtgtttccttaatttattcgtcgatcgactaaacgcacctgagaggtagagatcagtttttgtaccatatgcatatgcacttctgcatgaacatggagtaccacttgtaccacgcgcgtgtacgttgtggattacacatagatatatagttctttttcgtataccaaaaaaaa

SEQ ID NO: 86338 - DNA, 849 bp, Oryza sativa
  Clone ID: PAT_MRT4530_85389C.1
actagtggatcccccgggctgcaggctcacctgcagcagcaaacgagcaccacacaccagcagcagcagcaaagtcgatcgatcgtcagcacacacgaccaagatcgagatggcccgtgcacagctggtgttggtcgccctcgtggcagcggctctgctcctggcgggcccacacaccaccatggccgccatcagctgcggccaggtcaactccgccgtgtcgccctgcctcagctacgcccgcggcggctccggcccgtcggcggcctgctgcagcggcgtcaggagcctcaactccgccgccaccaccaccgccgaccgccgcaccgcctgcaactgcctcaagaacgtggccggcagcatcagcggcctcaacgccggcaatgccgccagcatccccttcaagtgcggcgtcagcatcccctacaccatcagcccctccatcgactgctccagcgtgaactaatccgatcgatcgctaccggaggatgacatgcagcgccggccgagatgcagctgtcgtctcacgctttgtatcttgtgttatctgtgtttatgctgaataaaatgagagctagctagctaggtcgatccatcgccatgcatacatggttgatcgcccggccggtcactacgctatctgtttccttaatttattcgtcgatcgactatacgtacctgagagctagagatcagtttttgtaccatatgcatatgtacttctgcatgtacatggagtactacttgtactacgtgcgtgtacgttgtggattatacatagatatatagctctttttcgtatacaaatacatgttctacaccgattactccaaaaaaaaaaaaaaaaaa

SEQ ID NO: 86339 - DNA, 1811 bp, Oryza sativa
  Clone ID: PAT_MRT4530_8538C.1
atgcgccgctacgcaccgcccgtccgcagccgccttcccgagcgcgtgcacggtccttcagaagagaagaacaaagaaagaaagacggcacaacagcaggaccatcaccggcgtcagcagcagccactcgacgccgactgcgttccagagaaccgccgctgccacgtccacgacgtgccggagcaacaggaccacccccaccggcggcgccgcgttgcgccgccgcatcccatcgtgatgcccgtgccgacgaggtcgccgtctcccccctcgtgcgccgccgcctccctcctcgtgcgccgcctcctccctcctgatgctgtcgcgccgccacgcctgccaccttgggcacctccctcccgtcgccgacgccgcccctccccgcccgatgttgtcgacgccaatggagaggggaaggggaggaggggagaagaattaaagatgcacgacgcagatcgaggagataggacgcggccttgccttcgccatgggtttcggcagatttggtcgaagggtctcatgccatccgccaacaagcccctcacgggcaagggtgagattggagcttcggccgagaccatgcaaaccatgtggtatggtatgcggcgccccctttcgaccgatgctcctgccgaaacctacattatccctgcgaatgaacaccgcctttttggggtctctgttgtggacgacgtcgagctggcgaagctggttagctctggggcgttggtcacggggcaggctttcgccccagggaaagccgaggtgccgaaacctatcgacaattggacggtggtattcgccgtcttttttgaggcagggctacggtttccctgcaacgtgttgttgccagagatccttcgcctcttccaggtggaacttccacagctgagcccgtcggcgcttgttcggatcgctatcttcgactgggcgtgccggacttccgggtttgagcctaacgccgagctcttcggcgccatatttttctccaccgtgaactcaaagacggccaaggatgatgaaataagccgcaagaacttggaggtgaaggccctggcccacaccctcaaggaggcgaagactgaagtcaaacgccttcagtccgaattcgataaggggaaagaggccagggccgaggttgatcgcctcaaggccgaactggagaaggagaaggcccattcggtggtgctcatcgattactacaaccttactgagccgaagatggaggctcttcgccagaaggctagcagggccgaagcgagcgccgtggaggagtcggagcggttttcgcgggagatggcgaagaccaccgaatccgcgagaacggcttgccaaacgctccgcctcgcccttaccgacatgggcgcgaaggtgcggggggtccgtatcgaggatgcctcagcctttgacttctccgagtggacccagcaggctggcggatcggtttcggactgcgccaccgcaacatttctcccgctcttcgcgcgtggcgaaaacagttctggcagaaagacggccggtccgctgccaaggcgcaccttctggagcaactggcgaaggcggaggcggcagatcggtgcaaagaagagggcgcggtgggcgaagaggttggaggcgatgcccaggatcacccagaggtgtgaggccctccgccctttctttagagttttgtagttttccaccctcttttgcgtttgctatccatcagggggttcgccgaaagtcgtgcatccggcccccttccgggagctggcgaagtcaaaacgagaaatttgtggcagtgaagggtctgccgaaggtgcgatgtccat

SEQ ID NO: 86340 - DNA, 232 bp, Oryza sativa
  Clone ID: PAT_MRT4530_85390C.1
aaaaaaaaaggagaaaaaattgcgttatttaaattattggtttataagaaaaccctatcacaaaagggggaaaaaacattgaaaatctctttaaaagaaccctttccagttttctagaggagtaaagttaattattagaggtggtttcaaaataaaagccgggaatactaacgcgatttaaaacgggtgaaaaaaagggggggggacaagtccaaaatgtccttgaggaaag

SEQ ID NO: 86341 - DNA, 384 bp, Oryza sativa
  Clone ID: PAT_MRT4530_85391C.1
atggacggccgcgaacgaatgcgaggcggcccgtcggcgggtgctgggggcagccggtgcgagcgcctcccgccgaccgcgtcgcgagtcgccttcgccttcgacaccaccaccaccaactatcttgcgccgccttctgtaccgctgcggacaaggtttataggtctcatgcaatgcaagaaaggtgtccgcctcgctgatctcgtccgcgccgccataactccatcgacaagcctcgccgatccgctccaccgacgcaccgccaggactccatcccttgcctcgccgatctgcgacgctgatgagtcgcggactcctgcatcggcatgctgccaccgcctccgccttgaacgccaagaggctgcagcagaaggccatttctga

SEQ ID NO: 86342 - DNA, 474 bp, Oryza sativa
  Clone ID: PAT_MRT4530_85392C.1
ttttgttttttttttttttttggtttttttttttttttttttttttttttttttttttttttttttttttttttttcgaaaacccaaaggcaaccaagacaatggccctttttgaaaggaaaaaacgggcccctcccaattagggcccaaatggggccgggggaagcccagtttttataaaaaagggggaaggggtccccagataaggggaaaaagaggggggggtcccaaaaccccccaacagggtggccgggggtttaaaaaggctggcatcctttttattggggggttcccagggggaacacctaagggcaatcaaagggggggcaattaaagggctaactggaaggggtggccaagcgaagcagtggtggaattttaacaggggaacagggcttttttgacccttcccttgggggcaggagggggcctgacggttccaccccctggagaaagggggctgggcgaggaaaa

SEQ ID NO: 86343 - DNA, 729 bp, Oryza sativa
  Clone ID: PAT_MRT4530_85393C.1
atggctatacacaagtcgacttcaagaaaatgtgaagggctaagaatgagctttctaaataacaatagcaaggaaattttactcacaaaatacacaccagtgaggaaatacaatctaactgtgatccttggtacagtgcatgtgaatattacgttaaagagcaaacgctatcagcgaaacctaaatctacgggaaatagcacccttgatctgggagcttaggctagtaaaatgcatacaagattatgggttaaagggatggggatcagctagaaggtggatgggtggtggagtagggtttttgtacctcttggcgttcaaggcggaggcggtggcagcatgccgatgcaggagtccgcgactcatcagcgtcgcagatcggcgaggcaagggatggagtcctggcgcttcatggacaatgcaaacaacttggatctttgcatttctaatcgagcttatcaccccaaaggcagccatgtccggaatgggatcgagcaatgctttaccttgtccgcagcggtacagaaggcggcgcaagatagttggtggtggtggtgtcgaaggcgaaggcgactcgcgacgcggtcggcgggaggcgctcgctggagaggggcgcgggcgttggaggcttgtcgtgacgcggtcagcggggaggggagtcggaatcgacggcggcggcggcggcggttggcgtgagagggatggcgcgaacaacgcgcgcggcgcttga

SEQ ID NO: 86344 - DNA, 390 bp, Oryza sativa
  Clone ID: PAT_MRT4530_85394C.1
ttgtaacatgagacattacaccaaaaaactaggtgggtcatctttggcctgcacgctcgggacacaacttgccgaggtgaagggtgcactatcgggcattggctcacatgccacataactcaaccagaaggctgctgaagactctagcgccacttgtctagagctcgtaaccaacgtatccatctctgaggtggaggtcaaggaaaaaggcggctaggactggccggcgtttaaggagacggtctctaacacctggacactaaaaagtgatgcaccactcaagggccctttttccgtttgcttgctttgtaataacggaggctaccgtgtcgcacaatgatggccatccctaaagctttactgccggatctgaatataagagtggcatcc

SEQ ID NO: 86345 - DNA, 501 bp, Oryza sativa
  Clone ID: PAT_MRT4530_85395C.1
atggcgaccctgtgtcggctttcgaaatgccttgtcatgaaagccttaaggtcaccagacgtagctgttctccacgggttggatgatccggttggactctgggagtccgagaaaatgaaaaggctctgggagccgcttaatcaagtgaaatggctctgggagccgagaagtaatgatctgacccaggaggtcggctggctggtagtggtgggtggggaggaggtcgccgggcgaggcggggcagccggcggggcgagcgcgggagaggaggagggcgtcggcaacacaccaagctgcagagggggcgggctcgaacgtggcggcggcgcggccggccaaggaccatccgctgctggagatggtgaggctgccgctggtgccttcgtgaacgcactgatgagcgaggacgagctccgcgtgcttgtcgacgccgtgatgatgcactacgaccaggtgttccgcctcaagagcttcgccacctataacaagcaaagaatctga

SEQ ID NO: 86346 - DNA, 357 bp, Oryza sativa
  Clone ID: PAT_MRT4530_85396C.1
aagtgaaaggaaggggctgctcatataactacatatggatgggtgacaacgattgctgcatggaacattgttacatgacagatataatatctactaggagcatgttctatctgcaaactgaaggggggaatgaaccaccaacgggctgaactttctgaacttgtaaagaattgtcgatgatctacacccggacccactgcttgccgacagatgaacgctccggaccgatgaacggtacgatcctaaacgtaagtgagggtgcgggaccacggcaccctctggttagtgctcacccatagaattaagcaactgtactaccagaacagcaccgtcctgtgagaagattcagacacattt

SEQ ID NO: 86347 - DNA, 438 bp, Oryza sativa
  Clone ID: PAT_MRT4530_85397C.1
atggggagagggggctcctccccccttcccctctcccgcggcgacctcctcttccccctccggctcaccggcctccccttccacctctcgctcgccgacctccccttccccctccttcacgggaagttgccgccgccaccgccgccgcacgcgatggggaatggagcagccgccgttgaagctcatgatgggcgagggcgccgctaccgcatgcggtggggaagagcgtcactgccgctgctcatggtggaggagggctccgtgcccccgctcggggatggccagctgatggtgacagctcagtatggggagatcaccaatgatgaagttcacgaagttgttcccggagttcaaatccttgagggggttctactctccgttgaggagctcactaagaaccgggcctttgctaaccctttcctcaacaggttgcactaa

SEQ ID NO: 86348 - DNA, 1602 bp, Oryza sativa
  Clone ID: PAT_MRT4530_85398C.1
ctccatcggtcgattcagagagagatcgagatcagcgtgagagagagagagagaatgagcagtacgagtggatctgcatgggatcacagcaacaatggaggcggcgggtcgccggagttgagggaggcgctgctgctgggtgacggcgggtcgtcgccggagtcgagggagattaaggggattgctgtgaagaagcaggatgacctggaggagatccggagcgtgggggagctgatgcggctggcggcggaggagaaccggcggctgtggtacctggccggtccggccatcttcacgtcgctggcgcagtactcgctcggcgccgtcacgcaggtgttcgccggacacctcaccacgctcgagctcgacgccgtctccaccgagaacatggtcatcgccggcctcgccttcgggatcatgtacgggatggggagcgcgctggagacgctatgcgggcaagcttttggcgcgaagcagcatcacatgctgggcatctacttgcagcgctcatgggtgatcctcaccgccatgagcgtcatcctcctccccatctacctcttcgccaccccgatcctccgcttcttccaccaggacgacgagatcgccgtcctcgccagccgcttctccctctacatgatcccccagctcttcgcctacgccctcaacttccccatccagaagttcctccaggcccagagcaaggtcatggccatggcggccgtctccgcggcggtgctgctgttccacgtcgcgctcacgtggcttctcctcgtgccgctccggatgggcctcgtcggcctcgccgtcgcgctcaacgtgtcgtggtggctcgtcgtgctcggccagctcgcctacatcgtcatgggctactgccctggagcttggaacgggttcgactggctcgcgttcaccgacctcctcagcttcgcccgcctctccctcggctccgccatcatgatctgcctcgagttctggttctacatgttcctcatcgtcattgtcggtaacctccccaatgcccaggtcgccgtcgccgccgtctccatctgcacgaacctgtttgggtggcagatcatggtgttcttcgggttcaacgcggcgatcagcgtgagggtgtcgaacgagctgggcgcggggcggccgcgggcggcgaggctcgcgatcgcggtggtgctcgtgtcctcggtcgccatcggcgtcgccttcttcgcggcggtgctgctgctccgcgacgtgtacggcgcgccgttcacgggcagcccggaggtggtgcgcgcggtggcgagcctgggcgtggtgttcgccttctcgctcctcctcaacagcgtccagccggtgctctccggcgtggccgtcggcgccgggtggcagtggctggtggcgtacatcaacctgggctgctactactgcgtcggcatccccgtcggctacgccatcgcgttcccgctccgccgcggcgtgcaggggatgtggggcgggatgctcactggcgtcgggctgcagacggcgatcctggtggcgatcacggcgcgcaccaactggaacaaggaggccagcgaggcgcacgccaggatccagcactggggtggcacggccaagctc

SEQ ID NO: 86349 - DNA, 1435 bp, Oryza sativa
  Clone ID: PAT_MRT4530_85399C.1
atggacgccgacagacatgcaaagttggcatgggaggatgcaacacaggggttgtcgaccacgcgtcgctggtctgacgcggacggagccagaacgccgccaccacgaccttcccacgctccgacgtcctccatccaacattcggcgctcttctcgctgtgccgacagcgaccggcagtgtcgccatccaatcttgcgttgggcaacaggcaacaattggccgatgacgtgcgatcatcgcaggcacgtcctcttcatgtcacggtgatccttgccgccgtagtagccgtaagcagcaccaccctagccgtaagcgctcgctgcgccgccggtgatggcgagaacgttggcgatagtggtgcggagcgtcgggttggggatcaggtcgttggcgcgcgcctgggccccgcacgcgcacttggacttggcggcgatgtggtcctagatgcacctgtcgcagaagctgttgaagcagcacttgctcgccagcaccgcgtcggccatcacgttcctacaaatcttgcagtagagttccgacgggatgacgccgctagatcccccgggcggcgtcctccattcggcgctcgtctccagctgccacaggggatggaaaagataacagaaagaggagagtcgctgacaaagaagaaggaggcgttatacccggttttccggttgagggatgttattcacacatgtgcaagagataagggaggttatttggatgggctttccaacaaattggcccactatgaaacgggaatgaggcctacgacgcaccaaaacacacgatcctctcggataaatcacagccgtagaaaaatctgcaccggaagatcgccgccgttcatttctgctactgacgggtcgaagtcgaaccagtacgagaacacgtcgctggtgcagatcgagggggtgaacaccaaggaggaggtggcgtggtactgcgggaagaggatggcgtacgtgtacaaggccaagaccaagagcggcggcacgaactaccgctgcatctggggcaaggtcacccgcccccatggcaactccggcgtcgtccgcgccaagttcaagtccaacctgccccccgcttccatggggcgcaaggtcagagtcttcatgtacccgagcagcatctaaagactcttgaagtgtggaggatgttgcttatctctcttagattttacttctggctgaaaatgtcttgaaaggagccgtattcatgttgagtttgcaagttgaactgctgttccctgagaacccctggaagttctccgtagttttgatgtcgaatgtatgcaccacttctattatattatgtcatatggacttatgatggagtcagggttggaacttgtaagcttgatttgtcatgtttcacagcatctatcttcttcgtatcatttgctcgcattactgagtcaaaaaaggggcggcc

SEQ ID NO: 86350 - DNA, 763 bp, Oryza sativa
  Clone ID: PAT_MRT4530_8539C.1
acaataagaaaagaccatattgcccttcggctctctcggcttggcaaatatactaccaactctttatacagagctatgtcttttagaggtgtgaaagatgagatgttacaattaatctggaaatctccctgtcccatgtcccatgaaagttaaacatttcctttggttggcaattagagatagggttcaatcttgtgagcaattaaaaaaggagggctgggatggttcagagttttgtcttttatgcagcactattgaatctaccaatcacattctctttaattgtccaatggcaacttttgcttggtgcatttgtagagatgtcttgaactgggatactgtcccctgtaatattgaggagtttttattgttaataaagcacaattctaacaatgataggagagctttaacaactttgcttgctgctatctgttgggttctttggaccatgagaaacaatatgatattcatatctcaattggtctattcccccctaatgcttccttttcggattgcttcctatttgctgcagtggaaggctttagggcgtgctgaagaagctaacaggatgatggagttgggagagaagatgaaggtcgctgctgccaacactggaagggaggggctgggcaaggagatcggcatgacaaggccagccgccaccgtcaccgcgtacgatagggatgtccggcgacagggatggcgagaactgtcgagctcgtcgccaccgagaacggacgacaggacgagtgagttcgcatag

SEQ ID NO: 86351 - DNA, 517 bp, Oryza sativa
  Clone ID: PAT_MRT4530_853C.1
cgaatccaattcgttaaggacccttccgcttccattccttctaaccatttaattggaggacttgctccagaatctaaatttgtgagagatcccacatgcaaccattgctcaaccagacttttcatttggaaatgcaggccatctaagttcgttgctgaacagccaccagtgaaaaaaggaccttgctgtgtctgcaagagacaagtccttgagagatgaatgtgtgagaactaatggtgtagatttggataagtgtgctccacagattgctgcacataatgcttgccttaagaaggaaggattcatgtcctctaaaaggagtatatagagaatagccgctttgaagagacaaaagaaaaagaatattctatttagatattacttgtgtgctatgtatagtggcgttagatttgtgttatactttgcagagatatatggttgctatgcataagcatatcagcgtaataaattgttctattctatacggaaagcctcaatccaaaaaaaaaaaaaaaaa

SEQ ID NO: 86352 - DNA, 495 bp, Oryza sativa
  Clone ID: PAT_MRT4530_85400C.1
atgccggacaacggcacagtgcaagaggagtgcatgcgatggcgagcgatcgggccaaaccgagacaattcttcttatgtttccgcttgcaccattaaatatgattttactatgccatccgagactacaatcaaagcttctaatgttgcaccagagagtgaggccaaggtagaagatgttaaatataagtcaaagccgaggacggctttgtttcaaggaagggaggatgatgagcccatgactcatcaagatgttcatggagacatgactagcgataattcaattattgtagctggtaattctctaatatcatctggttttcaatttaaagctatttattttgatgagaaatatggcaaaaatatggagaaatttactagcgctggtctatcatcaaatatattttttagaggagttaattttcacaagaaaagggaagaaaagaagcaaagaaaatatatccaaattggttgcattcaggtcgacgtcacatga

SEQ ID NO: 86353 - DNA, 371 bp, Oryza sativa
  Clone ID: PAT_MRT4530_85401C.1
aggccatagtgtttgcatgttatactttgtagattaaacattcacaaaagattgtcccttttatcagttcttttagagagataaaagggggagaaaatcgtccctatcagagctgacaaaggcattacattatcctgtcgcatgcatcctaatttggctcatcttttctgcaaggggatgatgcttagctgggaatagcagtatgagtcactagcagaaacctgctggtgaaaggaatggaggcaaagataccatgtcttaggatatgctcaggtgtccatcactccatcttcttcttgctctagattaattcccccagggtggcaggtactgtggtcgccgtcacagctagcaagataaggctggctggc

SEQ ID NO: 86354 - DNA, 269 bp, Oryza sativa
  Clone ID: PAT_MRT4530_85402C.1
tacacacttgcattgcctatgtcatacattgaagtgatatttgcaggtattgttgacgcagggaagtgttatagaacctattgtggttgttcgaggaaatgagatggtattggttatagtgggactactgtgttctatatctacaagtatttctgatttttttattgcgtgtcttttaaaatgttgatgaattcaatttgctggttgaaatatctgatcagaacaattaggtggctgagatgatgcatctaactctggaattactgaat

SEQ ID NO: 86355 - DNA, 1971 bp, Oryza sativa
  unsure (1)..(1971): unsure at all n locations
  Clone ID: PAT_MRT4530_85403C.1
actgtaatcaaatgcaacaaaaggttatctgcttatatacatccccgtactttaacttcgacacctgctgctcggtcggccgattaactgcattgcactgggtgttcaatctaccaacatgcagaggagcagatggtctgtgtgcctttgctccattctgtctttctatttcactactcattaatccatcaattcacacatcagactaaagagtttcaggatatacaactaacactggataaaaaaacctccccagtgtttccatctgcagccagttataacggcacaacagcagctgcacttcttcccaacaaactgaatcatctccgtcctctgtacagatacaaaatggtcatccccaaacctgtaaatctcctcaattttacaccaggcatcatcacaaatggaggtttttcatctagtcatgtatgtcctcttctttatcatgtcaaactgttggtatgtttgtgctatgaaaatacggcaataccccggaagatgagatacagtaggaacgagacataagcaagcaccgctgcgaagagaactaagccggataataggcctttcacttctgaagagaagaaatccaacaagaggcagccattgattattatcggcacggatgcgactgcccaagttgcaatttgcgttctcggacctatcttaaacactcccattacttgctccttggataccaatgttatcaatgggatgagtgcaaatgggatctgaattgactgaagcacattaagccactcattcagaacatcgagtgcagaatcagatgtgttaaagtatacagcaacagttatagttggcacaatcgcaaagcttctcgtgatcaatgctctgatccattttttcaaccgccagttcaggaatccactcattataaactgtccagcgtaagttccagttatggtactacttgtgccagctgctaatagcccaattccccaaatataaaggatagggaaaaaatcttccccaaacttctcttgtagaaaatgtccagcattctcaaggccaatgttacctgcttctttggttccataaaacccttttgcaaacactgttgtgacaaataaatttatcatgaagggcactaccaacgccatggtggattcatggtatagtacctcagcgcttcacggacttgatattccttgtgtggatcgatctttcttgattgtacaagagcagaatgaaggaaaacattgtggggcgtgataacacatccaacaagcccaacagcttggcttatcactcttgaactcagcctaggaaccagaataccaataattatgtctttcccgttaggcttagttttaaaaaacatccaagcaaacgacaaggccattgttgctatcagaacggcaaatacagcttccaacttcctcaccccatagttttccagggaaagaaaaaaaaagcaatccaatgcggtgatgacaacgccaacccagatgggcaagaagccgttgctgaggatcttgatggcaatggcgctcccgatgacctcctggatgtcggcgctgaccatggagacctcggccatgagccagagcgcgcggcgcgcccagtccgggtactcgtcgcggcagagctcggcgaggtgcttccccgtggccaccccgaggcgcgcggcgagcagctgcacgagcagccccatggccgtggcccagaagagcagccagagcagcgtgtctccggcggtcgcgccggcctggaggtcgccctccaggttgcccgggtccagnaacgcgatgctcatcaggaacccgggccccgtgaagagccacagcttgcgccacgagaanggcggcgcgtgaccgccgtagtagaggtgctcgtcgtcggcgtcggggtcgtcggggtcgctggagatggagacgacgatcttctgcgccggctcgaacgcgcgctcgacgaggtcctcgtcggagtaggcggagacaggnacggggt

SEQ ID NO: 86356 - DNA, 291 bp, Oryza sativa
  Clone ID: PAT_MRT4530_85404C.1
aaaacacaaaacaaatacggttgacagtacagttttttttattttttcatgggatttattttcaccagcatacgttcgttttttatccgtccacatttcccatttaccatttgacccttcatgtccatacatgcataaacacgtagcatagcttacgatttgattaattaggggggggggtaatttaattaattaattaatcactggggagattggcccacaaattttcccggcggcaattattttcaggtaataaaaaccccgaggttccctttaaaaaaaacccgggcc

SEQ ID NO: 86357 - DNA, 7243 bp, Oryza sativa
  Clone ID: PAT_MRT4530_85405C.1
atggctcaacttgcaaagaacgcatgcatggcagtagttgagcagcaggtaaaagctcaagatgtgaggctatggtccatggaaagaaaggatgtgacccgtgtggcaaaaactgatcattctttcgagtcgaacatactacagagagcatttgttcttgacaggatgctcgttctttgcttctattgcactccggtgattgcgttttttgttgatgacgtgtaatgtattatgtggctagtgatgtgcacagctcggcagcaacagctttgtacgttgtgcttctgacctgtggcccctgctcagccccacggaaagtaagctggggccacatctcagaagcattgtgcataatcctgtgctgctagttgtgcttgtggccgtgcaaatcttctaagtccatcggcatcaggctctgtgactgtaaactcagccttgtctagtcctatacagtcattttgtttacttgttggtaagagttagtgctctactcggttgtcagcgcaggtcatatagcgagtgtaataggaggcgtgagtgtagtaactgtatgtaagctggagtgtgttagcaatataccgagtagattaatgtgttctgcaaaaagaaaatcataatatgcgagagcagatctatcggcacgctctcgccgacttctattaactaaagaaaaaaaaagaagttcgtcttccagcagtggagaaaaaggtagagatcctcagctctgatctcgccactttgaatcataaagtccagcagttggagagtagcatccagcgacagccgagtggggatgagtttgcaggaaaggtgactacagcggttttgcccaaggaagagctgaactaccatagcaccccgttcatcaaggggcaacgcgatcctgagtttgcatcccctgaccaacagaatcaggatgggttgaccttccagtctggaaatagtggtctgggaggaggtattgcaggtagcattcctcccatgtcctgtcctcagttcaatggcgacaatccccaactgtggaaatctaactgtgaagtgtattttgatatctatggtatacatcctcaaaattgggtcaagattgctaccctgaacttttgtgggaatgcagctttctggcttcagtctgttaggtctcaattggctggtgctacttggttcgaattgtgtgacagggtttgtggtaggtttgcccgagacaggaagcaggctctgatcaggcaatggatccatataacacaaacaagctctgtggctgactatgtggatagatttgattctattatgcatcaactgatggcatatggaggaagtaatgatcctgcttattttgtgacaaagttcgtggatggactcaaggaccacatcagggtagtagtgatggtgcagcgccctcaggatcttgattcagcctgtacagtggcactgttacaggaggaggcattggaaggagtacaatctgttagcaacaagaaaaatgagacaacaacttttctgaaaactaagccaagtcacaatctgacctcaccaactttccaagccaggagcattccttttacgaacattgaagataaaagaggagtagaattcagcaagggaagggatgataaggtttctgctctaaggtcttacaggagatcaaaaggcttatgttttgtgtgtggtgagaaatggggaagggaccacaaatgtgctactacggttcagcttcatgtggtggaggagttgataaatgctctgaagacagatcctgaagaaaattgcaattcagaaggggctcctgaatctgaagaggattccttaatggccatctcttttcaagctttgaatggtacagattcttctaagtctatcaggctccggggctgggtgcaaaatacagagctgttaatgttggtggactccggcagtactcattcttttatcgatgctaaacttggggcacaattgtgtggattgcagaagttgaatcaagctatcaaggttcaggtagctgatggcagccagttgttctgtgactctttccttcccaattgcagctggtggagtcaggggcacagctttactagtgatttcaggttgttgccattgggcagctatgatgctatattgggcatggattggctggagcagttcagtccaatgcaagtggattgggttcataagtggattgcattccaacaccatgggcaagcagttcaattgcaaggcattcatccccaactctctacatgttttcctatttctaatgaccaattgcaaggtatgtccaagaagggtgctgtcatgtgtttggtgcatctcaatgttgctgaaactcttactgcaaccacagtgcctgagatagttcagcccatattaaatgaattccaggaaattttttctgagccaactgaattacctcctaagaggaattgtgaccatcacattccactggtggaaggggctaagcctgtcaatctgagaccttatcgatacaaaccagccctcaaggatgagattgagcggcaagtagcagaaatgctcaggtcgggggtgatacaaccaagtagtagcccattttcatcacctgcactattggtcaaaaagaaagatggaacatggcgtctctgtattgattacaggcaactgaacgatgtaactgtcaagagtaagtatcctgtcccagtcatagacgaattgttggacgagctagcaggatccaaatggttctcaaaattagatctcagggctggataccaccaaattcgtatggcagaaggtgatgaatacaaaactgccttccaaacacactcaggacactatgagtacaaggtcatgtcctttggattaactggggcccctgccactttccttagtgctatgaatgaaaccctgtctccagtattgagaaaatttgccttagtattctttgatgacattttgatttatagtcccacactggaactgcacctccaacatgtcagaacagtgctccagctcttatctgcccaccagtggaaggtgaaattgagcaagtgctcctttgctcaacaagagatctcttacttgggccatgtaattggggccgctggagtggctactgatccagcaaaaatacaggatgtggtgagttggccacaacctaccacaatcaagaagctgagaggattcttgggtttggcaggatattacaggaagtttgtcagacattttggactgattagcaaacctctgacacagttgttaaagaaaggaatacccttcaagtggactcctgaaattgaatcagcttttcagcagctaaaacaggctctagtggcagcacctgttttagcactgccagatttctccaagcacttcactattgaaacagatgcaagtgatgtgggcataggggctgttctatctcaagaaaaacatcctatagcttatctcagcagagctttgggcccaaaaacaagaggactgtctacttatgaaaaagagtacatggctattatccttgcagttgaacattggagaccatacttgcaacaaggagagtttattatcctcactgatcaccacagcttaatgcaccttacagagcaaagattacatacaccttggcagcagaaagctttcaccaagctgctagggctgcaatacaagatctgctatagaaagggagtttctaatgctgctgctgatgctctatctagaagggaatcaccaatcagtgaagttgctgctatatctgaatgtattccatcgtggatgcaagaactaatgcaagggtatcagctggatggtcaatctaaacagctactggctgaactagctatcagtcccaacagccggaaggattatcaactgtgccagggaattctgaaatacaagggcaagatctgggtgggcaacaatacagccctgcaacacaaattagtgaatgagctgcatgcgacaccccttggtggccactcaggtttcccagtgacataccgcaaggtgaaaagtttgtttgcatggccaggcatgaagaagttgatcaaagaacaattacaatcgtgtcaagtctgcttgcaagccaagcctgaccgagctcggtatccaggtctccttcagcccttgccagttcccgcaggagcgtggcagacaatatcactggatttcatcgaagggttacctcgctcctctcattacaattgcattttagttgtggtcgataagttttccaaatacagccatttcattcctttatcccatccttttaatgctggaggggtggctcaagagttcatgaaaaatatttataagttacatgggttgcctcgtgccattatttctgatcgcgacaaaatctttaccagtcaattttgggatcaactcttctctaagtttggcactgatttgcacatgagctctgcttaccacccccaatctgacgggcaaactgaaagggtgaaccaatgcttggagatttatctcagatgctttgtacatgctgctccccacaagtggtcttcctggctgtatcttgcagaattctggtacaacacatctttccattccactttgaacaaaaccccttttgaagtactctatggctatacaccatcccattttggcattggtttggatgactgtcagattgctgacttacatgagtggcacactgagagaaaatttatgcagcagctcttgcaacaacacctgaaccgtgctcagcagcaaatgaagcaccaggcagataaaaagcgcagtttcagacagtttgcagtaggagactgggtgtatttgaagttacaaccttatgttcaaacgtttgtggcgcaacgtgcttgtcacaagttggctttccgctactatggcccattccaggtgatgagcagagttggtactgttgcttatcatatccagcttcctgctactagctccattcatccagtcttccatgtttcgcaattaaaagcagctgtggggttttctaaaaaggtgcaagatgagctaccaacttctttgggagctctccaagttccattccagttcctggacaaacgcctggtaaagaaaggtaatcgttccgttcttcagttactaacccattggtatcattcctcgccgtcagagtctacttgggaggacatggaggatctgttcgcgcggtttccgcgtgcactggcttggggacaagccagttttcaagactgggggattgtcagaccatcccaaccaagcggcataactacatcgggaaggtctgacaagtctgcagttgcactgggagttgacaaagaagatgacgagctacagcagggaggtgaatcaggaaaggacctggggcgcggcctgcgtgctaaacgacccagtgttcgtgttaatgggccgatgtgggccaattcagtggagatgagtcgcgcacacggtagtcccagatcgttcttccctgtggggaatccctttcgagttatgtttccagggggagctcacctatctcggaagctccaagagttgctcgcttcgtacgaggatgccctggcattgagcttgaggaagctcaagccggaggccgcctcggatgtcctcaccttgtcatggatgaggcttgcagtggattgcttgtcagagctgcacaccaacatagctaacctgataaccgatctcgagctgcctgtctcggactgggatgacaaatgggtggacatttatctcaacagcagcgtgaagctgctggatatttgcatcgcgctgagctcggagctctctcgtctggatcaagggcaattgctgttgcagtatgccctgcatgtgttgggctcggagagtggcgtgccgtcgcaggagcaactcaagagagctgagccatcacttagggagtggatggagctggtgggcgtaagatgtgcaaggctttgtaagctgcttggccgaccttgcaaggagcttgctggggaaccttttttctgatgaaagggcaagaaacttccgcgaaagggaaagtgctcatgagagcgttatatggaatcgagtctgtgacggtgttcgtatgcagtatttttgtagctgtactgtctggcagccccaagccactggtggagttgcatgtccctgaaaaatttggttggtctcaggccttcaatgaccttcatactgcagtcagtgaggaactcacaagacaattatccggtggaagtgttgcagctgtaaaagagctggaagaagttgaagcatgtgctagaaggctgcatgttttggctagcacttctcagcttgaagaagaagctgccaacctggcaaatgctgttagccatacagaggaagaggtcatgtcagacagcattgcgcaggaaggagaccatcactgtggtcttaaacttgctgatgacactaccagggagggtggaatagtaatttcagagagtattgcagaagggggaacacaagaagctgaaatgaagaaggatatcagctatgaaaaggaagtggcaatggttgagagaatcagttacaaagagcaccaagatagtaacgtaaagcaggcgaatggcagcagcgatgagagcgccctggttgttcctgagagaaccagtgtccaggaaagcaaggaggaactattaaactgcatatccagcatgtcgaaaagcgcggaggggctccggcatgggttggactccctatcgaagcgcgtaggcgacttctttcagatcgtgcttacgggacgtgatgcattgctctgcaacctcaggatctcagatgcagcaagcaaggtcgccgaggtcagctcttgatattttatgtaaggtttcttgccgtataatgtttgtgtggctaagtgtgcgcccagcttggtagcacagctttgaacattgtgcttctgacctgtggcccctgctcagccccacagaaactaagctggggccacatctcagaagcattgtgcatagtcctgtgctgctagttgtgcttgtgccgtgcaaatcttctaagtccatcggcatcaggctctgtgactgtaaactcagccttgtcaagtcctatacagtcattttgtttactttttggtaagagttagtgctctactcgttgtagcgcaggtcatatgcgagtgtatagaggcgtgagtgtagtaactgtatgtaagctggagtgtgttagcaatatacgagtagattaatgtgttctgcaaagagcagatcattgtgtgctattgctgaactagcaaatgatatggccaacttgtattcaaaaaaaaaaaaaaaaaaaaaaaaaaaaaaaaaaa

SEQ ID NO: 86358 - DNA, 278 bp, Oryza sativa
  Clone ID: PAT_MRT4530_85406C.1
ttcttgttctcgactccgatcactctcctcctggggttcgttacggactcctcgcttcgctagctcgcttgcttgctggctgagctgtggtacgctcgccatggcgtcctcgacgggggggttggaccacgggttcacgttcacgccgccgccgttcatcacgtcgttcaccgagctgctgtcggggggcggtggggacctgctcggcgcctgcggtgaggagcgctcgccgagggggtttctccaaaggcggaacgagggtgggcggctgagtgccc

SEQ ID NO: 86359 - DNA, 324 bp, Oryza sativa
  unsure (1)..(324): unsure at all n locations
  Clone ID: PAT_MRT4530_85407C.1
agtactgatatcgaacagaatcaccaccaagtgtcatacttgtggtgttttattttactttacgccgtattctagttctaaattacattactttgaggtgtgggtgtgggactnattngataatcctgggtagtattgttgttgaaaggtaggagtgaaggnaccgggcttttgtaccatggtgttattgagggttagggattggtnnattgagatgggataggtattagggaatatataaattgggaagggagggaatattgagtttttttttggaagggggttgatgaaggggttagtgtttgttttgattgggatatattg

SEQ ID NO: 86360 - DNA, 317 bp, Oryza sativa
  Clone ID: PAT_MRT4530_85408C.1
tagtgggctgtgcccaatggagaggctgtacaacctgggatggaaagattgggtgataaaggctgcgaggcacatgggacagcacgagaagggtgaaatgctggtgttgcatgggtgttggctgtgctgcagcacgtgacccgaggaggaaattgcctgtgagtgggacgctgaacactgggacatggtggtgaccaagaagccaatgatgttgagttggcgtgactgtctgagtgtataaatgctccaaaattcgctgatctagcgacatgcccatgttctatgtgcccttttcaggtgaaaaaaaaaaaaaaaaa

SEQ ID NO: 86361 - DNA, 283 bp, Oryza sativa
  Clone ID: PAT_MRT4530_85409C.1
gtgtaaaccctaacccggtcgacttggacgctgtgggacacaagatcagctctactcatcgggtgtctcggccttttgagcgcggagatggctgaggagaccccagttgagactccagctgccctggttcttggggagcccatggatctgctgacggatctggaggtggaggagctgaagtgaggccctcatcatgcgcttgggacgggtctccgtgaggctgccaaggccatggagaagcatgctggtgccattctaccgtttgatgaaggctgcgacccac

SEQ ID NO: 86362 - DNA, 508 bp, Oryza sativa
  unsure (1)..(508): unsure at all n locations
  Clone ID: PAT_MRT4530_8540C.1
tgacagagcacatcctccactgtggaacacccaggcttgactgtgcgttcctcgtgcctgtcnacgagttagccaaaggaatgtgcagatcaggcagctgcaaacaatcagaataccgtttcgtctttgagtaatccagtgatgggaccttgcctttgctgcgtgggatgcaatgtttgtggcgtgaccatcatagcaagggcatagagaaaatatgcttgagaaaccaccccagagaaatgagtgtgcagcttgatgaaaatgatggtaaagagtgttgctttggtgttacacggaaatgttatgatgatgcatgacgtgaggacactgcgtggtggcatgcagatgtggcacaaaacggcatatcaggatatagaatattcacgctgcttttcagatgaatttggtcttccatctggtaacactggtcccaagatcactttgaaaataagaatataagaatggcgtgnctgtgacgtttttctnttcttgaaaaaaaaaaaaaaaa

SEQ ID NO: 86363 - DNA, 243 bp, Oryza sativa
  Clone ID: PAT_MRT4530_85410C.1
tcactcctcctccttgttcctcggtgctaatcgccatagtttaatcctccaccgccgcgtgctgcatgcctgcctcacacgtgcctgatgactgacctgatgcgactgactgcgctagcgcagcgctcgcgccggatgaaactgcgcggcctgggcgacgccaacatgagccgtccgcagaagcagcatgtcacgtccaaaaaaaaaaaattccccccctcatagctaacccctacaatgatt

SEQ ID NO: 86364 - DNA, 678 bp, Oryza sativa
  Clone ID: PAT_MRT4530_85411C.1
atctactccttcggtgtacacatgacttggtgggtacgatggatgcagggagcaccggaagggtgctatggcgaacgacaagctatttgcgatcaacgatccggtcttactatcacgccaaacatacctattgtaactaagcaagatgggtgacgcaactgacgacaactgagaacgagcggtaggaacagtacatgctgctcagcccacccacatactacgcgtgccttcaacaactgacaacggacaagccggcaagcacacttgagcatatgaagaatggcatgcacctcgtcaaatgtttacatgaggtatgtgatcaactacttttcttacgaggtccatgaccttcctaacttgatcatgctaaactacttgacgctaaacattattccatgctctgctctgcacgacaatgagaggtcgctacccagtggcgctatacgtgccatgcgcctaggcataaccacttaccggaactctgaccattactgaaaaaagctggcagaatactatcacttattacgccaggctacaacagatttgattgctatgaatcaacctgactttgttattaccatactcttccaagagattgacgcaaacaaggacactgttcgacaccatgagtctgaaatgcgattaagcatgcctgctctgtcacaagttgtccacggc

SEQ ID NO: 86365 - DNA, 267 bp, Oryza sativa
  Clone ID: PAT_MRT4530_85412C.1
atggcgcgtgaggggatcaggtctgaccggaggcgagcggagaaggtcgaagagggataccccaaggatgaaagccacggctcgggagtacacgtgtttcgccggacaaggaccccgtcaggaggtcacctaggcgaatatggtaaggcgaaagccttggcccgagggcatgggtttcgccaaggcaccaaaccccacctgaggaagcccagcgggccgttgcgtccccgaaaaggattcgccagatcaatgggccaagccatttag

SEQ ID NO: 86366 - DNA, 461 bp, Oryza sativa
  Clone ID: PAT_MRT4530_85413C.1
gcgcggggtagcttctcatcatcatcttcgtgctcgctgcgacggtaactatggcggaccaccacagagaccaaatggagtgcgggctgggggagcgttgtcaggcaggaatgggatacacgatgtactcgatgccacgctgccgtgcggtggtgaagcgccagtgcgtgggccactgcgcacatcggcggggccgtggacgatcaacttgctgatgactgctgtggaagcttagccgggtcaactacagctggtgcaggcgttgcaggctaaaacacatggttctaggaatgtacagggaggacggagccaccgatgttgtgtaccggatgggcgaagtgtttccctattgtcggagaggggatttgtagcgcttgtcggatagtcttccggtgttcgtgaacgtggatatccccaatgagacaggtggagtatgctactggctatgttattctaggacc

SEQ ID NO: 86367 - DNA, 2019 bp, Oryza sativa
  Clone ID: PAT_MRT4530_85414C.1
atggccgagccagcaaaggcgcacgacctctccccgagtatgagcggtgacgacagggagccaaacccacgccgtcgagctcgtactccaccgccccctccacgccaaagtcctaggcgggagaaggcgctcgagagggccgaaggatccgcgacttcgacacccacaggaggtggagaagggcggcgagatggggagcgtcgcctcctcgtctacggcgacggcagcacgccccagggcgcgctccaagctgcgggcgcgctcctacatcacccgcccgtcgcccatgacccggagtctccagcccaaccgcctagatgctggtgggcggtcctccgccaccaaggcctctggtgctgctaccaccggctccgcatcgtcaagacggagggcgcggcgagcggcagccgctgttcgccattcggccgccactccttcgtcaacgcctccgacccgggaagatctgcgtggggaaccggatgctcgcatcagtatcgagcgccggcgttccggcccaccatcgccgaaaaatatgacgggagcgtcaaccccgccgagtttctccaggtctacacgaccgggatcgaggccgccgggggtgacgacaggcggttctgtcaagtccgcaacaccataccatgcatccctgcgcacgcggtgatttacgcgttcagggggggtgtgcggcacaaccgcatgcttgaaaagatcgcctccaaggagccccagactaccgcggagctttttcagctcgcggaccgagtggctagtaaggaggaggcatggacctggaacccctccggttccggtgtggcagcttcggccgcccccggatccgccgctcagatagggcggcgtgacaggaggaggaagaagaggtcagcccataccgacgacgagggtcatgtcctcgccgtcgagggcgcttcgcgggccacccgaaaggggaggcctgcgggaggcaaaaagaacgaggccggcgctcccaacagggagcgcccaaccggcaagtggtgcaccgtccacaacacttcccttcacgacctcgcggaccgccgtgcagtcaaaagtttggctgagcggacgaggaagtgggaggaggagaggaggcaggagcgccgagagggcaaatccccggcggttccttccggtaatcggcgaagtgaggccaagcagaaggcccccgccgaggacatcgatgacggcgatgatgacctaggtttccaagagcttggggccaccattgccaccgtcgatgggggagcgtgtgctcacgtttctcgccggagcttcaaggccatgaagcgagagcttctagccgcgacccctactcatgaggcgacgtgtcgggcgcggtggtcggaggttgccctcaccttcgaccagaccgaccacccaccgtgcgttgcccggggagggcagattgcgatggtggtttctcccaccgtttgcaacgtaaagttggggcgtgtcctcattgatgggggagcggccctcaacatcctttcccctgcggcctttgacgccatcaaggccccggggatggtgctccggccgtcccagccaattatcggtgtgacgccggggcacacgtggccgttaggtcacatcgacctaccggtcaccttcggtggatccgccaacttccgcacggagcgggtgaacttcgatgtggcggacctcagtctgccctacaacgcggtcctggggaggcccgcgttggtgaagttcatggcggcggtccactacgcctacctacagatgaagatgcctggccccggtggccccatctctgtccatggcgacctcaaagtcgcgctcgcttgtctggagcagcgcgcggaccacctcgccgctgcatccaagcccgagggtggcgacgagaggcttggcgcttccgcccccgccaccccgaggcaacggatgatcacaggcgacgaggtcccggtcaaggaggttgccctgggcgacggcccgtccaagaccacacggatcggtggtcttctggacggcaaatag

SEQ ID NO: 86368 - DNA, 333 bp, Oryza sativa
  Clone ID: PAT_MRT4530_85415C.1
atggccccgtgcttcatcgcccccaaagattgcgctagacagatcaagcgaggtcgacggtgcagcgtcgacgtcctggagagaagagaaggcagcggcggtggaagaggaggcggcgaaggaaaaggcggcagcccgcggggaatcgtcgtgcgccgccatccctctccccgtggcggtcctcggctccgcgacgccgccaccagatcgggcgagctcggcaacgacatcgatggcggcttccggccccggagacggtggcttcctgcccgccaccgtcgccgcttggcctcctcgacccttccgccgttcgtcgcccgccttgttgagtag

SEQ ID NO: 86369 - DNA, 162 bp, Oryza sativa
  Clone ID: PAT_MRT4530_85416C.1
atggtggatgagacaacaacgaacagagcagtcgtgcgggaagcactccccaaaaccctaatcacccgcctacccgcacacgcgtcgtgggatcgtgggatcgtgcacgcgctattacggaggcagtcgtgggaacgtgggatcgtggttgcaaaagaatag

SEQ ID NO: 86370 - DNA, 2388 bp, Oryza sativa
  unsure (1)..(2388): unsure at all n locations
  Clone ID: PAT_MRT4530_85417C.1
atggccgagccagcaaaggcgcacgacctctccccgagtatgagcggtgacgacggggagccaaacccacgccgtcgagctcgtactccaccgccccctccacgccaaagtcctatgcgggagaaggcgctcgagagggccgaaggatccgcgacttcgacacccacaggaggtggagaagggcggcgagatggggagcgtcncctcctcgtctacggcgatggcagcacgccccagggcgcgctccaagctgcgggcgcgctcctacgtcacccgcccgtcgcccatgacccggagtctccagcccaacgttggctggacgatgtggccaaattgatcatgactgcacggcagcgcctagatgctggtgggcggtcctccgccaccaaggcctctggtgctgctaccaccggctccgcgtcgtcaagacggagggcgcggcgagcggcagccgctgttcgccattcggccgccactccttcgtcaacgcctccgacccggaaagatctgcgtggggaaccggatgcccgcatcagtatcgagcgccggcgtaatggccgacgtgctccccacgcaacggagggcgcctcctcgtccggagtgtcacctcaccacggacgcggggatcagccctccgtgcccccggttgttggtgtcggctgtagagcctttgtggcgagccttcggaatgtccgttggcccccaaggttccggcccaccatcgccgaaaaatatgacgggagcgtcaaccccgccgagtttctccaggtctacacgaccgggatcgaggccgccgggggtgacgacacggtcatggcgaatttctttcccatggccctgaaaggacaggcgcggggttggctaatgaacttgccacccgcgtctgtccactcttgggaggatttgtgccaacagttcaccatgaacttccaaggcacatatccgcgcccaggtgaggaagcggacttgcacgcagtacagcgaagggatgatgagtcacttcgctcgtacattcagcggttctgtcaagtccgcaacaccataccatgcatccctgcacacgcggtgatttacgcgttcagggggggtgtgcggcacaaccgcatgctcgaaaagatcgcctccaaagagccccagactaccgcggagctttttcagctcgcggaccgagtggctcgtaaggaggaggcatggacctggaacccctccggttccggtgtggcagcttcggccgcccccggatccgccgctcagatagggcggcgtgacaggaggaggaagaagaggtcagcccataccgacgacgacggtcatgtcctcgccgtcgagggcgcttcgcgggccacccgaaaggggaggcctgcgggaggcaaaaagaacgaggccggcgctcccaacagggagcgcccaaccggcaagtggtgcaccgtccacaacacttcccttcacgacctcgcggactgccgtgcagtcaaaagtttggctgagcggacgaggaagtgggaggagaagaggaggcaggagcgccgagagggcaaatccccggcggttccttccggtaatcggcgaagtgaggccaagcagaaggcccccgccgaggacatcgatgacggcgatgatgacctaggtttccaagagcctggggccaccattgcaaccgtcgatgggggagcgtgtgctcacgtttctcgccggagcttcaaggccatgaagcgagagcttctggccgcggcccctactcatgaggcgacgtgtcgggcgcgggtggtcgaggttgccctcaccttcgaccagaccgaccacccaccgtgcgttgcccggggagggcagattgcgatggtggtttctcccaccgtttgcaacgtgaagttggggcgtgtcctcattgatgggggagcggccctcaacatcctttcccctgcggcctttgacgccatcaaggccccggggatggtgctccggccgtcccagccaattatcggtgtgacgccggggcacacgtggccgttaggtcacattgacctaccggtcaccttcggtggatccgccaacttccgcacggagcgggtgaacttcgatgtggcggacctcagtctgccctacaacgcggtcctggggaagcccgcgttgatgaagatgccgggccccggtggccccatctctgtccatggcgacctcaaagtcgcgctcgcttgtctggagcagcgcgcggaccacctcgccgctgcgtccaagcccgagggtggcgacgagaggcttggcgcctccgcccccgccaccccgaggcagcggatgatcacaggcgacgaggtcccggtcaaggaggttgccctgggcgacggcccgtccaagaccacacggatcggtggtcttctggacggcaaatag

SEQ ID NO: 86371 - DNA, 2658 bp, Oryza sativa
  Clone ID: PAT_MRT4530_85418C.1
atgggtaagcggaagcagcgcggcggcgggggagcagccacggaaggcgacgcggccgccggcggaggccacagcccctccaccgtgttcgtctccaacctgccgtacaccttcaagtccgccgatctcgaggcggtgttcagcgaggtcgggccggtgaggcgctgcttcatggtcgcgccgaaagggtcggagacgagccgaggctttggattcgtacagtttgcaactgttaaagatgctgagcgatctattcagcaaaaggatggattttctgttgctggtagaaaaattagagttaagctagcaacacatcgtgctccactgaaggagcgtttacagaagaaggaaaacgccatgcaagccaaggatgccgatgtaacaaatgaagccaaggatgccgattcaacaaatgaagcccaggatgctgatgcaacaaatgaagaagatgatacttctactgcaaaacataaggagacctctcataaaaaagatgcagggcttgaacgagatggatgcacaacagatgcagcagctgtactttttgctagtgtgacatcagcctgggattcagttgttcacttgcaccgtaaggaggtcaagggagcagttgtttgggctcgtcaacttggtggggagggctcgaagatcagaaaatggagagtgatagtccggaatctgccattcaagattacagtaaaggagatcatggatatgttcagtttagcaggatttgtatgggatgtgtccattccacagaagtctgataacgggacatcaaaaggctttgcttttgtatctttcacacgtaagcaggatgcagaaaatgtatggtcagtaccctgttcagctataaaaaatgttaacggaaaagtagttgcaaagagaactgtggctgttgattgggctgttccaaagaaagtatacactgttgctgctgcaaaatccagcgctaaggatgatgagctggtaaatgtgtctgacaaaggcagtgatgaggagtctgaagataatcttgttggagaagatgatagctatgaacttgatcaggaagcttccaatcgtcctgctgatgatgattttgaaactgaaattgatatttcaagaaaggttcttgaaaatttgatcaagtcatctgagaaggctgaaccatctggcaatgagggttctgatgttgatacagatacagaaacagaacaagatacatcagaaaagaaacagaagcagacacatttacctgcatctgtacctgcagctgataagttagaaaattctaaacgtgtggcagaggaggaaaacacccttcctgcctcaaaattcaagaaacaagacgctgggctggataggacaatattcatatgcaaccttccttttgatctaagtaacgaggaggtaacagagcgcttctcagcatttgggaaggtcgaatctttcttcccagttcttcacaagctcacaaagagacctagaggaactggttttctgaagttctctacagcagaggcagctgatgcagccgtttctgctgccaatgctgctcctggattggggatctttataaagagcagggctcttaagataatgaaagcgctggacaaggagtcagctcacaaaaaggaacttgagaagtcaaagaatgaggtggaggatcgacgcaacctatacttgacaaaggaaggtgaaatacttgctgggacaccagctgcagaaggtgtgtccgatgctgacatgaataaacgtagttggctagctagaagaaaagcagaaatgctccagtctccaaaatttcatgtgtccagaacaaggcttatcatctacaacctgccaaagactatgaccattaacgacgtaaagaagctttgtagagaagcagttatttctcgtgctcacaagcaaaatcccatcattcgaaaggtaaatatcctgaaaaatgaaaagaagagcaacagtactgcacagaaacattcccgtggtgtagccttcgttgattttcaagaacatgagcacgctcttgtggctctaagagtcctaaacaataaccctgaaacttttggtgcagaacgtcgtccaattgtggaatttgcacttgagaatattgagaaagtgagactccagaaaatttggaaggagcgtcgtgataagttgcaagaaggtgcacaagataaggcaagacctctaggagatcattctgcaactgatggccctcaggcgaataacacaagggctttcaacaaagggcacaagagaaaaacacatgatagatcatctaagttatcgaactctggtaaagggtctgcagaggatctttcggcagctggagatggtggcagtggcattatggagagtatggttgaagataaaagaaaggctcaaaggcctgcaaaaagagcacggaagccaaacaagacgtcggatggagatagacaagatgcaacaccaccaactgctgatgggaatcaaactctgtcaagtaaacataatcaggcaggcaccccgacgaagaggaagaacagaaaagatagtcattcggagcaaaggagaggaaaggctccaaagacaaagaaagagccggctggggaaggaggtgtggataaatcgcttgtggagcaatatcgttccaagtttttgcagcatggtctgaacaaaaccaaaggataa

SEQ ID NO: 86372 - DNA, 234 bp, Oryza sativa
  Clone ID: PAT_MRT4530_85419C.1
atggcttctaagttcctccggattgcttctgaatacggctttggctatgacttgttactggggcctgtggcactcggtgacgcgccgccacggggaagggtagatgccattcctagaaatcagattagctcccaagaatactgcaaacccttcaatggacttgtggaacgaacagtcgggaggggtcctgttagggtgaacatgtgtcggtttatcctaagctcagcaggctag

SEQ ID NO: 86373 - DNA, 441 bp, Oryza sativa
  Clone ID: PAT_MRT4530_8541C.1
atgagcagcagcaacatcttcgaggacgacgagatcgaggcggcgttcgcggccggggcgatgccgccggagtggcggcggaggctggtggcgtcggggcagctggacgagcgcggcggcgacaagatcgcggcggacatcgccgccgccgggacgacgtcccgcccgagctcggggttcgcctggtccaagggtgccatggcgttcgcggcgttcgacgtcgtcgtgggcgcgctgctcctgtgcctgggcgtggctggcatcctctccgccggcgaacaccaccacggcgacggcaagaacgcggtggttgggggcctgctcgtgctagcgatgactgcagtggtagccagggtttgtgagtacgagcggaggcggggaaagatgcgcaggttgcaggcgcgaattgtcctcgagcgctctctgcttcctcccgtttaa

SEQ ID NO: 86374 - DNA, 3188 bp, Oryza sativa
  Clone ID: PAT_MRT4530_85420C.1
atgggtaagcggaagcagcgcggcggcggcggcggtggcgggggagcagccacggaaggcggcgcggccaccggcggcggcgccggaggccacagcccctccaccgtgttcgtctccaacctgccgtacaccttcaagtcctccgatctcgaggcggtgttcagcgaggtcgggccggtgaggcgatgcttcatggtcgcgccgaaagggtcagagacgagcagaggctttgggttcgtgcaatttgcaactgttcaagatgctgagcgatctattcagcaaaaggatggattctctgttgctggtagaaaaattagagttaagctagcaacgcatcgtgctccactgaaggaacgtttacagaagaaggagaatgccgtgcaagccaaggatgccgatgcaacaaatgaagccaaggatgctgatgcaacaaatgaagccaaggatgccaatgcaacaaatgaagcatatgctacttctactgcaaaacacaaggagacatctcataaaacagatacagaaccactacagttgttgaaaaaggaaactacactatcaaaggaagtcagcatttccaatactgctaaggtgaaaagctcagaaaagcaaagggttgcaaaaactgtgatattcggtggtcttcgagactttgctatggcgagtgaagtatttcgtctagctggagagattggcacagttgtatctgttagctatccacttccaaaagaggaaatggagctccatgggcttgaacgagatggatgcacaacagatgcagcagctgtactttttgccagtgtcaaatcagcttgggattcggttgttcacttgcatcgtaaggaggtcaagggagcagttgtttgggctcgtcagcttggtggagagctatttccccagttacctgcagttgtttctaacttgcttgctatacagggctcaaagatcaggaaatggagagtgatagtccggaatctaccatttaagattacagtaaaggagatcatggatatattcagtttagcaggatttatatgggatgtgtccattccacagaagtctgatgacggggcatcaaaaggctttgcttttgtgtctttcacacgtaaacaagatgcagaaaatgctataaaaaatgttaatggaaaagtagttgcaaagagaactgtagctgttgattgggctgttccaaagaaagtatacactgttgctgcaaaatccagcactaaggatgatgagctggcaaatgtatcagacagaggcagtgacgaggagtctgaagataatcttgttggagaagatgatagctatgaacttgagcaggagacttccaattgtcctgctgatgatttcaaaactgaaatggatatttcaagaaaggttcttgaaaatttgatcaagtcatctgagagggctgaaccatctggcaatgagggttctgatattgatacagacacagaaacagaacaagatacatcagaaaagaaacagaagcagacccatttacctacatctgtacctgcagctgacaagttagaaaattctaaacgtgtggcacaggaggaaaacacccttcctgccacaaaattcaagaaacaagacgctgggctggataggacattattcataagcaaccttccttttgatctaagtaatgaggaggtaacagagcgcttctcagcatttgggaaggttgaatctttcttcccagttcttcacaaactcacaaagagacctagaggaactggttttctgaagttctctacaccagaggcagctgatgcagcagtttctgctgccaatgctgctcctggattgggaatttttataaagagcagggctcttaagataatgaaagcactggacaaggagtcagctcacaaaaaggaacttgagaaggcaaagaatgaggtggaggatcgacgtaacctatacttgactaaggaaggtgaaatacttgctgggacgccagctgcagaaggcgtatccgatgctgacatgaataaacgtagttggttagctagaagaaaagcggaaatgctccagtctccaaaatttcatgtgtccaaaacaaggcttatcatctacaacctgccaaagactatgaccattaatgatgtaaagaagctttgtagagaagcagttatttctcgtgctcacaagcaaaatcccgtcatccgaaaggtaaatattctgaaaaatgaaaagaagagcagcagtactgcacagaaacattcccgtggtgtagccttcgtagattttcaagaacatgagcatgctcttgtggctctaagagtcctaaacaataaccctgaaacttttggtgcagaacgtcgtccaattgtggagtttgcacttgagaacgttgagaaagtgagactccagaaaatttggaaggaccgccgtgataagttgcgagaagctgcgcaagataaggcgaggcctctgggagatcagtctgcaactgatggccctgatgcaaataacagaagggctttcaacaaagggaacaagagaaaatcacacgatagatcatctaagttaccctacgctggtgaagggcctgcagaggatctttcggcagctggagatggtggcactgtggaaagtatggttgaagataaaagaaaggatcaaaggcctgcaaaaagagcacgaaagtcaaacaagggaaccaccgcgttggatggagatagacaagatgcaacaccaaccgctgataggaatcgaactctgtcgagtaaacataatccggcagatgccctggcaaagaggaaaaacagaaatgatagtcattcggagcaaaagagaggaagggctcaaagaaagaccaagaaagagctggctggggaaggaagcgtggataaatcgctggtggagcaatatcgttccaaatttttgcaacatggtctgaacaaaaccaaaggataattgagtgtgatcatcgtggggagaacaacatggtgacccggaccagcttgtcaaaaggctaaaatgtttccagagaactttccacaaactttgcagccccaccattggtctgccaaaattttgcttgctacattttggttgttttgtcccactcttgtcgatcttgacccttgatgacagtggctgatggtcgttggagccatctattatgcccatttgaatgggaatgcttatgtctacagaaaaaaaaaaaaaaaaaa

SEQ ID NO: 86375 - DNA, 1752 bp, Oryza sativa
  unsure (1)..(1752): unsure at all n locations
  Clone ID: PAT_MRT4530_85421C.1
actagtggatccccgggctgcaggcccgcttccgttcctccgccccacgccaccgccgccgacaagctcgacccacccgcgggcggccgccggagatggcgacggaggggctggtgcccatcacgcgggcatacctcgcgcgctactacgacaagtacccgctgcccccgctccccgacgccgccacggccctcgccgaccgcctccgcgccatctccgcggccctcgccctcgccgccgccgcccccatcacgccagatgaggagctcttggaaaaagaagctaatgggatacctgctcacaaaattgatgaaaacttgtggaaaaatagagaacaaatggaagaaattttgctcttgcttaacaaatctcgtcgtcctgttgcacttcaacagaggtccacggcagaggacactgagacatttattatacttgatgatgttgaaactaaattgaaggacatgctgaagaagttagaacagtttcaaataaaaaatgctgataatgttttcaatacagttatgacctacatgccacaagatttccgtggtacactaatcaggcaacagcgagaacgctctgagagaaataagcaagctgaggtagatgctttagttaatgctggtggaagcattcgtgatcgatatgcattgctgtggaaacagcaaatggacaggcgagtgcaattggcacaacttggttctgcaacaggtgtatataagacgcttgttaggtacttggtcggtgtccctcaggttctgttggacttcattcggcaaattaacgatgataatggacctatggaagagcaaagagaacgttatgggccagcactttacactcttacgaaactggtgcttgcaattcgattgtatctacacgtgtcattagcacgatatgggcagaggaaaatagaaaaggatgacattgctgtgttgcagcaggctgtggctatctacaccgaggaatttgagaagttcactgaattcataggcgaagtttttgtgaatgccccattcttcatatctgctgaggatgcaggtgctgaatcaaggaacagcgacgactacaaagaaaccattattccagcaggaaagacacatgaggttattcttagtgttgaggctgtcaactcatacattgcatgggacttctccttgcaacaaggggccctcaacatggtcttggatattggttttcatgtggagtacataagcccatcaggccagaaaactttaatacttccctaccgacgatatgaagctgaccaaggtaacttctgcactgtctctgccggatcatacaagcttgtttgggacaactcatattcgtcattcttcaaaaagagacttcggtacttggtggacgccgtgccttacattgattccccggcagagcccgccgcggaaccctgatggagcctgcttctctacgaagcgacgagggccattccctgcggcgggtttccgcgcagagtagtaccacaggccctctcgtcacacagagtgtcctaacacagttcntttttagcaagccgcatgcgacagcggcgctgtaatcctcagggttcagacgatacatacacacacaacagctgctcactggtgtccagtgtgagctgtaagatatatatatatatatatatatatatgcacccttgtgtgctcgtgtttacggaaactcgctaatgataagaaactgactgcttccattcaaattgacagtgatagactttgaaaaaaaaaaaaaaaa

SEQ ID NO: 86376 - DNA, 456 bp, Oryza sativa
  Clone ID: PAT_MRT4530_85422C.1
atggagatggctgggttcaacaagattggtccttggggtggaaatggaggaatcgaatatgtcatggagacagttcctcaccgtctagaaagcataacaatttatagttctgttgttgttgattccctcgaattttcctatagtgaagttaatggggacaatcacacttcaggtccttggggaagtgctagtagtgaaagtagccaaatgattcggcttggctctcacgactttctaagggaagtttctggaacagtaggtccgtttaattcaatgccgaatgttattacatcgcttaagttcttcacaaatggtggtacctatggaccttttggacaaggaggagggactccgtttaaagttgatccgttggagtatagtagcaacatcgttggtttctttggccgtgcagagcagtgcctcgaaacatttgggatctacattcgcaaattctaa

SEQ ID NO: 86377 - DNA, 564 bp, Oryza sativa
  unsure (1)..(564): unsure at all n locations
  Clone ID: PAT_MRT4530_85423C.1
gcaaggtacaaagatactcctggtatttggacaaaggagcaagtggaagcgtggaagccaatcgtagacggcgttcatgccaaaggaggaatatttttctgtcagatttggcaccttttcagcctaatgggcaggctccaatttcgagcaccaataagtcactaaaacctgcaggttgctgctagaaatgcaattgaagcaggatttgatggtgttgaaatccatggagctcatggttatttgatcgatcagtttctaaaagaccaagtcaatgatcgttctgacaaatatggtgggagcttagagaatcgctgccggtttgcgctagaagtggtccaagccgtaactgatgaaattggagctgacaaggttgggataaggctgtcaccctttgccagctattcagaggcagcagactcaaacccagaagctctaggcctatacatggcaaatgcactaaacaagtttggtatcctctattgtcacatggtggagccacggatggtaaagcttggtgaaaagtttgaaaccccncatagtcttcgtccaatcagggatgctttc

SEQ ID NO: 86378 - DNA, 859 bp, Oryza sativa
  Clone ID: PAT_MRT4530_85424C.1
ggccggaattgagcagggggggacgtgccgcgacggatcgaggcgatgcggcaggcggtcggcttgtgcaaggcccatcaacttcggccggccgcgctgctgtccccgcggccgttgctccggcgagcgtccccctgcctccctgcagcgggagcgggtggggagctcaggagggccagcgccgcgtcgcggttggtggtcaggaggagatgccaagaagaggagcagcagcaacagcaggaggaggaagagcggagcaatggcggtggtggtgatggggagcaagagcagagaacatttctcagcttggaggaggccgggctggtggagatgtccggcctcagcacacacgagcgattcctctgccgcctcaccatatcgtcgttgaatctcttgagagtgatttcggagcaagaaggcgtccccattgaggagctcaacgcaggccttgtttgcgactggttcgtcaaggacaagctcaagagggagcagaacgtgggctcagctgtcctgcagtgggacgaccctggtttctagctccatcatccgtttatggatgatggtgatttggtggtcttgccggcgtctccaccgagaaacagggttcatcaagtcaacatttttctcggttgatagagctcactgatcactttctttgaattaaagagggttcctttgtcttgcgacactcgttgtgcctaattgggctttttacatgtcagtacatgacgacctgtatcacttcctttgtatgccagagaccaaagccagaaacacagcttaattacgaagaatcagtttcaagaatatatggatcagaaaaaactgtcggattgttttcaaaaaaaaaaaaaaaaaa

SEQ ID NO: 86379 - DNA, 679 bp, Oryza sativa
  Clone ID: PAT_MRT4530_85426C.1
tagtggatcccccgggctgcaggagagagagagaggataagggagagagatgaagagagggagatggagggataggaggaggaagaagaagaggggtgagaatgacatgtggggcccacgtgggctccaccatttttattaatttattgtgtgaaactgacatgtgggtcccacgaggttttattattttttcgtgatcgaattgcaacgtaagcgccacatcagcgccacgtcaaatgaagaccgagttaaattaaccacgtaggcgccacgtcatccaaaaccgccgagggacctcatctgcaccggttttgatagttgagggacccgttgtgtatggttttctgattgagggacgaaaatcggattcgttgacaagttaagggaccttagatgaacttattgcatgattagttagtctgaggcccatgtgaatagacacaagcaaggactgtacatagtgtcggcccaagtaaacagaactgaagccttcagaaataagtgggctattgtaggctatgtaactggaccttctggaatcccagcaaattcagatagtgctgacctgtatttttttattttattttggattcagtcgtgttagttgacatgtcgcggtcaccatggataaagagagcatgtgtactctttgatttctactttaaaaacagtttcaatt

SEQ ID NO: 86380 - DNA, 291 bp, Oryza sativa
  Clone ID: PAT_MRT4530_85427C.1
atgtcgacgacgaaactgacgaacaccctggggtcgccgtcggagcagaggaaggagggaggccagaaatggaggagcggcgcggtgccggcggcggtgcccggatgcagaggatcgagtggattgggaaggtcgcgggtcgccggtggcctccggcgaggggagcccggcctcgccggcgccgacgatgacttcccgcggcctcctcgccgcgccttggcggagaagggagaggaggggacacaaactttgggctcaatttggcgcttgcggcgcgatgggtatttctag

SEQ ID NO: 86381 - DNA, 282 bp, Oryza sativa
  Clone ID: PAT_MRT4530_85428C.1
atggcgatgaaagatccgagcctgtggcacaaggtggccgccatatccggggttgctgcccttggacttggcacctatggcgcgcacatgttccgccccaagaaccccgcgtacaaggagtgcttgtcatccttgcagtttggagggcttcttactgctgggattgttctcttctctggaacgtgctacactgtggcttatcttgaagacaggaagtattcttccacggcaccgttgggtggctttgcgttcatcgctgcttgggccagtctgctcttctga

SEQ ID NO: 86382 - DNA, 479 bp, Oryza sativa
  Clone ID: PAT_MRT4530_85429C.1
tttcactcagcacagaataagtacaacacagagctggttgccattctggaggagaaccaactatacacctgatggggtgattgtcatactgcaagatgggttccagagtcttcagctgctccgcttctctgcccctatactgccgttgctgagtttttcagaaaatgccatgccgaagctcaaaggctcgagctgaagttcagaatgttggaaggcctctttggcatggacatctcacaagtctgaaagaagtgcatctgagagtcaatgaccaagccggtgagacgactagcttgattatagatgatctgataactgcagccaaaaaaattcgctaaccagccaagagtaatccgtgatgagtattatgacctactggagtgactacgttatattgtaattctccaccaattttattactggtgcgtgttattttaaagttcattacttcccgtatctaaaaaaaaaaaaaaaaaaaa

SEQ ID NO: 86383 - DNA, 120 bp, Oryza sativa
  Clone ID: PAT_MRT4530_8542C.1
atggccgctccattgcagcaactgagccacaagcactgccacagtgaggatttctgtggactgacagggcgctatggccgctccattgcagcaactgagccacaagcactgccacagtga

SEQ ID NO: 86384 - DNA, 619 bp, Oryza sativa
  Clone ID: PAT_MRT4530_85430C.1
cccggccggtgttggccttcgggatcggagtaatgattaatagggacagtcggagggaacagaagcgagcgagcaaggaaggcgatccaaggaagaagatggcggcggcggcggccatggcgatgaaagatccgagcctgtggcacaaggtggccgccatatccggggttgctgcccttggacttggcacctatggcgcgcacatgttccgccccaagaaccccgcgtacaaggaggtttggcacactgcgtccctctaccatctcgtccacaccgcggcgttgctcggggctcccatcaccaagcgccccgatgtttttggagggcttcttactgctgggattgttctcttctctggaacgtgctacactgtggcttatcttgaagacaggaagtattcttccacggcaccgttgggtggctttgcgttcatcgctgcttgggccagtctgctcttctgattatatcgtgttttagcatgtgaaaacgtattacattactgaatgctttgtatttggtgccctatcagttcatgcaattgactcgtatgcatctctatcatgaccttctagaaaagaaatgaaataaaatcaaaagtcccttgatggttgcacccccc

SEQ ID NO: 86385 - DNA, 348 bp, Oryza sativa
  Clone ID: PAT_MRT4530_85431C.1
atggcggcgacggcaagcgacggcgacggcggaggcggcgtggcggcgcaaccggagttcggccggcggcggcggcggatggtttcacgcggcgacggctctacgggtcgcaggacacatcctaaatgggtcaccaagcttgggcaatttgatgtccacttcataccacgaacaaccatcaagtctcaagtactctccgatttcgttgccaactggactgttgccgaggacggcaaagttgggcatacgaacaacgagcgatcaacaatggccttcaatggagcattcagcatccaaggagcaggcgttggatttatccttacatctctaaaaggagatcagttttga

SEQ ID NO: 86386 - DNA, 160 bp, Oryza sativa
  Clone ID: PAT_MRT4530_85432C.1
acacattgacctcactgtcatcggaccacacctggaagctggtcagtgggcccagtatactcgtgccagacaaatgtgtggttcggtactatgcctaccctggatgtaaaatcattcatgatctgatggcagcgttattactaagtatgaatgagggatt

SEQ ID NO: 86387 - DNA, 443 bp, Oryza sativa
  Clone ID: PAT_MRT4530_85433C.1
gatcttattcttagcactttatgttcaggtcctctgtaacttgctatgcatgccatttcttttgttttgttacatgtttatgaatttgggttatgtcttctcttgctaaatggaatgtgaattaatcaatctattatttttcctttttcaattgcacagagcatcaagaattctgaatgcccatctgagcttgagccagctgataagaagtctcaggtgaatgtgaatcttgttcggaaagaggaaaagtgtcctgtaagttttgtcagcctttgctttactgtttcaattgttctagacgacgatcccggccttgacaatgtccattgctcgaatgatgtaggaacctgtcaagcgcgcagctccattccatggagcggcaaaaactctggggacgccttctgataataactccacacctccggaggctacttctgcagcag

SEQ ID NO: 86388 - DNA, 171 bp, Oryza sativa
  Clone ID: PAT_MRT4530_85434C.1
atgcacgcacacgtacgctagggatccactttttcgaccgcccttccttttttttttttttggacaaaaatgacagattaattccattatattattgggggagcattacagaaccaaacaattcataccaaattacataatttgcattatttgtatgtggagagattgatg

SEQ ID NO: 86389 - DNA, 1863 bp, Oryza sativa
  unsure (1)..(1863): unsure at all n locations
  Clone ID: PAT_MRT4530_85435C.1
gcggttctctcgtgctggaagcagcggctgctgcagaagtagcctccggaggtgtggagttattatcagaaggcgtccccagagtttttgccgctccatggaatggagctgcgcgcttgacaggttcctacatcattcgagcaatggacattgtcaaggccgggatcgtcgtctagaacaattgaaacagtaaagcaaaggctgacaaaacttacaggccgcgccgcatgttttttttttttttttagagcaaaagtatagcactatagatgaataaggacgagactacgctgtctgaatgattaccgagttggcgacgccagcttcctcgatagtcttgctatggaaggcagaaaagggtagattcaagagaaaaagaaaacttggcatgaaaagataggggaggaaatttgcacgcttcaaatcggatagattgtgctttgttgaagagatggggggtcaacaaactgttttctgtcgaagctacgctgtctgaatgattaccgagtttgcgaagccagcttcctcgatagtcttgctcatgtcatcgaccggctttggggggaacccggcccttgcagcgtgtaatcaccggcgtactcctggaccttgttgtgtcgatgaacccccgaacatccgcgatcgtgtggctcgtgttgaaacgcgcgaccatgcggctgcacacttttcctctttccgaacaagattcacattcacctgagacttcttatcagctggctcaagctcagatgggcattcagaattcttgatgctctttaaaaaggaagcatttgctggatcatcaaaacttctaagtggaccatcatttactgtgaacccattggtccaaaaatagatgttgtggacaatactttctggtgactgaggcgcaacaggctctgcagattcacctgttagaagtctgcctgtcccagcaaagctctttgatttccggcgagcctcaaatgaacctttctttgctcccttcctcttagcttccttaaagatctcatccgcacggtttttacgcttagatcgatctctaacgaccattccactcttttcgcctccggtgtataattcctgcggcggcttatactcgtcgtcctccgagtcctcggaccccgcgctgtccttgccaccgccgagatcggagagcgtccgcacattccccttcccgctgccgctcccgccacgcgcgttttggcccctcttcagcctcttcagcggcctcctccgctcgtccgacgccgcagcctcctccgcggcgagggcggcgtcctcgtcgtcatcatcgtccccctccccgtccccatccccatccccgacgtagtcctcgtcgtcctgatcctcgtcgccgccgccgacgacgtagtcctcgtcgtcggagtcggcgccatcgctggcgggcgggggaggcgggggctggcgggggggcggatcggccgcgtcggcggcggcggcggaggcgtcgccgtcggcggagtcgtagaaggagcggacggcggactcgagggcccagttgtggctctcgaggaagaaggcggcctcctggggcgtcgcggaggtgacgccgcagaaggactccaccagcgactgcgcctccgcggccggtggcgccctggcggcgtccccggcggccatctcggtgcggggcggcggcgcgtcgtggggatcggggggnnnntggggtttggatcctcctctccccttcggccnccttgcgacaatagattgattaattcacattccatttagcaagagaagacataacccaaattcataaacatgtaacaaaacaaaagaaatggcatgcatagcaagttacagaggacctgaacataaagggcttaagaatagatc

SEQ ID NO: 86390 - DNA, 506 bp, Oryza sativa
  unsure (1)..(506): unsure at all n locations
  Clone ID: PAT_MRT4530_85436C.1
tttggctgcagggattcgcgcacgagctacctggatggcacgcttccgggagattcnggttcgacccgctggggctatcggaccggaggggaccggcgggttcatccanccacggtggctggcctacngcgaagtgttcnacggccggacagcgataatgggcgtcttccgcatggtcnccccggaactcctcngcaagctgggcctcgtccccnccgaaactgcgatcccgtggttccagaccggcgtnatcccccccgcgggcacctncacctnctgggccganccttacaccctcttcntcttcganctcccctcctccgnttcnccnaacaccnccgcttccannactggttcncnccnggctccntggggaacaatncttcctccgcctccaaggggggccggtncccaattccccctatantaatcctattacaattcactgggcgtcnttttacaacntcctgactgggaaaacctggctttccccacttaatcccctt

SEQ ID NO: 86391 - DNA, 605 bp, Oryza sativa
  Clone ID: PAT_MRT4530_85437C.1
cccgagcgtgggggctggtctcctgtgtggtctttgttctttcttgcgccccataaaacgcctggacggctagtcgtcacttcgcctgcccttgcaatcgcgggccgagcccatccgaggggttcggtagcgtccgttcggccgctcagcttagcctgctaaccttcgcacctttcatcccgtcaggcggtccatcctggtccctgcaaacgggattggtacgatgttgcggtggccatcctctctctgctgctgccgtacagctctcccgctgcaactacgggtctctccatcggcaaccgcagcaatcccctcctgtcgttctctccggcccctctcttcacgggcacggcgagcgctggtccttcttagcccctccctcgccacaccgccccgcggcaccattcattccatcccccgcaccatcgcgttccgccatcctttgccactcgtcgagccctccactccagtccaatcggtcgttcccgcgtctttcttcgccggccatgatatcgctgctgccttgtcgcttccccctcgccgccccccccggcctgccgtggagatggcggtggcgccgccgcccaaggtcgctgcccactctt

SEQ ID NO: 86392 - DNA, 1235 bp, Oryza sativa
  unsure (1)..(1235): unsure at all n locations
  Clone ID: PAT_MRT4530_85438C.1
ccacgcgtccgccacgcgtccgccacgcgtcctcgggcacgaggctgcgctgcagccgaacgaccgagctaccgagctaatccagccatggcctccaccgcgctctccaccgcctccaaccctactcagctgtgcaggtctcgcgcctcgctgggcaagcccgtcaagggcctgggcttcggccgggagcgcgtgccgaggacggcgacgaccatcacatgccaggccgcgagcagcatcccggccgaccgcgtcccggacatgggcaagcgccagctgatgaacctcctcctgctcggcgccatctcgctccccaccgtcggcatgctcgtcccctacggcgccttcttcatccccgccgggtccgggaacgccggcggcgggcaggtcgccaaggacaagctcggcaacgacgtgctcgccgaggagtggctcaagacacacggccccaacgaccgcaccctcacccaggggctcaagggtgacccgacgtacctcgtcgtggaggccgacaagacgctggccacgtacgggatcaacgccgtgtgcacgcaccttgggtgcgtcgtgccgtggaacgccgccgagaacaagttcatctgcccctgccacggctcgcagtacaacaaccagggcagggtcgtccgtggacctgctcccctgtcgctggcattggtgcacgccgacgtcgacgacggcaaggttctcttcgtgccgtgggtggagaccgacttcaggaccggcgacaacccgtggtgggcgtaagctataacaacatgatccatatcatcatcagcagcaaagttcacttgtgtgatcagcttgtagctataagtccgctgtatctgagaaacgctgctgtaaatccatcttcactttgtttttccaaattatatgtacacacactgtcacactgtatgaaagagcataaaacccttttcactgcataagtaaccctttttgagggttatgaatctgtgagatggatactcttttatagcagatcataccttagatgtcttcctgaatatgggcatttctgcatctgcactacactctgaaactgaaagactgaagaattcagggcataagatagcatatatagagaattgtttcagagcaattgcatgtgatttgttttgaccttgagaaaaaaaaaaaaaaaaaannnnnnnnnnnnnnnnnnnnnnnnnnnnnnnnnnnnnnnnnnnnnnnnnnnnnnnnnnnnnnnnnnn

SEQ ID NO: 86393 - DNA, 406 bp, Oryza sativa
  Clone ID: PAT_MRT4530_85439C.1
tagtgagggaacgggagcggtagcgaggtcggggcggatttttgtaacacgtaggctgttaagcccaccgctccctatccatttgcaaaagaggacctcggagaagacgacgggggggcgcctctcgccggaactgctgacaacctctggctccccctaaacaggacattaatgctaaaagactgcctacacgaataaaccacaaactgagcaagccatacgttgaacgcactatagcagtccaatatctcagaggacggctatggagagattagcacaagttgcaacagtgtcggcggccacttaagctcaacagcagagatgatgacccccataaaaaaagcgtccccagatacatactgcactacccgcagagatggggctatctttaagccataaatttcaa

SEQ ID NO: 86394 - DNA, 109 bp, Oryza sativa
  Clone ID: PAT_MRT4530_8543C.1
tgataattaacgacacgagctgcgacaagcggggggactttataaacctaaagggcgcatgctacccggcagatgcaaggtgggcgaactagtatctattgccacacag

SEQ ID NO: 86395 - DNA, 313 bp, Oryza sativa
  Clone ID: PAT_MRT4530_85440C.1
ggggggaagaaaacaaaccataaatccctccaacttttggaaacaaaccaactttattttttaaaaaaatttttttgcccttaacatttatccaacactttttcccatttttttttgagtcccccccaaaattaccaatcccgcttcattttttaaaaaattattttttccattttagggaatggaatcaattcctttttcttttggctttggcaacttgtttcaattcacagctttaccaaccaaagtaaaatgaccgacaggggctttttgatcccatttttccaaaattttttcaaaattttggaatttt

SEQ ID NO: 86396 - DNA, 849 bp, Oryza sativa
  unsure (1)..(849): unsure at all n locations
  Clone ID: PAT_MRT4530_85441C.1
ttatctccaccgcctgcgtgncntgnacnccgtttttccctgcnaccagagtcttncaccttccctacctaccccacatnccgncccccaaacccataatgactggtacttctgcttcttttggtgctggtgttgtactttggcgttttactttatggtaatgtgatcatggtgttgacgactcgttcttactgtatgttgnagcgggttgcgaaccgcccagttccagtccgccgcacgtgcttgtctcgtcggttgctcgcgcttacattttatgttgctctattagtcggtcttctcccactcgcctgcgtccgccggccactctcgctctcctttctagcgctgatattcgtagtggctcactttcaacggcgcgctgctgcacgcctgcgcgctgctctggcgctgttcgttcctgttagtcgtgtcttctccttccgttgggttctttgtctgtcgcgtttgctgtgtgggttgttgggtgtgccgttcttgcctgtgtcttactcgtgctgttccgtgttagtcctggtcgccgattttggctcgtccggttttgatcccgcttcctctctctgtttctgcttgttgcttctgctctggacttttgttcttgttctgcggtcacttgttctctccctgctgctgcttgtcggctctctgtttctctctggcgtcgtttgcccagcctgacctccgtctactcttgcgcttgtctatggttggtacccttcatactcactccgccgctcattcgttcaccacgcgaccgcagcagtgcacgtgatgcgagccagatgtgagagtcgggtgacgaaacaagtgacagtaagaaactatagtatc

SEQ ID NO: 86397 - DNA, 2115 bp, Oryza sativa
  Clone ID: PAT_MRT4530_85442C.1
ccggaattcccgggtcgaccacgcgtcccgcctcatccacctttttctcggaaaaaaattcgaatcaggcggagccacctcacctcgccgcggctgtttctcacgccgccttcccccgtcgacgcgcctcgccggaaccctaccacccggatctccgcggcggcggcggagatggtgagcgcgctcgcggggctgcaggaccacctcaagctcgcgcgggactacgcgctcgagggactctacgacacctccatcatcttcttcgacggcgccatcgcccagatcaacaagcatctaactactttggatgacgctctgattcgcacaaaatggctgaactgtaagaaagctatctgtgatgaagtagaaatcgtgaaacagctggatgctcaattaaaggcgtttaaagaagctcctggggcaaggcggtcctcgtcaccccccattcgctctaataataaatcctttgttttccaaccactggatgagtatccaacatcatcaccagcgccctttgatgatcctgatgtctgggcgccaccaagagatacaccaaatcgtagaccaacacgaggtcaatctagtacaagaaaatcctcccaagatggagcttgggcccggggtccatcaaagactggaacacctagtcgtggtgcaaaacctaatggaagtaaaggaaactctggggcaagatcatccactgcctctagcactggtgggaggaaagggaagtcaagttcaagcaaggctgattcagtgagtagcgatgctgaagaaggcaagtccaagaaggggcaatatgaaggaccagatatggacttggctgccatgcttgaaagggatgtcctggattctaccccaggtgttagatgggatgatgtcgcaggtcttagtgaggccaaaagacttcttgaagaagcagttgtacttcctctctggatgcctgaatatttccagggtattcgccgaccttggaaaggggttctaatgtttggtccacctggtactggaaagactcttttagcgaaggcagtagctacagaatgtggcacaacatttttcaatgtttcttcagcaactctggcttctaaatggcggggagagagtgagcgcatggtccgctgtttatttgatcttgcaaggttctatgctccaagtacaatcttcattgatgaaattgactccctctgcacatctcgtggagcttctggtgagcatgagtcatcaaggagggtgaagtctgaacttctagttcaaatagacggtgtaaataatagttctaccactgaagatggtcaaccaaaaatagttatggttctggcagctaccaactttccatgggatattgatgaagcactgagacggaggctggagaagcgtatttatattccacttccaaattttgaaagcagaaaggcactcatcaatattaaccttaaaactgttgaggttgctaccgatgttgacatagatgaagttgcacggaggacagaaggctatagtggtgacgaccttacaaatgtttgccgtgatgcttcaatgaatggcatgagacgaaagattgcaggcaagacccgcgatgagattaagaacatgtcaaaagatgagatctcaaaagacccagtggccatgtgtgactttgaggaagctctggccaaggttcagaagagtgtatcacccgctgatatagaaaagcacgagaagtggcaggccgagtttgggtccgcttgaaatctccattctgttcccgttcaaatttctcagatcattgtttctccttggttgcttgtgttcgcaagtatttcattcatttgtaccgctgttatgttgtttcaacggccttatgttgatcggttgtattgcctgcgccggtgttgtatcatagagacaaaccagacagtaaactaggaagtgagaggtctctgcccgtggaactgctttgttgatttagtttcagtgtcactggcactgccgaagccaaaggttgcgtcactctgtaaccatttcgaacagttgatatccagcttccatgtttcgcacgggcagttacaacgtgcgcgttttaacagtaaaaaaaaaaaaaaaactcgagactagttctctctctctctctcc

SEQ ID NO: 86398 - DNA, 513 bp, Oryza sativa
  Clone ID: PAT_MRT4530_85443C.1
atgttttggacctgcactggagttaagcagatctctcagtcctcgtgttttacatcaacaaaccctagccgccttcgtgtgcctctcctccttcccctcgtcccgtgccctcctctccttctcacgtcgccgtcgcctcctcctcgcgccgccaccatcgcgtccccatactcatcgcctccgtctccacctccgtcgctgccgtcgtgtcgccgtgtccgacacctccgcctccctctcccgccgccgccaccaccagtccaccattcaccgcctccgtttccgactgccaccgtcgctgtctccatctccgctccgcgtccgcctcgtgccaccgcctcctccgctgttaccggccacctacctcgcggcacgccgttgccgtcgttgagtgcacaatctccgccgctgtcgaccgccgtatccggctgccggcatccggatccggtggggggcggtcagatccgtgtccccaaaccacatggaaagggcggcctcgggtggagcagatag

SEQ ID NO: 86399 - DNA, 1016 bp, Oryza sativa
  unsure (1)..(1016): unsure at all n locations
  Clone ID: PAT_MRT4530_85444C.1
tgttgctgactgtttcntttgggtttcttctccgatggtttccnngtccgctatgtcttgctgaccgcacgagggtgctctgctcgatctgcctcgatggcatggaggccggccgcgccgtgcgcatcctccccggatgtagccgcatcttccaccagtactgcgtccaccggtggctcaccatctcaccgcgccgcctcgtctgcaacgggtgggtcacgctgcagtcgccggggacctcgccgtctgccgccgcccgccaagcctgctctggattcttgagatcctggcgttgccaccctaccgatcatggctcaggtctcggttcttgacgagttcttgttgaattctcagcgattgttgtcgtcggtttctaggctctggacagcggttcttgctgatttcttattcttttcggaggattcttggatgggactgcatgtaaattgacttggtgctgtaattcgttggtagaaatcagtacgcttatgcatagtttcacccctttttctactcttaacaggtcaacaactttgtccggattcagtctaggtgatgaatgaatggaatagctaatactgtgaatacaccaacttgttgcccatttttattgtgaatacacccaacctgcttcacctctgatagtggttgcccatttttattaggatttcctgatttttatcaccatgctgctcctcttgttctctaccaaaagaggttgctatgtatgggttttcagttcgtagtgtcttgatttctgagttgttatatcttccgtactttctgtttgcttcaacctgttagagttattttatttcgtgtgagttcctgattagattgggcgtttatttgtaccctgaattaattgtctactgcttaccttttcctgtatatatgtattgtgtgcttgtaaaatttcccctgcaccctgcttacccttttctgtatatatttattgggtgcttgtaaaatttccccctttgaagaggtgactgtaggaaaaaaaaaaaaaaaaa

SEQ ID NO: 86400 - DNA, 653 bp, Oryza sativa
  unsure (1)..(653): unsure at all n locations
  Clone ID: PAT_MRT4530_85445C.1
ccggccgggttttctttaaaacttttttgggtgatttgctggaatgggggatcatgttgcggtggatgttggggggctcatggtggaatgccgcatttgccaggaggaggacctcgccaagaacctcgagagcccctgcgcttgtagcggtagcctcaagtacgctcatagagaatgtgtgcaaagatggtgcaatgagaaaggagacataatctgtgaaatctgccacgtgtcatacaagcctggctatactgccccaccccaggtacatcatgatgagactactatagagatcagtagtggagattggtctatctctggcaatcggttggatttacatgatcctagaatcttggctatggctgccgctcaacaccgtttacttgaagatgagtatgatgaatatactgcaacaaacaacaatgctgctgccttttgccgctccatatttctaattctaatggctcttctactcttaaggcatacactaaccattactagtagtgatgatgaagatgacgcatctgctattttctcgntgtttcttttgagggctgctggatttttgctgccatgctatatcatgggctgggctattagtatcatgcaacgtcaaagacaaagacaggaagaaagcatgcttctaccaactg

SEQ ID NO: 86401 - DNA, 1291 bp, Oryza sativa
  Clone ID: PAT_MRT4530_85446C.1
ggccccccgccccatgcgtccgcccatttcggcttccggtcgcgtgggggggtaatccgagcctcgtcgtgatcccccgcgagtcggggggagcttcgattcggcccgaatcccgcttcttcgatctcgccacgggatttctagggctttagcccctagccccatcggtcgtgagagctgctgagcgtggagattttttctttaaaacttttttgggtgatttgctggaatgggggatcatgttgcggtggatgttggggggctcatggcgtcccggggcgccggcgaggaggaaacgggggcgctgattgggatggtggaatgccgcatttgccaggaggaggacctcgccaagaacctcgagagcccctgcgcttgtagcggtagcctcaagtacgctcatagagaatgtgtgcaaagatggtgcaatgagaaaggagacataatctgtgaaatctgccacgtgtcatacaagcctggctatactgccccaccccaggtacatcatgatgagactactatagagatcagtagtggagattggtctatctctggcaatcggttggatttacatgatcctagaatcttggctatggctgccgctcaacaccgtttacttgaagatgagtatgatgaatatactgcaacaaacaacaatgctgctgccttttgccgctccatatttctaattctaatggctcttctactcttaaggcatacactaaccattactagtagtgatgatgaagatgacgcatctgctattttctcgttgtttcttttgagggctgctggatttttgctgccatgctatatcatggcttgggctattagtatcatgcaacgtcaaagacaaagacaggaagaagcaatgcttctaccaactgaagtggcaatcatactccaccgaaatggaaggactatgcaattcgccgtagcgccagaatctcctaccacacctcatccagaacaagggcaatagaatttgctggcaacaggcatatcttgtgagtgcatacaagataccttgagccttctacaccctgactctgtgtacactgcaagccggttgcaccagccactttcaatggccaaattgcagcaaaaaagtgttgcgtgtctatctctcgatttgcataaactttgcagctaggcttgaatgcttttgtgattggctttcagcttcttctgcacataaagagattcctttcaataaatgaatataagctaaattaacaagaagaaaaaaaaaaaaaaaaaaaaaaaaaaaaaaactataaaaaaatatttt

SEQ ID NO: 86402 - DNA, 393 bp, Oryza sativa
  Clone ID: PAT_MRT4530_85447C.1
atggagatgatcggagttacacatgtggaagcatttggtaattcggaattagtggtgcaacaagttgccggagtttacaagtgcttggacgggtcactaaattggtatcttgatcaatgcttggatattattgccaattttgatgattttgctattagacatatttctagacatgataattctagaggaaatgatttagcacaacaagcatctagctataatgtgaaaaggggattatttctgatattggaaaagccagtacttgatttcaaatctttggacgaaattggcaaagttacagaccaggggcggtctgaccggcattgcactaccggtctgaccggtgaccatgggcggtctgactggccggatgccgccggtctgaccggctga

SEQ ID NO: 86403 - DNA, 314 bp, Oryza sativa
  unsure (1)..(314): unsure at all n locations
  Clone ID: PAT_MRT4530_85448C.1
ctaaaccctaaaccacccactttccccaatccccacctcaatggaagaagcggacgacgccccgccgccgtggaggcccagcaagccggcggcgnccatcgacggctcgtcggggcccctngccgccgccgccgcgcgcttntccggccgctcccgcgcgctcccatcctcccgcaanttccacttctacaacaacttcccctccttnaggtcccccgtnggcgccgcgccgccagggcgggcgcntccttcgcngncntcgggnncgnccccttttacccgaagcggcacccgcngttccccggggacgacct

SEQ ID NO: 86404 - DNA, 591 bp, Oryza sativa
  Clone ID: PAT_MRT4530_85449C.1
atgacggcgaggaggggaggagaccgcctgcagcacggcaacagtagaggggagagtgtatgtggctctcccaatccactcccctcccagatctggttaaatatacgggagctcgagaagggcgcggcgcggcaaaggggtaggtggcgttggcagcaggaggggaggaggctggtggcggtgccggcggtagcgccccactctcctcccctctcagatctggccgaaggaaaggaggccatcaacggcgtgacaacagtagaggggagagtggcggtggctcccctactcccctcccgtcctatatttggccttatgagagctcgagaagggggcggcgtggcaaagggggaggtggcggtggtggccggtgacgacaaagggcaggggctgcataggtggatgtggctgatctggccgtggaggcgatggatccagccatggaggcagcggcgagtagatccagtcggcgacccgtctcccagatctggatttgtgaaacgagtaaatgctataaattgtggtgctctatggatctggcaatttgggattcacttttgtgatttgggaataattgttctggattggtga

SEQ ID NO: 86405 - DNA, 1014 bp, Oryza sativa
  Clone ID: PAT_MRT4530_8544C.1
tcattgcggtagaatccccaggaccttgccatactcgatgaggtcgtcaaatacctcgtccagatccgtccacttgaactcgaacccttccctcaccagcttctccgacgaatagcacactctcggcttctcagggaacccttggaagccgtcagttttgacgttgtaccgagggtgctttcctgccacgaaacgggcgaatgccacgacggtggtgctgaggctgctgcagatgtacctccccgacgccgactccttctcggcgacgaatacctcggcgcggcagaggtcgtccacgtgaactgtcggaatggggccggttgctgccaggcctttcagggtttttagctgcgtctcatcactagatagcaaggagagcatagctgagacgcttgttgcggccgtcggcgtcggcgctgcacccaaagtgaacaccgggaacacggtgatgaggctgatgttgttctcctccgctaatttgcatgctgccttctccatgagcacctttgagacactatacgcccaagctggtggcttctctttcgtcaggtactcgacgtcggaccaggaatcctcgtccaggacatggccgtcgccttgcagcggcctgccggagacggcgggcgccgacgatgtgaggatcacgcgcttcaccgtgccggctctcacgcacgacctcatcacattcatggttccttggacgccggcttcaataagctctttctcaggattctgtgactggaaattcaccggagcggcgacgaggaaggcgtaatcgcagccggcaacggcatcgtcgaagctgccttcttcgtccatgtcagcgcggaagacctccaaggggcctagtgcttccaagtccttgagatgggaagtcttcttcatgtcatcacctgggtttctgaccgtcgtgttgacagcatatcccttctgaagcagcatcttgatgagcgccgaagcgatatacccgttcccgccggtcacgcacgccgtcttcatctcaaccgctgacat

SEQ ID NO: 86406 - DNA, 561 bp, Oryza sativa
  unsure (1)..(561): unsure at all n locations
  Clone ID: PAT_MRT4530_85450C.1
ttccgagcgacaaagagtttccatcttcctacacaaaggaaagaatagtgcgaaaaaaaaagtttctatccgaagggaaacacgcgtgaataaatacctaattaaaaataaatatctatctctaaaaaaccttctgtcgtaaaaaaaggaaaaaaaggaccgactcccgtagagaaaaaaaaagtccgactcgtgaaaaagaggttttctcgtccgtaataaaaaaaaagaaaaaaaaacatctaactcaaactccgtaaaaagaaaaggaggaaaaaacgacccgaccaaacttaaagtcgccccttgttatccgtatatatctctttaactctaatctaatctatcaatctaatctaaccaagagaagttaccatcatccgttaaaaaggaaaaaaatgcgcagaaaaaaataatttccnaaaaaatgcgcgggaaaaatacggtttccttcgtctgaaaaaaaccaaaaaaaatgctattaaaaactatcagaaagaaatacaccatttctaaaaaaatggtttcaaaaaaccacaccaaaaaaaaaaaaaaaaaaaa

SEQ ID NO: 86407 - DNA, 2059 bp, Oryza sativa
  Clone ID: PAT_MRT4530_85451C.1
gttagcgtggcgccggtgaggggcaggaggcgccggcggcgagggacaaacttttatttttcttacaaactcttactccctcctttttgttttatatattatattatttgttttgattttttttcatagttaaacatatttagctttgatcaaacttttagaaaaaaaaataacatcagcaggtcagagtataatccagatcagtatttatgggagacggagtttatccttgctgggcgcaagtacaaacgactagacttggagcttacgaatgcaagaggccttacaataaaatgcagccactatgttcctgctttcattccagagaatacttctcttccatgtgtgatttactgccatggaaatagtggatgccgggcagatgcaaatgaagctgctgttatactgcttcctgcaaatatcactgtttttacacttgatttttccgggtcaggtctatcaggtggagattatgtaagccttggttggcatgagaaagaggacctaaaatgtgtggtgtcatacctacggaccactaagcaagtttcctgtataggcctttgggggcgatcgatgggtgctgttacaagcctactctatggagcagaagattcctcgattgctggaatggtattggatagtgctttcactaacttatatggcttgatgatggagcttgtggatgtctacaaaatccgggttcctaaattcacggtgagcattgctgtatttgcattgttttaatcattttttttctgaaattcgtcgtttcaggttaagatggctgttcagtatatgagaaagatcattcagaagagagctaagtttgacataatggatcttaatgttttacaggttcttaaacagttcgctcccaagacgtttattcctgcattgtttggtcatgcttcaaatgacatgttcattcagcctcaccactgtgatcgtattcaccaggcgtatgggggggataaaagtataataaaatttgagggtgatcacaactccccaagacctcaatcatattatgattcagtttcaatgttcttctataatactttgcatcctcctcaattgcctggtcctggattctgggcgccggtgggcgaggagggtgcaccgtgatctacgatccgatcaccatggaggatcattagtggtctacgaggagctggaaccaattcatgcagttcatcaatagatgcatcgaaatttccaaatgctacaacaccagctagttgaattgctgtcagagagtgtgaatcagctgtccattaagaatgacagtgacttggattttcttttagacgagaatcgcaccctctcagaaattgatggtgatagtgctgggtcacgcttgcaggacaaatcaagtgggcacaatgaggaatcctgctcatgtacaagctctaacagagaaagttggggtagatgttcctctttagggggagctagtgacgactcattccctggcgatattagtgataagcaagagaatatgactgtaaaggctctggcaacaccgctaagacagaaagacagcaaatcgacaaccccaaaaacaaaggagaagaagaagtcactatggaagaagcttaaccgtgagagggcaggggtgggtgatagtctatcgcaacgtttgaagatgtgcctcagtcattcttctcgtcacaagagagtcaaatcatctgggatagtgtaacaacttattagccttgacaaagtccatctcaacgaatcactgacactgatcagttccgtgaacaccgaatcgccttgatttgattctgacttacctgctggcactaccagtgccagattgtaacttgtaacactggtgagtacatactcgattgccatggctcgtgtcaagcttcgcaggagcccatgagattgagcgacacgcccttgtatttgctgtctcctgtaattgcgatctctggctcgctgtttattttccttttaccacttgaatgctgtaaattacaatgctgtagtgcaaaagtgcgactgtcaacttgttggtgaaatgaaagggatgtcgtgcgtcgttttcctt

SEQ ID NO: 86408 - DNA, 786 bp, Oryza sativa
  Clone ID: PAT_MRT4530_85452C.1
ccacgcgtccgggctgattatgctgggtgttatatgtaattgcctccatcccaaaaagaccttattgtgcatagcaagaaatgaagtctttctgggaaggaggtagtaatacttagaaatcctctattagtgaactgttgattattgaactttgcgatctgaagtgctcttagttgcagtaattttaaatgcttgctcgctcctacaattgtggctgactttgtgttctcttgttcttaaacagttcgctcccaagacgtttattcctgcattgtttggtcatgcttcaaatgacatgttcattcagcctcaccactgtgatcgtattcaccaggcgtatgggggggataaaagtataataaaatttgagggtgatcacaactccccaagacctgaatcatattatgattcagtttcaatgttcttctataatactttgcatcctcctcaattgcctgtgaaatgctccaataatctaggtgctttcaaagttggcacggtgaccaatgagagtttcatttttgagatcattagtggtctacgaggagctggaaccaattcatgcagttcatcaatagatgcatcgaaatttccaaatgctacaacaccagtagttgaattgctgtcagagagtgtgaatcagctgtccattaagaatgacagtgacttggattttcttttagacgagaatcgcaccctctcagaaattgatgggatagggctgggtcacgcttgcaggacaaatcaagtgggcacaatgaggaatcctgctcatgtacaagctct

SEQ ID NO: 86409 - DNA, 870 bp, Oryza sativa
  Clone ID: PAT_MRT4530_85453C.1
atggaggcggggggagggtgcgcccactggcggttgcgggtggcccttgtgtgcggaggcagtggcggccaccagctgcgcccaccggcgtcttggcagcgacgcagcggggcgctcatggtgccgatggctagccgagcctcgacagccggtcccatggccgcatcggccggtggtcggtgcagcagtggatggcggcggcttggcggacttttttcgaggggtgttggtgttagctgtgtacaagaagtggtgctctggtgtatatctcaacaattcaacaaggatgatataactgcttatgaaatttcttgcttcctgcatcctgtctctgatattcagttgtttattctgtcaatttttcggcaggaattatcaattcatcttagtgctttgcattgtcaaatggcagatatgggagcaagacaacaggtgatgatgagaactggaacacaagctaagctacatgttcaaggatactcaggaaaaggtacgaattaccccctgaactatcacggtcgaccgaattaccctcttgaaccacaaaaccggatattcttcacccccaactttgcaaaccagacaaataacccccctggcttaatccgcggtggttttgatcctacgtgcgttccatcagaggccgcacctgtcagggccgacgctgccgccgacgtccagaccggctgccgcaccatgctcggcctcatagtcaccgggatcgccggcggtgccctcgcgcaggcggcgctcgccgaggccgccaagcccatcaagctcggccccccgccaccgccctccggtgaaggagaggttctacctgcagccgctgccgccggtgggaggcggcggcgagggcgaaggaggtga

SEQ ID NO: 86410 - DNA, 600 bp, Oryza sativa
  Clone ID: PAT_MRT4530_85454C.1
cacaaaatacaaaagctaatctgtttttacaccttacgcaaagcagctgcacaacaagatggcaagagcaaacttcctctttcactccaggttccataacacatactcaagttttacctaataaacgaactagtgaccatatgaacttcgaacaagctgatcctgaaaactgaggcaagcaaaatttaggcctcctttgaaacaaaggatttgtggaggaattttgtaggattccaatcctataggtaagtttcatatttggtcctctgaaacaaagaattggagcttctcaaatcctatgaaattccttaggaatggctcaatacatgtagattttaaaggaaagctagcaagagatacaacctcttggaaaatttcctttgagtctatctttgtcatctatttcctgtgcttctcctattcatgtattttaccattcctcatttcaaccggagccttaacttatctttggagagctgatggctatatatattaaccacagttaagtacgctatcatttcctcaagcatttgcttataacatcaacggttgccaacatttccgcttcttttttttgcctctccatatacctattttttg

SEQ ID NO: 86411 - DNA, 1383 bp, Oryza sativa
  unsure (1)..(1383): unsure at all n locations
  Clone ID: PAT_MRT4530_85455C.1
gttgtctcgtctcgtcagttgagttgagtagtgttgacttgagattcatcacatctgagtgagtaagagtttggaaaatgggcggcggaggagacggcgaactgtccccggcggaggccaggctggcgatgatggagctcgccaacatgatctccgtccccatggcgctcaccgccgtcatccgcctcggcgtccccgccaagctctgggcgggaggcgccaacgccccgctcgccgccgccgacctcctccccgcgggccacccggacccctccgtcctcgagcgcctcctccgcctcctcgcctcccgcggcgtcttctccgagcacaccggatcatcctccccctccccgcgccgcttctcgctcaccgccgtcggccgcaccctcgtccccggcggcggcggtagcccctccggctccggcgcgtcctacgccgactacgttctgcagcaccaccaggatgcgctcgtccgcgcctggcccctcctccacgaggccgtcctcgacccctccggccccgagcccttcgcccgcgccaacgccggcgtccccgcctacgcctactacggcaaggacagggaggcgaacgaggtgatgctccgggcgatgacgggggtgtcggagccgttcatggaggcgctgctggagggctacggcgacggcgggttcgagggggtgagcacgctggtggacgtgggaggcagctccggcgcgtgcctggagatgatcatgcggcgggtccgcaccatccgggacgccggccggttcgacctgcccgacgtcgtcgcggcggcgccgcccattcccggagtgaggcatgttggcggggacatgttcaagtccatcccctccggtgatgccatcttcatgaagtgggttctgacgacatggacgaacgaggagtgcacggcgatcctgagcaactgccacaaggcgctgccgggcggcgggaaggtgatcgcctgcgagccggtggtgccggacacgacggacggcagcacgaggacgagggcgctgctggagaacgacatcttcgtcatggccacctaccggactcagggcagggagcgatccgaggaggagttccgccacctcggcctcgccgccggcttcgcctccttccgggccatctacctcgaccctttctacgctgtcctcgagtacaccaagtagtagtcattcattcatgctgcatcaatttgctgctgaaatcaacaaccacgtttccttccttttctttttggtctcgtgacactgtcaaataagcagtatttcaattgtgcaatcagaccatgttcttttgagcattcacagcatcagagtaatggaaaggtgtagcagtttacgattgctagcataanaaaaaaaaaaaaaagcgngc

SEQ ID NO: 86412 - DNA, 379 bp, Oryza sativa
  unsure (1)..(379): unsure at all n locations
  Clone ID: PAT_MRT4530_85456C.1
gtggataaatagaagtagttaaccacaggcgaggcgaggtgtggtatagttaatttgaaggaattttttcagggaacccctcgaatgttggagtattaaagaccgcaggttttttttccttttctggaacccctcgtagtgttggagtattattgcgatattaaaggccgccgggtctgcctgttcaagcgatcccattccctcccttgttaatgtgattgtatttaataataatgttgtttgcttagcantaaaaaaaaaaaaaaaaaaaaaaaaaaaaaaaaaaaaaaaaaaaaaaaaaaaaaaaaaaaaaaaaaaaaaaaaaaaaaaaaaaaaaaaaaaaaaaaaaaaaaaaaaaaaggggggggccggttttaag

SEQ ID NO: 86413 - DNA, 621 bp, Oryza sativa
  Clone ID: PAT_MRT4530_85457C.1
gtgcgctcccatccaaagccgctgccgagtgcaatttcgctcctactcgaggtgaatcgcgccaattcttgccacacggttggattaaagataaacggtggtttcccctctcacaatttaaaccattcacccccgagccggccgttttaaccctcgctgccgccccgcgtcgcgcccggattggcgccaacacgtcgccagccgtttctacccatggtcaagccaatccttcttcgtatactaagtcctaaccgaagctctgcatcgagttttacctcgccgcaccaagccgagcaccgctgtccccgcgttgctctgttcttcgccgccgagaagattttccggctgcaatccgtcatttcaaccaatctcgccgctagctcaatcacatactaaattaacccctccgccgccgctcgccatcgccggagaaccctagctccctcccctcctcggccgcaacccctttccccctctacggccgcatttggggatccgctggaggtagaagaagagaagagagagagagactgacagctgggtcttgaggattcttctgacacactagataatatcaatcaatctcaagacatcgagcaaggcaagttaccatataccttt

SEQ ID NO: 86414 - DNA, 307 bp, Oryza sativa
  Clone ID: PAT_MRT4530_85458C.1
atcaaaacgcttgggaatgatatatgatcagtagagggaacaagacaaaactgtatctgccaaagaacacctctcccaactccacccatttacgccattatttctggacaaaaacatacggatttccattgctccgcttcaccagtcgggggccctaaaccccacaacatgatcctgctaagtgacggcatgtcagatgatgaaaacacatacgggtacttcattatcagaatggcagaacttaaaggtgacacttgtcatgccacaggcgttattagtgctgggcagcctatgaccgatagggcgc

SEQ ID NO: 86415 - DNA, 2000 bp, Oryza sativa
  Clone ID: PAT_MRT4530_85459C.1
atggacaagctcggcgccaacccggccaactcgtgcgcgctcacgccgctgggcttcctggagcgcgccgccaccgtgttcggcgactgcccgtccgtcgtctaccacgacaccgtcttcacgtggtcgcagacccaccgccgctgcctccgcctcgcctccgcgctcgtctcctccctcggcatctcccgcggcgacgtcgtgtccgtgctcctgccgaacgtgccggcgatgtacgagatgcacttcgccgtgccgatgagcggcgccgtgctgaacagcatcaacacgcggctcgacgcgcgcacggtgtccgtcctgctccgccactccggctccaagctcatcttcgtcgacccggcgctgctccccgtcctccgcgacgcgctccgcctcctcccggcggggcacacggccccgcgcgtcgtcctcgtcgaggatccccacgagaaggagttccctcccgcccccgccgccgcgctgacgtacgagaggctcgtcgagaagggggacccggagttcgcgtgggtgcggccggcgagcgagtgggacccgatgatcctcaactacacctccggcaccacgtcggcgcccaagggggtggtgcactgccaccgggggatcttcctcatcaccgtcgactcgctggtcgactgggcggtgccgccgcggccgacgtacctgtggacgctccccatgttccacgccaatggctggagcttcccatgggggatggccgtggtgggcggcaccaacgtctgcctccgccgcgtcgacgccgccgaggtgttcgacacaatcgcgcgccgcggcgtcaaccacctgtgcggcgcgcccgtcgtgctcaacatgctggcgaacgcgcccgagggcgtgcggaagccgctcccggggaaggtgcggatcctcacggccggcgcgccgccgccggccgccgtgctgtaccgcacggaggcgatcggcttcgaggtcagccacgggtacgggctgacggagaccgcgggtctggtgctctcgtgcgcgtggaagggcgagtgggacaagctcccggcctccgagcgcgcgcggctcaaggcgaggcagggcgtgcgcacgccggggatggccgaggtggacgtcgtggacggcgagaccggccgcagcgtgccccgcgacgggtcgaccatgggcgagatcgtgctccgcggcggctgcatcacgctgggctacctcaacgacgaggcggcgacgaaggcggcgatccgggacaacgggtggttctacaccggcgacgtcggggtgatgcacccggacgggtacgtggagatccgggaccggtccaaggacgtgatcatcagcggcggggagaacatcagcagcgtggaggtggagtccgtgctgtacggccacccggcggtgaacgaggcggcggtggtggcgcggccggacgagttctggggggagaccccgtgcgcgttcgtcagcctcaagcagggcggcggcgcggtgacggcggcggacgtggtcgcgtggagccgggagcgcatgccgcggtacatggtcccaaagacggtgatcttccgcgacgagttaccgaagacgtccaccggaaagatccagaagtacgtgctccggaatatcgccaaggagatggggcccaccacgggcaccaacaccaaccgcaacagtaaaatgtagcggcatctagccagcagatgtgtcacttgctttttagcgtcgtcgtcgtcgtcgtcgtcttcttcactcggacagagtcacagagcagaaatgcctggtgcaggcagaggctgatgcattccgcattgtcatggcatggtatgttggcctgttttttttttttttggggggggtgtttagatgcaccgataattttttttaaagacatgtacgaagtattaaatattagacgaaaaaaactaattacatagtttgtgtgtaaattacgagacgaaacaaataaacccaattgttccatgatttaaaaaaaaaaaaaaaaaaaa

SEQ ID NO: 86416 - DNA, 1887 bp, Oryza sativa
  Clone ID: PAT_MRT4530_8545C.1
atggcgtacctccgcgctggggaggccacactgctgctggaacgacgttggcctgcggtggtggtcagcggcggggtcacgcacgccaccactgggattagctcattcaggtccagtgctggagcaaccgcggttagtccggagcttgtcggggaggaccttgagaagataagcctgttccccgagggaggtttcaagccactcatccataagatccctgcgttactccgtaacatggagaacgcaggtagcctcttcgacccggacgttgtcgctattggcccatgccaccatgacaacccggatctgcaaggcatgaaaaatatcaagaagatggccgcgaaggagttctgctccaagtctgagcacaaggtctcagctttctacctcactgtccagaaggtttcggggcaagctagcaaatgctatcccaccagcattgacttaaacgacttcaccgatatgatgttctacgacggctgcttcctcctgcagttcattaagtccacggcggaccgtcgcgcgcggtccccctggactgatctgatacggagaatgggtttgtgggacagcatcgcgcgcgacgtcctcctcctagagaaccagatcccatgggtggtgcttgaggccctcatgagcctcaagcatgtatccgtcgaccggttcattgcatacatcatcagctggttcgacgagcagatggtgagacctcaggtccaacttgacaagtacagaccgtcccacctcctagaccttgttcgtcacttccagatcggctctcgtccaacaaaggtcgaacccatttcagaacctcggctggccatttcggctataaagctagctgagaacggcatccactttgagccgagtgagacgacgcggttcggcgacatcacagtagtgaagaaacggttcctcttcggcaagatatctctacctccattgttccttggccggaggactatgtgctggttggcaaacatggtggcatttgagcggacgaaggcagggagatgcgattgtggcgtgggctcttatatgcatattattgcagggctcatgaatagtgaagaagacgtgcgcgagctgcgcaccaaggggatactatatccggtgtttagcgacaagcaaacgctcaaattttttaagtccattacccagcacgtaccctacggttacgattatatgcgtatacggacaggaatcgatgactaccaccggcaacggaagctggcggtgactctgcacaggttcctgtataataacttcagattcttcctcatggctggatcagttatcgccccttcccgcgttctcccgtggcctcaccacctctccccgccgccctcctctctctcccacgccgccggccaactccagccaccctaccgccacgtcaatgcgccggccgacgtcgccgtctccacctccagcatcgcagcgtcaaggttgccctcggcgtcgcctccccttcggccgaacccgccggcgttcgtcgtcgcctcctcgccggttctcatcgtcgtcctctcatcgctctcggtcgttgtggcgttcgttcctccgtcaagccaatcctgtccgccgcccgcgtttcgtcaagtgtgcagcagccccgtcgtcgtcttcgtcctcggctccacgtcgtcaagcctcgtgccggccacgcctcgccttcgtccaaggatcgccgccgaagtcgttccctcgccgtttgcttccgtcgtccccgagccgcctccgccgcgcccgttcgtcgtcgtcgttcccacgcctcgttgcgtggtgctcctatcgttccggaggttctcaaagcgtgggtcgcggtcatcgctgaaggttcggaaggccgttctctctgagcaaggcaagtcgcatcatccttga

SEQ ID NO: 86417 - DNA, 465 bp, Oryza sativa
  Clone ID: PAT_MRT4530_85460C.1
ccggccggggcctgtgcaagtaaactcagcaccactacccctaccaccaccaccaccaccactactccatctaccatctccagtgcctctctctctagcttcttccttctttcatggcaggaaaggctggggtgatgatgcccatgagcccatccattttgacccatgccatcctggtcctatatacatactccccgtaggctcacactcccaatctctacttgctgctgcttctgcttgcgattgcgagctctctcctctctctctgttttttttttttttttggcttgcaaagcttttgctttgttttaggtgcttcttttccactcctttactgttcccccacttttccttgctttgtcacgcacacgaaaagctcctgcctttaccttatctccgctcgccttccctcacccccgtcgtagtgggatttggtggctgctcgcctctcgcgtttcttttgct

SEQ ID NO: 86418 - DNA, 1044 bp, Oryza sativa
  Clone ID: PAT_MRT4530_85461C.1
atggccgccatgggcgccgccggtttcaacgcgcttcttctgttttccggtcgcgttgcgtcgcggacccggataggggaaagtgttctgctggtggcctctctgctcatgcggcgagctttggtgacgaaaaatcgagctcaggtggcggactccaagctcagtgatctgacccgactgacaccgacgctcctccttcgctgctttagatccgatgttgccgacgacacatgtgacaatggaggatggctttggcacggtggtgactgcttcttcctagcgacggtgaagccggctacgctcgactcgatcgatggcaacatgccacagggtggcctcgacgacgctgaaggtgcagacgtcgcctacgaggagaccgttcgcctggcagaacctcttccagccggatggaagcaggttgcagcagccgtatccgttcttgtttacactacaagccacctcccatgacctgctgctgctgctgctgcttcttcctctcgagctgttgatcattagagtgatggtggtttcttctacgagcccgatcgacttgcagaagatccctggcaaagaaatattgccattttccagcatatagttgctgatctccttctttatccaagaaggtggtccgatctcgtagatagatttggattttttcggccgttttgtttctctgcctttctttctgctaccctttatactgcaaggtatttcctgtaattggtttttacaatcttcgccaaatctactgttcttgttacatttccttgtagaaaaagaaggtgtttcatgttggtttctagcactttgctgaattgtgatgtcgtccttggtcttcaaatctttcttgcatccattgatcccaaacactttgattttgaacactaagttgccttcatgcctcaagagcacaacatcacccggggaaatgccatggaatgacagaaactgtaaccagcctcctttgaaaaacatgcccaattcatccttctcgagctcaatgcgccagaatttgccgagggggcttaaaatgctagccat

SEQ ID NO: 86419 - DNA, 584 bp, Oryza sativa
  unsure (1)..(584): unsure at all n locations
  Clone ID: PAT_MRT4530_85462C.1
tctttaattccacctcgatcagaaactctgtacgtcggggtccttcctcctctgttgctgggctgagtgatggctcaaatagggttgcatctaccaagaagttccggaagaaccgatctctgttgaggactggtaggcgtgaattctcaccttctaacagtgggctagttcatggttttggtcaagaccatggatctaatcccaatcatacaaacaagaggttcagggttagtaacaaggaaacctccaagaagcttaagcacactcaagaagatactgcagataatgacttctcttatgaaagtgatgtaccagcattaggacaaggngatgatcaatacgatgcggctcaacaagcaggaatttcacagatgtattatgaaggtgaagagcctgaaactgaaatgcaatgtgcatcaccctccagaagtgatcctgtagactgcagcaatgatatgagcagcgattctttgagtcccggaaataatgagacggcagatgatgttttgggtggaggctatagtgtagcaattggtgatccatgctctaatgagaaatctgcatatcatgcttatttccccacg

SEQ ID NO: 86420 - DNA, 702 bp, Oryza sativa
  Clone ID: PAT_MRT4530_85463C.1
tcatcggttagcggcagcggcgcacacgtcggtggccggcacgcatggcgcggcgcgaggaagggcgatgggcggcggcgcgggggcgggccggcggtcggcgcgcacgcggcgcaccgggaggtggaggggatgggggagaggcgggcgtcggcggccatggccggaagcgtcggggggaggacgggggacggcggacggaggcgcacgttgggagctggagcggtgtcgggaggaggacggggaggaggagcaagagaggcggaagagggaggaagcagcggcggaggaggaggccgttcccgcgaccaaatccgtcggcgccacacggggggacgaccgtcgtcggatccgcacgggcgacggccaccgcacctccccactaccgtcagatccacacggttgcgcaatccaccttgccgggagaggagaggggagaggaggagtgggggagaagaggagaagaaggccgttcccgctcgtcgggtcagggcggggcagcagctgcggcggcggtggcaactgcggtggaggcggcgcatgaggtcctgtgggcgcacggctacgcatcgacggcggggcggcaactgcggtggacggcggcgcgcggggaaggggcggccgccgtagtgccggcgtgtccgagctccacgccaccgcgacggtatgggcatgaacattatgccgccgtttgttctccat

SEQ ID NO: 86421 - DNA, 233 bp, Oryza sativa
  Clone ID: PAT_MRT4530_85464C.1
taccgtgcggtggtatctgggtattggaattggtagcagtatagtgagtacaggagagaaaaataaagtgcatgcatcatcgtggtgtgacaagttgaaacatcggggtgatacaatctgataatgtcatgcaaatttaaacataatgcctctgtaaggataaatcctagtacattgttgaaattaattatcatcaccgtctactatggttgcatttacaaaaaaaaaaaaaa

SEQ ID NO: 86422 - DNA, 1473 bp, Oryza sativa
  Clone ID: PAT_MRT4530_85465C.1
atggcggcggagctcgttcacctcctccgctatctgttctcggtacccatgctgttcttcatcgtccccctcctcttcctcgtctgttcgccgcggcgccgccgtggccgcggcagctgcaggctcccgccgtcgccgtgggcgctcccggtggtcggtcacctccaccacctggcgggcgcgctccagcaccgcgccatgcgcgacatcgcgcggcgccacggcccgctcgtgctgctccggctcggcaggctccccgtcgtcgtcgcctcctccgcggacgccgcgcgcgaggtcatgaggacgagcgacgtcgccttcgcggcgcgccccgtcaaccggatgatccgggtggtcttcccggagggatccgagggggtcatcttcgcgccctacggcgagacgtggaggcagctccgcaagatctgcaccgccgagcttctcagcgccaggcgcgtccattccttccggtccgtccgcgaggaggaggctggccggatgctccgggcggtggcgtcggcggcggcgcagacgacggtgaacctcagcgagctgatgtcggcctacgccgccgactcgtcggcgcgcgccatgatcgggcggcggctcaaggacagggacacgttcttggcgatggtggagcgcgggatcaagctgttcggcgagcagagcttgccgaacctgtacccgtcatcgcgcctcgccgtgctcctcagcacaatgcctcgccggatgaaacggcaccgcgagagaatgacggcctacctggacgccatcatcgaggagcaccaagagagcagagcgtcccgggaagacgacgaggacttgctcgacgtgcttctcaggatgccagagagaagggacatgttcattgggggcagtgagccaccggccataacactgcaatggattatggctgaactcatcagaaacccagaagtgatgcaaaaggtacaagatgaggttcgacaattgcttgttggacagcacagagtcacagaggaaagcctaagcaaactgggttacatgaacttagtcatcaaggagacgctacggttgcaccctccaggaccacgactactattgcgagtgtgccgaaccacttgccaagtgttaggatttgacgttcctaaaggaacaatggtgctggtaaatatgtgggctataaacagggaccctaaatattggagccaagcagaagagtttattccagagagatttgagaatgctggtattaatttcaaaggaacaaactttgagtatatgccatttggagcagggcgacgcatgtgtcctgggatggcgtttggtctagcaacgttagagctcgcacttgcgagtctcttgtaccattttgactggaagctacccgacggggtagagattgacatgaaggagcaaagtggggtcacaacacggcgagtacacgaccttatgcttgttcctatcatccgagtgccattaccagtgtag

SEQ ID NO: 86423 - DNA, 407 bp, Oryza sativa
  Clone ID: PAT_MRT4530_85466C.1
ttttgtttttttatattaagagactagaatttgaaaaaattaaatggggaaataagtacacattgagggaagatattccatgaacaaatagatagaaaacattctaaattactcttttaagataagtatgcaagaagggcaacttcaccagtgtgggggggggccaaaaacactttctgaaacagagcctgataaggcttctgtgtggtccttaaggcgaaggattgggcttgtaacggagaccgaactggcagggttcagggggaagggaccacgaaccttgaccttgacacagagctggcatccccagagtacaactgattgcctcttcacaggaaacttgacacagaactcgcagaagtacttggagtgctggaaaacctcaatattctgggacgcatggggta

SEQ ID NO: 86424 - DNA, 1560 bp, Oryza sativa
  Clone ID: PAT_MRT4530_85467C.1
atggcggaggttgtacagctccaccacctcatcttgcttctgccgctgttcatcctccccttcctcctcctccgttcgtcgcgccgccggcgtggcgcctgcggccggctaccaccgtcgccatgggcactcccggtgatcggccacctccaccacctagccggggcgctcccgcaccgcgccatgcgcgacattgcgcggcgccacggcccactcgtgctgctccggctcggcgagctccccgtcgtcgtcgcctcctccgcggacgccgcgcgcgacgtcatgaagacgcacgacctcgccttcgcgacgcgccccatcacccgcatgatgcgcctcgtcttccccgagggctccgaggggatcatcttctcgccctacggcgagacgtggaggcagctccgcaagatctgcaccgtcgagctgctcagcgccaggcgcgtcaattccttccggtccgtccgcgaggaggaggtcaaccggctgctccgggcggtggcggcggccgcggcgtcggcaacctcgccggcgaagacggtgaacctcagcgagctgatgtcggcctacgccgccgactcgtctgtgcgcgccatgatcgggaggcggtgcaaggaccgggacaagttcttggcgatgctcgagcgagggatcaagctgttcgtgacgccgagcttgccggacctgtacccgtcgtcgcgcctcgccatggtcgtcagcaggatgcctcgccggatgaggcggcaccgcgaggaggtgttcgcgttcttggacgccattatcgcggagcaccaagaaaacagagcctccggggaagatgaggaggacttgctcgacgtgctcctgaggatccagagagaaggttgcatggagtccactgttatccaccgaatccatcaggacaacaattggaggaagtactcccatgaacacacaaataactcaaaaaaaaggttaccaagcaaattagcaaaaagttaccatggcttttccacaaaatgtagttacctgaaaatttggcttcatggtacacaggacttgttcaatgggggcagtgagacgacagcgacgacgctacaatggattatggctaaactcatgagaaacccaagagttatgcaaaaagcacaagatgaggtccaacgagtattcattggtcagcacaaagtcacagaagaaaacctaagcaatttgagttacatgtacttggtcatcaaagaggcgctccggctgcacccgccaagaccaccactgctgccacgagagtgtcgaactacttgccaagtgctagggttcgatgtgcctaaaggaacaatagtgctcgtgaatatgtgggctataaatagggatcctaagtactgggaccaatcagaagagtttatactagagagatttgagcatgttgatatcaatttcaaagggatgaactttgagtatatgccgtttggagcgggacgacggatgtgccctgggatggcatttggtctagtgaatttagagctcgtactagcgagtctcttatatcactttgactggaagttatctgacaaaataagtcggtga

SEQ ID NO: 86425 - DNA, 978 bp, Oryza sativa
  Clone ID: PAT_MRT4530_85468C.1
atggcggaggttgtacagctccaccacctcatcttgcttctgccgctgttcatcctccccttcctcctcctccgttcgtcgcgccgccggcgtggcgcctgcggccggctaccaccgtcgccatgggcactcccggtgatcggccacctccaccacctagccggggcgctcccgcaccgcgccatgcgcgacattgcgcggcgccacggcccactcgtgctgctccggctcggcgagctccccgtcgtcgtcgcctcctccgcggacgccgcgcgcgacgtcatgaagacgcacgacgtcgccttcgcggcgcgccccgtcaaccggatgatccgggtcgtcttcccggagggatccgagggggtcatcttcgcgccctacggcgagacgtggaggcagctccgcaagatctgcaccgccgagcttctcagcgccaggcgcgtccattccttccggtccgtccgcgagaaggaggctggccggatgctccgggcggtggcgtcggcggcggcgcagacgacggtgaacctcagcgagctgatgtcggcctacgccgccgactcgtcggcgcgcgccatgatcgggcgggggctcaaggacagggacacgttcttggcgatggtggagcgcgggatcaagctgttcggcgagcagagcttgccgaacctgtacccgtcatcgcgcctcgccgtgctcctcagcacaatgcctcgccggatgaaacggcaccgcgagagaatgacggcctacctggacgccatcatcgaggagcaccaagagagcagagcgtcccgggaagacgacgaggacttgctcgacgtgcttctcaggatccagagagaaggtgacctggaggtatccagagaaagcatcagatcaacgatcggagacatgttcattgggggcagtgagccaccggccataacactgcaatggattatggctgaactcatcagaaacccagaagtgatgcaaaag

SEQ ID NO: 86426 - DNA, 278 bp, Oryza sativa
  Clone ID: PAT_MRT4530_85469C.1
gcgttttcgagcccgacccgcctgggcttcgccggcaacaaagtgactcataactaggcaaaaatgcatcggcaggagaatgtttacatgggcaagctggtccagcaggttgaagggcatgaggtgatggccgtgaacatggagatggttgcatagactgtacattaagaagagctcactgcagtggaatgcaacctctcctctgttgcttagaagaatgtgattggggcccaccacgcctccagagatgtcgatttattcagtgcacactatgagga

SEQ ID NO: 86427 - DNA, 223 bp, Oryza sativa
  Clone ID: PAT_MRT4530_8546C.1
acgctcttaccacttttggttcctgaaattgagtcatggctggggggctagctcgcctccacaggctcctccaacacctccgtgccaccacctttggttatcccaacaaggtgattgcgcccctctcttggagtgatgttaaccaggaaaagggaatgctccatcatcaccagctgcttgcggagctcgatgccttgatcgaagctgacaaagagaaatatgc

SEQ ID NO: 86428 - DNA, 1515 bp, Oryza sativa
  Clone ID: PAT_MRT4530_85470C.1
atggcggcggagctcgttcacctcctccgctatctgttctcggtacccatgctgttcttcatcgtccccctcctcttcctcgtctgttcgccgcggcgccgccgtggccgcggcagctgcaggctcccgccgtcgccgtgggcgctcccggtggtcggtcacctccaccacctggcgggcgcgctccagcaccgcgccatgcgcgacatcgcgcggcgccacggcccgctcgtgctgctccggctcggcaggctccccgtcgtcgtcgcctcctccgcggacgccgcgcgcgaggtcatgaggacgagcgacgtcgccttcgcggcgcgccccgtcaaccggatgatccgggtggtcttcccggagggatccgagggggtcatcttcgcgccctacggcgagacgtggaggcagctccgcaagatctgcaccgccgagcttctcagcgccaggcgcgtccattccttccggtccgtccgcgaggaggaggctggccggatgctccgggcggtggcgtcggcggcggcgcagacgacggtgaacctcagcgagctgatgtcggcctacgccgccgactcgtcggcgcgcgccatgatcgggcggcggctcaaggacagggacacgttcttggcgatggtggagcgcgggatcaagctgttcggcgagcagagcttgccgaacctgtacccgtcatcgcgcctcgccgtgctcctcagcacaatgcctcgccggatgaaacggcaccgcgagagaatgacggcctacctggacgccatcatcgaggagcaccaagagagcagagcgtcccgggaagacgacgaggacttgctcgacgtgcttctcaggatccagagagaaggtgacctggaggtatccagagaaagcatcagatcaacgatcggagacatgttcattgggggcagtgagccaccggccataacactgcaatggattatggctgaactcatcagaaacccagaagtgatgcaaaaggtacaagatgaggttcgacaattgcttgttggacagcacagagtcacagaggaaagcctaagcaaactgggttacatgaacttagtcatcaaggagacgctacggttgcaccctccaggaccacgactactattgcgagtgtgccgaaccacttgccaagtgttaggatttgacgttcctaaaggaacaatggtgctggtaaatatgtgggctataaacagggaccctaaatattggagccaagcagaagagtttattccagagagatttgagaatgctggtattaatttcaaaggaacaaactttgagtatatgccatttggagcagggcgacgcatgtgtcctgggatggcgtttggtctagcaacgttagagctcgcacttgcgagtctcttgtaccattttgactggaagctacccgacggggtagagattgacatgaaggagcaaagtggggtcacaacacggcgagtacacgaccttatgcttgttcctatcatccgagtgccattaccagtgtag

SEQ ID NO: 86429 - DNA, 1453 bp, Oryza sativa
  Clone ID: PAT_MRT4530_85471C.1
atgaagggcttccgcgcggcgctggcccgcgcgtcggcgaggtcgcgggcggagctgcaggtagcgcggcggcggcgccacccgtcggatcccgcccgccgcctgtcccactccgggacggcgccggcgaggccgtcgttcggcatcgccttcgacatcgacggtgtcatcctgcgtggccgcagccctatcggaggctcgccgcaggctatccgccggctctactccgaagatggtaccctgaagattccgtttctgtttttaacaaatggtggtggtgttccggagcacaaaagagcacaagagctaagtgagcttttaggagttaatatctctccagcacaggttgtgcatggttcttctccttataaagagctggtgaaccgctttgaaaatgaccttattatcgctgttggaaaaggagagcctgcagcagtgatggttgactatggatttagaaaagttctatctatagatgagtattcatcatattttggagacattgaccccttagctcctttcaagaaatggatagtgcaacaaccagacaatataaacttgatgtcagaaaaagtgcacccatcatatgatgtttttgaagagagagttaaaggagtttttgttgtaagtgaccctgtcgattggggaagagacctacaggtactttgtgacatcttatcaactggtggacttcctggaagtggaagaggagatcaaccacctttgtattttgcatctgatgatcttgaatatcaggcagcatttccttctgaacgtcttggaatgggtgctttcaggatagcactggaaagcatcttcaatcaagttaatgatcatcggctgaagtacatatcatatgggaagcctaacccatttgtgttcaagaatgcggcaaacatacttgaaaaacttgctatttgcatgcatccaagttcactgccaacaaaagaagtagaagaacatcggttctctactatctacatggttggggataatcctaaagttgatataaatggagctttgaaggctggacccccttggtcacctgttcttacaaggactggcgtatttaggggaaaggataatgatccacagtatcctgctgatttggttgttgatactgttgaggatgccattaactgtattttggaaaaggaatgtatacagtgacagagtgacacttgttctgagtatccatgctcccttcattgttatttggcatgcattttgtgccacaccattgttttgtctagcaattctggagcaattgttagccggagttccatctctgattcattccacttgtttaagttgggacatcagaaaatatgctgatgcgctatagtattttttttttcctggctgagagataggccggacattatatatgtagaatcgtcagggtttcagggcagcagagctgcagcagagctaaaagtgaatttcaccctgt

SEQ ID NO: 86430 - DNA, 4531 bp, Oryza sativa
  Clone ID: PAT_MRT4530_85472C.1
accagactgagaagtggcggagataagcccacgggggtcgctggggagtccatgccttactcagcaagaaaccaaaacaacaaccaccacaactcgcagcttccaccacctcccactcggaattcgggagcgagtggtagccgtccaaccggcgcgatggatcccactttggctcagattctcgcggcgcagagtcagctcttcgaccgcttggtcgcgactcaggaggccttgggcaatgctctcctccagaacaaccgtcagccacagtctaagctggcggaagtgcagcgtacacagccacctgtgttctctgctgctgctgatcctctcgacgcggatgactggctccgcgatatcgagaacaagcttaacttcgtccgttgtgacgatgaggagaaggcgacctacgccgcctactaccttcagggcgctgcagctgcctggtgggagacttacaagtctacactcccccagggcaccgccatcacctggaacgtgttcaagcagggcttccgcactgctcacgtcccagaagggcttatgaaggccaagaggaaggagttcctcaatctcacccagggggacttgcctttcatggagttccttagtcgcttcaactaccttgcacggtatgcgactgatgagctaggcactactgaggcgaggaaggtgcaactttgccttgatcgccttagccctgagttgaagcacggtctctctacccatgagatcgacagtatgaagacccttgttgacaaggccctccgctgggaggcaagtgagaaggaagtagctgtggaccgcaagcgcaagttcttggcgcgcagggctactgtcagccgttcgagtcgcccacgcacttggcagcctgctccagctgcacgtcctgcttctgctccaccgcagaggctccagtacgcccccggaggctacaaccgtgctgcaaatgttaactgcttcaactgcgggaagttgggacactactccaacaactgtccttacccgcgtcgcaccggtgctcctccgccgcgccccgcagcaccgcagccccgtcctccacagggccgtggcgcccctgctgctgctccacgtgggggccgagccgctcccaagccggctcagaactttgggcgcggtcgtctcaaccacgcgaccgcagaggaggctgttgacgcacccgatgtggtgctaggtacctttcttgttcactcagttcctgtttggtgttatttgattctggtgcatctcattcctttatatccaccaaagtagcaaaacaaaacaacatagccaccacccttttagacacccccatgataatccaatctcctgggtcaaccttcaaaaccagaacaatatgcaaggatgtgcctattctcattgataaggtagagttcaaagccgacctaatccaagtgagttccttaagtttagatgtcatcctaggcatggattggctttccaaacacaaggggaatatcaactgtgcttctaaaaccatctcttttgtcaacaccaatgggaaaacagccaccttcacttccaataaagccaccacctcaaaacagccatgtatcaactctctcatcaaacctgagcttgaatcaatacccgtggtgtgtgaatatcctgatgtcttccctgatgagctaccaggaatgccacccgatcgtgacattgagttcgtgattgatcttgttcctggtgcgacgcctgtcgctaagcaaccctaccgtatgaccagtgatgaattggttgagctcaagaagcaaattgatgagcaactggagaagggtttcattcgacacagcagctctccttggggctgtcccgttctttttgctccaaaaagtgatggtacgcttcggctgtgtgttgactaccgtccactaaatgaggtgacaatcaagaacaagtatccactcccccgcatcgatgatctctttgaccaaatgaccggtgcgcaagtattctccaagattgatttgaggtctggatattttcaactcaagatcagaccggaggatattccgaaaacagctttcagaacccgctatggtttgtttgaatacaccgtagtttctttcggcttaaccaatgctcctgccacttttatgaacttgatgaacaaggttttcatggagtacttggacaaatttgtggtggtgttcattgatgacatcctcgttttctcgaagaatgaggaagaacacgcacaacatctaaggctagtgcttgacaaacttcgtgagcatcaactctatgcaaaattcaacaaatgcgagttttggatgaatgaagtggcctttctcggtcatgtgatatccgggggtggtatcgcagttgatccaagcaaagtggaaagtgtgcttaactgggaacagcccaagaccgtgacagaggttcgagcttttcttggcttagccggttattaccgccggttcattgggaatttctctaagattgctagaccgctgacccaacttctcaagaaggagaacaagtttgtatggtcagaggtatgcgaggcaagtttccaagagttaaagaaaaggctcacaacggccccagtgcttataatgcccgatatccacaagaatttcgatgtctattgtgacgcatctcaaaatggcctcgggtgtgtattgatgcaagaaagaaaggttgtggcctatgcttcacgtcagctgcgccctcatgaactcaattatccgacccatgacttggaattggcagccgtggttcatgccttgaagatctggcgccactaccttatcggtaaaagatgcgaaatctataccgaccacaaaagtttgaagtatttcttcacccaaccagatctgaacctaaggcaaagaagatggttggaactcatcaaagactacgatctcggcatccattaccatcccggtaaagccaatgttgtagccgatgcactcagctggaaacttaaccacatttctgcttctgaacttgtcacacaaccagagttgttactggaatttcagaagctcaatcttggtgtggttgaagaaggttttgttactgccctagcacttcaaccgaccctcctttctcagataaaagaggctcaactcactaaccaggaggtagctgaaattaaaaaggaaatggcaagtggcaagccaactatcttttccttggatgatgatggtgttgttgttcatgggaagcaattgtttgtccccgacactcaacatcttcgggagcttattcttacagaggcacacgagtctcccatgtccatccatccaggttgcactaagatgtaccaagatatccgctctctttattggtggcctaccatgagacgtgatattgctgcatatgttgctatttgtgatgtgtgtcagcgtgtcaaggctgagcaccagcgtcctgcaggtttgcttcaacccttgcaaattcctgagtggaagttcaatgaagttggaatggatttcataacaggtcttcccaagacttctaatggacatgattccatatgggtcatcgttgaccgcttgaccaaggttgcccatttcattccggtgaatgtctcctacaatggtgcaaagctggcaaagctctatttgactcacatcgttcgcttgcatggggtaccgaaggccattgtatcagaccgtggtccccagttcacttcccggttttgggagaatcttcatgagctccttggtactcaattgttctttagcacagcttttcacccacagactggaggtcagactgagcgcaccaatcagatcttggaagatatgctcagatcttgtgtcctcagttacaacaccaattgggagaaatgtctgtcctttgccgaattctcatacaacaacagttaccaagctagcctccaaatgtcaccctttgaggctttgtatggaagaaagtgtagaaccccactcttctggtcagaggtgggagaaagacaactctttggtcctgccgttatcaaggaagccgagcaaaacgtcgctctcatcagaaaccggctaaaggaggcacagtcacgccaaaagagctattccgaccgtcgccgtcgcgaattaagctttgaggttggtgactatgtctatctaaaggtctcgccgttgcggggcactcgccgatttcaagtgcatggaaaattggcgcctcgatacattggtccatatcgagttcttgccaagaggggtcaagttgcttacaagttgcagctgccatctcaactctcagatgtgcacgatgtgttccatgtttcgcaactcaagaagtgccttcgagttcctacggagctcactccgctagaagacatcaatatccaacccgacctctcctaccaagagtatccaatccgcattctagaggaagccgagcgacacatgcgaagccgctccatcaagatgctcaaaatccagtggagcaaccacactcccgaagaagcaacatgggaaagggaagaccgccttagagccgattttcctagtttcttctcctagatcctatcaaatctcggggtcgagattttgtt

SEQ ID NO: 86431 - DNA, 8628 bp, Oryza sativa
  Clone ID: PAT_MRT4530_85473C.1
atgaacatcgtgaagggcgtcgccgatctcctccgcaagtcggcggcggcctcgtcgggggttggcggcggcggcggcggggttgtaggggtcgacgacggcgtcgtcgacggcggcgccggcgccggtggctcctcctcctccgctccagacaggctccccgccgcgccgtcccccagggtccgcttcagtgatagtggtgttgaaggagtcttaaacatgctttggcagaaatatgagaatgccattgacaaggctgaaaagaaggaatccttgcaaatatttatcatgcatttcgtacaagcattcaaagagtgggaaccgcaatacacggagcaatcagttgatcaagaaccaatatcagatgatacggttttaggatgctccagagggcatccttctgagatcatccttattcttgtgcaggaggtttctcaaataacttctttcattactgagatgcataactgtagagtatttagttattatggaggtgtgcagaaggtcactgctcttctgaaagctgcagttgtaaagctcaagactttgaccagtttgcttgccgcagatgaacagctgtcaaacaaagccatagataacatgaagatgatgcaaaagatacttgtacacattgttacaataatttcaaacttcatgaacttggagccaactgctactaggttaacgcaatttgtcaatactactgggaaaaccctatcaaatgagtttttggccacagttactccaatatctgcaaaaagcgctgttcatgataccaactggcagcaaaaggccattgttgcagttatggaagctggaggcgtcaattggttagtagaactcttaagggtcatccgaagattgaatttgaaagagcagtggactgacgtgctacttcactttataactttgcatgctctgagatcaacaatctctcaacatgcacgtgcacagaatcatttcagaagcattggaggactggaggttctattagatggactgggattaccatcaagcaaattgtcagtctcaaagtattcttttgtccccagtgatgaaagttttggtaatgtcaacaatttacagttcttatgtgaaaatggacggatacataagtttgcaaacagcatctgttggcctgcatttatgcttcaggggtttcatcaacaaaaggcacttgactctcgagtgcagaactgtaagcttgaagaaagcactgggatatcgcttacatcagaatcttttgcaagtcctattgatattcttgatacaactgaatggactgagtattctgtaaagctgagcatagcactttgttcttttcttcttcctcctaacgagataaggaactcttctggtgcagttgatagccaagtttctctgtccatctcagtggcatactgtgagcaatgtgcaagatggattataaaggttctttcaacagtttttccatgcatcaaagcttgtgctagtgaatctgaattgcccaaccatataaggattttggcaaataccctacagcattatattctttgcacattcaggaaggttctcatttcagtaccagctctgctcaaatcttttcgcgctgagggtttatggagtctgatattttcagataaatttttttactttggatcatctatggagtatattcatcatattgtttgtgacacacaaaacaatcattttattgatgctactgaatcagctggttctaaaggccttaatcaagctgatgtcaacattcttcaagcagaagctatttccttcttggagtttgccgcaacaataaatgagaacacaaacaatctgccagagtgctcagcgttattagatgtgcttgaacgttgcacttatgatcctggattagctggaactattcttaagagttttcatgttatcctgcaacttgccactgaacagactatatcctcctttaaatcattggacgcgcttaccagagtcctgaaggttgcatgtcttcaagcacaacatctaaggaagctttcccatcccggagatggcttaagtggaaatgtttttcaatcagaaaatgttcagatgtcttcttcagatgagaagattaaaagtactattgcatgtgtggaattggctttcaatcttttcaaggaatacaccacaatatctgagcttggaaagattctagttttacataatgccaattgtattgagtgtttatttgatttattccaagaagaaaacctccgaaaaaatgtattggagcaagttcttgacttatttaggttaccttcagcatcagcacaagatcatacagcaaagttgcagctatgttcaaaatatttggaggctttcactcgtgcaaaagaaaaggaggacttcgcagaattgtctattgatctattagttaacatgagagagatcattatgatagatcgcatgtattatcaaaatctgttccgcaatggggagtgcttcctgcatattgtatccttactgaatgggacttttgatgaagcagttggtgaacaattagtccttaatgtccttcagacgttgactgtattacttgctgaaaatgatgtgtcaaagaatgaagatgtgatcatactatttttaaatgttttacaaaagagcagcactgcactccagcattatgggcttgtggtcctacaacagttgctcaagggatccattacaaatagaagttcttgtttcaaagcaggatttcttagttttcttcttgattggttttcagtagaggaaactgatgatactgtcataaaaattgccgagttgattcagattattggtgggcacagtatttgcgggaaagatatacgaaaaatgtttgccctcctgcgtgatgagaagattggtgtcaagcagaagcgtaattcattgcttttgacaagtcttagtcacatgctcaaggaaaagggacctgaagctttctttgaatttagtggtcatgactctggcattgaaataaaatcacctgttcaatggccttacaataagggcttatccttttgctgctggttaagggtggaaagtttccttgagaatagcatgatggggcttttctcctttttcacggaaagtggaaaaggatgtttggctatgcttgggaaagatgctctaatatttgagtctatcagtcaaaaacatcagtgtgttttgtcgcctctaagcctcccaacaaagcaatggatattcctttctgttactcattcagtagggagagcattctctactggaagccagctgagatgctatgttgatggtggccagatatctaatcaaaaatgcaggtgggcaaaagttaatgaagtaatgactcgctgcagtattggcacagatttgatgcccattggtgaagaacctacttcccttggttttgagagcacttctgcctttgttggtcaaatgggcccagtctatgcattttctgatgctctttcttcggaacaaataaaaggcatatataatctaggaccaagttacatgtactctttccttggtgatcaaaacttgcttatgaacgttgacactctgtacaagggtattctggatggaaaggatggcatttcatccaagatgatttttggcttgaatgcacaggctagtaacaatagaactttgttcaatgtatctgctgcacttgatggtcttgacaagagtaagtttgaggcaactatcatgggtgggacaaagttatgctcccggcgcttgctgcaggaaataatttattgtgttggtggtgtctctgtatttttccctcttctgatccactttgacgatgctgtaattcatagtagagaacctgccattggtgatgaattggcaggtcaagttgttgagcttgttgcatctgttttggatggaaatgtagcaaatcagcaacaaatgcatcttctttctggattctctatattagggttcttgtttcaatctgtttcaccacagctgctaaattttaagactctttcgtcgttgaagtacatgcttaatgttttgaagaactgtggtatgtcagacgttctattgaaagatgctctttcacaaatttatctgaacccacatatttgggcgtatgcaagctatgaagtgcagagagaactttatttgcttctaatacaatattttgaatgcgatgggaaatgtttgccaatgttgtgtgggctcccaaggatcattgacattgtactccagttttattcagaaaagactgatttaaggtcttctaagacttctctgcatcctgttaccaaaaaagtgattgcagagaggccaaacatagaagaaattcgcaagatccgtctgctcctattgagtctggcagaaatgagtataaagctaaaggtttctcaacatgatataacgacacttgtgtcctttttcgagagaagtcaagatgttgcatgtattgaagatgtacttcacatgattattcgtgctctatcacataattcactcctatcatctttcttggagaaagtgaatccccttggtggctgttacatcttcattaatcttcttaagagggagttcgagccaattcgcctcttgggacttcagtttcttggagaacttctggttggagttccttctgagaaaaaaggaccaaaattttttggccttcctgtaggacggcctagatctatttctgaaaatctaaggaaaggcatgacagcagcacctcaactgttcttctattcaatatctgaaagacttttcaaatttccactttcggatcatttacgtgctactctctttgatgtccttcttggtggggccagtcctaagcaggtcttacagaaacgttcccaatctgaagtgtcaaaagatagtgccatctcttcagcgagcttgtctccatttgctgttcctcagattttggtctgtatatttaaatatatgcaatcttgtcaagacacgttagcacggactaagatcttgagtgatcttcttgatttgctggattcaaacccttctaatgttgaagcccttgtggagtacggttggagctcttggcttgagacatctgtgaaacttgatgtatttagggactacaaatcaagttcagaagctgaggataatacttatgaaaccaatgagttaatccttgtgaggaacatgtattcattggtcctcacctactgcttgtgctctatgaaaggtggctggcatcagctggaagatacaacaaatttccttctcttgaaaatcgagcagtttccttcacctggcttatctgcacaatcttcatctgatgactctctaatagaggacattaacacctctgttgttgaaatactaaatgctgagggtagcggccaacttacaagctttccttggagtaatagtacatatactgatggagataaactgagtgatgattggtggagcttttacgacaagatatggactcttatttgcaatttgaatggcagaggacaaaatagattgactccaaagggttcaaatgctgctgtcccatctattggacaacgggcacgtgggctggtagaatcactgaatatcccggccgcggagatggctgctgtagtggtaactggaggaattggttctgcactaagtggaaaggcgaacaagaatgctgacaaagctatgatgttaagaggcgagagattcccaagaatcatcttccatcttataattttgtatctgtgcaaagctggcttggaaaacttatccaagtctttacttagggggagatcccagtatggggggcttgatgatggtgcccgttctcatattatgtcgccattgatttttgaaattctcgtacaagggaagtctctgcttgccactaatatgttggcaagagatgattccactgaagtaaatagcaataaggattctggttatgttcttaaggattctggttatgttcttaattttgttcagaaggaccgggttcttgctgcggctgctgatgaggtcaaatacatgaaggatgcaaaggctgatcgcctgaggcagctccaggaacttcattccaaaattgatgagagcttaattgaagatatagaacaactgcaaagctttgaggatgacatacagtttgctaagtctgctgccatttctgtggacgacagtagaaaagcagctctccagcttgcatttgatgaggatcagcaaataattgcagacaaatggatacatatttttcgtgctttgagtgaggaaagaggaccatggtctgctaacccatttccaaatagtactgtgacgtactggaaacttgacaagacagaagataaatggcggcgacgactgaaactcaagcgtaactataagtttgatgaacgcctttgtcagccaccatccaaatttagtaatgaaagcaatgcctcgtctgtcaacccctctgttagtgccaaaattccagaaaaaatgaagcacttacttctgaaaggagttcgtggaattacaggggatgttagttctgaaccttgcgaggataacaatgacatgagtgagccttcccagaataccctgtctgagacccagggctcaagtgatgctgcagattcttcaggttattctactagtgttcaaaataggaaagaaccagtgtctactggtggagatgacgactatgctgcaattctgtcatcagttcaatgtgttcttgtaaccccaaagagaaaactcgctggacaattgactattacacaaaaagccctgcatttttcttttgaatttttggttgagggcactggaggaacatctgttttcaacagatatcaagaaaaagattctgaccccaagaacgacctggggggtgcagaaaaactgaagggtagtcttgacggaggacgaggcaatgcaactgaatctggtgatgctctgatgaaaaatacatcaaacaacatcaaacaccatagaaggtggaaaataagcaggataaaagcagttcattggacacggtacctactacaatatactgcaacggagatattctttgatgatgccaatgcacttgtgtttcttaatttttcctcccaaaatgatgctaaaaacattgggtctctcttagtgtccctgagaaatgatgctttgttccccaaaggaagtactaaagacaaaaacagtgttatttcttttgttgacagaaaggttgcccttgaaatggctgagagtgctagggaaagttggagaagaagagaaatgagcaattttgagtatctaatgattctcaacactcttgctggacgatcttacaatgacttaactcaatatcctatattcccttggatattgtctgactattcgtcagagaaaattgatttcaacaagtcatccagtttccgtgacctgtcaaaacccgttggtgccttggatgccaaacgctttaaggtttttgaagaaagatatcttaatttctgtgatcctgatataccaagtttttattatggatctcactactctagcatgggaatcgttctttattaccttcttaggcttgagccttttactgctctgcaccgcaatctgcagggtggaaagtttgatcacgcagatcgtctttttcagagcattgaaagtacatataggaactgcttatcaaatacaagtgatgtcaaagagcttatacctgagttcttttatatgcccgagtttcttgaaaattcaaattcctatcaccttggtgtaaagcaggatggtgaacctttaggcaatgttggtctccctccatgggcaaagggttgtccagaagaattcattcatatcaaccgcgaagctcttgaaagtgaatatgtaagctctaatctccatcactggattgacctcatatttggttataaacagcgcggcaagcctgctgttgagaatagttttcagatcatttcccttggtgatggaagaattgtgcagagcgtccggcagcataaagatgttgtcagctgtgtggcagtttcatcagatggaagtgtaattgcaaccggaagttatgacacaactgttatgatctggcatgcattccgaggaaaatcagctgataaaaaatcaagaaatgcaaattatgatctgtctactaaggatcatgttattatcgaaagcccttatcatattttatgtggccatgatgatattatcacatgcttatttgttagtacggaactagatatcgttatcagtggatcaaaagatggaacatgtatatttcatacattgcgtgagggaaaatatgttcgatccattcgacatccatcaggagctggcttgtcgaaactggtagcatcgcagcatggcagactagtattttactccgacagtgacctatccttgcatatgtattccataaatggaaaacatattgcttcttcggaagccaatggccgtctcaattgcatggaactaagttgttgtggtgagtttgtggtatgtgctggtgatcatggacaaattgttcttcgctctatgcattctcttgatgttgtatggaggtatgagggagctgggaagactataacttcactagttgtgactccagaggagtgcttcttggcaggaaccaaggatggcagtttgattgtattttcaatagaaaaccctttaattcgaaaaggcactgttcagcggaacaagataaaatcttctgtgggtggttag

SEQ ID NO: 86432 - DNA, 1290 bp, Oryza sativa
  Clone ID: PAT_MRT4530_85474C.1
atgaggatcaacctggggaacaaggtggaggcgtggtgcggggacccgtcgatgggcgggtggcgcctcggcgtggtggtgtgggggaacggccaccagtacaacatccggtgggacggcggcgacgtcgtctccggccgcatacggcgggtctcggtgcgcccgccgccgccgcacctcgagatccccaccgacctcgaggccggcgacctggtggaggcgctcgacgaccgcatgtggaagctggccgagctcgtgcgcgccggcgacggcgacggcgagggcgagttcaccgtcaagatcgtcggctcgcccagcgccatcacggtgcccccgagcatggtccgcgtccgccaggtgctgactgacggcgacatctgggtcgccacctacaagggcgaggagatcccgggcgccagggagccgacggcgcgccccaacgccgccgcaaaccgccgcgcccccgccgccgccgcgaagcaccgccccgccgccgatcagttcgccccgccgccggccccctcccaccaatgggccaagatcaagaggagccgccacgcgacggaccacgacgccgccggcgaggtccggagggtcgaggccaactcgaagcggatccgcgccatggaagaagaggagggggagctgctcgtaggatacggcaacgtggaggtggtgcgcgcgaacgaaccaccacccaccgccgtgttcgtcaacaagcagcaggagatgagcgacgaggagaccgacgacgacgccaagtccgtctcgtcggccggcagcggcagcagcagcaacagcgagagcagcagcgacggcagcagcagcgagagcgacaacggcgaccgcgccgcgccgaggagcccaccgggggacgcccaagtggcggcgaaccagccgccgccgccgccattgcagccgcaatgccaaccacacatcaaagaagagcgcgccgacgacgacgacgtcaggacgaagtcgcgcgccgccaccgcaatgaagccgcgaccggccgttgcgccaataatgcagcggcgcctggccaacgagcaacctccgccgccgctggcggcggcggcggcggcggtaggcgagcaaatccaccgcctggaggtggacgcgtacggcgcgctgatgagggtgttccacgccaccggcgcgctgacgtgggagaaggaggagctgctgacgcagctccggctgcagctccacgtgtccagcgatgagcacctgcagctgatacgggccctcaacggtggcaggaggcggcttccaaagcctgagaattaa

SEQ ID NO: 86433 - DNA, 9028 bp, Oryza sativa
  Clone ID: PAT_MRT4530_85475C.1
tgatagtggtgttgaaggagtcttaaacatgctttggcagaaatatgagaatgccattgacaaggctgaaaagaaggaatccttgcaaatatttatcatgcatttcgtacaagcattcaaagagtgggaaccgcaatacacggagcaatcagttgatcaagaaccaatatcagatgatacggttttaggatgctccagagggcatccttctgagatcatccttattcttgtgcaggaggtttctcaaataacttctttcattactgagatgcataactgtagagtatttagttattatggaggtgtgcagaaggtcactgctcttctgaaagctgcagttgtaaagctcaagactttgaccagtttgcttgccgcagatgaacagctgtcaaacaaagccatagataacatgaagatgatgcaaaagatacttgtacacattgttacaataatttcaaacttcatgaacttggagccaactgctactaggttaacgcaatttgtcaatactactgggaaaaccctatcaaatgagtttttggccacagttactccaatatctgcaaaaagcgctgttcatgataccaactggcagcaaaaggccattgttgcagttatggaagctggaggcgtcaattggttagtagaactcttaagggtcatccgaagattgaatttgaaagagcagtggactgacgtgctacttcactttataactttgcatgctctgagatcaacaatctctcaacatgcacgtgcacagaatcatttcagaagcattggaggactggaggttctattagatggactgggattaccatcaagcaaattgtcagtctcaaagtattcttttgtccccagtgatgaaagttttggtaatgtcaacaatttacagttcttatgtgaaaatggacggatacataagtttgcaaacagcatctgttggcctgcatttatgcttcaggggtttcatcaacaaaaggcacttgactctcgagtgcagaactgtaagcttgaagaaagcactgggatatcgcttacatcagaatcttttgcaagtcctattgatattcttgatacaactgaatggactgagtattctgtaaagctgagcatagcactttgttcttttcttcttcctcctaacgagataaggaactcttctggtgcagttgatagccaagtttctctgtccatctcagtggcatactgtgagcaatgtgcaagatggattataaaggttctttcaacagtttttccatgcatcaaagcttgtgctagtgaatctgaattgcccaaccatataaggattttggcaaataccctacagcattatattctttgcacattcaggaaggttctcatttcagtaccagctctgctcaaatcttttcgcgctgagggtttatggagtctgatattttcagataaatttttttactttggatcatctatggagtatattcatcatattgtttgtgacacacaaaacaatcattttattgatgctactgaatcagctggttctaaaggccttaatcaagctgatgtcaacattcttcaagcagaagctatttccttcttggagtttgccgcaacaataaatgagaacacaaacaatctgccagagtgctcagcgttattagatgtgcttgaacgttgcacttatgatcctggattagctggaactattcttaagagttttcatgttatcctgcaacttgccactgaacagactatatcctcctttaaatcattggacgcgcttaccagagtcctgaaggttgcatgtcttcaagcacaacatctaaggaagctttcccatcccggagatggcttaagtggaaatgtttttcaatcagaaaatgttcagatgtcttcttcagatgagaagattaaaagtactattgcatgtgtggaattggctttcaatcttttcaaggaatacaccacaatatctgagcttggaaagattctagttttacataatgccaattgtattgagtgtttatttgatttattccaagaagaaaacctccgaaaaaatgtattggagcaagttcttgacttatttaggttaccttcagcatcagcacaagatcatacagcaaagttgcagctatgttcaaaatatttggaggctttcactcgtgcaaaagaaaaggaggacttcgcagaattgtctattgatctattagttaacatgagagagatcattatgatagatcgcatgtattatcaaaatctgttccgcaatggggagtgcttcctgcatattgtatccttactgaatgggacttttgatgaagcagttggtgaacaattagtccttaatgtccttcagacgttgactgtattacttgctgaaaatgatgtgtcaaagaatgaagatgtgatcatactatttttaaatgttttacaaaagagcagcactgcactccagcattatgggcttgtggtcctacaacagttgctcaagggatccattacaaatagaagttcttgtttcaaagcaggatttcttagttttcttcttgattggttttcagtagaggaaactgatgatactgtcataaaaattgccgagttgattcagattattggtgggcacagtatttgcgggaaagatatacgaaaaatgtttgccctcctgcgtgatgagaagattggtgtcaagcagaagcgtaattcattgcttttgacaagtcttagtcacatgctcaaggaaaagggacctgaagctttctttgaatttagtggtcatgactctggcattgaaataaaatcacctgttcaatggccttacaataagggcttatccttttgctgctggttaagggtggaaagtttccttgagaatagcatgatggggcttttctcctttttcacggaaagtggaaaaggatgtttggctatgcttgggaaagatgctctaatatttgagtctatcagtcaaaaacatcagtgtgttttgtcgcctctaagcctcccaacaaagcaatggatattcctttctgttactcattcagtagggagagcattctctactggaagccagctgagatgctatgttgatggtggccagatatctaatcaaaaatgcaggtgggcaaaagttaatgaagtaatgactcgctgcagtattggcacagatttgatgcccattggtgaagaacctacttcccttggttttgagagcacttctgcctttgttggtcaaatgggcccagtctatgcattttctgatgctctttcttcggaacaaataaaaggcatatataatctaggaccaagttacatgtactctttccttggtgatcaaaacttgcttatgaacgttgacactctgtacaagggtattctggatggaaaggatggcatttcatccaagatgatttttggcttgaatgcacaggctagtaacaatagaactttgttcaatgtatctgctgcacttgatggtcttgacaagagtaagtttgaggcaactatcatgggtgggacaaagttatgctcccggcgcttgctgcaggaaataatttattgtgttggtggtgtctctgtatttttccctcttctgatccactttgacgatgctgtaattcatagtagagaacctgccattggtgatgaattggcaggtcaagttgttgagcttgttgcatctgttttggatggaaatgtagcaaatcagcaacaaatgcatcttctttctggattctctatattagggttcttgtttcaatctgtttcaccacagctgctaaattttaagactctttcgtcgttgaagtacatgcttaatgttttgaagaactgtggtatgtcagacgttctattgaaagatgctctttcacaaatttatctgaacccacatatttgggcgtatgcaagctatgaagtgcagagagaactttatttgcttctaatacaatattttgaatgcgatgggaaatgtttgccaatgttgtgtgggctcccaaggatcattgacattgtactccagttttattcagaaaagactgatttaaggtcttctaagacttctctgcatcctgttaccaaaaaagtgattgcagagaggccaaacatagaagaaattcgcaagatccgtctgctcctattgagtctggcagaaatgagtataaagctaaaggtttctcaacatgatataacgacacttgtgtcctttttcgagagaagtcaagatgttgcatgtattgaagatgtacttcacatgattattcgtgctctatcacataattcactcctatcatctttcttggagaaagtgaatccccttggtggctgttacatcttcattaatcttcttaagagggagttcgagccaattcgcctcttgggacttcagtttcttggagaacttctggttggagttccttctgagaaaaaaggaccaaaattttttggccttcctgtaggacggcctagatctatttctgaaaatctaaggaaaggcatgacagcagcacctcaactgttcttctattcaatatctgaaagacttttcaaatttccactttcggatcatttacgtgctactctctttgatgtccttcttggtggggccagtcctaagcaggtcttacagaaacgttcccaatctgaagtgtcaaaagatagtgccatctcttcagcgagcttgtctccatttgctgttcctcagattttggtctgtatatttaaatatatgcaatcttgtcaagacacgttagcacggactaagatcttgagtgatcttcttgatttgctggattcaaacccttctaatgttgaagcccttgtggagtacggttggagctcttggcttgagacatctgtgaaacttgatgtatttagggactacaaatcaagttcagaagctgaggataatacttatgaaaccaatgagttaatccttgtgaggaacatgtattcattggtcctcacctactgcttgtgctctatgaaaggtggctggcatcagctggaagatacaacaaatttccttctcttgaaaatcgagcagtttccttcacctggcttatctgcacaatcttcatctgatgactctctaatagaggacattaacacctctgttgttgaaatactaaatgctgagggtagcggccaacttacaagctttccttggagtaatagtacatatactgatggagataaactgagtgatgattggtggagcttttacgacaagatatggactcttatttgcaatttgaatggcagaggacaaaatagattgactccaaagggttcaaatgctgctgtcccatctattggacaacgggcacgtgggctggtagaatcactgaatatcccggccgcggagatggctgctgtagtggtaactggaggaattggttctgcactaagtggaaaggcgaacaagaatgctgacaaagctatgatgttaagaggcgagagattcccaagaatcatcttccatcttataattttgtatctgtgcaaagctggcttggaaaacttatccaagtctttacttagggggagatcccagtatggggggcttgatgatggtgcccgttctcatattatgtcgccattgatttttgaaattctcgtacaagggaagtctctgcttgccactaatatgttggcaagagatgattccactgaagtaaatagcaataaggattctggttatgttcttaaggattctggttatgttcttaattttgttcagaaggaccgggttcttgctgcggctgctgatgaggtcaaatacatgaaggatgcaaaggctgatcgcctgaggcagctccaggaacttcattccaaaattgatgagagcttaattgaagatatagaacaactgcaaagctttgaggatgacatacagtttgctaagtctgctgccatttctgtggacgacagtagaaaagcagctctccagcttgcatttgatgaggatcagcaaataattgcagacaaatggatacatatttttcgtgctttgagtgaggaaagaggaccatggtctgctaacccatttccaaatagtactgtgacgtactggaaacttgacaagacagaagataaatggcggcgacgactgaaactcaagcgtaactataagtttgatgaacgcctttgtcagccaccatccaaatttagtaatgaaagcaatgcctcgtctgtcaacccctctgttagtgccaaaattccagaaaaaatgaagcacttacttctgaaaggagttcgtggaattacaggggatgttagttctgaaccttgcgaggataacaatgacatgagtgagccttcccagaataccctgtctgagacccagggctcaagtgatgctgcagattcttcaggttattctactagtgttcaaaataggaaagaaccagtgtctactggtggagatgacgactatgctgcaattctgtcatcagttcaatgtgttcttgtaaccccaaagagaaaactcgctggacaattgactattacacaaaaagccctgcatttttcttttgaatttttggttgagggcactggaggaacatctgttttcaacagatatcaagaaaaagattctgaccccaagaacgacctggggggtgcagaaaaactgaagggtagtcttgacggaggacgaggcaatgcaactgaatctggtgatgctctgatgaaaaatacatcaaacaacatcaaacaccatagaaggtggaaaataagcaggataaaagcagttcattggacacggtacctactacaatatactgcaacggagatattctttgatgatgccaatgcacctgtgtttcttaatttttcctcccaaaatgatgctaaaaacattgggtctctcttagtgtccctgagaaatgatgctttgttccccaaaggaagtactaaagacaaaaacagtgttatttcttttgttgacagaaaggttgcccttgaaatggctgagagtgctagggaaagttggagaagaagagaaatgagcaattttgagtatctaatgattctcaacactcttgctggacgatcttacaatgacttaactcaatatcctatattcccttggatattgtctgactattcgtcagagaaaattgatttcaacaagtcatccagtttccgtgacctgtcaaaacccgttggtgccttggatgccaaacgctttaaggtttttgaagaaagatatcttaatttctgtgatcctgatataccaagtttttattatggatctcactactctagcatgggaatcgttctttattaccttcttaggcttgagccttttactgctctgcaccgcaatctgcagggtggaaagtttgatcacgcagatcgtctttttcagagcattgaaagtacatataggaactgcttatcaaatacaagtgatgtcaaagagcttatacctgagttcttttatatgcccgagtttcttgaaaattcaaattcctatcaccttggtgtaaagcaggatggtgaacctttaggcaatgttggtctccctccatgggcaaagggttgtccagaagaattcattcatatcaaccgcgaagctcttgaaagtgaatatgtaagctctaatctccatcactggattgacctcatatttggttataaacagcgcggcaagcctgctgttgaggcggcaaacatattttactatttgacatacgagggtgcagttgatttggaaaacatggatgatatgttgcagaaatctgctattgaggaccaaattgcaaattttggacaaacacctattcaaattttccggaagaaacacccaagaagaggcccccctataccaattgctcacccactatattttgccccacaatcgataacagtgacttctgttgtccctagctctagtagctcctcatcacctgtattgtttgttagcttgttggactcaaacattgttgtgatgaacgaaggacttgtactgtcagtaaagctttggctaactacacaattgcagtctggtggaaacttcacgttttctggatcactggaacctttctttggaattggctctgatgtaatttctccccgtaaaattagcacttccctggccgaaaacgttgattttggaaggcaatgcctaacagcagttcaaattcatggtgataattatttaattctgtgtggtaattgggagaatagttttcagatcatttcccttggtgatggaagaattgtgcagagcgtccggcagcataaagatgttgtcagctgtgtggcagtttcatcagatggaagtgtaattgcaaccggaagttatgacacaactgttatgatctggcatgcattccgaggaaaatcagctgataaaaaatcaagaaatgcaaattatgatctgtctactaaggatcatgttattatcgaaagcccttatcatattttatgtggccatgatgatattatcacatgcttatttgttagtacggaactagatatcgttatcagtggatcaaaagatggaacatgtatatttcatacattgcgtgagggaaaatatgttcgatccattcgacatccatcaggagctggcttgtcgaaactggtagcatcgcagcatggcagactagtattttactccgacagtgacctatccttgcatatgtattccataaatggaaaacatattgcttcttcggaagccaatggccgtctcaattgcatggaactaagttgttgtggtgagtttgtggtatgtgctggtgatcatggacaaattgttcttcgctctatgcattctcttgatgttgtatggaggtatgagggagctgggaagactataacttcactagttgtgactccagaggagtgcttcttggcaggaaccaaggatggcagtttgattgtattttcaatagaaaaccctttaattcgaaaaggcactgttcagcggaacaagataaaatcttctgtgggtggttagtggtgtagctagaaacatcaacaagagcttgctgctacatgtatagagcaacaaaagcccttcaatccagtg

SEQ ID NO: 86434 - DNA, 1177 bp, Oryza sativa
  Clone ID: PAT_MRT4530_85476C.1
gtattgaattttggagtaaaaatacattggcagtgctcgaaaatgcatacatgagtaatcatgtaatgagattcaaaccaccagtggctcccatatttccattccatttccctagaccctagcattattttccagagtatcccctgccatatataacaacatatactgtgatacagtagtattaatttattacgaacatgaaaatagcccagctgcaggctgcagctcagtgcagaatagctgggctacagtatggcccgctgagccatccatccgcgatcgaacggtaggcagcctcggtgaggtgaatgccatcccagaccaagtaattctccgggtctccacaggcacttgcccctgacatgccacacctcgccttgttattgtagttgtaggagcctcacgtaccgccggaagcacccactcggcatcaaccctgtagcccgcgatgtccggcagactgagcccgatcaggtgacctacgccgcttgtgatcttggcgatgatctgaggcacgtagcctttcacctcgtccatgctcttgccgccgaagagaggggcgttgtagtcgttgcccccgaactcgcccacgatgaacagcgacttgctcaggtagctcttgcaatcgttgccgcagatggagggcaagagctgctggaaccactggatttgggtgtccagagggccgttgttccagatgctgttgcccaacccgagcgactggaagaagtcgaagttcatggtggtggcgccgatgatggccatgttcgcgcccttcttgaagtcgccgccgctcgccttcgacggcgggagcagcggcaatccgaagcgatcagctaggaagtcgatgatgacgcggccgttggtgcagcggccggtggggcggccgaagaaggtgttgccgtagggaggctggccggtggtgagccacgacgggcagccgccggtgcagaggttgccggtgtcggtgatggaaaaaccgaagttgtatatcgcgttgtagctctgcgacgacgctcgccgggcgacgacggcgaggaggaggaggacggcggcgacgacgacgacggccttgttggccgccatggctgagcacgtaagtgagtacgttgcgtgcgtgacagagagatgcgcgcgcgcacgtgacacgtctgtaaccttgtgccttgctcaaagg

SEQ ID NO: 86435 - DNA, 239 bp, Oryza sativa
  Clone ID: PAT_MRT4530_85477C.1
atgcggggccgcggctgcgctgcttggcgggggcgcgacgggaacgaccgtgcgggcggcgccgtgcagggcgtgtccggcagcggcgcgcggcggcgagggcgcggtggcagcggccgtgcgggcggcgcaaggcaaaacgcgttcagcggcagcgcgcggctgcgaaggctccgtggcaacggctcgtcgggctgggtattgcaaaagctcgttccgcggcggggccccggcggctt

SEQ ID NO: 86436 - DNA, 573 bp, Oryza sativa
  Clone ID: PAT_MRT4530_85478C.1
ggcaacattagtggaaatgtattgaattttggagtaaaaatacattggcagtgctcgaaaatgcatacatgagtaatcatgtaatgagattcaaaccaccagtggctcccatatttccattccatttccctagaccctagcattattttccagagtatcccctgccatatataacaacatatactgtgatacagtagtattaatttattacgaacatgaaaatagcccagctgcaggctgcagctcagtgcagaatagctgggctacagtatggcccgctgagccatccatccgcgatcgaacggtaggcagcctcggtgaggtgaatgccatcccagaccaagtaattctccgggtctccacaggcacttgcccctgacatgccacacctcgccttgttattgtagttgtaggagccttgcccaccggcgccgcagcacactttcaggccatattgtagcccgaaactcccgggagactgaaccattctggtgacctggtcgtagaagttgccgtacatgaggcggacgggcgggtacttggcctggacgccggcgagcccctgcttgagca

SEQ ID NO: 86437 - DNA, 1564 bp, Oryza sativa
  unsure (1)..(1564): unsure at all n locations
  Clone ID: PAT_MRT4530_85479C.1
ttttttttttttttttttttttttttttttttttttttttttttttggcaacatnagnggaaatgtattgaattttggagtaaaaatacattggcagtgctcgaaaatgcatacatgagtaatcatgtattgtgtttctttcctcctgtggctcccatatttccattccatttccctagaccctagcattattttccagagtatcccctgccatatataacaacatatactgtgatacagtagtattaatttattacgaacatgaaaatagcccagctgcaggctgcagctcagtgcagaatagctgggctacagtatggcccgctgagccatccatccgcgatcgaacggtaggcagcctcggtgaggtgaatgccatcccagaccaagtaattctccgggtctccacaggcacttgcccctgacatgccacacctcgccttgttattgtagttgtaggagccttgcccaccggcgccgcagcacactttcaggccatattgtagcccttcaaaatattttgccactttaagggattttaatactaaaatacccttggcgaaactcccgggagactgaaccatctgggtgacctggtcgtagaagttgccgtacatgaggcggacggccgggtacttggcctggacgccggcgagcccctgcttgagcaggccgttgtggtagacggagagggagttgtagctcttgaggcagccattgccgtcgtagtcgtcggagttggagctctggtacagcgtcaggtacagcgggaagcacccgatcggcatcacccccggcaccacgatgtccaccgctcccagcccgatcagcgtatctacgccgcttgtgatcttggcgatgatctgaggcacgtagcctttcacctcgtccatgctcttgccgccgaagagaggggcgttgtagtcgttgcccccgaactcgcccacgatgaacagcgacttgctcaggtagctcttgcaatcgttgccgcagatggagggcaagagctgctggaaccactggatttgggtgtccagagggccgttgttccagatgctgttgcccaacccgagcgactggaagaagtcgaagttcatggtggtggcgccgatgatggccatgttcgcgcccttcttgaagtcgccgccgctcgccttcgacggcgggagcagcggcaatccgaagcgatcagctaggaagtcgatgatgacgcggccgttggtgcagcggccggtggggcggccgaagaaggtgttgccgtagggaggctggccggtggtgagccacgacgggcagccgccggtgcagaggttgccggtgtcggtgatggagtcgccgaagttgtatatcgcgttgtagctctgcgacgacgctcgccgggcgacgacggcgaggaggaggaggacggcggcgacgacgacgacggccttgttggccgccatggctgagcacgtaagtgagtacgttgcgtgcgtgacagagagatgcgcgcgcgcacgtgacacgtctgtaaccttgtgccttgctccttggaggtgtgaataggctcggtccgtcgcgtggg

SEQ ID NO: 86438 - DNA, 146 bp, Oryza sativa
  Clone ID: PAT_MRT4530_8547C.1
ggcccgcccttggtttttttctttttagtttataaattggtaaaagcttttcctatccattggtaaacagtccggccaagcaagcaatgctacactcgccgtggaccgaacagtcgcaccatctcaaatatgccatcgcatggcag

SEQ ID NO: 86439 - DNA, 117 bp, Oryza sativa
  Clone ID: PAT_MRT4530_85480C.1
cccacgcgtccggatagatcatatcatgacaagtgaatctagcttgctagaaacacaggtagttcgtaattatcgcatacggccatagcgaagtacagtgtgggtctcgtggtttta

SEQ ID NO: 86440 - DNA, 342 bp, Oryza sativa
  unsure (1)..(342): unsure at all n locations
  Clone ID: PAT_MRT4530_85481C.1
cggacgntgggaatatttgtgctcttcaacattaattgttaccatttggcacgatcaaattaggagttggctcaagtgtacaatgcatcagtgctggttcatgctggtgcgtaactctaacaacattacatgaacagcaaaaactgatacatctgtgaatatatgcactcaatacatagcgagtaagctatatatgctaacatacattgaaattaaagaggcggttgagagagagaaactatatcatgctactttaggtataaaactagtgttttgcttggattgatgtggagctgcatatattttcgggcatagtacccagccactgtaaacttgcgcttg

SEQ ID NO: 86441 - DNA, 207 bp, Oryza sativa
  Clone ID: PAT_MRT4530_85482C.1
atggagttcaaggagggagatggagtggcggcaatagcaggtcgcttggcggccacgccgtacgtcggcctcgtcgcgttcctcctgtggctgctcggcgccgcgctcgcaatgctgtcggtcgccgccggccaattccccgctctcgttgccgccaccgtggccattgctacgcagctgcgcaattacctccttggtggtctctag

SEQ ID NO: 86442 - DNA, 708 bp, Oryza sativa
  Clone ID: PAT_MRT4530_85483C.1
atggctgacggctggctccgctccggcgccctcaccgccctcgacggcgtggcgcagccgcacccgctgccgctgcccgcgctgcggttcgcgcccaccctccgcgtggtcaagctcggttggtgcgatttccccagcggaatggcaccgcggccgcatttccctcgcctcaagcagatcacgctgtccgacgtcagcatctccgaggacgccatccatggcgtgctctcatgctgccctgcattggagagccttctgctagaggggaagagcttcggcgttcgtcgcctccgcatcgcctcccaaactctcaggagcttgggcctctgttattcgtggaatgcacgagatgatggcaggttgcaggaggtggtcatcgtggatgccccttgcctccagagattgcttacaccttatctgaataatggtccagcgaccatccgggtgattgcagcgcctaaaatggaggcattgggttggatttctgatggcatatctgaactccaccttggaacaacatattttccgaaaacgactgctgtcaacatgccaagctcaatgccaacagtgaaggttttggctcttgtctctgatggccctaatctggatgcagttgttgatttcctcaaatgtgtcccatgcttggagacgctgtatatcacttctcgcccagataaggttattaaaaatgcgcggaggtatgagtga

SEQ ID NO: 86443 - DNA, 279 bp, Oryza sativa
  Clone ID: PAT_MRT4530_85484C.1
atggcgccgccgccgcccagccagtccgacgccgccaccttgccgtgccgcccacgccgtcgctgccaagaaaccaccatcgacgtcatccgccacctcacgccgccgaccgagcgggaacacgcttggccgccgccgtcgaggccgttcaaccaccgaagcaccggcgccctgcccctcttcctctctgttgttgctcgggagaagaaacagaaggaaggagagaagaacgggaggaagaagaagagacatatgacaagtgggccctctgcacagtaa

SEQ ID NO: 86444 - DNA, 318 bp, Oryza sativa
  Clone ID: PAT_MRT4530_85485C.1
ctgttgtctgtcttcctcctcgtttgagctccaagcaagcttagccaagaaacaccataaagaagagagtgagagagagtgtgtgtgtgagaggaggtgagcttctctcacatgcacatggagggaggggagggcattgctgtagcaggtgcaggtggtgtccatgaagccggcttcggtttgttcagagcggccgctgtgaccatgacagaggcgcacgaagcagccaaggagtaccagtcttctccctcctcgccgtcgtcgtctcctactccttccccgccgccggttgctgcctccggccctggtggggtggcc

SEQ ID NO: 86445 - DNA, 3135 bp, Oryza sativa
  Clone ID: PAT_MRT4530_85486C.1
agtgatcatgaaggcagagctttcatccgaagtaattcggataaatagcgcttctcgaaccattccgtatcatttagatgggaataatgttagtattctttatggtccaactgttggtgctcatattgtctcggaatcctttgcgttcgcttatctgagcgacaagacaattatgccgacaaacaaattcttcaagcatcccaacggaaatcttattgaaggatttgggattgtgcaagagtgcttgtcattcatgacggcaaggaggtgatcttggatttccatgtctttgaaatccaagattttgatgttctaatcgagcacccgattgagtagctcctcattaatactgctcgattagacagcctcaaaatttctataggagggaatgaattctcaattccatcctcgcgggcaaggtttgccctaaccgattccttaccagaagaagaatatgcggaggaagtaatggccgttcttctgcatgagtctctggagtctcttcttgaaaatgaagtcccagatttcattgtaaaagaagatgagcactgtgaaactttcgaacttccaatcttagaatcaccgctgtgacctccgattgagctaaaaccccttccgcaaggaatgcgctatgcttttctatatggtaataaggaagctctagtcattatcagtgacaagctttctgatggcaaaaccagtcgtcttctagccgtctttgaaaaacatcgcgctgttctaggctattcccttcaggatctgaaatggattaatcccgtgctctatactcatcgcaagcccatcgtgcctgagagctcaccgtccagagaaccccaaagacagctgaataatgcgatgagggaagtcgttaagaaagaggtcctgaaactcctgcacgtctggattatctatcctgtgcaatacagcgagtgggatagcccagtccaagtagtgcctaataaaggaggaatgacggttgttgcaaatgctaaaaatgagcttatcccgcaacgaaccatcacaggatggagaatgtgcatagattacaggaaactcaacaaggctacgaaaaaggatcatttttcactacccttcattgatgaaatgttggaacggttggcaaatcattcctatttttgtttccttgatggatactctggctatcatcaaattcccatccatcctgatgatcagagcaagaccacgttcacatgcccgtatggaacctatgcctattataggatgtcattcaggctgtgcaatgctccggtctcttttcagagttgtatgatgtccattttctctgatatgatcgaacatattatggaagtcttcatggatgacttctctgtttatggaaaaaccttcggtcattgcctctagaatttggacaaggtcttgcagcgatgccaagaaaatgacctatttagatcttacttgataggagctaaggtaattgtttacacagatcatgctgccttaaaatacctgctcactaagaaagatgctaagccaagtcttttaagatagattcttctgctccaagaatttgacttagaaattaaggataaaaagagagtagaaaatactatagtagatcatttgtcgaggatgcaaatcactaacatgcaggaacccccgataaatgactttctatgggacgatatgctaatgacggtgcacgactccaacccatgttacgcaaatatagtaaactacatggtattaaagtacgtatcactggaagaaaatcagagaaagctgaaatatgagagctgacgtcacatctaggatgagccatacctatatagagtctgttcggacggattgctaagggctcaagattatagagagatgccactcttcgccctatggtggacactacggtgcattccgcacacaagccaagatctggcagagtggattcttctggccaacaatatatgaagactccaaggagtttgtcaaacgatgccagagctgccaaaggtaaggagggatcactgctcacgatgcaatgcctctcacgtataacctacaagtggagatattcgacgtgtggggtattgactttatgggacctttcctaagtcccataattgtgagtatatcctggtagcggtaggctatgtgtcaatggtcataagtgatgggggatcacatttcattgacaaaaccatcatataccttttgcgtgaaatgggcaccaagcacaacgtcgctacaccctactatcctcagacaagtggacaagcagaaacgtcaaacaaacagatcaagaatattctacagaaaatgatcaacaaattgggcacaggatggaaggacaagctacccgatgctctctaggcataccggacggcccataagacacccattggaattgtccacataccagataatctacgggaagtcatgtcgactccctgtagaactcgaacattgagcgtacttggcaatccaaaactggaatatggattttgagggagccggagaatggagataaatgcagttagctgaactagaagaatggagagacaaggtatatcacaattccaagacttataaggagagaacaaaacgctggcacgacaagcggataaaacatcaagaaattcaagccaggaaatgggaaaggctatttggacatggaaagttgcgcaacaaatgggaagggccatatgatgtcatcgatacctcgccgcacagagcaatcacactccgggatgactcaggtaacatattcaaggcgagggggttgttcgaagagcaattgaaggccaatctgctacccgccaagaagtatgtgggcactctgtacaccaaggcaggagatgaggtgctaaacaagtacaagacacccaccgccactccatcaacccctaagggggagaggttttgcattatgggagtgagaacccctagcggtgggtacggcaagggcttgtgccgccccttgacgcccatggaaaaggacgaggcagcagagtcggttggttcctcacccgccaaggtgaggcgtcatttgactcctcctcctatcattcgggcgccggggcaatactaacgtgcaaaatctgaaaataatgcatatctctaaacttctgacaatcactgaacttccctgaaaattac

SEQ ID NO: 86446 - DNA, 624 bp, Oryza sativa
  Clone ID: PAT_MRT4530_85487C.1
atgtcgaccagcaatgatcgtgataggggagttggatacaaacgtaggagatacattgggctgtcgcaccctccctatgcggcttacaagggatatataactaggagccctaatagacaaagactcgaagtctctcttccacactgtcgtcgcccatcgagcccaccgccaccgtcgtcgcccatccatgccgctgtcgggcaccccaacaccgtcggccatcgaccgccgccgccgtcgcgcatcgagcccgtcgctgccgtcgagcatccagccgccgccgtcacgcatcgagcccttcgccgtcgtcgcccatcgaggttgccgccatcgtcacgcgtcacgcatccagccgccgttgtcgcccatcaaggttgccgccgccgtcacatgtcacgcatccagccgccaccgtcgcgcatccagccctccgccgccgccgccgccgtcacgcatcgtggccgccgccgtcagccatcgagcccgccacgcattgagcccaccgagttgctgtcacgcctctcgccggtctcgccgcaaatcctcaatctcactgctctccccgatttttccccgtcaaacagtaaaggacagaaatacctttccaccaatgatactgcttga

SEQ ID NO: 86447 - DNA, 204 bp, Oryza sativa
  Clone ID: PAT_MRT4530_85488C.1
atgtcctccttacccgccttcgcgagcgacagggtggagctcgaggcagcacatctcaaggaggaacgcctcatcctcgagtgtgcggccggcaccgggaagcacccggatgaggcgcatttgcaagacttccatgaccactcttggtggtcgacagggccgacggtggtgcgacacacgacggtcattgtagcctcgcgctag

SEQ ID NO: 86448 - DNA, 1515 bp, Oryza sativa
  Clone ID: PAT_MRT4530_85489C.1
atgaccgtcgtgtgtcgcaccaccgtcggccctgtcgaccaccaagagtggtcatggaagtcttgcaactgtggtattcaatcccacgcaagcttcgaccttgcctattccctccgcggctccacctactcaccgacatgtaggtcaccgggttgtgcgctagcagcgcggcctacatgcgcctcatccgggtgcttcccggtgccggccgcacactcgaggatgaggcgttcctccttgagatgtgctgcctcgagctccaccctgtcgctcgcgaaggcgggtaaggaggacatggtggcagaggatggtgacggatcctcgcggcctgccgcatatggatcaacgagcctcgacatgctgtgcgaccgcaccattgactacaccgagcagctgtccgtcatggcaaaatggcacatttgtaatggcatggatcaattaatcctatattctaaacaatcttctgtttttcaggaggtggaggtcgttaacaacaatgtgaagttaatctgttatagggatcctgttccagggactacaaaattcaattacccattttattatgcttcagtttatgatctcttaaatcctaaaactgcgatagatcaaagcattaggcaatatgttgtccttcgaagaaagccacttcaagatgcatatgacacattcaacttcttgagcctttgtgaacacccgaacatccttaagccctatggattttgggaggataatgataacaaaggttttattgcatttccacgtgtcaaaggcacattaggtaaccttccaacagatgagttgttctctgtggagatcgatgcgaataaggttacctggctcaaaggcttttctccaagtggcatgcaaataatcagagatattgtgagctcggttcactatgtgaacgagcggtatcctcaagctggcactagttctagtggaagtgccataccgccacttacgatgtttccactagaacttgcctctcacaaaattttatatgagaagattccaacaggagaatacaagatttttcttggagatatatccacgactaaccattggccaaaaacaatgaaaaagaacttttcagttgaagatctcaagaggcacaactggaattgcctgggaaaatacatttcaactatcatggccggccataagcccaatactgaattgatacatcttgtagatgtcctgataaaggggtgtagcgccctgctgggacttaactacaacgaagctaaaagtttgttgagctccgtcatgcttctaagaaataagattgtcgcccaccaagatgatccttatcaaaattacactggacccaaggagcaaattggcgtggctaaagccctcttggagaagcttgtgttagactccaagcctgcttacatgataaagctcatcgaagagatccgaaagcttaactggataggagagtcaccacttgttagaagccttacgagctacgtgaaagcattcgaccccaatctcaagatcaggacttcatga

SEQ ID NO: 86449 - DNA, 295 bp, Oryza sativa
  Clone ID: PAT_MRT4530_8548C.1
gcacgaggcgcgactcgccgtccgtcagcggtggtcgcggcggtcggctacaagatgatggcgtgcagggccctcgcgctcctcccgctcccggctgccctcccgtctcccccgcccgcgcgccgcctcgctcgcgcggctcgactccgcccgccggctggcctctgcctccttattggtccggtgctgcgccaaccatcgccggtcccggaggctagagaggattacgacgaggacccccgtctcattgccatctcccaggtatcgaacatctaaaggactgggatcgcgcaga

SEQ ID NO: 86450 - DNA, 378 bp, Oryza sativa
  Clone ID: PAT_MRT4530_85490C.1
atggcgccaagcaggcgggaacgcgcagcgaagctaggtgtgtcgccgccggcggcggcggaggacaaggagatgacagcggctcagcttccaccgtctccatttgcggagctagtcataaaaatggaacgaggtaacgacggaatgcgtgttctcgcatctgtcgtggaaggaagctcgccgaggaagccggggatgacatcgaacacctggcggctgtcacagaaaacggaggtgttccgcaatgccctcggtcccttcgctcctcaccgcatcgcctccctccggcctcatagactattcgcctctcccggcctcatcgcatattcgcctcccccgacagcaacaacgactacggcgtgtcacgccccgaactag

SEQ ID NO: 86451 - DNA, 220 bp, Oryza sativa
  Clone ID: PAT_MRT4530_85491C.1
cccactctactctctgatttaacaatcagttatatataatctactatcttatataataatctcaatggaggggctttatcttcattactgctacttcccactattcttaccaaaccctaatctcataccatctcttattatcccaaccttctacaacactttctctttttcgacatacactcacctctcctttacaacaaattaacttttctcaacccaa

SEQ ID NO: 86452 - DNA, 666 bp, Oryza sativa
  Clone ID: PAT_MRT4530_85492C.1
atggcgaccccagctctgaatttaactaaattgtcttcagctccgtgcagctgctcgtcctgctcagctcaggagatggtggtgatggggcagctggggaggttcatggacgggatcaagtcgaagcttcgcggcggcggagggaggaagacagggaggaagaaggaggcggcggcgatgatgacgtacgacaagatggacaagacggagagcatgagggtggagatcaggagcaggcaggcgcagaagctcatcgccaagaacctcgtcgccgccgactccatcggccgccgcaacaagcgcttcttcctcgccttctgatttctgattcatcagttcatcaccatcgagaatccaattaagcaaacaaaatatatatttatgttgttatattgatcatcgccaacatcgaaacattcaagcgacagtatttactatgttgttatagatgcggagaatcccatcaaaacagttactgaaattttgctgttcgtcaggagattccacgaaaaattgttaacagtgtttgtggatgaagtgatatatatatatatcccgtccgtgtaatcgcctgtgtttatttgacttgactgttcgtgagagaagagaaaaaaaaaagcttaagcttttcgatgaaaaaaaaaaaaaaaaacccagggtttgggc

SEQ ID NO: 86453 - DNA, 1842 bp, Oryza sativa
  Clone ID: PAT_MRT4530_85493C.1
tcctttcttgttttccttctctccctcagaccaagacaaccaagcgtccggttctagatcgcgagcggccgcccttttttttttttttttgtagtctgaagagtaatctttgtttcatcctctctttctttttttctagttccttcttttcatacaagtacaatcacacggcatcaggtggcctgtggttgggtgcaggcagccttccctcagtagagagcattgaggaaggaatagtattatacacctgtgctttggcacgatggccagtgaatgtttactgaatcactgctggccaggaggcaagatgagtggatatggcaaagtttttcaacagtttagttctaacgtttggactattgagcgtatttgcgacaaaacttctgttttccttgtcctcagatcacgattgcttcctccaggaggcctgctgcgaacttcaataattatttgacatatatacagtcactggtccctaaagatgtaaccgactgaggaagtccgacaacctaatatttttggcaatcactgtacttccatcgtcagcatcaagatgtcgcagtatgacctcttccaagcgtccgtctctgtaggcatgcttgtagaaacagcttgacccaaagggacaagtaccagttccaaaatcgaagtacttgcagtcaatagacttgagtttggctttatagttgtcaataatctccagcttttcctccttcgaaaagtaccaaagaacacttggaatgacatagtatgaaagtttgcgacatattggacaagccctcagtgctgagttcacatccattccagacgtaggagaattgttacgccaatttctaatacatgaaatacagaagggatgatcacactcagataagagtccaaacttcctttcagcagcagtaggctttgagagcacacggtccaggcagacactgcattctatctcttggctacgtttcaaagactcaagacgcttgtggtttttctcacatagcttggtatgttcctccctctcatcaggacgataaggatgtaagcacattttcccacaggttgtgcacagatctccatgcatctgagggcactcttccccataaggacaattaccaccagcagcaaaagaacagattggcagatcagcgtcaagaacaatatacagcaatagaattatggaagcaattaaccatcaacaactccatatctccatatcgtaaatcagtttacagaatctccaaaacaacactgcaaagagacgatgatctcgatacaagacagcgatcgaggcgtgtctgtgaatgaaggagaaggagaagatcaggtccgcttgacggggtcgaagttggagacggcgacgacggcgccgacgatggcgacgagcacgaccccgccggacacgatgctgaggaggaagttcttgagcgacggcgtcaggctgccctgcgcggcctccgcgacgtcggggaggaccatcgccgccgccatggccgcggccgtcagcccggccgtcgccctctccttcatcgacgccgacgccctcacggccatcctcgccgccgccgccggcctcgccctcggcacgggctggaacgaggcgcacaggggcttcttgagccaggccacggacagtggccgcgccgcgacggcggacagcgacgcggttgtggccatggaggatgaagaagaagaactcgcggtgctttcttggcgcgagagcgagacgaggtgcaagtgtggcgcggcgacggcggacagctgacgcaggttgtggccatggaggatgaagaagaagaactcgcggtgctttcttggcgcgagagcgagacgaggtgcaacccaccggcg

SEQ ID NO: 86454 - DNA, 202 bp, Oryza sativa
  unsure (1)..(202): unsure at all n locations
  Clone ID: PAT_MRT4530_85494C.1
aggngcatacatacatgcactggtgaaactgcaactgaagggacagtgcgtgggtactacaagtgtacacatggtacgctggttggcaccatatggaccgagttggtgagctaacttgccggggacgaagttggcggggtatggccaggtgttggaggggacggggtaggaaaccaggtagaagaggatttacatggggcct

SEQ ID NO: 86455 - DNA, 753 bp, Oryza sativa
  unsure (1)..(753): unsure at all n locations
  Clone ID: PAT_MRT4530_85495C.1
ccggccgggatattaaaatttcacccccacctctccccgtctccccaactcctcctcaccccctttctccccgcgcctctcctcctcaccctagcccctctccccccacgcctctcctcctcctctcggcagccaaggcagagacggcgacagtgaacgacctccttcctcgttgagccaccgccgtggagccgcatcgatttggcccggggggcggatctggccaccgaacggcagatccagtcatagaagaggcgcgtgcagacggtggtggtcggcctcctccctcttcagtccagatggtggacagcctccttccttattgagacaccgccatggatctgcaccgaccggccaccggatggccacgggagcggcgcgggcggcggatccggtcgcgacgacgacggatcctccaacccccttgcctctcccgacgatgcagcgggtcggggtcacctgacgaccgtggctcggtgagcggcgactgcggctcggcgggcgatgacgacggcaaccacagcagccacggtgacgtatgcaacaagctccctccttcgccgacgcagctcgatgacggcatccgacgattggggattagggattttttattggaattttttttgctcgaaaaaaatgttttcgttggcgactatcttaacattgccgccagcgaatcctattttcactggtggntgtcttagcttgccgccaacgaanatgattttcactggcacgctgtattagcgtggc

SEQ ID NO: 86456 - DNA, 639 bp, Oryza sativa
  Clone ID: PAT_MRT4530_85496C.1
atgtgggacaagaagccgccgtcgacggcacacggcggcgagagcttaccggcgtccacgcgcccgtcgaacacgaggaagaggaaggaccgggaagacgaagcagaggaagttgccgccgccgccgccgctcaggaggaggagggggcgatgcggcggggcaaggcggtggcgcggcggcggagcctggtcagcctgggcatggcggcggtggtgggggcggtggcgtgggcggcggacgcgccgtgcctgccgctgctggtggggctgttcgccacgatgggcgtgtccatgtgcagtgtcacgcgcttcttcttcctccgcgagtccgccgccgcgctccggggcggcaggccgaccttctcctcctccaacaccgtcccgctgctcagcctcaactggttcctcctcggcatcctcacctcccccatgcttcccggcgctgcccacgccattgtttccgccgctaatctcagctcccatcgccgccgccgcttcagttcccaccggccgccgagcggcggcggccggtcgaaggggagaaaaggggagagaaagaggaaggcgtttcgtgcggactccagcacagcccatgctagaaaaattggagaaaaatatacagcatatcatattatttag

SEQ ID NO: 86457 - DNA, 546 bp, Oryza sativa
  Clone ID: PAT_MRT4530_85497C.1
atggcgtgggcagcgccgggaagcatgggggaggtgaggatgccgaggaggaaccagttgaggctgagcagcgggacggtgttggaggaggagaaggtcggcctgccgccccggagcgcggcggcggactcgcggaggaagaagaagcgcgtgacactgcacatggacacgcccatcgtggcgaacagccccaccagcagcggcaggcacggcgcgtccgccgcccacgccaccgcccccaccaccgccgccatgcccaggctgaccaggctccgccgccgcgccaccgccttgccccgccgcatctgcacggacgtctcggaatcctactcctccatggtcacctccgtcgcgacgccaccgccccctcctcctcctgagcggcggcggcggcggcaacttcctctgcttcgtcttcccggtccttcctcttcctcgtgttcgacgggcgcgtggacgccgcttgagaggcttcagctatggcgccgcaccacgcaacaagtagctcatcagttccccaccattgatgaacatctcaatgcttga

SEQ ID NO: 86458 - DNA, 474 bp, Oryza sativa
  Clone ID: PAT_MRT4530_85498C.1
atgtccgtgtggaggagagaaggaggtgggacccatgtaaaaactaggttcgtgtggcttgttttggctccgagaacctcaactaaatttgtcagagaaaaagcatgccacacacagagcaggagagagagggaagaagctcgccggagaagccacttccacgccgaagaagctcgccggagagggagaggagtaggagcgccgctgccgccgccgttgtccgtggctctgtgcctgcgccccgccgtcatccacagtgccgcggccgtgagatccgctgcgccgcttgacgccgttttcgtcttctgccacgccactcaaaggtgccgcggccgctcgacgccgccgccgtcatccgccgtgccgagctccaccgaagacggcgagatgaggggagagagagaggaccggacgagaggcgacgaggaggaggtgaacgagaaggcacctagccgccccgccgctgccgcttag

SEQ ID NO: 86459 - DNA, 183 bp, Oryza sativa
  Clone ID: PAT_MRT4530_85499C.1
gttgcaagatacatgatggcactacaaaatgtgccggaagttgagccaagagtttgggtcaccagctgcggtgcttgggtgcaggtgcaggaggaggagggttgcaactgtggtggtgaggttgaagaaatggctgagaggagtgatgggagaccatgcttgcagattggctggctgcatggt

SEQ ID NO: 86460 - DNA, 405 bp, Oryza sativa
  Clone ID: PAT_MRT4530_8549C.1
ttaaattatttcttttttttttttttttttttttttgtttttttttaaatttttttggggtttttcccccccaaatttttttgatagggccggaaaaaattccaagatcacaaccctaaagggtcgtaccccggaaaaaggaaaaattttccaccacccacacaccgacaggttcaaaaaaaaaaaccgggagaagggtaacaccggaccggccgccgttaaatttgacccactgccctttgaccaacaaagaaacattggtgagatcgcccaaaaaaacacccttacaaccaatacaaagccaactcctagagggggcttgcaccaatcgaacgaaaggcttccgttaggggataccaaaacgaccttttcaaaaagagaagcgatgggaaaccaccgccccca

SEQ ID NO: 86461 - DNA, 456 bp, Oryza sativa
  Clone ID: PAT_MRT4530_854C.1
atggcgaggaccgggactatgttcagagaaaaacagaggtctagtgcggtcgggataccatgtgagaaggtgactagagttagaattcttggaggtcaacttcggtcaacggtggagatcaggactagactcaggaaggagttgaggtccagactgtcaaggataccgggtgacgaagttggatacgagatggcatacggtggatggataccgtgtgggagagatcttcgcaacgggcttcacgaggtgtgcgtgcaagcatcggtgttcgcaaagggaattggaagaaattggaagaggcttatcttcagtgatggcaggcttgatccatgcagaggcaagccgagtcggctcaggcagcaagcagcagcagcgacggcaggaggagtccgacttctgtgcggctgtagttttggagaaaaaggaaattatgggattgagtcctattatgaatag

SEQ ID NO: 86462 - DNA, 1809 bp, Oryza sativa
  unsure (1)..(1809): unsure at all n locations
  Clone ID: PAT_MRT4530_85500C.1
atgggcaaccccaccgccgccgccatcacccaagtcctccacaacaagcaggagttccgcctcactgccggcgtcgacgacctcctcgtcgtctccatcggctccggctcctccagtgccgccccttccgccaccccgtcctccaggggcctcctgctggggccggtcggcgaggccgacgcggagctcgcggccgcgcaggaggtggccgtggaggtcgcggcaagcgctgcgggtcgtcccgacggctggcgagggagggagaaacggggcacaccgtcgatgcggcggggccaccgcgccgcggctggacccggacgcggaggaggaggagacgaggaggacgccgacaaccaccatggcaacgccgacgaccaccatgctcaccggccgccgcgcgctcgcacgccgccttcgccgcccgccgccgcccgttcttgctactcccctgccgcaaagagaaccgcacctccagccacgcgcccccacgaggccgaggccgcgcgccgcggccgcacccgacccgccgccctggagccgccgcagcaggaggcggtgaagccgtccccgaccaacggccgcatccgctaccgctcgccctcggcggccgacctactcccggccgatgacctcgccgccgccgccggcccctccgccgcggatgccgcgaggatgcgccgcttctcggccgccgccggggcgcggcagcagcagcagcagggggaggccgtgtccgaccgcgtcctccgcttccgcggggtcctcgtcgtggtgctcgcgccggtgctcctcatctcgctcgtgctccttctcatgcctcgcgcgcccgcctccgctaccgtcgagggctctgccggtgagctcgtcgccgctgccggacggaggtggggcccccgggccgtcagcggacttggggacggatccaccaggtacgctgtgatatttgatgccgggagctccgggagccgcgtgcacgtgtactgcttcgatgggaacctggatctgctgcctattggaaaggaaatcgagctgttcaagcagaaaaaaccaggcctcagtgcctatgccatggacccacaagaagctgctaagtcacttgtttctcttctagaggaagctgaaaaagtaattcctgtggaattacgtgagcaaactcctgtcagggttggggctactgcaggcctgagagcattagggactgaaaagtctgaagaaattttgcaagcggtaagggatcttcttcaagacaagagctctttcagatcccaaccagaatgggttaccgttctagatggatctcaggaaggtgcattccagtgggttaccatcaattatctgttgggaaatttgggaaagccttactcacacacggttggagtggttgatctaggtggtggttctgtccaaatggcttatgccatctcagagaaggatgcaggaaaggctcctccagttgcagaaggtgaagattcatatgtgaaggagcttctacttaagggaacaacatattatctttatgttcacagttatttgcgttatggattgctggcggctagagcagagatcttaaaagcaggtgaaggcaatgattaccgcaactttgtatcaatttacgttttcttggaaagatggtaccggattctaattgtccttgtaaattgtacacaggacaatacagatatggtgacgatatattcgaagcatcaggagagctctccaaagtttgacgaaccagcatgcactccacatgnaatgtacatttgggtggtgtgtgggaatggtggtngaggagatggggcngaagatcct

SEQ ID NO: 86463 - DNA, 454 bp, Oryza sativa
  Clone ID: PAT_MRT4530_85501C.1
ccccccaaagcggatcttttaatggaacttttaagttttctggatctttaattggaccctttcagttttaaaaggacaaaactgggggggaccggtttgaacagaccctacaattaaacataggaaaggaccgaggaacatcaaaccaacacccccgggggggccacctattttaacccccaaaggaatcggctgggacggggttcaggagccctgaaaaacgggggtaagggggtcaggaccctttggacaggctattattgggggcacccacaggccagggggcaccacccattacagtttaaatttcccaggtctccctggggcagtttgtaaggtttttgcatccaggccccgtcacaaacacgttattttaaatccgaacaccaccaaagctttggattttttaaatcccttcccaggggaaaaacttcggggaaacgggaccaccccg

SEQ ID NO: 86464 - DNA, 665 bp, Oryza sativa
  unsure (1)..(665): unsure at all n locations
  Clone ID: PAT_MRT4530_85502C.1
agtggatccccgggctgcaggaatcggcacgagggtatatcatgatcggaacgatttcctttatctgttactgcagatttanagaaacacaagtctgatatactaatagacgtaatgattttgcacaagtatttgtagatatctcttatctgcacatatggtctaatatctttcaagcacgcagaaaaattaaaattctttagtgtgctgattctatgaagtttaccatttagcttttagtcaaatgtaccggcatacttaaggaagtatactcattcacccaacttctataatctgaaatccactgttcttttttggaactgcatgtcttccctgatggcaaatactacatgttgcctgtgggataaacaggtccttgagattcacagcatcattttcacaattggctgatggtttgtgtaacatttatgttgggatatgtatgatatcctacaaaaaagccagctaccaaaattttgttagggcctcaatccaaaatggccctaacatcaagtaatcaattttcatcgaattcagcagattgtaagctagctagtctgttgttctttaagacaaccttaatttgtgttaacctgttctaattatggaatgctgattgttttgtgccaatgcttacagtatctagcttcttgctagtgggtttg

SEQ ID NO: 86465 - DNA, 105 bp, Oryza sativa
  Clone ID: PAT_MRT4530_85503C.1
atggcgagcgacgtgtacaccgtatttgccgcaggcgcgcgcagctgctcctgcaccttcggaccgcgaaaccaccgcggccacggcacacgacacaagggttag

SEQ ID NO: 86466 - DNA, 237 bp, Oryza sativa
  unsure (1)..(237): unsure at all n locations
  Clone ID: PAT_MRT4530_85504C.1
catgtattattangganttgcttcaanngactnccncccngcttnaaaccgcngtnacnagtgcngtgnttgctgggtgtggcatnaactgattnccgctaccccancntnncatttgggnncctgtatttnccntggttttatttgtgcccnctgtttggtnncaatnantgatttgggacggtggnancccaaaaaaaaaanaaaaaaaaaaaaaaaaaaaaaaaaaaaaaaaaa

SEQ ID NO: 86467 - DNA, 1672 bp, Oryza sativa
  Clone ID: PAT_MRT4530_85505C.1
atggcggcctgcgtcgacgacgtcggcaagccgcgggcgtcgaggaaggtgtgcgtgatcggcgccgggatggccgggctggcggcggcgcgggagctgcggcgggaggggcacgccgtgacggtgctggagcaggccggcgacgtgggcgggcagtggctgtacgacgacccgcgggccgacgacgacgacgaagacccgctcgccgccgccgccgccgccgcgaagccggtgagggtgcacagcagcatgtacgcctcgctccggctgctcggcccccgcgaggtcatgggattctccgacttccagttcgtgccggccaggaagagccgctgcggcggcggcgacaaccccggcggccgcgacccgcgccgcttcccggggcaccgcgaggtgtacctctacctcagggacttttaccgcgcggcggggctcaccgactccgtcaggtttaacaccagggtggtgcgcgtcgccgtggcgccgccgccatgccgaggtggccccggcgacgcgctgagatgggtggtgagatccatggacgccggcctctggaagcgatgcaccgatgaccagatggcggaggcgcactgcgtcgaggaggtgttcgacgccgtcgtcgtggccaccggccactactcgcaaccaaagctgcctagcatccaaggaatgggggattggaaacggaggcagatgcacagccactggtaccgggtcccggactccttccgcgacgaggtggtggtgctggtgggctgcggcgacagcggcatggacatcgcgctggacctcctcgccgtcgcgagggaggtgcacctctccgccaagtctgtggaggcggccgcgacgccggcgatgtccaagatgctggcgaggcacgccaacctccacctgcacccgcagatcgagcgcctgtgcgacgacggccgcgtggtgttcgccgacggcggcgggggcgtcgtcgccgccgacaccgtcatgtactgcaccgggtaccgctactcgttcccgttcctggacaccgaggggaaggtcgccgtcgacgacgacgacaaccgcatcgggcctctgttcgagcacacgttcccgccgtcgctcgcgccgtcgctgtcgttcgtcggcatcccgaggaaggtgatggtgccgtggttcttcgaggcgcaggggaggtggatcgccggcgtgctgtccggccggcgggcgctgccgtccgaggaggagatgacgcggtccgtggaggagttctaccgcgccagggagctcgccggcgtgcccaaggcgcacacccacgacgtcgagcctcacaaaatgtatgagcttggggagaagtactgcgatttcccgcgcacggaggagtggaagagggagctgatggcgatcatcagccggaacacgagcgacgacatggagacgttccgcgaccgcgacgacgacagcgacaacgtccgcaggtgcctgcaggagtggtacgccctggctgagcaccaggctcaagacgaagaagacccagctgccgctgctgcacaagcacccgtgcacagctcgctctgaagcctgtacagctgtgtgttctgtgctctgcacaatcataattttcttctacagagcatgaaaatttctgaaataaaacagagcatgcagaaatttcgaaaaaaaaaaaaaaaaaaaaaaa

SEQ ID NO: 86468 - DNA, 607 bp, Oryza sativa
  unsure (1)..(607): unsure at all n locations
  Clone ID: PAT_MRT4530_85506C.1
aaagagcagttttcccccatcatcgccaccatttttgtccggccaccggtgccgttgccctccccnccgaggtccaggagcgcaggttccctacactccctgctccggcctgtacggctntgctcagtgctgtgcgaccgacatcctcggcctcgccaacctcgactgtggccagccctcagacgcccccgtcgatgccgacaacttctccgagatttgcgccgccatcggccagcgtgctcgctgctgcgtcctgcccatccttgaccagggtatcctntgcaacacccccgctggtgttactccgtaaattgctcgacaatcttttgtnttgagcctacggcaactgcatcttttgtacggatagcagatttgtgacgaaganacgttcagctcatttttattgctattgtggtttcatgtcccaggtgtaatcttgtacctattttctttcgaggggagttttggggtcctttctnttcctcagggcaaggtctctttttgtgtcgagagtcgatgataatcgtggagaggacgtttataggttactggtgagagtagaaataaaaggttgtttanaatcaaaaaaaaaaaaaaaaaaaaaaaa

SEQ ID NO: 86469 - DNA, 650 bp, Oryza sativa
  Clone ID: PAT_MRT4530_85507C.1
cctgggctgcaagaattcggcagcgagagaaaaagaaaattctcgaagcgaatggagaagagcagcaccgccgcgggagggaggagcagcacgccgccgccgccgatgtacacggacgagttcgcgctcgaggggaagaagcccgtcaagaaccccttcgtccccatcggtgcattggtcactgctggtgttctgacggccggcctgatcagcttccgatatggcaactctaaactgggtcagaaactgatgagggctcgtgtggtcgctcaaggagcgacggttgctctgatgatcggcagtgcctactactacggtgatcaaatcaagctgttcaagaaagggtcaagcccttgaagacaagtacaggaatcttcatatctatacttagttttgggcaagattacgctgttcattgttcctccagccattggggtttaaccatgttgttttcgcctggcacgtggtagctaacaaaaacaagatcagatttggatttgcgcaattactaggctttgaataaaaagcttttctttcgtcgacttgacaccaagttatgcattgtattggaacacagcactgttaatcgagcgaatgggtaaaatacatacacagtgcagacctgtggcttgaaagctgcatcaaaaaaa

SEQ ID NO: 86470 - DNA, 738 bp, Oryza sativa
  Clone ID: PAT_MRT4530_85508C.1
atggccatgaatgcgaagtatgtaacttcaccgagcaggctctataaaaagggcatacttgatgttgaaggagcaagagagctaccacgcctacatgcagcctggagttcagtaggagtagggagcaagctctacacaattttttctgaaggattcgtcatggctcaagtaactttaaattatgcaaggattctaatgaaaattgtggatcagctcggtcttgagaaaccaacaatggcacacgagaaaagtgcggatgggatattccattcctttattgaagtggatcttgtaaactgggtgtctaaaggattccgaggtccaagacaatttataggaacatcacctatctcttcaagaagagctacgagaaaagcaactcgtaacgctgtccaaaggctagaaaaatgtggccttgttaagattagtgattacagccggcgtgatttgaaattatggaagaagagagtcataagggttactacagtatgcaaggaagttgtggaaggtagagatgagcttgagagagatttcttctttttgcaacaaaaccgtgctaagttacttgtagagaactgtgagctgcagaggaaaattgttgagttgcaagagaacgtagattgctggaaggcagataaggaagagaaagataatctcatcatcgagaactatgagttaaaggcagaactgcgtgctctaaaaagacaactttcagaagccaagaataagaacgaataa

SEQ ID NO: 86471 - DNA, 386 bp, Oryza sativa
  Clone ID: PAT_MRT4530_85509C.1
gattacggataaggcatacctcctatcttaccacttatggaatataccgataaggtataccttcacgtacacggatcgttccaacatacgttgtaggaatctttacaaattatggaaaatatctccacgggtcaaagtaatttccaaagtcctactcggaatcttacttggggatcaagatgatccacggtataaaagggacccccacggaggggtgcaaggcatcgcatatcatcacctacacacccaccatagtttacgaagccggagtatgcgaagccaagttgttgggagatctcgtcggatacaccgactacgatctcattctcgttccaacggaccccaatacccaaatcattcggtccacgggtatcccccgtcgacac

SEQ ID NO: 86472 - DNA, 2743 bp, Oryza sativa
  Clone ID: PAT_MRT4530_8550C.1
tcatttgaaactatttttattatttttcttatttttcccccttttactctttttcttagagttaggagaagatgccataggatttaaagtgtttttaagactattctcacagtcctcgctaaaatccatgacctcttccataatttcactacataaatgttgtagtaaaaaattatcctccaactggtcatctaatgactcagtatcaacattaggggtacaaacttgattaatagaagaacaagcacatccgcttatcctattatttttcttccttgatggagagattactgcctcagggatagcagagagctttgccacaagactttcctgaatctgggccttgtcaaccattatagtctcctcatctaaaccatcaaattcttcatcagaaacagtcaagtcatcagattcaggtatcagatttagctgagaagagggagcagaaggaccacccctctcactaaattgaccaccagaacccatcttagagctgttacctgaatcaaataaaccagcccccttccccagatcctgattcatgttcccctcttttttcttttccaaatccccatcatccaaattctccatctccataggcacaggctcctcaggcctattttcaggttctactctaaaagacagctcatacaagtgatcaccaataaccacatccaccacatcaggaatcagagacgggtcaagaaccaaaacttgtaagcgagctatatcataccttctagtaaatatcatatcaacagctttagtaattccaaggatggaaccaacagcccaaatgattaaatactctctcaattcagaaggaagacctttgcactgtacccacacttttggcatcacatatttcacctcattcccaactcccctttccacaatctccatttcagcctcaccaactttagtgtgtatcttgccagacatatgtcctttagtgaccttaaccaaagccgctttaggctcatgcttaaccctcattccagctcttcgaaacgctctgctcttgaatcttgatttcagtaactttcttggatcacggagatattggacagaaacaattgagcatgatatcttctttgcagatttcgcttttggcttagtcttcttcacaggcgtaggcgtttcttttataggcccaggcagaacacccttttttagtgcactccctcttggagtagcagatggtggcagcctcaagcactgcggcggcaaaggattgtgaggcttccaaactagattattcttcatcgagaacctcactttcttaccgctcttctccccatcctgggaaataattgtaccttcgctgctaacatcgtctccatcagaaaccgataacctatctgcagattttgctctcttccttttctttgcagctttcccactagcgggcgaagcacttgagctgctgcctccattgaccataccagcttctgctgcagccttctcaaactgcttctggagattggacatcaatgtctcatcaaatgtaacagcctcagtaccatcacccatctgttggtcctcctctgcaggagcatctgtactctgtttcgtgacatctccctcatcaacaacctctaccttcttctttttcttcttctctttcttctccttcttgacctttttctcttgctttgaatccttggccccctctgtctcaccttccaccaatgaagctttcttcacctttttcttcttcttcttctccaccttcacctcatccaaatccatgccattctccacccctgtcacctcggtactcttgaactctggcacagcaatctcgaccccagagagctccaatcctttctcaaccttcacaaacgcatccctcagcccaaatagcacctttcggtttgcttgcacggtctccgccttcgccccaatatctgagaacctcttgctgaacccaaacagcaagccaaccttcccaatcttctcgtctgcgctccccttctccaccccctggcctttcttcgccctctcgagcaattgtttgccgctctcgaggaacctctcaaacacactagacttaaccttagccaccatcaccctatcagatgacttctccaacacagcgaagaaaggagatagcaacacctccattgtctgtaagctcacagggagcacaggcgacagctcgtccagaaacacctcggcgacatggtacccaagcccacggggcgagccggcggcgacgttgtcggcctcgggaaggagtaccttctccgacaggatcgatacgacctgggaggtgaggtcggcggcgaaggagttggcggcgaggaggaggaaggcgtggtggaggaacctgcggttgaggaggtagaacttgtcgaggcggtgggtgtcgatgtggacccactcgcggcggagggtggcgaggtaggcggcgaagaaggcggcggcggcggccggcgaggggcccgaggagacgccggcggcgaggcgggtggcgagggaggactggtagagcggcttgtcggagtgccagaagcagaagaagaggcccttccagagcttgaggaggtcgcagccggagaggtgcggagccgaggccgggaggaaggtggagaggaggtgccgcaccgcgcgctcccgtgcggagccgttgcaggaggccaggcgccgcgcgatggccgcggcctcggccgatgcgtcggcggcggcggcggcggccatggagaagatttgggggagggagaggtggaaaccctagctg

SEQ ID NO: 86473 - DNA, 1167 bp, Oryza sativa
  Clone ID: PAT_MRT4530_85510C.1
atgctggattacatccccaccgtgttcgacaatttcagtgctaatgtttcagtggatgggaacatcatcaacttgggattatggggcactgctggacaagaggattacagcaggctgaggattctgagctacagaggagcggatatatttgtgctagcattctcactgatcagcagagcgagccatgagaatgttctcaaggaggaactcgaattcgatctatggccgcgttggggcgatggcggggctgattttattgggattttcctggtggatgggtgcaggatggattggggtcaactgcgatcatgttcaccacatataattgatgaccccttagatcataatgttggaggctatctcaaaaggaaggcaaagcatagaagcacagaacattgttcgaatggtcttatggaagcaacactatctcatgctcgttcacctaaacagcttaaggttattacattgattttggcattggctgcaccagttgtgtcatatgctggtttggttatttgcatggttgatgttgtaattgggagtattatgtataaaaatgttggtgtgatgtggcaatttgagcaatattggaccttgcttcttatggcattccagttggctgatgattgcagttacatgttgatggcatccttatatgtgtagtttataaggcaccatatcaattaatttaaatcaagcaaactgatgtgtaccttaaatttgcaggaaccctggtggcctaccaaattggcttggcaatgtagtagtctctgttgccattgctattgtcatatgttttacctgtgtgtatcttctttcttacgttcatatatcaggtaaaccatgacacactatatatatcatcatgctttgcttccctttgcagttacatcaatttctgtgatcatgtttattcgaaatctcaaaagtaggttctgcatcagattgttacacctgtcctgtccacgagattgcatccatccagaagggaatgaaaagagcatcaaggcatttttggcaaattattgattttgttcttgagcgtggcatttaccaatccattatatatatatatatatattggttttattacagtacaaagaaatcaagttcatgttactcggtgcattgttcatacagatgtataaaaatgttggtgtgatgtgg

SEQ ID NO: 86474 - DNA, 395 bp, Oryza sativa
  Clone ID: PAT_MRT4530_85511C.1
cacccgtctaactttgtcaccaatcttcatcacgcccccaacttttgcgtaatgagcgccaccgccctccatctcaaatactttaaggacaacaatggatagagcatccctcctttcaacacctccatgaacgttcagctccaggggctcgacaaggtcaagcaaaccatctgcttctcctctaaagagtgcagggaggtcttgtccaacgccctgtgcccatttggctaattctatagacagcgactacaccataaggagctacggacccagggccttgtcaatggtggaatcaacgttccaatgatgtcggcctctccaatttttgctaatgctccagctgagaaaggtggcaaaaactccatgattgatttcctcatgggtggaggtgtcag

SEQ ID NO: 86475 - DNA, 258 bp, Oryza sativa
  Clone ID: PAT_MRT4530_85512C.1
atggcgcgccacgacttgcacacggatctgaaccgcaggatggacttgacagggaggcggaggaggatttcctccacaatgtcttccgggatgccggccgcggcggcgccgggacacttcggcgtgaggaggaagccgcgcgcggtgatgtcctcgcgccgccgtggcggcaaggccgtcggcggtggcaccgccggtgaggaaggtatcggcgtcgacgaggacacaactccagatcatgctcaagtgctgaactga

SEQ ID NO: 86476 - DNA, 522 bp, Oryza sativa
  Clone ID: PAT_MRT4530_85513C.1
atgccgcttcccgccaacgccgctcaaatcaccgcgccacccgttgcttcccacgcgcgcgcgccgtggtggccgaccgaccagtcgccgccgccgtcagagcctgccgcgcctgagcacgagtctgccgccttgcgccctcccttcctcttcctctcccttgttttcgccttctgcctccaccgcgccatcgtcgctccgccctgcttgcacctccgccgtttgtcgccaaagcaccgggagagccaccgacgccgtcttcaacctcccgccggtccgcgtggctgccacgtaggtgccacgtcggcgccagctcggccggaccgggtcaagccgatcccggtcagccgctccctccgtccccgctcgccttcggagcccaaagacccgcagtgcgaggatttcgaggatcaagctcaagatctcgaggaaggcaagggagccttgatgccgggagacaagtggattcgccagggtggtatcggggaggacccctgggcttcctggcacagtatggtctag

SEQ ID NO: 86477 - DNA, 674 bp, Oryza sativa
  Clone ID: PAT_MRT4530_85514C.1
acgaggcgggcgagcttgaggacgaggtacacggtggagcgggtggcgaggacgtcgaggagccccaccacgtgcgggcggcggcgacggtggggctggaggagctgcggaggaggatggcggacttcgccagggagagggattgggagcagttccactccccaaggaacctcctcctcgccctggtaggggaggtaggagagctctctgagatattccagtggaaaggggaggtgcccaaggggctccccggctgggacgaggcggagaaggtgcacttgggggaggagctggccgatgtgctcctctacctcgtcaggctgtcggacatgtgcggagtcgatcttggcagcgctgctctacgcaagctggagatcaatgcacgcaagtacccagcaagccagtgcaagggctcatccaagaagcatacctactacagctccagatgcgatgttagtggtaacagcaacggcaccaaccatctcacctctaacgaggagcatgacaacaacaccagcagcaacaacgacaacaatggagtctaagacttatagagcagcttggatggtagcttggctggttcttgcgtttagtgatcctcgctaattatgtgccgatacagggagtaggcattgatctcttttggtggtaaagaatcaagtttatctagttgt

SEQ ID NO: 86478 - DNA, 1586 bp, Oryza sativa
  Clone ID: PAT_MRT4530_85515C.1
atgggaggcgaggtgagagaagaggagaggggaaccgcgacgcgccatggcccctaaccccagcgacagcgccgtcgtcggcgaacaagaggaaggacgaggcgggggtctcgtcgaatcaggcggcggtgcgggaagaggaggaggagaggcgctggtttggggaaagaagaggaacgagaaaaaagaaaagaaagagggaggggaaatagacttccctcaggcggctagggtgcggcccgagagaaaagggcggctcggccgagctaaatgggccggccggcccgagaaggcggcccaaaggcacgcgcggggagagagggaggggaaccggtgggccgggtccacctcgcgttgtcccaagtgggacccgcttgtcggcggctcggctcaccgtgagcgaagggtgggtgcggtgcacgcttgtggcttgcggtggacgcggcgtgcaagtggcccacgcgcagcctctcggctctccgtgggccgcgcgcacgcgagcggggacggagggagcggctgaccgggatcggcttgacccggtccggccgagctggcgccgacgtggcacctacgtggcagccacgcggaccggcgggaggttgaagacggcgtcggctggaacagacggcggacggcggctgcgaacggcagagcgaaccacggcgatacaggtgaaagcgagcacaccgggaggtagcatgggttgagaggggacgaaccaatggctcggattcgctggagggagttcgacggcagcggattgcggcggcggcaaccggcggcgggaaaagagggtaacagcgacggcgcgacgggagatcgattcaggcgagctagagcatctacgcgacttcgggaatccgtttctagcattggattggacggaacatcgccgaggaaggctgatgatgggtggctactaccgagcgcggcggcgacggcggcaagcctactgcgagcggcgacggcggcaagcctactgcgcggaaggaggaagagtgaggagggagaacggggaggtgttctaccgagacgagacggggcgctgtgacgagaggccgacggcacgggagtgatctctccggcctcgggccggggaagaggaagaagacgagcgcccggagtccccttcacgcgtccttcgcacgcactggctctcccggtgctttggcgacaaacggcggaggtgcaagcagggcggagcgacgatggcgcggtggaggcagaaggcgaagggaaaagaaggagggagagagggcgacgcggcaggaggaggaggagctctgcctccatcccttggaagctagcacgcggagtggcggggcctggtcgatgacaacgacgatgacggcggggcggtttggaagggcgcggctacaaggcggcagactcgtgctcaggcgcggcaggctctgacggcggcggcgactggtcggtcggccaccacggcgcgcgcgcgtgggaagcaacgggtggcgcggtgatttgagcggcgttggcgggaagcggcatcgagagggagcgagagcagagagagagaggggaaggaaagagagagagagcgagctctctcttgctcagcg

SEQ ID NO: 86479 - DNA, 669 bp, Oryza sativa
  unsure (1)..(669): unsure at all n locations
  Clone ID: PAT_MRT4530_85516C.1
nnggnnnnnnntttgtttttttttttgcgtgttttgtggtttccccataatcatcgaacttcatatgattatatcaacacaggccatcatcaatttacagctttcaggtggcactatcaccggacaatcaaaggcgcctccgaaacatagcaacgcaggcacacaaagaaaccatggggaagcaaacttcccctactgactatttcaaagaaatagaaaagaatgtttttgtgcgcccttccaacatttcaagaatatcagaggcgatgaggatcacactactgattcaatacttacaaggtgtatgtacagagtattgggtggcctagaccgccgtgtactttcagattgccatgagggttgttaatccaagaaatacaggccagtctgacaattatgttgtctcgtcaaactccattttctttccacaaacagggcatgcttcacttctttccatccactcataaatacagccaaggtggaaatgatgtgagcactgcattactatcctaggattctcagaagtataatcttcaagacaagttgggcagacatcttcatcttcagcggatggggaaaagtatgtgaaataatttccaggttccttcgcttggcagcttctctccatgagtagagctgcttcttttcatttttgtgtcatagtttccc

SEQ ID NO: 86480 - DNA, 497 bp, Oryza sativa
  Clone ID: PAT_MRT4530_85517C.1
ggcaaccggagatgacgcctccgcctccgccgccgcggcgccccgtgtgcgtgaccggcgccggcgggttcaccggctcgtggctcgtcaagctcctcctctcccgtggctacgccgtccacgccaccctccgcgacccagatgatcccaagaacgcgtttctgaagcagctggagaacgctccggagaacctgcgcctgttcaaggccgacgtgctcgacggcggctcgctgacggcggcgttcgccggctgcgagggggtcttccatccggccactcccgtgccggaacacaagacggtcgatccggagaaggagatgctggctcctgctgtgaaaggcaccagaaatgtgctcgaggcttgctctgctgcgagcgttcagaaactcgtcgtggtctcatccatctgtgctgtttgctttaacccgagcttgcctcgagacaggctcatagatgagacttgctggtcagacaagaagtcatgcaaagaaaatgag

SEQ ID NO: 86481 - DNA, 360 bp, Oryza sativa
  Clone ID: PAT_MRT4530_85518C.1
ggccctccggaaaaattccttcctcccaaaaaaagggaatccctcccccccccggtttaacccattttatcgccgggatgatttgttttaattaacaaaccccaaaaaaaatttccccctcggaaaaaaaactttttaaaagggttttccgtttttaacagggttttaaacaaaaacccgggggcccaaaactttggggaaaaatttccctccaagaaaaaaattggagagaacctcccgggggggcagctaacccatcctgagctagttttttaccggggggggccggttaaaatccaaaacaaaagctgccccctttttcccccaaccccgtggaggggacgggccgaaatcaacccc

SEQ ID NO: 86482 - DNA, 555 bp, Oryza sativa
  Clone ID: PAT_MRT4530_85519C.1
atccccgggctgcaggaattcggcacgaggtatctacttcacattgcggtattatctgctctcaacttctcatactttattattatgatgattattattattattattattattattattattattattattattatttgcaaaaaaagagagaaaaacttctcttgctattcatcaatgaaatgtgcctctgtttcaaaaagataaaaaaaggcaaagaaagaaagactctgcactggaactacataagtaatgtacgatatcggttcattgaaaaatggtagtggtgtacatcacagtgctcacttgtttttgccttcagaagggttattgtgctttctatttcaagacaattaatactacctgctttaccttgttaatttctggtcgtgctaattgcttcagttaatccctggtgacaactggcaactcagctcttgttgcctttgtcctatgatggattgtatgtggcactgcatttttgacagcctaagacttttaactcccccccccaaccccttccttaacttaaattatacatgttcttatatgccc

SEQ ID NO: 86483 - DNA, 1763 bp, Oryza sativa
  Clone ID: PAT_MRT4530_8551C.1
caagaaattccccccctctcgccctcgccttctccgagttgccagcatatgcgccccggattttccttcagatttgcctagtttttctccctcgctcttgactcgcgatctcccgatctggttcgaaagatcgcacccttttctctctgttttttttaatctatctctcccccgagcggccctcactcagatcacccaggaggagggcggttgcggcggtggtgtcgtttgcggattggattctttgtctgatctcgcgtggtgaggatcttgtctgtgtggattcgcgggtttcttggatcggaaagggggaatgctggtatcaatatgctagcccgcggagccgtgcggtcgctgttcgatcgtctccggccgccgccgcatcaccggaggaggaggagtagccccgccgcgattatgccggccgccgccgccgcccaccgtggctgcttctgcagcctcagccactcgaatctgtgcggggagggcagtgtgattcagaggaagggatttcttgatcttgggatgggtcggaggttcgcgccgggcagcgcattgggatccaagggatgcctgaattggcaggatcggggtagatccaagaggggggtggatggtggcgaggccgtgaggatcaaggcgcaggttctggcgccgcagcggcagctgctccatgacccggaggttctgccattggaggaggttgccacgaagagcttgaacgggaatggcgcgtgccggcgtgggaagccgctgggtttccccgagaacgctgcgccgacgaagatggtggttgctgttgatgtggatgaagttcttggaagctttcttgctgctctcaacaaatttattgcggaccgttattctttgaatcactcagtatcagaataccatgtgtatgagttcttcaagatatggaattgttctcgagaaagagctaattttcttgtccatgagttctttacaacccattacttccaagatggtatacatcctatccccggtgcccgagatgctctgcaaaatctctcttctttctgtagcttatctgttgtcacatctcggcaggatgcaattaaaaatcacacattagactggatcgacaagtactatccagggttatttgagcagatccattttggaaaccattttgctttgcaaggtcaatcaaagccaaaatcagaaatttgcagatcttttggtgctcaggttttgatagatgacaaccccagatatgctttagattgtgccgaggatggcatgagggtccttctctttgattatcacaactcgtacccttggtgcaaaactggtgttgacgaatcgcatccgctggtgaccaaggttcacaattggcaagaagttgaggaaaagcttctttcttgggtagtaccagagttctgacacttgattcggtaggagacgcaccatttgagagcagcagatgtctcggtagactttgatttctgaagaaacatgttcaacccattccagtatgtcagagttaaataggatctacaacatccctaggcaaagactggcagaatgaacgttgttgcagaatgaaggtctggaaggctccagttttagtatgtctcccatgtgattcaagacgaatttgcaatgttgacgactgaaaccgtcttcactcttcagttcttttaccctgctgtggggtgtatatattgacactgctataacctcaatgaatttggggaacgcttcatataaatttgacatgcgtgtgagcgtgttagatcttt

SEQ ID NO: 86484 - DNA, 469 bp, Oryza sativa
  Clone ID: PAT_MRT4530_85520C.1
cgctcagagaattcgtttacaccactgcctgccgccctgtgaggaccgtgaggcctgccatcacttggccattggttgcctcactggcttccacaacatataccgaacatgctgcggatgcatggcattaggcaagtgccataccaggtacaccaggccggtactgatttccaaccataacaactgcggattactgccagtgccactgcttcagtctaaacacaatgccaaggaggtgaccaagtactgcaagaacatcattggtgcaactgacaggaatgactgcggctgcagtacatgtgcttttgtcagctttgcttggcagttggtgacctggtggagcatgcaactttgggacaactgcccacttcaattcaacttgtcctgccctgtgcacgcaaacaaaacaatgcgaggctgccgagctgctgcctgctgttggcacatacagacatacaaatgacgaacc

SEQ ID NO: 86485 - DNA, 352 bp, Oryza sativa
  Clone ID: PAT_MRT4530_85521C.1
ggaggtaaaccaacggcaagatacagacaaacacaaacatggttctcaattcaccctgagcacatacaatcccattgcctggtgtgacacgcactgaagtcaacaatctcaaggaccatgacacggacagggacttctagccactgcttgacccacggttaacactacaaacctcacattgagagaccgctgaactattcgcaaatacgatcggcgcgatagatgatgcgacaaagggcatctatctcaccacaggagtactaacactggtccatagaaaagcccctatcggagaatgggcatgggccgacgagggaccaaatgcacagacgtgccactgtcgactaagaaa

SEQ ID NO: 86486 - DNA, 1676 bp, Oryza sativa
  Clone ID: PAT_MRT4530_85522C.1
cttgcccctcttcgacgacatatgctcctgctgcggcattgcgccggcgtcgcggcgacctccagggcgccaccacggtcgtcgtcagtccccgctggtgctcaagccagcccgaggcctcccaccagcagcggtggcgcgtgcgcgccatcggttcccagtccaacaccaccgccgcaggcaccaacagctgaaacgagcgtgcgctctcctccaccgtccgatcccagattctcccttggtccaccaaagacatttcccagtccaacaccaccgccgtcggcgccaacggctgaaatgagtgtgcgatctcctccaccgcccgctccgagattctcgcttggtccaccgaagacttttcccagtccaacaccaccaccaccgtcgccaatggctgaaacgagtgtgcaatctcctcctccgcccgctcctagattctcccttggtccaccgaagacctttcccagtccaacaccgccgccgccaacaccaacggctgaaacgagcatccgctcttctccaccgcccgctcctagattctcccttagtccaccaaagacctttcctggtccaacaccaccaccgccagcatcagtggctgaaacgagcgagctctctcctccaccgcccgttcctagattctcccttggtccaccgaagacctttccccgtcgaacacctccgccgctggcgccagtggctgaaacgagcgtgcgctctcctccaccgtctgctccgagattctcccttggtccaccaaagacttttccccgtataacacctccgccgccggcaccaatggctgaaacgagcgagcaccctcctccaccgcccgttcccagattctcccttggtccaccgaagacctttccccgtcgaacacctccgccgccggcagcagtggctgaaacgagcgagctctctcctccaccgcccgttcctagattctcccttggtccaccgaagaccgttccccgtcgaacacctccgccgccggcgccagtggctgaaacgagcgagctctctcctccaccgtccgttccaccgaagacctttccccgtcgaacacctccaccgcagacaccgatgtctgaaacgagcgtgcgctctcctccaccgcctgctcccagattttcccttggttcaccaaagacctttccccgtcgaacaccaccgccgccggcgccagtggttgaaacaagcgtgcgactccctccaccggaacatccgacagcttcttccagtggcacgaacacgccgccgccggacgcatacacaagtgtaagatcgccgccgccacgcacaccaaagatctccggtggcacgcacacgcccccggacgcaaacacgagtgtccgttcgccgccgccaccacaggacacaccaccgagagtttccggtggcaagcacacaccgccggacgcatacgccagtgtacgtgtgccaccaccttccacgccaagagtttccggcggtggaacgcaggcgccgccggaggagccaccaccaccaccgccgtcgccgacgttttccggtaacatgactggtcgtccaccaccaccatgttctccgacggccgtgtccagtggctccccggcagtgccagtcttgtttatggcgatgaacacatcctgactagtttgatttgatctccctcgagatttagttaactgttc

SEQ ID NO: 86487 - DNA, 515 bp, Oryza sativa
  Clone ID: PAT_MRT4530_85523C.1
gcctgaacatccattttctctcttcctctatggctccctaggcgctggcgaaatgcagatggtgtcctcgtcgttgagcaggccgttgttgttgtcctcgtagctgaccatggttttaggcatgctcccgaccttaaggagtgtattcgcgtggccgtcgtcgtccccgtcgccggcggagggggcaccttgcagcctaagccaggctttcttcttcctttgcatgagagccaccattatcctgggggcgtgttatactgttttccttttctgggttgcttttgcataccctcgtagctggctagagtacctgcagctgtctccattgttcgtcgtcgctgtaactgctccaacgctgggagtagtgatgatccggaacggctgaactataccatcaaacttcgtggatgcgtgtgggcacatcattaattcctcatactgcttactactactatgtgcatgtctgtatgctacgaaatgcatgtatcgatctgcgatgtaatattcagtatttt

SEQ ID NO: 86488 - DNA, 2555 bp, Oryza sativa
  Clone ID: PAT_MRT4530_85524C.1
atggcggcatctcgcctcgtcgcggccgcggccattgtcgtcgtcgtcctcgtcctggccggcgcgggcgcggcgggcgcggcgggcgcgggggaggtgcgggcgctgctggacctggcggcggggctggaccccacggggaggctgctgccgtcgtgggcgccggggagggacccgtgcgggcgcgaaggtggcggcgggttcgagggcgtggcgtgcgacggcgccacgggggccgtcgccaacgtctcgctgcaggggaaagggctcgccgggacgctcccgcccgccgtcgccgggctcacggcgctcacggggctgtacctccactacaaccgcctcaccggcgcgctcccccgcgagctcgccgccctctcccgcctcaccgacctctacctcaacgtcaacaacttctccgggcccatcccgcccgagatcgccgccatgccctccctgcaagtggtgcagctctgctacaaccagctcaccgggggagtccccacgcagctggggctcttgaagaggctcaccgtgctggagctgcagtccaaccacctcagcggcgccatcccggcgagcctcggcgacctgccccagctggtgcgcctggacttgagcttcaacaacctcttcggctccatcccggtcaggctggccctgctgccccgcctcctcgccctcgacgtcaggaacaacaccctcaccggcagcgtgccctccgaactggcgaagctgcagggtggattccagtatgcaaacaacaccgatctgtgcggcaccggcctgcccgcgctgcggccgtgcactccggccgacctcatcagccccgacatgccccagccgttcagcgccggcatatcgccgcagatcacaccggggtcctcctccgatggccatggccattgcactggaactcactgcccgccatcgacgaaggcgctcgcggctgtcgttgtcgtggccgtaattcttctcgcggtgaccggggctggcatgttcgcgttatcgtggtaccggtggcgcaagcaacgggttgttgcaggctcgccggcggctgttggtggccggtgtagtacagacgctgctggtaaggactcgtttcgcaagagcgcctcatccacgcttgtgagcctcgagtactcgaatggttgggatccattggccgatgggaggggtggcattgggttctcccaagaggtggctcagagcttcaggttcaacatggaggatgtggagtcggcgacgcagtacttctcggagctgaacattttggggaagaacggcaacttcgcggccacgtacaggggcacattgcgagatgggacatccgtcgtcgtcaagcggctcggcaagacctgctgcaagcaagaggaggccgagttcctcaaggggctgaagctgctcgccgagctgcagcacgagaacattgttggcctgaggggcttctgctgctccagagcgagaggcgagtgcttcctcgtctacgacttcgtgccgaacgggagcttgtcgcagttcttggatatcgacgccgacgatgttgctcgcagcaatggccgcgttctcgaatggtccacgaggatttccatcatcaggggcattgctaaaggaatcgagtatttgcacagcactagagcaaacaagccccctcttgttcaccagaacatatcggcagacaaagttctggtggactacacctacaggcctctaatatctggttctggcctgcacaagctccttgtcgatgacctggttttctcgaccctcaaagcgagcgctgccatgggatacctcgccccagagtacactaccaccggccggttctcggagaagagtgatgtttatgcatttggggtaatcgtatttcagatactgaccggtaaaagcaagattatgcagctgccccttgagtccagcaacgacgaggatctcatcgacggtaacctaagaggatgttactcggcagctgaagcagctaagctggcgaagatcgcatcagcctgcaccagtgaaaatccagatcatagacctacaatggaagagttgatccaagaactgtgcaccttctgatcatgggcctcatccacctgtaactgttcccacgagtcacatgccttgacagtgccatgagaatttgtaacctacctacctaggatcactaatcactgatcttagaagcacatccgatcgaggtgccaacgaattaatgacctacctaggatcctgaacatcttgtatcatgctaatgttgtattggtattactgcatcgattaggttggatgtttctcctccatgttaggtgaatgcagccatttgtagcttcagctcttgtgactcctcccaaggtgtgtaccatcagtactgtgtagcagctttggatgggatcctgtgatggttccatccatggaggaagagccaagagcccctggagtgcatgtgaggtagtactagtagtgtagattgctcgccttgttttgtttgtttgctcatcagctcatgctttggtacagcactagaccttgtgatcaaaaaaaaaacctcagcccggggatcc

SEQ ID NO: 86489 - DNA, 3033 bp, Oryza sativa
  Clone ID: PAT_MRT4530_85525C.1
atggcggtcgacaaattggtgttcaacggattcagcaacagcagtttggtgcttgatggttcagctgccgtcttaccaaatggaatcctcaagctggccaatggatcatcatatgcatacacaaaaggccatgctttcttcccttctcccatccaatcgcgcaactccacagatggctccatcttctccttctcggcaacctttatcttcgctatgcttcacacgcttcctttggaggagggcgatgggattgccttcttcctagctgcacacaccaacttcaccggaacaggtatttctggcgactttggtcttcctgctgaagatgacaatggcaaatcgttggaccatatcctgtccatagagctagataccttacacaatgaaagatttggggacatcgatgacaaccatgttggcatcaacatcaacagcttgaactcctcccagtcctctccagccggctactacacagatgaaccctactctattttgcacccgctgcggctcaagagtggtgaggagatgcaagtatggatagattacgaccaccggcgcatgcagctcaatgtcaccttagctccagtccccatggccaagcccaagcgccctctcttatctgcaactcataatctctcaaaactgttgttggaccacatgtatgttggcttctcttcatcgtcgtcagcggccttgtatattagtggtcatgctcatggtcattttattgccggcttctgcttcaggctagatggaaaacctgcatcactgcaatactccaagctacccaagataaacacatctgatctacctgatcatgtcacctatggtactggaagggggagctcgatttattggccagattttttgacacttccattgatatatgcctcagctcttggtggtgcaatatcgatgcctgttatcctctacctaattgtgagaagatgtcgcaggtaccaggagttacatgaagattgggaggtcgagtttggcccgcataggttctcattcaaggagttgttcaaagctaccaatggctttgttgacaagcagttgctcggagtaggagggttcgggaaggtgtacaaaggagtgcttccatcatccaaattggaggttggtgtcaaggtgatgtcccatgattcaaaacaagggatgaaggagttcgtcgcggaggttgtaagcatgggccgacttcgacatcggaacctagtacagttacttggatattgccgtcgcaagggtgaacttctactagtatatgagtacatgccaaatggcagtcttgataagtacttgtatgaccaggataaaccctcgccgaattggattcaaaggtttgagatcatcaagggtgttgcatcaggtcttctctacctacacgaagaatgggagcaggtcgtcatccaccgtgatatcaaggcaagcaacgtcctcctcgacagtgagatgaatggtcgactaggcgattttggcctagcacgattacacgaccatggagttgatgcacacacgacatgtgtggcagggaccagaggctacatctcccctgaactagcgaggctgggcaaggcgaccaaggcaaccgacgtgttcgcgttcggtgcattcatcctcgaggtcgcctgtggccgtcgcccgataggcatgaactcatcaggagaattgcaagtgttggtggacttcgtgctcagattctggcagcgagatctgatcctgtgcatgttggataccaggttgggaggagagtttgtgacggaggaggcagagctagtgctcaagcttgggcttctctgctcgcacccgtcgccagcttcaaggccaagcatgaggcttgtgatgcaatatttgtgcggcgatgtgctgttaccggcgatgccggagagttaccggagcatccggagtttcagtgagatgcaggttgaaggtgatcagcttgatgagaatcccttattaagacagtatctgtcggcgttcctcctcaagcttgccgacgacctgggcgtcgtgctgcacgccatgcttgccaagaaggaggagctgaccgcggtcggcaacaacggagcagaggcatcgtgccgttcccgtgctctgctggcggcgctgccatcggagtcgtgctgggtgccgcccatggacgaggacgactactcgtcgctgtccccgtggatgatcctgtcgaccaccaagtccgtcaagtacatcgacacggcgcactacgcggtgccgggcggcgcccgcgtggttgagttggtgaccggcatggagacggcgatggtgcaggaggtgagcaccgtgcccgggctgtcgtacaggctggagttctccgttggggacgccggcgacgggcgctccgggtccctgaccgtgcaggcgtacgcgtgcggagatgagagaggcggccggcgaggaggcgggaggaggagggcggcgctgctggcctgctgctatgccgtgcgacgaggagggcggctgtctgccgaggagaaggccgatgtcggggccaccgccacggcagtccgctccatcgacgggcgcacggccatcgccgcggcgtcgggcggggtagcggccatgggcaaccccaccgccgccccttccgccaccccgtcctccaggggcctgctgctggggcggccggcgaggccgacgcggagctcgtggccgcgcaggaggtggccgtggaggttgcggcaagcgctgcgggtcgtcccgtcatcccgatggctggcgagggagggagaagcggggcacaccgtcgatgtggtggcggcggaggaggaggacgccgggcaccgctccgtggctggatccggccgcggaggaggaggagacgaggaggacaccgacaaccactatggcaacgccgacgaccaccatgctcaccagccgccgcgcgctcgcacgccgcctccgccgcccgccgctcagccctgctcgccgccgcccgttcttgctactcccctgccgcaaagagaaataccccgtgtatctggttttgcggttcgaggacgtattttatcccgatga

SEQ ID NO: 86490 - DNA, 698 bp, Oryza sativa
  Clone ID: PAT_MRT4530_85526C.1
atgggtctcacgtgggccccacatgcgttcctcgccaagcttgccgacgacctgggcgtcgtgctgcgtgctatgctcgccaaggaggagctggccacggtcggcaacaacggcgtcgtgttgttcatcgtccacaaccccggtgtctctgatgacgaagctcgcggccccctcatcgactcgttcgccattcacaccccgctaccccctcaaactgcgccaggtaacatgctgaagaatgggggctttgaggagggcccgtacatcttccccaacacgtcctggggcgtgctggtgccgcccatggacgaggacgaccacacgccgctgtccccgtggacgatcctgtcgaccaccaagtccgtcaagtacatcgacgcggtgccgggcggcgcccgcgcggttgagctggtgtccggcatggagacggcgatggtgcaggaggtgagcaccgtgcccgggcggtcgtacaggctggagttctccgtcggggacgccagcgacgggtgctccgggtccctgaccgtgcaagcgtacgcgtgcggagatgagagaggcggccggcgcggaggcgggaggagggcggcgctgctggcctgctgctgtcccgtgcggtgaggagggcggccgtctgccgagaagaccgatgccgggaccaccgccacggcagtccgctccgtcgacgggcgcacggccat

SEQ ID NO: 86491 - DNA, 584 bp, Oryza sativa
  Clone ID: PAT_MRT4530_85527C.1
atggctggcaggtcgagatacgacaaccccttcgaggagggcggcggcgacgaggtcaaccctttcgcggataaagcttctaaaggaggatcagcagcaatacgccctagtgctccaccggccacccacctttcgcctcttcctcctgagccagctgacttctacaatgacttctcgaccccggtggatattccaatggacactagcaaggatatgaaaacaagggagaaggaacttcttgcaaaggaagccgagctaaacaggcgagagaagatttgcactgctgatcttactagttttgcagctggtattgtgttggaagacaaaaactggcctccatttttccccatcatccataatgatattggcaatgagatacctgtccacctgcaaagaacacagtatgtcgcatttgcgtcactcttaggattggtcctgtgcttgttttggaacatcatctgtgttacggctgcttggattaaaggggaaggtcccaagatctggtttcttgctgtcatctatttcattcttggatgcccaggtgcctactatctgtggtaccgaccactttaccgtgccatgag

SEQ ID NO: 86492 - DNA, 808 bp, Oryza sativa
  Clone ID: PAT_MRT4530_85528C.1
ggtccggtttgacggcaacaccacgcgtccgcacgacgggctgagcctgagcctgccaaatccacgcggagtccgctaaaatttttccactggttctagatgatcgccatcgatgatgcaacgaccaactgcttcctctgcggaatagctgaataaattcagagttcaggtccatctaggctgctgctgctgctcttcgtctttgctgacctcggcacaggcagagagagaagccaagaaaagggaaaagagaggaagaagagagggaagaggagaagggagacgcgcggtgatcggaggttgatccatggctggcaggtcgagatacgacaaccccttcgaggagggcggcggcgacgaggtcaaccctttcgcggataaagcttctaaaggaggatcagcaggtcaatccagctattccggaggcgcattctatacaacacaatcacgccctagtgctccaccggccacccacctttcgcctcttcctcctgagccagctgacttctacaatgacttctcgaccccggtggatattccaatggacactagcaaggatatgaaaacaagggagaaggaacttcttgcaaaggaagccgagctaaacaggcgagagaaggaaatcaaaaggagagaggaggctgcagcacgagctggtattgtgttggaagacaaaaactggcctccatttttccccatcatccataatgatattggcaatgagatacctgtccacctgcaaagaacacagtatgtcgcatttgcgtcactcttaggattggtcctgtgcttggtttggacatcatct

SEQ ID NO: 86493 - DNA, 482 bp, Oryza sativa
  Clone ID: PAT_MRT4530_85529C.1
ctaaagcacatgatacgcgctctcccacaccgaggcacctcgcacccgtaaccctccccaaacccaccatcccaaaacggcacccagccaacagtcacgcagaacccagaaacaaagggactcctctgccctacgaagcagctcacatcacgcacccgctccacccaaaccaagacctcacaccctccaacacactcgccgcattccaatttttgggcacattggagagccgccaccacacccgtcatgaaacacagaagacacccgggtccgacgttaaacctagtccatcctcgatgtcagaagcacctgccaccggccgtcccctcccacatagccgcatgcttcctgcccaaagtgacacaagaggaagagggcaaggaacagcagaaagaagaagggacaggctgacctatgggtttcggtgtcataaagtcaaagtagagatggtaaaaggagaggctcttggagtgaacaattag

SEQ ID NO: 86494 - DNA, 456 bp, Oryza sativa
  Clone ID: PAT_MRT4530_8552C.1
atgtcgtcgctgcgagctgtctcctttccctcccagactggctctaccaagctcgccggaatgtgggggagaggagaggcgcagggtggccgcgcaagagaggagtggcgtggtgacgggagagaggagtggcgcagcggcgagggagtggaaagaggagtggccacactcctttccctcctagatcgcctccccctcggcttgcctccccctcggctttggctccacaaagttcgctggacggtgggggagaggagcagcgtgcagtggctggtgggagaggagcggagcgcggtgcggcagcgagacaagagtggcacgccatgtgggagtggtgtggagctatggacagctaatggaaatggatcttcgctggcggccgagttaagagggccaccagcgaagatgtacaccttttcgttggctgcccacttaaacgtccgccagcgaaaatag

SEQ ID NO: 86495 - DNA, 376 bp, Oryza sativa
  Clone ID: PAT_MRT4530_85530C.1
cccactcctcctcagcttagtactccaggataggcaggaggccgaccaccaactgagagagctagtattaggaggacggcggtgcgtagcgcaagaactacgagaggatgcccagggacctaccgacgggcaccatgagtactgggctgacgcctaactaccggactgttgctcatcaccttcatgcttcaagacgtgctgaaactcaaatgttgatgctccaagatcctccatctcatcgagattgacctacagatgcacttgaccgcatccatgcttttatgagctgtgatgaatttggcctgcacaacttgcgccgtctgcatgagggccctgccgttacagccttgatgtgggaacgcgctcctgagcatgg

SEQ ID NO: 86496 - DNA, 981 bp, Oryza sativa
  Clone ID: PAT_MRT4530_85531C.1
atggctactccagcctctgcggggggcgggagcgggagcgtgggaggcgtcggctcctcctccggcggcggcgagaggaggccgctgttccagcggctgtggacggaggaggacgagatcgtgatcctccgcgggttcgcggagttcaccgcggcgcgcggcacggcgttcgcgtcgcaccagtacgacaccgaccccttctacgaggacatgcgcggccgcctccagctcggcttctccaagagccagctcgtcgagaagctccgccgcctcaagcgcaagtaccgcaactgcgtctcccgcctccggggatccggcagcgccttctccttccgctcgccgcacgagcaggccatcttcgagatcgcgcgcaacatctggcgccccaccaacaagcacggccgggacggcgactccgacgacgaggacgccacgcaggtcaccccagcgcccgttcccgtgaacaccagccccaatggtgaggtcaagtccccaacctcagggcggcagcggcgtcgcaggcgtggcggagattttgccgccaccgcgcctgccgctgctccggccaccaccaacatggtgcagcccattcagccggtgcaggtgccggtttcggtgcccgtcaagatggatgacacgcttcctgcgttgtcgcagaccacaatgccaattacagtgacaatggagggctcggaacccctcagattgccggtcatgccacctcagccggctgttttagatgccgacaagagttgcttgacgcctctgtttaaggagatggtacgtgcagtgataaatatcgaatcaaacccgttcggtgcacaactgtccgagccgccacatggtttgcccatggaaggggagaaatggaggaagcagcgtatattggagctggaggtatacttgaaacggatcgagctgctgcaggaccaggtgaaggctacgcttgaggagctcaagtcctccgcgcctgggacttga

SEQ ID NO: 86497 - DNA, 343 bp, Oryza sativa
  unsure (1)..(343): unsure at all n locations
  Clone ID: PAT_MRT4530_85532C.1
atgtcgacaaccggcgacaacaacaacactggtgacaaggaggaggagcctcccgtcaacaccaacggaggcaatactgtctcaaactccagcggatggccattctcggtgtataacgtttcactattaccgttcgttcttcgtttcctataactgtaggtcgcaatattattgcgttctcttgtctatgttgatacttattctatattaagcatgctcatgttgtacacatctagcaatttcactagatctactcaaattacaaatattaaaatatgccgaattatgaccaaatttctaacaatagacacacacaaaanggggttccatccaannggcacat

SEQ ID NO: 86498 - DNA, 782 bp, Oryza sativa
  Clone ID: PAT_MRT4530_85533C.1
gacactatagactactctcgcttgcctgttcgtgctagaacctttggctgcacaagtggggagatgcccttcacttatctaggtttactaatggggaccacaaaaccaaagattattgactttgcccctctggttgacagagtggagagatggctcccatctatagctgcttttctcaatcatggtcagagactaacaatggtaaattttgttctatatgctccccctaatttctacatgtgcactcttaagcttcaaaaaaagtgattcaacacatagacagagcaagaagacactgtctttggaggaagtcaaatgatccaaacactaagatccactccttggctacatgggacctagtatgccagccaaagaagaaaggtggtttgggcattataaacctggaactgtaaaacattgcccttctgaccaaacatctggacaagttcttcaacaaaaaagacctgccctaggtaaaactaatatggaacaagtaatactctttgtctgactctcctcatgctcacacataaaaaggatccttttggtgtaaggacatttttagattgattcccatcttcagagcagtctcaaagatcactattggcaatggggacacggcccttttctggaaagataactggtctggcaagtttttacaagatgaaatgaactccctattctcttttgctaagaataaggacatctcctgtcaaagctttttagagctcgagagtttagaacaggcttttcacattcctctctctgttcaagcttgcatg

SEQ ID NO: 86499 - DNA, 711 bp, Oryza sativa
  Clone ID: PAT_MRT4530_85534C.1
atggccggtatcgtggctttagccaaccgccaaaggtccgcttcgcccgtcatggccctagcaatttccgcccatgtcctgctcttttcgttgaagacccgattgtttctttctttccaaatcgtccacgccaccaaagttgcaatggtgtcgaaccctcgacgatgttccttggccattcttttgcgactgtcacatagccaggagtggaaagagtgctcattgagagtcctcgactccgaagacgatctgctgtccaacaacgattcagtgcgaccagccacagaaagtaccgacagcgcgggggcgctagagacttccaaattggcttgtgctcaaggctgccaacaatcctcccagaaccgtaccagcttcccatcgcccactgagcaaaccaaagaaatcgagacaaggttgcgttccttctgtgaaactgggatgttaagtccttgccacggcttatccgacgagatctgcctcattacattggattggaagagccgaacacttagcaaagtttgttcgaaggccagatgcttcaccgaagatggagagaacctccgtcgccacatggatctcctctactgccggacggataaatgcgaccacgtcgtccgcatagagcgagacccggaaaggaatccccaacggtcgcagcaagccaacattctcggccttcgcaaggatagaactcaacacatccattgctag

SEQ ID NO: 86500 - DNA, 957 bp, Oryza sativa
  Clone ID: PAT_MRT4530_85535C.1
atggtgaagcaaaggcagacggtgggtaacttggctattgatggtgatcttacctacgagatcctcctccagctgccggccaagaccgtgctccgttgtggtgccatgagcaaggcatggtgccgcatcaccaccaatccgacgttcctctctgaccatgcgcaccaccgcccgctggaggctctcctatacaactcctttggtaaggcagcaggcaagatcgacatggagctggacaccttgtcagtcgctgttcactaccatgcggcggtgcccgagcggaagggcatcggccaccacgtcatctgcaaccccacgatgcggcagtgggccgagctcccacggctgactggaggcagaaacttaatagaatgccaccgagagttcgggttctacttccaccttcagtacgacgagtaccacttgctttgccattgcactatgaacctcgcgggaaggctcaccaaccatatggtggcgtttgacatggttgccgagacgttcaaggaaatgatgccgcctctagtgaccacgaagttctttgcaaacctgctagccatggataagttcctcatggcatcaaagttcacggacttgggcatggacctctgggtcttggagggctatggagtcatggacgagaggtgggagctctggcaccacgtcgtactgccatggcagctaagtgcaacccttaaacgtccacttctcatcgagggaggtgatagcggcgatgtcataatggggacaacctatgacttgggggtgtacaatgtgaagagcaagatattcagggttgtcgtcaccgtcaaaccgcccgatgcccttctcctgtcacgggacatgctcagggagagcctagtgccacacactttcttcaacaatcaacaaccaaacccaacccgctatgttacaaaaaaaacaacttgcttgccattgtttcgcttcctctcctaa

SEQ ID NO: 86501 - DNA, 997 bp, Oryza sativa
  Clone ID: PAT_MRT4530_85536C.1
agctagcagcaccaaacagaatgttttttttgggatacgcgagggacccatctttgtattaaggaataaagtatttacagagcggtccgaaaaatcaaaaacacgaaggagacaagatacaggaagggggaggaggaagaaaataaaagcctaatctcccaacgaatgaggcgaccttccacccgacataagggtcgccatggccggtatcgcggctctagccaaccgccaaaggtctgcttcgcccgtcatggccctagcaatttccgcccatgtcctgctcttttggttgaagacccgattgtttctttttttccaaatcgtccacgccaccaaagttgcaatggtgtcgaaccctcgacgatgttccttggccattcttttgcgactgtcacacagccaggagtgaaaggagtgctcattgagaggcagacactcagaatgaccaatagctgaaagagcaatccaccatagctgatgagactccgagcaagcaaccaataagtgatcaatcatctcatcgcattgatcacaaagagggcaacaagccgggtgtgacggccctcgactccgaagacgatccgctgtccaacaacgattcagtgcgaccagccacaaaaagtaccaacagcgcgggggcgctagagacttccaaattggcttgtgcgccaagagatcgtgtccggttcctcacctagctaaaccaatcgcagaatgtcccaaagcttgagatattccaggattgcctgaatccccaatgccgaacagatgtctcgaatccacctcttgtcttgcaaagcctcagctaccgttcgtctgttccggaaccgagcgggaacagctgcgtagaccgcgggcgccagcgaccgaattgaagagccctgtaggcaataatcctcctagaaccgtaccaacttcccatcgcccactgagcaaaccaaagaaaccgagacaaggttatgttccttgccacggcttatccggcgaggttctttga

SEQ ID NO: 86502 - DNA, 5932 bp, Oryza sativa
  Clone ID: PAT_MRT4530_85537C.1
atggacaatcaatcaggacaaccgcagtacggcatggctgatcatggatttcgccccttctcagcctcaatctcggcaccatctactgcacagcagcacacgggttcttcgtcgaacactgcagtaattcaggtggcaaccccgccatcccacacagattatggtaacatatacctagctgatgatggctaccattggaggatgtgtgggcagaacacaattcagggtgagccatgccagacgatattctactatcagtgtgcccaagcaaactgcatggtccagaaatcggtcgcacgctctgcagacggacagaccactcaaacattttctatgggcgttcataaccacccacagagggggccaacgccgccaagaagtccctccgtcgacccacccgtgccgttctcttcgccgtcatgctcaccccctcggtcgccggttgaatgcgcggagcgtggctgcgcctctctgtcgccggcgcgcgcaaaccccccttcggagttcgagcatgttccacctggcgacccggagctccgggtaaacagggagatctgtgtgctgccgttctcggccgcgatgagggagcgggaggcgcagctccggcgggcggtggtggcggtggtggttggggcggctcgtacgccgtccgcggcccaggtgcacgacgagctatgctcggagttctctctgtctcctcacagcttctcggtacgccgtttcttcccggaggatttcctcgtcaccttccagtccgacgaaatcttcgaccgtgttgcgcgccgccgctccatccctctcggtcagttccgtctcttggtcgcgccttggtcgaggcagctgcatgcgagggaggggtcgatgcttttccgggtgcggctgcacctggaagggatccccggtcacgcctgggatgaggcgacggcggctgcggtgctcggttcttcctgccgtatcatctcctgtgatccggtcagttcctcagccagtgacatggcggtcttcaagctctacgcttggacctccgaccctgcctccatcccgaaggagaaatggctgcgcattgtcgaggatggtggcccggttgtcacgccgcagggcacctgtgagcgctacctcgactacgtcgttctcatccacctcaccgccatggaggatcacatctcgccgccggagccgtacctccctttcgcgccgtccagcggtgattctggtcgccctagctcggacgactcggacgacggccctcctcgacggcacttcttccacacctccagaggtcgacgagatggttccccccctccgccgcagtccggtcagggctcgacaggcggcggtggaggcggtgggcacagggccgctccggtggcggtgatgccggcggagctctgttccggccgccttcttcggcgggctggggcgctggcgccggagaagcctgtccgggctgtggccggcgcggaggcggccatggcgcggcggaggaggcctcgtggtcggcgacgtcagcaaaaggtgctaaagtggaaaagcaagttcttaaagcttagccctgttcgcagctgttgcaggtggcagccacgaaaaggacaagacacttctgagccggtctcggtcgcaaaggcaaaggagagttctgctctgcaatctctgtctcttggctctgtggtggggcaggaggacagggagtttgtcttgcctgtgagcgcggcgtctgaggctgattcggcagtctcttcgaggagagacatggttgggctggccgcctctccagttgggttggaggcccaacaaggcggtttggtgctatcgactgtcgctgggccggctgttgagtcagctgggtctcggcctgaggtgcagtcacagcccagcccgctagcaatggaggaggcccaccatgacgcttctaccttccttcaagggtctgtttcagcccatgcagacccgttcctctcggtcgttctggcagcaaagccaagcatggcaatggcagcgccgggtgagtcagcgcttccgccgcctgactccgtgccagacgcgacacttggagtggaggctgtctctgctcctttggtgtgcccagaacagcatttggcggcgtcctcgacgccgttatcacaagttttctctccggtctcggctttgccgactgcctccgcggtggtcgtggtagctgagatcggggggccgtttcccgatgaggtcgttccggtagatgagatggccgcatctccgcctgctccatctactgccgtgttcgcagcggctgtggaggaggcttcagctccgccgccgacgcttatcaccttctccaggagagccaagaaagcaatccccccggcactgcttcccccaccagcccctcagcagccgccgcaaccagcgccgctgcagacgccgcgtcgcagtgtgcgtcaagcgcttcaagcgacacatggcgccccaactttctcccgctgccagtcagtgttagctaagaagatgggggagaaggatactgctgtcccagctgcgcctgcaccgactgtgtgtactatccagcagtacaacgagctgttcgagaaggagctgtctcaggatcagatgttggcgctggccgacctctttggcatttgtctaccgcctcctgccagcgcggtggaaaccaaactggatgctatctctgtaccgttggctacccaatttttgggtcctaatctagcagacttttgctacctgccctccattcagacaagaggaggagtgctcttggcctgggatcgtagcgtcgtttcttgcgattcgcattctctaggagaattctctcttacagcgcgcctctccttttgcgatgggaattcctgttggatcacggtcgtttacggtccacaacccgacgcagataaggtgcgttttctgcaggaacttagggacaccagaagcacccgtgatgggccgtggatggtcgttggtgacttcaacttgatttaccaagatcaggataaaaataactccaacctgaacagaaggatgatgggtcgcttccggcgggcgatcaatgacctggcgctgaacgaacttcatctgaatggacgctctttcacgtggtcgaatggatgggaacatccaacgttggagcgtcttgacagaatattcgttacttcggacctagaagagctcttcccacaaagtttcctcaaagctcttccttcggtgatttctgatcactgtccactgcttctttcaacactgccttctcttccggcgaaagggaggttccggtttgagaatttttggtgcaaattggaaggttttgaggaggtcgttcaggaagcatggtcggctgattgtagactgcaggatccaatctcccggttggacttcaaactaagatcaactggtcgtgctctccaaagctggagtgacaaaaaggtcggcaatgtaaagttgcaattggagatggcccgggaactcatcggcaggttcgatcgcatggaagaatcgcggggcctttccggccaagagcgttttcttcatcgcgaattgaaaaggaagtaccttgctcttgcctcccttgagcgaactatggcaagacaaaggtcgcgcatctcttggctgcgagaaggcgatgccaacacgagattttttcatcaacatgctgcctggcgacgacgaagaaattttgtgcagcaactggagcatggctcacaggtcgctactgcccctgacgagaaggctgcccttgcccacgacttctttgatggagttcttgggtcagtgagccaccgtaatttctcggtgaaccttgatttcttcgaatctaggggacagcatatcgaggagttggaagatcctttcaccgaggatgaggtgcggaaggcaattgctgacagcccgcatgacaaggcaccaggcccggacggcttctcgggcatgttctaccaccgctgctgggtcatcatcaaggacgacccttgcctggtacacagcttcgtgaagcttttcaccaaaattctctcacgccgtctctcgccgaagctagactctttggtcgccaaaaatcagagcgcttttatcaagaaacgctgcattcaagacaactttatgttagtgcggcaatcagcaaaatacctgcatgatcgtagaactccttcggtgctgttgaagctggacatcgctcaggcctttgactccatctcatggcagttcattctcgaagtgctggagcataaaggtttcggcgttcgatggcgctcgtggattgctatgctctttcggacagccagctcgcgagtgctcatcaatggtgagccgggttgcccgatcatacaccgaagaggggttcggcagggagatcccatctccccgatgatgttcatcctagcaatggatgtgttgagttctatccttgcgaaggccgagaatgttggcttgctgcgaccgttggggattcctttccgggtctcgctctatgcggacgacgtggtcgcatttatccgtccggcagtagaggagatccatgtggcgacggaggttctctccatcttcggtgaagcatctggccttcgaacaaactttgctaagtgttcggctcttccaatccaatgtaatgaggcagatcttcagatcctccatgacgagttaccatgccaggtcgcatccttcccatgcacatatttggggctccctctttccatctttcgtctgaaaaaagaggatttgcaaccgctgattgacaaaatcggtcgtcgactgcctttctggatgtctcatttgatgactcctatcggtcggaccaccatggtgaaagcagtactaagttctatccccatctacttgctcatggcaatcaatgcgcctaagtgggtaattaaaggaattgataagatccgtcgtggttttctttgggccgggaaggccacggcaaacggcggtgtctgtcgcgttgcgtgggctcgagtttgctcgcccatagagtatggtggtctaggcatcctcgatcttgagagattgggtatagccttgaggtcgcgatggctctggcaacaaagaacctcgtcggataagccgtggcaaggacttaacatcccagtttcacagaaggaacgcaaccttgtctcgatttctttggtttgctcagtgggcgatgggaagctggtacggttctgggaggattgttggctgcagggctcttcaattcggtcgctggcgcccgcagtctacgcagctgttcccgctcggttccggaacagacgaacggtagctgaggctttgcaagacaggaggtggattcgagacatctgtgcggcactggggattcaggcaatcctggaatatctcaagctttgggacattctgcgatcgattcagctaggtgaggaaccggacacgatctcttggcgttgggaaagctcggggtcctactccgctcgctcggcgtatcgtcttctcttcgcgggaagaaccagccttgagcacaagccaatttggaagtctctagcgcccccgcgctgtcggtactttctgtggctggtcgcactgaatcgttgttggacagcagatcgtcttcggagtcgaggactgtcacacccggctcgctgccctctttgtgatcaatgcgatgagacgattgatcacttattggttgcttgctcggagtctcgccagctatggtggattgctccttcagctattggtcattctgagtgtctacctctcaatgagcactcttttcactcttggctgtgtaacagtcacaaaaggatggccaaggaacatcgtcgagggttcgacaccattgcaactttggtggcgtagacgatttggaaagaaagaaacaatcgggtcttcaaccaaaagagtaggacatgggcggaaattgctagggccatgacgggcgaagcggacctttggcagttggctagagccgcgataccggccatggagaccc

SEQ ID NO: 86503 - DNA, 258 bp, Oryza sativa
  Clone ID: PAT_MRT4530_85538C.1
atggtcgatgttacaaacttaactgctgccaaggataggagaaagcgtgacagagaggtcttctatgggtcttggaagtgctcatccactgttttgatcagtgaaggggatgctgttagtgatggagttagaacaagacataaaggcaagcatctatggtgcttgagacctactttcttattacgtcacccaattttgcttgaacaagaggcatgcaaaacatttgaaggatggatcatgatcaacggcagagggtga

SEQ ID NO: 86504 - DNA, 527 bp, Oryza sativa
  Clone ID: PAT_MRT4530_85539C.1
aaacaacgtaagaaggaggcgactacatctctatcaggttgcatagatcccattgggtccaaacttaaccatgagaaaaaaaaaggcaccatgacatgtgaattatgtactcccaaaataagagtacatgtctgtgtaggttcacaaattatgaagggtgcccataagagatatcacaaattatgctggctttggtgctacccaagcctgttcaggaaccgtgatactgaatgattggttggaggcttggagctgtctatttcccttcatttcagccttcctgataaaaatgcatgccgcctacgttaatttctactgtgcagtgacaaagctttgatttgagacactattgccttctatgggtcttggatgtgctcatcaactgttttgatcagtgaaggggatgctgttagtgatggagttagaacaagacataaaggcaagcatgaagcatctatggtgcttgagacctactttcttattacatcacccaattttgcttgaacaagaggcatgcaaaacatttg

SEQ ID NO: 86505 - DNA, 339 bp, Oryza sativa
  Clone ID: PAT_MRT4530_8553C.1
atgcgccgccagccgctacaggtcagcggcaacagcaggttcggaccgacgcctctgttcttgttcttggaggttcggaccggcggcaagaccctgtgctcttccagcgctaacgagcagtggacggatgtgcagcttctgatccacacccgtgcaggggcagcgctggaacacaggcactacacattccctggcctgccattcaagatttggggagcggttgttcaaagggcggtcgcggaggttgtggtggtcgccgacgaggtttcaacggagaccttcgcgggggatgttgatgcagcgcgaggccgttctcgcggcgggtggcgaggtggctaa

SEQ ID NO: 86506 - DNA, 564 bp, Oryza sativa
  Clone ID: PAT_MRT4530_85540C.1
ggatcactttttattgctgtccttctggttctcgctctctactttttcccaagaggccggatagtgactcacatgccaccagcgcgtgacactatgcgacgtctgaatacaccgctagctaactacgtgctgctcctgtttgccaatgaacagctggcgccacctctctggctccattatcccgtggtactgctgcgatgactcccgaggcttctgaacataaccacggccagcacgacactaagaataaccacgaggaccagcacgacgatgaccacgatgatgaggattaccatgaccactagcatgagcccatatcagaagcatgacgatgattatgatcatgacgactataaccgtgaccgtgaccgtgaccgtgaacgtgaccgtgaccgctaccgtgatcttgaacgcgctaacggaggaccatgaccgtacccatgactcatgagcctgatcactgtgactaccatcgcgaccgtcatcatgacgccgaccaccacagcactgacgacatcgagcgatatcgacattgttgtcgtctctggcggcacaccatgggaa

SEQ ID NO: 86507 - DNA, 326 bp, Oryza sativa
  Clone ID: PAT_MRT4530_85541C.1
cccggggcccccaagccgcccaatttgtgggaaaaattagcgggggaggggggggggctaagggtggttcttggcgctgttcggcttgcgggacaggacacatagggggaaaccacacccaagacaggggggctacaacccgggccccgtttggaagcaggaatgggctttttttttacccggtggggggttgcccggccttggttaagcgccagtgcgttgggcctgggacgggcggccgccgccagcaaggcccgggagaatggtggccgcaagttcgccgagttcacagacaggttgtgcacgtgccaggcgatcaaccacat

SEQ ID NO: 86508 - DNA, 496 bp, Oryza sativa
  Clone ID: PAT_MRT4530_85542C.1
aaaaaaacccagtccccccctcccctctcctctcctcctctaaaatatttttttaaaagataattatagataagagtcgtgtccagaaaggacttaccatgtactttgggtataaatatagcccgaccccatgtaatcaaacaacgtcagttcaatacacttcagcgcatcgccacccttttacttttcattgttcttttcgacgagtttttgctttcgagttgggctgcatcaggttcgatctccgacaaaaagcatgccccatctaatggattacatgccgctgatatctacagccaatcgagtacaccgaacaatctccaagtttttacttgcctacgccgatccaacttaagttgcatcggcgtggcccccaacaatatgtcatcggcagacctgtcgataggctatcgatcaaaccatctggcacgctcaggacccgaaggcaaatttcccggacctgcactgtagttaagcagatctcctaggcaacaat

SEQ ID NO: 86509 - DNA, 1974 bp, Oryza sativa
  Clone ID: PAT_MRT4530_85543C.1
atggccatggccaaggctctgctcttcgccatcctcggatgcctctgcctctgcagcgctgttctagcagctcgtgagctgagcgatgacgcggccatggcggcgaggcacgagaggtggatggcgcagtacgggcgcatgtacaaggacgatgccgagaaggcacgccggttcgaggtgttcaaggccaatgtcgccttcatcgagtcgttcaatgctggtaatcacaagttctggctcggcgtcaaccagttcgccgacctcaccaatgacgagttcaggtcgacgaagaccaacaagggattcattcctagcacgactagggttcctactggattcaggaatgagaatgttaacattgatgcgctgccggcgaccatggactggagaaccaagggcgtggttgttgttgggcgttttcggccgtggcagccatggaagggctgcgagggtgggctcatggatgatgccttcaaattcatcatcaagaatggtggcctcaccaccgagtccaactacccatacgcagcagtagacgacaagttcaagagtgtatccaacagcgtcgcatcgatcaagggctatgaggatgtgccagccaacaatgaggctgcccttatgaaggcggtggctaaccaacctgtgtctgtggccgtcgatggaggcgacatgacattccagttctacaaaggtggtgtgatgaccggctcatgtggcactgacttggaccatggtattgtggccattggctatggcaaggctagtgatggtaccaagtattggttgctgaagaactcctggggcatgacttgggaagaggaggaaggaggggtggtggtggtggctaaggaggaggaggaggaagaggaaggaggggtggcggtggggatgaggaggaggaggaagaagggcagtagcggggagaaggaggaggcggcagaggataacgccagtcggctcgccggcggaggcgatagtggcaaccacgccctccgctctgccagatccggtaggaggggaggcggcggcggcaggaggggaggcgtcagcgacaggcaggggtggtcggatccggcgttggcggcgggtggggtggctcaagaaggggaggcggcggagggctcgccggcggcgggctctctgaagggagacggcgcgatgggaggtggcgcgacggatgaccgtgcaacggcgacgactgaagagcccttcccccctcctctgccgcgctccccctcgcgccccgcgcccctgcacacgccgcgccgctgccgccctctgctgcgcgccgcctcgcgccctgcgccgccatcaccatcgccgtcgcctcgctccgccgcgcgctgtcgcgccgcctcgcgccccgcacgccgtcgccgtcgccgtcgcgtcgccatcatcaccacgccgcacgccgtcgccatcgccgtcgcatcgtcatcaccgccgcgccgcttgcctgtcaccgtcggctgcgccgcgccgagccccacgccactctcgtcgccgccgtcgcgtcgcccgtcgcgtcgccatcaccatgcgccgcgagccgtcgccgtcggcctcgcgccccgagccgccgcgcgcccatcgctgccgccgcaggccgcgcgcctgtcgtcgtcccgcccgtcgcgtcgccgctccgagccccgcgccgtcgcgtcgccgcttgtcaccgtcgcctcgctcaccgcgcgccgcgccgtcccatcgccctcaggccgaccgccctccccgcgccctataaacccccccccctgtcgccattaccctcatcaccttctctccctttcccctctctttcccatctccggcgtcgccgcctatttggaagccgccgccgccgccgcggagccgacgcgccccgccgccgcgctgcgcctcgtcgccgcgccgtgctccggcgtcgaccccgccgccgtcgtcgccggaccggtaagcccttccgccttccttcgttgccggtag

SEQ ID NO: 86510 - DNA, 981 bp, Oryza sativa
  Clone ID: PAT_MRT4530_85544C.1
atggccatggccaaggctctgctcttcgccatcctcggctgcctctgcctctgcagcgctgttctagcagctcgtgagctgagcgatgacgcggccatggcggcgaggcacgagaggtggatggcgcagtacgggcgcgtgtacagggacgatgccgagaaggcccgccggttcgaggtgttcaaggccaatgtcgccttcatcgagtcgttcaatgctggtaaccacaatttctggcttggtgtgaaccagttcgccgacctcaccaatgacgagttcaggtggatgaagaccaacaagggattcattcctagcacgactagggttcctactggattcaggtatgagaatgttaacattgatgcgctgccggcgaccgtggactggagaaccaagggcgcggtcactcccatcaaggatcaaggccaatgtggttgttgttgggcgttttcggccgtggcagccatggaaggtattgtcaagctgagcacgggcaaacttatctcactctctgaacaagagcttgttgatgtgatgtccatggtgaggaccagggctgcgaagaatggcggcctcaccaccgagtctaactacccatacgcagcagcagacgacaagtgcaagagtgtatccaacagcgtcgcatcgatcaagggctatgaggatgtgccagccaacaatgaggctgcccttatgaaggcggtggctaaccaacctgtgtctgtggctgtcgatggaggcgacatgacattccagttctacaaaggtggtgtgatgaccggctcatgtggcactgacttggaccatggtattgtggccattggctatggcaaggctagtgatggtaccaagtattggttgctgaagaactcctggggcacgacttggggtgagaatggtttcttgaggatggagaaggacatttctgacaaaaggggcatgtgtggcctcgccatggagccttcctaccctactgcatag

SEQ ID NO: 86511 - DNA, 506 bp, Oryza sativa
  unsure (1)..(506): unsure at all n locations
  Clone ID: PAT_MRT4530_85545C.1
agacggtggttggaagcagcgccgccggccntgcgcgcacgtgcgctggccggatccacgccgcccccgccgctgacancgagaaggcgacggtggccgggagcgacgccgccagctccgcacgcacgcacgccggccggattctagttttcctttttctgaatttttatttttttcaaaattttatttttccgtgagggcgacataacccgaccgcacgcgaaaataagattatcccgtgcagtctacttaatccgactgcacgggaagatggatttttccatgcagttgggccacccgcacgcgaaaatatttatttttgcagacacctcggtgtagacgggcaagacctccatacggaaaactcttttcgtagtagtgatggggtgcctgattacaaatgagtggtcaatgatatgcaaccctcatctgtatcggctccctttccatcaagagagaatcccttatatgccactgaaatttggtccaaaaaaaaaaaaaaaaaa

SEQ ID NO: 86512 - DNA, 1334 bp, Oryza sativa
  Clone ID: PAT_MRT4530_85546C.1
tttgtggcacagcatgaggcgctggaccaccgtatcctctcactgaaaacctcgagaacggaaggtctcacacaaaccaagatggagatcgctttaaatccactagacatcaccattgcctttgcatctgcatataaagcagcaggtggccactgtgcaggctgcatagcgagaagaagctaggctttgttgtcaacatggcaagagctgtgcttacactgactgttcttgccttcttgtgccttgtggccctcggcttgtccggcagagccaatgccaatgcaacggcggggaggaagatggttggggtgtatgagctgaagaagggggatttctccatcagggtcaccaactggggagctactatcatgtctgtgattcttcccgactccaaagggaatttggctgatgtagtccttggctacgatacagttgctgaatacgttaacgggacggcctacttcggaggactgatcggccgcgtagccaacaggatcgccaacgcgcggttcacgctggacgggaagacctaccggctgttccgcaacgacggcaacaactcgctccacggtggtcaccgtggattcagcaaggtcatatggacggtgaaggagcacgtcgccggcggcgactcgccgcgcatcacgctgtactaccacagcttcgacggggagcaaggttttccgggcgacctggacgtgttcgtgacgtacgagctgccccgcccctacgtgctggccgtgcgcatgaacgcgacggcgcggggcaaggccacgccggtgaacctcgcccaccacgcctactggaacctcgccggcgagggcagcggcgccgccagcgtcctcgccgagacggtgcggatccacgcgtcgcggtacacgcccgtggacgccgcgacgctcatcccgacggggcgggtcgcgcccgtggccggcacgccctacgacttcctcgccggcgccccggtgggcgcgcgcatcgtcggcgccgccgttcccggcggcgccgtctccgggtacgacaccaattacgccgtggacggcgccgcagccgacggcgagcggcggcggctccggccggtggcggaggtccgcgacggcgcgacggggcgggcgatggaggtgtgggcggaccagccgggggtgcagttctacacgagcaacgggctcgccggcgtgcgcggcaagggcgggagggtgtacggccggtacggcgcgctgtgcttggagacgcaggggttccccgacgccgtgaaccacccgagcttcccgtcgcagatcgtccggccggggcaggtgtacgagcacaacatggtgttcaagttcaccttctag

SEQ ID NO: 86513 - DNA, 245 bp, Oryza sativa
  Clone ID: PAT_MRT4530_85547C.1
gctgttccgtgagtcctacgcaaataagagggcttcacactaaaccttttcttccaacattaatgtgactttttaatttttgcactttattatgttgattactggaacacaactagtgaaacacagttatggaatagaatgtgttgcacgacaggggagggctgtgcttctgtgtatttccaacattgtctctgaatctgttcatgtagttgttcaagttttatgcttatgacagattggtggtt

SEQ ID NO: 86514 - DNA, 261 bp, Oryza sativa
  Clone ID: PAT_MRT4530_85548C.1
atgggcggcggtcgtgcagccggctccgctcttgcgtgcaatgccctctgcttccacccagccaacgccagccggacgaagccgaagctgaagaggaatccaaagaatcccaagccaacagactgcgacgcatttgccgtccccgaccttatcgacgttcgggaattccattatcaggactacttaatatttcttagcattcatccaatgcttcgggcatatgctctgtcggtgacatggggccgggggtatcgtgactag

SEQ ID NO: 86515 - DNA, 130 bp, Oryza sativa
  Clone ID: PAT_MRT4530_85549C.1
cggaccgctggcgtgcacggatcatgacgcgcggctagtggcgggttacaacaacggcggacggccctggcagccacaggtttctgctgggttgtcagtcggggtggaggcatggtccaccgattacatg

SEQ ID NO: 86516 - DNA, 359 bp, Oryza sativa
  Clone ID: PAT_MRT4530_8554C.1
gggtggcaattttttttttttttttttttttttttattgaaaggcaggggccaacaaacccaactggcaataaaaaatccacacgggtaacacaacaatggacaagcccccacccaaaaaaagcaaaattaaacaccaaccaaaccaaaggggccccccccccgagaaggcataaaccaaaaaatttccaaccagaaacggcaaaacggatagggggggggggaaaacaaaccccccaaatgttctgcccgaggaccctgactttaccccccaggggacggggggactggccagccccccaaaacccccatagggggccaagaaacacctaggacccgccctggcacaaggcaaaaagc

SEQ ID NO: 86517 - DNA, 352 bp, Oryza sativa
  unsure (1)..(352): unsure at all n locations
  Clone ID: PAT_MRT4530_85550C.1
cttagcatttcttctcttttttttttttttttttttttatcacanccaaattcccacataataaaaccccaagaaaaaaaaaaaaggacaccccccctacaggcctttaaaaccactggtgattacatgtacactcaaatgtaaantgcacaaaaagtctataactcaagtacactaaaacaaccttttcctttgttcctttaaattagttaacctcggccctttttattgccgttattcatctatgaaactgagtacaaggcaggcaacccattaaatttgtatacttacattacttttttttttcttccataattaaaccaaacagacatccatgggatttgaaaaagaa

SEQ ID NO: 86518 - DNA, 282 bp, Oryza sativa
  Clone ID: PAT_MRT4530_85551C.1
atgtggggagtggggactggcagtggggaggagaggccccgctcgggggcgtcacccgagaaaggggaggagaggcgctgcccgggggaggagatcaggctccgcccaggcggccggggcactggcgtgaggggaaaaggaagtgggtgtgaggataagccccaggctctgcaaaataggtggcgcactgctaatgccattaatgcgcagagcgcggccagcaggaacaataatgcccacgtgcatgaaacatctcaaagtcgtcttgcactgttgcattag

SEQ ID NO: 86519 - DNA, 376 bp, Oryza sativa
  Clone ID: PAT_MRT4530_85552C.1
tttttattagcttaaatggctggaaacaagctttgggtatacttttttggctataaaattgggattcaaagaagatgggggtggtagtaataccgagcggcgcgggagcaggtggcgagacgggagggggaggggtattatgacatatggaccttattggccttactacgacttactatggactttgtaatgggggccggccccggggtccacgatctactgggctataggaaaccggattggatcacacgggcgacataatgggagtcacggcccgcgcgtgccgccgtcgcgagatggagcagtggcaggcgtcaaagggggcacaacaagctatattcatctcgccaccggacggggcaagcggcgatcgcgg

SEQ ID NO: 86520 - DNA, 2128 bp, Oryza sativa
  Clone ID: PAT_MRT4530_85553C.1
ttcagctcgcgagacgccggggatggagcacgacgcgcacgccccgccgcctgccgcgcaggagctcggcgacgcctccgcctccgcctccgtcgtcgacgactgggcgcgcgacgaggacaccgagccgatggccgtggatccccaccacgccgtcgccgccgccgccaccgccactgaggacggcgagggcgtggcggatgccgctcctcccgcggccccggctgaagatgttacagaaattcaatcatcactacagtccttggagttgaagacgaatgctgctgcacatgaggatgctcaagaggtagtagaggaggaaaaggaaacaaagcggcatttgaatgtggttttcattggtcatgttgatgctggaaaatcaactgccggagggcaaatacttttcttgagtggtcaagtcgatgacaggaccatccagaagtatgaaaaagaagcaaaagataaaagccgagaaagctggtacatggcttacattatggacacaaatgaggaagagcggctaaaggggaaaactgttgaagttggtagagcccactttgagacagaaactacaagattcactattttggatgcaccggtgaagatgaagggtcataaaagttatgttccaaatatgataagtggtgcatctcaagcagacatcggtgttctggttatatctgcccgaaaaggtgaatttgaaactggttacgaaaaaggaggacagactcgtgaacatgtactgcttgcaaaaactttaggtgttgctaagttgatagttgtcatcaataagatggatgaaccaactgtaaaatggtctaaagaaaggtatgatgaaattgagtcaaagatggttccttttctcagatcttcagggtacaatgtcaaaaaagatgttcactttttgccaatatctggtcttttgggaagcaatatgaagaccaggatggataaaagcatttgtagttggtgggatggtccatgtctttttgaagtcctggattgtattgaagttcctttgcgtgaccccaaaggtccagtcaggatgccaataattgataagtataaagatatgggcactgtagtgatgggaaaaatagaatctgggaccatcagagagggtgacagtttgttggtcatgccaaacaagactaacgtgaaagtcattggcataagtttggatgagcacaaggtacgccgtgctggacccgctgagaatgtccgtgtcaaattgtctgggattgaagacgaggatattatggctggttttgtgctctcaagcattggtaatcctgttggtgctgtcactgaatttaatgctcagttgcagattctagagttgcttgacaatgctattttcacagctggctacaaggcagtgttgcatatccactctgttgttgaagagtgtgagattgttgatcttatagaggaaattgatatgaagaaaaagaaagaagctgatccaaagaagaaaaaaccaaagcggaagcctctttttgtgaagaatggtgcggttgtagtttgccgcattcaggtgaataatttgatttgtatagagaacttctctgattttcctcagcttggaaggtttacacttcgaacagaaggcaagtagacatgcattgaaatacattaggctattccaccagctggcagcccaacattttcagcttaagtcaattttgaacaggatggatgtctcttgagagcttctgaaagcaatgacattgcttgagcatacattttttccggcccggcttgaaaatcatcaatcatttaggcatagctgttattattaagatgggttgcataatttatagctcttgttacatgtttgtgaggttgtaaaatcagtatgggtatatccctgccctaaccttccaatttgaataccagtgttgcaaaggtttttcgtgtgcacaatcctttgcccctcccgggcatccgaacaaacaaaattttgatatgcccacctgaaccattttggttcttgtatgttttcgaggtgccacctggtggtattttattatacgcagttttgtatgttttttccgaaggggtgccaccctggtggtattttattataccgcccagcactgtttatccaaaaaaaaaaaaaaaaaaa

SEQ ID NO: 86521 - DNA, 423 bp, Oryza sativa
  Clone ID: PAT_MRT4530_85554C.1
tgtgtttttttttttttttttttttttttttttttttttttttttttttttttttttttttttttggacgggggggctttgtttttattaccgggttttaaaaggggacagaaatcctggcaaacctacaaaggtaagttgggacctacaggggggggaggcctggttttcctcaaaaagaaggggtaaaatttaacgggcaaactttaataacagcagggccaaccctagttaaacgggtccactttaacttttttttttttcccctcggaagaaaaaagggggaaagaaacggaaaaaaactggacctaaaaaagccggggagctaggagaccaaaaagggcaccggggggggagtaattttgttttaatcccacaaaagggtgttttttttctttgaatgcgtttttccgccccattacc

SEQ ID NO: 86522 - DNA, 406 bp, Oryza sativa
  unsure (1)..(406): unsure at all n locations
  Clone ID: PAT_MRT4530_85555C.1
gtgtgccttggttgaagaaatggggcgggacatggggtgaggtggtggatgtgacccccagtgtgcttgtgcgccatgggtgctgcaagaggagcctgggagtgaccgccacaaggtgctgcaagcagatggaattgcaaggtgcagcctgcagtggagatggcttggactggtgaatgcaagaagaagtgtgtgccatggaaatgttgggtgtntggcttggcaagcagtgttgaggcaatgcatgcctgctgcttgcagtgtgccccaatgtgagcatgtgttgatgtgtgtgtgcaggtggaaagtgtntgttgcctgtttggtactgagcattttgggacatgcgagaattgcaaagcatntgttggctgttactggggtggttgaaaaaaaaaaaaaaaaa

SEQ ID NO: 86523 - DNA, 433 bp, Oryza sativa
  Clone ID: PAT_MRT4530_85556C.1
gataagctcgcacggtgccgcaatgaacgagagaggctgcagctcttcacagatggcccacctactaccacgacggagacccgtcaccaccctccgtcagcttcaagcgcataacggcaccctctgcatgcccatgctccatacctacggtaccgacatctgtactgaatttttgaaggatggcaggaccatgagacctgccagaggggcacgaacgtcactgttaccactgattataacatctacgacgaggaaaccatgaccaccatgaaccacatgaaactgacagaggacgtgatgcctgccaaggggatgctctgcctcgatggcacaatggctgtgactgtctaccgctagaaccacaaggctgcaactgctacgagcaggtgtgataacaccatgatgattgtgcacagatacaattgcaccgtcg

SEQ ID NO: 86524 - DNA, 213 bp, Oryza sativa
  Clone ID: PAT_MRT4530_85557C.1
atggaccgaaaggctgatgcaggcttgtggtgcttgtctgaagattctgaaaacatcaacctcaagctcaccggcaacaaactgctccgaatttccctcttctccagcaaaggcgggcgtcgtggagcgttcgcgctgtttgttgccgccgcgcccgctgaggcgctgaccgacgtggattccgacccggtgcgcaccggtcccggcaaataa

SEQ ID NO: 86525 - DNA, 536 bp, Oryza sativa
  unsure (1)..(536): unsure at all n locations
  Clone ID: PAT_MRT4530_85558C.1
ccacgcgtccgaaatgcaattgatgctgctcttctgcgcccagggcgttttgatatggtatcccgatctccctctccctctccctcacacatagcaaacaataatcatgttctttttttttcattttactgcaggttttgnatgnnccaccaccagangcggaacatacaaacacgngcgggcnnangagnaagcgcgggggggcnccnngcaggacacgcgccaggggaagaagggggggaagggagcacagccaggaccaggcccagcacgcaggcagggagcgaagaaggccnngagngcgcgaaaggggcncgagggccggcgcgagaaggcggagcgccgngcccgccaccgcgacancgaanccagcaacannaggcncnnggacaacgagggggcgaaagnaggagacnncgaggganccaancagnccccggacanggcggcgcgcccccacnccacncgggggccgggcaccnncggnnancaggccccggagnacgcgaggacagggcagcnaaacacgaagagcg

SEQ ID NO: 86526 - DNA, 492 bp, Oryza sativa
  Clone ID: PAT_MRT4530_85559C.1
gctcccagctcagccagtacttccccgcaagtgcaagcacgcgcccaaggcctcttcgcctaccccgtcgtcgtctccggcgccgtgcgacgccgctcgcgcggcgaggtactcgctgcactgggttcggaggcgcaccggaacggtggcacgtctgctgacgccacggggctcgcccccggggaccggctgccgctgtcgctgcaccggccggacttcgtgacgtgcgcgcttgacgacgcgcgcgcgcaccgccgtcgacggcgacggcgacggtgacgtgcctgctcgtcaggaggaggtcgttcgacgtcacctccaagggagataattgaaacgatatgcagagctaaattacttattccgtttcaaattataaaaaccttttaggttttgtttcatgtatgtgcttcatttatatgtgtaaataatttaaacgagggataaagaagcccaaacgtatctctatctcaaaaaaaaaaaaaaaaaaaa

SEQ ID NO: 86527 - DNA, 987 bp, Oryza sativa
  Clone ID: PAT_MRT4530_8555C.1
atggcgctggaggcggtggtttactcccacggcggccatttcggcgggtacggcggcgggctgatgggcggcgccccggcggcgccgtgggatgtcttcgcagccgccggtggcggcgggagctgggacgatcccggcctgttcgcggcagaggcgtctcttgatgtgatccagggcgtggatgagtgggaggtggatcaggatcagcatgcttcttcttcttctaaggtggcggcgcggccgcctgtgaaggcggcggcggcggcggggaagagaaagaggcggcgggcgaaggcggcgaagaaccgggaggagatcgagagccagcggatgacccacattgccgtcgagcgaaaccgccgccgccagatgaacgagtacctcgccgtgctccgctccctcatgccaccttcctacgcccaaaggggtgaccaagcatccatagttgggggagcaatcaactacgtgagggaactagagcagctgctccaaacactggaggcgagaaggaccatcaaggaccacatcgacggcggcgccggcgagtctccctcccccttcgccggcttcttcgccttcccacagtactccaccgccacctccggccatggcggcggcggcgatgcacacagcaggatcgtcgtcaagcctgcagagacgacgactacggccgccggtggcggcgccggcgcggcgatcgccgacatcgaggcgagcatggtggagggccacgccagcgtcaaggtgcaggcgcggcggcggccgaggcagctgctcaagctcgtcgccgggctccaccagctagggctcaccaccttgcatctcaacgtcaccaccgtcgccgccatggccatgtactccttcagcctcaaggtggaggatggatgtaagcttgggtctgtggaggagattgcaactgcagtgcatgagattctggagaggatgcaggaggagcaggcttttgctgatgccaaaactagcttgtga

SEQ ID NO: 86528 - DNA, 909 bp, Oryza sativa
  Clone ID: PAT_MRT4530_85560C.1
caagaacgatacagtctcactgctacatcattcgaaatagatcggtcaactcacaccgtcctacgccgctactcacgaccccggtactcctgcccccgggaccctcccctcgatcatgtcgccacatacggcgcgaaccccactcgcccgtccacggctcatcgtacccagaccctaggcacagcaagcagccccatcacaaccgcctcactacgccccacacttccctctacctaattactatatcaccgtacatagcacagagacaaatcgaatcacgacatcgaacgaaacagacaaccaaaccaaaccgacaccacccccataaacgcacgaccgaaatccccttttcacccgcaactatcaccattacccccacttaaactcttcctccctcccttacccctcccatcttagccccgccgaccaccacccgcgcgtcactcccccagtgccgacccgaggaagacacaaccagggccgccgctcccggttatgtcgccgccaccacctccggatccgggcgggtggggggcgccgccgccaggggagcacggggccacactgccggcccatcgccgccactgcacgttacgcccggtcctgtgtttgccggccgtccacccctgcttctttctccccccgccccagttttcattggacggttcgctttcctttttccccctccgccgtttttggcctttttccctccttccccccccccttttttcccccccccgccccccctcttttgtcgcccccccttcactggttttcccctttccccatttttggtcccccccccccgcgccactgctcgccgcctcccccatttttatccccgtccccccccccgtcgttgtgtgtggggatggttccgcgccgtgctaaccgccccgttttttagta

SEQ ID NO: 86529 - DNA, 345 bp, Oryza sativa
  Clone ID: PAT_MRT4530_85561C.1
ccggccgggactcccgctgcgaggacgtctgcagtaacttcgtctccatgtggatctccgcagcctccttcgacggtgcctactacatcgaggacacctgccacatgcccaggctgctggacgactacatggacgtcttccgcgtgctcaagccggatggtctctatctatcctacgagtgtatgaccacctccctctaccgagttcgacaacccgtagcaggactaggccctgcacgacatcccactacggcgacgcgactaccttgtctctcaccgccaagactagatggttgccatcgccgaggatggcgaatatcagtggcacagggagcgcaaccacgac

SEQ ID NO: 86530 - DNA, 181 bp, Oryza sativa
  Clone ID: PAT_MRT4530_85562C.1
aaggcctttaatcaaataccgtattcacacacggaattgacctgctggcgtttcttacacactacaccatgcacaattacatcttatggttcagggaggatcataaaggtggcgcagagtgtatatctctcagaacgcttcatctactgcttgatgcccgcaaccagttggctagtaggct

SEQ ID NO: 86531 - DNA, 1983 bp, Oryza sativa
  unsure (1)..(1983): unsure at all n locations
  Clone ID: PAT_MRT4530_85563C.1
tccccgcccgcggccgcgctgcctcttcctgcgctctcggcaatcccaccgcggccatcccctctcatcctcacgaactcaatcacggccccatcaccacccactccactccctcctcccccgagcccgagtgcctcaccgccactagctagcagcagctggcggcggctggcggagaagaggaggagatatggcggcggtggcggggacgggggtgttcgcggagatcctggagggggaggtgtacaggtactacgccgacggggagtggcgcgtctcggcctccggcaagtccgtcgccatcgtcaaccccaccacccgcctcacccagtacagggtgcaagcatgcacccaggaggaggtgaacaaggtgatggagacggcgaaggtggcgcagaaggcgtgggcgcgcacgccgctgtggaagcgcgcggagctcctgcacaaggcggccgccatcctcaaggagcacaagaccccgattgcagagtgcctcgtcaaggagatcgccaagcctgccaaggacgcgatctctgaagtggtgaggtcaggggatttggtgtcgtacacagctgaggagggtgttcggatactgggggaaggcaagctgctggtgtctgatagcttcccgggcaatgaacggaacaagtactgtttgagctccaaggtacctcttggagtagttttggcaatcccaccatttaactatcctgtcaacctagcagtctccaagattggcccagcactaattgctggcaatgctcttgttctgaagcctccaactcagggagcggtggctgcactacatatggtgcactgcttccaccttgctggtttccccaaaggcttgatcaattgtgtcaccgggaaaggttctgaaattggtgattttcttacgatgcatcctggagtcaactgcataagttttacgggaggtgatactggtatagccatttcaaagaaggctggaatggtcccgcttcagatggaacttggaggaaaagatgcttgtgttgtgttagaggatgcagatctggatttagtggcagcaaatatagtaaaaggaggcttctcttacagtggccagaggtgcactgctgtgaaagtggtgctgatcatggaatccgttgctgatatcgtggtagagaaggtgaaggccaagttggcaaaactgacagttgggccacctgaggctgactctgatatcaccccagttgtaacagaatcctcagcaaattttattgagggtttggtcatggatgccaaggagaaaggagcaaccttttgtcaggagtacaggagagaaggcaaccttatctggccgttgctactggatcacgtccggcctgacatgaggattgcttgggaggagccatttggccctgtcttgcctgtgattaggatcaactcggtcgaggaaggcatccgaggagccattggcccctgtcttgcctgtgattaggatcaactcggtcgaggaaggcatccaccattgcaatgccagcaattttgggctgcagggatgtgtattcactaaagatatcaacaaagcgatcatgatcagcgatgcgatggagaccggaaccgttcagatcaactctgcaccggctcgaggacctgaccatttccccttccagggcttgaaggacagtgggattggatcccaggggataactaacagcataaacatgatgaccaaggtgaagagcactgtcataaacctaccatctccatcctacaccatgggctgaggtgttccatatagatgatcagatttctataaccacatgagtacaatgtagagaattcaaatgttttgtaaccacgtgagctttgtacgctatttgcaccacagttctccctgtatgttgttggctcttttacaattaagaataatgcatgttgaagtatgagtcttccaatatgatacaaaaaaaaaaaaaaaagaattcggcacgagctcgtgccgantcctgcacccgg

SEQ ID NO: 86532 - DNA, 468 bp, Oryza sativa
  Clone ID: PAT_MRT4530_85564C.1
atgggtgacaaaggagtaagggtagcaacagctttccccacggtgcagaaccagccacgcaacggaagagtggcggcgacgggggcctcggtggcgaagctcgggctgcgaggggcagatttggtgacggagcttgggctacggcaggtgaatttggcggggaggggcggcggaggcttgcgacgagaaggagcagcgacggcaggacccgggcggcggagttctggttgcgatggtgtgcggtctacggatctggtggcggcggtcggtgacagcggcatggcggcgacaaagctcgagttgcaacggtgcatcagcaacagatcgactcggcctgcgggatgtggatccgatggcgccgaggcatgcgggggacaggttggcgacaacggtgtgtcgacggcagatctgacggcgccgattcgtgcgggcagcggagtggcaggtcggcgacggcggcggcgatag

SEQ ID NO: 86533 - DNA, 216 bp, Oryza sativa
  Clone ID: PAT_MRT4530_85565C.1
atggccgttagcgtcgcgccggtcgaggcgccgaggaacagacgagctactgaatttccaaaggcgcaacatgcaaaaagaaaagctcctttcttttcctacttggccgccgctcgtgaccaagctctcttgtccctgtccgtccctccactgcggcgagtggccgaagtccgtgccgtaacgttcggccaggagcacgatgatagaaaaaactaa

SEQ ID NO: 86534 - DNA, 627 bp, Oryza sativa
  Clone ID: PAT_MRT4530_85566C.1
gacgattttgtaattcgacgacaagttgagggacctttggtgtacttgttcgtaaaagaaaagaaacaccggcccagtattgataatgaagcccagacggaccaacaggccaagcccatcttatcccaagaaaaaaaaggggaaaaattactcctttctaagcgaaggcctaggctaaagaacagagaagagacctgctcttgcgatccttctcactctcttcctccccgagtcgacggccggccaccgacttgggggaaaccaagccaccgccgccgcagccgccgtaccccaccctccctcccggcggccgcgggccatagccgcgttctcccccgcgcgtctgcctgcggcgtggaggcgtggggggcgacggcgatggggtccatgacgatcggcgccaagtacaagaccacgctcaaggaccccggcaccaccggcgtcctgcgcatggtgcgtcgcgatcccccctctgttcctccctccctctctctctcccgcatagcgtcgcctctctccctccagctccgattggtcgggtttaacccttgcggccgtgccctactggatacacactccgcgggaggtgcggtgggtgtgctgattctgtggagggatgtcgcttga

SEQ ID NO: 86535 - DNA, 177 bp, Oryza sativa
  Clone ID: PAT_MRT4530_85567C.1
atgcgcttatgggctgacggaggtcggcatcgtcgtgggtggaaacttggacagagaggagatcacctggagatcgccttgcgcaccgaggagatcgccggagagagaagggacaaagatggcttaagcggtgaaaacggaagtaacgaggtgaagtttctcggggacaacggttag

SEQ ID NO: 86536 - DNA, 527 bp, Oryza sativa
  Clone ID: PAT_MRT4530_85568C.1
ggtggtaatggttaggacttcatccaacttggccaagtgccaggagaacttcgtatcatcacaagggcgcaagcgcgggagttctgatactcaggcagattggagccccctgaagagtgtggtgctaccagagggacaggggtattcagggttcccagtggaggctatggtgtggttcgcgcttcccaagatgggggaagttctcgcaaccagtctgttctatggcaagaggaggtgatggtggtgcacgcatggtgacctgaacaggtctggtagaggttagagtagttctccaggatagttctcagcgcaaagttttgcaagttctgagtcactggatcaagtttctggcattttggaattcacatctgttctgaagctattcttgatctcttaatttcttacaccttacatttaaattttcgaacacttacaaagagctctctggtttgtaccatgggatgagcccattattcactcctacatttaatataatgctgccactattttctaaaaaaaaaaaaaaa

SEQ ID NO: 86537 - DNA, 503 bp, Oryza sativa
  Clone ID: PAT_MRT4530_85569C.1
ctagtcgtccgccaactgcaagccgtctgccttcgtgccggccgctgctcttgcacgattgcgctgcgctgcgtcgccggccgcccgcatcaggctacacagccaccgcgggccgcgccgttgctgtattcgtcgagccgcactcaacacgtcgagagagaagtggatggcgttccccacctccaccgccgccggcttggagatcatcgccgaggagggccctagcggaagcagcgcccaacagcagcaggcatagcatccggtggcggcggcggggcgcgacagcggaggcacggcggggatggggagcggcaagtcgtcggtggacggcggcagcggccaccgcgcgttgtaagactcgccgccgcgggtgttgcaggagctcaaggacgcgctgtccagcctgcagcagacgttcgtcatctccgacgcgatgcgcccgaactgccccatcttctactccagcgaggggttcttcaccatgaccggctactcccccaagg

SEQ ID NO: 86538 - DNA, 208 bp, Oryza sativa
  Clone ID: PAT_MRT4530_8556C.1
ttagaagctgattcagcttcgaagcaagcggagatcgccatcgggagctagggagagactgggacagcctgaggagagcatgatatggactgcttcgcgcagacaggagggaagagggtgcatgaccctttgaaccatattatctcaggctgatgcggccaccaccgtaacggaggtgccggtggactacgtggacaaggcgcaggac

SEQ ID NO: 86539 - DNA, 1644 bp, Oryza sativa
  Clone ID: PAT_MRT4530_85570C.1
atgtcccatgttagatccgcatccgccgctgccgatgcggcgtcggattggcagaaggtgagggcggagtggttcgccaggttcaaggaggagtacgagaggaaggtcgcggagcatcccgacgtcgactggtccgacgagctggccgtcgacgcccgccactatcgcgagagctgggaacgcatctatgcaagagcctacggccccttcgacaaatccagccctacccgtgctgttgtggtgtgtgatcctgtctaccttgaggctgtgctaagagtcaagggctctactgaatcagaggatgaagatttaagctttttcactgtaccgctcaccgatgtcaaccgccctagggaaacatgcctgattactagagagtacaccagcaagcttagcacgctggagctgacgtttggctatgtcgttcgctccgtggaggccacgatcaaggcgcgtatcgttgatgggtcatggccagaagaagatggttcttcagctcggtttactgcctgtacctccagcctgaaacacaatggagttttgttgcttgattctggagataagaggaggaagatgcgtgttgatgccgatggcgtggtagggctctcgcggcgtgtggtttctgttgagtttgagggggagctggaagtttctgtggtgacatttgatggtagtaatatttgtagtaagatggaagctgagataaggttcgtgcctgaggaggcttcgctatacgcggtaaggcgcatccatgggctcaacatgaccaaaaagagggtgaaacgaggatatttcctcatctgctcgagcttcgtcgacaacaacgtcagcaccagcctcagccaagtactccctgcttcaacaatgctggcatcgactcaagtcggcgaaatcgtcttcccggtttacaccacgatgccgatctcaaccagtcctccaatgaccggagacgagaacgcagtggctacgaaccaaggcgattccatgtcgaaaaatcctcccgtcgagacggagaacggaatatcgacgacatccaagctcgagaaggattctgatacggccaaaccttgtccttccgacatgaaccacgagccgacaaagatgacttccgaagccacaaggtcttggtgtcctatccacaaaaccaagaaacacactctgcaagattgctgggttttcctcaacgtccgtgctgaaattcgcacctgcaaagaacgtggaattcagcgtacttctccaactcgggatgtctattgtcctattcacaagacaaagaatcacgacctctcgagctgcaaagtctttctcggcgccatgaaagctccgtctcctaagtcatatgtccccatcagggataacggcaaggaacaaggagcgactccaacttcagatcgattcgttggggtaatcgatatcgatcctcacgaaccatcggtcttacatctcctcgaggactatgggtcatcgacaacgagcgcgccgcgggagcacaccaggagcagccaccaactggcgaggccaatggtgaagatccggaacggagggaatcacctcaacgagctacccctccacctcgcggcactggcgatcttcaagatcaaatcaacggccgtcgagaagcacgacgcacatgagacaatgtga

SEQ ID NO: 86540 - DNA, 348 bp, Oryza sativa
  Clone ID: PAT_MRT4530_85571C.1
atggcggatcgggtgatccattacctcctgcgcggcaaccagctgcagggccgccgccaaaccctcgccgtcggcgtcggccaccaccaccgccgccggctgctcctcctcgactccagccgcgtgttcatgttactcgccgtcgttatcctcgtgcacctgctcactgcaggcgcggccgccgtccagggcgccgagccgtgcgtcctcgtcgccgccttcctcctgtggctgctcggcgccgcgttcgccgtgctgtcgctcgccgccggccagttccccgttcttgctgccaccgctgccaccatcgcgaccacgctccgcagctacctgattggaggtctctag

SEQ ID NO: 86541 - DNA, 2115 bp, Oryza sativa
  Clone ID: PAT_MRT4530_85572C.1
ctatttctcgtttagtgtcgccccgatcttgacggtcttgtcggggttggcactggagagtggaacaatcttgatggcgccgtctggtttcggcgtcttgtttgtcttggtcactttcttgggtggctcagtcgtggcgggtgggctgggcgtttgctcgactatgtcgaggcttcgcttgtcgcattgcaccgctagctttgcgttcccttgaatagtgattgttcccttcggtcccggcatcttaagcacttgatatgcgtagtgagatgcggccatgaactttgcaagtgcagttctcccgatgatggcgttgtaagctatatcgaattcagcaacatcaaaggtgatatgttctgtgtggaagttgttggcttggccgaaagtcacgggcaacgtaatcttgcccaaaggtttgcctttttcaaatgccatgtgcttctcgagcgactttttgaaaacaaggcaatcttccagagaatgtctgtccgtcttgtgtatagggcaccatgatttctttgtgtcgctgctttgtgggtctatgcgtttgggagggttcgcgtattctgctgcgaggacttccgcttgagctttccttttcccgtttttgcgatttttcttcttgcttgactcagatgtgtccgtggctggtttcttctctcccccggtcttcggcctatcgttcttgcgtcttagcgcatcatcagcgtgggcgcatcgctcaacgatctcgaataatctccgagtggttgtgatgcgtcttgtcgccaactcctgggtagtgtagcgatctctgacaccggatttgaaggcgcgaattacagaagcgtcggtgatttcaggaattgtgtttctgcactcgttgaaatgtcgaacatattccctcaatgattcacccgaattctgtgtcaacgcgtgtaggtcgtcttcgatcgcgtggcgcttgtatgttccttggaaattgacgatgaattgttgccacaggtcagtattgtctagcacccgtcgttcgcgattgttgtgattgtggtggttgttgtggtcccggtcctcgtttgagcggtctcctcgatttccgttatcatggcgccatgaagagacatgacgccgagagcgattcacgttgtctcgtgtgcgtcgtgcttcccagcggccgttgatttgatctcgaagatcgccagtgccgcgaggagaaggggtagcttgttgaggtgattccctccgttccggatcttcaccattggcctcgctagttggtggctgctcctggtgtgctgcggtagcggcttcttcaaacgcgttgctgaggttagtcaccgattcccgtagtcgttctgtccaacgctcgaggtcaacgttcagaacaggatcgtaaggagtttccctcagtatcgcttgaacggccctgatgtgctgggctggagtagtcgattgattccccgcttctgtgttggcgtgcgctgacgtgccgatgtcatcgatagccaatacctcccgcggcgcactcgttgtcgatgacccatagtcctcgaggagatgtaagaccgatggttcgtgaggatcgatatcgattaccccaacgaatcgatctgaagttggagtcgctccttgttccttgccgttatccctgatggggacgtatgacttaggacactgagctttcatggcacttgtggcttcggaagtcatctttgttggctcatggttcatgtcggaaggacaaggtttggccatatcagaatccttcttgagcttggatgccatcgatattccgttctccgtctcgatgggaggatttttcgacatggaatcgccttggtttgtagccactgcgttctcgtctccggtcattggaggaccggttgagatcggcgtcgtggtgtaaaccgggaagacgatttcgccgacttgagtccataccagcattgttgaagcagggagtacttggctgaggctggtgctaacgttgttgtcgacgaagctgactttctttgcggggacggggccaggatacccgcatgagggcgggggcgggggcattccgacccaacccagccccgccccgttgccacccctaggcgccacggtggcctgccccctggcggcccatgccat

SEQ ID NO: 86542 - DNA, 2988 bp, Oryza sativa
  Clone ID: PAT_MRT4530_85573C.1
atgtcgacaaccggtgacaacaacaacactggagacaaggagaaggagcctctcgtcaacaccaacggaggcaatactgcctcaaactccaacggagggccattctcgggtgtgctcgccgacaatattgtggacgtgtatatgcacatgccttcagggaaggacatgtgggatgctcttgaggccaagttcggggtttccgatgccggcagcgagctgtatgtcatggagcagttctatgactacaagatggtcgatgatcgttctgtagtggaacatgctcatgagattcagatgttggcaaaggaacttgagaacaacaactgtgagttgccggacaagtttgtgacaggtggcattattgtcaaattgccaccttcttggacggactttgctacttctctaaaacacaagatgcaagagttcagtgttactgatcttattggctctttgggtgttgaggagaatgcgagggtcgggagaggtttctccttgttgatgggaaacggatcgcttgcggctattcatggtgttggtacggtcgatctagagtttacttcgggaaagatcgtgcagctgaagaacatgcagcatgtcccttcaataaagaagaatctagttagcggctctctattgtgtagagatggttttagacttgtgtttgaatccaataaatgtgtcatatctaaatatggaacgtttattggaaaaggttatgacagcggaggcttgttccgcttttccttggatgatatgtgtaataaagttgtgaaccatgtaagcaatgatgatgatgagtctaatgtgtggcattcacgactctgtcatgtgaattttggttgtatgacacgcttagccaacatgagtttaattccaaaattcactttagtcaaaggctctaagtgccatacttgtgttcaatcgaaacaacctcgcaagcctcacaaggcatctgaggcgaggaatttggcaccactagaacttgttcattccgatctgtacgaaatgaacgacgtgttgactaaagggggaaagaaatatttcatgacactgatagatgattgcactagattctgctatgtgtacctattgaaatcaaaggatgaagcattacattacttcaagatctataaggctgaggtagaaaaccaactggaaaggaaaatcaaacggttgaggtctgataggggtggagagtatttttccaatgaatttatttctttctgcgaagagtatggaattattcatgataagacgcctccctattcaccccagtcaaacggggtagccgaaagaaagaaccgcactctaactgagatggtgaatgccatgttagacactacaggactttccaaggaatggtggggtgaggcaatattgactgcgtgtcatgtcctaaatagaattccttctaagcataaggaagtaacaccattcgaggaatgggaaaggaagaaattaaatctctctcaccagcgcacatggggctgtttggccaagctaaatgtacctatagccaaaaagcgtaaacttggaccaaagaccgtagattgtgtgttccttggttatgctatccacagtgtgggatataggttcttaatagtaaattctggattacccgacatgcgtgttgaacatattgatcaaacgcttgaggaaaatcctgaggaggataacattgtagcaactcgaaagagtaagagacaaaggactgcaaagtcttttggagatgactacattgtatatcttgtggatgatactgcaagaaccattgaagaggcatattcatctcctgacgctgactattggaaggaagcggtaagcaatgagatggactcaattatgtctaatggtacttggaaagttgtcgagcgtccatatgggtgcaagcctgtagaatgcgaatggtttttcaagaaaaagcttaggcctgatgatacaattgaaaagtacaaggcaaggcttgtggccaagggttgtacccaaaaagaaggcgaggactttttcgacacttattcaccggttgctcgcttgaccatgattcgagtactactcgctctggcagcctctcatggtctactcggccatcagatggatgttaagacagctttcctcaatggagagttggaggaggagatctatatggatcaaccagatggcctcaatgtgattgaggaggtcaaggactttctgtccaaaagctttgaaatgaaggatttgggagtggcacatgttattcttaacattaaactactgagaggagatgagggtgggattacacttgtgcaatctcactatgtggacaaggtcttgagtcgctttggttatagtgactgcaaggcagctcctactccttatgatcccagtgtgctattaaggaaaaaccgaagaatagcaagggatcaattgagatactctcagatcattggttcattgatgtacttagctagtgcaacgaggtctgacatctcatttgctgtgagcaagttgagccggtttgttttaaatccgggagatgatcattggcatgctcttgaaagagtaatgcgctatctaaaagggacaatgagctatgaaattcactacgccgggtacccaaaagtgctggagggctatagtgattcaaactggatatctgatgctgatgagataaaggccacaagtgggtatgtgttcacacttgtagggggcgctgtttcctggaagtcttgcaagcagacaatcttaacgaggtcaacaatggaagcagaactcacagctttagatactgccacagttgaggccgaatggcttcgtgagctcctgatggacttgccagtggttgaaaaaccagtaccagcaatcctgatgaactgtgataatcaaacagtgattattaaagtgaacagttcgaaggacaacatgaagtcatccaggcatgttaaaagaagactgaagtctgtcagaaagcagaaaaactccggagtgatagcattcgactatgtctag

SEQ ID NO: 86543 - DNA, 1424 bp, Oryza sativa
  Clone ID: PAT_MRT4530_85574C.1
atgttacttatctcattgttgaaaataaaaatattttctcactaaatcaacactgattaggagaaattaatctcagctggtagaaacaaagggatggttgacatttttcaactacgtcgggtggttttagcatcaactttaggggatccacatcccacgaggagtcggaattgacctcgagcagatgaggaaatatcctcgtttcaccctctttttggtcatgttgagcccatggatgcgccttaccgcgtatagcgaagccttaacaaccacaacaggtaaagtactacccccaaatcatcgacatgataaagaaagacatgaccaggcaacagtgatctccattttacaaaagccaacatcaagctcaacacagctttcaccgacctcctcaggcacgaaccttatctcagcttccatcttactacaaatattactaccatcaaatgtcaccacagaaacttccagctccccctcaaactcaacagaaaccacacgccgcgagagccctaccacgccatcggcatcaacacgcatcttcctcctcttatctccagaatcaagcaacaaaactccattgtgtttcaggctggaggtacaggcagtaaaccgagctgaagaaccatcttcttctggccatgacccatcaacgatacgcgccttgatcgtggcctccacggagcgaacgacatagccaaacgtcagctccagcgtgctaagcttgctggtgtactctctagtaatcaggcatgtttccctagggcggttgacatcggtgagcggtacagtgaaaaagcttaaatcttcatcctctgattcagtagagcccttgactcttagcacagcctcaaggtagacaggatcacacaccacaacagcacgggtagggcctgtcagtagtagatatggatcctcttgggtgagggtttggcagtcatccctagtgcggtcgaagaccatattgcgattgtgatcaattgtgtcccgtgcagcaatgagaccaaacacatggatcggccactgtaagccccgccttaattctttgatttttacacagaagattggatttgtcgaaggggccgccgtaggctcttgcatagatgcgttcccagctctcgcgatagtggcgggcgtcgacggccagctcgtcggaccagtcgacgtcgggatgctccgcgaccttcctctcgtactcctccttgaacctggcgaaccactccgccctcaccttctgccaatccgacgccgcatcggcagcggcggatgcggatctaacatgggacatggggatccgattgaaccccccaaacaggattcggcggaagcagcagcaggacgagcgacggcgccccggatcgctcgcggggaggatgggatcggcgacgagcgagccggcgaactcacgatgaggagtccccggccgg

SEQ ID NO: 86544 - DNA, 1594 bp, Oryza sativa
  Clone ID: PAT_MRT4530_85575C.1
taaagaaactgtcatgccccatgagcactttgccccgatagaacacaatgatgaaacgcctgaggaaaatcctgaggagggcaccattgtaaatactcgcaagagtaagagacaaagggttgcaaaatcctttggagatgactacattgtatacctcgtggatgacaccccaagaaccatagaagaggcatattcatctcctgacgctgactactggaaggaagcagtacgcagtgaaatggactcgattatgtctaatggtacttgggaagtcgttgagcgtccatatgggtgcaagcccgtaggatgcaaatgggttttcaagaaaaagcttaggcctgatggtacaatcgaaaagtacaaggcaaggcttgtggccaagggttatacccaaaaggaaggcgaggatttcttcgacacatattcaccagttgctcgcttgactacgattcgagtactacttgctctggcagcctctcatggtcttctcgtccatcagatggacgttaagacagctttcctaaacggagagctggaggaggagatctatatggatcaaccagacgggtatgtactagaaggtcaggagggaatggtgtgtaaactattgaaatccttgtatggcctcaagcaagcacctaagcaatggcatgagaagcttgacatcacgcttacatctgcaggctttgttgtgaacgaagctgacaaatgtgtatactatcgctatggtgggggagaaggggtgatcttgtgcttgtatgtcgatgacatactgatctttgggaccagccttaatgtgattgaggaggtcaaagactatctgtctaagaattttgaaatgaaggatttgggagaggctgatgttattcttaacatcaaactacaaagaggagatgagggtgggattacacttgtgcaatcccactatgtggacaaggttttgagtcgctttggatatggtgactgcaagccagctcctactccttatgatcccagcgtgctattaaggaaaaaccgaagaatagcaagggatcaactgagatactctcaaatcattggctcattgatatacttggctagcgcaacgaggcctgacatctcatttgctgtaagcaagctgagccggtttgtctcaaatccgggagatgatcattggcaggctctggaaagagtaatgcgttatctaaagggcactatgagctatggaattcactataccgggtatccaaaagtactagaagggtatagtgactcaaactggatatctgatgctgatgagataaaagccacaagtggatatgtgttcacacttggaggtggcgctgtttcctggaagtcttgcaagcagaccatcttaacgaggtcaacaatggaagcagaacttacagcactagatactgcgacagttgaggccgagtggcttcgtgaactcctgatggatttgccggtggttgaaaaaccagtgccagctatcctaatgaactgcgataatcaaacagtgattattaaagtgaacagttcaaaggacaacatgaaagatgttgacctgcagaacatctcagaaggaacacacctatatgagttcgactgctag

SEQ ID NO: 86545 - DNA, 1801 bp, Oryza sativa
  Clone ID: PAT_MRT4530_85576C.1
ctagtcctcgcagactggatcaagtttggcgccgtctgcaagacgtggaagcgggcggcggatacggcatgaacctccgccttcatccgaagcccctagcgactttctcctcctccactccatcgccatcgccttcttctcctcccgcgccgcttcgcttctcctcccgtgccgccgctccgcttctcccctgcgcctccttcccctccctccggtggccgaggcgaatccggcgaccgcgccgaggacgccgccgccgtgcgcctcgccgtcgaccgcgccgctcgcttctcctcccgcgcggactcgggagcggtgggagcggcgggagtggacgatgcgtcgccgacgggcggccggagacgggagcagacaagcggctcgagcagcgccgccggaccccggggagcggcggagccgcgcggcacaggccgccgcggcgagcccggcagccgccgccgccgcgaggaagaggagcatgagccgtcgcccaataccctctatatctggtctacgggtatcacccgtcgacagtggcgcgccaggtagggggccttggtactcaaggttcacgacgccgatctcaaccagtcctccaatgactggagacgagaacgcagtggctacgaaccaaggcgattccatgtcgaaaaatcctcccatcgagacgaagaacggaatatcgatgacatctaagctcgagaaggattctgatacggtcaaaccttgtccttccgacatgaaccacgagtcgacaaagatgacttccgaagccacaaggtcttggtgtcctatccacaaaaccaagaaacacactctgcaagattgctgggttttcctcaacgtccgtgttgaaattcgcgcctgcaaagaacatggaattcaacgtacttctccaactcaggatgtctattgtcctattcacaagacaaagaatcatgacctctcgagctgcaaagtctttctcggcgccatgaaagctccgtctcctaagtcatatgtccccatcagggataacagcaaggaacaaggagcgactctaacttcagatcgattcgttggggtaatcgatatcgatcctcatgaaccatcggtcttacatctccttgaggactatgggtcatcgacaacgagcgcgccgtgggaggtattggctatcgatgacgttggcacgtcagcgcacgccaacgcagaagtggggaatcaatcaactactctagcccagcatatcagggctgttcaagcgatactgaggaaaactccttacgatcccgttctgaacgttgacctcgagcgttggacagaacgactacgggaatcggtgactaacctcagcaacgcgtttgaagaagccactaccgcagcacaccaggagcagccaccaactggcgaggccaatggtgaagatccggaacggagggaatcacctcaacgagctacccctccacctcgcggcactggcgatctccgagatcaaatcaacggccgccgagaagcacgacgcacacgagacaacgtgaatcgctctcggcgtcatgtctcttcacggtgccatgataacataaatcgaggagaccgctcaaacgaggaccgggaccacgacaaccatcacgatcacaacgatcgcgaacgacgggtgccagacaatactggtcatggccgccgccgtatcgacgacgacgatggagatcggcgccgagacaacagcggaagacgacgacaggattcccgagatccaggccgtcatcctcgtaatcgtacgccggaaccaagcgacccggaagccttacctattttctaa

SEQ ID NO: 86546 - DNA, 2820 bp, Oryza sativa
  Clone ID: PAT_MRT4530_85577C.1
atgtcgacggagattggagacaagatgatgaacgacatcaacggaggcaatactgcatcaaaatccggcggtgggacgttctcggggtatactttcattctcccgattctattagatgtttctttgttaatactcttcgcaatggcagcattgcgttactatgtaaatgttgatgcttatttgatattaagcatactcaagttgtatacatctagcactgtcactagatctactcatattgcaattgtcatgtttattgtcttaatattttggattaaaatatgccgaattgtgaccaaatttccaacaatccaaaaacttgataggtctttttcggtagttggctttgctgcatcactaaaaccacatgctttcgatggttcaaattataaaagatggaaagcacgtgcacttttgtggttgacggtgatgcattgtttctttgtctcacggggcaaaccgagtgaaccgcctttctctcctgaggaggaggctaagttcgaggctacggattgcttattccatggagcattgatcagtgtgctcgccgataatattgtggatgtgtatatgcacataccttcagggaaggacatgtgggatgctcttgaggccaagttcggggtttccgacgccggcagcgagctgtatgtcatggagcggttttatgactacaagatggtcgatgaccgttctgtagtggaacaggctcatgagattcagatgctggtaaaggaacttgagaacaacaactgcgagttgccggacaagtttgtggctggaggcattattgccaaattgccaccttcttggtcggactttgctactcctctaaaacacaagaagcaagagttcagtgttgctgatcttattagctctttaggtattgaggagaaggcaagggcaaaggacaaccggggcaaaaagatcgagggaggttctagtgccaatttggtgcagaagaagaaccctcacgcatcccacaacaacaagaagaaagtcaaacctgacgtcaaacccaaggctacaaccaattttaagaagaaaggcaagggaaaggcaaaaggagattgctttgtgtgtggcaagcctgggcattgggccaaggattgtcctgagcgcaaggacaagaagtctgcaaacatggttattagtgagggcgaagaaacattggggtatggtaaatttttacctatagttctctctgtctgtcactcacctgattggtgggttgatactggtgctaatattcatgagtgtgcggacatttccctgttttcttcttatcaagtcgggagaggttcctccctgttgatgggaaacggatcgcttgcggctgttcatggtgttggtacggtcgatctgaagtttacttcgggaaagatcgtacagctgaagaacgtgcagcatgtcccttcaataaagaagaatctagttagcggctctctactgtgtagagatggttttagacttgtgtttgaatccaataaatgtgtcgtatctaaatatggaatgtttattggaaaaggttatgatagtggagggggaaagaaatatttcatgacactgatagatgattgcactagattctgctatgtgtacctattgaaaacaaagaatgaagcattacattactttaagatccataaggctgaggtagaaaaccaactggtaaatgtacctatagccaaaaagcgtaaacttggaccaaagatcgtagattgcgtgttccttggttacgctatccacagtatgggatataggttcttaatagtaaattctggagttcccgacatgcgtgttggtacaattactgagtccagagatgccacattttttgagaatgaatttcctatgaaaaatgcacctagcacttctagtcaagaacctattttatcccctgagcactttgtgccgatagaacacattgatcaaacgcttgaggaaaatcctgaagaggataacattgtagcaactcgaaagagtaagagacaaaggactgcaaaatcttttggagatgactacattgtatatcttgtggatgatactccaagaaccattgaagaggcatattcatctcctgacgctgactattggaaagaagcgatacgcagtgagatggactctatgtctaatggtatttgggaagtcgtcgagcgtccatatgggtgcaaacctataggatgcaaatgggttttcaagaaaaagcttaggcctgatgcctctcatggtctactcatccatcagatggatgttaagacagcttttctcaatggagagttggaggaggagatctatatggatcaaccagatggatatgtactaaaaggtcaagagggaatggtgtgcaagctgttgaagtccttgtatggtttcaaacaagcgcctaagcaatgtcatgagaagtttgacaatacacttacatttgctggctttgttgtgaacgaagctgacaaatgtgtgtactatcgctatggtgggggagagggagtgatcttgtgtttatatgtcgatgacatattgatctttgggaccagcctcaatgtgattgaggaggtcaaggactttctgtccaaaagctttgaaatgaaggatttgggagtggctaatgttattcttaacattaaactactgagaggagatgagggtgggattacacttgtgcaatctcactatgtggacaaggtcttgagtcgctttggttatagtgactgcaaggcagctcctactccttatgatcctagtgtgctattaaggaaaaacagaagaatagtaagggatcaattgagatactcccagatcattggttcattgatgtag

SEQ ID NO: 86547 - DNA, 721 bp, Oryza sativa
  Clone ID: PAT_MRT4530_85578C.1
gccagaggttacaattgaaaagtacaaggcaaggcttgtggccaagggttatacccaaaaggaaggcgaggattttttcgacacctactcatcagttgcccatttgaccacgattcgagtactacttgctctggcagcctctcatgctcttctcgtccatcagatggacgttaagacagctttcctaaatggagagctggaggaggagatctatatggatcaaccaaacgggtatgcactagaaggtcgggagggaatggtgtgtaaactgttgaaatccttgtatggccttaagcaagcacctaagcaatggcatgagaagtttgacaccacacttacatctgctggctttgttgtgaacgaaactgacaaatgcgtgtactatcgctatggtgggggagaaggagtgatcttgtgtttatatgtcgatgacatattgatctttaggaccagcctcaatgtgatcgaggaggtcaaggactttctgtccaagagttttgaaatgaaggatttgggagaggctgatgttattcttaacattaagctactaagaggagatgagggtgggattacacttgtgcaatcccactatgtggacaaggttctgagtcgctttggacacaacgactgcaagccagctcctactccttatgatcccaaccatcttaacgaggtcaacaatggaagcagaacttacaggactagatactgcgacagttga

SEQ ID NO: 86548 - DNA, 1602 bp, Oryza sativa
  Clone ID: PAT_MRT4530_85579C.1
atggggctgtttgaccaaggatgcaaatgggttttcaagaaaaagcttaggcctgatggtacaattgaaaagtacaaggcaagacttgtggccaaggcctctcatggtctactcgtccatcagatggatgttaagacagctttcctcaatggagagttggaggaggagatctatatggatcaaccagatgggtatgtactagaaggtcagaagggaatggtgtgcaagctattgaagtccttgtatggtctcaaacaagcgcctaagcaatggcatgagaaatttgacaatacacttagatctgctggctttgttgtgaacgaagctgacgaatgtgtgtactatcgctatggtgagggagagggagtgatcttgtgtttatatgtcgatgacatattgatctttgggaccagcctcaatgtgattgaggaggtcaaggactttctgtccaaatgctttgaaatgaaggatttgggagtggctgatgttattcttaacattaatctactgagaggagatgagggtgggattacacttgtgcaatctcactatgtggacaaggtcttgagtcgctttggttatagtgactgcaaggcagctcctactccttatgatcccactagtgcaacgaggcctgacatcttatttgctgtgagcaagttgagccagtttgtttcaaatccgggagatgatcattggcatgctcttgaaagagtaatgcgctatctaaaagggacaatgagctatggaattcactacgctaggtacccaaaagtgctggagggctatagtgattcaaattggatatctgatgctgatgagataaaggccacaagtgggtatgtgttcacacttggagggggcgctgtttcctggaagtcttgcaagcagaccatcttaacaaggtcaacaatggaagcagaattcacagctttagatattgccacagttgaggccgaatggcttcgtgagctcctgatggacttgtcggtggttgaaaaaccagtaccagcaatcctgatgaactgtgataatcaaacaatgattattaaagtgaacagttcaaaggacaacatgaagtcatccaggcatgttaaaagaagactgaagtctgtcagaaagcagaaaaactccggagtgatagcattggactatgtccagacggctaaaaatctggcagatcagtttaccaaggggctaggacgaggagacgctggccccgggagggagctcgggggaggacgccgctgcatcctctattcctctgtgagagctcgagctcgggaggtgaagccggggaggaagtggggtcgcaaggatggaagcgggatcaaggggtcatcattaggagggcggaggcggagggggtggcgtggtttctgccgctgttttgatgctgcgggagtcggacaaaccaatacgccaccagatatcgacatcagagataagcctagacagaccccatttggtgcctgtagaggccaactaaagggatctaatgccatctttgatctcgatgagttcatattcgaggaggaagactaccctatcgtcgactacgtgttagtgatccatgccgccaagtcgatgacagctagatag

SEQ ID NO: 86549 - DNA, 151 bp, Oryza sativa
  Clone ID: PAT_MRT4530_8557C.1
ctggaaaagaaggacaacttcaacatttttgttcaaacgggcaggcttaggaaaccgtgaccccgagacgttcttaagcttacatattaaggttttgtatccacccaacaaggtttctaaggaagtccacagatcccatttgggatatcaa

SEQ ID NO: 86550 - DNA, 555 bp, Oryza sativa
  Clone ID: PAT_MRT4530_85580C.1
atgcctcgcgcactgatcgccctcgcgtcggctgtcctgctgctggtggccgcggtggcgccgccgctcgccgccgcggacgacggcggcgccggagtcccgggggaagggaagctggagagcgcggggtccgcgattaagtcggcggccgccaacgcgttcggggtcggctccgacatcggcggcgtcccggcggcgccgccgctcgccctcgcctccgcgctcctgctgctgctggccgccgccgccgcggtggcgccgctcggcgccgcggcggacggcggcctcgtccagggcggcggcgaggtcgcgaggtcggccgcgaacaccctggccgtcggcgccgaccccgaccctgcctccgccgacggcatcccggccgaccgggcgccggacgcccacggtttcacggaggccggcttcccaacctctaccaccaccaccggcctcgtcaaccggttcggtctctacatcctcgacgtgtggttggccttgcagctggtgcccacgaagaagcaaggcgtcatcccgaagacgcagtggcgacgacgctag

SEQ ID NO: 86551 - DNA, 1085 bp, Oryza sativa
  Clone ID: PAT_MRT4530_85581C.1
ccggccgggctttagggcttgtgccttcccccccggccgggacaacgcagccgccacaaaacccttctccccgcgcgcgcgccctccgctccttcctccgcccagctgcccgccgctcgttcgccaccgccaccgccgccgccgccgctgcgtcgatcgaagatgtatctccagtactacatcaacgagaagggggacaaggtgtacaccaccaagaaggaatctcctctcggtgttcccacgcagtctgctcacccagctcgcttctctccagatgacaagtactcacgccagagatacctgttgaagaagagattcgggttgctgccaacccaaaagccagcaccaaagtactgaaggagaaacctcggaccaccatgttccatggatccctcgaagagaatcagtcttgcctacctcgctatttacctgtatcactcaaatgatctgatgtatcgcgatgctatctacgaatcgtacttcctctcgaccatattagtatgatcatgaaagtcattcaggtgtcttcgcatgttctgaactgttggcatgattataatctaaaaagtatgaatctagactgttactagtaaaaaaaaaaaaaaaaactattaggaaatcatatgatggttagctgataaagcaaggaaacaaaaaggggcatagcgtcgtttttttttagaaaagaaaattcggggggggggcccgggaacccaattcagcctgtgggagagtcgtttgcacgcgcggaaggggcggagggtacagcgggggagatggggaaaacccggggttacccgatggaatcgggtggaggcggattcccagcgtgcagatggggtgtgggggaggaggggagggggagcgggcgggggcgaggagcgcgagcggaggggcgagtgggacgggccgggagtggaggagtatgcgaggtgggggaggggggctgggaggggtacgaggccgtgggtcggcggtgggcggagcggtgtggggctgggggtgggtaagagggagtggatgtgcttgggagaaaaaaaaaaaaaaccaaaaaaaaaaaaaaaaaaaaaaacccaaccaaccac

SEQ ID NO: 86552 - DNA, 732 bp, Oryza sativa
  Clone ID: PAT_MRT4530_85582C.1
atgaacggtgtgttgactaaaggggggaagaaatatttcatgacactgatagatgattgcactagattctgctatgtgtacctattgaaaacaaaggatgaagcattacattactttaagatctataaggtcgaggtagaaaaccaactggaaaggaaaatcaaacggttgagcacttctagtcaagaacctattttatcccctgagcactttgcgtcgatagaacacattgatcaaacgcttgaggaaaatcctgaggaggataacattgtagaaactcaaaaaagtaagagacaaaggactgcaaagtcttttgaagatgactacattgtatatcttgtggatgatactccaagaaccaatgaagaggcatattcatctcctgacgctaactattggaaggaagcggaagtcatcgagcatgcatatgggtgcaagcctgtacgatgcaaatggattttcaagaaaaagcttaggcctgatgcctctcatggtctactcgtccatcagatggatgttaagacagctttcctcaatggagagttggaggaagagatctatatggatcaaccagatgacctcaatgtgattgaggaggtcaaggactttatgtccaaaagctttgaaatgaaggatttgggagtggttgatgttattcttaacattaaactactgagaggagatgagggtggattacacttgtgcaatctcactatgtggacaaggtcttga

SEQ ID NO: 86553 - DNA, 546 bp, Oryza sativa
  Clone ID: PAT_MRT4530_85583C.1
atggccagcgcctccaccgggtcgtcggtcgccgcgcgcgtcggctggagcttgctacgccgctttggggtgggctcatcgccgcgggcagccgccgcgacggcggagggcgactcagtggggatgcggaggataccgtcgacaatggtggtgatcgcgggcacggtgcccatccccgtggcggtgtcgatggcaggctccgactgctgcatgaaccagcggatggtctcgctgtcggacttgtgccctagctcgcgggtgagccagcggatggtctcgcagtccaacttgtcacctgagttggcgccgccgccgccgtcgcgtcgccgccttgctctcctccccacccgttgggcggcggcgccggcctgcccagagcggcggaaggagatgaggaggctgcctagagaaagagatgaggaagggagagaagaggggaaagagggagaggaggctgacgtggataaccctaacatgtgggccccacgtgggtcccacgctgactcagccgccaccaaaggacctcgggtgaccaattttgtatag

SEQ ID NO: 86554 - DNA, 1270 bp, Oryza sativa
  Clone ID: PAT_MRT4530_85584C.1
gcctgatggtacaatcgaaaagtacaaggcaaggcttgttgccaagggttatacccaaaaggaaggcgaggacttcttcgacacatactcaccagttgctcgcttgaccacgattcgagtactacttgctctggcagcctctcatggtcttctcgtccatcagatggacattaagatagctttcctaaacggagagctggaggaggagatctatatggatcacccagacgggtatgtactagaaggtcaggagggaatggtgtgtaaactgttgaaatccttgtatggcctcaagcaagcacctaagcaatggcatgagaagtttgacaccacgcttacatctgcaggctttgttgtgaacgaagctgacaaatgtgtatactatcgctatggtgggggagaaggggtgatcttgtgcttatatgtcgatgacatattgatctttgggaccagccttaatgtgattgaggaggtcaaggactatctgtccaagagttttgaaatgaaggatttgggagaggctgatgttattcttaacatcaaactacaaagaggagatgagggtgggattacacttgtgcaatcccactatgtggacaaggttttgagtcgctttggatatagtgactgcaagccagctcctactccttatgatcccagcgtgctattaaggaaaaaccgaagaatagcaagggatcaactgagatactctcaaatcattggttcattgatgtacttggctagcgcaacgaggactgacatctcatttgctgtaagcaagctgagccggtttgtctcaaatccgggagatgatcattggcaggctctggaaagagtaatgcactatctaaagggcactatgagctatggaattcactataccgggtatccaaaagtactagaagggtatagtgactcaaactggatatctgatgctgatgagataaaagccacaagtgaatatgtgttcacacttggaggtggcgctgtttcctggaagtcttgcaagcagaccatcttaacgaggtcaacaatggaagcagaacttacagcactagatactgcgacagttgaggccgaatggcttcgtgagttcctgatggacttgccggtggttgaaaaaccagcgggtgatcaggtttttggggagtgcctcccgcacgactgctcatcgcgatgtctggagtcgccgccgctgctggaggagatggcggaggtggtgcgccgccaacaggagccggagctggtgcgccaggaggaggtgccgtga

SEQ ID NO: 86555 - DNA, 378 bp, Oryza sativa
  Clone ID: PAT_MRT4530_85585C.1
atgcatagccaacaacaatgcaacaagctagagggcatcattgagcagggcgggtggtgtctggcgcattacaaggacccgacaggaggtaagcagcatgcccccgtgcccgccgccggtgtcggcgctccagccgacgccgcccatgcgtatcctccgacgcccagccagcttttccgccgcctcctggccgtcgtcccagcgctccgcaagctcctcccagtcacgccagttctccgcaagtttcctccagccgtgcccggagtccccgccgcggcctccgcgcagatctgggcgtccccctttggcctccgtcgcctcgatggtagcagagacgccagatccgccacctgctgccgctcgccggtccttcgctga

SEQ ID NO: 86556 - DNA, 486 bp, Oryza sativa
  Clone ID: PAT_MRT4530_85586C.1
atggcgacgagcagtcgtgcgggaggcactccccaaaaacctgatcacccgcctacccggtgcagatctcaggcgaaggtgtggtttcggaggcactgctccttccaatctctcgtgcgcgcaagagatcagaagcggggaagcgagagcaactcaggcgcggagaaggagaaactaacaccgggaaagaagcgaagaagacggatcgggctcgcggcctccttatctatcaggagaaagaacgtggacgcgctgttgcggagggaatcgtgggaacgtgggatagctggcattggtttttcaaccactggcaaatccatcaggagttcacgaagccactcggcctcaactgtcgcagtatctagtgcttttccgacgttccggaggagagcgtttccgttgaggaaggttcagaagcgtttgtggaagcccaaggcaagtcacacagatcccaaacaaccctttgagcatgttgatcccgtttaa

SEQ ID NO: 86557 - DNA, 2721 bp, Oryza sativa
  Clone ID: PAT_MRT4530_85587C.1
atggcggaggtggtgcgccgccgccaggagctggagccggtggcgcgaacaacaacatcaacggaggcaattctgcctcataatccagcggagggccattctcgggtggacgtgtacatgcacatgccttctgggaaggacatgtgggatgcacttgaggccaagttcggagtttctaacgccggcagtgagctgtatgtcatggagcagttctatgactacaagatgttgccggacaagtttgtggcgggtggcattattgccaaattgccaccttcttggtcggactttgccacttctctaaagcacaagagacaagagttcagtgtttctgatctcattggctctttgggtgttgaggagaaggcgagggcaacggacatccgggaaaaaaaggttgagggaggttctagtgccaatatggtacagaaaaagaaccctcatgcatcctacaacaacaagaaagtcaagcctgatgtcaaacccaaggctgcaaccaactttaagaagaaaggcaagggaaaagcaaagggagactgctttgtgtgtggcaagtctgggcattgggccaaggactgtcctgagcgcaaagacaggaagtctgccaacatggtcattggcgagggcggaggaacatcggggtacggtaaaatattacctacagttctctctgtttttcactcacctgattggtgggtggacactggtgctaatattcatgtcgggagaggttcctccatgttgatgggaaacgggtcgcttgcggctgttcatggtattggtacggtcgatcagaagtttacttcgggaaagaccgtgcagctgaagaacgtgcagcatgtcccttcaataaagaagaatcttgttagcggctctctactttgtagagaaggttttagacttgtgtttgagtccaataaatgtgtcgtatctaaatatgggacttttgttagaaaaggttatgacagcggaggcttgttccgcttttctttgaatgacatgtgtaataatcataatgttgtgaaccatattagcgagaatgatgagtctaatgtgtggcattcgcgactctgtcatgtgaatttcagttgtatgacgcgcttagctaacatgagtttaattccaaaattcactttgatcaaaggttccaagtgccatacttgtgttcaatcgaaacaacctcgcaagcctcacaaggcatctgaggcgaggaatttggcacctctagaacttgttcattccgatttgtgcgaaatgaacggcgtgttgactaaagggggaaagaaatatttcatgacactgatagatgattacactagattttgttatgtgtatatattgaaaagaaaggatgaagcattgcattactttaaaatctataaagctgaggtagaaaaccaacttgaaaggaaaatcaaacggttgaggtctgatagaggtgaggagtatttttctaatgagtttgcatccttttgcgaagagtttggaattatttatgagaggatgcctccctattcaccccaatcaaatggggtggccgaaagaaagaaccgtactctaactgagatggtgaatgccatgttagagactgcggggctttccaaggaatggtggggtgaggcagttttgactgcgtgtcatgtcctgaataaaatttcaatgaagcataaggaagtaacaccattcgaggaatgggaaaggaagaaattaaatctctcatacctacgaacatggggctgtttggccaagcactttgcaccgatagaacacaatgatcaaacgcctgagaaaaatcctgaggaggacaacattgtagacactcacaagagtaagagacaaagggttgcaaaatcctttggagatgactacattgtataccttgtggatgacaccccaagaaccatagaagagacatattcatctcctgacgctgactactggaaggaaataatggatgttaagacagctttcttaaacggagagctggaggaggagatctatatggatcaaccagacggccttaatgtgattgaggaggtcaaggactatctgtacaagagttttgaaatgaaggatttgggagaggctaatgttattcttaacatcaaactacaaagaggagatgagggtgggattacacttgtgcaatctcactatgtggacaaggttttgagtcgctttggatatagtgactgtaagccagctcctactccttgtgatcctagcgtgctattaaggaaaaaccgaagaatagtaagggatcaactgagatactctcaaatcattggttcattgatgtacttggctagtgcaacgaggcctgacatctcatttgctgtaagcaagctgagccggtttgtctcaaatccgggagatgatcattggcaggctctggaaagagtaatgcgctatctaaagggcactatgagctatggaattcactataccgggtattcaaaagtactagaagggtatattgactcaaactggatatctgatgctgatgagataaaagtcacaagtggatatgtgttcacacttggaggtggtgttgtttcctggaagtcttgcaagcagaccatcttaacaaggtcaacaatggaagcagaacttacagcactagatactgcgacagttgaggccgagtggcttcgtgaactcctgatggatttgccggtggttgaaaaaccagtgcgcgccagctatcctaatgaactatga

SEQ ID NO: 86558 - DNA, 3603 bp, Oryza sativa
  Clone ID: PAT_MRT4530_85588C.1
atgtctggagttgccgccgccgccgctgctggaggagatggcggaggtggtgcgccgccaacaggagctggatccggagccggagctggtgcgccaggaggtgccatgaacgacagcaacaacggaggcaattctgcctcaccatccagcggagggctattctcgggcatgttattgcgttactgttatgttcctgttcctgacattcatgatgcgcatagtatgatactggttatgttaagatcaccctacactgcttatgccatgattattgctttaacattttggattaaaatatgccgattaatgactatatttccaacaatccaaaaacctgataggtcattttcggtagttggctttgctgctgctctgaaaccacatgcttttgatggttcaaactataagagatggaaagcacgtgcactattgtggttgacagcgatgcagtgcttctatgtttcacggggcaaacgaagtgaaccacctctttctcctgaggaagaggctaagttcgaggcttcggattgcctgttccgtggagcattgatcagtgtactcgctgacaacatagtggacgtgtacatgcacatgccttctgggaaggacatgtgggatgcacttgaggccaagttcggagtttctgatgccggcagtgagctgtatgtcatggagcagttctatgactacaagatattcgatgaccgttctgtagtagaacaagctcatgagattcagatgctggctaaggaacttgagaacaacaactgtgagttgccggacaagtttgtggcgggtggcattattaccaaactaccaccttcttggtcggactttgccacttctctaaagcacaagagacaagagttcagtatttctgatctcattggctctttgggtgttgaggagaaggcgagggcaaaggacgtccggggcaaaaaggttgagggaggttctagtgccaatatggtacagaagaagaaccctcatgcatcccacaacaacaagaaagtcaagcctgatgtcaaacccaaggctgcaaccaattttaagaagaaaggcaagggaaaggcaaaggtagactgctttgtgtgtggcaagtctgggcattgggccaaggactgtcctgagcgcaaagacaggaagtctgccaacatggtcattagcgagggcggaggaacatcggggtacggtaaaatattacctatagttctctctgtttttcattcacctgattggtgggtggacactggtgctaatattcatgtcgggagaggtttctccttgttgatgggaaacgggtcgcttgcggctgttcatggtgttggtacggtcgatctgaagtttacttcgggaaagaccgtgcagctgaagaacgtgcagcatgtcccttcaataaagaagaatctagttccaagtgccatacttgcgttcaatcgaaacaacctcgcaagccttacaaggcatctgatagatgattgcactagattttgctatgtgtatctattgaaaacaaaggatgaggcattgcattactttaaaatctataaagctgaggtagaaaaccaacttgaaaggaaaatcaaacggttgaggtctgatagaggtggggagtatttttccaatgagtttgcattcttttgcgaagagtttggaattattcatgagaggatgcctccctattcaccccaatcaaatggggtggccgaaagaaagaaccgtactctaactgagatggtgaatgccttgttagacactgcggggctttccaaggaatggtggggtgaggcagttttgactgcgtgtcatgtcctgaataaaattccaatgaagcataagaaagtaacaccattcgaggaatgggaaaggaagaaattaaatctctcatacctacgaacatggggctgtttggccaaggtaaatgtacctatagccaaaaagcggaaacttggaccaaatactgttgattgtgtgttccttggttatgctatccacagtgtgagttatagattcttaatagtaaactctagagtacccgacatgcatgttggtacaattcttgagtccagagatgctacattatttgagaatgaatttcctatgaaacatacacctagcacttctagtaaagaaactgtcatgccccatgagcactttgcaccgataaaacacaatgatcaaacgcctgaggaaaatcctaaggaggacaacattgtagatactcgcaagagtaagagacaaagggttgcaaaatcatttggagatgactacattgtatacctcgtggatgacaccccaagaaccatagaagaggtatattcatctcttgacgctgactactggaaggaagcagtacacagtgaaatggactctattatgtctaatggtacttgggaagtcgttgagcgtccatatgggtgcaagcccgtaggatgcaaatgggttttcaagaaaaagcttaggcctgatggtacaatcgaaaagtacaaggcaaggcttgtggccaagggttatacccaaaaggaaggcgaggacttcttcgacacatactcaccagttgctcttttgaccacgattcgagtactacttgctctggcagcctctcatggtcttctcgtccatcagatggacgttaagacagctttcctaaacggagagctggaggaggagatctatatggatcaaccagacgggtatgtactagaaggtcaggagggaatggtgtgtaaactgttgaaatccttgtatggcctcaagcaagcacctaagcaatggcatgagaagtttgacaccacgcatacatctgcaggctttgttgtgaacgaagctgacaaatgtgtatactatcactatggtgggggagaaggggtgatcttgtgcttatatgtcgatgacatattgatctttgggaccagccttaatgtgattgaggaggtcaaggactatttgtccaagagttttgaaatgaaggatttgggagaggctgatgttattcttaacatcaaactacaaagaggagatgagggtgggattacacttgtgcaatcccactatgtgaacaaggttttgagtcgctttggatatagtgactgcaagccagctcctactccttatgatcccagcgtgctattaaggaaaaaccaaagaatagcaagggatcaactgagatactctcaaatcattggtttattgatgtacttggctagcgcaatgaggcctgacatctcatttgctgtaagcaagctgagccggtttgtctcaaatccgggagatgatcattggcaggctctggaaagagtaatgcgctatctaaagggcactatgagctatggaattcactataccgggtatccaaaagtactagaagggtatagtgactcaaactggatatctgatgctgatgagataaaagccacaagtggatatgtgttcacacttggaggcggcgctgtttcctggaagtcttgcaagcagaccatcttaacgaggtcaacaattgaagcagaacttacagcactagatactgcgacagttgagaccgagtggcttcgtgaactcctgatggatttgccggtggttgaaaaccagtgccagctatcctaa

SEQ ID NO: 86559 - DNA, 485 bp, Oryza sativa
  Clone ID: PAT_MRT4530_85589C.1
tctataaaagacataacacggcatgcgcgcgcgcgcaagcgcgggtactctatatcgcgcgcgctctttttttttttttttttttttttttttttttttttttttttttttttttttttaaagcaaaattgggggaaaaaaaaaacgggcgcaagatgacattgcattgggatgatgcacaacatcctgaacctgatgcgggagcaaaggatgttgaaagccttcaaccacacagtacttcccttcaaaaattatccattaaagggcatggaggtctttgttgaccatcatggctgaacaatgagctctctgttaaagctctccgggcttttaatctaacagggggggcctggaaaggccttccatcatttaaccagatatgggagctttacgagctaacattggagaatataggcacaatacgtaagtccgttctggaacaatggtgttgtaagctaaaaaggctaacactgatcgacttaaag

SEQ ID NO: 86560 - DNA, 532 bp, Oryza sativa
  Clone ID: PAT_MRT4530_8558C.1
cccgggctgcaggcggcgcccacgcggcgccgtgaacggcgacgcgacgtcgctgggcctcgcgctggcgctggcgcacgagcagcgtgcgtggtgtgggatgggcgccgcggtggcgctcccggaggcccggcgccggcgcccactcccgggctacgtggcggcgctgctccgcgacaaggtcgcctacgcgcggctgcggaagctgctgatgctgagggcggaggcgtgcacggggaaggagctcgtcggcacgtggtactcggcgaacgaccccgccgccgccgacagggaggtggtggcggcggaggcttgcgagctgctcgaagggatcgaggtcggcagcggcaagaactacgccacggcgaggcaggcgatgtggccggaaagctgcgccgccgtcgggatggagatcacccggccacggcggccgtcgtctcctgagcaaattctccacgtcagtgagaaggaaaaggagaaacatggggcatctgaccagtaccagattaagcagacgaaaatcatgaagaag

SEQ ID NO: 86561 - DNA, 163 bp, Oryza sativa
  Clone ID: PAT_MRT4530_85590C.1
ggaagaaatgcatcacagattagaaggaaatggaggcacagattacaaatacgtcacatcacaaaatcttaaacaaaaatttcttcacatatcctataagaaatacattacaactcaaatacattacagatcagattcaatatcacatactatacatatcaaa

SEQ ID NO: 86562 - DNA, 440 bp, Oryza sativa
  Clone ID: PAT_MRT4530_85591C.1
cttaaggccgtcttcctgatgccacacatggttgggaccacttaatgcaggtcgctgctgcccaaatgggcctgagtgacagggacatagctgatctttctggtggtcacaccctgcgaagattccacaaggagagacactactttccaggagcctgacacgtcaaccctttgatctattgacaactatcactagacccagcttgggagtcgctagaatgaacgccatgttcatctagcacgcgacagagctctactggctgacccacccttgcgagcactggaggagaaatatgctggggatgaggacgccttcattgcggattactactaggctcacctcaagctctctgaactgcgattcgttgaggagtacgaagcctctagagagtgccatattcactgaagattaatgacgatttgcattccgcgtcttagagt

SEQ ID NO: 86563 - DNA, 441 bp, Oryza sativa
  Clone ID: PAT_MRT4530_85592C.1
atgagcagggtggatccgagccgagccgttcccatggatatggcgacggagtggatccccactgctcctactccttgctccaaggcggcattggccggaatggtcttttttggtgcgctagagaggctggcgtcgtcctccatcatggcggcgccagccaccctggtgccgtcaccatgccagtgcggcactagggcacgtggttgggctgacgtggcaaagaggggcgccaaccacactggcaccgttccacatatcacggcgccagccgtgctggcgcactcccccaaggatttttttgtggaaatcgaagagaaagagaaagatcattaccgcaacgtctctttgatggtcatgtctcccctcttctttccttacccatacaagtcttcccgctttccttacccatccaagccttctcatacttatatgttcacttag

SEQ ID NO: 86564 - DNA, 897 bp, Oryza sativa
  Clone ID: PAT_MRT4530_85593C.1
atggacttgtcgagctccaaggaggcgacgcctcctcccgaggcgtggtggacgggggagacggtggcggtggtgacgggggcgaaccgcgggatcgggcacgcgctggcggcgcggctggcggagcaagggctggccgtggtgctgacggcgcgggacggggcgcgcggggaggcggccgcggcggcgctccgcgcgaggggcctccgctccgtccggttccgccgcctcgacgtctccgatccggcctccgtcgccgccttcgcctcctggctccgcgacgaactcggcggcctcgacatcctggtgaacaacgctgccgtttcgttcaacgagatcgacaccaattcggtggagcacgctgagacggtgctcaggaccaacttctacggggccaagatgctcatcgaggcgctcctgccgcttttccggcgatcggctgccaacagcaggatcctgaacatcagctcccagcttggcctcctaaataaggtgagggacccgtcgctgcggagcatgctgctggacgaggcgtcgctgacggaggggaagatcgagcggatggcgtcgcggttcctggccgaggtgaaggacgggacgtggtcggcgccggggcgcgggtggccggcggtgtggacggactacgcggtgtccaagctcgcgctcaacgcctactcgcgcgtcctcgccgcccgcctcgcccgaggcggcgaccgcgtcgccgtcaactgcttctgccccgggttcacgcgcaccgacatgacccgcggctggggcacccgcaccgccgaggaggccggccgcgtcgccgccggcctcgcgctgctcccgcccggcgacctccccaccggcaagttcttcaagtggtgcacgccccagctctactccaagctgtga

SEQ ID NO: 86565 - DNA, 3429 bp, Oryza sativa
  Clone ID: PAT_MRT4530_85594C.1
attgcaggagcaaacaaaataaccgcggaatttttccccattcaaagttcaccaaaatgagctgcaacgcaacgccatttggagctgtacaagaaattttttttccacccccctaacccaagctaagctaggctgcatcttatcaaaatcctacttcttgaaccccttgctgagccactgaatcaactgctacaccagcagcaatgttcatgttccatgttcttgatgttcatgtcaaccttgctggctcccgggcttgatgagcggctgctgggagatcttcccccactcctcgggagagcacttcacctccttgaggaaggccaccacctccttcatggtgggccgctccgcgggcgccgggttcacgcagaagatggcgatccccagcgtctgcagcatctcctggaccagctggtccggcatgccgcgcagcttcgggtccaggatgttcaccgctggctcgtagctccccatcttcttcttcgcccactccacgatgtggagggagtcgcccaccaccgcctccaccgcgctccgcccgctcaggatctccaggagcaccaccccgtagctgtacacgtcgctcttctcggtgatcttcgtggtgtagccatactcggcgatgcgtgacatagcatgatgatagttgggggagttcatcagcttggccagcccaaagtcagccaagtatgcctcatacttcgtatcaagcagtatattattgcacttgacatcgcggtggagtatcgccgggacgcaatcatggtgcagataggccagcccttgtgctgcgccgacggcgatcttgtaccgggtatcccagtccaggctcctgttatccttcaggagctgttgcagattgccattggggatgtagttgtagagcaagagcttaacatacttgtttgagcagtaaccaagcagcttgacgatgttccggtgcctgatgtgccccaatatctgaatctcagcagcgaacgcgtcgattggctcctccttcgatgtcttccacagcttcttcacggcgatgatctccccattcggcatctcagctctgtacacaacacctgagcaacctttgccgatcacattctcatctctcaggcactccaagatgttatcgacgcagaagttcagcttctggaacggcgtgaacgtccacgggtgcgagaagtcatcgccacccgcaaccgacatgctcatcgccttcttgcccgcgagtgttctgcttctgttgatcaggatccagaccacaacaagcaacagagtgattgagcccagaacagcacagacaaggatcacggtcttgacggtcttcagtgccgtcctgcgaaccatgtctgatgcacaagtgtgcccgtcgtaggactcgcagaggttgggattgttgatgtaggagctcgatgacaatgtcttgaagaacggtgtcaccgggatcgcgccggagaaattgttgtacgaaatgttgagagatgtcaagctggtgagcccactcaacactgagatgctgccatacaagccattgctggagaggtcgagcgactgcagctgcgtcaagctggacatctcatccggcagctcgccggtgaacctgttcgagctgaggtcaaggctaatgctcaggctcgagagcgcgccaatctccggcggtatcggaccggagaagctgttgttgctcagctccagcatggtcagcttctgcaggttgcgaatcgacttgggcaatgtcccggagagcatgttgccgctgaggatgagcttgttgaggtagctgaagttgccgaagctcgccggtatctcgccggtgagcttgttcatgctcaggtcaagctgctccaggttcatgagctcgccgaactgcggcgggatggcacccgtgaagctgttgttgtggacgtcgagcagctcgagcaccgtgatgttggcgagctcgccggggagcgcgccggtgaacttgttggagtagaggtccaggaacaccaggttcggcagcttgccgatctccctgggtatctcgccggcgagctggttctcgccgagccggaggcgcaccagcgacgagcagtcggcgacgctcggcgggagcctcccggagagcgcgttcccgaggaggagcagcttgctgagcttctgcagcgcgaacacctcgtcggggatgccgccggcgaggcggttcctggacaggtcgagcgcgtacagctcggtgcagttgccgagcgacggcggtatcgcgccggagagcgcgttgccccagaggaacagcacctgcagcgccctgagctcgccgagctgcggcgggatggcgccggtcaggccgttcttgtcgagctggagcgccgtgaggctgctgcagttgctcagctccgccgggatgcgccccgcgagctggttgtccgacaggtgcagctgctcgagcgcggcgaggcggccgagcgccccgggcacctcgccggcgagccggttgccggagaggtcgagcacgacgagcgccgagcagttggagagctccggcgggatcctcccggacagggcgttgccccagagcagcaggctggtgagcttttgcagccgcccgagctccggaggtatcgggccggtgagcttgttcatgtggaggtacaggttgcgcagctcggcgcagccgccgagcgcggcggggatcgggccggacacgccggtgtcgtacaatgccagcgtctggaggttggcgaggttgccgagctcctccgggatggcgccggacagcgcggtggcggcggcgccgaagacggtgaggttggagagcgcgccaagggaggccgggatggggcccgacagccccgggttgccgccgacgcggaactgctggagcgcggtgagcgcgccgagcgacgctgggatggtgccgttgaggaggttgtcctggacgcagagcacctggagcgcggcgaggctggcgagggagcgcgggatggcgccggtgaggcggttggagttgaggagcaggtactggagccccgacagcgcgccgagcgacgccgggatgtcgccgtagagcgcgttcgacgagaggtccagcacgcggagcgcggcgagcgacgcgtacgccggcgggatggcgccggagatgttgcaggtggagaggttgagcagctggagcgacgacagcgacgcgagctgcggcggcagcgacgacaggttgaggaaggtgttcggcagcgacagcgacaccacccggctctgcggcgagcacgtcaccccctgccacgagcacggcgtcgcggcggtggggtcccacgacggcagcaccggcgacggcgccgccgccggcagcagcgacagcagcgccttcccgtccgcggacagggccggcgccgggcgaaccaccacccccaacaccaccaccaccaccaccaccaccaagaaccggtcgccccggtgcgccat

SEQ ID NO: 86566 - DNA, 359 bp, Oryza sativa
  unsure (1)..(359): unsure at all n locations
  Clone ID: PAT_MRT4530_85595C.1
gaaagtagagagatggaggggaaggaggaggatgtccggctgggagccaacaagttctnggagaggcagccgatcggcacggcggcgcagggctccgacgacaaggnctacaaggagccgccgccgggccgctgttcgagccaggtnngctcaagtcgtggtccttctaccgngcagggatcgccgagttnatggncaccnncctcttccnttacatnancntcctnaccntcataggggtcaacaanttcacnttcaagtgtgccancgtngncatccagggcatcgtctgntccttcggnggcatattcttttgancttcgantacttgcattgccgagnatattccggcgggacaa

SEQ ID NO: 86567 - DNA, 363 bp, Oryza sativa
  unsure (1)..(363): unsure at all n locations
  Clone ID: PAT_MRT4530_85596C.1
ccgaaacaatatcaacttncacggaggccagccacggatatgatatacataatgttatataatatcaaccctcggttttgagcaggggctaactcacactaggttacatatcgagcaaaacaaaaaccaatacattcctttcgactcatcagctactgcatgcatgcatatcttcctaactttgaatataagctacaaacagggccctggggcaacttctttcagggacagcttgcttgacaaatggatgaatgttacattatgtacaaggtcgctcccgcaggccctagtaacaacaataccccagggtgtaagatattctacatcaaggccgcccccacaaggccacaatttcaacacaaa

SEQ ID NO: 86568 - DNA, 284 bp, Oryza sativa
  Clone ID: PAT_MRT4530_85597C.1
cataggaaggcgagggagaggaagaagagacaggcaatgcttatggaacgcccgctcgaactgtttctaagagttattaggccattagcactataagagatatctcattcacggaggaagaaagtgtgtgtccaaaaaagccaacttcaatagatgaggtggagaaacatagcgagctatgtggtacgctcttgagctaggatgagagcaagatgaagtatggcaaatatttcaattgcttatttttaatgagtttattgccttattgactattatactatttt

SEQ ID NO: 86569 - DNA, 141 bp, Oryza sativa
  Clone ID: PAT_MRT4530_85598C.1
atggcgcccaagggagacgtgacgcagcagtattgcctagtgcaaccgaaggagaaggcaccacaagcgggagaggcggcagctgctacaccaactccacctgaacaacctcagtcggcaaatcctcgtgcttgtatgtaa

SEQ ID NO: 86570 - DNA, 356 bp, Oryza sativa
  Clone ID: PAT_MRT4530_85599C.1
cacagcccagggtagatgccacaaggcacaggtgcatgccagcagagctcagccagccaggtccagccagcagcatgcccaggtgcagaggcagcatccagaccatgttcatggacggcagtgggcagagctgcacagggtgccacgagggaggcacagaggccacacacaccacacagcagcatcatgccagcgggggagtccaaacctccgggttgcctcacgccaaacggaccgttctactgcccatgctctcagcaacgccaaattcccagtttactgaaaaattaaaccttttaatataatatatttccaaaaaaaaaaatgtgaaattttaatatttaaaaaaaaaaaaa

SEQ ID NO: 86571 - DNA, 1556 bp, Oryza sativa
  Clone ID: PAT_MRT4530_8559C.1
atgagcggggcggaggaggaggcggcggcggcgaggggagggggaagcgggagcgagagcggggggagcggaggaggtggacggggagggggagggggaggggcggggtcgtcggggagcagcggggcgcggcggcggttcgacgacaaggggcttgtggcgaggacgtcgctgatcctgtggcacacgcaccagaacgacgccggcgccgtgcggaagctgctggaggaggacgccgcgctcgtcaacgcccgcgactacgacagccgcacgccgctccacgtcgctgcgctccacgggtggcacgacgtcgccgagtgcctcatcgccaacggcgccgacgtcaacgcccaggatcgctggcagaacacgccacttgctgatgcggagggtgcaaagaggcatgctatgatcgagctactcaaggaacatggtggattgacatatgggaaaactggaagtcattttgaaccaaagacaattccaccacccctaacaaacaaggctgactgggagattaaccctcttgagttggatttctcaaaagctgttatcatcggaaaggatgatctttttagatgttatatgcaaatagagatagttgggtgttcaaaacttgccattatattagctggctcttttggtgaaattctgaaagccaactggcgaggaacacctattgctgtcaagcgcattcttccatctctatctgatgacaggctggtgattttttttggggtatgcagacaagatttcaagcatgaagtcaacttgctaataaagctgagacatccaaatattgtgcagttccttggagcagtcacagaaaccaagcctttaatgctcgttactgagtttttacgaggaggcgaccttcatcaatacctgaaggagaaaggtgcacttgccccagcaactgctgttaatttcgcactagacattgccaggggcatggcctatcttcataatgaacctaatgttgtaattcaccgggacttaaaaccaagaaacattcttctagtaaattctgctgccaatcacttgaaagttggagattttggtcttagcaagattatcaaagcccagcatgccaatgatgtgtacaagatgactggggagactggaagctaccggtacatggctcctgaagtattcaaacaccggaaatatgacaagaaagttgatgtcttctcgtttgctatgatactttacgagatgcttgaaggggatccacctttctctaactatgaaccttatgaagccgcaaagttaattgagctatgctggtccggggatatccatctgaggccatctttcctagagatcctcaagaggctcgagaagatcaaggagtacttagctgcgcacgatcaccattggcatttgttctcccagttccctgctctttttatgtttcttgagaatcagtacagtggatacaggaagtaaatgtgccatgtaatctgtttaaaagcacttcttttacggggattaaaaaaaagctagttctttgtgaactttgtaaacagaaaaaaaaaaaaaaaaaaaaaaaaaaa

SEQ ID NO: 86572 - DNA, 543 bp, Oryza sativa
  Clone ID: PAT_MRT4530_855C.1
atggcggaggcgcacgtcatcgcgatatgcgtcgcggtggccgcgctggcgctcgccgccgccgtgctgggcgtcgtcggcgaggcaaccaagtccaaggcaccgccatcatctcgatcgaacgctctcgtcttacgttcggtacgacggcgtgaactgcgtgtaccgtcggacgccggcgttcggctgcgggatcgccggcttctggcgaccgtgtcggcggcggcgttcgtcgtcggcgcgttcaggagccagagcggcgagcggcggcggagggaggacggcgtcgagacctactacaggtgcaccgtgctcgtggccggggtgttcgccggcgcgtcgtccctcgcgctcctcgcggccgccgtcgggatcgcctcgtacgtcgcgctcgaggcggcggcggcggcgccgtgctgggaggagcgccgcctgggcgtcgcggcggcggggcagccggagcagggtcgtcgtggtcatggttgtccgtcgtacggatcaaacaagaccatgctggaactgtttgaagacgaagctgcctga

SEQ ID NO: 86573 - DNA, 1279 bp, Oryza sativa
  Clone ID: PAT_MRT4530_85600C.1
atggccgtgctcctcctcctccccgtccccgtcccgccgtctctcctctacgccgtcgccgcactcgcgctcgccgccgtcacccacctcctccacctcccctccctcctcctctacgccctccacacctacatccacccggacgctgtcccctcctccacccctcgcgccgtcctccgcccgcccggcgccgccgctggatccgggaaccccaagcagcaacgcggtggtggtggtggtggtggcaaggcggcggcgtctccgttcgacgaggggtccaactccgcgcagctctaccgcctccgcctctcccacgccacgctcgccacgcgcccgcgcttcgccgacttccacctcgcactcctcctcccgctcgcgctgctgccaccggcgctgctgctcccggcctccgccgccggcgcggccgccccgctcgcgccgctcccgcccgtcgtgttcctcttcgtcgcgctgctgcgcctcgtgatgctcccgtccccgcgccccgcctacctcgccgccgcgctcggcgcgctgctcgtcgctacgctgctctcgtccagcccgttcgccggcgcgctcgcgtcgctcgccgcgctccccgccacgcggttcgcgcgctcgttctggctcggcaccgaccagccccgctctgggctcgccgtgctcgcgtcgtccgcgcccgcgcgcctgctcctctacctcgccgtcctcgtctcctccgcggcgtcgatcctccaatgctgcgggttcctggacagcccggagcttgaggtgaagctgctcgccgccgcggcggggctgcagctgctggcctcgcgggcggccgtgcagatgtatctcaacgaggccgtcttctgctggtaccagcggctgcacgtcagccgctcgccggacacggagtacggccgcgccaaggtgttcctgcacaaccaccatctctgcgccgtggccacgcagctcgtcgcgccgccactgctcgtgctctcgctgctggcattgtggcgagtgcaaggaaaagattactttgagggcgtggaggagctgaactggcttgttgggtggtcggttgccatgaaggaggctgcattgctcgcggcgcggtggatcgttgcggtttggtcgacggtgaccgtgggcacgctcgtgttttacaagcgtggatggttattcgtcttgtgatcaatcccttttttagcttgattctgcgtgattgattcaaatggaagttgtatttgataaaaaagttctacactggattgccggagttttgatagca

SEQ ID NO: 86574 - DNA, 336 bp, Oryza sativa
  Clone ID: PAT_MRT4530_85601C.1
atgcgcctgtcggagtctataggcgcgcgcccctctcctccttccccattggcggcggcgtccacgggtggcggcggagcttcgccaagacggggcagcagatccggcggcaatgcgactcgcgaggggtggtgtccagcagcaacaactcgtgacgcgggggttctggcggtgacgactcatggggcagccagtccggcgggaacgaggcgcgcggagggcggatccggcggcggcaactcgcgaggctgcaggtccggcggcaacgagtacgagttcttgtcagcaggagtggagtcattttttggattgacgaagatccgacgtcctacgtaa

SEQ ID NO: 86575 - DNA, 231 bp, Oryza sativa
  Clone ID: PAT_MRT4530_85602C.1
atggcggatctggaccaacgccgcttcccgggctcctcctcgtcgggatctggaggtggtagatccggtgaggcagcactgggggttctgccgcccgaacaaggcctcgagaagacgaggtggtggctgccgagcgtgatagcggctggcaagcgaggagacgtgccggccgaattccaaaccttcgatggacttcccaaccagctgtggatcaagaccaggacagcctaa

SEQ ID NO: 86576 - DNA, 686 bp, Oryza sativa
  Clone ID: PAT_MRT4530_85603C.1
ccggccgggccgcttcagacgacaacaaccctatccgccggaagaaccaagaaaatttgggaagagacaattcacaattgacgaagaagggaaaaatcctccgattcctccagtctcccatcgagcggagcacacaaaccaaaccaagaaaaccggtgatgcttccccccgccctcctcctcgtcgtcgccgtcggcgccgcgctcctcctcgccttccgccctccgctgccggccctcgccgcccgccccatcgtcgccgccgccggcggcaagcccgcccccaccgaggccgccgccaccgcgaggtggctcgccgcccagaacacgtggggcgtcctcagcacaatatcaagtgatctaagtggagctccttttggcaatgtagtttcatatagtgatggagtgccaggtgagagccatggaatcccctacttctatctgacaacgctagatcccactgcgagagatgcattggaggatgaaaggacctcctttacccttagcgagttccctcttgcgacatgtgggaagattgatcctgaaaacccaacttgtgcaaaacttactcttactggaaagatttggccaaagaagcactttttactacacatcctgaaatgcagggttggcccaaagatcatcatttccaaatcttcaaattggaaatcaaaacctatttttgat

SEQ ID NO: 86577 - DNA, 3469 bp, Oryza sativa
  Clone ID: PAT_MRT4530_85604C.1
tgaagaatgttctacataatctcaactaacacccagtcgtcaacgtactgctgtacacgtggagcccaaagtgcgcctgctagctgtccccgtcgagtcaacctgtgaagagaggtaaattatatggctcgatgaagtaatccgcctaaaaatttagaaatgaacaatccgaactcacgagtggtcggcagggaggacaggggggaggcaaaaatcgccctcccccagggcggcaagggggccgcctgcaaaattccatgccccctcgccgcccatttgcaggcgccccccccccccacagtacaaaatcgccctagcggagggcggcaagggggccgcctgcaaaattccatgccccccctcgccgcccatttgcaggcggccccccgcacagtataaaatcgccctagcggagggcggcaagggggccgccctgcaaatttcgttgacggccgtcgcccgagagcgaacggccgtctgccacgtcattttcgccgccctcggagagggcgatttttaaaaatcgccctcccagagggcggtaggcgaccgtcgcgtccaacgccgccgtcggcgaggccgccgcgtctctagaagaaggcatgtttaggaacgctaacacccctggctcgccggcgaagaattctccgtccgtctggtagtggtaccacagactgcagcgcaccccgagcaccatgccttccgtcaggccattgctgaccatctccttcccttggtcggtgatgccgcccaggcaactccggcaacgctccggcggcatgccgtccatgcactgcgccagcccgtatactactggctgactctcctggccgtcgaaccaccccttccccttgcccgtcaagtagctggcccgactactcaccatggcgtcggagatcctctccatgagctcagagaaaagctcgctgaaccgcgtgcgatcagcatccctctgagggacagcagggttcaggtaattgctcactatgcacgccggcgcgttgctgaagctggagatgaagtccgtgtcagagaagcttagcagcgcctggaactcatggtcgtacaaggttacagtactcttgtgcgactgggactgggagtcactctcactactggtagatccattattactgatgctggctgtgtcgagcactctctgtaagcggctgctgcagttggtggagtctccccggcagagtacggcgccgtagacgatgtcgggacctgtcgtcccagccgtggcgccggcggccgagtgcgaccccgtcttggtgacattggcgatcaggtctttggcgaggttgagcaggttggtcttgtaggtgccctctgccatgtaggcgagggtgttcgcgttgctgctgctgctgctcgagaacgtcccaccgctggattttgaggcagtattgcctccgttgatgtcgttcatcttcttgtctccaatctccgttgacatcttggtgaaggcgccgatgcagcagcagtagccgcgaagaacaagagcagtcgcgcttgaagcgctaccaaaaacttgatcgcccgccagcaagtccatcaggagctcacgaagccgttcggcctcaactgtggcagtatctaaagctgtgagctctgcttccattgttgacctcgttaagatggtctgcttgcaagacttccaggaaacagcgccacctccaagtgtgaacacataccctcttgtggcctttatcttatcagcatcagatatccagtttgaatcactatagccctccagcacttttgggtacccggcatagtgaattccatagctcattgtcccttttagatagtgtattactctttcaagagcatgccaatgatcatctcccggatttgaaacaaactggctcaacttgctcacagcaaatgagatgtcaggcctcgttgcactagctaagtacatcaatgaaccaatgatctgggagtatctcaattgatcccttgctattcttcggtttttccttaatagcacactaggatcataaggagtaggagctgccttgcagtcactataaccaaagcgactcaagactttgtccacatagtgagattgcacaagtgtaatctcaccctcatctcctctcagtagtttaatgttaagaataacatcagccactcccaaatccttcattttaaagcttttggacagaaagtccttgacctcctcaatcacattgaggctgttcccaaagatcaatatgtcatcgacatataaacacaagatcactccctctcccccaccatagcgatagtacacacatttgtcagcttctttcacaacaaagccaacagatgtaagtgtattgtcaaacttctcatgccattgcttaggcgcttgtttgagaccatataaggacttcaacagcttgcacaccattccctcctgaccttctagtacatacccatctggttgatccatatagatctcctcctccaactctccattgaggaaagctgtcttaacatccatcttgtacttttcaattgtaccatcaggccacaatgttcctccgccctcactaataaccatgtttgcagacttcttgtccttgcgctcaggacaatccttggcccaatgcccaggcttgccacacacaaagcaatctccttttgcctttcctttgcctttcttcttaaaattggttgtagccttggatttgatgtcaggtttgactttcttgttgttgttgtgggatgcgtgagtgttcttcttctgcaccaaattagcgctagaacctccctcgatctttttgccctggttgtcctttgccctcaccttctcctcaatacccaaagagccaatgagatcagtaacactgaacttttgcctcttgtgttttagagaagtagcaaagtccgaccaagaaggtggcaatttggcaataatgcctccagccacaaacttgtccggcaactcgcagttgttgttctcaagttcctttaccagcatctgaatctcataagcctgttccactacagaacggtaatcgaccatcttgtagtcatagaactgctccatgacatacagctcgctgccggcgtcggaaaccccgaacttgacctcaagagcatcccacatgtccttcccccgagaacgtcccatcgctggatttgaggcagtattgcctccgttgatgtcgttcatcttattgtctccaatctccgttgacatcttggtgaaggcgccgatgcagcagcagtagccgcgaagaacaagagcagtcgcgcttgaagcgctaccaaaaaacttgatcgcccgcctacccgtgcaagttctcaagcggacggagttccggaggcacctgctcgtcccgtacacctgtgcgcgcaggtgaacagaaccggggaaggattctctcggtgaaggccgaaagctgtatataagatcacaaacatgaaatccactattgtctatctcaacattgctgaaaggataagtgtccat

SEQ ID NO: 86578 - DNA, 875 bp, Oryza sativa
  Clone ID: PAT_MRT4530_85605C.1
agggaaaaatcctccgattcctccaccctcccatcgagcggcgcgtccaaaccaaaccaagaaaaccggtgatgcttccccccgccctcctcctcgtcgtcgccgtcggcgccgcgctcctcctcgccttccgccctccgctgccggccctcgccgcccgccccatcgtcgccgccgccggcggcaagcccgcccccaccgaggccgccgccaccgcgaggtggctcgccgcccagaacacgtggggcgtcctcagcacaatatcaagtgatctaagtggagctccttttggcaatgtagtttcatatagtgatggagtgccaggtgagagccatggaatcccctacttctatctgacaacgctagatcccactgcgagagatgcattggaggatgaaaggacctcctttacccttagcgagttccctcttgggacatgtgggaagattgatcctgaaaacccaacttgtgcaaaacttactcttactggaaagttgaagttgattgaccctcaatcatctgaagcagatttggccaaagaagcactttttactaaacatcctgaaatggagggttggccaaagaatcatcatttccaaatcttcaaattggaaatcaaaaacatatttttgattgattggtttgggggtcctaagcctatatcccccactgaataccttgaatatgagaagaaccgggccttgctgaagtcatcctaagcgacgcaccacgtttatatgtatgttgtaaagataaacagtaaattaattatatatgctatgtacatatttacatactgtgaacacatcttgttcatcttgaataaaaacgttattatgtttgtttatggaaaaaaaaaaaagcggacgcgtggg

SEQ ID NO: 86579 - DNA, 2811 bp, Oryza sativa
  Clone ID: PAT_MRT4530_85606C.1
atgtcgacaaccggcgacaacaacaacactggagacaaggagaaggagcctcccgtcaacaccaacagaggcaataccgcctcaaactccagcggagggccattatcaggtgtactcgctgacaatatagtggatgtgtacatgcacatgccttcggggaaggacatgtgggatgcacttgaggccaagttcggagttttcgacgccggcagcgagctttatgtcatggagcaattctatgactacaagatggtcgatgaccgttctgtagtggaacaggctcatgagattcagatgttggcaaaggaacttgagaacaacaattgtgagttgccggacaagtttgtggcggctggcattattgccaagttgccaccttcttggtcggactttgctacttctctaaaacacaagaggcaagagttcggtgttactgatctcattggctctttgggtgttgaggagaaggcgagggcaaaggacaaccggagtaaaaagatcaagggaggttctagcgccaatttggtgcagaagaagaaccctcacgcatcccacaacaacaacaagaaagtcaaacctgacgtcaaacccaaggctacaaccaattttaagaagaaaggcaagggaaaggcaaaaggagattgctttgtgtgtggcaagtatgggcattgggccaaggattgtcctgagtgcaaggataagaagtctgcaagcatggttattggtgagggcggaggaacattgaggtatggtaaatttttacctacagttctctttgtctgtcactcacctgattggtgggttgatactggtgctaatattcatgtcgggagatgttcctccttgttgatgggaaacggatcgcttgcagctgttcatggtgttggttatgacagcggaggcttgtttcgcttttccttggatgatatgtgtaataaagttgtcaaccatgatgaagcattacattactttaagatctataaggctgaggtagaaaaccaaactggaaaggaaaatcaaacggttgagtatggaattattcatgagaggacgcctccctattcaccccagtcaaacggggtagccgaaagaaagaaccgcactctaactgagatggtgaatgccatgttagacactgcaggactttccaaggaatggtggggtgaggcaatattgactgcgtgtcatgtcctgaatagaattcctactaagcataaggaagtaacacaattcgaggaatgggaaaggaagaaattaaatctctctcacctgcgcacatggggctatttggccaaggtaaatgtacctatagccaaaaagcgtaaacttggaccaaagaccgtagattgtgtgttccttggttatgctatccacagtgtgggatataggttcttaatagtaaattctagagtacccgacatgcgtattggtacaattactgagtctagagatgccacattttttgagaatgaatttcctatgaaaaatgcacctagcacttctagtcaagaacctattttatcccctgagcactttgcgccgatagaatacattgatcaaacacttgaggaaaatcctgtggaggataacattatggatgttaagacagctttcctcaatggagagttggaggaggagatctatatggatcaaccagatgggtatgtactagaaagtcaggagggaatggtgtgcaagctgttgaagtctttgtatggtctcaaacaagcgcctaagcaatggcatgagaagtttgacaatacacttacatctgctggctttgttgtgaacgaagctgacaaatgtgtgtactatcgttgtggtgggggagagggagtgatcttgtgtttatatgtcgatgacatattgatctttgggaccagcctcaatgtgattgaggaggtcaaggactttttgtccaaaagctttgaaatgacggatttgagagtggctgatgttattcttaacattaaactactgagaggagatgagggtgggattacacttgtgcaatctcactatgtggacaaggtcttgagtcgctttggttatagtgactgcaaggcagctcctactccttatgatcctaggacaatgagctatggaattcactacgccgggtacccaaaagtgctggagggctatagtgattcaaactggatatctgatgctgatgagataaaggccacaagtgggtatgtgttcacacttggagaatccttccctggttctgttcacctgcgcgcacaggtgtatgggacgagcaggtgcctccgaaactccgtccgcttgagaacttgcacgggtaggcgggcgatcaagtttttgggtagcgcttcaagtgcgactgctcctgttcttcgcgactactattattgcatcgacgccttcgtcaacatgtcgatggagattggagacaaggaggtgaacgacatcaacggaggcaatactgcctcaaaatccagcggtgggacgttcttaggggagatcttgctctccggacgcaaatttacttgggccaactctatgccgagcccaacttacaaaaacgccgcctccgcgtcagcccgtgcgccgccgtcgctgccgcgagtccagccaagcgccgccgctgctccagtcaccgccgtcgctccggaaggccatcgccaggttcgcaaggtcgccaccgtcctcatcccgtcctccgtttctgccaaagactgccggagcgccgccgccatcgacgacccgaagaccgccgccgcctcgacctcgctgccgtcgtcgtccaagccaccggtgagttgtcgcgtcgcgctttacgcgtag

SEQ ID NO: 86580 - DNA, 368 bp, Oryza sativa
  Clone ID: PAT_MRT4530_85607C.1
tttgttttttttttttttcccggtttttttttttttttttttttttttttttttttttggaaaaaaacccggccatgccaccggcaaaaggttaaaaaaaaacaaaaaaccggggccaaaattcaaaatgggggggcaaaacccgggggccccaacggcgagggcccgggaagcccccaacccaaacgcaagcctgacgggctttggaatgagctggagggcaccagtcaaaagcaaaccgcatctttgcccccccccacaaaagacagcccccccttcggatcaacccccaaacccacggcgggggctgacactcccggcctgggggcaccggccggggcggcacaggaaaaaaccagggccccggg

SEQ ID NO: 86581 - DNA, 234 bp, Oryza sativa
  Clone ID: PAT_MRT4530_85608C.1
gttgttgtactttttgatcagggagtcctatgttgaggagcaccggtccttggtggagactcaaggagcagataagtcagcagatgtaaaagctggctcgcgcagtatccgaaaaggcggtaagcacactggtagctgatatgccgtttataaaaacaaaaaagagaaacgaccgcgtacaaaaagctactacgaacatggaggaaacaggtaaaaggctaagcaacacaaaag

SEQ ID NO: 86582 - DNA, 2382 bp, Oryza sativa
  Clone ID: PAT_MRT4530_85609C.1
atgcagtgcttctatgtttcacggggcaaacgaagtgaaccacctctttctcctgaggaagaggctaagttcgaggcttcggattgcctgttccgtggagcattgatcagtgtactcgctgacaacatagtggacgtgtacatgcacatgccttctgggaaggacatgtgggatgcacttgaggccaagttcggagtttctgacgccggcagtgagctgtatgttatggagcagttctatgactacaagatggtcgatgaccgttctgtagttgaacaagctcatgagattcagatgctggctaaggaacttgagaacaacaactgtgagttgccggacaagtttgtggcaggtggcattattgccaaactaccaccttcttggtcggactttgccacttctctaaagcacaagagacaagagttcagtgttcctgatctcattggctctttgggtgttgaggagaaggcgagggcaaaggacgtccggggcaaaaaggttgagggaggttctagtgccaatatggtacagaagaagaaccctcatgcatcccacaacaacaagaaagtcaagcctgatgtcaaacccaaggctgcaaccaattttaagaagaaaagcaagggaaaggcaaagggagactgctttgtgtgtggcaagtctgggcattgggccaaggactgtcctgagcgcaaagacaggaagtctgccaacatgatcattagcgagggcggaggaacatcgaggtacggtcgggagaggttcctccttgttgatgggaaacgggtcgcttgcggctgttcatgtgtgggttatagattcttaatagtaaactctggagtacccgacatgcatgttggtacaattcttgagtccagagatgctacattctttgagaatgaatttcctatgaaatatacacctagcacttctagtaaagaaactgtcatgccccatgagcactttgcaccgatagaacacaatgatcaaacgcctgaggaaaatcctgaggaggacaacattgtagatactcgcaagagtaagagacaaagggttgcaaaatcctttggagatgactacattgtatacctcgtggatgacaccccaagaaccatagaagaggcatattcatctcctgacgctgactactggaaggaagcagtacgcagtgaaatggactcgattatgtctaatggtacttgggaagtcgttgagcgtccatatgggtgcaagcccgtaggatgcaaatgggttttcaagaaaaagcttaggcctgatggtacaatcgaaaagtacaaggcaaggcttgtggccaagggttatacccaaaaggaaggcgaggacttcttcgacacatactcaccagttgctcgcttgaccacgattcgagtactacttgctctggcagcctctcatagtcttctcgtccatcagatggacgttaagacagctttcctaaacggagagctggaggaggagatctatatggatcaaccagacgggtatgtactagaaggtcaggagggaatggtgtgtaaactattgaaatccttgtatggcctcaagcaagcacctaagcaatggcatgagaagtttgacaccacgcttacatctgtaggctttgttgtgaacgaagctgacaaatgtgtatactatcgctatggtgggggagaaggggtgatcttgtgcttatatgtcgatgacatactgatctttgggaccagccttaatatgattgaggaggtcaaagactatctgtccaagagttttgaaatgaaagatttgggagaggctgatgttattcttaacatcaaactacaaagaggagatgagggtgggattacacttgtgcaatcccactatgtggacaaggttttgagtcgttttggatatagtgactgcaagccagctcctactccttatgatcccagcgtgctattaaggaaaaaccgaagaatagcaagggatcagctgagatactctcaaatcattggttcattgatgtacttggctagcgcaacgaggcctgacatctcatttgctgtaagcaagctgagccggtttgtctcaaatccgggagatgatcattggcaggctctggaaagagtaatgcgctatctaaaggacgggcgggcgatcaggtttttggggagcgcaaggcgcgactactcactgttcgtcaacatctacttcatcttcaccaacatgtcgaacactggagacaaggagaaggagactcccgtcaacaccaacggaggcaatactgcctcaaactccagcggaggaccattcttggggccagacgccgccatcgtcttcctcgctgacctcggcctctccgccgccgacatcgccaccaccgtcgcctacgaccactgctactga

SEQ ID NO: 86583 - DNA, 738 bp, Oryza sativa
  Clone ID: PAT_MRT4530_8560C.1
tcgggagattttggtcttagcaagattatcaaagcccagcatgccaatgatgtgtacaagatgactggggagactggaagctaccggtacatggctcctgaagtattcaaacaccggaaatatgacaagaaagttgatgtcttctcgtttgctatgatactttacgagatgcttgaaggggatccacctttctctaactatgaaccttatgaagccgcaaagtatgtgggagaagggcatcgcccaccctttcgttcgaagggatttactaacgagttaaaggagttaattgagctatgctggtccggggatatccatctgaggccatctttcctagagatcctcaagaggctcgagaagatcaaggagtacttagctgcgcacgatcaccattggcatttgttctcccagtaatagcttcatgtctgtctattcatcgcgatcgattgctactgcgcgtggtgttacgagtgaggaattcatgggagacctgacattttatcatgtacaaaatttagagggccccaaggaagggtcaaaatgggtactgttctgctaaagcagatatcttgtttttctttttcttgaacaattattattgttgttaggttccctgctctttttatgtttcttgagaatcagtacagtggatacaggaagtaaatgtgccatgtaatctgtttaaaagcacttcttttacggggattaaaaaaaagctagttctttgtgaactttgtt

SEQ ID NO: 86584 - DNA, 1046 bp, Oryza sativa
  Clone ID: PAT_MRT4530_85610C.1
gcacgtcgccaccaccgtctccgcttccctttccattcgcgccgccacctcgccgtcgcacccagcggcggcgccgccgtgccggaggagcggcgatgtggtgccagtcgtgcaaggaggagtacgaggaggaggacgccgggacgtgcaaggagtgctacgaggaggcgagcgagacggaggaggagctcaagcgcgagatcgacgacctccgctcccgcctccacttcctccgcctcccttccccttccctcgacgcctcctccctctcccactccgacctcctcctccacgccatccccgccgatgcgcccgcccgccccgacacccccgccgtccccgcccaccgcgtcatcctcgccagcagatctcctgttttcagagctatgcttgagaacgagatggaagagagccggagtggcatcatcaaaatatacgatgtgtcctacgacgtccttcgtgctttcgtccattacatgtacacagcagaagctctccttgacgagcagatggcatctgatctcctggtgttggctgagaagtacgaagtgaagaacctgaaggcctactgtgagaaattcttaacatccaaagtgagcaacgacaatgccatcacgcattatgcgtttgcgcatcgccacagcgcgaagcagctgctcgagacatccctggcagcgatcatggacaacatgtcaacgctggcagatcgggaggaatacaaggagcttgttgagaaggacccaaggcttgttgtggagatatatgaagcctatctgaacagacaagtgaacactgctgctgggaaggagacagattccagtagtaggaaggggtaattcaaaagaaaactgctatcagagatgtaattaatgttctaaccaagcttttgcatgttcatgctaggcaaagactggcacatcaaattgtcatcctgcggtgtaggcgcagaacagctatttctgtatatgcttgaattgatactgtgtgctcgctactgacaaaaaaaaaaaaaaaaaaaaactcgcttcaatataaaaacgaaaaaa

SEQ ID NO: 86585 - DNA, 2424 bp, Oryza sativa
  Clone ID: PAT_MRT4530_85611C.1
atgcagtgcttctatgtttcacggggtaaacgaagtgaaccacctctttctcctaaggaagagactaagttcgaggcttcggattgcctgttccgtggagcattgatcagtgtactcgctgacaacatagtggacgtgtacatgcacatgccttctgggaaggacatgtgggatgcacttgaggccaagttcggagtttctgacgccggcagtgagctgtatgtcatggagcagttctatgactacaagatgcacaagagacaagagttcagtgttcctgatctcattggctctttgggtgttgaggagaaggcgagggcaaacgacgtccggggcaaaaaggttgagggaggttctagtgccaatatggtacagaagaagaaccctcatgcatcccacaacaacaagaaagtcaagcctgatgtcaaacccaaggctgcaaccaattttaagaagaaaggcaagggaaaggcaaagggagactgctttgtgtgtggcaagtctgggcattgggccaaggactgtcctgagcgcaaagacaggaagtctgccaacatgatcattagcgagggcggaggaacatcgggagatgctactttctttgagaatgaatttcctatgaaatatacacctagcacttctagtaaagaaactgtcatgccccatgagcactttgcaccgatagaacacaatgatcaaacgcctgagaaaaatcctgaggaggacaacattgtagatactcgcaagagtaagagacaaagggttgcaaaatcctttggagatgactacattgtatacctcgtggatgacaccccaagaaccatagaagaggcatattcatctcctgacgctgactactggaaggaagcagtacgcagtgaaatggactcgattatgtctaatggtacttgggaagtcgttgagcgtccatatggatgtaagcccgtaggatgcaaatgggttttcaagaaaaagcttaggcctgatggtacaatcgaaaagtataaggcaaggcttgtggccaagggttatacccaaaaggaaggcgaggatttcttcgacacatattcaccagttgctcgcttgactacgattcgagtactacttgctctggcagcctctcatggtcttctcgtccatcagatggacgttaagacagctttcctaaacggagagctggaggaggagatctatatggatcaaccagacgggtatgtactagaaggtcaggagggaatggtgtgtaaactattgaaatccttgtatggcctcaagcaagcacctaagcaatggcatgagaagtttgacaccacgcttacatctgcaggctttgttgtgaacgaagctgataaatgtgtatactatcgctatggtgggggagaaggggtgatcttatgcttgtatgtcgatgacatactgatctttgggaccagccttaatgtgattgaggaggtcaaagactatctgtccaagagttttgaaatgaaggatttgggagaggctgatgttattcttaacatcaaactgcaaagaggagatgagggtttttggggagtgcctcctgcacgactgctcatcgccatgtctggagttgctgccgccgctattggcggaggtggtgcgtcgccgccgacaggagctgcgccgctgccgacgccgacaggagctgcgccgctgccgatgccgacaggagctggatccggagctggtgcgccaggaggaggtgccgtgaacgactacaacaacggaggcaattctgcctcaccatccagcggagggccattctcggggcggatagaggagtacgagctgaggcgagaggaggctgatcggagaactagagctgatatacggtctctcatagatgtggttgaagcatgcacaccggaagttgggaagaaggcaaaagacttgccagcgtcaattaagaaagagcagtcaaaggtgacgcccaccacatgttcgacgaaatgctctagtcccgacatcgagcccaatctcaccgtggttgcggtggacaaatgtgccaccactgccatggcctccatgaagttggtagctgatgatggtgcaaccagcaccaccaaaattcccaccactgactattccaaggagacgcacgccaagtgttcgatgttgggcttcgatgtcaagtgggacgccaacaaagccgacatcacgttcctgaccaagacggttgtacttgaaaccgttccagcatccattgcatcattgagcgccttctcaccaaggatgatcgccgacatcaagcagtacacattgatgcccaccagaaaggacaactgctacttaagttggagacacttacttcttgcaagagtgatggttgtggagctgagcagtactgggcaatttggttctgagaacatttccatcaaaggaaaacatgttgacaagctgtga

SEQ ID NO: 86586 - DNA, 2319 bp, Oryza sativa
  Clone ID: PAT_MRT4530_85612C.1
atggcgcgcctggagctggagccgccggaggtggtgcgccaggagctggagccgcggagggccattctgcctggagctggagccgccggaggtggtgcgccaggagctggagccggtgccgtgaacaacaacatcaacggaggcaattctgcctcacaatccagcggagggccattctcgggtgtactcgctgacaacatagtggacgtgtacatgcacatgccttccgggaaggacatgtgggatgcacttgaggccaagttcggagtttctgacgccggcagtgagctgtatgtcatggagcagttctatgactacaagatagtcgatgatcgttctgtagtagaacaagctcatgagattcagatgctggctaacgaacttgagaacaacaactgtgagttgccggacaagtttgtggcgagtggcattattgccaaattgccaccttcttggtcggactttgccacttctgtaaagcacaagagacaagagttcagtgtttctgatctcattggctctatgggtgttgaggagaaggcgatggcaaaggatgtccggggcaaaaaggttgagggaggttctagtgccaatatggtacagaagaagaaccctcatgcatcccacaacaacaagaaagtcaagcctaatgtcaaacccaaggctgcaaccaactttaagaagaaaggcaagggaaaggcaaagggagactactttgtgtgtggcaagtctgggcattgggccaaggactgtcctgagcgcaaagacaggaagtctgccaacatggtcattagcgagggcggaggaacatcgggagatgctacattctttgagaatgaatttcccatgaaacatacacctagcacctctagtcaagaaactgtcatgccccatgagcactttgcaccgatagaacacaatgatcaaatgcctgaggaaaatcctgaggaggacaacattgtagatactcgtaagagtaagagacaaagggttgcaaaatcctttggagatgactacattgtatacctcgtggatgacactccaagaaccatagaagaggcatattcatctcctgacgctgactactggaaggaagcagtacgcagtgagatggactcgattatgtctaatggtacttgggaagtcgttgagcgtccatatgggtgcaagcccgtaggatgcaaatgggttttcaagaaaaagcttaggcctaatggtacaattgaaaagtacaaggcaaggcttgtggccaagggttatacccaaaaggaaggcgaggatttctttgacacatactcaccagttgctcgcttgaccacgattcgagtactacttgctctggcagcctctcatggtcttctcgtccatcagatggacgttaagacagctttcctaaacggagagctagaggaggagatctatatggatcaaccagacgggtatgtactagaaggctttgtcgtgaacgaagctgacaaatgtgtgtactatcgctatggtgggggagaaggagtgatcttgtgcttatatgtcgatgacatattgatctttgggaccagcctcaatgtgattgaggaggtcaaggactatctgtccaagagttttgaaatgaaggatttgggagaggctgatgttattcttaacatcaaactacaaagagaagatgagggtgggattacacttgtgcaatcccactatgtggacaaggttttgagtcgctttggatatagtgactgcaagctagctcctactccttatgatcccagcgtgctattaaggaaaaaccgaagaatagcaagggatcaactgagatactctcaaatcattggttcattgatgtacttggctagtgcaacgaggcctgacatctcatttgctgtaagcaagctgagccggtttgtctcaaatccgggagatgatcattggcaggctctggaaagagtaatgcgctatctaaagggcactatgagctatggaattcactataccggatatccaaaagtactagaagggtatagtgactcaaactggatatctgatgctgatgagataaaagccacaagtggatatgtgttcacacttggaggtggcgctgttttctggaagtcttgcaagcagaccatcttaacgaggtcaacaatggaagcagaacttacagcactagatactgcgacagttgaggccgagtggcttcgtgaactcctgatggatttgccggatggctcatgccttaatgtgatccgagtggcttttccaagcagagatgttgacctacagaacatctcggaaggaacacacctatatgagttcgactgctag

SEQ ID NO: 86587 - DNA, 3261 bp, Oryza sativa
  Clone ID: PAT_MRT4530_85613C.1
atggcccttttctgctaccgccgcgcatccgacttcctccccgatcacgccgcgcacgcctatgggatacagaccgcgccgctgctggccttctacgccttggctaattcggcgctcgtcacgctgtatgcgatgtgttggaaggggcggcggcgtttgctcgccggagaagaagctggtggtgccggagagcgtgtgcgggcggccgctggggctgcagttccaccacgcctccggcgacctgtacgtggccgacgcgtacctaggcctcctgagggcgccggcgcgcagcgggctggccgagaggtggtgacgacggaggccgccggcgtgccgttcaacttcctcaacggccttgacatcgaccagaggaccagcgacatctacttcaccgatagcagcagcacgtactggaggagacctctggtgaacttattcctttccaagtcaaattattatccttcacctaagttccttttctcatgggccgattcacatgagccaacccttctcaaaccgaagtccaatatacctacccctcaaaacacagtatcagtactggatcttcccatggacccattccaacaaaatgtctctcctgctttacccccaaagcccaaaaggagggctgggaaggtgatcttgatggatttagaaaggaggagaagtgcaagtatcaacaaactttctgatggatttatgtcccctgatccaaacttgggtgtgggaaagccaaggggaaaggatagggcaaagagtaccaagaagcttaaaatgttggctcaagaaagtggtatcttactctctcttaaccctttgcctctggaacttaacgatcctaatgcttcagatgatgagattgatgcccctctcgccgattgttctatacggctccttcaacagattggcactgagcgatgcaatgtttcatggggaaaacgaagtgaaccacctttctctcctgaggaagaggttaagttcgaggcttcggatttcctgttccgtggagcattgatcagtgtactcgctgacaatatagtggacgtgtatatgcacacgccttcagggaaggacatgtgggatgcacttgaggccaagttcggagtttccgacgccggcatggaacaagctcatgagattcagatgttggctaaggaacttgagaacaacaactgtgagttgccggacaagtttgtggcgggaggcattattgccaaattgccaccttcttggtcagattttgccacttctttgaagcacaagagacaagagttcagtgtatctgatctcattggctctttgggtgttgaggagaaggcgagggcaaaggacaacggggcaaaaaggtcgagggagaaagtcaagcctgatgtcaaacccaaggctacaaccaattttaagaagaaaggcaagggaaaggcaaagggagactgctttgtgtgtggcaagtctgggcattgggctaaggactgtcctgagcgcaaagacaggaagtctgccaacatggtcatttgcgaggcggaggaatattggggtacggatttacagttgacacctccctattcaccccaatcaaatggggcagccgaaagaaagaactgtactctaactgagatggtgaatgccatgttagacactgcgggactttccaaggaaaggtggggtgaggcaattttgactgcttgtcatgtcctgaataaaattccaacgaagcataaagaagtaacaccattcgaggaatgggaaaggaagaaattaaatctctcatacttacgaataaggggctgtttggccaaggtaaatgtacctatagccaaaaagcgtaaacttggaccgaatactgttgattgtgtgttccttagttatgctattcacagcgtgggttatagattcttaatagtaaactctggagtacccgacatgcgagttggtacaattattgagtctagagatgctacattctttgataatgaatttcccatgaaaaatatacctagcacttctagtcaagaaactgtcataccccatgagcactttgcaccgatacaacataatgatcaagcgcctgagggaaatcctgaggaggataacattgcagatactcgtaagagtaagagacaaagggttgcaaaatcctttggagatgactacattgtatacttcgtggatgacactccaagaacaatagaagaggcatattcatctcctgatgctgactactggaaggaagcagtacgcagtgagatggactcaattatgtctaatggtacttgggaagtcgttgagcgtccatatgggtgcaagcctgtaggatgcaaatgggttttcaagaaaaagcttaggcctgatggtacaattgaaaagtacaaggcaaggcttgtggccaagggttatacccaaaaagaaggcgaggatttttttgacacctactcaccagttgctcgcctgaccacgattcgagtactacttgctctggcagcctctcatggtcttctcgtccatcagatggacgttaagacagctttccttaacggagagctagacgaggagatctatatggaccaaccagacgggtatgtactagaaggtcaggagggaatggtgtgtaaattgttgaaatccttatatggccttaagcaagcacctaagcaatggcataagaagtttgacaccacacttacatctgtcggctttgttgtgaacgaagctgacaaatgtgtgtactatcgctatggtgggggagaaggagtgatcttgtgtttatatgtcgatgacatattgatctttgggaccagcctcaatgtgaatgaggaggtcaaggactttctgtccaagagttttgaaatgaaggatttgggaaaggctgatgttattcttaacattaagctactgaaaggagatgagggggggattacacttgtgcaatcccactatgtagacaaggttttaagtggctttggatacagtgactgcaagccagctcctactccttatgatcccaacgtgctattaaggaaaaaccgaagaatagcaagggatcaactgagatactcccaaatcattggttcattgatgtacttggctagtgcaacgaggcctgatatctcatttgctgtaagcaagctgagccggtttgtctcaaatccgggagatgatcattggcaggctctggaaagagtaatgcgctatctaaagggcactatgagctatggaattcactataccgggtatccaaaagtactggaagggtatagtgactaa

SEQ ID NO: 86588 - DNA, 575 bp, Oryza sativa
  Clone ID: PAT_MRT4530_85614C.1
aggaatagcgctaacaataggaacaggaggagaagattataccccgagaatagccctccgctggatggtgaggcagaattgcctccgttgttattgtcgttcacggcacctcctggcgcaccagctccggctccggatccagctcctgtcggcggcgcaccacctccgccatctcctccagcagcggcggcggcaactccagacatggcgatgagcagtcgtgcgggaggcactccccaaaaacctgatcacaagcctacccggtgcagatctcaggcgaaggtgtggtttcggaggcactgctccttccaatctctcgtgcgcgcaagagatcagaagcgaggaagcaagagcaactcaggcatggagaaggagaaactaacaccgggaaagaagcaatgaaactggatcggactcgcggcctccttatctatcaggagaaagaacgtggacgcgctgttgcggagggaatcgtgggaacgtgggttagtggctgcaaaaggatagcgggagtaggagctggcttgcagtcactatatccaaagcgactcaaaaccttgttcacatagtgggat

SEQ ID NO: 86589 - DNA, 134 bp, Oryza sativa
  Clone ID: PAT_MRT4530_85615C.1
tgttgacgcgtgggttcaacaatggagacaaccagaggaggtaggtagccgatgacgtttacttcagaattaggccctagagtttggtttctacaggaggacaaagatgatttgagacatattgcttttgtttt

SEQ ID NO: 86590 - DNA, 1011 bp, Oryza sativa
  Clone ID: PAT_MRT4530_85616C.1
atgggggccacgtgggcccacgtgtcattctctcccctcctcttcttcatcccctctccccatctcggcatctcccctctcttcatctctctcaatctcctctctcttctctctccaggcacgacgaccaaagggcagtggccggttgggagaagggacggtgcgcggcaaccacagctacggaggaaccagtccggcagtggcgcaagcggaggcgccgcttgggacaccatcctcgatggcccaccaaacacacgtggttgcgccgccgcagctgtgggaggccaccgaacggtggcgagccgccgcttcctctcccaggccgcgtgcaccgtcgcggccgcctccccacgccgtcgccctgctcccttgccaactattcccccgctggccgccgctgccccatgccaccatacctcgtcttcaagcgacgtcgattctaatcatcatcatccttctgccgttcttcaaccacttccgaggggaaacgggctgaagtggggagatggtgctgcggcgggctactgcggcggtgggcgattgcccgaagaaggtggcgaagctggtggacctggtgaaccttccgacagccctgagggagttcgcggggggccagtcccagatgtcccacctctctttcttcctccgcgtctggtcacatatcaagagcaacaacctccaggtgatccaatgggatggtaccattttttacttattgtcaccattttgacttaaattgggtaggtctaaagtggagctctctgaactcccaatgcttgtcaagctgcattttcccaaatttccaaagtcataagaatataaaagtcacagcttttaataactaaattttgtggaagctggttttatttcttgtatcctcagataagcagcaaagtcaatgtgaatttgtttccaaaatgcccgttactatcagctaacatgtgtgcaatgaacgatgcagttctgtgactcttgagttctgcccactcgatatatgtaatttgtcatgtt

SEQ ID NO: 86591 - DNA, 1539 bp, Oryza sativa
  Clone ID: PAT_MRT4530_85617C.1
atgcgtaaggagaaaataccgcatcaggcgccattcgccattcaggctgcgcaactgttgggaagggcgatcggtgcgggcctcttcgctattacgccagctggcgaaagggggatgtgctgcaaggcgattaagttgggtaacgccagggcatgcaagcttaggcctgatggtacaatcgaaaagtacaaggcaaggcttgtggccaagggttatacccaaaaggaaggcgaggatttcttcgacacatattcaccagttgctcgcttgactacgattcgagtactacttgctctggcagcctctcatggtcttctcgtccatcagatggacgttaagacagctttcctaaacggagagctggaggaggagatctatatggatcaaccagacgggtatgtactagaaggtcaggagggaatggtgtgtaaactattgaaatccttgtatggcctcaagcaagcacctaagcaatggcatgagaagtttgacaccacgcttacagctgcaggctttgttgtgaacgaagctgacaaatgtgtatactatcgctatggtgggggagaaggggtgatcttgtgcttgtatgtcgatgacatactgatctttgggaccagtcttaatgtgattgaggaggtcaaagactatctgtccaagagttttgaaatgaaggatttgggagaggctgatgttattcttaacatcaaattacaaagaggagatgagggtgggattacacttgtgcaatcccactacgtggacaaggttttgagtcgctttggatatagtgactgcaagccagctcctactccttatgatcccagcgtgctattaaggaaaaatcgaagaatagcaagggatcaactgagatactctcaaatcattggttcattgatgtacttggctagcgcaacgaggcctgacatctcatttgctgtaagcaagctgagctggtttgtctcaaatccgggagatgatcattggcaggctctggaaagagtaatgcgctatctaaagggcactatgagctatggaattcactataccgggtatccaaaagtactagaagggtatagtgactcaaactggatatctgatgctgatgagataaaagccacaagtggatatgtgttcacacttggaggtggcgctgtttcctggaagtcttgcaagcagaccatcttaacgaggtcaacaatggaagcagaacttacagcactagatactgcgacagttgaggccgagtggcttcgtgaactcctgatggatttgccggtggttgaaaaaccagtgccagctatcctaatgaactgcgataatcaaacagtgattattaaagtgaacagttcaaaggacaacatgaagtcatctagacacatcaagagaagactgaaatctgtcagaaagcagaaaaactccggagtgatagcattggactatgtccaaacggctagaaatctggcagaccagtttaccaaggggctaccacgtaatgtgatagacagtgcatcgagggaaatgggcttgatacccacctaa

SEQ ID NO: 86592 - DNA, 3342 bp, Oryza sativa
  Clone ID: PAT_MRT4530_85618C.1
atgtcgacaaccggcgacaacaacaacactggagacaaggagaaggagcctctcgtcaacaccaacggaggcaatactgcctcaaactccagcagagggccattctcgggatataacgtttcactattaccgttcgttcttcgtttcctacaactgtcggtcgcagtattattgcgttctcttatctatgttgatgcttattctatattaagcatgctcatgttgtacacatctagcactgtcactagatctactcaaattacaaatgtcatgtggaaagcacgtgcacttttgtggttgacggtgatgcaatgtttctttgtttcacggggcaaaccgagtgaaccgccgctctcccctgaggaagaggctaagttcgaggttgcggattgcttgttccgtggagcattgatcagtgtgctcgccgacagtattgtggacgtgtatatgcacatgccttcaaggaaggacatgtgggatgctcttcaggccaagttcagggtttccgatgccgggagcgagctgtatgttatggagcagttctatgactacaacatggtcgacgaccgttctgtagtggaacagtttgtggcgggtggcattattgccaaattgccaccttcttggtcggactttgctacttctctaaaacacaagaggcaagagttcagtgttactgatctcattggctctttgggtgttgaggagaaggcaagggcaaaggacaaccggggcaaaaaaaagaacgatggaggttctagtgccaatttggtgcagaagaagaaccctcacgcatctcacaacaacaagaagaaagtcaaacctgacgtcaaacctaaggctacaaccaattttaagaagaaaggccagggaaaggcaaaagtagatttctttgtgtgtggcaagcctgggcattgggccaaggattgtcttgatcgcaaagacaagaagtctgccaacatgatcattagcgagggcggaggaacatcggggagaggttcctccttgttgatgggaaacggatcgcttgcggctgttcatgatgttggtacagtcgatctgaagtttacttcgggaaaaatcgtgcagctgaagaacatgcagcatgtcctttcaataaagaagaatctagttagcggctctctactgtgtaaaggtggttttagacttgtgtttgaatccaataaatgtgtcgtatctaaatatggaacatttattggaaaaggttatgactgcggaggcttgttccgcttttccatggatgatatgtgtaataaagttgtgaaccatgtaagcgatgatgatgatgagtccaatgtgtggcattcgcgacattgtcacgtgaattttggttgtatgacacgcttagccaacatgagtttaattccaaaattcactttagtcaaaggctctaagtgtcatacttgtgttcaatcgaaacaacctcgcaaacctcacagggcatctgaggtgaggaatttggcaccactagaacttgttcattccgatctgtgcgaaatgaacggcgtgttgactaaagggggaaagaaatatttcatgagagtgatagataattgcactagattctgctatatgtacctattgaaaacaaaggatgaagcattacattactttaagatcgataaggctgaggtagaaaaccatctggaaaggaaaatcaaacggttgaggtctgataggggtggagagtatttttccaatgagtttaattctttttgcgaagagtatgaaattattcatgagaggacgcctccctattcaccccagtcaaacggggtagctgaaagaaagaaccgcactctaactgagatggtaaatgccatgttagacactgcaggattttccaaggaatggtggggtgaggcaatattgactgtgtgtcatgtcctgaatagaattcctactaagcataaggaagtaacaccattcaaggaatgggaaaggaagaaattaaatctctctcacctgcacacatggggttgtttggtcaaggtaaatgtacctatagccaaaaagtgtaaacttggacaaaagaccgtagattgtgtgttccttggttatgctatccacagtgtgggatataggttcttaatagtaaattctagagtacccaacatgcgtgttggtacaattactgagtccagagatgccacattttttgagaatgaatttcctatgaaaaatgcacttagcacttctagtcaagaacctattttatctcctgagcactttgtgccgatagaacacattgatcaaatgcttgaggaaaatcctgaggaggataacattgtagcaactcgaaagagtaagagacaaaggactgcaaagtcttttggagatgactacattgtatatcttgtggatgatactccaagaaccattgaagaggcatattcatctcttgacgctgactattggaaggaagcggtatgcagtgagatggactcaattatgtctaatggtacttgggaagtcgccgagcgtccatatgggtgcaagcctgtaggatgcaaatgggttttcaagaaaaagcttaggtctgatggtacaattgaaaagtataaggcaagacttgtggcaaagggttatacccaaaaagaaggcgatgactttttcgacacttattcaccagttgctcgcttgaccacgattcgagtactacttgctctggcagcctcttatggtctactcgtccatcagatggatgttaaagacagctttcctcaatggagagttggaggacgagatctatatggatcaaccagatggcttaagcaatggcatgagaagtttgacaatacacttacatctgctggctttattgtgaacgaagctgacaaatgtgtgtactatcgctacggtgggggagagggagtgatcttatgtttatatgttgatgacatattgatctttgggaccagtctcaatgtgattggggaggtcaaggactttctgtccaaaagctttgaaatgaaggatttggaagtggctgatgttattcttaacattaaactactgagaggagatgagggtaggattacacttgtgcaatctcactatatggataaggtcctgagtcgctttggttatagtgactgcaaggcagctcctactccttatcatcctagtgtgctattaaggaaaaaccaaagaataggaaaggatcaattgagatactcccagatcattggttcattgatgtacttagctagtgcaacgaggcctgacatctcatttgttgtgagcaagttgagccggtttatttcaaatccgggagatgatcattggcatgctcttgaaagagtaatgcgtgctatctaa

SEQ ID NO: 86593 - DNA, 1278 bp, Oryza sativa
  Clone ID: PAT_MRT4530_85619C.1
atggagagcccggactcgtcgtccggctcggcgccaccgcgagtactacggcggcaacagcagcagccgggctcggcgccggagctgccgccggggttccggttccacccgacggacgaggagctggtggtgcactacctcaagaagaaggccgcctccgttccgctccccgtcaccatcatcgccgaggtcgatctctacaagttcgatccctgggatctccccgagaaggcgaacttcggggagcaggagtggtatttcttcagcccgagggaccgcaagtacccgaacggggcgcggccgaaccgggcggcgacgtcggggtactggaaggccaccggcaccgacaagcccatcatgtcgtcggggagcacccgcgagaaggtcggcgtgaagaaggcgctcgtgttctaccggggcaagccacccaagggcgtcaagactaactggatcatgcacgagtaccgtctcacggacacgtctagctccgccgccgccgtcgctacgaccaggcggccgccgccgcccatcaccggcggtagcaagggcgccgtctctctcaggctggatgactgggtgctgtgccgcatatacaagaagacgaacaaggccggtgcggggcagaggagcatggagtgcgaggactccgtggaggacgcggtggccgcgtacgcgccgtcgtcgcagcagcatgccacggctgctgctggcatggccggttcggacggcgccggaggagttgctgcagcgcacggcggcgactacagttcactgctccatcacgacagccacgaggacaccttcctcgtaaacggcctgctcaccgcggaggacgccgccggcctctcgaccggcgccagctctctcagccagctcgccgcggcggcgagggcggcggcgacaccgtgcgacgccaccaagcagcttcttgctccgtctccaaccccattcaactggttcgaggcattccttccacgggccaaggagtttcctagtgggctaagcaggagtagcagagacatcggcgacatgtcgctgtcatcgacggtggacaggagcctgtctgaggctggcgccgtggccattgacaccggcgacgccgccaatggcgcaaacactatgcctgcatttatcaatcctctcggcgtgcagggtgcaacctaccaacaacaccaagccatcatgggtgcctcgttgccatcggagtcagcagcagcagcagccgcctgcaatttccagcatccgttccaactctccagggtgaattgggattcctga

SEQ ID NO: 86594 - DNA, 135 bp, Oryza sativa
  Clone ID: PAT_MRT4530_8561C.1
gttgagtacagacatgtttgctctgaattcactgcattcaagaagaatccaaagcttgagtctttggacaagtcattgagatttagtcctactttgactatgcacgcagtaaacttcagtgcagaaacagctgag

SEQ ID NO: 86595 - DNA, 4371 bp, Oryza sativa
  Clone ID: PAT_MRT4530_85620C.1
atgtctggagttgctgccgccgctattggcggaggtggagctgcgccgccgccgacgccgacaggagctggatccggagctggtgcgccaggaggaggtgccgtgaacgactacaacaacggaggcaattctgcctcaccatccagcggagggccattctcggggtataatcttctccttctactgctcatgttatcgcattactggtatgttcctgtttctgacattcatgatgcgcatagtatgctactggttatgttaagatcaccctacactgcttatgccatgatcatagtttcaatttcttggattaaaatatgccgaataatgactatatttccaacaatccaaaaacctgataggtcattttcggtagttggctttgctgctgcactgaaaccacatgcttttgatggttcaaactataagagatggaaagcacgtgcactattgtggttgacagcgatgcagtgcttctatgtttcacggggcaaacgaagtgaaccacctctttctcctgaggaagaggctaagttcgaggcttcggattgcctgttccgtggagcattgatcagtgtactcgctgacaacatagtggacgtgtacatgcacatgccttctgggaaggacatgtgggatgcacttgaggccaagttcggagtttctgacgccggcagtgagctgtatgtcatggagcagttctatgactacaagatggtcgatgaccgttctgtagtagaacaagctcatgagattcagatgctggctaaggaacttgagaacaacaactgtgagttgccggacaagtttgtggcgggtggcattattgccaaactaccaccttcttggtcggactttgccacttctctaaagcacaagagacaagagttcagtgttcctgatctcattggctctttgggtgttgaggagaaggcgagggcaaaggacgtccggggcaaaagggttgagggaggttctagtgccaatatggtacagaagaagaaccctcatgcatcccacaacaataagaaagtcaagcctgatgtcaaacccaaggctgcaaccaattttaagaagaaaggcaagggaaaggcaaagggagactgctttgtgtgtggcaagtctgggcattgggccaaggactgtcctgagcgcaaagacaggaagtctgccaacatagtcattagcgagggcggaggaacatcggggacggtcgggagaggttccttcttgttgatgggaaacgggtcgcttgcggctgttcatggtattgccaaaaagcggaaacttggaccaaaaactgttgattgtgtgttccttggttatgctatccacagtgtgggttatagattcttaatagtaaactctggtgtacccgacatgcatgctggtacaattcttgagtccagagatgctacattctttgagaatgagtttcctatgaaatatacacctagcacttctagtaaagaaactgtcatgccccatgagcactttgcaccgatagaacacgatgatcaaacgcctgaggaaaatcctgaggaggacaacattgtagatactcgcaagagtaagagacaaagggttgcaaaatcctttggagatgactacattgtatacctcgtggatgacaccccaagaaccatagaagaggcatattcatctcctgacgctgactactggaaggaagcagtacgcagtgaaatggactcgattatgtctaatggtacttgggaagtcgttgagcgtccatatgggtgcaagcccgtaggatgcaaatgggttttcaagaaaaagcttaggcctgatggtacaatcgaaaagtacaaggcaaggcttgtggccaagggttatacccaaaaggaaggcgaggacttcttcaacacatactcaccagttgctcgcttgaccacgattcgagtactacttgctctggcagcctctcatggtcttctcgtccatcagatggacgttaagacagctttcctaaacggagagctggaggaggagatctatatggatcaaccagacgggtatgtactagaaggtcaggagggaatggtgtgtaaactattgaaatccttgtatggcctcaagcaagcacctaagcaatggcatgagaagtttgacaccacgcttacatctgcaggctttgttgtgaacgaagctgacaaatgtgtatactatcgctatggtgggggagaaggggtgatcttgtgcttgtatgtcgatgacatactgatctttgggaccagccttaatgtgattgaggaggtcaaagactatctgtccaagagttttgaaatgaaggatttgggagaggctgatgttattcttaacatcaaacttcaaagaggagatgagggtgggattacacttgtgcaatcccactatgtggacaaggttttgagtcgctttggatatagtgactgcaagccagctcctactccttatgatcccagcgtgctattaaggaaaaaccgaagaatagcaagggatcaactaagatactctcaaatcattggttcattgatgtacttggctagcgcaacgaggcctgacatctcatttgctgtaagcaagctgagccggtttgtctcaaatccgggagatgatcattggcaggctctggaaagagtaatgcgctatctaaagggcactatgagctatggaattcactataccgggtatccaaaagtactagaagggtatggtgactcaaactggatatctgatgctgatgagataaaagccacaagtggatatgtgttcacacttggaggtggcgctgtttcctggaagtcttgcaagcagaccatcttaacaaggtcaacaatggaagcagaacttacagcactagatactgcgacagttgaggccgagtggcttcgtgaactcctgatggatttgccggtggttgaaaaaccagtgccagctatcctaatgaactgcgataatcaaacagtgattattaaagtgaacagttcaaaggacaacatgaagtcatctagacacatcaagagaagactgaaatctgtcagaaagcagaaaaactccggagtgatagcattggactatgtccaaacggctagaaatctggcagatcagtttaccaaggggctaccacgtttttggggagtgcctcctgcacgactgctcatcgccatgtctggagttgctgccgccgctactggcccgccgacaggagctggtggtacgccgccgccgacaggagctggatccggagctggtgcgccaggaggaggtgccgtgaacgactacaacaacggaggcaattctgcctcaccatccagcggagggccattctcgggggacggctatgcatttgcatccacagagaacagcatggttatctacaacattaatgtggctcctctgataaaaagtaacaaatacacgcttttggctgagcggacgaggaagtgggaggaggagaagaggcaggagcgccgtgagggcaaggccccggcggctcccgccggcaaccggcgaggtgaggccaagcagaaggccaccgccgaggacatcgacgatggcgacgaggacttggggttccaggagcctgaggccaccgtcgccaccgtcgatgggggagcgtgcgctcacgcttctcgctggagcctcaaggccatgaagcgcgagcttctggccgcggcccctacccatgaggcgacgcggcgggcgcggtggtcggaggttgccctcaccttcgaccagaccgaccacccgccgtgcgttgcccggggaggacagatcgcgatggtggtttcccccaccgtttgcaatgtgaagttggggcgtgtcctcatagacgggggtgcagccctcaacatcctttcccccgtagcctttgacgccatcaaggccctggggatggtgctccggccgtcccagccgatcatcggtgtgacgctggggcacacctggccgctgggtcatatcgacctcccggtcaccttcggtggttccgccaacttccgcacggagcgggtggacttcgatgtggcggacctcagtctgccctacaacgcggtcctggggaggcccgcgttggtgaagttcatggcggcggtccactacgcctatctccagatgaagatgccgggccccggtggccccatcaccgtccatggcgacctcaaagttgcgcttgcttgtatggagcagcacgcggaccacctcgccgcggcgtccaagcccgcgggtggcgacgagaggctcagcgcctccgtcccggccgccccgaggcagcggatggtcacgtgcgacgaggtcccggtcaaggaggttgccctgggcgacggcccgtccaagaccacacgaatcggtggtcttctggacgacaaatag

SEQ ID NO: 86596 - DNA, 157 bp, Oryza sativa
  Clone ID: PAT_MRT4530_85621C.1
ctccaccagtccaccagtgcacagctcaccaccattgttgtgtttgccaaacacaactcgacagtcatttgcagtgcacactcaccaccaggcagcttgcatcttgtgtgcaccagtggcacacattgcagccaccactgtgtggcacacacatata

SEQ ID NO: 86597 - DNA, 732 bp, Oryza sativa
  Clone ID: PAT_MRT4530_85622C.1
atggctgctgctctcactcccgttccgcgctggcaggggaaagacgtaggccgtcgagctgggacgtccctccagtgcacggggctacgcccacaaggagctcttcctccaggctgcaagaaaacaagggcaggtggtcaaaatttggaaacagaacttgaattttttgatcaagacacagtgaacagggttctagggcctgcttttgttgataatttatacttcctgcaggaactagtacaggacctttcagaactcgatgaacctttcacaaaggatgaaaacaaaatagcagtcttccaatctagctggctaatggtgcaaaagaaaatcctatcctcggacaagcttcagtttaggggctgggataacagcccaatttgctcactctgtggtatagagcctgaaacaagtgtgcacctcttcatggagtgcttttatgcgagacatgtatggaacaacatctggctgaagctaggccttcagattccatcactgtctccctttaatggtgacatgcttgagtgggggaaagcttctaggaagcaaatgatcaaagaacaaaggaggtatttcaacggtttaatcatctacacaacatggggaatttggctccaaagaaatgatcaagtctttaatgatgcatatggctcggtgcaacaagtggtgaattccatcatcaccatgtgcaaagcctacgatgaagcgatcagttgtctttgcaacatttga

SEQ ID NO: 86598 - DNA, 1339 bp, Oryza sativa
  Clone ID: PAT_MRT4530_85623C.1
atggcttcgcatgctggaggtagtggcggcggcggcggtggaagtggccgggatgctggctcggcgcagcgcgggccgatgcaggggttggcgaggcaagggtcgctgtatgggcttacactcaatgaggttcagagccagttgggggagccgttgcttagtatgaaccttgatgagctgcttaaaagcgtgtttcctgatggcgcggaccttgacggtggcggtggcggtggcggcatcgcgggccagtctcagccggccctggggctgcagcgccaggggagcatcacgatgcctccggagctgagcaagaagacggtggatgaggtgtggaagggcatccaggatgtgccgaagaggggtgctgaggagggtggccggtggaggcgggtgatgatgtccatagtaaattttgtagattatatggggtctgcccacatatttcgcatcctttggcggtaggaaaaatcgatatagcttgagattccatcttccccctccagccggtggtggtttagagcttgtaaacaccagcacgggcagagccctagccatgtcgccccagctgctgatctcttcggaggctttgtcactagtcagtatgcttacatggcaactcacctggcacctcagccattagctgttgctacaggtgctgttttggatccaatttactccgatggccagatcacttcgccaatgctcggggctctttctgatcctcagacacctgggcgcaaacgctgtgccacaggggagattgcagataagctagtagaaagaaggcagaagaggatgataaaaaacagggaatcagctgccaggtcaagagcgaggaagcaggcttacactaatgagcttgaaaacaaagttcttcgtctagaagaggagaatgagaggctaaagaagcagaagcctacattcatactgtccagcaaagtgagccgcaagcaggtcaccaaagccatgagatctgccaccatttgtgtcctctgcatttgcattctcatgatcctgcaatgctttgccagcatcagtgcagtggatcttggcgatgctgcagcttcagcgtcagggggagaaggcctgatccggccgaggaagctgctgcagaatgcgccggcggcgaggtcaccgccgtcgcgctccgccgccgccgtggaggtcgaggtcaatgcgagcctggggaagcagaagccgtcgagcaagtcgaatcccaggcagaattagaagctaagctactatcagtagacgacacacgctcacatggagctcttccgagatgtggctgtagaaatgtacataggaattttgatgtggaaatttagtttcttcctcg

SEQ ID NO: 86599 - DNA, 572 bp, Oryza sativa
  Clone ID: PAT_MRT4530_85624C.1
cgttctgcatggattgatgggtgcaaaccaaaagtcctcatgcctcttgtctatgcgatctccaagaacaaaggaaagtccctacgccaagtaaaagaagacgacacctgggtgcatgacctgaccctcgatgcagactcatatttcacaatcaaccttgttgaccagttagtccgctagtgggaagcggttcggaatgtgaacttaaacaacgaagaaccggaccagattgtttggaaattcataagtaataggcactacacatcctcctcggcctaccatgcacagtgcttgcgggcgccaaacacaagtctcaactccttgttctagaaaatctgggcgccggggaaatgcaaattccatgcatagctcatcatccagaatagagtttggacgtctgaccggcttgcgaaaggagttgacaaaacaacagccattgccctctctgtcgttgtaaagccgagacggccttgcatctcgtcaccatgtgaggatatacaaagataatctgacacctcgttgctagatgggtgggatatcaacaattggtgccggctcagtgggaggaagct

SEQ ID NO: 86600 - DNA, 577 bp, Oryza sativa
  unsure (1)..(577): unsure at all n locations
  Clone ID: PAT_MRT4530_85625C.1
tatacggatagctggtacgccggcacgcacggaggcacgagttccggaattgacgccaccatccacgtcangcgttctttgttttctgacgcgcgccaacactggatcaccaggaggtttataaccctaatcccgctgaagaagcgtctgtccaaaacggttctgctcgccaccctctgcaatcccttcctcgggcgcaagcgcaaacccgtcctgctcctgcagccgccgtcgagtaccttgagctgcgtgcaccccttcaacggacgaacgctaacctgcccgcacgcttctcctaccgaggccgatcagaatgttgagacctctgggtacttgccgccgtagacagtgcaggaccttgtggaccagatcgagcacctgcagcgacttaaccgggtgcctagcttggagtacaccatggacggattcgactaccgtgagaatcacagaatcacccgcaactattaccgtaggtactggaccatgtgcaaactggccatgtttggatgcaccgaaaccacccaaatgctcaaggagctttaggaggcttcgaaggcgtcccctgatgccttggttc

SEQ ID NO: 86601 - DNA, 1923 bp, Oryza sativa
  Clone ID: PAT_MRT4530_85626C.1
atggcggcggggaacggccggatggaggcggcgctgggctgcctcgcggcgctccccgacgaggtgctctgcgccgtcgtcgacctcctcccgcccaccgacgtcggccgcctcgcctgcgtcagcagacttaatctttgttcagaaaatgatgagatttaccagaagcctcgccattttgatgggttcaatcccacgcacttatacaggacacggtacagatgtttgactagtttgtgtagcttttcctttgataatgggcacgttgaaaggaaagatgacctttctctagaccaatttcgcgctcagtatgatggaaaatgtccagttttgcttactaaactggctgaaacctggccagcaaggactaaatggacagcgcagcaactgacacatgattatggtgaagttccctttaggatatctcagagaagccctcaaaagataaaaatgaaactaaaagattatgttttttacatggaactccagcatgacgaagatccactttacatatttgatgataagtttggagaatcagcacctacactattggaagattacagtgtccctcatctatttcaagaagatttctttgaaatcatggattacgaccaacgaccagctttcagatggcttattattggaccagagagatcaggtgcttcttggcatgttgatccagggttgaccagtgcctggaatactcttctttgtggccgaaaaaggtgggcaatgtaccctcctggaagagtaccaggtggtgtcacagtacatgtcagtgatgaagatggtgatgttgacattgaaactcctacatctttgcagtggtggctagatatctacccaaatcttgctgagcatgagaaaccactggaatgcacacaattaccaggagagaccatatttgttcctagtgggtggtggcattgtgttttgaaccttgacatgacaattgctgtcacgcaaaattttgtcaaccaatcaaattttaagcatgtatgtttggacatggcacctggttactgtcacaaaggagtttgccgtgctggcttacttgctgctccagacaaatctattagagatattgaaaatcttcctagtataacgagtagattgaaccactctgacatggcctgtaaggaaaaaagactgaaaagttcagagcctataagaacttcaaataatgcaaatcagtgttctgcatttgagttctcagatgttcatgaaaacttgggggaccaagttttttcgtatgatatagatttcttatcccaattccttgagaaagaaaaggatcactattcttctgtctggagccctactaattcaattggccagagagaagcaagagaatggctacgtaggctatgggttcttaaacctgaattgagagaactaatatggaagggtgcatgtctagcaattaatgtagacaagtggtattcatgcttagaggaaataagtgcatgccatagtttaccaccaccttctgaagatgagaagcttcctgttggcacaggtagcaacccagtcttcattgtttctggcaatgtgatcaaaatttatgctgaaggagggttgggttattctatacatggtttgggcacagagcttgagttctatgatcttctgcaaaaacttggctcgccattgatcaaccatgtccctgagatcattgcaagtggctttcttgtgtacctggatggtgtctacaagacagttccatgggatggaaacggaataccagatgttctagctaaatactactctttggaggtgtcttatgcaaacggctcttttcctcttggattatggagcaagcaactgtttggattgagtaattcaactgatgctccagacagaccaatttgtccttacatggttaccagaaaatgcaaaggggatatttttgctcgcatgtaa

SEQ ID NO: 86602 - DNA, 724 bp, Oryza sativa
  Clone ID: PAT_MRT4530_85627C.1
cggcacgcgcgcgcgccctcgccttcctcctcctcgccgttgatcgatcgatctcctgctcgatctcttgggccctagctacgatcaccaactagcttcaagcttcctctcccagcagctgcagcggcagctagccagcgatcgatcgatcgatcgagctacacgtgagatcgagtgcgtgcagtagtgtgtggtgtgcatgtttccggtggaggtggcggcggcggcggcggcggcggggaggatgcagggggaggcggtggtgccgatgatgctgccgcccttcttcatggactcggggatctggccggcggcggcgggggtcgtggatgtcgccgcgtcggcggaggaagaggcggcggcggcggcggcggcgcaggaccgcgcgctggcggcgtcgcgcaaccaccgcgaggccgagaagcgccgccgcgagcggatcaagtcgcacctcgaccgcctccgcgccgtcctcgcatgcgaccccaagatagacaaggcgtcgctgctggcgaaggcggtggagagggtgcgcgacctgaagcagcggatggccggcatcggcgaggcggcgccggcgcacctgttcccgacggagcacgacgagatcgtggtgctcgcgtcgggcggcggcggcgtctgcggcgccggcggcgcggcggcggtgttcgaggcctccgtctgctgcgacgaacgctccgacctcctcccggagctcatcgag

SEQ ID NO: 86603 - DNA, 435 bp, Oryza sativa
  Clone ID: PAT_MRT4530_85628C.1
atgactactttctttcccctctctctacctctttcctctctctcttcttctctacctctcttcctctctctcttcttggcaaccggccatgcgggaggactgaggagcgcggctgacgacgggcggggagaggagcggaggtggagacggatgcggcggggcgccaccggcgatggcctcgccgtcgcctcgctctccgctctgcttgacgagaagcaactccagcgctcgcccaaacccaccctcgccgagtacgctgtccggcttgaagttcctcgtcgccgccctgagctctgcgaacatgaagattcagaggttggggacctccaggatcctcccctccggctccgggtagagcgccccggcgacgccgatgactgcgccgcctgctgctcccaggggcatattgttgctgctactgctgctgcttggtga

SEQ ID NO: 86604 - DNA, 273 bp, Oryza sativa
  Clone ID: PAT_MRT4530_85629C.1
atggatcttatctccgcgaccgcgagcggtgacggaggcttcgggaggggaggagaggaacgggagtgcggcggggcttaccttaccgcggcggtggcggcgccgaaggaatccgcggcggcagcggcgtcgcggggtggcgcggcggcgagcagccgccgcccgccgccgtgccgccccatctcgcgcccgacgtcctgcttctcgtcgttccgcctcgcagctcgcgtgaatcggcaaatctactggatgaatctgtacctcccaaatgga

SEQ ID NO: 86605 - DNA, 665 bp, Oryza sativa
  Clone ID: PAT_MRT4530_8562C.1
cgacaaggggcttgtggcgaggacgtcgctgatcctgtggcacacgcaccagaacgacgccggcgccgtgcggaagctgctggaggaggacgccgcgctcgtcaacgcccgcgactacgacagccgcacgccgctccacgtcgctgcgctccacgggtggcacgacgtcgccgagtgcctcatcgccaacggcgccgacgtcaacgcccaggatcgctggcagaacacgccacttgctgatgcggagggtgcaaagaggcatgctatgatcgagctactcaaggaacatggtggattgacatatgggaaaactggaagtcattttgaaccaaagacaattccaccacccctaacaaacaaggctgactgggagattaaccctcttgagttggatttctcaaaagctgttatcatcggaaagggctcttttggtgaaattctgaaagccaactggcgaggaacacctaatgctgtcaagcgcattcttccatctctatctgatgacaggctggtgatacaagatttcaagcatgaagtcaacttgctaataaagctgagacatccaaatattgtgcagttccttggagcagtcacagaaaccaagcctttaatgctcgttactgagtttttacgaggaggcgaccttcatcaatacctgaaggaga

SEQ ID NO: 86606 - DNA, 318 bp, Oryza sativa
  Clone ID: PAT_MRT4530_85630C.1
gacgtgctaggtcttatatagtgtatcctgaaaccaatacacaggccgctggtcgacaacgtacagactggggacagcgtgacgtcacccaactcaatcgtctagcagcacataccacattcgcctgctggcggattagcgaataggcccgaagcgatcgcccttcgcaacagctgaccagtgtgcatggtgaatgggacacgccacgcaccctgtcattaagcacgaagggcgtggggggtacgcgcaacgcgaccggtgcacttgacagtggcctagggcccagtgcctgcgctttctgccctttcttcctcgtca

SEQ ID NO: 86607 - DNA, 1006 bp, Oryza sativa
  Clone ID: PAT_MRT4530_85631C.1
ccgcgccgccagaattcgccacgccgtccctacaggctaacacaatggcagctcccgccatcctccgcctcctccctcttctcctcctcgccgccgccgcgaacgccgccacgttcaccatcaccaacaagtgccagatcaccgtgtgggcggcagccgtgccgtccggcggcgggcagcagctggacccggggcagcagtgggtgatcgacgtgccggccggcacgacgggcgggcgcgtgtgggcgcgcacgggctgcagcttcgacggcagcggcaacgggcggtgccagacgggcgactgcggcggcgtgctgcggtgcgcggcgtacgggcagccgcccaacacgctggcggagttcgcgctgaaccagttcagcaacctcgacttcttcgacatctccctcatcgacggattcaacgtgcccatggacttcctccccgccggcgacggcgccgggtgcgccaagggcgggccgcggtgcgaggcggacgtggcggggcagtgcccgagcgagctgagggcgcccggcgggtgcaacaacgcgtgcacggtgttcaagcaggaccagtactgctgcaccggctcggcggcgaacaactgcggcccgaccaactactcgcagttcttcaaggggctctgcccggacgcctacagctaccccaaggacgaccagacgagcaccttcacttgcccggccggcaccaactaccaggtcgtcttctgcccatgagggacgatgacttgttagctggcatctgatcgatgtgatcttggttagatgtatacacaataaacaagcatgcatactttttatgcgagtttgtatcagaatcatgaagagaaaagttactctgtaataaagtaaaccattcaaaactgaagtggtttttcacttgtagtttggttaattacacaggcatgaacgaatccgttcaaattctcggaattctttcagtaagaaaaaaaaaaaaaaaaaaaaaaaaaaaaaaaaaaggggggggg

SEQ ID NO: 86608 - DNA, 677 bp, Oryza sativa
  unsure (1)..(677): unsure at all n locations
  Clone ID: PAT_MRT4530_85632C.1
atagcgcaacccaatccccagttttccggtgggaacctttgggtgcgcccccgaaccggggggttttccaataagtgccggggccaattctaaaacgtaacccctacgcgccagccccactaagcagttctggtccacacccaaggcaggcggaccactatccggccacaaaggtgccagagggcccgttgtgcaattgaatcgccaaactcgcaacctagcgttcagtggaggttgttcctcacccgctatccgaccaacatagttcgacactcaatgtgtactcccatagcgcagccctttcggttcccaacctgggtaacctgtttgggggttggtaggggcccaattggtgaagggagggggttgaaggtttccttccttggaaggcccccctttgaagggaatccttctgccccgggccgtttttgggtaagaaaaaggaaccttaaccggaaggggaagggtttgggccgccttggaaggttccccggaaccggaagganaaattggtaagggggaattgggccggaattggaaattgggntggaacccggaagntaaaccttaaagaagggaagtttccgttccttccgttcntgggggggcccttggaattgtttccttggttngttgttccaaaaggccctggaagttgnanaaaacctggcctggcc

SEQ ID NO: 86609 - DNA, 2200 bp, Oryza sativa
  Clone ID: PAT_MRT4530_85633C.1
tgcggccccgggggctgggtcgcaatctctcgacccacgcgtccgcggcttccctccggctcgagccaatctctcgctgtgtctctctcgcgctctccactagcaccggctcggctcggctcgcgcggcggcggcggcggggcggcgtggcgccgagggaggggaacgccggtgtggggagggcggcggcgaggggactcgccggcgacgagctggtttgggtatgagaggggttacccatgcggcgccgaccacgagcgtcccccgccgcggctccatggacggcctcctcatcttcgtcttctacctctcgcttcctatacgtggtggccgcgaccactcgttaatctcctcctctaattgttagccgatctcgcctctcccccacactctctgatcccgctctctctctctgcttcgattcgattcgattcgatcttctccacctcgtcgccgtcgaacgcaactcggatcgggaggataatggaccagccttctaatggcttcgccgccggaggtctttttcttcgtcacattgatgggcaaaatgcctctcccccttctgtcattgtgattggtggagggatttcaggcattgcagctgctcgtgcgctgtctaatgcttcgtttaaggtcacactattagagtcacgggaccgacttggtggccgtgtgcatactgactattcttttggctgcccaattgacatgggagcatcttggttgcatggtgtatgcaatgagaattcattggcaccactgattaggttgcttggccttagattatatcgcaccagtggtgataactctgtgctatatgaccatgatctggagagctatgctctctttgataaggatggtcgtcaagttccccaggagatagtgacaaaagtcggggaaacatttgagaaaattcttaaggagacggtgaaagtaagagctgaacatgaagatgacatgcctcttattcaagccatctcaattgtgcttgacaggaatccacacctaaagcttgatggtttgcaatatgaagtactgcagtggtgcatatgtaggctggaggcatggtttgccacagatgtggataatatatctctgaaaaattgggatcaggaacatgttcttactggtggccatgggcttatggtgcatggttatgatcctgttatcaaagctctcgcgcaagatcttgatatccacctgaaccacagggttaccaaaatcatccagaggtacaacaaaactatagtatgtgttgaagatgggacaagctttgttgcagatgctgctataataactgtccctcttggtgtacttaaagcaaatatcatcaagtttgaacctgagctcccagattggaagctttcatcaatatctgatcttggtattggcattgagaacaaaatagccctccgcttcaatagtgtattttggccaaatgtagaagtgctaggcagggttgccccaacatcaaatgcctgcggttactttcttaaccttcacaaagccacagggcatccggttcttgtatgcatggtagcaggaagattcgcatatgaattcgagaagctatccgatgaagaatccgtaaactttgtcatgtctcagctcaagaaaatgctaccaggagctactgaaccggtccagtatttggtttcaaggtggggaaccgacccgaattcgcttggttcttattcctgcgaccttgttgggaagccagctgacttgtatgaaagattctgtgctccggtgggcaacctgtttttcgctggggaggccgcctgcatcgatcactctgggtccgtgcatggagcttattcttcaggcattgttgctgcagaggattgccgaaggcatctgtcgacgcagctaggcatctccgaccttttccaggttgggaagattatcatgagggaggagatgactgaagtcatggtccccttccagatatccaggctgtgaaagaagaacaaagcctgcctatttagcaccgtgtttatcctgcagctgctatggttaatattgtagctgctgctctgtagtttcctaattatctcagatcctgtaccgtttcacagtttgatcgtttatgtgtattcaaataaaaacagaataattatatatcaacagaccttgttctctgaaaaaaaaaaaaataattttcaattccaaaataatacaaaaactattgttaatattg

SEQ ID NO: 86610 - DNA, 1256 bp, Oryza sativa
  Clone ID: PAT_MRT4530_85634C.1
atgagttttgctgttgtgtctctgtgcattgcttggttgaccatcaagaagaacatcaaataccatttgccgctcctgaaccgctggacgccgcctaccgccgccgccgctgaacgacacccaccgcctccacccgtgcgtctgccgcgcccctgcgcctcttcccatgaccctgtgcctcctcccacgcagcccttcgcgccggcgcttgaggccgttggcgcctccggctgcgccaccaggggagatgaaggggaaaggaagggagaaaagctagggttcagacttgagagctccagagactcagaccggaggaggattcgtttcttcgcggtccccgtgttgaataggaaggaattcagagggattagtcctcatcgccgagcgcgcgcgtcaaggactagtacagccagttcaaggagaactccgccgagaaagcactggatctgcatcgaggacaagttccgcgccgccggcgactacgtctcacagaagagtcgactctagaggatccccttaccaacaacgcagctcggtgtttggcaaaaagaaggtcgagcccatggtcaaggatgcagcagctccagggaagggcgggaggcttaagatggaatctagcaatgcacaacctcaagattctgcctattcagttcccaaaaacccatccatgacttgttgccggaagaggactgatggcgctactttcctcgaagatctgaaagaccatatcgaggagttcatccatgcctccatggatgagcacaagacatgcttcaaacaccatccaaaaggtcagatgtgcaaacactcagatactgcacttctttgctctttctgcattttggacattttgatgatgaagcatttcttgtgcttcatgtttcgcatctcagatgtttgggatgtcaaaggttgtcgcggagcgttcggcggatgccaaggaagctgaagtcgagagcgctttgcctcttcagaccagtgtctcgcagtaggatgctatggctgatggcagcttgttgccttctgttggctgtgtgccatcctgtggagcttaacaatcagtagtacctgtaataggtgaatcgggagtctactgctgtttttttttataagaaatcttgaacaaattagggtcaacaactgttgaattgctgatttgttttgctcatatagcacattcctactctatcctaaccttgtctaaccttgtatatgaggggtcaataaagaattctgcccacaagattcctcgagct

SEQ ID NO: 86611 - DNA, 1068 bp, Oryza sativa
  Clone ID: PAT_MRT4530_85635C.1
cccacgcgtccgcccacgcgtccgcccacgcgtccggtagcaggaagattcgcatatgaattcgagaagctatccgatgaagaatccgtaaactttgtcatgtctcagctcaagaaaatgctaccaggagctactgaaccggtaaatcctcaaaattcattttcagaccatgtacagttgagtactgtcaatttcagactatgaacagtagctctaacacttgtgctacacaactgcaggtccagtatttggtttcaaggtggggaaccgacccgaattcgcttggttcttattcctgcgaccttgttgggaagccagctgacttgtatgaaagattctgtgctccggtgggcaacctgtttttcgctggggaggccgcctgcatcgatcactctgggtccgtgcatggagcttattcttcaggcattgttgctgcagaggattgccgaaggcatctgtcgacgcagctaggcatctccgaccttttccaggttgggaagattatcatgagggaggagatgactgaagtcatggtccccttccagatatccaggctgtgaaagaagaacaaagcctgcctatttagcaccgtgtttatcctgcagctgctatggttaatattgtagctgctgctctgtagtttcctaattatctcagatcctgtaccgtttcacagtttgatcgtttatgtgtattcaaataaaaacagaataattatatatcaaaaaaaaaaaaaaaaaaaaaaaaaaaaaaaaaaaaaaaaaaaaaaaaaaaaaaaaaaaaaaaaaaaaaaaaaaaaaaaaaaaaaaaaaaaaaaaaaaaaaaaaaaaaaaaaaaaaaaaaaaaaaaaaaaaaaaaaaaaaaaaaaaaaaaaaaaaaaaagggggggcccccttttaagaaaaccaagttttatgccccggggctcgcaaggaaaaactttttttttggggccccaaaaaaaaaattaaggggccgggtttaaaaaaccggggcagggaaaaaacctggggttcccaaaattaaaccccttggaaaaaaaccccctttcccccgggggggtaaaaa

SEQ ID NO: 86612 - DNA, 1920 bp, Oryza sativa
  Clone ID: PAT_MRT4530_85636C.1
atgcctccacaggtttctctacaactagtggtgatggcagcagatgaagggagccagatttggtggctagtagtgatgagcgacgaaagtggtatctctcaggcggatggaggcaaacgaagtgaaccgcctctctctcatgaggaggaggctaagttcgaggcttcggattgcctgttccgtggagcattgttcagtgtactcgctgacaatatagtggatgtgtatatgcacatgccttcagggaaggacatgtgggatgcacttgaggccaagttcggagtttccgacgctggcagcgagctgtatgtcatggagcagttctatgactacaagatggaacttgagaacaacaactgtgagttgccggacaagtttgtggcgggtggcattattgccaaattgccaccttttttgtcggactttgccacttctctaaaacacaagagacaagagttcagtgttaatgatctcattggctctttgggtgttgaggagaaggcgagggcaaaggacaaccggggcaaaaagatcgagggaggttctagtgccaatatggtgcagaagaagaaccctcacgcatcccacaacaacaagaaagtcaagcctgatgtcaaacccaaggctacaaccaattttaagaagaaaggcaagggaaaggcaaagggagattgctttgtgtatggcaagcctggacattgggccaaggattgtcctgagcgcaatgacaagaagtctgctaacatagtcattagtgagggcggaggaacatcggggtacggtaaatttttacctacagtactctctgtttttcattcacctgattggtgggttgatactggtgctaatattcatgtcgggagaggttcctccttgttgatgggaaacgggtcgcttgcggctattcatggtgttggttccaagtgccatacttgtgttcaattgaaacaacctcgcaagcctcacaaggcatctgaggcgaggaatttggcacctctagaacttgttcattccgatctgtgcgaaatgaatggcgtgttgactaaagggggaaagaaattttttatgacactgatagatgattgcactagattttgctatttgtatctattgaaaacaaaggatgaagcattgcattactttaagatctataaagctgaggtagaaaaccaacttgaaaggaaaatcaagcggttgaggtctgataggggtggagagtatttttccaatgagtttacatccttttgcaaagagtttggaattattcatgagaggacgtctccctattcaccccaatcaaatggggtagccgaaagaaagaaccgcactctaactgagatggtgaatgccatgttagacactgcgggacttcccaaggaatggtggggtgaggcaattttgactgcctgtcatgtcttgaataaaattccaatgaagcataaggaaataacaccattcgagcaatgggaaaggaagaaattaaatctctcatacctacgtacatggggctgtttggccaaggaagcggtacgcagtgagatagactcaattatgtttaatggtacttgtgaagtcgttgagcgtccatatgggtgcaagcctgtaggatgcaaatgggttttcaagaaaaagcttaggcctgcaaatgggttttcaacaaaaagtttaggcctgatgatggacgttaagacagcattcctaaacggagagctggaggaggagatctatatggatcaaccagacgggtatgcactagaaggtcaggagggaatggtgtgtaaacagttgaaatccttgtatggccttaagcaagcacctaagcaatggcatgagaagtttgacaccacacttacatctgctggctttgttgtgaacgaagctgacaaatgtgtgtactatcgctatggtgggggagaatga

SEQ ID NO: 86613 - DNA, 1488 bp, Oryza sativa
  Clone ID: PAT_MRT4530_85637C.1
atggtgaaacaatttgtgtcgaatgccttggttgccacaaggagggcattaacagagggaatggtgtacaggacgagcaggtacctccggaactccgtccgcttgagaacttgcacgggtaggcgggcgatcaagtttttgggtagcgcttcaagcgcgactgctcttgttcttcgcggctactgctgctgcatcagcgccgtcaccaagatgtcaacggagattggagacaagaagatgaacgacatcaatggaggcaatactgcctcaaaatccagcaatgggactttctcgggtgtgctcgccgataatattgtggatgtgtatatgcacataccttcagggaaggacatgtgggatgctcttgaggccaagttcagggtttccgacgccggcagcgagctgtatgtcatggagcagttctatgactacaagatggtcgatgaccgttctgcagtggaacaggctcatgagattcagatgctggtaaaggaacttgagaacaacaactgcgagttgccggacaagtttgtggctggaggcattattgccaaattgccaccttcttggtcggactttgctacttctctaaaacacaagaggcaagagttcagtgttactgatctcattggctctttgggtattgaggagaaggcgagggcaaaggacaaccggggcaaaaagatcgagggaggttctagcgccaatttggtgcagaagaagaaccctcacgcatcccacaacaacaacaagaaagtcaaacctgacgtcaaacccaaggctacaaccaattttaagaagaaaggcaagggaaaggcaaaaggagattgctttgtgtgtggcaagcctgggcattgggccaaggattgtcctgagcgcaaggacaagaagtctacaaacatggttataagtgagggcggaggaacattggggtatgtcgtcgagcgtccatatgggtgcaagcctataggatgcaaatgggttttcaagaaaaagcttaggcctgatggtacaattgaaaagtacaaggcaaggcttgtggccaaggtctctcatggtctactcgtccatcagatggatgttaagacagctttcctcaatggagagttggaggaggagatctatatggatcaaccagatgggtatgtactagaaggtcaggagggaatggtgtgcaagctgttgaagtccttgtatggtctcaaacaagcgcctaagcaatggcatgagaagtttgacaatacacttacatctgctggctttgttgtgaacgaagctgacaaatgtgtgtactatcgctatggtgggggagagggagtgatcttgtgtttatatgtcgatgacatattgatctttggaaccagcctcaatgtgattgaggaggtcaaggactttctgtccaaaagctttgaaatgatggatttgggagtggctgatgttattcttaacattaaactactgagagtcactatgtggacaaggtcttga

SEQ ID NO: 86614 - DNA, 2448 bp, Oryza sativa
  Clone ID: PAT_MRT4530_85638C.1
atgcgcgactactcactattcgtcaacgtctacttcgtcttcaccaatatgtcgaacactggagacaacggcaacactggagacaaagcattgatcagtgtactcgctgacaatatagtggacgtgtacatgcacatgccttcaaggaaggacatgtgggatgcgcttgaggccaagttcgaagtttccgacaccggcagcgagctgtatgtcatggagcagttctatgactacaagatgatgctggcaaaggaacttgagaacaacaactgtgagttgccagacaagtttgtggcgggtggcattattgccaaattgccaccttcttggtcggactttgccacttctctaaaacacaagagacaagagttcagtgttaccgatctcgttagctctttgggtgttgaggagaaggcgagggcaaaggacaactggggcaaaaatatcgagggaggttctactgccaatttggtgcagaagaagaaccctcacgcttctcacaacaacaagaaagtcaagtctgatgtcaaacccaaggctacaaccaattttaagaagaaaggcaagggaaaggcaaagggagattgctttgtgtgtggttccaagtgtcatacttgtgttcaatcgaaacaacctcgcaagcctcacaaggcatctgaggcgaggaatttggcacctctagaacttgctcattccgatctgtgcgaaatgaacggcgtgttgactaaagggggaaagaaatatttcatgacactgatagatgattgcactagattttgctatgtgtatctattgaaaacaaatgataaagcattgcattattttaagacctataaagctgaggaaaatcctgagaaggataacattatagatactcgaaagagtaagagacaaagggttgcaaaatcctttggagatgactacattgtatacctcgtggatgacactccaaaaaccatagaagaggcatattcatctcctgacactgactactggaaggaagcggtacgcagtgagatggactcaattatgtctactggtacttgggaagtcgttgagcgtccatatgggtgcaagcctttaggatgcaaatgggttttcaggaaaaaacttaatcctaatggtacaattgaaaagtacaaggcaaggcttgtggccaagggttatacccaaaaagaaggcgaggattttttcgacacctactcaccagttgcccgcttgaccacgattcgagtattacttgctctggcagcctctcatggtcttctcgtccatcagatggacgttaagacagctttcctaaatggagagctggaggaggagatctatatggatcaaccaaacgggtatgtactagaaggtcaggaggaaatggtgtgtaaactattgaaatccttgtatggccttaagcaagcacctaagaaatggcatgagaagtttaacacaacagttacatctgctggctttattgtgaacaaagctgacaaatgtgtgtactatcgttatggtgggggagagggagtgatcttctgtctatatgtcgatgacatattgatctttgggaccagcctaaatgtgattgaggaggtcaaggactttctgtccaaaagctttgaaatgaaggatttgggagtggctgatgttacacttgtgcaatcccactatgtggacaaggttttgagtcgctttggctatagtgactgtaagccagctactactccttatgaccccaatgtgctattaaggaaaaaccgaagaatagcaaggcatcaattgagatactcccaaatcattggttcattgatgtacttggctagtgcaacgaggcctgacatctcatgtgatgtaagcaagctgagccggtttgtttcaaatccgagagatgatcactggcaagctctggaaagagtaatgcgctatctaaagggcactatgagctatggaattcactatactgggtacccaaaagtactggaagggtatagtggctcaaactggatatctgatgctgatgagataaaagccacaagtggatatgtgttcacacttggagttggcgctgtttcctggaagtcttgcaagcagactatcttaacgaggtcaacaatggaagcagaactcacagcactagatactacgacagttgaggccaagtggctttgtgaactcctgatggatttgccggtggttgaaaaaccagtgccagctatcctgatgaactgtgataatcaaattgtgattattaaagtgaacagttcgaaggacaacatgaagtcatctaggcatgtaaagagaagactgaaatctgttagaaagcagaaaaactccggagtgataacactggactatgtccagacagctaaaaatctggcagatcagtttaccaaggggctaccacgtaatgtgatagacagtgcatcgagggaaatgggcttgagacccacttag

SEQ ID NO: 86615 - DNA, 448 bp, Oryza sativa
  Clone ID: PAT_MRT4530_85639C.1
gatttaagtatatattgatataggaattatatattgttaatatctacattcgtttaagtagatttaggtctttatcatctatttacaactgccgatcgatttacatatgacatcagctcaaagataaatgaaatgtcatcggcacttagccgattggctatcgtttatagatttaaccgcggtttctttgtatctatttcttgttgattgcaggatcaaatcaactggcatgctaacacgcccgaagacgagctttggacctgcactgagttaagcagatatcccagtcctcgtgtttttcgtcaacagataggttcttcagatatgcaacaatctcgttcctccaatcatccgcgtcaacatttgcaatcccaattaggcaaactcatcagtcatggaacacaaatcactatcatactcatcgctcatcaaagatagatcatcacta

SEQ ID NO: 86616 - DNA, 2539 bp, Oryza sativa
  Clone ID: PAT_MRT4530_8563C.1
gtccgcccacgcgtccgcggacgtgacgcggtagatatcccactcgcttcgacactctcttccccttcttctcccggagaaaacctcgagccaaggccccgactccgactccggtgatgtcggcggcggtggggggagccgagttccacgggttccgtgggggtggcggcggcgcggcgcagctgcagaggtcgcggatgctcggaaggccgctccgtgtggcgacccctcacgcggcggcccccgctggcggcggcgggtcgtcgtcggccagcatacgcgccgtctccgcgccactcaagaaggatgcatctgaagttaagaggagcaaggttgagatcatcaaggagaagagcaattttcttcggtaccctttgaatgaggaactggtctcagaggctcccaatattaatgacagcgctgtccagcttattaaatttcatggaagctatcaacagacggaccgtgatgttcgtgggcagaagaattactcgtttatgctccgaacaaagaatccttgtggaaaagttccaaaccagctttacttggctatggatacgctagctgatgaatttggtattggaacactccgattgacgaccagacaaacatttcagctgcatggcgttcttaagaagaacctgaagactgtcatcagcactgttataaagaatatgggttcatcattaggtgcctgtggagatctcaacagaaatgtacttgcacctgcagcaccttatgtcaggaaggatattctttttgctcaagaaacagcagagaatatcgcagctcttcttacaccacaatctggggcttattatgacctgtgggtggatggagaaaagataatgtcagccgaagaacctcctgaggtcacgaaagctcgcaatgacaacacatatggaacaaatttccccgattcccctgaaccaatatatggcacacagtatctgccaagaaagttcaagattgctgtcactgtcgctggagataactctgttgatattctgaccaatgacatcggtgttgttgttgtttcagatagtgcaggagagcctgttggcttcaacatttatgttggtggtggcatgggtaggacacaccgagtggagaccacattccctcgattggctgatccactgggttatgttcctaaggaagatatattgtatgctataaaagcaatagtcgtcacacagagggaaaatgggagaagggatgaccgccgatatagcaggatgaagtatctgattgataactggggaattgagaagtttcgggctgaagtcgaaaaatactatggaaagaagtttgaagattctcgtcctttgcccgaatggcagttcaacagctacctaggatggcaggaacaggttaccgcggttttccttttaccgtacccccgcagtaatcacgtggttactggcggtttgggaaactctggtcacactccgggtgatggaaaattattctacggagtgcatgttgataatggtcgtgtcgcagggcaagcaaagaaaactctacgagagattattgagaagtacaatttggaagttagcattactccaaaccagaatcttatcttatgtgggattgatcaagcatggaaagatcccatcacagcagctcttgctcaatctggcctgctggaaccaaaggatgttgatcccctgaatattacttccatggcatgtcctgccttaccactgtgccctctagcacaaacagaagctgaacgagggattctgccgattcttaaacgaattagagcagtttttgataaggttggcatcaaggaccatgagtcggtagtggtgaggataacaggctgccctaatggatgcgctagaccatatatggcagaggttggctttgttggtgatggcccaaacagttaccagatatggcttggaggaacaccaaaccagagtaccctagctgaaacctttatgaataaagtgaagcttcaagatattgagaaggttttggaaccattgttttcctattggaacagcacacgtcaggaaggtgaatcttttggtagcttcacacgccggacgggatttgacaaattgaaagaggtagtgaacaagtgggcagagtcagcatcagctgcatgatggactgctttcgctgaacaagttgataacaattctgaccacgggtccaatgcgggcatcgtcaagggctctcaacataactatgtgagcattgcaggagaaaattttgtcaatttcgttgacaagattgaggactcgccgactcgggtttggaatcgttcgttcagataattaatcaaaatttttcgtgtactctggtttgagaaaaaaaaatgtgcttatgagaaaacaaaaggaaccctggctgtttactttggaataaattgcttggaaagtgtactgaataaatttttccaataaggtgtttgactttttttcgcacaacaaggccatacgctgtaaaaagaaaaaaaaatcggggggacttggcgcgttgggggagaggggcccccgtcgaaaaaaaaaaaaaaaaaaaa

SEQ ID NO: 86617 - DNA, 653 bp, Oryza sativa
  Clone ID: PAT_MRT4530_85640C.1
acctggaggaagagatctatatggatcaaccagacgggtatgtactagaaggtcaggagggaatggtgtgtaaactgttgaaatccttgtatggcctcaagcaagcacctaagcaatggcatgagaagtttgacaccacgcttacatctgcaggctttgttgtgaacgaagctgacaaatgtgtatactatcgctatggtgggagagaaggagtgatcttgtgtttatatgtcgatgacatattgatctttaggaccagcctcaatgtgattgaggaggtcaaggactatctgtccaagagttttgaaatgaaggatttgggagaggctgatgttattcttaacattaaactacaaagaggagatgagggtgggattacacttgtgcaatcccactatgtggacaaggttttgagtcgctttggatatagtgactgcaagccagctcctactccttatgatcccagcgtgctattaaggaaaaaccgaagaatagcaagggatcaactgagatactctcaaatcattggttcattgatgtacttggctagtgcaacgaggcctgacatctcatttgctgtaagcaagctgagccgagatgttgacctgcagaacatctcagaaggaacacacctatatgagttcgactgctag

SEQ ID NO: 86618 - DNA, 420 bp, Oryza sativa
  Clone ID: PAT_MRT4530_85641C.1
atggacgtggccgggggctgcaaagaagtcgaggaggtggaggctgttgacggcggctatcacagacgccgatggagatcggttggcccaccgacgttcgacacgtcgaccacgtcaacttccaccgagtacatggcttgcagggccctcccgtggagctacagcccgaggtctgcggaaacgcccctagcgcaagagctgcggctgacaactgtattattattatggatatggaatattgcacaagacggtgttcggtgtgtcacggagtcgatgcactgctcgtacgacgcgcgggggaacagcgtaccgagcatactcctgctgatgcagcggtggctctacaagcatggcgggctgaaggctgagggcatcttccgcatcggcggcgacgacgcccaagagcaagctgtccggtag

SEQ ID NO: 86619 - DNA, 2796 bp, Oryza sativa
  Clone ID: PAT_MRT4530_85642C.1
atgtcgaacactggacacaacggcaacactggagacaaggagaaggaggttcctgtcaacatcaacggagtcaatactgcctcaaactccaacagaggaccattcttggggtccttttcggtagttggctttgccgcaacactgaaacatcatgcttttgatggttcgaactataagagatggaaagcacgtgcactactatggttgacagcgatgcaatgcttctatgtttcacggggcaaacagagtgaaccgcctctctcttctgagaaggaggctaagttcgaggcttcggattgcctgttccgtggagcattgatcagtgtactcgctgataatatagtggacgtgtacattcacatgccttcacggaaggacatgtatgatgcacttgaggccaagttcagagtttccgacgccggcaacgagctgtatgtcatggagcagttctatgactacaagatggtcgatgaccattctgtagtgcaacaggctcatgagattcagatgctggcaaaggaacttgagaacaacaactgcgagttgccgggcaagtttgtggcgggtggcattattgccaaattgccaccttcttggttggactttgctacttctctaaaacacaaaaggcaaaagttcagtgttactgatctcattggctctttgggtgttgaggagaaggagagggcaaaggacaaccggggcaataagatcgagggagggacaagaagtccgccaacatggttattagcgagggtggatgaacattggggtacggctactaccaattttaagaagaaaggcaagggaaaggccaagggcaactgctttgtgtgcggtaaacctaggcattgggctaagaattgtcctgatcgtagggacaagaagtccgccaacatggttattagcaagggtggaggaacattggggtacggtcgggagaggttcctctttgttgatgggaaacggatagcttgcggctgttcatggtgttgcatgttgactaaagggggaaataaatatttcatgacactgatagatgattgcactagattttgctatgtgtatctattgaaaacaaaggatgaagcattacattactttaagatctataaagctgagacactgcgggactttccaaggaatggttggggtgaggcaatcttgactgcttttcatgtcctgaataaaattccagtaaagcataacttggccaaggtgaatgtacctatagccaaaaagcgtaaacttggaccaaagacggtagactgtgtgttccttggttacgctatcctcagcgtgggttattggttcttaatagtaaactctggagtacccgacatgtgtatgggtacaattactgagtccagagatgccacattctttgacaatgaatttcccatgaaaaatacacctaacacttctagtcaagaacctgttttaccccatgagcactttgcaccgatagaacacaatgatcaaacgcctgaggaaaatcctgaggaggataacattgtagatactcgaaagagtaagagacaaagggttgcaaaattctttggagatgactacattgtatacctcatggattacactccaagaaccatagaagaggcatattcatctcctgacgctgactattggaaggaagtgaaggcaaggcttgtggccaagggttatacccaaaaagaacgcgaggacttttttgacacctattcattagtagcccgcttgaccacgattcaagtactacttgctctggcggcctctcatggtcttctcgttcatcaaatggacgttaagacagctttcctaaatagagagctggaggagaagatctatatggatcaaccagatgagtatgtactagaaggtcaggagggaatggtgtgcaaactgttgaaatctttgtatggcctaaagcaagcacctaagcaatggcatgagaagtttgacacaacacttacatctgctggctttgttgtgaacgaagttgacaaatgtgtgtactatcgctatggtgggggagagggagtgatcttgtgtttatatgtcgatgacatattgatttttggaaccagcctcaaagtgattgaggaggttaaggactttctgtccaaaagctttgaaatgaaggatttgagagtggctgatgttattcttaacattaagctactgagaggagatgagggtgggattatactcgtgcaatctcactatgtggacaagatgatcattggtaagctttggaaaagagtaatgcgctatctaaagggcacagtgagctatggaattcactatactgggtacccaaaagtactggaaggatatagtgactcaaactggatatctgatgctgatgagatagaggccacaagtggatatgtgttcacacttggaggtggcgctgtttcatggaagtcttgcaagcagaccatcttaacgaggtcaacaatggaagcagaactcacagcactagatactgccacagttgaggccgagtggcttcgtgaactcctgatggatttgccggtggttaaaaaaccagtgccagctatcctaatgaactgtgataatcaaacaatgattattaaggtgaatagttcgaaggacaacatgaagtcagctaggcatgtaaagagaagactgaaatctgtcggaaagcagaaaaaatccagagtgatagcactggactatgtccagacagctaaaaatctggtagatcagtttaccaaggggctactacataatgtgatagacagtgcatcgagggaaatgggtttgagacccacttag

SEQ ID NO: 86620 - DNA, 281 bp, Oryza sativa
  Clone ID: PAT_MRT4530_85643C.1
ggggtacatacgaaaccaaaaccatactattcaatgatctatcaggcactgacccaacgccctctggaccggcacccaaatgttaatagaccgacctagcaaatggcattgaggctaactgttcgaggtggaacatgtggccccaccggataaaggacgtgaacactgttaatacacctgcataccagagatgatagacacgctgcatgtgtgtatacgaaccatcgtgacacatcttgggagcggaagcagcaaccacgtgggctcgagcagggcaagac

SEQ ID NO: 86621 - DNA, 3123 bp, Oryza sativa
  Clone ID: PAT_MRT4530_85644C.1
atgcagtgcttctatgtttcacggggtaaacgaagtgaaccacctctttctcctgaggaagaggctaagttcgaggcttcggattgcctgttccgtggagcattgatcagtgtactcgctgacaacatagtggacgtgtacatgcacatgccttctgggaaggacatgtgggatgcacttgaggccaagttcggagtttctgacgccggcagtgagctgtatgtcatggagcagttctatgactacaagatggttgatgaccgttctgtagtagaacaagctcatgagattcagatgctggctaaggaacttgagaacaacaactgtgagttgccggacaagtttgtggcgggtggcattattgccaaactaccaccttcttggtcggactttgccacttctctaaagcacaagagacaagagttcagtgttcctgatctcattggctctttgggtgttgaggagaaggcgagggcaaaggacgtccggggcaaaaaggttgagggaggttctagtgccaatatggtacagaagaagaaccctcatgcatcccacaacaacaagaaagtcaagcctgatgtcaaacccaaggctgcaaccaattttaagaagaaaggcaagggaaaggcaaagggagactgctttgtgtgtggcaagtctgggcattgggccaaggactgtcctgagcgcaaagacaggaagtctgccaacatgatcattagcgagggcggaggaacatcgggagatgctactttctttgagaatgaatttcctatgaaatatacacctagcacttctagtaaagaaactgtcatgccccatgagcactttgcaccgatagaacacaatgatcaaacgcctgaggaaaatcctgaggaggacaacattgtagatactcgcaagagtaagagacaaagggttgcaaaatcctttggagatgactacattgtatacctcgtggatgacaccccaagaaccatagaagaggcatatttatctcctgacgctgactactggaaggaagcagtacgcagtgaaatggactcgattatgtctaatggtacttgggaagtcgttgagcgtccatatggatgtaagcccgtaggatgcaaatgggttttcaagaaaaagcttaggcctgatggtacaatcgaaaagtataaggcaaggcttgtggccaagggttatacccaaaaggaaggcgaggatttcttcgacacatattcaccagttgctcgcttgactacgattcgagtactacttgctctggcagcctctcatggtcttctcgtccatcagatggacgttaagacagctttcctaaatggagagctggaggaggagatctatatggatcaaccagacgggtatgtactagaaggtcaggagggaatggtgtgtaaactattgaaatccttgtatggcctcaagcaagcacctaagcaatggcatgagaagtttgacaccacgcttacatctgcaggctttgttgtgaacgaagctgacaaatgtgtatactatcgctatggtgggggagaaggggtgatcttatgcttgtatgtcgatgacatactgatctttgggaccagccttaatgtgattgaggaggtcaaagactatctgtccaagagtgatttgggagaggctgatgttattcttaacatcaaactacaaagaggagatgagggtgggattacacttgtgcaatcccactatgtggacaaggttttgagtcgctttggatatagtgactgtaagccagctcctactccttatgatcccagcgtgctattaaggaaaaaccgaagaatagcaagggatcaactgagatactctcaaatcattggttcattgatgtacttggctagcgcaacgaggcctgacatctcatttgctgtaagcaagctgagccggtttgtctcaaatccgggagatgatcattggcaggctctggaaagagtaatgcgctatctaaagggcactatgagctatggaattcactataccgggtatccaaaagtactagaagggtatagtgactcaaactggatatctgatgctgatgagataaaagccacaagtggatatgcgttcacacttggaggtggcgctgtttcctggaagtcttgcaagcagaccatcttaacgaggtcaacaatggaagcagaacttacagcactagatactgcgacagttgaggctgagtggcttcgtgaactcctgatggatttgccggtggttgaaaaaccagtgccagctatcctaatgaactgcgataatcaaacagtgattattaaagtgaacagttcaaaggacaacatgaagtcatctagacacatcaagagaagactgaaatctgtcagaaagcagaaaaactccggagtgatagcattggactatgtccaaacggctagaaatctggcagatcagtttaccaaggggctaccacccactaacccacgttcccacgattccctccgcaacagcgcgtccacgttctttctcctgatagataaggaggccgcgagtctgatccgagttcctcgcttctttcccggtttttggggagtgcctcctgcacgactgctcatcgccatgtctggagttgctgccgccgctattggcggaggtggtgcgccgccgccgacgccgacaggagctggatccggagctggtgcgccaggaggaggtgccgtgaacgactacaacaacggaggcaattctgcctcaccatccagtggagggccattctcgggcaccacctttcgctttcggagagcaaactatgttacacgcaattttgcaattgccgctgtgacagttttcttcccccgtccagaagaaggcccttcagcgcttgtcaatagtgctcatcatcagtttgatcgtgtccggaggtgtgaggtcgtcggcgagatgagctccggcggcgaggaggggaagacgtcgtggccggaggtggtggggctgcgggcggaggaggcgaagaaggtgatcctcaaggacatgcccgacgccgacatcgtcgtggttccggtggggacgccggtgaccatggacttccgccccaaccgcgtccgcatcttcgtcgacaccgtcgccggcacccccaccatcggctag

SEQ ID NO: 86622 - DNA, 1917 bp, Oryza sativa
  Clone ID: PAT_MRT4530_85645C.1
atgtcgacaaccggcgacaacaacaacactagagacaaggaggagcctcccgtcaacaccaacggaggcaatactgtctcaaactccagcggagggccattttcggggtataacgtttcactcttaccgttcgttcttcgtttcctacaactgtcggtcgcaatattattgcgttctcttgtctatgttgatgcttattctatattaagcacactcaagttgtatacatctagcactgtcactagatctactcatattgcaaatgtcatgtttattgtcttaatattttggattaaaatatgtcgaattatgaccaaatttccaacaatccaaaaacttgatagtgtgcacgccgacagtattgtggacgtttatatgcacatgccttcagggaaggacatgtgggattctcttgaggccaagttcggggtttccgacgccgacagcgagctgtatgtcatggagcagttctatgactacaacatggtcgatgaccgttctgtagtggaacatgctcatgaaattcagatgctggcaaaggaacttgagaacaacaactgcgagttgccggacaagtttgtggcgggtggcattattgccaaattgccaccttcttggtcagactttggtacttctctaaaacacaagaggcaagagttcagcgttactgatctcattggctctttgggtgttgaggagaagacgagggcaaaggacaaccgggacaaaaagatcgagggaggttctagcgctaatttggtacagaagaagaaccctcacgcatcccacaacaagaacaagaaagtcaaacctgacgtcaaacccaaggctacaatcaattttaagaataaagacaagggaaaggcaaaaggagattgctttgtgtgtggcaagcctaggcattgggccaaggactgtcctgagtgcatggacaagaagtctgcaaacatggttattagtgagggcggaggaacatcggggtatggtcgggagaggttcctccttgttgatgggaaacggatcgtttgcggttgttcatggtgtagattctgctatgtgtacctattgaaaacaaaggacgaagcattacattactttaagatctataaggctgaggtagaaaaccaactagaaaggaaaatcaaacggttgaggtctggtaggggtggagagtatttttccaatgagtttacttctttatgcgaagagtatggaattattcatgagaggacgcctccctattcaccccagtcaaacggggtagccgaaaagaagaaccgcactctaactgaaatggtgaatgccatgttagacactgcaagactttccaaggaatggtggggtgaggcaatattgactgcgtgtcatgtcctgaatagaattcctactatgcataaagaactaacaccattcgaggaatgggaaaggaagaaattaaatctccctcacctgcgcacatggggctgtttggccaaggtaaatgtatctatagccaaaaagcgtaaacttggaccaaagaccgtagattgtgtgttccttggttatgctatccatagtgtgggatataggttcttaacagtaaattctggagtacccgacatgcgtgttggtataattactgagtccagagatgccacattttttgagaatgaatttcctatgaaaaatgcacctagcacttctagtcaagaacctattttatcccctgagcactttgtgccgatagaacacattgatcaaatgcttgaggaaaattctgaggaggataacattgtagcaactcaaaagagtaagagacaaaggactgcaaagtcttttggagatgactacgttgtatatcttgtggatgatactccaagaaccattgaagaggcatattcatctcctgacactgactattggaaggaagcggtatga

SEQ ID NO: 86623 - DNA, 2394 bp, Oryza sativa
  Clone ID: PAT_MRT4530_85646C.1
atgacgagtttggcctcatcagcgacaggtagagagaataacccgttagagttctactctcttccaatctcccccaacattgaacaaaggtcattttcggtagttggctttgctgctgcactgaaaccacatgcttttgatggttctaattataagaggtggaaaacacgtgcactactgtggttgactgtgatgcaatgtttctatgtttcacggggtaaacgaagtgaaccacctctctctcctgaggaagaggttaagttcgaggcttcggattgcctgttccgtggagcattgatcagtgtacttgctgacaatatagtggacgtgtatatgcacatgccttcagggaaggacatgtgggatgcacttgaggccaagttcggagtttccgacgccggcagtgagctgtatgtcatggagcagttctatgactacaagatgtttgtggtaggtggcattattgccaaattgccaacttcttggtcggactttgccacttctctaaagcacaagagacaagagttcagtgtttctgatctcattagctctttgggtgttgaagagaacgcgagggcaaaggacaacagggacaaaaaggttgagggtggttctagtgccaatatggtacagaagaagaaccctcatgcatcccacaacaacaagaaattcaagcctgatgttaaacccatggctacaaccaattttaagaagaaaggcaagggaaaggcaaagggagactgctttgtgtgtggcaagtctgggtattgggccaaggactgtcctaagcgcaaagataggaagtctgccaacatggtcactagcgagggcagaggaacatcggggtacgattggtgggttgatactggtgctaatattcatgtcgggagaggttcctccttgttgatgggaaacgggtcacttacggctgttcatggtgttgatgaagcattgcattactttaagacctataaagctgaggtagaaaaccaacttgaaaggaaaatcaaacggttgaggtctaataggggtggagagtatttttccaatgagtttacatccttttgcgaggagtttggaattattcatgagaggacgcctccctattcaccccaatcaaatggggtagccgaaagaaagaaccgtactctaactgagatggtgaatgccatgttagacactacggactttccaaggaatggtgggcataaggaagtaacaccattcgagaaatgggaaaggaagaaattaaatctctcatacctacgaacatggggctgtttggctaaggtaaatgtacctatagccaaaaagcgtaaacttgtaccgaatactgttgattgtgtgttccttggttatgctattcacagcgtgggttatagattcttaatagtaaactctagagtacccaacatgcgtgttggtacaattattgagtccagggatgctacattctttgagaatgaatttcccatgaaaaatacacctagcacttctagtcaagaaactgtcatatcctatgagcactttgcaccgatagaacacaatgatcaaacgcctgagggaaatcgtgaggaggatagcattgtagatactcgtaggagtaagagacaaagggttgcaaaatcctttggggatgactgcattatatacctcgtggatgacactccaagaaccatagaagaggcatattcatctcctgacgctgactactggaaggaagcagtacacagtgagatggactcaattatgtctaatggtacttgggaagtcgttgagcatccatatgggtgcaagcctgtaggatgcaaatgggttttcaagaaaaagcttaggcctgatggtacaattgaaaagtacaaggcaaggcttgtggccaaggcctctcatggtcttctcgtccatcagatggacgttaagacagctttcctaaacggagagctggaggagatctatatggatcaaccagactgcctcaatgtgattgaggtggtcaaggactttctgtctaagagttttgaaatgaaggatttgggagaggctgatgttattcttaacattaagctactaagaggagatgagggtgggattacacttgtgcaatcccactatgtggacaaggttctgagtcgctttggatacagcgactgcatgccagatcctactccttatgatcccagcgtgctattaaggaaaaaccgaagaatagcaagggatcaactgagatactcccaaatcattggttcattgatgtacttggctagtacaacgaggcctgacatctcatttgctgatggcttataccttaatgtgatccaagtggcttttctaagcagagatgttgacctgaagaacatctcagaaggaacacacctatatgagttcgactgctag

SEQ ID NO: 86624 - DNA, 2442 bp, Oryza sativa
  Clone ID: PAT_MRT4530_85647C.1
atggaccttgcactccaggaattagctcgtcgaatattttgtggagtccagatcgcatttcaagagtggcctgaatcgagatttgggtccctgccgcatgcctcggcggtcgatagggcctctgtgccatgtgccatctcctgctccccatctctgccccttccacgctggctgtcctcgcctcctcctgatgttttcgtccgtccggacctttgcactgcccacctgcttctccccgaccccattctgtgcgcaaggtgcctccgaagctccgtccgcttgagaacctgcacgggtaggcgggcgatcaagtttttgggtagcgcttcaagcgcgactgctctcgttcttcgcggctactgctgctacatcggcgccttcaccaagatgtcaacggagattggagacaagaagatgaacgacatcaacggaggcaatactgcctcaaaatctagcggtgggacgttctcgggtgtgctcgccgacaatattgtggacgtgtatatgcacatgccttcagggaaggacatgtgggatgctcttaaggccaagttcggggctcatgagattcagatgttggcaaaggaacttgagaacaacaactgtgagttgccggacaagtttgtggcaggtgtcattattgccaaattgccaccttcttggacggactttggtacttctctaaaacacaagaggcaagagttcagtgttactgatcttattggctctttgggtgttgaggagaaggcgagggcaaaggacaaccggggcaaaaagatcgagggaggttctagcgccaatttggtgcagaagaagaaccctcacgcatcccacaacaacaacaagaaagtcaaacctgacgtcaaacccaaggctacaaccaattttaagaagaaaggcaagggaaaggcaaaaggaggttgctttgtgtgtggcaagtctgggtattgggccaaggattgtcctgagcgcaaggacaagaagtctggaaacatggttattagtgagggcggaggaacatcgaggtatggatgcaaatgggttttcaaggaaaagcttaggcctgatggtacaattgaaaagtacaaggcaaggcttgtggccaagggttatacccaaaaagaaggcgaggactttttcgacacttattcatcggttgctcgcttgaccacgattcgagtactacttgctctggcagcctctcatggtctactcgtccatcagatggatgttaagacagctttcctcaatggagagttggatgaggagatctatatggatcaaccagatgggtatgtactagaaggtcagaagggaatggtgtgcaagctgttgaagtccttgtatggtctcaaacaagcgcctaagcaatggcatgagaagtttgacaatacacttacatctgctggctttgttgtgaacgaagctgataaatgtgtatactatcgctatggtgggggagagggagtgatcttgtgtttatatgttgatgacatattgatctttgagaccagcctcaatgtgattgaggaggtcaaggactttctgtccaaaagctttgaaatgaaggattttgactgcaaggcagctcctactccttatgatcccagtgtgctattaaggaaaaaccgaagaatagcaagggatcaattgagatactctaagatcattggttcattgatgtacttagctagtgcaacgaggcctgacatctcatttgctgtgaacaagttgggccggtttgtttcaaatccgggagatgatcattggcatgctcttgaaagagtaatgcgctatctaaaagggataatgagctatgaaattcactacgtcgggtacccaaaagtgctggagggctatagtgagtcaaactggatatttgatgctgatgagataaaggccacaagtgggtatgtgttcacacttggagggggcgctgtttcctggaagtcttgcaagcagaccatcttaacgaggtcaacaatggaagcagaactcacagctttagatactgccacagttaaggccgaatggcttcgtgagctcctgatggacttgccggtggttgaaaaaccagtaccagcaatcctgatgaattgtgataatcaaacagtgattattaaagtgaacagttcgaaggacaacatgaagtcatccaggcatgttaaaagaagactgaagtgcctccgaagctccgtccgcttgagaacctgcacgggtaggcgggcgatcaagtttttgggtagcgcttcaagcgcgactgctctcgttcttcgcggctactgctgctacatcggcgccttcaccaagatgtcaacggagattggagacaagaagatgaacgacatcaacggaggcaatactgcctcaaaatccagcgggatggggggtgccaggcccaccccggcacccccgggtggcttcgccactggaggtggatga

SEQ ID NO: 86625 - DNA, 366 bp, Oryza sativa
  Clone ID: PAT_MRT4530_85648C.1
ttgagatcgatcaactttccagcgctagaggtcgtctcgatcactcagtgcagcaaactgacgcaactgggcatccggcctcaggggaagttgagggagatcaggggctttgtatgattttcttatctttttgattgtttttgtcttcttttttttttttttggtttttcttttctatatgtgcttgttttttgctatatttttttcttattttactctctcttttctacttttttctttctatttttctttctctctacttttttacttttttttactttctttttttattcatttattttttctcttttttttatcttttctctttcttttttttttttttcctttttttttattttttttttt

SEQ ID NO: 86626 - DNA, 1432 bp, Oryza sativa
  Clone ID: PAT_MRT4530_85649C.1
gcacgaggggaaacgttagcatcaataaagaattacaaatgaagatgaaactggcttgtctgacagagatcaaagactgtacttaacagcgccatcttaagcaaagatgaatcgctaatattaacctattctatacactgccaaatgtggcactatgctatggactacctatatatatatggtgcactaacctcttttctgtggtctacactagagccttgttccaggcattcctcagtcatacaggtgcatatatgggctaactatacgctattattgtaagttataaataggtgaaaagaaaacgatgaagtagtcatggcttccggagagctgacgcagctcccattattacagccattacaaccccgagtccggcaccaagtgatgcacctacggcagcagctgtaacagagccatctctcttctggggcttccgcttcccttgcagagatgctgctttctctctctccagctccagcgacaatctctcacgagaaagctcctcaaatgctggctcttcattgctgtgaattacttgatgtacaagttgacgaagggcagtgacaccctcaacatgcataacaatgtccttcctctgaaatggtgagagtgaaaagtttactggataaaaagcagctctgcctgaaggattctcgttcctcagactgccactagctgaactgatggggcgcaaactatttgtggcacttggcattagaaatggggaagagttaacaactttagtcatgtcaggagaggcttgataagcttccattgctgaagtgatcaatgcgttctgttcatgtgcactgacggagaatttattagttattgcaaggatccatggaatgccaagagccttggcttcatccaagagaagtgaaagcgctggctgtggttgagaagtgttggactggtgatactgaggaattcgatgagcaaggttatgcacaacaataactaagtcagtcttcctgctgagatcatgtatccctaactgcaattcttctttgaactgcctaacttctaaaggtagttcctgcaagttcactgttgccgaatctacgtagcacaaaccatttgaaactccttttccatgcaaatctacatgtatgcactcaagaactgctttgcttctttctttaaattgtcctaacaatgcttttagcaaggaagttttacctgctccctctagtccaagcaatcgcaccctcctggtcctcacatagacctctttacatatagttacaaaatcacttgtaccgtatataagaaattcattcaaacccttgcaacaacctttatcttcaaacaatgagtcaaatccataatctggatttgaccctgtacccgtggccacagaaaccataaaatcttcactgatataatttggaggctgctttagtggctgaccaactagaatgcgcat

SEQ ID NO: 86627 - DNA, 521 bp, Oryza sativa
  unsure (1)..(521): unsure at all n locations
  Clone ID: PAT_MRT4530_8564C.1
gcacgaggactacagaggcaaaactcaactcctgaaacaccctccatgcactcatccggccagccgcttcacttgaccatccattacatgacgcgcgctgtttactngttgttaccactgcccgagcatgtttagcagggactggcaccatcatgtgatccatgccgtgccgtcagttccatcattccataccatgccatgactagcagtaggaccatgccatcctcccggcatcaacatcacaatgttctgtgcgtgctgtctcaataagcaatgcctgtgagattgttctgttattggtgaagcactctcagtatctcctgagtcgtatcgtcttactttggatataagttattacaacatcatgcttagctctgatccatcaatggaatctaccaataaccacactagtgctcttcataccatcagatattttgcaggatttgcttttgtctactttgaggatgagcgtgatggtgatgaggccatacgagcccttgatggctatccttttggccctg

SEQ ID NO: 86628 - DNA, 3990 bp, Oryza sativa
  Clone ID: PAT_MRT4530_85650C.1
atgtctggagttgctgccgccgctactggcccgccgacaggagctggtgatacgccgccgccgacaggagctggatccggagctggtgcgccaggaggaggtgtcgtgaacgactacaacaacggaggcaattctgcctcaccatccagcggagggccattctcggggtataatcttctcctcctgctactgctgttagcgctattcctgttcctgttcccattgttagcgctatactatgtgcgctatgttcttgttcctgttctacataatgcctctagcatgttatcgcgttactgtgcttctatggtttcacggggcaaacgaagtgaaccacctctttctcctgaggaagaggctaagttcgaggcttcggattgcctgttccgtggagcattgatcagtgtactcgctgacaacatagtggacgtgtacatgcacatgccttctgggaaggacatgtgggatgcacttgaggccaagttcggagtttctgacgccggcagtgagctgtatgtcatggagcagttctatgactacaagatggtcgatgaccgttctgtagtagaacaagctcatgagattcagatgctggctaaggaacttgagaacaacaactgtgagttgccggacaagtttgtggcgggtggcattattgccaaactaccaccttcttggtcggactttgccacttctctaaagcacaagagacaagagttcagtgttcctgatctcattggctctttgggtgttgaggagaaggcgagggcaaaggacgtccggggcaaaagggttgagggaggttctagtgccaatatggtacagaagaagaaccctcatgcatcccacaacaataagaaagtcaagcctgatgtcaaacccaaggctgcaaccaattttaagaagaaaggcaagggaaaggcaaagggagactgctttgtgtgtggcaagtctgggcattgggccaaggactgtcctgagcgcaaagacaggaagtctgccaacatgatcattagcgagggcggaggaacatcggggacggtcgggagaggttccttcttgttgatgggaaacgggtcgcttgcggctgttcatggtattggtacggtcgatctgaagtttacttcgggaaagaccgtgcagctgaagaacgtgcagcatgtcccttcaataaagaagaatctagttagcggctctctattgtgtagagaaggttttagacttgtgtttgagtccaataaatgtgtcgtatctaaatatgggacttttgttggaaaaggttatgacagcggaggcttgttccgcttttctttgaatgacatgtgtaataatcataatgctgtgaaccatattagcgagaatgatgagtctaatgtgtggcattcgcgactctgtcatgtgaatttcggttgtatgacgcgcttagctaacatgagtttaattccaaaattcactttggtcaaaggttccaagtgccatacttgtgttcaatcgaaacaacctcgcaagcctcacaaggcatctgaggcgaggaatttggcacctctagaacttgttcattccgatttgtgcgaaatgaacggcgtgttgactaaagggggaaagaaatatttcatgacactgatagatgattgcactagattttgctatgtgtatctattgaaaacaaaggatgaggcattgcattactttaaaatctataaagctgaggtagaaaaccaacttgaaatgaaaatcaaacggttgaggtctgatagaggtggggagtatttttctaatgagtttgcatccttttgcgaagagtttggaattattcatgagatgacgcctccctattcaccccaatcaaatggggtggccgaaagaaagaaccgtactctaactgagatggtgaatgccatgttagatactgcggggctctccaaggaatggtggggtgaggcagttttgactgcgtgtcatgtcctgaataaaattccaatgaagcataaggaagtaacaccattcgaggaatgggaaaggaagaaattaaatctctcatacctacgaacatggggctgtttggccaaggtaaatgtacctatagccaaaaagcggaaacttggaccaaaaactgttgattgtgtgttccttggttatgctatccacagtgtgggttatagattcttaatagtaaactctggtgtacccgacatgcatgctggtacaattcttgagtccagagatgctacattctttgagaatgagtttcctatgaaatatacacctagcacttctagtaaagaaactgtcatgccccatgagcactttgcaccgatagaacacgatgatcaaacgcctgaggaaaatcctgaggaggacaacattgtagatactcgcaagagtaagagacaaagggttgcaaaatcctttggagatgactacattgtatacctcgtggatgacaccccaagaaccatagaagaggcatattcatctcctgacgctgactactggaaggaagcagtacgcagtgaaatggactcgattatgtctaatggtacttgggaagtcgttgagcgtccatatgggtgcaagcccgtaggatgcaaatgggttttcaagaaaaagcttaggcctgatggtacaatcgaaaagtacaaggcaaggcttgtggccaagggttatacccaaaaggaaggcgaggacttcttcaacacatactcaccagttgctcgcttgaccacgattcgagtactacttgctctggcagcctctcatggtcttctcgtccatcagatggacgttaagacagctttcctaaacggagagctggaggaggagatctatatggatcaaccagacgggtatgtactagaaggtcaggagggaatggtgtgtaaactattgaaatccttgtatggcctcaagcaagcacctaagcaatggcatgagaagtttgacaccacgcttacatctgcaggctttgttgtgaacgaagctgacaaatgtgtatactatcgctatggtgggggagaaggggtgatcttgtgcttgtatgtcgatgacatactgatctttgggaccagccttaatgtgattgaggaggtcaaagactatctgtccaagagttttgaaatgaaggatttgggagaggctgatgttattcttaacatcaaacttcaaagaggagatgagggtgggattacacttgtgcaatcccactatgtggacaaggttttgagtcgctttggatatagtgactgcaagccagctcctactccttatgatcccagcgtgctattaaggaaaaaccgaagaatagcaagggatcaactaagatactctcaaatcattggttcattgatgtacttggctagcgcaacgaggcctgacatctcatttgctgtaagcaagctgagccggtttgtctcaaatccgggagatgatcattggcaggctctggaaagagtaatgcgctatctaaagggcactatgagctatggaattcactataccgggtatccaaaagtactagaagggtatggtgactcaaactggatatctgatgctgatgagataaaagccacaagtggatatgtgttcacacttggaggtggcgctgtttcctggaagtcttgcaagcagaccatcttaacaaggtcaacaatggaagcagaacttacagcactagatactgcgacagttgaggccgagtggcttcgtgaactcctgatggatttgccggtggttgaaaaaccagtgccagctatcctaatgaactgcgataatcaaacagtgattattaaagtgaacagttcaaaggacaacatgaagtcatctagacacatcaagagaagactgaaatctgtcagaaagcagaaaaactccggagtgatagcattggactatgtccaaacggctagaaatctggcagatcagtttaccaaggggctaccacgtaatgtgatagacagtgcatcgagggaaatgggcttgatacccacctaa

SEQ ID NO: 86629 - DNA, 3456 bp, Oryza sativa
  Clone ID: PAT_MRT4530_85651C.1
gcctcctttgtgttttttactgtgttaccaataatttcagctgattttcacgtgtatcagtataaacgtcatgccaatcaacaacatgccaacattaatggccacctcagtttgctcattacatcaactggaaatatattttaaaaaatgtgataccattgctactgtttcagtgcaaaaggaagcgttgcgtttctaagattgttacacgtatggggaacaccagggctacaaaatttgtgacaattaactgtattgaagcttgctatgtgaatccgagaaaaagaatggacatactgtagttgacgtacccaatatgccagcgaaaggcccagcagatctcctatctcagggtaggtagccttcaaggtgatggcttctgactttcagctgtaaaatctgcacaaaatctgcttgcccactttgctatgatgatgttacaacaatcatatggcagtagagccgccagaaggtatacatctctaatcatgtgaagaatgtgacaacatctcttctgtatcccctaactatcaacatgcgtgggacgttctctacaagcagatccatgtactccatgtagaaatacgcagggtgatttaatggtggtggagggaggcttacgaggaccacagctgccattctggagtacctaagtattgtcgagttcagcttgaacattgtatagaggaatttctcaatcttctgttcattcacaactacttgctttccgtcctccattagtggatgtccttctctttgtgcagtttccttcatctcagagaggtatgtgctgatccttcgctgtgcacttgtgtaagcctcttgagaatcgtcctgtggagcaccactgctactgctctccatatgaggttcccatgacttcatagtcacgacgatgacctcagcatgcattcgaagatcatacaagaactttttgacgtcagccttcagctcctcagcatcagtatcctcctctgctatgcagaacacttggattttgcagctttcaaaggtctcttttgtgagcaggagctgagacagaagaagcatcaatcctccatctctcacaatccagtagaggtcaatagtgccgtactgtctctggtactcattaggccactcatcaaggcccttcacaatgacaacggctttgttagcaataatgcaatcatttattatgctaacaaatgttgacggtatctgtatcagattctcgcgacgccaaatctcagggtaccgcatcacaataatgttgggcttcaagttacctagacccatggtctgaacaatgctgcggaagccctcagacattgatggcgctacaataatctctgcaacaccctcacagcgtttgtactcaatgtaagtgtccagctgacgacaagcagtctttgcatcctcggccagttcatgataatcaccgtcaataatcgagacgaaaattgacataccacgccccttcttcttcatacagttggcaaaatctgcaagctttggatgacaaggtacattttctggaagtttaccccaaggacggcagaatatcagaggaatggggtaccaattcttaggatgcacttggtttgctcctaatgatctgagacttcgtagtgccaattgaaagtatgcactcttaaatccatctccccagtctccagccttaccttttaagctcacatagtaatagatgaggcttgcaagggcaagggagacaacagtaaaagaccaggatatcaaaaacatgatcacaacacaaagcaatgcaccaacaagtgataaactccaatggtgaaatttccaacgaggacgccaactaggagcatcaaggaggtcaaggagaaagcatgacaggttcacaccagcatagcacagaaggaaaaacattgtgatggtgggcgtaatcaaatccaagttgccaataaccacacagcagatacaaatgaaagctgtgaataaagtggctgagtgaggctcagccccttcagaaaccttgaagtaattaagaactggaagaatgtcatcatttgctattgctgccagtaatcttggagcccctgtcaaactctgcagtgctgcgcctaaagtagacaaaataataccaatataaatcactgctggagcaggccatgccactgtagcagtaagaagcctatcagttagaagctcttctcttgtggccaaggctccaaatagaaggacagagaacaggtacatggcagttgttgtaagagttgcagataatgttccaattggtattgaacgttgtgtgtccttcagtgaagccgatcggttcgaaccagccataattccagtcactgctgggaaaaagaggcctaccaaagcattgaaatcccaatatatggagccatttggatcaggaactccagcattgtttgtgcgttgatattctgagccccagttgtccttaaatgtggttatactcaacccagtaattccctttggagcattgtgccttggtgcaatgaaaacaccaagataaatgcacaacagtgaaaagaggactggtattaagaaggcaggtgcaaccttgttgatgattttgacaccgccaaacacaataaagcacagcagtatggttacaataacaccatatacttgaaggtcatgcaagctgggtgttgatatagttgctgtgctagctgttgcagtgccatttactaatgtattattgactactgtgacactctctttaaaaaaaccagcagaaggaactgcatccaaaaaggtttctacagctcctagcacatacatggatccagcaactgcatttccaaggaagaagcatagtccaatgctaactccaacttcaggaccaagcgcacgcccaatgagatagtatggcccaccacccttcattgctccattcgttgcaatggcacttaatgatattccagttaaaaatgtgcatgcaccacagaacgagactaaaacaagcgactgccatacacctgccatacctacaatccatgtaaaacggatataataaatgattcccaatatattctgcaagcatgggacaaagacacccatcatggtaccaaacttgggtccagtttcctttgggcgtccaatcgtaattgcaacatcctcaccgtccctaggactggaaggggcctgaatctgttctcctgtcatgctcttgaggcccaaaatatttacaagagagtcaaaaccaaaaagctcaagctttgaatccccttgtgaaacagtgtgatcttcttgcatgcttggatccaccgttagattccttggtggctggggcgtgatgccactgacggctgccacagcggtagaggaggaggagccgggctccatggaggtcatctggatgacggcgcgatcgctggagccgacggggcgatacctcctgccgttgggcggcgcgggcaccggcaccccgtcgtccgctgccccctcgatctccccgttctccat

SEQ ID NO: 86630 - DNA, 314 bp, Oryza sativa
  unsure (1)..(314): unsure at all n locations
  Clone ID: PAT_MRT4530_85652C.1
ctgggctgcaggattcggcacgaagacgacgaatcacganaggggagctcgttcttgatccatggcgggctcctcctccganctgatctaccgccgcggncacganncgcaaccggncgcgggtgacnttgacngctgcggcgtgatggccgccgccgggtactcatcatcggccaagccgccgcacaanccaccactcggcccgctgcggtatctgctcnccnancaacggctggtgttcgcgctcgtccgcatggncatcccgtcctggtcttcctcctggcggctccctcttntnngaacngangncccac

SEQ ID NO: 86631 - DNA, 489 bp, Oryza sativa
  Clone ID: PAT_MRT4530_85653C.1
ataggtattaagcactgtgaggctcacatggttagtaacaactaacagacttctaaaatgacacgcacagcacctatgattacatacaggccatctggccatgaataggaagctctaactctagatgcacatgcaaccaatcatagcacactctcgctcacacaaaatgcacgggacgtacatgatacacgaggttgctaacggtgagcttagctttagcacacgctaactgcataaggccatcatgcatttagccctgacctagcgcatggtgacggctagcacgccgaccgggccaatcttgactatggcatcggcgaacatactatggtaggaggaggccatattggagtatgtgaccacctgaacggtggagtacatggctgcatacatgacatcatcggacgtgagcacgctgaaggtgctcatgacccccgcggagaatccatccatccatgcgtaccgagagacagcagtcaatatctcgag

SEQ ID NO: 86632 - DNA, 598 bp, Oryza sativa
  Clone ID: PAT_MRT4530_85654C.1
tcatagtgtaaacgcgtcaccagcaacgaaggcgcgatcccatttttggcacaaacctttttccctcctaaggctcgcgcgtccccgcccaaccctaaccccttcaaatacccccacccgctccctccgcctcccaccaatccgcgcctcccgcatccggctctcactgacacctcgggcccacatggcagccacacgcaagccccgctcctcctcgtcggccgccgccgccgcgggcgtcgtcgaccaccaccgcttcctccgccccggcgccctcgcccgcctccgcgacgccaggctccggcgccggaaccccgccgtctcccgccccgcccctccctcgtcgccttcgccttcccccgccgcgccctcgtcgtctccccctcctgctgcggccggggacggcgagggcggcgcggtgatgccgtacttcgtgcccgtatcgaggctcctcggcccgcggtgcccccagcggaagaagctcgcggcggcgaagagggtgatgctcttcgcgccgccgccgccgagcccggacctgcccgtcgaggtggccatggagttcctcggctcgccggacatggtggtcgccgctcactag

SEQ ID NO: 86633 - DNA, 834 bp, Oryza sativa
  Clone ID: PAT_MRT4530_85655C.1
ggcgtcgtgcgtcgtgtgcctcggcgcgctcgaggcgcgtcaccgggtgcgcgagctcggcaactgcgcgcacgcgttccacaaggcgtgcatcgacaagtgggtcgacaagggccaggccacctgcccgctctgccgcgccgccctcctcccctccgccgacgacgccgacgccgccgccatcgccgccaccaccaggcaccacctcccctccttctgatccatgtcgccaagaacccatcttgcttagcacccaacacccccttccaccccaagagcaacaagggttccctcctcctttctccaccaatggatcaaatccaatcaaaatggaagaacacacaacacaagagaagagagatagagagagaaatcaatggaggaagaagatgagaggagagagagggggtgtgtgtggtggaggagtattattggtaggggaggcactaattatgaggaggacaaggatggctacctgcactgcattggatctggtgaatttcagccctagctagctatagatccaacatctcctcttttcccttctcttctcttctcttcacttcacttcacatcaactttttctttgcttttcttttttctactttactttcttcttttgttgccttcacctcctttttgaaattttgctttctttctctttaatttttctccctctttttccttcttttttttgagggtttcctctccccttgtcattaacttaatttgtaaggggggattaagagagagagatgtgtacatacctgcctccactttgacaaatattggaataataatttataatgatgatgatgatgatgataatatagt

SEQ ID NO: 86634 - DNA, 6291 bp, Oryza sativa
  Clone ID: PAT_MRT4530_85656C.1
atggtggtcagctacagctgcacggctggtaccaagctggcatggatattgtcgttgctgctcatcctggtcgcggcgacacaagtccatggcgtgtctcctggtgggtttttaaacatcgactgcggattgacaaatcgtagtacttataatgacaccgacacaactttgacgtacgtttctgacagagaatttgttgagggcggcaacggcaagagctacgatattatggcacaatacatcgcagatgctacaaatgaacaagaaaaaacgttgagaagcttccctgatggccaacggaactgttatacattaccaaccaacagtagcaagaattacctcatcagagccaccttcacatatgacaagtatgacggccttcacttgccaacgaagggcgctcagtgtgtctttagaatcctcatcggcgtcgccgactcagcaaccgtcaacttggccaactagggtgcagccgagacgttttataaagaggtgatcacagttgctccagacaaattcatatccgtctgtctgataaacttgggatcaggaactcccttcgtatctacattagacttgagggaattggatggtgcaatgttcccatttctgaatctttctgtttcaatcagccatttggctcgacaaagatatggctcggtcgatgattacatcacgagatatccaactgatcccttcgatcgtttctgggaggcagccctacgctacaaatttcccttcctcaacatgaccaccaaccaagacgtgacaaagcttcctggaaatgacgactttcaggtgccgatgcccatccttcagaaggcctcaaccataagcagcaatttctcagagtttaacgtcagcgtgatatttccggacaacatgaaaaacatcgacaacatcaacaacatcgactacaggagcttggagctgctaccaatcttccactttgccgatattggaggcaacaaccagaatagaacgtttgatatctataacgatggaaacctgatgtttcccaactacataccacccctgttccgagcggagagcacatatcagagtggtaagttcttgcgcaagaggggcctcaacttcaccctgcgcaagacgcccagctcggagctccagccgctcatcaacgcattcgaggtgtactcgcttgttcatacagacaacctcaccacttctccagacgacggaaaatcagcagaacaagaagattattctatttatgaagaggaagctccattacatatcgacatcaaacggttcacatatgcagagctgaagctcataactaacaacttccaatcaatcattggaaaaggaggttttggcactgtttatcatggcatactggaaaataacgatgaagtagctgttaaggtgcttgtggagacatctatagcagagtcaaaagacttcctccctgagaggaaatcttcagctgtcatggtcgggataacatatcaacgcagaagccgcacagggctgcaggatacggcgtcaggagatgcagcgcagcgcaccccgtcaatagttcacagagatgtgaagacacccaacatccttctggacaagaatctggtggccaagatatctgattttgggctttcacgggcttttaatgcagctcacacgcatatatctactgttgttgccggcacccttggttaccttgaccctgagtatcatgctactttccaacttaccgttaagacagacgtttacagttttggaattgtcctcttggagattgtcactggtcaacccccagtatttatggatccccaaaccgtccacttgccaaattgggtgcggcaaaagattgataagggaagcatccacgatgttgtggacaagaaactgttagatcaatacgatgccactcacctgcaaactgtgatagaccttgcaatgaactgccttgaaaacacatcaattgacaggccaagcatgactgaggttgtttctgtgcttaaggtgttgtttacggtggctatttcaagtgagaaacgatcggttacatcaacccctcaagagaagaacgtcatggatgcagacattccacggcagttccacttgatgatttctggagctacaacaacaagctacgacaacgagggcagttcctcacagtctggtcctaccgcggcggtgccgacgcatgtgccgccggcggcggcggcgacggcgacggctgaggtgtcagatcccggggttctgagttctgacatgagggctcgaacgctggccccgtcgtccaatgctaaaacagaaggatttgatggtgatcagctacagctgctcggctggtaccaagctgacatggatattgtcgttgctgctcatcctggtcgcggcgacacaagtccatggcgtgtctcctcctgtagcaagaagtatctcatcagagccaccttcacttatggaaactacgatgggctcaactcgtcagagaagggttctttgtttatctttggactccatatcggtgtcaacttctggacgacggtcagccgaaagattcggttgaccaatttcattaagagggaaggattcccaacggatcagtatgatcgcttctgggagggctgggtctttaccatgcacacctttccatgggttaataagagtagcaacggcaaggtggctgaacttcctaatattgacacctttgggcttcctccagccattctgggaagcgcttcaaccataaacggaaacttctcttggctcaacatcagcgttagtgccagtaactctctcgcaacagacctagagcttcttccagtctttcactttgttgaactcggcaataatggttcaaagagaatttttgacatctacaatgtcgatgaaccgcaagcactgttctccaacttcagcccaccgtcattcctgagctccatgttccacaactggttcttgcgcaaaggcagaagggcatattttcagcttcgcaagaccccagactcacagctaccacctcttattaacgcatatgaggtgtactcccgtgtccaggtggagaacttcaccactgcttcaagtgatgttgactccatgaaaacaatcaaagagaagtacatggtaatcaaaaactggaacggggatccatgctcaccaagagagtacatctggaatggtttgacttgcacctaccctaatggtggccagaacccaaggattgttgaaattgacttgtctaataaccagctcaatggatccatccctgattctattcttcaaagatacaaagccgggaagtcaagaaaatcagaagaagaagattatgatatgtatgaagaggagactcccctacatatcgacatcagaaggttcacatatgcagagctgaagctcataactaacaatttccaatcaatcattggaaaaggaggttttggtactgtttatcatggcatactggaaaataatgatgaagtagctgttaaggttcttgtggagacatccatagcagagtcaaaagactttctccctgagacacccaacatccttctggacaagaatctggtggccaagatatctgattttgggctttcacgggcttttaatgctgctcacacgcatatatctactgttgctgctggcactcttggttaccttgaccctgagtaccatgccactttccagcttactgttaagacagacgtttacagttttggaatcgtcctcttggagattgtgactggtcaacccccggtattcatggaccctcaaaccgtccacctgccaaattgggtgcgacaaaagattgctaatgggagcgttcacgatgttgtggacaagaagctgttggatcagtatgatgccacgcacctgcagactgtgatagacctcgccatgaactgcctcgaaaacgcatcgattgacaggccaagcatgaccgaggttgtttccgtgcttaaggcaggagccgccgcccggtgcggccaccgccacaggccccgtccctacctcggctgcccggtcaaggagctaactaatcccagcgacatgttcaggcaaattgaactcttctcgtcgatgcataggcatgtccatgcccagcctcccgctgggtttttaagcatcgactgcggatatacagatagtgctggctatgacgacaagaacacaatgttgccatatgtctctgacaaaggatatataaagggcggcaagaccttcagtattctgtcacagtacatgaaagaagctgcaaataagcaagaagaaaccctgagaagtttccctgatggccaacggaactgttatacattaccaaccaaccgtagcaagaagtatctcatcagagccaccttcacttacgggaactacgatggccgcaactcatcagagagtggttcaccgtttctctttggactccatatcggcatcaacttctggacaatggtgaacctgacaaaattgccttcatcgaacacaatctggaaagagctgatcatggttgctccaggcaattccgtatctgtttgtctgataaacaacgaattggggactcccttcatatcgacattggatttgaggcccttgcaagatacaatgtacccctttgtgaatgtttctgtggccgtcagttatttttctcggcaaagatatggacaagtcaatgatgtcatcactagatatccagaggatgtttacgaccggttttgggagggagcgttccacaccagatcctatccctggatcaaccttaacacaacacaagaagtgaaaaggctcccaggtgatgaaaagttcatggtgccgaataccatcctccagaaagcttcaaccataaacatcacattcagttggctcaacatcactgtgaggggcgccaacaacctgcttggcttgggggatctggagctgctaccggtctttcactttgctgagatagccagcaacacgaccaggttgttcgatatctacagcgacagcgaggagctgttcgccaacttctcaccatcccccttccaggtggacagcatgtaccagaatggccggttcttgcccggtgtgagctcaactttcacgttgcgcaagcagcccacatcacagccaccgctcatcaacgcgttcgaggtgtattcacttgtccggatagctactgcttctgatgatgagttgaagactataactaacaacttccagtctatcattggaaaaggaggatttggtatggtttatcatggcatattggacaatggagaggaagtggcagtcaaggtgcttcgggagacatctataacactatcaaaggacttcctccctgaggtgcaaatattgtcaaaagttcaacacaagaatctcgtcacgtttttaggatattgccacaacaagaaatgccttgcccttgtgtacgatttcatggctagaggaaacctacaagaagttttaagaggaggactggagtatctgcatgaatcatgcaccccgccaatagttcacagagatgtgaaaactgcaaacattctcctggataagaatcttgtggccatgatatctgactttggtctttcacgatcttacactccagcgcacacacacatatcaactgttgctgccggtactgttggctaccttgaccctgagtaccatgctactttccacctcactgtgaaagcagatgtctacagcttcggcattgtcctcttggagatcattactggccaaccttcagtgttagtggactcagaaccagtgcacctaccaaactgggtgcgccaaaagattgctgaagggagcattcatgatgctgtagacagtagactaaggcatcagtatgatgccacttccatacagagtgtcatagatcttgccatgagctgtgtggaaaacacatccactgataggccaagcatgactgacattgttatcaagctcaaagaatgcctaccggcaggtacaggtgaaatgcaactggtgtctaggtcctataaacagaaggaagccatggacgctgacatagcgaggcaattccagctgctgatttctggagtttcaatagaaagcattgagggcaactcaagtgggaccacagaattaagatatccttcgggaagtcaagcagctgcccaccggccatcgctccatgtccgtcgtctccaccgccagccctggtgcttcctcagcccccagcctggaatcccctcctcaggctacgtctgtaggagacgcggggagctaccggcggagcaagcgagggtcgccgattcgaagcaaacgccgtcgcagccaccgccgctgcggagctatcgccgcctcgcccggtga

SEQ ID NO: 86635 - DNA, 969 bp, Oryza sativa
  Clone ID: PAT_MRT4530_85657C.1
ttacttccctacatatcgacatcagaaggttcacatatgcagagctgaagctcataactaacaatttccaatcaatcattggaaaaggaggttttggtactgtttatcatggcatactggaaaataatgatgaagtagctgttaaggttcttgtggagacatccatagcagagtcaaaagactttctccctgaggtacaaaccttgtcaaaagttcatcacaagaatcttgtcgctttggtagggtattgccaaaacaagaagtgccttgcacttgtttatgatttcatgcctagaggaaatcttcattcaggagtgaaatcgatactaggaaagagctagggcataccttacgaagagaagaaacccgtatatccccgatccattccgcaccaatcccggagagggaggagagagaagcttcagcggcggtgccgacgcatgtgccgccggcggcggcggcgacggcgacggctgaggtgtcagatcccggggttctgagttctgacatgagggctcgaacgtgttctgggccaagcgcgtgcatacgtgatcgctcacagacgcgatcgttgaagccttcctctaatccaatccgagctacttcgtatatgattggcatgcacacttgactctgattgcgaccgggaaacgcatcgaactggtcgtgcaaccaaacattgccgtcgttccgcttgctctccaaattagccacttccgcggcatccaaccaactaagcgcgtatattgtataatctctgaagaacgtttcctcgaagtcgaagccaaataaccaatcagaacttgcatcccgtggtctcctgccgctgacgcacgtacggatgatcttagcgcatatttcgccataggataatcgacgatgccggcccgcggttgttttgtcagaattcgacatgcgaccaaacaaagcaaacagtgcacgtttgaaaaaactgtatgcagacacctg

SEQ ID NO: 86636 - DNA, 474 bp, Oryza sativa
  Clone ID: PAT_MRT4530_85658C.1
gaaaaaacagcacttcaaatcattcattcatttaaattttatattaggcactaaagatcccatcaattgctgtagagacttacataacagtgagggaatttacttgatagtctggaatggtgcctgtcaggttgttgtgtgataaatccaatttcttcagtgatgacattttcatgaatgatatttctaactctccttgcagaccgctgccagatagatttatttcaacaatccttgggttctggccaccattagggtaggtgcaagtcaaaccattccagatgtactctcttggtgagcatggatccccgttccagtttttgattaccatgtacttctctttgattgttttcatggagtcaacatcacttgaagcagtggtgaagttctccacctggacacgggagtacacctcatatgcgttaataagaggtggtagctgtgagtctggggtcttgcgaagctgaaaatatg

SEQ ID NO: 86637 - DNA, 1055 bp, Oryza sativa
  Clone ID: PAT_MRT4530_85659C.1
tcagtattcctctttcttggtaacatgttcttcctgcggaagtgagacgaactgcacgatgttttgaaccactgaggcttcgactctgaactttgaggcaatcttgtccacgctcattgggccagggtggttactggactttccttggtacagttggatgatttcatggacatgagcgacgctaatggttcctggaggtagttgtctgtgtccgccttccccgggttcaggtctggatgttctaacccttgggagtggcctgttgtactgatctacgacgaaagcttcacccatttctggctttcctccaggctttgtagtgattctcccaaccatgtgcttaagcatctcatcataacttggatcacgctccttaagtacaccaggggcatcttttggttgtgttgtgacatcatcctggaagacacggagacgatcctgtgccgccgcgccgccagcgcccgccggcgacggcggtgcaggcggaaggtgatgaggacgagggggcgccggggtgggtggggtcctcacgcgccccgcggcgccgcgcagggtctggcccatgtggctccggcccgccgccgacgacgacgaggaggagaggcgaggaggtgggggatgacacgaggcgccgcggaggtggccacgcgtgttggggggaggcgagaacttcgtcggttgctgcgatggtgggagacgggctggattttcggcccaaacgggtggtggcggggcatataaattttcctaggggacggtggctaagagtgacatggcggccgcggagaggggcgcgccgtgatatttttgcaagcggccccttctcgccctacgctagggcgatttatcaccgcgaggagaccactgcaaaatttctcgacgccccctcccggccaggggaccggccattccccgcccaaggggagggtgatttgtcaaccccccctcccggcacctataaaactagggttgtcaacgagccgagctcgagcgagctcgtctgcctaggctcgagctcaatacaagctcgagtcgagcttgagccgagcctataa

SEQ ID NO: 86638 - DNA, 936 bp, Oryza sativa
  Clone ID: PAT_MRT4530_8565C.1
atggccgaggtcgaaaacaccacgataacaacagacgacgacgagattcacgttcccccggttctcggagaaatcaaggacattggcatagatccagagatcagtatggctaaagaggacaaggagaagacaacattcatcatgcctttcgatgttttttgttataccaagatgcccttcgagctaatcagtgtaggcaacatgtaccagcgcgagattcaaggggctcttggtgacctgatcggccgaaatgtggtggcctacgtcgacgacgtcgtggtcaaaacaaagacaagcgacaagctgattgacgacatgagggaaacattcaacaatctccgacgacatcgactgaaattaaatccggagaagtggacgtttttagtaccatcagggaagctgcttagtttccttgtctctaagcgaggtattaaggcaaacctagagaagatcaaggcaatcgagaacatgaattcgcccacaagactcaaggagccaatggaagagttatttccttatattgccgccacaccctattctgttagcactgtcatcgttgtcgagagggataaagcacaacacccggtgtactatgtcaacgaggccctccatgacgccaaggtaaatgcaaatgatttgttttatgggatagctggttacatcgattctggttggaggacggatccaatggaacatatggcatttcgcgatgacgaacagttcctcttggacgagatcaatgagagtaggcgtcaatactgggtggatgaggagggaaacgaggacccaaaccaatacatgaatgaggagaggagcgaagaagtagacgaggagggaaacgaggatgagcaacaggacaaccaatcaaacattggatcgaagagggtacgcggacaatggggtctcgcaaggaaggtcgaggggagacgattataa

SEQ ID NO: 86639 - DNA, 458 bp, Oryza sativa
  Clone ID: PAT_MRT4530_85660C.1
tttgttttttttttttttttttttttttttttttttttttttttttttttttttttttttttttttttttttttaaccaaaaaaaacccattttatttttttaaaaaggccatcgccaagaaactaaaaaagggaaacaaagggtgcaactaaaccccgaccacgagactttttcgggggcccgggcccctaataaatttaactggaaacccccacaagccaaagttgggggcagatttgaacactcacacaatttttgaaaaaaatacccaggggttgccccgacccatccttgggggggtttatttattatgaaccccatggcgaccctgggttccaacttggtaaaaaagggagatggcccgagagatggcccgcccgcggcaaggaaagggtagctaggggtaggggcaggcgagggtggccttttagaacaagggggcctgtttatggggggg

SEQ ID NO: 86640 - DNA, 549 bp, Oryza sativa
  Clone ID: PAT_MRT4530_85661C.1
tgatttccctacatatcgacatcagaaggttcacatatgcagagctgaagctcataactaacaatttccaatcaatcattggaaaaggaggttttggtactgtttatcatggcatactggaaaataatgatgaagtagctgttaaggttcttgtggagacatccatagcagagtcaaaagactttctccctgaggtacaaaccttgtcaaaagttcatcacaagaatcttgtcgctttggtagggtattgccaaaacaagaagtgccttgcacttgtttatgatttcatgcctagaggaaatcttcaacagcttttaagaggaggatatgacagtttgaattgggaagagcgacttcacattgcacttgatgctgcacaaggtctggaataccttcatgaatcatgcaccccatcaatagttcacagagatgtgaagacacccaacatccttctggacaagaatttggtggccagatatctgatttgggctctcacggcttttaatgctgttacacccatatatctactggtgctgctggcactctggt

SEQ ID NO: 86641 - DNA, 729 bp, Oryza sativa
  Clone ID: PAT_MRT4530_85662C.1
cctatacctcccctcggcggcgaggcggcggagctccggcgagcctggagcacgtcggggtttcccctcccgcggcctcgccgtatcggatcgccggcgtatggcctacgtctacctagagttcagatactatgcgaggaattgagagacagccgagcttcagcacaaataaaaatggagcatcttccatatcccaacgaccctgatgtagcctgcaagagactgcatatctcttctgaaactttgaaaatataaaaatatattgcagaataagagctttgctgtgatgactaatcttctctagttggtggtcccatgtggtcagaggtgtctctaaggaagctaagaaagagctgaactctgtgattatcttagtggcctgggaaatttggaaacaccggaatgactgcatcttcaacaatgccacacctagtactgctgccgtattggatgctttggcaagggagagtttattattgtgtactgctggggcaagagctcttcatgaactcttggcccggtcgctctccacctaggagcttagctcctgcgggagttgttgcgcatcgcctcggcgatggttttgggtttttctcttcttttttcagagtgttcctttgtgaagcactctgctgtacataccttttcttctccttaatgaaatgaaacgcatggctcttgcgttttttgagaaaaaaaatatctttcatccatacaatatgttatatt

SEQ ID NO: 86642 - DNA, 237 bp, Oryza sativa
  Clone ID: PAT_MRT4530_85663C.1
atggacgacgagcccatcaacgcgcacaagctcctcaaggagcagttcgtcagcaacttgacggggtcttccctgctggagatcgccgcgctctccaccgtggktccgatattgcctctggttttaatggacaaatcggacgtctggcatttctcagaacatcggacggtgtatttgttacaaaatgtttcagatgtttcatccatcaaggaaaaatgtttcatcgcttcaacataa

SEQ ID NO: 86643 - DNA, 518 bp, Oryza sativa
  Clone ID: PAT_MRT4530_85664C.1
ggttgatctcacagttggattcactgcagaaaacaagacgaataggagcagaggaaccactgaactgaaggggctcatgtcgatcatctttatagtgcttagcattgttgccctagagaagtttcagagcttgagctgtgaaaatatgtgggagaaccggagaagcattgcaaatgagtacaatgggttttcatccatatctaggtcatggtcttgctgctttataagcatctggagtctggacagggccacaggggccactgggaaatgtaaaagtcagtgattgtcaatactgcaagaaaattgtcaaggtttactgcaagactacttacagcgatgagggttggtatcaggtatgtcacttcaatcagttccactattaattttacatgtgaaccaaaactttgctctctctttccacctggcttccattctttcaatcaccatcgttgactgactgggcaatatatggctctatattggaagcatcttctcacctttattcaacattaaagtag

SEQ ID NO: 86644 - DNA, 370 bp, Oryza sativa
  Clone ID: PAT_MRT4530_85665C.1
ggggaggaaaattttaaaaaattttccttcgaaaatgggcagccggtccaaaaaccccaaaaaatttggtatagggaccccgtttatttaacttcccaggggaaaaaaaaaaaaggggtggaaaccccccaaaaccccccaaaatttaaatttaagccccccccccaaaaaagggggggccggggccctcccgggaaaaaaggaaccgtaacttaaaaattaggcccccgagccggggggggccaatgggttggggacgggcccaagataaagcttcttgaattttaaaaaaaaccaaaatccaaggggggaaaggtttggccccccccccaaaatggttaaaaaaacaatttccccccttgggggggga

SEQ ID NO: 86645 - DNA, 679 bp, Oryza sativa
  Clone ID: PAT_MRT4530_85666C.1
gtacaatatagacaatgtacagtgcaccagggaggatgaccgcgaacggtgtgagctcgatatccaagggcggggctgtaatgaggaggtatacccgtggaccatgacggaacggtgtgtgcggcggatgcaggcaaggagggaatcgcgcagctggtcaaggctacagccatcctgggtgttctttgtgcagcacctctatatatattctttctagaacaagggcaatttacagctttggtccattagagggaaaaaggtgatcaagaagaaagcgggcagtatttcctggacacttcaaaatgatagggaaaattagaactgagaggggcaagggatttctatcattgttctgcttgggaacaaaactgatcttgttgaccagagtaaattgaacagaaaacacataactacatggtcttccctgttgaagcacatcttccatgggtctgtaacagctcagcctactcaagtagacgatgacaagccacgagagtttctagagcccatgtgtgaaacatcaagtgcttcaagttttaagctgcagcagcttttgcaccactgcaccaacctgtttgtagcatttagacatcacttgcttggatgccatcctcacactgttgtatatatcagattatttttataaaaccattaaattccatttaaaaaaaaaaaaaaa

SEQ ID NO: 86646 - DNA, 2898 bp, Oryza sativa
  Clone ID: PAT_MRT4530_85667C.1
atggctcttcttggcaagactagttgcaaggctgccgtgttcttggcagctctagtggtcatggctactgctttttcatcctctcatgctgcccaaggacaagacgggcgggcgatcaggtttttggggagcgcaaggcgcgactactcactgttcgtcaacatctacttcatcttcaccaacatgtcgaacactggagacaaggagaaggagactccctgcttctatgtttcacggggcaaacgaagtgaaccacctctttctcctgaggaagaggctaagttcgaggcttcggattgcctgtttcgtggagcattgatcagtgtactcgctgacaacatagtggacgtgtacatgcacatgccttctgggaaggacatgtgggatgcacttgaggccaagttcggaatttctgacgccggcagtgagctgtatgttatggagcagttctatgattacaagatggtcgatgaccgttctgtagttgaacaagctcatgagattcagatgctggctaaggaacttgagaacaacaactgtgagttgccggacaagtttgtggcaggtgacattattgccaaactaccaccttcttggtcggactttgccacttctctaaagcacaagagacaagagttcagtgttcctgatctcattggctctttgggtgttgaggagaaggcgagggcaaaggacgtccggggcaaaaaggttgagggaggttctagtgccaatatggtacagaagaagaaccctcatgcatcccacaacaacaagaaagtcaagcctgatgtcaaacccaaggctgcaaccaattttaagaagaaaagcaagggaaaggcaaagggagactgctttgtgtgtggcaagtctgggcattgggccaaggactgtcctgagcgcaaagacaggaagtctgccaacatgatcattagcgagggcggaggaacatcggggtacggtcgggagaggttcctccttgttgatgggaaacgggtcgcttgcggctgttcatgtgtgggttatagattcttaatagtaaactctggagtacccgacatgcatgttggtacaattcttgagtccagagatgctacattctttgagaatgaatttcctatgaaatatacacctagcacttctagtaaagaaactgtcatgccccatgagcactttacaccgatagaacataatgatcaaacgcctgaggaaaatcctgaggaggacaacattgtagatactcgcaagagtaagagacaaagggttgtaaaatcctttggagatgactacattgtatacctcgtggatgacaccccaagaaccatagaagaggcatattcatctcctgacgctgactactggaaggaagcagtacgcagtgaaatggactcgattatgtctaatggtacttgggaaatcgttgagcgtccatatgggtgcaagcccgtaggatgcaaatgggttttcaagaaaaagcttaggcctgatggtacaatcgaaaagtacaaggcaaggcttgtggccaagggttatacccaaaaggaaggcgaggacttcttcgacacatactcaccagttgctcgcttgaccacgattcgagtactacttgctctggcagcctctcatggtcttctcgtccatcagatggacgttaagacagctttcctaaacggagagctggaggaggagatctatatggatcaaccagacgggtatgtactagaaggtcaggagggaatggtgtgtaaactattgaaatccttatatggcctcaagcaagcacctaagcaatggcatgagaagtttgacaccacgcttacatctgcaggctttgttgtgaacgaagctgacaaatgtgtatactatcgctatggtgggggagaaggggtgatcttgtgcttatatgtcgatgacatactgatctttgggaccagccttaatgtgattgaggaggtcaaagactatctgtccaagagttttgaaatgaaggatttgggagaggctgatgttattcttaacatcaaactacaaagaggagatgagggtgggattacacttgtgcaatcccactatgtggacaaggttttgagtcgctttggatatagtgactgcaagccagctcctactccttatgatcccagcgtgctattaaggaaaaaccgaagaatagcaagggatcagctgagatactctcaaatcattggttcattgatgtacttggctagcgcaacgaggcctgacatctcatttgctgtaagcaagctgagccggtttgtctcaaatccgggagatgatcattggcaggctctggaaagagtaatgcgctatctaaagggtactatgagctatggaattcactataccgggtatccaaaagtactagaagggtatagtgactcaaactggatatctgatgctgatgagataaaagccacaagtggatatgtgttcacacttggaggtggcgctgtttcctggaagtcttgcaagcagaccatcttaacgaggtcaacaatggaagcagaacttacagcactagatactgcgatagttgaggccgagtggcttcgtgaactcctgatggatttgccggtggttgaaaaaccagtgccagctatcctaatgaactgcgataatcaaacagtgattattaaagtgaacagttcaaaggacaacatgaagtttttggggagcgcaaggcgcgactactcactgttcgtcaacatctacttcatcttcaccaacatgtcgaacactggagacaaggagaaggagactcccgtcaacaccaacggaggcaatactgcctcaaactccagcggaggaccattcttgggctttgcctccacggcggttaaacaatgcaatgcgtgcgtcgagtgtggggagtcgaggtag

SEQ ID NO: 86647 - DNA, 624 bp, Oryza sativa
  Clone ID: PAT_MRT4530_85668C.1
atgggaacaagaatagcgctaacaacagtaggcaggaggagaagagtataccccgagaatggccctccgctggatggtgaggcagaattgcctccgttgttgttgtcgttcacggcacctcctggcgcaccagctccggatccagctcctgtcggcggcgtaccacctccgccagcagtagcggcggcaactccagacatggcgatgagcagtcgtgcgggaggcactccccaaaaacctgatcacccgcctacccggtgcagatctcaggcgaagttcattaggatagctggcactggtttttcaaccaccggcaaatccatcaggagttcacgaagccactcggcctcaactgtcgcagtatctagtgctatggtctgcttgcaagacttccaggaaacagcgccacctccaagtgtgaacacttatccacttgtggcttttatctcatcagcattagatatccagtttgagtcactatacccttctagtacttttggatacccgattccgtcgtttccggagagtccgttttcgcaggagaagagtttgaagagttccaaggccagcaaggcaagtcacacagatcccaaacaaccctttgagcatgttgatcctatttaa

SEQ ID NO: 86648 - DNA, 4950 bp, Oryza sativa
  Clone ID: PAT_MRT4530_85669C.1
ttactgtggcaactggtggatatcactcctgcgatatatggaaaccgctaatccgatcagatctctctcacttgctttccatctctggtgttcttcctcctccgcgcgtctgtgctgcctctgttctgcctccccacttctgatcgcttgcgtgcacgagagatcggaacgagcagggcctccggaaccacaccttcgcttgagatctgcatcgggtaggcggatgatcaggtttttggggagtgcttccacacgactgctctcgtcgtccaccatgtctgcacctggagccactgccgacgcacctggagccactgccgtccctggagatggcacgccgggagccggagccgctgcgaacgtcaacatcaacgtaggcagtcctacctcacaatccagcggagggacattctcgggagatgctacattctttgagaatgaatttcccatgaaatatacacctagcacttctagtcaagaaactgtcataccccatgagcactttgcaccgatagaacacaatgatcaaacgcctgagggaaatcctcaggaggacacaattgtagatactcgtaagaggcctccggaaccacaccttcgcctgagatctgcaccgggtagacgggtgatcaggtttttggggagtgcttccgcacgactgctctcgacttttgctctgttcgtcatcgtctcgtcgtccaccatgtctgcacctggagccgctgccgccgcacctggagccgccgccgccgctggcgccgctgccgccgtcctagagatagcacgccaggagccggagccgctgcgaacgtcaacgtcaacagaggcagttctgcctcacaatctagcggagggccattctcggggtatatctttctcctgctgttaactcattcgttcatacctctgttagtcatgttagtcgcaattctattgcgttcttggtatgtgcatgatgcttattataccttaagcatgctcctggttatgctacatttcatcactagatcaccccacattgttcatgccatgattattatcttaacattttggattaaaatatgccgatatatgactatatttccaacaatccaaaaacctgatgggtcattttcggtagttggctttgctgctacactgaaaccacatgcatttgatggttctaactataagaggtggaaagcacgtgcactattgtggttgacagcgatgcaatgcttctatgtttcatggggcaaacgaagtgaaccacctctctctcctaaggaagatgttaagtttgaagcttcaaattgcctgttccgtggagcattgatcagtgtactcgctgacaacatagtggacgtgtacattcacatgccttccgggaaggacatgtgggatgcacttgaggccaagttcggagtttccgacgccggcagtgagctatatgtcatggagcagttctatgactacaagatggttgatgaccgttctgtagtagaacaagctcatgagattcagatgctggctaaggaacttgagaacaacaactgtgagttgccagacaagtttgtggcgggtggcattattgccaagttgccaccttcttggtcagactttgccacttctctaaagcacaaacaagagtttagtgtttctgatctcattggctctttgggtgttgaggagaaggcgagggcaaaggacaaccggggcaaaaaggttgagggaggttctagtgccaatatggtacagaagaagaaccctcatgcatcccacaacaacaagaaagtcaagcttgatggcaaacccaaggctacaaccaattttaagaagaaaggcaagggaaaggcaaaggaagactgctttgtgtgtggcaagtctgggcattgggccaaggactgtcctgagcgcaaagaaaggaagtctgccaacatggttattagcgagggcggagaaacatcggggtaaggtaaaatattacctacagttctctctgtttttcactcacctgattggtgggttgatactggtgctaatattcatgtatgtgatgacgggagaggttcctccttgttgatgggaaacgggtcgcttgcggctgttcatggtgttggtacggtcgatctgaagtttacttcgggaaagaccgtgcaactgaagaacgtgcagcatgtcgcttcaacaaagaagaatcttgttagcggctctctattgtgtagagaaggttttagagttgttttttgaatcctataaatgtgtcgtatctaaatatggaacttttattggaaaaggttatgacagcagaggcttgttccacttttctttggatgatatgtgtaataatcataatgttgtgaaccatattagcgagaatgatgagtctaatgtgtggcattcgcgactctgtcatgtgaatttcggttgtacgacgcgcttagctaacatgagtttaattccaaaattcactttggtcaaagtttctaagtgccatacttgtgttcaatcgaaacaacctcgcaagcctcacaaggcatttgaggcgaggaatttggcacttctagaacttgttcattccgatttgtgcgaaatgaacggcgtgttgactaaagggggaaagaaatatttcatgacactgatagatgattgcactagattttgttatgtgtatctattgaaaacaaaggatgaagcattgcattactttaagacctataaagctgaagtagaaaaccaacttgaaaggaaatcaaacggttgaggtctgatagaggtggggagtatttttccaatgagtttgcatccttttgcgaagagtttggaattatccatgagaggacgcctccctatccaccccaatcaaatggggtggccgaaagaaagaactgtactctaactgagatggtgaatgccatgttagacactgcggagctttccaaggaatggtggggtgaggcagttttgactgcgtgttatatcctgaataaaattccaatgaagtataaggaagtgacaccattcgaggaatgggaaaggaaaaaattaaatctctcatacctacgaacatggggctgtttggccaaggtaagtgtacctatagccaaaaagcgaaaacttagaccaaatactgttgattgtatgttccttggttatgctatttacagtgtgggttatagattcttaatagtaaactctggagtacctgacatgcgtgttggtacaattattgagtccagagatgctatattctttgataatgaatttcccatgaaacatacacctagcacttctagtcaagaaactgtcataccccatgagcactttgcaccgatagaacacaatgatcaaacgcctgagggaaatcctgaggacaacattgtagatactcttaagagtaagagacaaagggttgcaaaatcctttggagatgactatattgtatacctcgtggataacaccccaagaaccatagaagaggcatatttatctcctgacgctgactactggaaggaagcagtacgcagtgagatggactcgattatgtctaatgatacttgggaagtcgttgagtatccatatgggtgcaagcctgtaggatgtaaatgggttttcaagaaaaagcttaggcctgatggtacaattgaaaagtacaaggtaaggcttgtggccaaggattatacccaaaaggaaggcgaggattttttcgacacatactcactagttgctcgcttgaccacgattcgattactacttgctctggcagcctctcatggtcttctcgtccatcaaatggacgttaagacagctttcctaaacggagagctggaggaggagatctatatggatcaaccagacgggtatgtactagaaggtcaggagggaatggtgtgtaaactgttcaaatccttgtatggccttaagcaagcacctaaacaatggcatgagaagtttgacactacacttacatctgcaggctttgttgataacgaagctgacaaatgtgtgtactatcgtcatggtgggggagaaggagtgatcttgtgcttatatgtcgatgacatattgatcttttggaccagcctcaatgtgattgaggaggtcaaggactatctgtccaagagttttgaaatgaaggatttgggagaggctgatgttattcttaacattaagctaccaagaggatatgagggtgggattacacttgtgcaatcccactatgtggacaaggttttgactcctactccttatgatcccagcgtgctattaaggaaaaaccgaagaatagcaagggatcaactgagatactctcaaatcattggttcattgatgtacttggctagtgcaacgaggcctaacatctcatttgctgtaagcaagctgagccggtttgtctcaaatccgggagatgatcattggcaggctctggaaagagtaatgcgctatttaaagggcactatgagctatggaattcactataccgggtacccaaaagtactagaagggtatagtgactcaaactggatatctgatgctgatgagataaaagccacaagtggatatgtgttcacacttggaggtggcgctgtttcctagaagtcttacaagcagaccatcttaacgaggtcaacaatggaagcagaactcacagcactagatactgcgacagttgaggccgagtggcttcgtgaactcctgatggatttgccggtggttgaaaaaccagtgtcagctatcctaatgaactgtgataatcaaatagtgattattacagtgaacagttcaaaggacaacatgaagtcatctaggcatatcaagagaagactgaaatctgtcagaaagtagaaaaactccggagtgatagcattggactatgtccaaacggctaataatctggcagatcagtttaccaaggggctaccacgtaatgtgatagacagtgcatcgaggaaaatgggcttgatacccacc

SEQ ID NO: 86649 - DNA, 411 bp, Oryza sativa
  Clone ID: PAT_MRT4530_8566C.1
atggaggtcgagggaatagtgaagctccgaccgctatgtcgtcagcgagttgaggtggtggctgacgtaagattgggcggcagaggaggaaggcaaggcacggcgtcggtggagtgggggcgaagagaacagcgccggcttgattccttagcggcgaggtttgcggcggcgtgcgccgtgcacggcacgcgcactgagaggaaggaggcggctgggttgatgttacaaaggaacggcggcaaacttcgggtcgacggctgcgacggtgctccggcggtcttcggcggcggcgaaggggcggacgaggacggcgacgacttggcaaccacgacggcggtcttcccgagcgacggcgacgtctggaacggcggcggcgcacggctggagcgacggcggcgacggcggcgctag

SEQ ID NO: 86650 - DNA, 3513 bp, Oryza sativa
  Clone ID: PAT_MRT4530_85670C.1
atgtcggtggtggagcacggcacatcggccatggtgctcccagtcccatatatgtcagtctcagggacgtctgcggcgccggaggaggaaaaggacgacccctgcagtgccggaggaagacgcgggtcgctgctcaccaggcaaaaggagatgcgatatgatgttcgtcgaattgagccgacggagagcttgaaagacacggctgctcgtggagccaagccgcacgggcgggcgatcaggtttttggggagcgcaaggcgcgactactcactgttcgtcaacatctacttcatcttcaccaacatgtcgaacactggagacaaggagaaggagactcccgtcaacaccaacggaggcaatactgcctcaaactccagcggaggaccattcttggggtataaccttattacattatttcaattagaatgcttctatgtttcacggggcaaacgaagtgaaccacctctttctcctgaggaagaggctaagttcgaggcttcggattgcctgttccgtggagcattgatcagtgtactcgctgacaacatagtggacgtgtacatgcacatgccttctgggaaggacatgtgggatgcacttgaggccaagttcggagtttctgacgccggcagtgagctgtatgttatggagcagttctatgactacaatatggtcgatgaccgttctgtagttgaacaagctcatgagattcagatgctggctaaggaacttgagaacaacaactgtgagttgccggacaagtttgtggcaggtggcattattgccaaactaccaccttcttggtcggactttgccacttctctaaagcacaagagacaagagttcagtgttcctgatctcattggctctttgggtgttgaggagaaggcgagggcaaaggacgtccggggcaaaaaggttgagggaggttctagtgccaatatggtacagaagaagaaccctcatgcatcccacaacaacaagaaagtcaagcctgatgtcaaacccaaggctgcaaccaattttaagaagaaaagcaagggaaaggcaaagggagactgctttgtgtgtggcaagtctgggcattggcccaaggactgtcctgagcgcaaagacaagaagtctgccaacatgatcattagcgagggcggaggaacatcgggagatgctacattctttgagaatgaatttcctatgaaatatacacctagcacttctagtaaagaaactgtcatgccccatgagcactttgcaccgatagaacacaatgatcaaacgcctgaggaaaatcctgaggaggacaacattgtagatactcgcaagagtaagagacaaagggttgcaaaatcctttggagatgactacattgtatacctagtggatgacaccccaagaaccatagaagaggcatattcatctcctgacgctgactactggaaggaagcagtacgcagtgaaatggactcgattatgtctaatggtacttgggaagttgttgagcgtccatatgggtgcaagcccgtaggatgcaaatgggttttcaagaaaaagcttaggcctgatggtacaatcgaaaagtacaaggcaaggcttgtggccaagggttatacccaaaaggaaggcgaggacttcttcgacacatactcaccagttgctcgcttgaccacgattcgagtactacttgctctggcagcctctcatggtcttctcgtccatcagatggacgttaagacagctttcataaacggagagctggaggaggagatctatatggatcaaccagacgggtatgtactagaaggtcaggagggaatggtgtgtaaactattgaaatccttgtatggcctcaagcaagcacctaagcaatggcatgagaagtttgacaccacgcttacatctgcaggctttgttgtgaacgaagctgacaaatgtgtatactatcgctatggtgggggagaaggggtgatcttgtgcttatatgtcgatgacatactgatctttgggaccagccttaatgtgattgaggaggtcaaagactatctgtccaagagttttgaaatgaaagatttgggagaggctgatgttattcttaacatcaaactacaaagaggagatgagggtgggattacacttgtgcaatcccactatgtggacaaggttttgagtcgctttggatatagtgactgcaagccagctcctactccttatgatcccagcgtgctattaaggaaaaaccgaagaatagcaagggatcagctgagatactctcaaatcattggttcattgatgtacttggctaacgcaacgaggcctgacatctcatttgctgtaagcaagctgagccggtttgtctcaaatccgggagatgatcattggcaggctctggaaagagtaatgcgctatctaaagggtactatgagctatggaattcactataccgggtatccaaaagtactagaagggtatagtgactcaaactggatatctgatgctgatgagataaaagccacaagtggatatgtgttcacacttggaggtggcgctgtttcctggaagtcttgcaagcagaccatcttaacgaggtcaacaatggaagcagaacttacagcactagatactgcgatagttgaggccgagtggcttcgtgaactcctgatggatttgccggtggttgaaaaaccagtgccagctatcctaatgaactgcgataatcaaacagtgattattaaagtgaacagttcaaaggacaacatgaagtcatctagacacatcaagagaagactgaaatctgtcagaaagcagaaaaactccggagtgatagcattggactatgtccaaacggctagaaatctggcagatcagtttaccaaggggctaccacacgggcgggcgatcaggtttttggggagcgcaaggcgcgactactcactgttcgtcaacatctacttcatcttcaccaacatgtcgaacactggagacaaggagaaggagactcccgtcaacaccaacggaggcaatactgcctcaaactccagcggaggaccattcttgggtttattcgatcgccggatacccgaggaagaagaagaagaagaaaagatgagctactacggccagcaacctcccgtcggcgtcccgccgcagcaaggttacccggggaaggacggctacccgccgccggggtacccaccggccggctacccgccggcgcagggctacccaccggctgggtaccccccgcagcagggctaccctccgccgtacgcgcagccgccgccccagcagcagcagcacagcagcggcccttccttcatggagggatgtaattaccggacgctggtctcagatctgtccacgccgacgggtgcggtggccggcgcgtccgccgcggcggcggcggcggcggcggcgcaccttggctgccctctgctgctgctgtctcctggacgcctgcttctgaggatagaggcgacgggtgcaagagagctgaagagatttgtttcatggagctga

SEQ ID NO: 86651 - DNA, 3561 bp, Oryza sativa
  Clone ID: PAT_MRT4530_85671C.1
atgtctgcgcctggagccggagcttccgatggtgcgcctggagctggagccggagatggtgcgcctggagctgcgaacgtcaacaccaacggaggcaattttgcctcacaatccagcggagggccattctcgggtgaaccacctctttctcctgaggaagaggctaagttcgaggcttcggattgcctgttccgtggagcattgatcagtgtactcgctgacaacatagtggacgtgtacatgcacatgccttccgggaaggacatgtgggatgcacttgaggccaaattcggagtttccgacgccggcagtgagctgtatgtcatggagcagttctatgactacaagatggtcgatgaccgttctgtagtagaacaaactcatgagattcggatgctggctaaggaacttgagaacaacaactatgagttgccggacaagtttgtggcaggtggcattattgccaaattgccaccttcttggtcagactttgccacttctctaaagcacaagagacaagagttcagtgtttctgatttcattggctctttgggtgttgaggagaaggcgagggcaaaggacgtccggggcaaaaaggttgagggaggttctagtgccaatatggtacagaagaagaaccctcatgcatcccacaataacaagaaagtcaagcatgatgtcaaacccaaggctgcaaccaactttaagaagaaaggcaagggaaaggcaaagggagactgctttgtgtgtggcaagtctgggcattgggccaaggactgtcctgagcgcaaagacaagaagtctgccaacatggtcattagcgagggaggaggaatatcggggtacggtaaaatattacctacagttctctttgtttttcactcacctgattggtgggtggatactagtgctaatattcatgtcgggagaggttcctccttgttgatgggaaacgggtcgcttgcggctgttcatggtgttggtatggtcgatctgaagtttacttcgggaaagaccgtgcagctgaagaacgtgcagcatgtcccttcaataaagaagaatcttgttagcggctctctactgtgtagagaaggttttagacttgtgtttaaatccaataaatgtgtcgtatctaaatatgggacttttgttggaaaaggttatgacagcggaggcttgttccgcttttctttgaatgacatgtgtaataatcataatgttgtgaaccatattagcgagaatgatgagtctaatgtgtggcattcacgactctgtcatgtgaatttcggttgtatgacgcgcttagctaacatgagtttaattccaaaattcactttggtgaaaggttctaagtgccatacttgtgttcaatcgaaacaacctctcaagcctcacaaggcatctgaggcgaggaatttggcacctcttgaacttgttcattccaatttgtgcgaaatgaatggcgtgttgactaaagggggaaagaaatatttcatgacaccgatagatgattgcactaggttttgctgtgtgtatctattgaaaacaaaggatgaagcattgcatttctttaagacctataaagctgaggtagaaaaccaacttgaaaggaaaatcaaacggttgaggtctgatagaggtggggagtatttttccaatgaattttcatccttttgcgaagagtttggaattattcatgagaggacgcctccctattcaccccaatcaaatggggtggccgaaagaaagaatcgtactctaactgagatggtgaatgccatgttagacattgtagagctttccaaggaatggtggggtaaggcagttttgactgcatgtcatgtcctgaataaaattccaatgaagcataaggaagtaaatgtacctatagccaaaaagtggaaacttggaccaaatactgttgattgtgtgttccttggttatgctattcacagtgtgggttatagattcttaatagtaaactctggagtacccggcatgcatcttggtacaattattgagtgtagagatgctacattctttgagaatgaatttcccatgaaacatacacctagcacctctagtcaagaaactgtcatgccccatgagcactttgcaccgatagaacacaatgatcaaacgcctgaggaaaatcctgaggaggacaacattgtagatactcgtaagaaagaggcatattcatctcctgacgctgactactggaaggaagcagtacgcagtgaaatggactcgattatgtctaatggtacttgggaagtcattgagcatccatatgggtgcaagcccgtaggatgcaaatgggttttcaagaaaaagcttaggcttgatggtacaattgaaaagtacaaggcaaggcttgtggcaagggttatacccaaaaggaaggcgaggactttttttgacacatactcaccagttgctcgcttgaccacgattcgagtactacttgctctggcagcctctcatggtcttctcgtccatcagatggacgttaagacagctttcgtaaacagagagctggaggaggagatctatatggatcaaccatacggatatgtactagaaggtcaggagggaatggtgtgtaaactgttgaaatccttgtatggcctaaagcaagctcctaagcaatgtcatgagaagtttgacaccacgcttacatctgcaggctttgttgtgaacgaaactgacaaatgtgtgtactatcactatagtgggggagaaggagtgatcttgtgcttatatgtcgatgacatattgatctttgggaccagcctcaatgtgattgaggaggtcaaggactatctgtccaagagttttgaaatgaaggatttgggagaggctgatgttattcttaacattaaactacaaagaggagatgagggtgggattacacttgtgcaatcgcactatgtggacaaggttttgagtcgctttggatatagtgactgcaagccagctcctactccttatgatcccagcgtgctattaagaaaaaaccgaagaatagcaagggatcaactgagatactctcaaatcattggttcattgatgtacttggctagtgcaacgaggccagacatctcatttgctgtaagcaagctgagccggtttgtctcaaatccaggagatgatcattggcaggctctggaaagagtaatgcgctatctaaagggcactgtgagctatgggattcactataccgggtatccaaaagtactagaagggtatagtgactcaaactggatatctgatgctgatgagataaaagccacaggtggatatgtgttcacacttggaggtggcgctgtttcctggaagtcttgcaagcagaccatcttaacgagttcaaaggacaacatgaagtcatctaggcatatcaagagaagactgaaatctgtcagaaagcagaaaaactccggagtgatagcattggactatgtccaaacggctagaaatctggcagatcagtttaccaagaggctaccacgtaatgtgatagacagtgcatcgagggaaatgggcttgatacccacctaa

SEQ ID NO: 86652 - DNA, 1863 bp, Oryza sativa
  Clone ID: PAT_MRT4530_85673C.1
atggaggtgggcatggtggtggtggtggcggcgaaggtgttggtgagcctgtggtgcgtgggggcgtgctgcctcgcggcgtacctgtaccgcgtcgtgtgggtggcgccgcggcgggtgctcgccgagttcaggaggcagggcatcggcgggccgcgcccttccttcccctacggcaacctcgccgacatgcgggaggccgtcgcggccgccaggcatcagctggcggaggcgcgacgccgacggcgagcacgcgacagcggcgatggcggcagcggcgccggcatcgtgcacgactaccgccccgccgtgctgcccttctacgagaagtggagaaaagactacgtggatgtgtacatgcacatgctttcggggaaggacatgtgggatgcacttgaggccaagttcggagtttccgacgccgcagcgagctgtatgtcatggagcaattctatgactacaagatggtcgatgaccgttctgttgtggagacaggctcatgagattcaaatgttggcaaaggaacttgagaacaacaattgtgagttgccggacaagtttatgcggggtggcattattgccaaattgccaccttcttggtcagactttgctacttctctaaaacacaagaggcaagagttcggtcttactgatctcattggctctttgggtgttgaggagaaggcgagggcaaaggataacttgggcaaaaagatcgagggaggttctagcgccaatttgtctgggcattgggccaaggattgtcctgagcgcaaggacaagaagtctgcaaacatggttattagtgagggcggaggaacatcgaggtatgctgttcatggtgttgatacgatcgatctgaagtttacttcgggaaagatcgtgcagctgaagaacgtgcagcatgtcccttcaataaagaagaatctaatagatgttaagacagctttcctcaatggagagttggaggaagagatctatatggatcaaccagatgggtatgtactagaaggtcagaagggaatggtgtgcaagctgctgaagtccttgtatggtctcaaacaagcgcctaagcaatggcatgagaagtttgacaatacacttacatctgctggctttgttgtgaatgaagctgacaaatgtgtgtactatcgctatggtgggggagagggagtgatcttgtgtttatatgtcgatgacatattgatctttgggaccagcctcaatgtgattgaggaggtcaaggactttctgtcaaaaagctttgaaatgaaagatttgggagtggctgatgttattcttaacattaaactactgagaggacatgagggtgggattacacttgtgcaatctcactatgtggacaaggtcttgagtcgctttggttatagtgactgcaaggcagctcctactccttatgatcctagtgtgctattaaggaaaaaccgaagaatagcaagggatcaattaagatactctcagatcattggttcattgatgtacttagctagtgcaacgaggcctgacatctcatttgctgtgagcaagttgagccggtttgtttcaaatccgggagatgatcattggcatgctcttgaaagagtaatgtgctatctaaaagggacaatgagctatggaattcactacgccgggtacccaaaagtgctagagggctatagtgattcaaactggatatctgatgctgatgagataaatgccacaagtgggtatgtgttcacacttggagggggcgctgtttcttggaagtcttgcaatgtttcttggaagtcttgcaagaagaccatcttaacgaggtcaacaatggaagcagaactcacagctttagatactgccacagtttag

SEQ ID NO: 86653 - DNA, 668 bp, Oryza sativa
  unsure (1)..(668): unsure at all n locations
  Clone ID: PAT_MRT4530_85674C.1
ttgagaaagtgttccaggagtgtgttatgtaaaagatgggccaacataagagtgtacccaagccagctgcntgcgttctaacttaccatnaaggaaagggtgtgtgatccagggtggaatcttacactgtaccggtttcactctattgtgctgctcccagtctccaaaccaagcccataccncctcctaacancgtagacaatgtgatgaaattaccacgagtgggaactnacgataacatgcatgaaaatacgcaaggaagcttgaagaagcatgatggaacaagacgaggagcttnaatggacgcnanattgagtggtagaaaagagaacnactgaagcaaggaggaggaggagtagaacaaggaggagaaagacaanaggtagatggagtaccnagagaagtaggggaaggtaggagaacgagaaagacaaaggagaactctcccggagataggagaccaggaggagccagatncaccggaccataggaaaanaggtaggagnaagagaggaaggaggtaccgccccacgagaaccaggagcacaagaaggaaaaggaagtgaaagaagaagagaggaaggaggacagaaccaaggagaaagaggagagggaagggacagaaccccccccaagtaggaggaggggagaaaaaaaaaaaaaaaaaa

SEQ ID NO: 86654 - DNA, 3894 bp, Oryza sativa
  Clone ID: PAT_MRT4530_85675C.1
atgtctggagttgccaccgccactgctggcggaggtggtacgccgccgacaggagctcgatccggagctggtgcgccaggaggtgccgtgaacgacaacaacaacggaggcaattctgcctcaccatccagcggagggagtgcctcccgtacgactgctcatcgccatgtctggagttgccaccgccactgctggcggaggtggtcattttcggtagttggctttgctgctgcactgaaaccacatgcttttgatggttcaaactataagagatggaaagcacgtgcactattgtggttgacagcgatgcagtgcttctatgtttcacggggcaaacgaagtgaaccacctctttctcctgaggaagaggctaagttcgaggcttcggattgcctgttccgtggagcattgatcagtgtactcgctgacaacatagtggacgtgtacatgcacatgccttctgggaaggacatgtgggatgcacttgaggccaagttcggagtttctgacgccggcagtgagctgtacgtcatggagcagttctatgactacaagatggtcgatgaccattctgtagtggaacaagctcatgagattcagatgctggctaaggaacttgagaacaacaactgtgagttgccggacaagtttgtggcgggtggcattattgccaaactaccaccttcttggtcggactttgccacttctctaaagcacaagagacaagagttcagtgttcctgatctcattggctctttgggtgttgaggagaaggcgagggcaaaggacgtccggggcaaaaaggttgagggaggttctagtgccaatatggtacagaagaagaaccctcatgcatcccacaacaacaagaaagtcaagcctgatgtcaaacccaaggctgcaaccaattttaagaagaaaggcaagggaaaggcaaagggagactgctttgtgtgtggcaagtctgggcattgggccaaggactgtcctgagcgcaaagataggaagtctgccaacatggtcattagcgagggcggaggaacatcggggtacggtaaaatgttacctacagttctctctgtttatcattcacctgattggtgggtggacactggtgctaatattcatatatgtgctgacatttctctgttttcttcttatcaggtcgggagaggttcctccttgttgatgggaaacgggtcgcttgcggctgttcatggtgttggtacggtcgatctgaagtttacttcgggaaagaccgtgcagctgaagaacgtgcagcatgtccctttaataaagaagaatctagttagcggctctctattgtgtagagaaggttttagacttgtgtttgagtccaataaatgtgtcgtatctaaatatgggacttttgttggaaaatgttatgacagcggaggcttgttccgcttttctttgaatgacatgtgtaataatcataatgctgtgaaccatattagcgagaatgatgagtctaatgtgtggcattcgcgactctgtcatgtgaatttcggttgtatgacgcgcttagctaacatgagtttaattccaaaattcactttggtaaaaggttccaagtgccatacttgtgttcaatcgaaacaacctcgcaagcctcacaaggcatctgaggcgaggaatttggcacctctagaacttgttcattccgatttgtgcgaaatgaacggcgtgttgactaaagggggaaagaaatatttcatgacactgatagatgattgcactagattttgctatgtgtatctattgaaaacaaaggatgaggcattgcattactttaaaatctataaagctgaggtagaaaaccaacttgaaaggaaaatcaaacggttgaggtctgatagaggtggggagtatttttccaatgagtttgcatccttttgcgaagagtttggaattattcatgagatgacgcctccctattcaccccaatcaaatggggtggccgaaagaaagaaccgtactctaactgagatggtgaatgccatgttagacactgcggggctttccaaggaatgtgtgggttatagattcttaatagtaaactctggagtacccgacatgcatgctggtacaattcttgagtccagagatgctacattctttgagaatgaatttcctatgaaatatacacctagcacttctagtaaagaaactgtcatgccccatgagcactttgcaccgatagaacacaatgatcaaacgcctgaggaaaatcctgaggaggacaacattgtagatactcgcaagagtaagagacaaagggttgcaaaatcctttggagatgactacattgtatacctcgtggatgacaccccaagaaccatagaagaggcatattcatctcctgacgctgactactggaaggaagcagtacgcagtgaaatggactcgattatgtctaatggtacttgggaagtggttgagcgtccatatgggtgcaagcccgtaggatgcaaatgggttttcaagaaaaagcttaggcctgatggtacaatcgaaaagtacaaggcaaggcttgtggccaagggttatacccaaaagaaaggcgaggacttcttcgacacatactcaccagttgctcgcttgaccacgattcgagtactacttgctctggcagcctctcatggtcttctcgtccatcagatggacgttaagacagctttcctaaacggagagctggaggaggagatctatatagatcaaccagacgggtatgtactagaaggtcaggagggaatggtgtgtaaactattgaaatccttgtatggcctcaagcaagcacctaagcaatggcatgagaagtttgacaccacgcttacatctgcaggctttgttgtgaacgaagctgacaaatgtgtatactatcgctatggtgggggagaaggggtgatcttgtgcttatatgtcgatgacatactgatctttgggaccagccttaatgtgattgaggaggtcaaagactatctgtccaagagttttgaaatgaaggatttgggagaggctgatgttattcttaacatcaaactacaaagaggagatgagggtgggattacacttgtgcaatcccactatgtggacaaggttttgagtcgctttggatatagtgactgcaagccagctcctactccttatgatcccagcgtgctattaaggaaaaaccgaagaatagcaagggatcagctgagatactctcaaatcattggttcattgatgtacttggctagcgtaacgaggcctgacatctcatttgctgtaagcaagctgagccggtttgtcacaaatccgggagatgatcattggcaagctttggaaagagtaatgcgctatctaaagggcactatgagctatggaattcactataccgggtatccaaaagtactagaagggtatagtgactcaaactggatatctgatgctgatgagataaaagccacaagtggatatgtgttcacacttggaggtggcgctgtttcctggaagtcttgcaagcagaccatcttaacgaggtcaacaatggaagcagaactaacagcactagatactgcgacagttgaggccgagtggcttcgtgaactcctgatggatttgccggtggttgaaaaaccagtgccagctatcctaatgaactgcgataatcaaacagtgattattaaagtgaacagttcaaaggacaacatgaagtcatctagacacatcaagagaagactgaaatctgtcagaaagcagaaaaactccggggtgatagcattggactatgtccaaacggctagaaatctggcatatcagtttaccaaggggctaccacgtaatgtgatagacagtgcatcgagggaaatgggcttgatacccacctaa

SEQ ID NO: 86655 - DNA, 387 bp, Oryza sativa
  Clone ID: PAT_MRT4530_85676C.1
atgactgttcctttgtcagatatagaaacgggggcgggctggcacggcggggcggcgcggaggggagagggaagggcggcgccgggcaaggaaggggaggaaggtgggggcggcggcggcggtggaggccctcgcggccggctcgacctgtgggagcaaccgtccaacaactccacgacaccggtgacatctctctccatgatcatcacggagtggaaggaagacatcaaggagttgagggctgtcctgcaggacttgtggcctccatgtcgtcacaacttcaagatctccaagcgagcagatctgcgtcacaggccatgccaaggcggccatcgacctcttggagttggacttggcaacggcgtcatcgtcggcaaggtggagtga

SEQ ID NO: 86656 - DNA, 2256 bp, Oryza sativa
  Clone ID: PAT_MRT4530_85677C.1
atggtgtgcaagctgttgaagtccttgtatggtctcaaacaagcgcctaagcaatggcatgagaagtttgacaatacacttacatctgctggctttgttgtgaatgaagctgacaaatgtgtgtactatcgctatggtgggggagagggagtgatcttgtgtttatatgtcgatgacatattgatctttgggaccagactcaatgtgattgaggaggtcaaggactttctgtccaaaagctttgaaatgaaggatttgggagtagctgatgtaattcttaacattaaactaccgagaggagatgagggtgggattatacttgtgcaatctcactatgtggacaaggtcctgagtcgctttggttatagtgactgcaaggcagctcctactccttatgatcctagcggacgaactgctcttgttcttcacggctactgctgctgcatcgacgccttcaccaagatgtcgacggagattggagacaagataatgaacgacatcaacggaggtagtactgcctcaaaatccagcggtgggacgttctcggggtatactttcattctcccgattctattagataggacactcgccttgctcctgctccgctccgctccggcgccctgcctgcgctgcgctcgcgagacaccacacgagggcggcgccgcgattccacggcgtcctgccgcccgccgccctagcctgtttcctccccagcatccgccgccgcaggggagcatgaaaccctcacccgcttccaccaaagccccgctcccgtggatctccccgctccactaccgaagccccacacgcgccgcgccgccctccccgccgccgccgccgcctccgctgcccgaagcgcccctcacgcagctgcggtacgtccaccaccccgacctagcccgcctcatcgcctcctccccctccgcgcagcgcgcgctcgacctcttcaacgccgccgccgcgcagcgcggcttctcgcacaccccggccaccttcgccgcgctcctcgtccgcctcgcccgctctcgcctcccctccgccgccgccgccgtcctccgccgcgccgcctccgcgccctgccgcttcctcgagccgcagttcctcccgctcctccgcctcctcccgcccgaccactccctcgcgctcctccgcctcctccccgcgctcctccgccggggccgcgtctcccgcaaggccctcgccgtctgcctcgaccgcctcgtctcctcccgccgctgccccgatgttctcaccgagctcctggccgacctgcgcgacccccggagcaagtaccttccgcagcccaacacgtgcatctacaacatcctcatcaagcattacgtcaagaaaggcgatttggggacagccttccaggtgtttgatgaaatgcgtaagatgaactgcgctgatgttagaccaagcttagtcacctattcaacattgataggtgggctctgtcgtggggctcagatgaaggaagcgtttgaactatttgaggacatgatcgagaaggaccgcattgtgccagaccagctaacatacaatttgctcatcggtggattctgcaggctaggacaggtggagaaagcacaatcgatctttggatttatgaggaagaatgagtgcgagccaaatgccttcaactatgccactttgatcaatgggcactgtaagaaaggggaagtggaggcagcgaggggggtatttgaggagatgattagatctggggttcagccggatgctgtcagctatacctcacttgttggatgcctttgtcggcatgggaatgtggatgaggggatcaatcttgtgcaggagatgtggcagaaagggtgtaaggctgatgttgtcacatacaatctgctgcttgaggggttgtgcaaagatagacggatagcggaagcagtgaccttgcttgagaagttaccgtccgaaggagtacagctgaatgtcgcaagctaccggattgtgatgaattgcctgtgctcatgtggagagatggagaaagcggctggcttgctgggcatgatgctcggacgaggatttgtacctcactatgcagcatcaaacatgctgttgattggtctgtgtgatgttgggagggtatcagatgcaacagtcacattgtatggactggtggacactgggttcatgccagaggctagatgctgggcaaggctgattgagtctgtgttccgggagagaaagcttaggagatctattgagctgttggatgtgctgattgctgaagggtga

SEQ ID NO: 86657 - DNA, 3762 bp, Oryza sativa
  Clone ID: PAT_MRT4530_85678C.1
atgcagtgcttttatgtttcacggggcaaacgaagtgaaccacctctttttcctgaggaagaggccatgttcgaggcttcggattgcctgttccgtggagcattgatcagtgtactcgctgacaacatagtggacgtgtacatgcacatgccttctgggaaggacatgtgggatgcacttgaggccaagttcggagtctctgacgccggcagtgagctgtatgtcatggagcagttctatgactacaagatggtcgatgatcgttctgtagtagaacaagctcatgagattcagatgctggctaaggaacttgagaacaacaactgtgagttgccggacaagtttgtggcgggtggcattattgccaaactaccaccttcttggtcggactttgccacttctctaaagcacaagagacaagagttcagtgttcctgatctcattggctctttgggtgttgaggagaaggcgagggcaaaggacgtccggggcaaaaaggttgagggaggttctagtgccaatatggtacagaagaagaaccctcatgcatcccacaacaacaagaaagtcaagcctgatgtcaaacccaaggctgcaaccaattttaagaagaagggcaagggaaaggcaaagggagactgctttgtgtgtggcaagtctgggcattgggccaaggactgtcctgagcgcaaagacaggaagtctgccaacatgatcattagcgagggcggaggaacatcggggtacggtaaaatattacctacagttctctctgtttttcattcacctgattggtgggtggatactggtgctaatattcatgtatgtgctgatatttctctgttttcttcttatcaggtcgggagaggttcctccttgttgatgggaaacgggtcgcttgcggctgttcacggtgttggtacggtcgatctaaagtttacttcgggaaagaccgtgcagctgaagaacgtgcagcatgtcccttcaataaagaagaatctagttagcggctctctattgtgtagagaaggttttagacttgtgtttgagtccaataaatgtgtcgtatctaaatatgggacttttgttgaaaaaggttatgacagcggaggcttgttccgcttttctttgaatgacatgtgtaataatcataatgctgtgaaccatattagcgagaatgatgagtctaatgtgtggcattcgcgactctgtcatgtgaatttcgggtgtatgacgcgcttagctaacatgagtttaattccaaaattcactttggtcaaaggttccaagtgccatacttgtgttcaatcgaaacaacctcgcaagcctcacaaggcatctgaggcgaggaatttggcacctctagaacttgttcattctgatttgtgcgaaatgaacggcgtgttgactagattttgctatgtgtatctattgaaaacaaaggatgaggcattgcattactttaaaatctataaagctgagatagaaaaccaacttgaaaggaaaatcaaacagttgaggtctgatagaggtggggagtatttttccaatgagtttgcatccttttgcgaagagtttggaattattcatgagatgacgcctccctattcaccccaatcaaatggggtggccgaaagaaagaaccatactctaactgagatggtgaatgccatgttagacactgcggggctttccaaggaatggtggggtgaagcagttttgactgcgtgtcatgtcctgaataaaattccaatgaagcaaaaggaagtaacaccattcgaggaatgggaaaggaagaaattaaatctctcatacctacgaatatggggctgtttggccaaggtaaatgtacctatagccaaaaagcggaaacttggaccaaaaactgttgattgtgtgtttcttggttatgctatccacagtgtgggttatagattcttaatagtaaactctggagtacccgacatgcatgctggtacaattcttgagtccagagatgctacattctttgagaatgaatttcctatgaaatatacacctagcacttctagtaaagaaactgtcatgccccatgagcactatgcaccgatagaacacaatgatcaaacgcctgaggaaaatcctgaggaggacaacattgtagatactcgcaagagtaagagacaaagggttgcaaaatcctttggagatgactacattgtatacctcgtagatgacaccccaagaaccatagaagaggcatattcatctcctgacgctgactactggaaggaagcagtacgcagtgaaatggactcgattatgtctaatggtacttgggaagtcgttgagcgtccatatgggtgcaagcccgtaggatgcaaatgggttttcaagaaaaagcttaggcctgatggtacaatcgaaaagtacaaggcaaggcttgtggccaagggttatacccaaaaagaaggcgaggacttcttcgacacatactcaccagttgctcgcttgaccacgattcgagtactacttgctctggcagcctctcatagtcttctcgtccatcagatggacgttaagacagctttcctaaacggagagctggaggaggagatctatatggatcaaccagacgggtatgtactagaaggtcaggagggaatggtgtgtaaactattgaaatccttgtatggcctcaagcaagcacctaagcaatggcatgagaagtttgacaccacgcttacatctgcaggctttgttgtgaacgaagctgacaaatgtgtatactatcgctatggtgggggagaaggggtgatcttgtgcttatatgtcgatgacatactgatctttgggaccagccttaatgtgattgaggaggtcaaagactatctgtccaataattttgaaatgaaggatttgggagaggctgatgttattcttaacatcaaactacaaagaggagatgagggtgggattacacttgtgcaatcccactatgtggacaaggttttgagtcgctttggatatagtgactgcaagccagctcctactccttacgatcccagcgtgctattaaggaaaaaccgaagaatagtaagagatcaactgagatactctcaaatcattggttcattgatgtacttggctagcgcaacgaggcctgacatctcatttgctgtaagcaagctgagccggtttgtctcaaatccgggagacgatcattggcaggctctggaaagagtaatgcgctatctaaagggcactttgagctatggaattcactataccgggtatccaaaagtactagaagggtatagtgactcaaactggatatctgatgctgatgagataaaagccacaagtggatatgcgttcacacttggaggtggcgctgtttcctggaagtcttgcaagcagaccatcttaacgaggtcaacaatggaagcagaacttacagcactagatactgcgacagttgagaccgagtggcttcgtgaactcctgatggatttgccggtggttgaaaaaccagtgccagctatcctaatgaactgcgataatcaaacagtgattattaaagtgaacagttcaaaggacaacatgaagtcatctagacacatcaagagaaaactgaaatctgtcagaaagcagaaaaactccggagtgatagcattggactatgtccaaacggctagaaatctggcagatcagtttaccaaggggctaccacgtaatgtgatagacagtgcatcgagggaaatgggcttgatacccacctaa

SEQ ID NO: 86658 - DNA, 3161 bp, Oryza sativa
  Clone ID: PAT_MRT4530_85679C.1
agtgggtctcaagcccatctccctcgatgcacagtctatcacattacgtggtagccccttggtaaactgatctgccagatttttagccgtctagatatagtccaatgctattactccagagtttttctgttttctgacagacttcaatctcctttttacatgcctggatgacttcatgttgtccttcgaactgttcactttgataatcactgtttgtttatcacagttcatcaggattgttggtactggtttttcaaccaccggcaaatccatcaggagctcacgaagccattcggcctcaattgtggcagtatctaaagctatgagttctgcttccattgttgacctcgttaagatggtctgcttgcaaaacttccaggaaatagcgccacctccaagtgtgaacacatacccacttgtggcctttatctcatcagcatcagatatcaagtttgaatcactatagcccttcaatacttttgggtacccggcgtagtgaatctcatagctcattgttccttttagatagtgcactactctttcaagagcatgccaatgatcatctcccggatttgagacaaatcgactcaacttgcttacagcaaatgagataccaggcctcgttgtactatctaagtacatcaatgaaccaatgatctgtgagtatctcaattgatcccttgctattcttcggtttttccttagtagcacactggaatcataaggagtagaagctgtcttgcagtcactataaccaaagcgactcaggaccttgtccacatagtgagattgcacaagtgtggtcccaccttcatctcctctcagtagcttaatgttaagaataacatcagccactcccaaatccttcatttcaaagcttttagacagaaagtccctgaccacctcaatcacattgaggttggtcccaaagatcaatatgtcatcgacatataagcacaagatcagtccctctcccccaccatagcgatagtacacacatttgtcagcttcgttcacaacaaagccaacagatgtaagtgttttgtcaaacttctcatgccattgcttaggcgcttgtttgagaccatacaaggacttcaacaacttgcacaccattccctcttgaccttctagtacatacccatctggttgatccatatagatctcctcctccaactctccattgaggaaagctgtcttaacatccatctaatggaggagtagaccatgagaggctgccaaaccgagtagtactcgaatcgcggtcaagcgagcaactggtgagtaggtgtcgaaaaagtcctcgccttccttttgagtataacccttggccccaagccttgccttgtacttttcaattgtaccgtcaggcctaagctttttcttgaaaacccatttgcatcctataggcttatacccatatggatgctcaacgacttcccaagtaccattagacataattgagtccatctcactgcgtaccgcttccttacaatagtcactgttaggagatgaatatgcctcttcaatggttcttggagtgacatccacaaggtatacaatgtagtcatctccaaaggattttgcaaccctttgtctcttactcttacgagtatctacaatgttatcctcctcaggattttcctctggcgtttgatcattgtgttgaataggaataaagtagaaaacaggagtccggaagtcttcggaagagttcgggtatggctctagtagcttttctcttctcttttgtaagctttgtacttttattagaatactcttctatatacatttatggtattgaaatagttacaatggtatatacgtgcgcttgcagatgaactctgtaaccataatataccaggtccgttctcccttctcgggagagcaaagcagtggttataggtacatttaccttggccaaacagccccatgtgcgtaggtatgaaagatttagtttcttcctttcccattcctcgaatggtgttacctccttatgcttagttggaattttattcaggacatgacaagcaatcaaaattgcctcaccccaccattccttggaaagtcccgcagtgtctaacatggagttaaccatctcagttagagtacggttctttctttcggctaccctgggggactggggtgaatagggagacgtcatctcatcaataattccaaactcttcgcagaaggacgtaaactcattggaaaaaatactctccacccctatcagacctcaattgtttgattttcctttcatgttggttttctacctcagccttatagatcttaaagtactgtaatgcttcatcctttgttttcaatagatacacatagcataatctagtgcaatcatctatcagtgtcatgaaatatttcttcccccctttagtcaacacaccgttcatttcgcacagatcggaatgaacaagttgtagaggtgccaaattcctcgcctcagatgcattgtgaggcttgcgaggttgttttgattgaacacaagtatggcacttggaacctttgaccaaattgaattttggaattaaactcatgttagccaagcgcgtcatacaaccgaaattcacatgacaaagtcgcgaatgccacacattggactcattattctcgctaatatggttcacaacattactattattacacatgtcatccaaagaaaaccggaacaaacccctgctgtcatagcattttccaataaaacttccatatttagatatgacacatttattgaattcaaacacaagtctaaaaccatctctacacagtagagagccgctaactagattcttctttattgaagggacatattgcacgttctttagttgctcgatctttcccgaagtaaacttcagatcgaccgtaccaacaccatgaatagccgcaagcgatctgtttcccatcaacaaggaggaacctctcccgacctgataagaaaaaaaaggaaaatgtcagcacacacatgaatatcagcactagtatcaacccaccaatcaggtgagtgacagacagagagaactataggtaaaaatttaccataccccgatgttcctccgtcctcactaataaccatgtttgcagatttcttgaccttgcacttagggcaatccttggcccaatgcctaggcttacctcacacaaaa

SEQ ID NO: 86659 - DNA, 633 bp, Oryza sativa
  Clone ID: PAT_MRT4530_8567C.1
atgtcgtcggagattgttgaatgtttccctcatgtcgtcaatcagcttgtcgcttgtctttgttttgaccacgacgtcgtcgacgtaggccaccacatttcggccgatcaggtcaccaagagccccttgaatctcgcgctggtacgagaggtggttggtgtcctcgtggccttcgagagccacctatcgatgatgatgaagacaacgaaggataactataatcgggagtacgacctctggatctatgccaatgtccttgatttctccgagaaccgggggaacgtgaatctcgtcgtcgtctgttgttatcgtggtgttttcgacctcggccattgtcaccctgacttctccagccttgattgttctcgtccttgcagctttgccaatccagtcggtctcggtcctcatttagatagcttcatgattgccatcgctgttctgttatcgttgtggagaacaacgttggtgatggccgacgtccgtcttgttctcgtcattcccgtctccgcctgttcaagtggtcgcaaagatcacgattacctcggcaaggaacgtctgtgtcggctcttcaccaggtacgtccaagtacataaagctaaggataagcaaaggatagagtggattcaccggtga

SEQ ID NO: 86660 - DNA, 609 bp, Oryza sativa
  Clone ID: PAT_MRT4530_85680C.1
atgcccggatccagcggcggcagctgccccccacccggatccagcggcggtggcggtggggtgcccggaactagggggtggcaattttcccagtggggctgggaaacaggggcggggatgggtgctgatttcgactcgcggggagtcggggtcgggggcccggccatgggcggggacgggggcggggctacggcgtcggcggccaaggagcgagcgatgctgtcagtggccaagtcgcgggcggcggcggcgaccaaggtgcgggtgacggcggtgacgacgaccatggtgcaggcgacagcttcggcgaccaaggtgtgggcggctacgacggcgaaggagcttgtagtgatggcatcgtcaacggctaggggcatggccaaccgcgtcggcgtcgacatgcggttcatacgcagcggcggcggcgccatttccggcatttctcctcatctcgtggccacctcgtcgctgtttgccgtcggtggcggcggcgcacgacggccggtggaaggtggcggccgggcgcggccgtggcgagggcgggctggtggcagcggcggccgcggcgagggcgaggacgtgcgcgcggcggccgcggtgagggcgtga

SEQ ID NO: 86661 - DNA, 569 bp, Oryza sativa
  Clone ID: PAT_MRT4530_85681C.1
atggtggcggcgctggcgaacgacgactacggcggtggcggctgctccgggcacggcggcggctcccttcccctcccctcccagatccagccgaaggagggaggggggagggcggtggcgacagcggtggctgcttcgggcgcggcggcggctcccctcccagatctagccgaaggagggaggggggagggcggtggcaacggctgctgctgctttgggtgtggcggcggctcccctcccctttcctccgagatccagccaaaggagggagggcggaggatggtggcggctcccctcccctcccctcccagatccaaccgaaggagggagggggagggcggtggcgacgggcagcggcggccgcggcagcggctgcttctggtggaatgggaatgggttttgtggaatttgttgagatatgtggatttgtactgcgacatgtggaatgggaatgggtccagtgaaatgcttgttagctttctagattcatggatcagggtcatcattgtgaaatggtttcctgtaaagaccttgcttcatgacaacttgcagttcaattttttgttgtg

SEQ ID NO: 86662 - DNA, 524 bp, Oryza sativa
  unsure (1)..(524): unsure at all n locations
  Clone ID: PAT_MRT4530_85682C.1
aggangtaaagagtaacngttctaaatttcattgttactccccttgagctnagcttgaattgngtctngtctagcntttcngaaaattnanatcaggcnntggagnctnccngtngacttcanaggattncaagaaggntntcnctggccacncctcnnnngatgtantgctnaccnttntgcatgcgangctcnggtggctgatcgctgcancttctcgcagcttgctgcgggtgtacatggttttcaccccttgtggtcaagattatggtcnacnggtttggcngngtnccttctnttccaaggacgccgatcnanttactgtnccnntnatgtggacantgntctgtccnngtcaggncntctgaagnngtatntatccannatnaatggtcanntccncggataganattggtccctgncnccntttaggtgggccatcctggaacctgtatnaacaaaatcggtcttcaaangcntntatgattattcagngtnttnggttcaagcgtctgcctgggtt

SEQ ID NO: 86663 - DNA, 3957 bp, Oryza sativa
  Clone ID: PAT_MRT4530_85683C.1
atgggtttcgtcttcggcatcgacgactttgtcttccctcccggacaggcgttccgctccctcggcgtcaactctcgaccaacggagattggggaatacgacgacttcggctaccactacgaccaccgcagcctcgacgacttcgacgaaagctatgaagataactacacgcccctctacttcggcatcttcatggccgataacgagatggaagaacaacgtcaagcccgagaagcagaagaacaacgtgtgcgacaagaagccgaacgtcgccgactggaggaggagcgccaagcacaagagcgagaacggctgcagcgtgagcaacaggagcgcgaacgggctgcgaaggaggctgaggaccggcggcagcgcgccttggatgccgagcgacgagcacgggaactcatcgggcagcaggacgttgaggggaccgcagttttccgcaccacccagcaaaacgcggttgcagcgatcaccctccttgacaccctcctcaaagaagatgcactcaatcagaccaatcacgtcgtcaacatcctgaaccagaccaagaccatgatcgccgcttcggtcccggttaactccgcgagcgtccgcacgccgactagcggccgagttccgcctcttcaacctcaagattaccaccaaccaagcctcagcgtcgccggtgcgggatccagtcgcaggagcagggatcatggcgaaagatctgttcactcgcctcctgaccgacacaaggagcgtcgggctgaacgtccccactccccacatcgcaggcgtcccgtcgatcttcgcgaaactatcaaccagcgccacgcggcaagaggtcacatcccccaccattcactagatcgttacgatgacgacgtagatggagttgctgccttcacaagcgatctgcgtcgagtggattggccagccggcttcaagacgactagaatcgagaaatacgacggcaccacaaaccttgaatcttggctcaccgtctacaatctcgctatccatgcagcaggaggagacagcaaagccatggcaaactatctgcccgtggctctagcggactccgcccgcacccaatttgatctctacaacgttgttcagaagtccggggaatctcttcgagattacatccgacgtttttccgagcaacgcaacaagatctccaacatcaccgacgatgtcatcatcgccgccttcaccaaaggcattcatcatgatctcttagtcggcaagttcggtcgcaagcctcccaggacggtcaagcagatgtttgaaaaagccaatgagtacacaaaagctgaagatgccgtcaccgcctccaaacagtcgggcaccactaggaagccgaagaaagacacgctgacagcaggggggagtggaagtaccaatcacaaggaccgcaagcgtaagcccgaggaacttgtggcgactactacaccgtcctcccgacagcattcgcgagtcaataccttcgacaagatcatgaactctcagtgtccacatcatccaaattcaaatcatgtggccaaggattgcttcgtctacaaacagttcgcagagcaatacaccaagagcgcacgcaagccgactgacggagatcaaagcacgtcgaagaagaaggatgatgaagacgatgccccgactggtttccaagactctcgcaaggaactcaatgatatctttgaaacagctatcaagtttgaccgctcggatcatcctgaccgagtggtccacccggggcggtaccccctgatcactctgccggtcactttcggcactcgggagaactttcgcacagagaacatctgcttcgaagtcgctgatttcgagacagcataccatgctattcttgggcgcccggcattagccaagttcatggctgtcccacactatagctacatgatgatgaagatgccaggtcctcgaggagtcatatccatgcggagcaacatcaagcaagccgtcacttgtgacaaggaaagctgcgagatggcccagacccgcgagattacactcgcccgagaggaagtgattgagcactctttacatgttaaggaagacgctaaacctatcaagcaacgactctgccgcttcgcacaggacaggaaggatgcaatcaaggaggaattaaccaagctattagcagcaggcttcatcaaagaagtcctacatcccgactggctggcaaacccggtcctggttcggaagaaaacgggacaatggcacatgtgtgtcgattacaccgacctcaacaaatcttgccccaaagatcaattcgggttgccttgcattgaccaggtagtcgactcaaccgccggctgcgaactactcagttttttggattgctactcaggatatcatcagatccgactgaaggattccgactgcttaaagacttcattcatcacgcccttcggggcctactgctatatcaccatgtcttttggattgaagaacgtaggagcgacatatcaacgcatgatccagagatgcttttcaactcagattagtcgcaacgtagaagcttatgtcgatgatgtggttgtcaagaccaagcagaaggacgatttgattgaggatctagaagaaacctttgcaatcatccgcgccttcaggatgaaattaaaccctgaaaaatgtatcttcggagtaccattagggaagctgcttggctttatggtatcccataggggcatacaagccaacccggagaaaatctacgccatcctcaacatgaaaccgccaagctcccggaaagacgttcaaaagctaaccgagggcatggcggcgctcagccggtttgtctcacgactcggcgagcgggggatgccctttttcaagctgctaaagaaaaccgataattttcagtggggacccaaagcacaaaaagcctttgaagacttcaagaaacttctcactactccaccggtcttagcttcatcacatccgcaagagccgctgttgttatatgtgttggcaacttcccaggttgtaagcacggtcctggttgttgagcgtgaggaagaaggccatgttcaaaaagtccaacgaccaatctatttcgtcagcgaggatttagctgactccaagacaagatatcctcaggtccaaaagttgttatatggagtcttgattaccatcaggaagttatctcactacttccaaggtcactcggttacggtggttatgtcgtttccactcagggatatacttcataaccgcgaagcaaatgggcggatcgcaaagtgggccttagagttgatgtctttggatctatctttcaagccgcggacttcgatcaagtcccaagctctagcagattttgtcgccgagtggaccgagtgccaggaagacacacctgtggagaaaatggagtattggactatgcattttgacgggtcgaagaggctctcaggcaccgaagcaggagttgttctgatttccccgactggagaaagactgagctacgtcatgaaagagtggtcctaccttgttaagaatatgaccgcctatcggcaggaggtacgcaagttagaagataagttcaacggtcttgagctaacccatgtccttcggcataataatgaggcagccgacagattggctaattttggttcaaagcgagaagcagctccttccgacgtgttcgtcgagcatctttatgagccaaccatattaaggaaagaaacagtcgaggctatggatgctcaagaagagttgcaaaccattccattatcttggccgtttgcggtttgggggctcgacatggtcggcccattcaagaaagctatcggtggttatactcatctctttgtagcggttgataaactctccaagtggatcgaagccaaaccagtcatcacaatcacagcagacaaggctagagatttcttcatcaacattgtgcactggttccgggtacccaatcggataattactgataacggcacttaa

SEQ ID NO: 86664 - DNA, 348 bp, Oryza sativa
  Clone ID: PAT_MRT4530_85684C.1
atggccgcttgtcttgaagcagcaagagaagcttgtgttaagtttgccaaggaaaaatgcattgaacccttccgagatgcaaggattgcttctgagggtcttcttgaaaatacaaagttcgccatctggggtgctggggacacagggctcgacgacaaggtgagagagaaggctacagtgcagcctactgtctacatcttcttcatggcgcacgcgaggccatggccatggcaatggcaatggcatcctaggactgaacctaagctggggtttgattctgtttttgtttttgtaggcatggcatggcaggcaggcacgaatgtcgaggcaacgagcctcttgttctag

SEQ ID NO: 86665 - DNA, 522 bp, Oryza sativa
  Clone ID: PAT_MRT4530_85685C.1
ggggctgggcgagggggagatggaggcggcgctgatggcgttccaccggttcgggaaccagtcggcggcgtcgctgtggtaccagctggcgtacatggaggcgaaggggagggtccggcgaggcgacacggtgtggcagctcgccgtcggcagcggcctcaaggcgaacagcttggtgtgggagcgcgtcgccgacgacgaccacttcgccacggagcgccacgggaggaccacgctgggcccatgggccgactgcatccacaagtaccccgtcactgaagggtagcacgcatgcatacacatggaagattagaaattaagttatggtttgttctaataataagccacgagtaagatttcatgtgtaatctcgtgtgtggtttcttatataatttagtgtttgaatatttccaccactttactggaaataaaggctatatatatactttaccttaaaaaaaaaaaaaaaaaaaaaaccaagctagttccccccctcgcccgtgttcctcagcccgggatcca

SEQ ID NO: 86666 - DNA, 844 bp, Oryza sativa
  Clone ID: PAT_MRT4530_85686C.1
gttggggatggcgatggtggcgatggtggtggcggcgatggcggtggcggcggtggcgaggggggacatgagcgcggacaggacggagtgcgcggaccagctggtggggctggcgccgtgcctgcagtacgtgcagggggaggcgaaggcgccggcgccggactgctgcggggggctccggcaggtgctcgggaagagccccaagtgcctgtgcgtcctcgtcaaggacaaggacgacccaaacctcggcatcaagatcaacgccaccctcgccctcgccctcccctccgcctgcggcgccacccacgccaacgtctcccactgcccccagctccttcacattcctccgaactcgaaagacgccgccatcttcagccccggtggcgacaagggctcccctgctgctccagatcatgtagttctacaaattactgaccatgatccgtactacatagtggaatttacggcagtgactaatctaccgatcgaaaccaagaacacgggattggatggagccagatcaattagtgggcgattatattggacaatgcctgctaccttcatgttgccaagaaaaagaagcaaggatattgagaaaaaggaaggggtcagggggttcggagaattaaactccaaaccccacctcatggacacccaggtgaagctggctgttgtggtgaaggtgatggggcgtaccggctccaggggtcaggtgacccaggtgagagtcaagttcttggatgaccagaaccgtctcatcatgaggaacgtcaagggcccggttcgagagggcgacatcctcaccttgctcgagtccgagagggaggccaggaggcttcgctga

SEQ ID NO: 86667 - DNA, 453 bp, Oryza sativa
  Clone ID: PAT_MRT4530_85687C.1
atgacgcctacgacaacgatggcacagaggctgtggaccgctgggagcctcgggggaatggctccggattattggagcaagcctccgtcggtaaccacgagttccagagccccctccccccgggagggcgaccgaactcaagcaaggctccgggtatcatggtacctggataccggagagttagccgaggcctccgaagaagaccatggcctccggaggggcttaatgcccccggagccaatcaaggccttcggagctcaccaaggcctgcggaggggaccatggcctccagagccagccaaggctttcggagccgtccaaggccttcggggccgtccaaggccttcggggctgcccgaggcctttggagtcatccgaggccttcggagccgtgcaggaccttcggagccaaccatgactcttggggcgagccgctgccttcggagccagtaa

SEQ ID NO: 86668 - DNA, 1425 bp, Oryza sativa
  Clone ID: PAT_MRT4530_85688C.1
atggggtgcgggaggtgggcgacatgcgcggggaggtgggggatgtggcgcggaggcaggggtgacctcttcctcataatggtggctccactggaccctgcaaacctggtgtccttgtttctgttgagatacatgaagcacatcgtggatactagccttgctagatgggagctcaagctagtaagcgacttcacctctgcgttccaaaatcctgtatggtcccacaaagcgtggtgccaacttgcctttgggttggaagtggtgcactccccggagtggcgtaactcgaaggccaccgacctcggctatctcacccaactaaatgggagaacaccacgcctacggatgtcactttatgcagaggacgctgcaatgttcgtccggccgacagtcagagacatgagccacttagctcaaatcctacactccttcagggacgtaaccggccttcagacaaatatgaaaaagagccagatcacgcccatccgttgtgttggcatcgacatacaagagatcttacgagtcttccctgcaaacatcactggcttcgcaatgaaatacctgtgtctcccgcttgtggtctccaagctcaagaaagtccacatccagcctctgttggataagtgcaaggccagattggcgccatggcaaggaaaaaaggtggtccaactcatcgctttgaatgtggtgctcttgatcacattcgttctgcattgtccgaagcttgggagaggcaagaaggaagacaatggtggagagaagaccaaggacaacaaccccaagagcacgttcaaggggaagaagactaaggagaatctcaagaagatgtttgatcaagttttgttgatgcgaaaaacacacactggcctggaagatctgcttaacttcagtgcaggctttggtggcaaggaaggagaacgtgtggatcgtggattccggttgttcgtggcacatgaccggtttttgttaaggtacattgtcacaggttcaggggaggatggtcgtatttttaaagacgagagcgacgactttgacaatgaggttggctcggccggtcagattgggcgccaggcggtcagaccgctagcacacgtccagtcagaccggcgtaggatgtgcggtcagaccggccagatggagaattgcaagccaatttcaacaccaattggttctacagctgtgttggatcctaatgaagatggtgaagctgttgatcagaaggagtatagaggtgttgctgattgtcgggtccggtcagacaggccaatggttgccggtcagaccggtgtgtattgtgcggtcagaccggcgacgacagctgatctcggcggtcagaccaaagatacaatatcggtcagaccgatggctttcaggcggtcagaccggtgcaactacttcggtcagaccgcgatccgtcgaaattga

SEQ ID NO: 86669 - DNA, 1020 bp, Oryza sativa
  Clone ID: PAT_MRT4530_85689C.1
atgaggcggttgggcagcggcaatgccggcggcggcgcggcagtggccggagagtgggatggtggtggcattgcggggaggatgaggggggtgaacgcggggatcatggacgagaaggtgctggagctggtgttccgggcgctgaactgggacccgagggagctgtgcgtggtggcgagggtgagccggcggctgcgggcggtggcggagcgggtgctgtggcgggagctctgcgtgtcgagggcgccgcggatggtgtcggcgctgtcgggcccgaccgcggcggtggcggcggcggcggggcgcatcgggggaggctggccggcgatggcgaagctgctcttcttctgctgcggcgcggcgggcgccgccgtgccgggccacttcgcgcccgtgtcgcggttctccaagacgtcgggccggaccttcctgtcgcggcggtgcgcgggggacctgctgttcgtgtcggacccgtgcgagcacgccgccggcgccgcgtccgacgacgacgtcgtgggcgcgtaccgcggcgtgtaccgcgggttcatgcggtcgcggacgcgcgccttcctcgtcggccaccgcgccccgctggagccgcgcgtccgctgcccctactgcggcgcccgcgtgtggagcatgaccgccgcggggctcgcgccgcgcagcgcgtgccgctggctcggcgccaacgagggccgtctcgagtacttcgtctgcgtcagcggccacctccacggcagctgctggctcgcccgcctctcctcctcctcctcctccagcgacggcgagcgcagcgccgactccgactccaaccacagcgacgacgagacattcgccgccgccgactacaatgctgtacagacaacagacaagaggtgcataggcgcccgaccatctaacatgtctcttaacaacgaacaccactgccaattatggctgactggaaatgatatgtgctgctactacaccaaggcatgcagaaaagatgggtcaaggctatctcactcgttagcatga

SEQ ID NO: 86670 - DNA, 2038 bp, Oryza sativa
  Clone ID: PAT_MRT4530_8568C.1
gttttcaacaacgtaatggctcacagcttacctcttgatgtatggggttggatcaccaacctgcctccgttctcccaatggcgctccaacgccatgtccctttgcatctgccccacaccatcagcatcagaatcatcacagccatcggtgaacctatcagttgtcaaaacccctcccacccagccctcctttgtcaccttctccatctttgcaaattaccgtgtgccaatttctctgtggacgtcaaaaccagtccacctgaaatcatacacccagcagtctctagacgaacaagagatgttagagttgtttgttgacattgtggactgggtgctgagatccggaccaaacaaaaagctgtcctttcagtttcccagggcacagattcatggcaatctaaaggacgtgtttaacatagttttcttgtccctggccttcctagtttgcatctatgaggctccccatgctcttcgctgtcgatgcctcgaatccctgaggactcagctgactgggccaaagtgcaaagatgctgcaaagacctttgtcagaatgttgggagcaaaccttgaggagcaatggatgcagacaatgaatcttgcagtgactaactggattgttgagcaacgatcctcacaccattcatttggggtgccatcgccactgttctcatatgctctttcagcaagtgggctctggaaggtccagctatactgcccactcattgccatgagcatggaagatcctgcagtgccaacacaggatgagcgccttctcttctcgcttacttatcagcaacttgaaggtgtgattcagctcgcctacaaaacaatcagaagggacaactggattgatgtcgagataaaggtggacaacataaggtgtgatgtggactctttggtctccgagatcctcatgactgaacgtggacatggctctgaggagaagcactttccatcacgtgttatgctgcaaatcacacctatgcaacaatcagatgtcctgtcggtttcagtcagcaagtcctccgacaaccccacgcatgagtttggccttgagaagggcattgaaggttcattcgaccccccaaacacatttggactaaaggcatcggtcagcgaaagcctcacactgaccatgaaaccctggaaatttgaacagtctgtgcatggaaacactacaaccttgaactggtttctccatgatggtgtaaacggaagggaggtttattcttcaaagccttccaagctctccctgcttcagccacgggcctggtttcgtgacaggtactcgaccgtgtatcgcccattcacgaagaagggtggtgtcattttcgcacgtgatgaatatggagacagcgtctggtggaagatctgtggtgcagcattagggaagaccatggactgggagattagaggctggatttggctgacctactggcctaacaaacagaagacctttcacagtgaaacaaggaggcttgaattcagagaatgtctgcaacttccccttatgaaatctccatgatgtatcttttggtacttggaatgaccatagagcgctataatgcgatagtagtatgtttaagtatttaaaattccatatgcatgcaaaattgtactatcatagtttgtcatacttttatgcatgcagaaataaacttcctaatcccctcctcccctccccccgttccatcgagcgggaacaagaaagagatctcctcctcttccaactcttccaactcctctccctcccctcctcctccattcttcctattcctcctccgttcagatatgagtcgcctcacgccgccgcctcgcttggtggcatggcgagcgtgtcggtgtcggtggtggtgtgtgccctcctctttaacagccgccgccgccgaaacagctgctgctggtggtggcggcaccactgtgggcgtggtggtggtggcgcaggaccatcatggttggcgttggcgtcgcacggctgcggacggaaaccaacatccgctagggctgccgctcgcgatatagaacgttctagatcgcga

SEQ ID NO: 86671 - DNA, 300 bp, Oryza sativa
  Clone ID: PAT_MRT4530_85690C.1
atggagttccgaagcaacttggatgagacacaaagcaagtggaaacctaactgccctgaagacgtgcatgtgatgatgattgttgatgaagtggatcacttgatgaatcaggttggggaacgcttctggaggcggctacggctcaacttgaacagccacaaaatcttcatgaactctggcagcgggggcttgaaccgtgaactcagagtgagccacacggacaagaggttcctcaatctcgaagccaggaggaacaaaaaactcaggagtgaagagggctaccggaaagttcgccatcgg

SEQ ID NO: 86672 - DNA, 3096 bp, Oryza sativa
  Clone ID: PAT_MRT4530_85691C.1
atggctgggctgtcacctcgcttcttggggcgcacaagcccacccgtcgatgcgatcgccgcccgccgcctagtggcgctcctcctggagcaccaggacaggaggcgccagctcctgcagatccactcccagctcattgcccaccaggtgttcgaccggcgtcccacgccgtggcacgccctcctcaaggcctactcgcatggccctcacccgcaggatgccctgcagctcttcaggcacgcgcggtggcacgcggccgacgacacgtacgccttcacgtttgccctcaaggcctgcgctggcctggggtggccgcggtgttgcatgcagctccatgggcttgtcgtacggaaggggttcgagttccagacctacgtgcatactgcccttgtcaatgtgtatatcttgtgcgggtgcctggcggattcacggatggcgttcgaggaaatgccggtgaagaacgcggtttcttggaatgtggtgataacaggctttgctggatggggcgaggttgagtatgcgaggctgctctttgagcggatgccttgtaggaatgttgtttcgtggagcgggatgatagatgggtatacgcgtgcttgtcgccctgtcgaggcagttgctcttttccgccgcatgatggcagaaggcattagtccaagcgagataactgtgttggcagttgttcctgcactatctaatgttggaaagattcttatcggggaagcattgcatggctattgtgagaaggagggtcttgtgtgggatgttcgggttggcaattcactcatagacttgtatgccaagattgggtctattcagaattcgctaagggtgtttgatgaaatgctggacagaaggaacttggtgtcatggacatcaataatttcaggttttgcaatgcatgggttgtcagttaaggcagtcgaactgtttgccgatatgagaagagctggaatcagacctaacagaataaccttcttgagtgtcctccatgcttgtagccatggagggctggtagagcaaggagttgcatttttcaaaagcatgatttatgaatacaacataaatccagatgtcaagcattttgggtgtatcatagacatgctaggtagggctggacgtttgcgtgaagctgagcagataataagagattttcctgtggaagtcaatgcaactgtctggaggacgctgttgggttgttgcagtaagtatggagaagttgagatgggagagaggacaatgaagaagatattagccttagaaagagaatttggtggtgattttgtggttctatccaatatgcttactgagcttcgtaggtttagtgatgctgaaatagtacgaaaactagtcgatcagaggaattctgttaagtcatttttcaacattgtaaggatggaagccataaaaaggcttcatgcctattacatcgtttctgggctgtacaattgccattatgcaatgtctaaggttctcagatcctatgccattctccaaccagatttggtttttgctcataaagtgtttgatcagattgaagcaccaaccacttttctttggaatatcctaattagagggcttgctcaaagtgatgcaccggcagatgccattgctttctacaagaaggcacaaggaggaggaatggtgccagacaacctgacatttccattcatactaaaggcctgtgctagaatcaatgctctcaatgaaggggaacagatgcacaaccatataacaaaacttggtcttctttcagatatctttgttagcaattcgttgattcatctatatgctgcctgtggtaatctttgttatgcaagatctgtttttgatgagatggtagttaaggatgttgtatcctggaattcgctgatctgtggatatagccagtgcaatagatttaaagatattttggcactgttcaagttaatgcagaatgaaggagtgaaagctgataaggttacaatgatcaaggttgtttctgcgtgtactcgtttaggagattatagcatggcagattacatggtcaggtacatagaggattattgcattgaggtggatgtttacttgggcaatacattggtagattactttggaagacgtggacagttacaatcagctgaaaaggtgttctttaacatgaaggttaggaacattgtaacaatgaatgcaatgatcgctgcatatgcaaaaggacaagatatagtttcagcaaggaaaatattcgatcaaattcctaagaaagatttgatttcatggagttctatgatatctggatattcacaagctaatcacttctctgatgctcttgagatcttcaggcaaatgcagagagccaaggtgaaaccagatgccattgtgattgccagtgtagtgtcttcttgcgcacatttgggtgcacttgatcttggtaagtgggttcatgagtacgtgaggagaaacaacatcaaagctgacaccattatggagaattctctgattgacatgtatatgaaatgtggaagtgccaaggaagcattgcaagtgttcaaagaaatgaaggagaaggacaccttgtcatggaactcaatcataattgggctagcaaacaatggcttcgagaaggaatctctgaatttgtttcaagctatgcttactgaaggattcagaccaaatggagtcactttccttggtgtactgatcgcttgcgcgaacgctaagcttgttgaggaagggcttgaccacttcgaaagcatgaaaagactttacagcttagaaccccagatgaagcattacggctgtgttgttgatctcctcggccgtgctggtcagttggagaaggcactgagattcatcactgagatgcccatagatcctgaccctgttgtttggaggatacttctgggatcatgcaatacgcatggtgatgtagccattgcagagatcgtcaccaagaagctcaatgagttagagcccagcaacagcggaaactatactctgttaagcaatgcatatgcgagtgctcatagatggagcgaagctatgaacgtcaggcaatgtatggctgatactgatgtgaggaaatctcctggatgcagtgctgttgaagcggcttaa

SEQ ID NO: 86673 - DNA, 156 bp, Oryza sativa
  Clone ID: PAT_MRT4530_85692C.1
atggcactaacactaatttctatcatatgtaggcagatccaagttgatgctggcataggctttggtgaatcactgatgggtgatggccagtttactttctcatcggcttacaacctcttcttcatggcaaagaccaaatgtttatatgaggtctag

SEQ ID NO: 86674 - DNA, 1087 bp, Oryza sativa
  Clone ID: PAT_MRT4530_85693C.1
gaaaaagagaagactaatgcacttacagtatccgaagagagaaccacaggtaatcttaatggtgctacaattaatcaagaagagcaaccattagtggaaccaactgttgagatgcctttgtcacacgttgatttacttgatgttccttgtaataaagaagagttgtgtgataatgcttcacttatatccatgccacaactagtgaatgaacatattgtttctagtgtttcattgtgtgcagattttaagcatgttgtttacattgctaatgaaatagagaaacgagaattgacatcttctttaaatactttgggtaatgttcagtttgatgatttttgtgagctcgataatttgaaggagaaattatttgctaagtctgatttgccatgtccaactagtgctatttttcatatatttggtgaatctgattatagaggaatatatttggagcatagagtttacatatattcagatttagaacctcctgtacatgtggataaaacatgcaagctagagagaaatgttattgataacaaaattatctcgagtttatcttgttttaattggaagaaacatgttgttttaaatggactacacgaagagcaccatatggaaaaaccaaggacggttttccgtgaagaaggggaggatgatgtgaccatggctactatagatacaaccgtcgttcacatcaagatcaagttgaccaagttctggaatccaattcggccacccgctacattgctgccttcaaacggccgccaaaattgcatacgagctccgttttgggtccgtgagtacttgatggaaagctctcggggtcctctttccaacggatctagcatcatctccgaattccatcttgtttggccgcaatcgcagaaacaaggtgttgtgtcacctatactgggcctatgggcttgtaacttcatctgggaccccagcccaagtggggcccatgtggagaataaggttgatctgcaccgacaagatcaacaacccacggagaggtgtatcgatcgctaaggcgcaacacaacaatgtctagtacggttgtagtcgggtcgtcaacgtttctcccaaatcg

SEQ ID NO: 86675 - DNA, 1602 bp, Oryza sativa
  Clone ID: PAT_MRT4530_85694C.1
atggcgagtgggggtgaggatcccgggccatctgatgtgcgatcacacgtcccagcccttgtcgcagatcgctcgcatttgatgcaaggcaacgatgttcgtctacatgatgatgttcaacgagggggtttgcagcaattaggtggtggagatggaggaggagatacagggagcgagtcaaccagaacggatcgccctccatgtgtagatgatgctcatatgaggatgccgacgaggaatgtcatgcatattcatggagctcatgtcccagatgaaatggttcccaagtttggcatggaattcaaatcgtacgagatggcctatgcgttctataacaaatacgtagagcacgctggttttaacgtgaggaagagtcgaagcagggcagcatacagggaaatttgttgcagcaaagagggcaagaacaaataccggggggatgagactaagcgtgaacgccgtcgtggatcagctaggattggttgccgtgcatatgtgagggtgaggaatgttgtgatagagggagaggtggcgctaaccatcacctacaatcaacattgtttggatgtgccttgcttcgagatgaaagggctgaatcatttgagtggctatttgagacgttcaagaattgcatgggagactgccctacaccacgttgcattcttacagacatatacgccgattgaatttgagtatgcctggaaagagttcatagacaagtttgggctgcatgatagtacagagttgcgggatttgtatgatataaggcatcgttgggtccctgcctttttcaaggaagattactgtggccatatgacgtcaacacagcggagcgagagctttaacaggttagtgaagagtagttttgtagaccaccaaacagcactgcacaggtttgctcggaggatacttgaggtggtactttcaaggaaggagaaggaggctgcagagacgcgagcttgtcaggatgtaccaaatgtgaagacagcatggccttttgcagagcagctttctagagtgtacacccgtgcagtgttcaaagtgttcgagaatacgctagatgaaagtgttcattttaggattgagcaatatggagtggaccagacacaatggattatttctcacagcaagcgttcagagaagcatgactggtgccaacgtcaattcaaggtaacggcggacgtagttaatgggcagttcatctgtgagtgcatgcaatgggagcacacaggtttgttctgtccccatttactgagagcgttcgtgcatgttcaagttgagaagatccctcatacatatgtactgcgtcgttactcaagggaagcaaagagtgatgtcaattttgaccggcgtgatcgtccaatagcggggctagatggtgttaaattatcaaacaggacaaaggtgttgtcattggatgcacagcaactagtaaagtgggggaggaggtcgtcagttgctttcgaaagggcgacatcagtgatgaaagggctgagaaatcagctggaagagattccggcagatgtgcacgggttagatgcagatgatggtgtgagtgagcatgaggttgaagttggcgatggagctaggccatcaatatag

SEQ ID NO: 86676 - DNA, 3492 bp, Oryza sativa
  Clone ID: PAT_MRT4530_85695C.1
atggcggctccagaccggcgtggcagcagggagatcgggaagggcggtggacgacgtcggggacggcggccgtcggatctgctgcggccggtcggagaagacgggcgggcgatcaggtttttggggagcgcaaggcgcgactactcactgttcgtcaacatctacttcatcttcaccaacatgtcgaacactggagacaaggagaaggagactcccgtcaacaccaacggaggcaatactgcctcaaactccagcggaggaccattcttggggtataaccttattacattatttcaattagaagttttactgttaatgttcatcgcaatgtcaacattgtgtcattatgtgattgttgatgctaattcaacgttaagcatgctcatgttgattacattcaccactatcactggatcaaatcctattgtaaatatcatgtttattatcttgttattttggattaaaatatgccgaattatgaccaaatttccaacaatccaaaaacctgataggtcattttcggtagttggctttgctgctacactgaaaccacatgcctttgatggttcaaactataagagatggaaagcacgtgcactattgtggttgacagcgatgcagtgcttctatgtttcacggggcaaacgaagtgaaccacctctttctcctgaggaagaggctaagttcgaggcttcggattgcctgttccgtggagcattgatcagtgtactcgctgacaacatagtggacgtgtacatgcacatgccttctgggaaggacatgtgggatgcacttgaggccaagttcggagtttctgacgccggcagtgagctgtatgttatggagcagttctatgactacaagatggtcgatgaccgttctgtagttgaacaagctcatgagattcagatgctggctaaggaacttgagaacaacaactgtgagttgccggacaagtttgtggcaggtgacattattgccaaactaccaccttcttggtcggactttgccacttctctaaagcacaagagacaagagttcagtgttcctgatctcattggctctttgggtgttgaggagaaggcgagggcaaaggacgtccggggcaaaaaggttgagggaggttctagtgccaatatggtacagaagaagaacccttttgcatcccacaacaacaagaaagtcaagcctaatgtcaaacccaaggctgcaaccaattttaagaagaaaagcaagggaaaggcaaagggagactgctttgtgtgtggcaagtctaggcattgggccaaggactgtcctgagcgcaaagacaggaagtctgccaacatgatcattagcgagggcggaggaacatcggggtccggtaaaatattacctatagttctctctgtttttcattcacctgattggtgggtggacactggtgctaatattcatgtcgggagaggttcctccttgttgatgggaaatgggtcgcttgcggctgttcatggtgttggtacggtcgatctgaagtttacttcgggaaagaccgtgcagctgaagaacgtgcagcatgtcccttcaataaagaagaatctagttagcggctctctattgtgtagagaaggttttagacttgtgtttgagtccaataaatgtgtcgtatctaaatatgggacttttgttggaaaagacactgcggggctttccaaggaatggtggggtgaggcagttttgactgcgtgtcatgtcctgaataaaattccaatgaagcataaggaaataacaccattcgaggaatgggaaaggaagaaattaaatctctcatacctacgaacatggggctgtttggccaagataaatgtacctatagccaaaaagcggaaacttggaccaaaaactgttgattgtgtgtttcttggttatgctatccacagtgtgggttatagattcttaatagtaaactctggagtacccgacatgcatgttggtacaattcatgagtccagagatgctacattctttgagaatgaatttcctatgaaatatacacctagcacttctagtaaagaaactgtcatgccccatgagcactttgcaccgatagaacacaatgatcaaacgcctgaggaaaatcctgaggaggacaacattgtagatactcgcaagagtaagagacaaagggttgcaaaatcctttggagatgactatattgtatacctcgtggatgacaccccaagaaccatagaagaggcatattcatctcctaacgctgactactggaaggaagcagtacgcagtgaaatggactcgattatgtctaatggtacttgggaagtcgttgagcgtccatatgggtgcaagcccgtaggatgcaaatgggttttcaagaaaaagcttaggcctgatggtacaatcgaaaagtacaaggcaaggcttgtggccaagggttatacccaaaaggaaggcgaggacttcttcgacacatactcaccagttgctcgcttgaccacgattcgagtactacttgctctggcagcctctcatggtcttctcgtccatcagatggacgttaagacagctttcctaaacggagagctggaggaggagatctatatggatcaaccagaaggtcaggagggaatggtgtgtaaactattgaaatccttgtatggcctcaagcaagcacctaagcaatggcatgagaagtttgacaccacgcttacatctgcaggctttgttgtgaacgaagctgacaaatgtgtatactatcgctatggtgggggagaaggggtgatcttgtgcttatatgtcgatgacatactctcaaatcagctgagatactctcaaatcattggttcattgatgtacttggctagcgcaacgaggcctgacatctcatttgctgtaagcaagctgagccggtttgtctcaaatccgggagatgatcattggcaggctctggaaagagtaatgtgctatctaaagggtactatgagctatggaattcactataccgggtatccaaaagtactagaagggtatagtgactcaaactggatatctgatgctgatgagataaaagccacaagtggatatgtgttcacacttggaggtggcgctgtttcctggaagtcttgcaagcagaccatcttaacgaggtcaacaatggaagcagaacttacagcactagatactgcgacagttgaggccgagtggcttcgtgaactcctgatggatttgccggtggttgaaaaaccagtgccagctattctaatgaactgcgataatcaaacagtgattattaaagtgaacagttcaaaggacaacatgaagtcatctagacacatcaagagaagactgaaatctgtcagaaagcagaaaaactccggagtgatagcattggactatgtccaaacggctagaaatctggcagatcagtttaccaaggggctaccacgtaatgtgatagacagtgcatcgagggaaatgggcttgatacccacctaa

SEQ ID NO: 86677 - DNA, 312 bp, Oryza sativa
  unsure (1)..(312): unsure at all n locations
  Clone ID: PAT_MRT4530_85696C.1
ggcaggtaccgtncaattatttcttcgacccaccacgcgtttgatttttgctccagccgcgaacgattgggggggggggtttttgggcgntttttctggaccttccattagtcgccgtctcgccgtccagaagcaggcggatggccggatcggcggcgagcgagtgctcgccgacccgattctcgtctccgcgcctcagggtctacctcacgcgagccttccacgccatgaacaacgaattgaacacggtcttctctgaatcctgttccccttggatactagcacgggatggacactgcgaccaccgaatta

SEQ ID NO: 86678 - DNA, 1883 bp, Oryza sativa
  Clone ID: PAT_MRT4530_85697C.1
atggagagcctccggatcgccgcctcccaccgcccgcctctgctcctcccatccccgcaccagctccggcgccgccacatcgccgccgtttccctctccctcccacacacctcgctctccctctcctcgcatcatcatcatcatcatcgcctcgccccaacgcctctccgccgccgcatcccacctctcctcgcctcgcaaacacccaacccggaggcggacagcccggcccccgccggcacgaagctcgccccgctcctcgtgtccctcgcggtcggcctcgccgtgcgtttcctcgcgccgcgcccacccgaggtgagcccccaggcgtggcagctcctctccatcttcctctccaccatcgcggggctagtgctgggcccgctccccgtcggcgcctgggctttcctggggctcaccgccgccgtcgccacccacacgctccccttcgccgccgccttctccgccttcaccaacgaggtcatctggctcatcgtcatctccttcttcttcgcgagggggttcgtcaagaccggtctcggcgaccgtatcgccacctacttcgtcaagtggctcgggggcagcacgctggggctgtcctatgggctcaccatcagcgaggcgttcatctcgccggccatgcccagcaccaccgcgagggccggaggcgtgttcctgcccatcatcaagtcgctctcgctctcggcagggagcaagccgaaccacccgtcgtcgcggaagcttggatcctatcttgtgatgtcgcaattccaggcagctggtaactcaagtgcgctcttcctaactgctgcagcacaaaatttgttgtgcttgaagctagcagaggagcttggtattatcgttgcaaatccatgggtagcatggttcaaagctgctagtttgccagccattgcttctctactagcaacaccatacttgctatacaaaatatttccccctgaaacaaaggatactcctgatgccccagcattagctgcagagaagcttgagcgcatgggtccagtgactaagaatgaatgggttatgattggtacaatgctccttgcagtttcattatgggtatttggggatgctatcggtgtatctagtgttgttgccgcgatgcttggactctctattcttctcttgctaggtgtgctagactgggatgattgcttaaatgagaaatctgcatgggatacattggcatggtttgcagttctagttggaatggcaggacagctcactaacctgggaattgtgtcatggatgtcaagctgtgttgccaagctgcttgaatccttctcgctgagctggcctgcagccttttgtgttcttgaggcttcctacttcctgattcactatctatttgcaagccaaaccggacatgttggagctttatactcggcatttctggccatgcatgtagcagctggtgttcctcgagtgctgtcagctcttgctttggcattcaacacaaatctgtttggtgcactaactcattatagtagcggacaggctgcagtgtactttggagcggggtatcttgagcttccagatgtattcaggatgggtttcgtaacagccttgatcaatattctgatctggggtgttgttggaaccttctggtggaaacttttggggctctattgatagcggctgcctgtaaattgaccaaagttttccattggagctcactgaattcggaagggatgtttcttttgtggcctgtcgatgagagttcaataacagaataactttgttccttcaaaatgatcagctcggccgctcggttagctcagctgtatagtaaatgtaaattagggaactaagagagtaatggaaaatcaggtcaatctgattacctcaaaaaaaaaaaaaaa

SEQ ID NO: 86679 - DNA, 2263 bp, Oryza sativa
  Clone ID: PAT_MRT4530_85698C.1
atccctgcagttctgccatttgtcatttgcattctcgtgatgtttttgatctgttattcagcttaaatacaaatacttggctctatcctaaaccttcttgcgcttgctcggcggcgacgctgtatcctttattgattaaccttaggcagcacatccccatgcctccgattatcatcttcctcacttcatcttccaaattttcttcgctatcgcacagatcagatgctggtgatgggcatggagtggacacgtacccatcattgtagtattgctcaagatcttcttgaaacctctcctcatctgattctgtaggtggtggtggccaatctggcattggcggccccctaacacgaaactcaggaggtagatccacctcgcgcatcactggagatggagtcaacctctcagtgacatcattatctacaccaacccatatattccaaccatccactctcctgccggtactatcacccgtacttaaccaacatcgttccgtctcattggagtcgcttcccctcccttttgtcattgactttggtggtggacgcttgctaatttcatcaccagcacttccaccccgatggatcgatggcccagctccatcgccaacatcaacctcatgctcactcacaccatcatctgcatctaacccatgcacatctaccggaatctcttccagctgatttctcagccctttcatcactgatgtcgccctttcgaaagcaactgcgacctcctcccccactttactagctgctgtgcatccaatgacaatacctttgtccttgaattgacgttggcaccagtcatgcttctctgaacgcttgctgtgagaaataatccactgtgtctggtccactccatattgctcaatcctaaaatgaacactttcatctagtgtattctcgaacactttgaacactgcacgggtgtacactctagaaagctgctctgcaaaaggccaagctgtcttcacatttggtacagagccacagtaatcttccttgaaaaaggcagggacccaacgatgccttatatcatacaaatcccgcaacactgtactgtcatgcagcccaaacttgtctatgaactctttccaggcatactcaaattcaatcggcgtatatgtctggttaatgcacaccatcatctctgtctcagtgtccttgtgtctcatgaaaatagtattcagatgatctgagtggccgtctataatgtgccacctgcacaaccgatggatagtatatgggaaagcacgaccaaccgcaatagccatagcagggtcttggtctgtaagaatgcaccgcgggcgtacggcagtcgcccatgcaattcttgaacgtctcaaatagccactcaaatgattcagccctttcatctcaaagcaaggcacatccaaaaagtgttgattgtaggtgatggttagcgccaccccttcctcatatgtttttatgtcccagtaaaacttaggattatccttcttgcactcgttaaaaaaattcagcagcttgcttatgtcgtccgcattctcctcacgaacattagccgttttcctgttttccagatctcgggttgtgaaagggatggtttcacagtctccatgcatatcggacagcacacccattacactactttgtggtacgcgacattgctgcatagtgtctacaaactccattaacgtgtcatcccgttgcttgtgcgatctcatgtgcttcacggctgagggcgatcgcgtcaacgggtggttgtgttctacaacaacatcatcaaaaaccactgatacaacctctccctctctcacaacattcctcaccctcacatatgcgcggcatccaatcctagctgatccacgacggcgttcacgcttagtctcatccccccggtacttgttcttgccctccctgctgcaacaaatttccctgtatgctgccctgctccgactcttcctcacgtcaaaaccaacatgctctgcgtatttgttatagaacgcataggccatctcgtacgatttgaattccatgccaaacttgggaaccatttcatctgggacgtgagctccatggagggcgatccgttctggttgactcgctccctgtatctcctcctctctatctccagcacccaattgctgcaaaccccctcgttgaacatcatcatgtggatgaacaccgctgccttgcatcaaatgcgagcgatctacaccgagggttgggacgtgtgatcgcacatcaaatggcccgggatcctcacccccactcgccat

SEQ ID NO: 86680 - DNA, 1803 bp, Oryza sativa
  Clone ID: PAT_MRT4530_85699C.1
aagcacagccactaagaaaaagtagcaattatttaaaacgacaattcaataatcaatttaaatacgacaaatcttatcggtactatcctaaaccttcttgcgcttgctcggtggtgacgctgtatcctttgattgattatccttaggcagcacatccccatgcctcaaattatcatcttccacatctccatcctccaaattttcttcgcaatcgaacagatcagatggtggtgacgggcatggagtggacacgtacccatcattgtagtattgctccagatcttctcgaaacctctcttcatctgattctgtaggtggtggtggccagtctggcgttggcgaccccctaacacaaaactcaggaggtagatccacctcacgcatcaccggagatggagtcaacctctctggtgaatgcgagccggatgaatcaccatgtattgagggtgaggccggcgagccatcgggtagcttagacagcctatgcgccgtctcattggggtcgcttcccctcccttttgtcattgactttggcggtggacgcctgctaatttcatcaccaacacttccaccccgatggatcgatggcccagctccatcgccaacatcagcctcatgctcactcacaccatcatctacatctaacccatggacatctgccggaatctcttccagctgctttctcagcactttcatcactgaggttgccctttcgaaagcaaccgacgacctcctcccccactttactagctgttgtgcatccaatgacaacacctttgtcctgtatgataatttaacaccgtctggccccgatattggacgatcacgccggtcaaaattgacatcactctttgcttcctttgagtaacgacgcagtacatatgtatgaggaatcttctcaacttgaacatgcacgaatgctctcagtaaatggggacagaacaaacagctgaactgcccattcactacgtccgccgttactttgaactgacgttggcaatagtcatgcttctctaaacgcttgctgtgagaaataatccattgtgtctggtccactccatattgctcaatcctgaaatgaacactttcatctagcgtattctcgaacaccttgaacactgcacgggtgtacactctagatagctgctctgcaaaaggccatgttgtcttcacaatcggtacagcctgataagcccgcgtctctgtagccttcttctccttccttgaaagtgccacctcaagtatccttcgagcaaacctgtgtagcgctgtttggtggtctacaaaactactcttcactaacctgttaaagctctcgctccgctgtgtcgacgtcatacggccacagtaatcttccttgaaaaaggcagggacccaacgatgccttatatcatacaaatcccgcaacactgtactgtcatgcagcccaaacttgtctatgaactctttccaggcattctcaaattccatcggcatatatgcttggttaatgcacaccatcatctctatctcaatgtccttgtgtctcatgaaaatagtattcagatggtctgagtggccgtctataatgtgccacctgcacaaccgatggatagcatctgggaaagcacgaccaactgcaatggccatagcagggtcttggtctgtaagaatgcaccgtggcgtagggcagtttcccatgcaatttttgaacgtctcaaatagccactcaaatgattcagcccttccatctcgaagcaaggcacattcaaaaagtgttgattgcaggtgatggttagcgcctacaaacatggccagaggcat

SEQ ID NO: 86681 - DNA, 147 bp, Oryza sativa
  Clone ID: PAT_MRT4530_8569C.1
atggcgctcgccgtgctgcagctcctcgggggcaaatccatgaaattactaaatctcacaatgaagcatattgagtttttagagaatgtctactgccattacatgaatacggttcacaagctaaggaagctaaatgtcgatgcataa

SEQ ID NO: 86682 - DNA, 509 bp, Oryza sativa
  Clone ID: PAT_MRT4530_856C.1
ccggccgggatgatcaacaatattgactacaccttcttgtagtcctgatatacacgtagtgattgcttacatccttactgcgatgactacaccagcccgatctttgccctgctagccttaattgctctttctgcagtgccactactgtcatcaccactatgcatcatctcccaccctgattaaccatggataccgtgagatccgtgcacacctaacatgatgaacatgatcgtgatggtgagctccacagtcatgaccttgcctcagacaatgatgctcctgcaacatctatgttacatgctgctacaatgcatgatgcctcagtgacactgtgacactcgttgtctcaccacggacactatgcaactacttattcgtgatctactcctccagaatgacatggtacagatcggaatgcaaatggcatacctgcgtcatatgggccctgtcctattccgactctctacctgtgcttcgtacttcgatccgacgattgtgatacatgtact

SEQ ID NO: 86683 - DNA, 3786 bp, Oryza sativa
  Clone ID: PAT_MRT4530_85700C.1
atgtcaacggagattggagacaagaagatgaacgacatcaatggaggcaatactacctcaaaatccagcggtgggacgttctcggggtatactttcattctcccgattttattagatgtttctttgttaatactcttcgcaatggcagcattgcgttactttgtaaatgttgatgcttatttcatattaagcatactcaagttgtatacatctagcactgtcactagatctactcatattgtaaatgtcatgtttattatcttaatattttggattaaaatatgccgaattatgaccaaatttccaacaatccaaaaacttgttaggtctttttcggtagttggctttgctgcatcactaaaaccacatgctttcgatggttcaaattataaaagatggaaagcacgtgcacttttgtggttgacggtgatgcattgtttctttgtctcacggggcaaaccgagtgaaccgcctctctctcttgaggaggaggctaagtttgaggctacagattgcttgttccgtggagcaatgatcagtgtgctcgccgataatattgtggatgtgtatatgcacataccttcagggaaggacatgtgggatgctcttgaggccaagttcggggtttctgacgctggcagcaagctgtatgtcatggaacagttctatgactacaagatggtcgatgaccgttctgtagtggaacaggctcatgagattcagatgctgaaggaacttgagaacaacaacggcgagttgccggacaagtttgtggctggaggcattattgccaaattgccaccttcttggtcggattttgctacttctctaaaacacaagaggcaagagttcagtgtcactgatctcattggctctttgggtattgaggagaaggtgagggcaaaggataaccggtgcaaaaagatcgagggaggttctagcgccaatttgatgcagaagaagaaccctcacgcatccaacaacaacaacaagaaagtcaaacctgacgtcaaacccaaggctacaaccaattttaagaagaaaggcaagggaaaggtaaaaggagatttctttttgtgtggcaagcctgagcattgggccaaggattgtcctgagcacaaggacaagaagtttgcaaacatggttattagtgagggtagaggaacattggggtatggtaaatttttacctacagttctctctgtgtgtcactcacctgattggtgggttgatactggtgctaatattcatgtgtgtgcggacatttccctgttttcttcttatcaagtcgggagaggttcctcctttttgatgggaaacggatcgcttgcggctgttcatggtgttggtacggtcgatctaaagtttacttcgggaaagattgtgcagctgaagaatgtgcagcatgtcccttcaataaagaagaatctagttagcggctctctactgtgtagagatggttttagacttgtgtttgaatccaataaatgtgtcgtatctaaatatggaacgtttattggaaaaggttatgacagcggaggtttgtttcgcttttccttggatgatatgtgtaataaagttgtgaaccatgtaaacgatgatgatgatgagtccaatgtgtggcatttgcgactttgtcatgtgaattttggttgtatgacacgcttagccaatatgagtttaattccaaaattcactttagtcaaaggctctaagtgccatacttgtgttcaatcgaaacaacctcgcaagcctcacaaggcatctgaggcgaggaatttggcaccattagaacttgttcatttcgatctgtgcgaaatgaacggcgtgttgactaaagggggaaagaaatatttcatgacactgatagatgattgcactagattctgctatgtgtacctattgaaaacaaaggatgaagcattacattactttaagatctataaggatgaggtagaaaaccaactggaaaggaaaatcaaacggttaagaattcctactaagcataaggaagtaacaccattcgaggaatgggaaaggaagaaattaaatctctctcacctgcgcacatggggctgtttgaccaaggtaaatgtacttatagccaaaaagcgtaaacttgaaccaaagaccgtagattgtgtgttccttggttatgctatccacagtgtgggatataggttcttaatagtaaattctggagtacccgacatgcgagttggtacaattactgagtccagagatgccacattttttgagaatgaatttcctatgaaaaatgcacctagcacttctagtcaagaacctattttatcccctgagcactttgtgccgatagaacacattgatcaaacgcttgaggaaaatcctgaggaggataacattgtagcaactcgaaagagtaagagacaaaggactgcaaagtcttttggatatgactacattgtatatcttgtggatgatactccaagaaccattgaagaggcatattcatctcctgacgctgactattggaaggaagcggtatgcagtgagatggactcaattatgtctaatggtacttgggaagtcgtcgagcatccatatgggtgtaagcctgtaggatgcaaatgggttttcaagaaaaagcttaggcctgatggtacaattgaaaagtacaaggcaaggcttgtggccaagggttatacccaaaaagaaggcgaggattttttcgacacttattcatcggttgcttgcttgactacgattcgtgtactactcgctctggcagcctctcatggtctactcgtccatcaaatggatgttaagacagctttcctcaatggagagttggaggaggagatctatatggatcaaccagatggcctcaatgtgattgaggaggtcaaggactttctgtccaaaagctttgaaatgaaggatttgggagtggctgatgttattcttaacattaaactactgagaggagttgagggtgggattacacttgtgcaatctcactatgtggacaaggtcttgagtcgctttggttatagtgactgcaaggcagctcctactccttatgatcctagtgtgctattaaggaaaaaccgaagaatagcaagggatcaattgaggtactcccagattattggttcattgatgtacttagctagtgcaacgaggcctgacatctcatttgctgtgagcaagttgagccggcttgtttcaaatccgggagatgatcattggcatgctcttgaaagagtaatgcgctatctaaaaggggcaatgagctatggaattcactacgccaggtacccaaaagtgctggagggctatagtgattcaaactggatatctgatgctgatgatataaaggccacaagtgggtatgtgttcacacttggaggtggcgctgtttcctggaagtcttgcaagcagaccatcttaacgaggtcaacaatagaagcagagctcacagctttagatactgccacagttgaggctgaatggcttcgtgagctcctgatggacttgccggtggttgaaaaaccagtaccagcaatcctgatgaactgtgataatcaaacagtgattattaaagtgaacagttcgaaggacaacatgaagtcatccaggcatgttaaaagaagactgaagtctgtcagaaagcagaaaaattccggagtgatagcattggactatgtccagacggctaaaaatctggcagatcagtttaccaaggggctaccacgtaatgtgatagactgtgcatcgagggagatgggcttgagacccacttag

SEQ ID NO: 86684 - DNA, 1419 bp, Oryza sativa
  Clone ID: PAT_MRT4530_85701C.1
atgtctgcgcctggagccggtgccgctgctgctgctggaggagatggcggagatggtgcgccacctggagctgctgctggaggtggtgcaccaggagctggagccggtgccgcgaacaacaacaccaacggaggcagttctgcctcacaatccagcggagggccattctcagggtatatccttctcctattcctgttcttgttgttagcgctttattgctatgttcctgttcctgatattcatgatgcctctagcatgctaccgcgttactgctatgttcttcttcctgatattcataatgttgttcatgatgcctttagtatgctactggtaatgttacatgctgtcactagatcaccctacactgtttatgccatgattattgtcttaacattttggattaaaatatgccgatttatgaccatatttccaacaatccaaaaacctgataggtcattttcggtagttggctttgctgctgcactgaaaccacatgcttttgatggttctaattataagagatggaaagcacgtgcactattgtggttgacagcgatgcaatgcttctatgtttcacggggcaaacgaagtgaaccacctctttctcctgaggaagaggctaagttcgaggcttcggattatctgttccgtggagcattgatcagtgtacttactgacaacatagtggacgtgtatatgcacatgccttctgggaaggacatgtgggatgcacttgaggccaagttcggagtttctgacgccggcagtgagctgtatgtcatagagcagttctatgactacaagatggtcgatgaccgttctgtagtagaacaaactcatgagattcagatgctggctaaggaacttgagaacaacaactgtgagttgccggacaagtttgtggcaggtggcattattgccaaactgccaccttcttggtcggactttgccacttttctaaagcacaagagacaagagttcagtgagaaggcgagggcaaaggacgtccggggcaaaaaggttgagggaggttctagtgccaatatggtacagaagaagaaccctcatgcatcccgcaacaacaagaaagtcaagcctgatgtcaaacctaaggctgcaaccaactttaagaagaaaggcaagggaaaggcaaagggagactgctttgtgtgtggcaagtctgggcattgggccaaggactgtcctgagcgcaaagacaggaagtctgccaacatggtcattagcgagggcggaggaacatcggggtacggttgggagaggttcctccttgttgatgggaaacgggtcgcttgcggctgttcatggtgttggtacggtcgatctgaagtttacttcgggaaataccgtgcagctgaagaacgtgcagcatgtcccttcaataaagaagaatcttgttag

SEQ ID NO: 86685 - DNA, 1627 bp, Oryza sativa
  Clone ID: PAT_MRT4530_85702C.1
gggaggatggggtataggatagtgagacgaagaggaagaagggtcacggcaacgagaatacacataggcatgtgtgttttccatggtagtcatacgccggtccaaagaagtgacttgagaggatatcctggcaacctcagaacgaatgcccctcgcatcctcatgcattgcttcagccctcatgctcggtagttagcctttgaatgctttcacttaagctatttatagccccaagcaccgagttgaaatagtcctgaagaggcatgccaaagtatgcataaggaggagtgaagtactcattgataccttgaggaggaggaggtgctgagcttgagattgccccaaggtggaaagaaggtgcctcatcctaggagtatggggagtgccaagctgaagaccaggcttatattgcttatgcttctttagattgtttccaacactcccaagctgagcttgaatctacctcataatgtagggcgcatggtaaattcattgactaaacgtgcccttggatattgcaatctcttgcattatgaagttccccacatcaaactgacgaccctgcatgatggcatttatcacatgccaagccacccccttaatatcatcattattcccacatcgagggagaatggtggctctcacaattctgttcaccacactaagaatagtcatcaaccctgcaacttttccatgggtggtgtcgccttccatcttcatagacctgtgaaagataatcaatggagagcgggttgtgagtatgctccttatgcagatcatcaccaaagtcaaagcggatgttgagtaacctccggaactgcctcctagagatagagtactggagggtgtgtgacatccacttcatctcactacaatcaccggcaacccccgttgtggcataaaattggcggatgagctcctcatcatagtcttgtgccataatgactatgcaatctatccccacagccctgaaaagggcttgcaagcttgtaaactctagagtctcatttatgttccgccatgaaatccacttgtgctttgcaaaagccctgctcctgtagagctgctcataaatagtcttctggaaggccgtgtgaaaacggggatcagtggtgtctctaggcctcttgaactgatcatgatgccttaggatggtgtactgagcggagttcctgatgttaaccacaaattgctcatattcctctccgctcgactcctcatgctcgcactcgggctcttgcacggccgcttgatgaccatggcgagtgcggggaggcattgctgaatccaaagagcaataaaggaatatgagcaacaaatttagaaaacactcggttaggcggaaagaaattttgcactgccggtcaggggcggtcagaccggtggccaatggccggtcagaccgcccgtagggctgaccagaccgccacggttgaaaggagatggtttgcacgaagaacaacccactaatttgtgcaaatccataagcacttcttccttcacctggtgtcacgtctagaaatttagcccatatttccagactattttgtgtattaaatccctgtccaggaccaggaccaggataagttcttccagggcatcccgcgaaccagtccttaattgccat

SEQ ID NO: 86686 - DNA, 4116 bp, Oryza sativa
  Clone ID: PAT_MRT4530_85703C.1
atgtctggagttgccgccgccgctgctggaggagatggcagaggtggtgcgccgccaggagctggagctggaggtggtgcgccaggagctggagccggtgccgcgaacgacaacatcaacggaggcaattctgcctcacaatccagcggagggccatcctcggagtatatccttctcctattccctttgttagcgctatcgctttactgttatgtgctctatgttcctgttcctgacattcatgatgcctctagcatgttattgcgttactgtaatgttcctgttcctgacattcatgatgcgcatggtatgctactggttatgttaagagcaccctacaccgcttatgccatgattattgctttaacattttggattaaaatatgccgattcatgactatatttccaacaatccaaaaatctgataggtcatttttggtagttggctttgctgctgcactgaaaccacatgcttttgatgattctaactataagagatggaaagcacgtgcactactgtggttgacagcgatgcagtgcttctatgtttcacggggcaaacgaagtgaaccacctctttctcctgaggaagaggctaagttcgaggcttcggattgcctgttccgtggagcattgatcagtgtactcactgacaacatagtggacgtgtacatgcacatgccttccgggaaggatatgtgggatgcacttgaggccaagttcagagtttctgacgctggcagtgagctgtatgtcatggagcagttatatgactacaagatggtcgatgaccgttctgtagtagaacaagctcatgagattcaaatgctggctaaggaacttgagaacaacaactgtgagttgccggacaagtttgtggcgggtggcattattgccaaactgccaccttcttggtcggactttgccacttctctaaagcacaagagacaagagttcagtgtttctgatctcattggctctttgggtgttgaggagaaggcgagggcaaaggacgtccggggcaaaaaggttgagggaggttctagtgccaatatggtacagaagaagaaccctcatgcatcccacaacaacaagaaagtcaagcctgatgtcaaacccaaggctgcaaccaacattaagaagaaaggtaagggaaagtcaaagggagactgctttgtgtgtggcaagtctgggcattgggccaaggactgtcctgagcgcaaagacaggaagtctgccaacatggtcattagcgagggcggaggaacatcagggtacggtaaaatattacctacagttctctctgttcttcactcacctgattggtgggtggacactggtgctaatattcatgtcgggagaggttcctccttgttgatgggaaacgggtcgcttgcggctgttcatggtgttggtacggtcgatctgaagtttacttcgggaaagaccgtgcagctgaagaatgtgcagcatgtcccttcaataaagaagaatcttgttagcggctctctattgtgtagagaaggttttagacttgtgtttgagtccaataaatgtgccgtatctaaatatgggacttttgttggaaaaggttccaagtgccatacttgcgttcaatcgaaacaaactcgcaagcctcacaaggcatctgaggcgaggaatttggcacctctagaacttgttcattccgatttgtgcgaaatgaacggcgtgttgactaaaaggggaaagaaatatttcatgacactgatggatgattgcactagattttgctatgtgtatctattgaaaacaaaggatgaggcattgcattactttaaaatctataaagctgagatagaaaaccaacttgaaaggaaaatcaaacggttgaggtctgatagaggtggggagtatttttccaatgagtttgcatctttttgcgaagagtttagaattattcatgaaaggacgcctccctattcaccccaatcaaatgggatggccgaaagaaagaaccatactctaattgagatggtgaatgctatgttagacactgcggggctttccaaggaatggtggggtgaggcagttttgaccgcctgtcatgtcctgaataaaattccaatgaagcataaggaagtaacaccattcgaggaatggcaaaggaagaaattaaatctctcatacctacaaacatggggctgtttggccaaggtaaatgtacctatagccaaaaagcggaaacttggaccaaatactgttgattgtgtgttccttggttatgctattcacagtgtgggttatagattcttaatagtaaactttggtgtacccgacatgcatgttggtacaattcttgagtccagagatgctacattctttgataatgaatttcccatgaaacatacacctagcacttctagtaaagaaactgtcatgccccatgagcactttgcaccgatagaacacaatgatcaaacgcctgaggaaaatcctgaggaggacaacattgtagatactcgcaagagtaagagaaaaagggttgcaaaatcctttggagatgactacattgtatacctcgtggatgacaccccaagaaccatagaagaggcatattcatctcctgacgctgactactggaaggaagcagtacgcagtgaaatggactcgattatgtctaatggtacttgggaagtcgttgagcatccatatgggtgcaagcccctaggatgtaaatgggttttcaagaaaaagcttagacctgatggtacaattgaaaagtacaaggcaaggtttgtggccaagggttatacccaaaaggaaggcgaggacttcttcgacacatactcaccagttgctcgcttgaccacgattcgagtactacttgctctggcagcctctcatggtcttctcgtccatcagatggacgttaagacaactttcctaaacggagagctggaggaggagatctatatggatcaaccagatgggtatatactaaaaggtcaggagggaatggtgtgtaaattgttgaaatccttgtatggcctcaagcaagcacctaagcaatggcatgagaagtttgacaccacgcttacatctgcaggctttgttgtgaacgaagctgacaaatgtgtgtactatcgctatggtgggggagaagaagtgatcttgtgcctatatgtcgatgacatattgatctttgggaccagccttaatgtgattgaggaggtcaaggactatctgtccaagagttttgaaatgaaggatttgggagaggctgatgttattcttaacatcaaactacaaagaggagatgagggtgggattacacttgtgcaatcccactatgtggacaaggttttgagttggtttggatatagtgaccgcaagccagctcctactccttatgatcccagcgtgctattaaggaaaaaccgaaaaatagcaagggatcaactgagatactctcaaatcattggttcattgatgtacttggctagtgcaatgaggcctgacatctcatttgctgtaagcaagctgagccggtttgtcttaaatccgggagatgatcattggcaggctctggaaagagtaatgcgctatataaagggcactatgagctatggaattcactataccgggtatccaaaagtactagaagggtatagtgactcaaactggatatctgatgctgatgagataaaagccacaagtggatatgtgttcacacttggagggggcgctgtttcctgcaagtcttgcaagcagaccatcttaacgaggtcagcaatgaaagcagaacttacagcactagatactgcgacagttgaggccgagtggcttcgtgaactcctgatggatttgccggtggttgaaaaaccagtgccagctatcctaatgaactgtgataatcaaacagtgattattaaagtgaacagttcaaaggacaacatgaagtcatctaggcacatcaagagaagactgaaatctgtcagaaagcagaaaaactccgaagtgatagcattggactatgtccaaacggctagaaatctgacagatcagtttactaaggggctaccacgtaatgtgatagacagtgcatcgagggaaatgggcttgatacccacctaa

SEQ ID NO: 86687 - DNA, 3381 bp, Oryza sativa
  Clone ID: PAT_MRT4530_85704C.1
atgcagtgcttctatgtttcacggggcaaacgaagtgaaccacctctttctcctgaggaagaggctaagttcgaggcttcggattgcctgttccgtggagcattgatcagtgtactcgctgacaacatagtggacgtgtacatgcacatgccttctgggaaggacatgtgggatgcacttgaggccaagttcggagtttctgacgccggcagtgagctgtatgttatggagcagttctatgactacaagatggtcgatgaccgttctgtagttgaacaagctcatgagattcagatgctggctaaggaacttgagaacaacaactgtgagttgccggacaagtttgtggcaggtggcattattgccaaactaccaccttcttggtcggactttgccacttctctaaagcacaacagacaagagttcagtgttcctgatctcattggctctttgggtgttgaggagaaggcgagggcaaaggacgtccagggcaaaaaggttgagggaggttctagtgccaatatggtacagaagaagaaccctcatgcatcccacaacaacaagaaagtcaagcctgatgtcaaacccaaggctgcaaccaattttaagaagaaaagcaagggaaaggcaaagggagactgctttgtgtgtggcaagtctgggcattgggccaaggactgtcctgagcgcaaagacaggaagtctgccaacatgatcattagcgagggcggaggaacatcggggtacggtaaaatattacctacagttctctctgtttttcattcacctgattggtgggtggacactggtgctaatattcatgtcaggagaggttcctccttgttgatgggaaacgggtcgcttgcggctgttcatggtgttggtacggtcgatctgaagtttacttcgggaaagaccgtgcagctgaagaacgtgcagcatgtcccttcaataaagaagaatctagttagcggctctctattgtgtagagaaggttttagacttgtgtttgagtccaataaatgtgtcgtatctaaatatgggacttttgttggaaaaggttatgatagcggaggcttgttccgcttttctttgaatgacatgtgtaataatcataatgctgtgaaccatattagcgagaatgatgagtctaatgatgaggcattgcatttctttaaaatctataaagctgagatagaaaaccaacttgaaaggaaaatcaaacggttgaggtctgatagaggtggggagtatttttccaatgagtttgcatccttttgcgaagagtttggaattattcatgagatgacgcctccctattcaccccaatcaaatggggtggccgaaagaaagaaccgtactctaactgagatggtgaatgccatgttagacactgcggggctttccaaggaatggtggggtgaggcagttttgactgcgtgtcatgtcctgaataaaattccaatgaagcataaggaagtaacaccattcgaggaatgggaaaggaagaaattaaatctctcatacctacgaacatggggctgtttggccaaggtaaatgtacctatagccaaaaaacggaaacttggaccaaaaactgttgattgtgtgtttcttggttatgctatccacagtgtgggttatagattcttaatagtaaactctggagtacccgacatgcatgttggtacaattcttgagtccagagatgctacattctttgagaatgaatttcctatgaaatatacacctagcacttctagtaaagaaacaatcatgccccatgagcactttgcaccgatagaacacaatgatcaaacgcctgaggaaaatcctgaggaggacaacattgtagatactcgcaagagtaagagacaaagggttgcaaaatcctttggagatgactacattgtatacctcgtggatgacaccccaagaaccatagaagaggcatattcatctcctgacgctgactactggaaggaagcagtacgcagtgaaatggactcgattatgtctaatggtacttgggaagtcgttgagcgtccatatgggtgcaagcccgtaggatgcaaatgggttttcaagaaaaagcttaggcctgatggtacaatcgaaaagtacaaggcaaggcttgtggccaagggttatacccaaaaggaaggcgaggacttcttcgacacatactcaccagttgctcgcttgaccacgattcgagtactacttgctctggcagcctctcatggtcttctcgtccatcagatggacgttaagacagctttcctaaacggagagctggaggaggagatctatatggatcaaccagacgggtatgtactagaaggtcaggagggaatggtgtgtaaactattgaaatccttgtatggcctcaagcaagcacctaagcaatggcatgagaagtttgacaccacgcttacatctgcaggctttgttgtgaacgaagctgacaaatgtgtatactatcgctatggtgggggagaagtggtgatcttgtgcttatatgtcgatgacatactgatctttgggaccagccttaatgtgattgaggaggtcaaagactatctgtccaagagttttgaaatgaaagatttgggagaggctgatgttattcttaacatcaaactacaaagaggagatgagggtgggattacacttgtgcaatcctactatgtggacaaggttttgagtcgctttggatatagtgactgcaagccagctcctactccttatgatcccagcgtgctattaaggaaaaaccgaagaatagcaagggatcagttgagatactctcaaatcattggttcattgatgtacttggctagcgcaacgaggcctgacatctcatttgctgtaagtaagctgagccggtttgtctcaaatccgggagatgatcattggcagactctggaaagagtaatgcgctatctaaagggtactatgagctatggaattcactataccgggtatccaaaagtactagaagggtatagtgactcaaactggatatctgatgctgatgagataaaagccacaagtggatatgtgttcacacttggaggtggcgctgtttcctggaagtcttgcaagcagaccatcttaacgaggtcaacaatggaagcagaacttacagcactagatactgcgacagttgaggccgagtggcttcgtgaactcctgatggatttgccggtggttgaaaaaccagtgccagctatcctaatgaactgcgataatcaaacagtgattattaaagtgaacagttcaaaggacaacatgaagtcatctagacacatcaagagaagactgaaatctgtcagaaagcagaaaaactccggagtgatagcattggactatgtctaa

SEQ ID NO: 86688 - DNA, 5317 bp, Oryza sativa
  Clone ID: PAT_MRT4530_85705C.1
atggacaaagacggccgacctagtgccccggcagaagcaaccaagaattttgtatgccacagcggttgggttgtgagggacaacgtgcctgtcagcacggtgtactggcgcagaacatgggcatgcagggataatgacagctttgtcccggactcagagaaagagatgttgtggaccacaatgctcgagacgttcacgctacccgcgggtacggagaacatagtgaaacggtggactctgaagaaaatggcagaacagttccagagcttcaagggagatctctacaagaaatacatcctgaaggaactaacaccgaacttcgacgtatttccaaagctaagagatcattgggacaagttcgttgcttacaagacagggcaacaagggcaagcgatgatggctagaaacaaagaaaatgccgccaagaagtaccatcaccacttgggcgatcagatacgcgaggctgccagtcaactaacggacgcagtggtagcctcttctcagggcacattccgacccgatagagagaaggatgagctgtcactcgccctacagactcccgagcatccaggacgaacacgagggaaaggcgtgatcccctggaagattggatttaaggaggacatccacatatacaggagtcggatgaggagcaagagagataccgaggcgaagattgcagatcttgagtacagggtattgagctacgagctcagcatgcaagaggaggtggcaaggaaggtaggatcacagagcatggacgccatgcaaacccaggacgaaaccacctgccccgttgatgagatcacgcagtggacaccatgtgagctgcatattcccttcaagaacttatcaatcaaggtggcgtcgggaatggccatcccaacggacccttccaggacttaccactgcaggccgattccagcaggatactcgagggtcgaagttgagctagtggaagctgcgtacgaggacctcgagttggactacccaggaggagacggcgacaagcggcgtctcgtgcaccatctcctccggctccgccatctcttcctgcaccatctcctccggttcctccgccacgtcctcctgcaccatctcctccggctcctccgccacctactcctgcaccatccggagccggaactggcgcaccgggagctggtgcaccgatcgacaacaccaacggaggcagttctgcctcacaatccagcggagggactttcacagggtataactctctactgttacttcggtttttgttatttcggttagtcacaatgctattgcgttctatgtatgatgatggtgcttattatatctgaagcatgctcctgtttatgtttgattttatcactagatcaactcatattgttcatgccatgattattgtcttaatattttggattaaaatatgctgatatatgactatatctccaacaatccaaaaacctgataggtcattttcggtagttggctttgccgctgcactgaaaccacatgcttttgatggttctaattataagagatggaaagcacggatactactgtggttgacagcgatgcaatgtttctatgtttcacggggtaaacgaagtgaaccacctctctctcctaaggaagaggttatgttcgaggcttcggattgcctgttccgtggagcattgatcaatgtactcgctgacaatatagtggacatgtatatgcacatgcctttagggaaggacatgtgggatgcacttgaggccaagttcggagtttccgacgccagcagtgagctgtatgtcatggagcagttctttgactacaagatggtcgatgaccgttctgtagtggaacaagctcatgagattcagatgctggctaaggaacttgagaacaataactgtgagttgccggacaagtttgtggcgagaggcattattgccaaattgccaccttcttggtcggactttgccacttctctaaagcgcaagagacaagagtttagtgtttctgatctcattggctctttgggtgttgaagagaaggcgagggcaaaggacaaccggggcaaaaaggttgagggaggttctagtgccaatatggtacagaagaagaatcctcatgcatcccacaacaacaagaaagtcaagcctgatgtcaaacctaaggctacaaccaattttaagaagaaaggcaagggaaaggcaaagggagactgctttatgtgtggcaagtctgggtattgggctaaggactgtcctgagcgcaaagataggaagtctgccaacatggtcattagcgagggcggaggaacatgggggtacgataaaattttacctacagttctctctgtttttcattcacctgattggtggattgatattggtgctaatattcatgtatgtgttgatatttccctgttttcttcttatcaggtcgggagaggttccttcctgttgatgggaaacgggtcacttgcggctgttcatggtgttggtacggtcgatctgaagtttacttcgggaaagaccgtgcagctgaagaacgtgcaacatatcccttcaataaagaagaatctagttagcggctctctactgtgtagagaagattttagacttgtgtttgaatccaataaatgtgttgtatctaaatatggaacttttattggaaaaggttatgacagcggaggcttgttccgcttttctttggatgacatgtgtaataataacaacgttgtgaaccatattagcgagaatgatgagtccaatgtgtggcattcgctactctgtcatgtgaatttcggttgtatgacgcgcttggctaaccatgagtttaattccaaaattcactttggtcaaatgtttcaagtgccatacttgtgttcaatcgaaacaacctcgcaagcctcacaaggcatctgaggcgagggatttggcacctctagaacttgttcattccgatttgtgcgaaatgaacggcgtgttgactaaagggggaaagaaatacttcatgacactgatagacaattgcactagattttgttatgtgtctctattgaaaacaaaggatgaagcattgcattactttaagacctataaagctaaggtagaaaaccaacttgaaaggaaaatcaaacggttgaggtctgataggggtggagagtatttttccaatgagtttacatccttttacgaagagtttggaattattcatgagaggacgtctccctattcaccccaatcaaatgggatagccgaaagaaagaaccgtactctaactgagatggtgaatgccatgttagacactgcgggactttccaaggaatggtggggtgaggcagttttgattgcgtgtcatgtcctgaataaaattccaatgaagcataaggaagtaacaccattcgaggaataggaaaggaagaaattaaatctctcatacctacgaacatggggctgtttggccaaggtaaatgtacctatagccaaaaagcgtaaacttggaccgaatactgttgattgtgtgttccttggttatgctattcacagcgtgggttatatattcttaatagtaaactctggagtacccgatatgcgtgttggtacgattattgagtctagagatgctacattctttgagaatgaatttcccatgaaaaatacacctagcacttctagccaagaaactgtcataccccatgagcactttgcaccgatagaacacaatgatcaaacgcctgagggaaatcctgaggaggataacattgtagatactcgtaagagtaagagacaaagggttgcaaaatcctttggagatgactacatcttatacctcgtggatgacactccaagaaccatagaagaggcatattcatctcctgacgctgactaatggaaggaagcagtacgcagtgagatagactcaattatgtctaatggtacttgagaagtcgttgagcatccatatgggtgcaagcctgtaggatgcaaatgggttttcaagaaaaagcttaggcctgatggtacaattgaaatgtacaaggcaaggctcgtggccaagggttatacccaaaaagaaggcaaggatttttcgacacctactcaccagttgctcgtttgaccacgattcaagtactacttgctctggcagcctctcatggtcttctcgtccatcagatggacgttaagacagctttcctaaacggaaagctggaggaggagatctatatggatcaaccagactggtatgtactagaaggtcaggagggaatggtgtgtaaactgttgaaatctttgtatggccttaagcaagcaccaaagcaatggcatgagaagtttgacaccacacttacatctgctggctttgttgtgaacaaagctgacgaatgtgtgtactatcgctatggtgggggagaaggagtgatcttgtgtttatatgtcgatgacatattgatctttgggaccagcctcaatgtgattgaggagatcaaggactttctatccaagagttttgaaatgaaggatttgagagagtctgatattattcttaccatgaagctactgagaggagatgagggtgggattacacttgtgcaatcccactatgtggacaaggttttaactcttactccttatgatcccagcgtgctattaaggaaaaaccgaagaatagcaagggatcaattgaggtactcccaaatcattggttcattgatgtacttagctagtgcaatgaggcctgacatctcatttgctgcaagtaagctgagccggtttgtctcaaatccgggagatgatcattggcaggctctggaaagagtaatgcgctatcttaagggcactatgagctatggaattcactatacctagtacccaaaagtactagaagggtatagtgactcaaactggatatctgatgctgatgagataaaagccacaagtggatatgtgttcacacttggaggtggcgttgtttcctggaagacttgcaagcagaccattttaacgaggtcaacaatggaagcataacttacagcactagatactacgacagttgaagccgactagcttcgtgaactcctgatggatttgctggtggttgaaaaaccagtgccagctatcctaatgaactgtgataatcaaacagttcaaaggacaacatgaagtcatctaggcatatcaaaagaagactgaaatctgttagaaagcagaaaaactctgcagtgatagcattggactatgtccaaacggctaggaatccaagatggagatcgttgcggaaacagagtaagaatcggctagagtccagatcggctgagtccgagttagatgaggat

SEQ ID NO: 86689 - DNA, 3381 bp, Oryza sativa
  Clone ID: PAT_MRT4530_85706C.1
atgcagtgcttctatgtttcacggggcaaacgaagtgaaccacctctttctcctgaggaagaggctaagttcgaggcttcggattgcctgttccatggagcattgatcagtgtactcgctgacaacatagtggacgtgtacatgcacatgccttctgggaaggacatgtgggatgcacttgaggccaagttcggagtttctgacgccggcagtgagctgtatgtcatggagcagttctatgactacaagatggtcgatgaccgttctgtagtagaacaagctcatgagattcagatgctggctaaggaacttgaaaacaacaactgtgagttgccggacaagtttgtggcgggtggcattattgccaaactaccaccttcttggtcggactttgccacttctctaaagcacaagagacaagagttcagtgttcctgatctcattggctctttgggtgttgaggagaaggcgagggcaaaggacgtccggggcaaaaaggttgagggaggttctagtgccaatatggtacagaagaagaaccctcatgcatcccacaacaacaagaaagtcaagcctgatgtcaaacccaaagctgcaaccaattttaagaagaaaggcaagggaaagacaaagggagactgctttgtgtgtggcaagtctgggcattgggccaaggactgtcctgagtgcaaagacaggaagtctgccaacatgatcattagcgagggcggaggaacatcggggtatggtaaaatattacctacagttctctctgtttttcattcacctgattggtgggtggatactggtgctaatattcatgtcgggagaggttcctccttgttgatgggaaacgggtcacttgcggctgttcatggtgttggtacggtcgatctgaagtttacttcgggaaagaccgtgcagctgaagaacgtgcagcatgtcccttcaataaagaagaatctagttagcggctctctattgtgtagagaaggttttagacttgtgtttgagtccaataaatgtgtcgtatctaaatatgggacttttgttggaaaaggttatgacagtggaggcttgttccgcttttctttgaatgacatgtgtaataatcataatgctgtgaaccatattagcgagaatgatgagtctaatgtgtggcattcgcgactctgtcatgtgaatttcggttgtatgacgcgcttagctaacatgagtttaattccaaaattcactttggtcaaaggttccaagtgccatacttgtgttcaatcgaaacaacctcgcaagcctcacaaggcatctgaggcgaggaatttggcacctctagaacttgttcattccgatttgtgcgaaatgaacggcgtgttgactaaagggggaaagaaatatttcatgacactgatagatgattgcactagattttgctatgtgtatctattgaaaacaaaggatgaggcattgcattactttaaaatctataaagctgaggtagaaaaccaacttgaaaggaaaatcaaacggttgaggtctgatagaggtggggagtatttttccaatgagtttgcatccttttgcgaagagtttggaattattcatgagatgacgcctccctattcaccccaatcaaatggggtggccgaaagaaagaaccgtactctaactgagatggtgaatgccatgttagatactgcggggctttccaaggaatgcacttctagtaaagaaactgtcatgccccatgagcactttgcaccgatagaacacgatgatcaaacgcctgaggaaaatcctgaggaggacaacattgtagatactcgcaagagtaagagacaaagggttgcaaaatcctttggagatgactacattgtataccttgtggatgacaccccaagaaccatagaagagacatattcatctcctgacgctgactactggaaggaagcagtacgtagtgaaatggactcgattatgtctaatggtacttgggaagtcgttgagcgtccatatgggtgcaagcccgtaggatgcaaatgggttttcaagaaaaagcttaggcctgatggtacaatcgaaaagtacaaggcaaggcttgtagccaagggttatacccaaaaggaaggcgaggacttcttcgacacatactcaccagttgctcgcttgaccacgattcgagtactacttgctctggcagcctctcatggtcttctcgtccatcagatggacgttaagacagctttcctaaacggagagctggaggaggagatctatatggatcaaccagacgggtatgtactagaaggtcagaagggaatggtgtgtaaactattgaaatccttgtatggcctcaagcaagcacctaagcaatggcatgagaagtttgacaccacgcttacatttgcaggctttgttgtgaacgaagctgacaaatgtgtatactatcgctatggtgggggagaaggggtgatcttgtgcttatatgtcgatgacatactgatctttgggaccagccttaatgtgattgaggaggtcaaagactatctgtccaagagttttgaaatgaaggatttgggagaggctgatgttattcttaacatcaaactacaaagaggagatgagggtgggattacacttgtgcaatcccactatgtggacaaggttttgagtcgctttggatatagtgactgcaagccagctcctactccttatgatcccagcgtgctattaaggaaaaaccgaagaatagcaagggatcaactgagatactctcaaatcattggttcattgatgtacttggctagcgcaacgaggcctgacatctcatttgctgctctggaaagagtaatgcgctatctaaagggcactatgagctatggaattcactataccgggtatccaaaagtactagaagggtatagtgactcaaactggatatctgatgctgatgagataaaagccacaagtggatatgcgttcacacttggaggtggcgctgtttcctggaagtcttgcaagcagaccatcttaacgaggtcaacaatggaagcagaacttacagcactagatactgcgacagttgaggccgagtggcttcgtgaactcctgatggatttgccggtggttgaaaaaccagtgccagctatcctaatgaactgcgataatcaaacagtgattattaaagtgaacagttcaaaggacaacatgaagtcatctagacacatcaagagaagactgaaatctttcagaaagcagaaaaactccggagtgatagcattggactatgtccaaacggctagaaatctggcagatcagtttaccaaggggctaccacgtaatgtgatagacagtgcatcgagggaaatgggcttgatacccacctaa

SEQ ID NO: 86690 - DNA, 217 bp, Oryza sativa
  Clone ID: PAT_MRT4530_85707C.1
aacgggttatttattgttttaatgttttcacatataatccaatactattcccaacacgcaaaagagaccatccaacattacgaagatctaaaccgatctgaccaaacctttcagttatagtagtaaatactatacgtaccatacaagccggtaacaatactaacaaaatctaagtcccatggaacgagcaattacacaatttcacacaggttccaaa

SEQ ID NO: 86691 - DNA, 209 bp, Oryza sativa
  Clone ID: PAT_MRT4530_85708C.1
tttttgtcagtcaaaagaggtgggattagattaataatctatttgagaaactgccaaagacaattcgggtcagctcagctcatggcatatatacagggaaggaacttacaatgggcaggcgctctctcattactgcagtactacccatagaacactctttccagcactcaattaacacgccctttgctgttcgcgctgcgggcaacagc

SEQ ID NO: 86692 - DNA, 3249 bp, Oryza sativa
  Clone ID: PAT_MRT4530_85709C.1
atgtctggagttgccgccgctgctggaggagatggcggaggtggtgcgccgccaacaggagccggagctagtgcgccaggaggaggtgccgtgaacgacaacaacaacggaggcaattctgcctcaccatccagcggagggccattctcgggcgctattcctgttccattattagcgctatcgctatactatgtgcgctatgttcttgttcctgttcttcatgatgcctctatgcgttactgttatgttcctgttcctgacattcatgatgcgcatagtatgctactggttatgttaagatcgccctacactgcttatgccatgattattgctttaacattttggattaaaatatgccgattaatgactatatttccaacaatccaaaaacttgataggtcattttcggtagttggctttgctgctgcactgaaaccacatgcttttgatggttcaaactataaaagatggaaagcacgtgcactattgtggttgacagcgatgcagtgcttctatgtttcacggggcaaacgaagtgaaccacctctttctcctgaggaagaggctaagttcgaggcttcagattgcctgttccgtggaacattgatcagtgtactcgctgacaacatagtggacgtatacatgcacatgccttctgggaaggacatgtgggatgctcttgaggccaagttcggagtttctgacgccgacagtgagctatatgtcatggagcagttctatgactacaagatggtcgatgaccgttctgtagtagaacaagctcatgagattcagatgctggttaaggaacttgagaacaacaactgtgagttgccggacaagtttgtggcgggtggcattattgccaaactaccaccttcttggtcggactttgccacttctctaaagcacaagagacaagagttcagtgtttctgatctcattggctctttgggtgttgaggagaaggcgagggcaaaggacgtccggggcaaaaaggttgagggaggttctagtgccaatatggtacagaagaagaaccctcatgcatcccacgataacaagaaagttaagcctgatgtcaaatccaaggctacaaccaattttaagaagaaagacaagggaaaggcaaaggtagactgctttgtgtgtgacaagtctgggcattgggccaaggactgtcctgagcgcaaagacagaaagtctgccaacatggtcattagcgagggcggaggaacatcggggtacggtaaaatattatctacagttctctctgtttttcattcacctgattggtgggtggacactggtgctaatattcatgtcgggagaggttcctccttgttgatgggaaacgggtcgcttgcggctgttcatggtgttggttccaagtgccatacttgcgttcaatcgaaacaacctcgcaagcctcacaaggcatctgaggcgaggaatttggcacctctagaacttgttcattccgatttgtgcgaaatgaacggcgtgttgactaaagggggaaagaaatatttcatgacactgatagataattgcactagattttgctatgtgtatctattgaaaacaaaggatgaggcattgtattactttaaaatctataaagctgaggaagtaacaccattcgaggaatgggaaaggaagaaattaaatctctcatacctacaaacatggggctgtttggccaaggtaaatgtacctatagccaaaaagtggaaatttggaccaaatactgttgattgtgtgttccttggttatgctatccacagtgtggtttatagattcttaatagtaaactctggagtacctgacatgcatgttggtacaattcttgagtccagaggtgctacattctttgagaatgaatttcctatgaaacatacacctagcacttctagtaaagaaactgtcatgccccatgagcacttggcaccgatagaacacaatgatcaaacgcctaaggaaaatcctgaggaggacaacattgtagatactcgcaagagtaagagacaaagggttgcaaaatcctttggagatgactacattgtatacctcgtggatgacaccccaagaaccatagaagagacatattcatctcctgacgctgactactggaaggaagcagtacgcagtgaaatggactcgattatgtctaatggtacttgggaagtcgttgagcgtccatatgggtgcaagcccgtaggatgcaaatgggttttcaagaaaaagcttaggcctgatggtacaatcgaaaagtacaaggcaaggcttgtggccaagtgttatacccaaaaggaaggcgaggacttcttcgacacatactcaccagttgctcgcttgaccacgattcgagtactacttgctctggcagcctctcttggtcttctcgtccatcagatggacgttaagacagctttcctaaacggagagctagaggaggagatctatatggatcaaccagacgggtatgtactagaaggtcaggagggaatggtgtgtaaactattgaaatccttgtatggcctcaagcaagcacctaagcaatggcatgagaagtttgacaccacgcttacatctgcaggctttgttgtgaacgaagctgacaaatgtgtatactatcgctatggtgggggagaaggggtgatcttatgcttatatgtcgatgacatattgatctttgggaccagccttaatgtgattgaggaggtcaaagactatctgtccaagagttttgaaatgaaggatttgggagaggctgatgttattcttaacatcaaactacaaagaggagatgagggtgggattacacttgtgcaatcccactatgtggacaaggttttgagtcgctttggatatagtgactgcaagccagctcctactccttatgatcccagcgtgctattaaggaaaaaccgaagaatagcaagggatcaactgagatactctcaaatcattggttcattgatgtacttggctagcgcaacgaggcctaacatctcatttgctgtaagcaagctgagccggtttgtctcaaatccgggagatgatcattggcaggctctagaaagagtaatgcgctatctaaagggcactatgagctatggaattcactataccgggtatccaaaagtactagaagggtatagtgactcaaactggatatctgatgctgatgagataaaagccacaagtggatatgtgttcacacttggaggtggcgctgtttcctag

SEQ ID NO: 86693 - DNA, 1651 bp, Oryza sativa
  Clone ID: PAT_MRT4530_8570C.1
ctagtggatcccccgggctgcaggactaaaatgatgatgaacaagtaataggagaaggcaaacggttttgtctccaagttgactgtcagttgggtatcgtttcatagcttaaaattttgagcctgcatgaacttttgcattgtctatttgattcttcaatttattgtgcacttgtgcagtaaagcccatgtgatctgtacttgatggtttctaacaacatatccatgacatcttcttcatttccttacatgctagtacatttgtatttgcttagatattgttacatttttttcagatcattctgtgtttccccattttcgcaatcactactgcactatgaaactgtattactggactacccacaaaactatacaatatgaaataattctctgattggggcgctggagattcgtcctagaccggccggggacgacctcttcttccctttcctctcctccgccgccgctcccccgactccggcgagcccccttccccccacccatcggcgcggaggacgttgccgggatgagcgtctccccttcaaccggacgcgatctcccggggcgctcccgtatgcccttgcgctgctagagatccgggctcttctcggatctcaggagtacaagatatagtgtaccagctctctctcattcaacatgtggagttttgcgtcaaacgccatagctggaagcataaggaaaaaagcacagccctcaaaatgcagtcaatccaatcctgattgctctgatgatgatgtttcttcatgtgcaagtagagaggaaggccttgaatgtccaatatgttgggaatccttcaaccttgttgagaatgttccctatgtcttgtggtgcggtcatacaatgtgcaagaattgcatcttgggtcttcaatgggctgtcgtcaagttcccaacccttcctatacaactgcctctcttcatctcatgtccatggtgtaacctgttatctttccggctagtttacaagggaaacctcaagttcccacgcaagaactattttctgctatggatggttgagagcatgaatggcgagagagcaaagttccattcccctagtcatgaagagcgccattctttatgcccttctggtggtggcccaagttccagtcaacaccatcgaagacctgctccacgaacagaaagcgccagtggcagagaaaggagtgttgctggcaacgttttcaatacttacagcatcagtgcatctctccaaaagataatgttgtcttttgttcagatgacagccaagtttccactcgtgataattttccttctgatagttctatatgctgtccctgcaagcgtagcagttctagtattgtatgtccttgttacagttttgtttgcactgccgtcctttttgatcctctactttgcttatcccagtttggattggctcgttagagagatcttcaattgagttatattgtactccatgtcattacagtttataactcagcagcagaaaatttagcatttgcaatctcatgtgctctgggggaggatgtcaagtgtgatttcttatccattcgattgaggccttcagggacagtagttgtaagatggaactctaattattgcattgatatacatgaatcactcaggttttactgtaaaaaaaaaaaaaaaaaa

SEQ ID NO: 86694 - DNA, 669 bp, Oryza sativa
  Clone ID: PAT_MRT4530_85710C.1
atgggcaacgctctcaccggcaagcggcgcgtggcgaaggtgatgacggtggacggcgccacgttccggtacagggcgccggcgacggcgggcgcggcgctgcgcgggcacccggccgggcaccagctgctcgagtcggaggaggtccgtcgcctcggcgtgcgcgccaggccgctcgaccgcgacgcgccgctcaagcccggcaagctctacttcctcgtccagctcccccgcggcgccgccggctatggcggcgacgacgacccgcgggcgccgcgcaagacgtggtcgggggcgctccacgtgggcgcgagggagcggctggagaaccctgatgctgtcgcggcgcaccgtgtcggacatggcgtcggtggtgccggcggcgagggcggtggccggcggccggcggcgagccggcgcggaggccgtcgtccgtggagcaaggacgccgccgaggccgccgagaggatcatgcagctgtgcgtcgccagggaccagggcggcgccggcgccggcgccgccgtcacgctcgctgcctccggcccggtgtcggcgatgtcggggaggaagacgtcggccatgaagaaagagttcgccggcgtgtgtgctgcacttggcgtcagtaacctttttggctcacgtggtgcgcatgtgcgtgctgcccaataa

SEQ ID NO: 86695 - DNA, 3282 bp, Oryza sativa
  Clone ID: PAT_MRT4530_85711C.1
atgtgggatgcacttgaggccaagttcggagttctcgacgccggcagcgagctgtatgtcatggagcagttctgtgactacaagatgatgctggctaaggaacttgagaacaacaactgtgagttgccggacaagtttgtggcgggtggcattattgccaaattgccaccttcttggttggactttgccacttctctaaagcacaagagacaagagttcagtgtttctgatctcattggctctttgggtgttgaagagaaggcgaggataaaggacaaccggagcaaaaaggttgagggaggttctagtgccaatatggtacaaaagaagaaccctcatgcatcccacaacaacaagaaagtcaagcctgatgtcaaacccaaggctacaaccaattttaagaagaaaggcaagggaaaggcaaagggtgactactttgtgtgtggcaagtctgggcattgggccaaggactgtcctgagcgcaaagacaggaagtctaccaacatggtcattagcgaggagggcggaggaacatcggggtacggtaaattattacctacagttctctctgtttttcattcacctgattggtgggttgatactggtgctaatattcatgtcgggagaggttccttcttgttgatgggaaacgggtcacttgcggctgttcatggtgttggtacggtcgatctgaagtttacttcgggaaaggccgtgcagctgaagaatgtgcagcatgtcccttcaataaagaagaatctagttagcggctctctactgtgtagagaaggttttagacttgtgtttgaatccaataaatgtgtcgtatctaaatatggaacttttattagaaaaggttatgacaacggaggcttgttctgcttttctttggatgacatgtgtaataataataatgttgtgaaccatattagcgagaatgatgagtccaatgtgtggcattcgcgactctgtcatgtaaatttcggttgtatgatgcgcttggctaatatgagtttaattcaaaaattcactttggtcaaaggttccaagtgccatacttgtgttcaatcgaaacaacctcacaaacctcacaaggcatctgaggcaagggatttggcacctctagaacttgttcattccgatttgtgcgaaatgaacggcatgttgactaaagggggaaagaaatatttcatgacactgatagatgattgcactagattttgttatgtttatctattgaaaacaaaggatgaagcattgcattactttaagacctataaagctgaggtagaaaaccaacttgaaaggaaaatcaaacggttgaggtctaatagaggtggggagtatttctccaatgagtttacatccttttgcgaagagtttggaattattcatgagaggacgcctccctattcaccccaatcaaatggggtagccaaaagaaataactgtactctaactgagatggtgaatgccatgttagacactgcgggacatttcaaggaatggtggggtgaggcagttttgattgcgtgtcatgtcctgaataaaattccaatgaagcataaggaagtaaatgtacctatagccaaaaagcataaacttggaccgaatactgttgattgtgtgttccttggttatgctattcacagcgtgggttatagattcttaatagtaaactctggagtacccgacatgcgtgttggtacaattattgagtccagagatgctacattctttgagaatgaatttcccatgaaaaatacacctagcacttctagtcaagaaactgtcataccccatgagcactttgcaccgatagaacacaatgatcaaacgcttgagggaaatcctgaggaggataagattgtagatactcgtaagagtaagagacaaagggttgcaaaatcctttggagatgactacattgtataccttgtggatgacactccaagaaccatagaagaggcatattcatctcctgacgctgactactggaaggaagcagtacgcagtgagatggactcgattatgtccaatggtacttgggaagtctttgagcgtccatatgggtgcaagcctgtaggatgcaaatgggttttcaagaaaaagcttaggcctgatggtacaattgaaaagtacaaggcaaggcttgtggccaagggttatacccaaaaagaaggcgaggattttttcgacacctactcactagttgcccgtttgaccacgattcgagtactacttgctctggcagcctctcatggtcttctcgtccatcagatggacgttaagatagctttcctaaacggagagctagaggaggagatctatatggatcaaccagatgggtatgtactagaaggtcaggagggaatggtgtgtaaactgttgaaatccttgtatggccttaagcaagcacctaagcaaaggcatgagaagtttgacaccacacttacatttgcaggctttgttgtgaacgaagctgacaaatgtgtgtactatcgctatggtgggggagaaggagtgatcttgtgcttatatgtcgatgacatattgatctttgggaccagcctcaatgtgattgaggaggtcaaggactttctgtccaagagttttgaaatgaaggatttgggagaggctgatgttattcttaacattaagctactgagaggagatgagggtgggattacacttgtgcaatcccactatgtggacaaggctctaaaaagagtaatgcgctatctaaagggcactgagctatgggcactgagctatggaattcactataccgggtacccaaaagtactagaagggtatagtgactcaaactggatatctgatgctaatgagataaaagccacaagtggatatgtgttcacacttggaggtggcgctgtttcctggaagtcttgcaagaagaccatcttaacgaggtcaacaatggaagcagaacttacagcactagatactgcgacagttgaggccgaatggcttcgtgaactcctgatggatttgccggtggttgaaaaaccagtgccagctatcctaataaactgtgacaatcaaacagtgattattaaagtgaacagttcaaaggataacatgaagtcatctaggcatatcaaaagaagactgaaatctgtcagaaagcagaaaaactccggagtgatagcattggactatgtccaaacggctaaaaatctggcagatcagtttactaaggggctaccacgtaatgtgatagacagtgcatcgagggaaatgggcttgatacccacctaa

SEQ ID NO: 86696 - DNA, 323 bp, Oryza sativa
  Clone ID: PAT_MRT4530_85712C.1
tttgtttttttattttttgggttttttttttgcgcaattgattttattttcaccatgcattcgtcaaataaaaacagccttcatcacaaaggggcatactcctcgtattaaagatccaacaggttaagggaacacccgagcttcaaactccacatgaccaaaagtggaggctgacaagggggtacctaggccactcatacggcggaggacatcttcatggaatttacgagctccctaactcgggatgacccgggaagggactttctgttagaaaagagaattctgttttcacaaaacccatgcccacaaaaaagggtatgaac

SEQ ID NO: 86697 - DNA, 3255 bp, Oryza sativa
  Clone ID: PAT_MRT4530_85713C.1
atgatgtaccgggagaccttcgccgacgaggtcggacacatcaggaagtcgttcgagatgctcgagggagctaatgtccagcaagttattcctgaagctgctggaggctatgctcaagaccgggaacaggatgaacgttgggacctcctgcggcggcgccatggcgttcaagctcgaagcgctgctcaaattcacctatgtcgagggcaccgacgggaagccacgctgctccacttcgtagtgcaggagatgaccctgtcgagcgccgccgaggcggcggacattgccgcggggctcgccgccgagctcaccaatgtcaggaagacggcgaccgtggacctggacgtgcttaccacctcggtgtccggcccgtcgcacggcctgtcccaaatcaaggagctgattgggagtgacctgtccggctatgagaggaaccagtgcttcgcgcgtggccttcatgtgactacactgttcacattatttgcctttccgctgttgaagttagactttggatctgaatctatacggaagagtggtagatccagtgaaccacctctttctcctgaggaagaggctaagttcgaggcatcggattgtctgttccgtggagcattgatcagtgtactcgctgacaatatagtggacgtgtacatgcacatgccttctgggaaggacatgtgggatgcacttgaggccaagttcggagtttctaacgccggcagtgagctgtatgtcatggagcagttctatgactacaagatgttgccggacaagtttgtggcgggtggcattattgccaaattgccaccttcttggtcggactttgccacttctctaaagcacaagagacaagagttcagtgtttctgatctcattggctctttgggtgttgaggagaaggcgagggcaacggacatccgggaaaaaaaggttgagggaggttctagtgccaatatggtacagaaaaagaaccctcatgcatcctacaacaacaagaaagtcaagcctgatgtcaaacccaaggctgcaaccaactttaagaagaaaggcaagggaaaagcaaagggagactgctttgtgtgtggcaagtctgggcattgggccaaggactgtcctgagcgcaaagacaggaagtctgccaacatggtcattggcgagggcggaggaacatcggggtacggtaaaatattacctacagttctctctgtttttcactcacctgattggtgggtggacactggtgctaatattcatgtcgggagaggttcctccatgttgatgggaaacgggtcgcttgcggctgttcatggtattggtacggtcgatcagaagtttacttcgggaaagaccgtgcagctgaagaacgtgcagcatgtcccttcaataaagaagaatcttgttagcggctctctactttgtagagaaggttttagacttgtgtttgagtccaataaatgtgtcgtatctaaatatgggacttttgttagaaaaggttatgacagcggaggcttgttccgcttttctttgaatgacatgtgtaataatcataatgttgtgaaccatattagcgagaatgatgagtctaatgtgtggcattcgcgactctgtcatgtgaatttcagttgtatgacgcgcttagctaacatgagtttaattccaaaattcactttgatcaaaggttccaagtgccatacttgtgttcaatcgaaacaacctcgcaagcctcacaaggcatctgaggcgaggaatttggcacctctagaacttgttcattccgatttgtgcgaaatgaacggcgtgttgactaaagggggaaagaaatatttcatgacactgatagatgattacactagattttgttatgtgtatatattgaaaagaaaggatgaagcattgcattactttaaaatctataaagctgaggtagaaaaccaacttgaaaggaaaatcaaacggttgaggtctgatagaggtgaggagtatttttctaatgagtttgcatccttttgcgaagagtttggaattatttatgagaggatgcctccctattcaccccaatcaaatggggtggccgaaagaaagaaccgtactctaactgagatggtgaatgccatgttagagactgcggggctttccaaggaatggtggggtgaggcagttttgactgcgtgtcatgtcctgaataaaatttcaatgaagcataaggaagtaacaccattcgaggaatgggaaaggaagaaattaaatctctcatacctacgaacatggggctgtttggccaagcactttgcaccgatagaacacaatgatcaaacgcctgagaaaaatcctgaggaggacaacattgtagacactcacaagagtaagagacaaagggttgcaaaatcctttggagatgactacattgtataccttgtggatgacaccccaagaaccatagaagagacatattcatctcctgacgctgactactggaaggaaataatggatgttaagacagctttcttaaacggagagctggaggaggagatctatatggatcaaccagacggccttaatgtgattgaggaggtcaaggactatctgtacaagagttttgaaatgaaggatttgggagaggctaatgttattcttaacatcaaactacaaagaggagatgagggtgggattacacttgtgcaatctcactatgtggacaaggttttgagtcgctttggatatagtgactgtaagccagctcctactccttgtgatcctagcgtgctattaaggaaaaaccgaagaatagtaagggatcaactgagatactctcaaatcattggttcattgatgtacttggctagtgcaacgaggcctgacatctcatttgctgtaagcaagctgagccggtttgtctcaaatccgggagatgatcattggcaggctctggaaagagtaatgcgctatctaaagggcactatgagctatggaattcactataccgggtattcaaaagtactagaagggtatattgactcaaactggatatctgatgctgatgagataaaagtcacaagtggatatgtgttcacacttggaggtggtgttgtttcctggaagtcttgcaagcagaccatcttaacaaggtcaacaatggaagcagaacttacagcactagatactgcgacagttgaggccgagtggcttcgtgaactcctgatggatttgccggtggttgaaaaaccagtgcgcgccagctatcctaatgaactatga

SEQ ID NO: 86698 - DNA, 5861 bp, Oryza sativa
  unsure (1)..(5861): unsure at all n locations
  Clone ID: PAT_MRT4530_85714C.1
cagaaacccggtccgcttcgcgcgcggtgccccggggccgacgcgtcgccttagcgaatccagcagcagaagcagcagcagcagctcagccgccgccgatggcgtccacgatcatggccccaacctcccgcgtcctcgccgccaagacccccttcctcggccatccccgcccctccaatgcccccgtccgcgacatcgccgccgccgccaccggccgcatcaccatgagcaaggagctgtggtacgggccggatagggtgaagtacctggggccattctcggcgcagacgccgtcgtacctgaggggcgagttcccgggcgactacgggtgggacacggcggggctctccgcggacccggaggcgttcgcgaggaacagggcgctggaggtgatccacggccggtgggcgatgctcggcgcgctgggctgcatcacgccggaggtgctcgagaagtgggtgcgcgtcgacttcaaggagcccgtgtggttcaaggccggcgcccagatcttctccgacggcggcctcgactacctcggcaaccccaacctggtgcacgcccagagcatcctcgccgtgctgggattccaggtcgtcctcatgggcctcgtcgagggctaccgcatcaacggcctccccggcgtcggcgacggcaacgacctctaccccggcggccagtacttcgacccgctcggcctcgccgacgaccccgtcaccttcgccgagctcaaggtcaaggagatcaagaatggccgcctcgccatgttctccatgttcggcttcttcgtccaggccatcgtcaccggcaagggccccttggagaacctgctcgaccacctcgccgaccccgtcgccaacaacgcctgggtctacgccaccaagttcacgccgggctcgtgaatggcccagccgccattgtagactactctctctctccatcgctcgatgtaccaatgcttgcacagattgtacgatgctgtgatgaatctgatatgatccatccagaattcagaaactgaaaaaagttggggtttgcaacttatgtgtcagctgctgctttaagcttagttaactcttttgatgttttaatttgtacatttgtgtactttgtaatgatccatacgagacctagtgtttgattattgctaatttgctgtggcaatttcttgcaaaaaaaaaaaaaaaaaaaaaaaaaaattcaaatttttgaagatacaaaccttgcagacttcagttgaagcagagacaaaaacatttgcatttttttttttttttggagtaaaaacgccttgcaaattcgatgatttccttgctgtacacatattacagagctggtgttgcattatctctattcgctcatggcggataatctgtatttaattacccttccatatctcaggttcatctctctacatacaagatggcatacatacactgacaacaaagaactaatatacatgtacagacttcttgctttcacctatataaatcttttctctgataagctggacaccggacgatcgagtgccagcaccaccgccattgatgatggagctcatcatcgtcatcaacaacatcaccatcatctcgtcaggcttgcgatgaagaggagagaacctcgaagccttgtttttcacctcccagtctcttccattgtctcttcttggatgcagtagcagggaatgtagggaaatgcacttggattcagattgaatgcattcactttgagctcttcttcccccaccatcttttccgggatttctcctcaccaaccttctgaagatttaccttggtctccttcaaccgagacttgtagtctttcttccatgtcgcgaatcggtccttgagctttcggagttcatcgtctgggttcatgtttgaaccaacttgtccggacttcacggcaacaaggaagccagcatcgtcttcaaacacctgccgcctgtcctcaaactccttggctaggtggttcaccgcgtttatccgcctatctgaattcggtgctgccactctagcctcagagttgtggttttgatatttgaactctgtcccttcaggggtatgggtcccggtcgacgtatcttcagaatcataatgagcatgcattggagcagcgtcggttcgagctgctcggctggccacatcttctgcagttaggctcttcttggcagccacaaggctcaactgcagagaggagagctgcttcttccatgcctcttccatagatttcattttggcctcatattctgaccatttcttctcatattgatccaattgttgctttagcatttcgttttcttcctccttatctcgcaatgcagcctcagcttttgaaacacgtccctggagttccgtgataactggttgccgaggataatctccattcgtttcctgccatgggatgctaatcgttagaggatacacatgatacatccgcgcttgtgaaacattattccttacatgtataacttttctgtgactagcctttgagtccttctcttccttcaggcacttatatttcttcctggccaagcacccacgcatcactgattgtagaagaacaacatatttgagctgatcaataaacatggtagctgcaattcgacgcctagcatacttctgtatgagaacagatgccttccatctctttacaagatgatcaaagtgaactcttgccttttcacctcttataaatgattgcaaagtcattgctcctttcttcagtccctggtattcttgtctagtacacaacccacggaagttcttctgaatccgaagggctccatggagcatccgattcttagcattttccagtgcagcaacctgtcctgtacgaagaaacaattttgtatagccaacttgatacatttctggtggaatattgaactgttgtaatacagcaaccgaaatactaagaggatcctgcgatgcaatggaacgcaggagaagacacccatatctttcagcaaactgttggtgagtcatcctagttggatagcctgctcttgatatccgcacaacttcgagcaccccacaacacttaagctggtgtgaaacaagatcatgctcaaatagcatgggacgttgtttgctatttggctggatgcatcgaatgaaatgaggagttgtgttctccaattgctgcatcagcttgaacagttgagccttaaatttggtcacgacactttgcttttgtgaatcaacagctgagtgccatgacaaggttgatttattctgagaatcagcaaccatgacagaggcaaagtattttgggagttcagatttacatgatgagagtagttgaattaactcagagttcaacggatctctgttcttctccaagaaaccagttgtatcatacgtcacctctccagcataatggcaaatcttaaaagcaccttcttgttcacccctgaaggcagagtttcccctcaagtgctgcttaagcttgttagcaaaagaaaagtctgttgcctttgggaatgtagactcttcatccagtaatgataatagccctagaggtttcttctcaaagagagttaagcagtcagcattatccacaaattccacatttgcccagtcaattccatcctctaagtattcctcctgttctagcttgaaaagatgtcgattgaagtgctgttgtagcctttcgttggcatagtttatacaaaattgctcaaaaccattcttaatgaaagactcgaacccataaatatctaaaatacttatggatctccatgtgtgttctcttccagttccaagtgagtggttaatttgctcaacaacccagtcaaacaaatgggcgtaaatggactttgctagagcatcccttgcatcaatagcctgagttaatgtcagcttttgaataatattgtcctttccagcttggattttacgtgtagtgagggcattcatcaattgaggagcgctgcaacctaacagcttggctgcagtagccaacccttcatttgaaacaatctccacatgattttcattgtctatcacagagaatgaaatgtttccaagccacaagacagctgcgagcatggaaaacaatttcatttggtcttctttagatatttgaataatatcgagtgcatccactagcattgaaaatcttttagcatcatcaacaccatcaattctcaagcaagcactctgctttaagtaattgtagtaatcggcttctttcaaaaacagtttttcagacagctttccagtttcagagaagtgtatttcagtaagtttaccaaatcgactagagttatcatttcttgatgtttttgcattccctaatgcttccagaatagcatttgtctgaagaacctcagactccattcctctggcatcccctagagtggccaaatattgcattgcaattttagctgtctcagtctttcctgctccactttcgccacttattattatagattggtttacgccatctcttcgcatttcattaaaagccaagtcagctattgcatacacatgtggatcatcattgagctttttcctgtattgcgagatgaaatctttcccatagagagcaacttcttttaatggattaacagcaaccagaacaggccctgcttttgtataaataagatcacgagaatatctggactgcagatcgtaaagaactgagggttcatttaaatagctgagatggattaaattatccactccatcaagaatatcagggttcgccggcaagagtctgtctggtgacagtgtcaaaacctctccattaaccaggagtatttcaacatcatctccagaaactgattgaatctgtccaagtttccatgttgcatctggtgaagaacaccaaactcggagcttcttctggaggacataatccatggtatcagtgaacaccggcttcccatttgtctttgtccttggagaaacagaagggagctccttagagaccatcatctccttcctttccttgtgaatgttatcagcatacggcgactcctcaagaacctccccattagagaacttcctcttggccccaaatatgcgagtttttaccacattctcctccttggcctcctgaacacaaatcttcatctcaacccctggcttcttgtcagccatcaccatatccgccacagcgccttctgccgcgccattctcaagattaaccccagccatcaccgtatccgccacagcgccttttgccgcgccattctcaagcttaaccccagaaggcagtgatggccgtcttgcactgggcaagcggccgcggcacgtcggccgcgctggcaatgccggaggcgcatccttgggctgctcatcgcgcttctttatcgtctccagcaagacctccagggagctcttcgccgcggccggggctggcgccatcacggcggctgcagagagcatcaccgccgtgggaaatcacacaaaagccaccagatcagaccagtgacctacacgcaggctcacacaccaatccgccaaatcctgccgcggggcaccatggcaaccaaaaccttctccatctcgcaccaatattatctccaaatttaggtgcacacgcccctaactcaaaagcaaagggctcgaaagtgacagcgcccccaaacccccaaattctgccgccaagggctcaaaatcccctcaacaatctctcanattcccactcccccagcaccgaattagcactcaattgcacgcaccaagaacagatttcggcggtgcacgaatccaagggacggggggggtaaaacccanactccgcgcgatttttgaagggggggaaaagacccggnggcccaagcttggaatcggcaaggggcgactgcaaaagctggcgaaaggaaaggggccaaaagaaccccgaaccaaaaa

SEQ ID NO: 86699 - DNA, 849 bp, Oryza sativa
  Clone ID: PAT_MRT4530_85715C.1
aggcccaaataaggagccccgggttttcaaaaaaaacccgttgggttgtaaaccatctgacaccaaagagggttgctagctaaaactacaagcatacagaaaaaaaggaaaaaaattacaaatacaccgtttatttttttctctcataaatattcgggttgtaattttattggcacagatataccgttgatattacgatcttgcacaataaaaacacgagaccgcagttcgtgagagcgagtggtctcgcaaactcaagtagcgataccgatccttgccgctaatctctactactttaaaattttgtagtggtgacagacacgcgcaatcgtacccattggatccagatatccaacgcttcagaatgggtgctgtaggcgcagacacatgcatcccctccccaccccccgagtcgtcgacctctcctcgttcctcacaaccaccgcgatctctcgccctcgatggctcgatccctctctccgccgctccctccgccactcccggcatccaacgcgcctcctccgtgctctcctccccatcgccactgcggtgcctcgccgaaagacgttgcccccactcatccatccagggcgtcatcgtcgtgcgatcctgcaagccagcaacgaggtgcttcggcgagccggcgatagcgaataagcggaggcgggcgcagtcatggaacagcagccgggcgccgcggtggcgagccggcgagcagcatatggaggcagagcaggcaagggcgcaaggtaccaggcgactgggcaacgagactgccgacgctgacagccgagcagctagcagattaggcggcgagcaacagcagctagaagaacaactaagcaaccg

SEQ ID NO: 86700 - DNA, 1512 bp, Oryza sativa
  Clone ID: PAT_MRT4530_85716C.1
tcatccatccaaagactggacaaggttttcacccagagctccttgccgagggaggagggatacctcaacagtgccctcaagagggttactatgcccgaaggcaaagtcaccgaccgacgcccctctgtcggccggcttcatcgaaccaccatccctgagaactggcccaggacctctccgttccaccacccgccggcctcctcgccagatctggccgaaggagaacccgggattggatggcattgcttcagcagccggcaacgaggaagacgacctatcgccgccagctcccttagcacaaccatctgggcctgcgccgacgccggaaacattgccgctttggctccggtgccacccgccggcgctcccattgcccggccgccgctccccacctggccaccacggcggcatcggttgcccagccaccgaggcctggccgctcgcgctcacaccggcgaggcacggccgccgcgcccggaacaccgccgccgtgccgcttgggcggaggagggagaacgccagccgccgcgccccaccaccacggccgcacgccaccacgccgctcggcagccgcgcgccgccaccacggtcgcatgccgcccagccgcctcgcgccgccgccgcgccagctccaggcgggggatggccggatccggccttgggggcgccggatccgccgcctccccacacatccccgccgttgccgcctttgaccacgccggtggggagcttcgtcatcatctcgtccacgtcgcgccgaggagggagaacgccacaaagaaggcctcgccgccgccttccctgctcgctgccggctttgccgccggcaagctccggcggcggcgagaagactggtcactatttactagtgtggatgaaaatttgaaccatgttcgaactacaaaccacattgaaacttgtaagtccacaggtcctaatgatgcagccatacttgacctgtacaaagaaactgagctggttgatgctgtacacatgacacaaagttcttcagaaagtgtgcagagcccttctgatatgttctcaaataatgaaatgaactcttcatttgaaacagatgaaaatcattcaattaaatcttcaagcgataggactttgattgatttctaccataagctgagggaagaaacactgacagtaatatttcggaatgggaaggattttaaggaaatctgtgagaaactacctgaaggtttttgtatagaggaacatactgcaaaggatgtattcatttctgaactgcttgacagtgccagagaggttcatttgaaggattttgaggaagaatatcatttaatagaaaagataccgatgcatggtgtggtgctttggcaagaatcctgtcaatcaaatgtctgcagcgtagtaatttcccaaggtggccaattctttattgctcttggggagatttacagagttgcacagattctaaatttatccttgcagtccttcaagccctgggttcttgctgatcctggaatggaatggaagtga

SEQ ID NO: 86701 - DNA, 754 bp, Oryza sativa
  Clone ID: PAT_MRT4530_85717C.1
aaccctgaacaaaaataatatatatgctccaataaacatcttctggctgtcgaggaaggatgtgcaccagagcacacgccccgaaccatgtgccaaccgtccgaacacacactacagagagggaagccaagcaccgaaccggccatcgctatgcgagaccgatcgccaccgagctaacgacaccactacgacacgaagactctaaaatgacgccctcacgagggtcgcgacgccaaaagacgccgtcgtcatctatccaaagactggacaaggttttcacccagagctccttgccgagggaggagggatacctcaacagtgccctcaagagggttactacgtccgaaggcgaagtcactgttggcccaaagaattgggctaagctttcgctcggaaccccctgccaccgtggtacatcacccaatccgaatccaccatctgaacatcggcggcacatggcttccgccacacccgaccgacgcccctccgtcggccggcttcatcgaaccaccatccctgagagctggcccaggacctctccgttccaccacccgccggcctcctcgccagatctggccgaaggagaatccgggattggatggcattgcttcagcagaaactccccacagagaaggggaggagctccaggaagggtgagggtgttgaccggcaacgaggaagacgacccaccgccgccagctcccttagcacaaccatctgggctggtgcaggcattaattctcttaatactcca

SEQ ID NO: 86702 - DNA, 890 bp, Oryza sativa
  Clone ID: PAT_MRT4530_85718C.1
ggctaggtggggagcggcggctgggcaatgggagcgcaggcgggtggcaccggagccagagcggcgacgtttccaccgttggcgcaggcccagatggttgtgctaagggagctggcagcggtgggtcgtcttcctcgttgccggtcagcatcctcaccctttttggagctcctccccttcgttatggggagttttagactggattgaggcggcagcttgtcagcgggggaagctcaggctgctgaagcaatgccatccaatcccaggttctccttcggccagatctggtgaggaggccagcaagtggtggaacggagaggtcctaggccagttcttagggatggtggttcaatgaagccggccgatggaggggcgtcggtcaggtgtggtggaagccatgtgccgccgatgttcagatggcggattcggattgggtgacgtaccatggtggtagagggtgccgagcgaaagcttagcccaattctttgggccaatagtgacttcgtcttcgggcgtagtaaccctcttgagggcactgttgaggtatccctcctccctcggcaaggagctctgggtgaaaaccttgtccagtctttggatggatgacagcggtgtcttttggcgtcgtgaccctcgtgagggtgttattttagagtcttcgtgtcgtagtggtgtcgttagctcagtggcgatcggtctcgcatagcgatggctagttcggtgcttggctttcctctctgtagtgtgtgtttggacggttggcacatggttcggggtgtgtgctctggtgcacatccttcctcgacagccagctgtcgacgtaaaactttttttttaactttttcttcctatcttaattatattgaatgacctcccttcggtcattccag

SEQ ID NO: 86703 - DNA, 906 bp, Oryza sativa
  Clone ID: PAT_MRT4530_85719C.1
tttttggtggcgccggagccagagcggcaatgtttccggcgtcggcgtaggcccagatggttgtgctaagggagctggcggcggtgggtcgtcttcctcgttgccggtcaacaccctcacccttcctggagctcctccccttctctgtggggagtttctaagctggattgaggtggcagctcgtcagcgggggaagctcaggctgctgaagcaatgccatccaatcccggattctccttcggccagatctggcgaggaggccggtgggtggtggaacggagaggtcctgggccagctctcagggatggtggttcgatgaagccggccgacggaggggcgtcggtcgggtgtggcggaagccatgtgccgccgatgttcagatggtggattcggattgggtgatgtaccacggtggcagggggttccgagcgaaagcttagcccaattctttgggccaacagtgacttcgccttcggacgtagtaaccctcttgagggcactgttgaggtatccctcctccctcggcaaggagctctgggtgaaaaccttgtccagtctttggatagatgacgacggcgtcttttggcgtcgcgaccctcgtgagggcgtcattttagagtcttcgtgtcgtagtggtgtcgttagctcggtggcgatcggtctcgcatagcgatggccggttcggtgcttggcttccctctctgtagtgtgtgttcggacggttggcacatggttcggggcgtgtgctctggtgcacatccttcctcgacagccagctatcgatgtaaaatttttcttgtaactttttcttcctatcttaattacattgaatgacctccttcggtcattccggcaaactttgtagtcatgctacacatcatctgcactattgacctccttatactc

SEQ ID NO: 86704 - DNA, 399 bp, Oryza sativa
  Clone ID: PAT_MRT4530_8571C.1
ctcttgttctcctctctcctgtgatccccctccgctagggttttagctatctcccattgccgccatccatcagcatttcgattggatcactcctctcccccctgcaccgcctctcggatcccgccgccgcccgtcgttgacgcctccggcgacgcagactctatctctatgtgcatccatcccttctcgacctcgcgcaaatcccatccttatcgccccttctttgcctgcgaaagatcgggtcttttttttctgcccgtctatttgtcgcgataggttccacaatttagctgcctggagattctaccgccttgtaagagtccagaactcccgtcattgctccacttgtcctcgcctcgtttctcgaggagagaataagacgcaaatcaaactatactg

SEQ ID NO: 86705 - DNA, 638 bp, Oryza sativa
  Clone ID: PAT_MRT4530_85720C.1
atacttctcaccactcacacttacatcgaaagcataacaactagaatcccaccacaacgaatatcattttcttctttgctccccttgctattgctgcatgtagcagcctctgcacaggttgatgctgttactcaagcatacaggcaatatcagatgcagccgcatctcatgctgcagcaacagtatgcttaccccatcgagagagttcgtaaggcactcagtgcagaagcagtggcaagcccccttcttccaatcacccgagcttcaactgagaaactgccaagccatgcgacctgcttgctgccaacagctcaggatgatcgcgcaacactctcactgccaggacattagcagaggtcaggtgattgtgcagcagctacagctaccacagtttgctgccgtctacttcaatcaggctcaagctcaagcccaagctatgatggccctaaacttgccggcaatatgcggcatctacccaagctacaacactgctccctgaaggattcctaccgccggtgccatctgggattgaattgtagcagcatagtacttcaggatagaaaaatagagtcatgcatcatcgcgtgtgacaagtagaaacatctgggtgatacaaatctgaataaaaatgacatgca

SEQ ID NO: 86706 - DNA, 692 bp, Oryza sativa
  unsure (1)..(692): unsure at all n locations
  Clone ID: PAT_MRT4530_85721C.1
cgcccagcgccgcacctcctctcctcgtgctctctcgccccctcgccgccgtgcgcatccccctcgcgtcctcgccccctcaccgcccggcggcaatcgatgtgctcctcctccgcagtccgcaccaccatcgcgccgcgcgcccctccgtaccgcgaaaaatcgccgcgcctcccctccatcgttgcgcctctcccacatcgccgcgccggcgcccaccatcgtcaccgccgcccatcgctctccaccttgcctccattgcggctacgccctccctctttcagtgctgacgctgtccccccgcctttcctccttccgcccacctactaccgatgccgccacccctcgcagtgactcctccccgaccccgacgccgacgccgacgccgtatcccccgccaccaacgccaccgccgtcgacgcctactcctgtggcagtgtggaggactgctgcttccctgtctccatcaggtgtgtgcacgatttgtgtttgttaaaatgcttatgtcaaaaagctgtgggtataaaatgatatgctgcagattatcttttcctgttataggttgatcaataatggtttccctaattcaactttcatattgctgaatcttttggtctacattgatagctgatccattggngggtgattatacaaatgatttccgtttggtaatgattttttccctaccttgc

SEQ ID NO: 86707 - DNA, 455 bp, Oryza sativa
  Clone ID: PAT_MRT4530_85722C.1
gccgactagaactagtggatcccccgggctgcaggaattcggcagagatgaacaagcttggtttgcattccctgcgacagaggactggtacattcagagcacttgcgacatctggtgaagggttgtatgagggtcttgactggctttccaacaacattgccagcaagcttgagcgttttggcagctggatatctgaaccatgcactagtgccggtttacatattatatacatatcacctaccacacataggttgcctctcacaaaactctttgtggaggctagtaccagattgttccttttcgtggaccatatggttaatgtttgttgttcacattactcgttcaagatcgtggctgagctgattgattacgtgctgtccatatgtacccgtttgtctgagatggtctagtaaattgataatgctttgtcaaaaaaaaaaaaaaaaaaaaaaaac

SEQ ID NO: 86708 - DNA, 397 bp, Oryza sativa
  Clone ID: PAT_MRT4530_85723C.1
gcggagagctcctccaagtgcagagtaggggtcccttcgtgggcggtctgcgtcaccatttcctctctcgtagccatggctctcctccgctgcctcttcctcctcgccgtccttcttccccaccggaatggcgccgtcgtcgccgccgcgtcgccgcaccacggccccgcgccgcacgactacagggaggcgctcaccaagtccatcctcttcttcgagcgccagcgctccgtggaagctgccgccgtcgcagcgcgtctcctggcggggtgactccgtgccgtcgccgacgtgctcctccatcaaggtgtgacttgtgtgggagggtactacgacgccggcgacaacatgaagttcgggttcccgctggcgttcagcatgacgatgctggcgtgga

SEQ ID NO: 86709 - DNA, 135 bp, Oryza sativa
  Clone ID: PAT_MRT4530_85724C.1
gtcatccaatcattctctgttccgctctctcaccccatcgagataagcgtggcaagcgccaagctcttatctcggccctcgtaaggggtagcccattcgtcaccagggttgagcccgggctcgggctcaagggcc

SEQ ID NO: 86710 - DNA, 1222 bp, Oryza sativa
  Clone ID: PAT_MRT4530_85725C.1
ttttctttgcttggcaggagttacatttttttagatgacatcctgtagggattcaggccattggagcttgagggatacacaccattcagtagtttgagaaattgatgtttcaacttcgcctaaatttataggttaaatatgatactaattagttgtgcttgtcgtttttagtaatcagtgccacatataaaatgtagctcaagccatttttttgtgcttttacctctcctatcaaggtaggactgatgttggcatttgggaacgccttttcattttctttatgtaatgaggattaatgtatttccaactcctaattagtaaatcacaacaagaggaaaacaataaggatataattaccctttctaaattgggctgctggatgcggcacgcgggccaattggaataaccaggaaataaatgtaatatgaaaatacaaaacattgaatgatgtgtcaggaggatcatttccatccactgattgcatatgctaattctattattttatcatctcttttttcaaaggtccttccggaggttcttcatatggctatcctggtctgctaacttctactccctccgtcccataataggtgacgttttttactttttatttgcaatgtttgaccattcgttttatttgaaaaattagtgcaaatataaaaaaagataagtcatcatgtcaacagtcacttttgataataaagcaacatgcatcacaacaaacatcaaataataatttcaaaattttttgcaataagcacgcaataatcaaccattgcataaacaaaaactcaaaaagcacaagtaatatgggcacggaggtagtatgatttaatctgtgtgcgctgctgctttccatgtctctgcaaatgcatatgtattgatgtgcccttcaatctccattcagagtatgctatcatgacacacaaggatttttttgttgggtgctgtgtaaaattattgttaccgaagccttcaaaggtattagagtaatatattgttacatctccttcaccgggcttctatactaaagatcctcctattactattttagttctttttaaaccagacaacctgattagctattcttacttatctttttatacaagattttttttacaagattatatttgcaccatcagatgtagaatgccaactttgttcaagctccccctagccatataccatatattcatgttctgcttgatttctactctggttg

SEQ ID NO: 86711 - DNA, 489 bp, Oryza sativa
  Clone ID: PAT_MRT4530_85726C.1
gggatccaagggggaggcctttttcaccggttttaacctacctttgtggctttatttgtaacaaggtccccaagattaaatttcccgggtttttttttactaggagcccggggccctttttctaaaaaaaagaaggatgggattcttttggggattttttgaaaggaaccaagtcaaaaaaaaacaattttttaggggggccccccccttgggaaaaataaaaaaaccccggatccccgggggggggttttttggggggggttttttaaaatttggcccaaaaggggcccccttttttaaatttttacaccccccaaaaaaaagcgggggggtttattattattatttatattggggggggggttattattttttcctcccaataatacccccccacccacctttttttttttttggaggaaaaaaaaaataccccctctttggagtctcgtttcaaaaaaaaaaaaaatttttttttttttttaaaaa

SEQ ID NO: 86712 - DNA, 170 bp, Oryza sativa
  Clone ID: PAT_MRT4530_85727C.1
ggccgacgacgcggatcgatacttgcacgaatcctggcacagttgaccgccagcactccttgatgccgctgtggcgctacttggccaacgccattgtcgccaatcgccattcagctaccctactgagccgccaacctctcggccctggatgtcatgcctccactgcctga

SEQ ID NO: 86713 - DNA, 715 bp, Oryza sativa
  Clone ID: PAT_MRT4530_85728C.1
gtcgctatccttttgcagccactaacccacgttcccacgattccctccgcaacagcgcgtccacgttctttctcctgatagataaggaggccgcgagtctgatccgagttcctcgcttctttcccggtgttagtttctccttctccgcgcctgagttgctctcgcttccccgcttctgatctcttgcgcgcacgagagattggaagaagcagtgcctccgaaaccacaccttcgcctgagatctgcaccgggtaggcgggtgatcaggtttttggggagtgcctcctgcacgactgctcatcgccatgtctggagttgctgccgccgctattggcggaggtggtgcgccgccgccgacgccgacaggagctggatccggagctggtgcgccaggaggaggtgccgtgaacgactacaacaacggaggcaattctgcctcaccatccagtggagggccattctcggggtataatcttctccttctactgctgttagcgctatactgtgtgcgctatgttcttggttctgttctacatgatgcctctagcatgttatcgcattactggtatgttcctgtttctgacattcatgatgcgcatagtatgctactggttatgttaagatcaccctacactgcttatgccatgatcatagtttcaatttcttggattaaaatatgccgaataatgactatatttccaacacggtctagggc

SEQ ID NO: 86714 - DNA, 1844 bp, Oryza sativa
  Clone ID: PAT_MRT4530_85729C.1
ttctccttcctccgccttccactctctccgtcgcctcgcctcacctatctagggttttggagcaaaacctagccttcgatcccagcgcgcatggacgtcgagggcgaggtcccggccgcggcggcggaggccgtggccaacggcctcggcggcgcggagccttccccggcgccggtgtccgcggagcagctggacgtggaggcgtacgccgcgcagtacacggggcggacgcgcctggcgcgcctcctgttcatcgccgagaggtgcggggtggaggcggtggagctcgaggcgctgcggatggcgtatgacgagatcaagcggggggaggacaccatgttccaccgggaagtcacgaacaaaatcaacggccgcctcggcccgaaatacgcgctcgaccaggcctggaccgattccgtcaaccgccgcgccgagcagcgcaaggagaagctcgagagcgagctcaatggctacaggaccaaccttatcaaagagagcatcagaatgggttacaatgacattggtgatttcttctatgctcatggccacctttcagatgccttcaaaagctacatccgtacacgtgattattgtaccacttccaagcatatagttcagatgtgtatgaatgtgattctggttagcattgagttgggacaatttccacatgtttccaactatgttagcaaagcagagcaaaccccagatactttggaccctatcattgttgcaaagttgcgagcagctgcaggattagcctacttggcaacaaagaagtacaaacttgcggcccgtaagtttgttgagacaggacatgaactaggaaacaattattctgaagtcatagctccacaagatgttgctgtctatggtgccctttgtgcacttgcttctttcgaccgttcagacctaaagagcaaagttatcgacaacagtaatttccgaaactttctggagctggtgcctgaagtgagggaacttgttaatgatttctattcaagtcgctatggatcatgtttggagcatcttgagaagctaaagacaaacctcctgttggatattcatttgcacgatcatgtagaaactctatacatggatattcgccacaaagctatcatacagtatacacttccatttatatctgttgatcttaacacgatggctgctgcttttatgacgtccgtgtccatgttggagaaagagctagctgcactgatcactgagaacaaaatacaggctcggatagactcccacaacaagattctttatgcgaggcatgctgaccaaagaaatgcaacttttcaacgtgttcttcaaacaggcaatgagtttgagagagatgttaagtctttgcttctgagagctaacctcatcaaacatgatttcaaccaaagagctggacaaaggaagatgtgaactctgccactgctgttgctgaaacaaggcgtgccggcttatccttttggacacatttgttttgtacctaaaagtgtatgggccatggagaagttttggtgatgaatcatgaattagactgatgactgagcatgcaagtctgtttaaatgcgttttaccttttcggacaattccttgcttgctgtggttttaaatatgatgctgtgtaaacagctctggatatttaagcatctagagacttgacagaacgatctgtcacatttgaggccaagctattttttaaaatataaatgcttagagctggtactgtgatgcatagtaactcttagtaaaaaaaaaaaaaaaaaacaaactccctccagtgcgtgcgcggtccggccggatgtcctcagggcccccggtggtgtgcgcgggcgaaaaaaaaaaaa

SEQ ID NO: 86715 - DNA, 401 bp, Oryza sativa
  unsure (1)..(401): unsure at all n locations
  Clone ID: PAT_MRT4530_8572C.1
ggggcgggccactcttcctcggactcgtgtgcgcgcttaagactaacatcaccaccctcggncctctcgggcgcgcnggntcgggggagggggtgttcatngccacattggttngcaanaagggcctcaanatgaagatcaagccatacattcccgggggggggtggcatttgagcatttctggatccatgccggggggcgtgccgggctggatgagctggagaagaacttggaggtggctggctggcacatggagccatctagggtggcactggaccgggttggcaacacatcgaggaggtcactctggtgtgggctgggggacaccgaggcgaatgggaggagcatggatcgggacagggtctggcagattggatttggatctgggttcaagggcaaca

SEQ ID NO: 86716 - DNA, 2824 bp, Oryza sativa
  Clone ID: PAT_MRT4530_85730C.1
atgcaatgcttctatgtttcacagggcaaacgaagtgaaccgcctctctctcctaaggaggaggctaagtttgaggcttcggattgcctgttccgtggagcattgatcagtgtactcactgacaatatagtggacgtgtacatgcacatgccttcagggaaggacatgtgggatgcacttgaggccaagttcggagtttccgacgccgtcagcgagctgtatgtcatggagcagttctatgactacaagatgatgctggcaaaggaatttgagaacaacaactgtgagttgccggacaagtttgtggcgggtggcattattgccaaattgccaccttcttggtcggactttgctacttctctaaaacacaagaggcaagagttcagcgttactgatctcattggctctttgggtgttgaggagaaggcgagagtaaaggacaaccggggcaaaaatatcgagggaggttctagtgccaatttggtgcaaaagaagaaccctcatgcatcccacaacaacaacaacaagaaagtcaagcctgatgtcaaaccaaaggctacaaccaattttaagaagaaaggcaagggaaaggccaagggcgactgctttgtgtgcggtaagcctgggcattgggcgaagaattgtcctgatcgcaaggacaagaagtctgccaacatggttattagcgagggcggaggaacatcggggtatggtcgggagaggttcctccttgttgatgggaaacgggtcgcttgcggctgttcatggtgttggtacggtcgatctgaagtttacttcgggaaagaacgtgcagcatgtcccttcaataaagaagaatctagttagcggctctctattgtgtagagatggttttagacttgtgtttgaatccaataaatgtgtcgtatctaaatatgaaacttttattggaaaaggttatgacagcggaggttccaagtgccatacttgtgttcaatcgaaacatcctcgcaaacctcacaaggcatctgaggcgagaaatttggcaccactagaactagttcattccgatctgtgcgaaatgaacagtgtgttgactaaagggggaaagaaatatttcatgacactgatagatgattgcactagatattgctatgtgtacctattgaaaacaaaggatgaggcattgcattactttaagatctataaagctgaggtagaaaaccaacttgaaaggaaaatcaaacggttgaggtcagataggggtggagagtatttttccaatgagtttacgtccttttgcgaagagtttggaattattcatgagaggacgcctccctattcaccccaatcaaatggggtagccgaaagaaagaatcgcactctaactgagatggtgaatgccatgttagatactgcgggactttccaaggaatggtggggtgaggcaattttgactgcttgtcatgtcctgaataaaattccagtgaagcataaggaagtaataccattcgaagaatgggaaaggaagaaattaaatttctcatacctacgcacatggggctgcttggccaaggtaaatgtacctatagccaaaaagcgtaaacttggaccaaagaccgtagactgtgtgttccttggttatgctatccacagcgtgggctataggttcctaatagtaaactctggagtacccgacatgcgtgttggtacaattactgagtccagagatgccacattttttgagaatgaatttcccatgaaaaatacacctagcacgtctagtcaagaacctgttttaccccatgagcactttgcaccgatagaacacaatgatcaaacgcctgaggaaaatcctgaggaggataacattgtagcaactcgaaagagtaagagagaaaggactgcaaagtcttttggagataactacattgtataccttgtggatgacactccaagaaccatagaagaggcatattcatctactgacgctgactattggaaggaagtggtacgcagtgagatggactcaattatgtctaatggtacttgggaagtcgttgagcgtccatatgggtgcaagcctgtagaatgcaaatgggttttcaagaaaaagcttaggcctggtggtacaattgaaaacctcaatgtgattgaggaggttaaggactttttgtccaaaagctttgaaatgaaggatttgggagtgactgatgttattcttaacattaagctactgagaggagatgagggtgggattacactcgtgcaatctcactatgtggacaaggttttgagtcgctttggttatagtgactgcaagccagctccaactccttatgactccagtgtgctattaaggaaaaaccgaagaatagcaagggatcaattgagatactcccaaatcattggttcattgatgtacttggctagtgcaacgaggcctgacatctcatttgctgtgagcaagctgagccggtttgtttcaaatccgggagatgatcattggcaagctctggaaagggtcatgcgctatctaaagggtacaatgagctatggaattcactatactggttacccaaaagtactggaagggtatagtgactcaaactggatatctgatgctgatgagataaaggccacaagtggatatgtgttcacacttggaggtggcgctgtttcctggaagtcttgcaagcagaccatcttaacgaggtcaacaatggaagcagaactcacagcactagatactgccacaattgaggccgagtggcttcgtgaactcctgatggatttgccggtggttgaaaaaaaaaccagtgccagctatcctaatgaactgtga

SEQ ID NO: 86717 - DNA, 714 bp, Oryza sativa
  Clone ID: PAT_MRT4530_85731C.1
atggcagcctcacggtccacggtggaccgggtgcacccgggctcacaccggccggcgccgtgggccccacgcatcagccgcacccgaggggccgggcagctgacggccgggccccacacggcgcgcccagaggcggccacgtcggcgcggccggcgggaggcggcgcccgtgccccgatggttgccgccggcgaccatcggcgcagcggagcggcgaccgagaggggaagggaagggggaaaagaggcggtggtcctcagctcatcccgggtgatggcggcgacgaaggaggcggccggagcggagggaggtggtggcgcggctcgggtcaacggggacggcggcgttccggcggtcgacgggctcggcgtggtggtggacgacgtcggcggcggcgccgaggcgggaggaagtccgaggcagcgacggagggcggctggagcacggcggcgacggcggagagagagggcgacggcgcgggctcgattccgatggggaggctgggcggcaaacggcggaaacggacaagggaggtacggggagggtttgtatgggatcggggacgagagagggcggccggaggagggggaaacgggcgtgggagacccggctgccttcaatggcgccggcgagattaggggaggggtttccaagcgaatccgagggagagagaggggaaaatgggagaaaggaggagggaatcgggggaaataa

SEQ ID NO: 86718 - DNA, 1173 bp, Oryza sativa
  Clone ID: PAT_MRT4530_85732C.1
ctattccgccctgccttccatgtcccgaccgcaccggaggtgtatctcgtagccgcaggcgatgcactggtacgcccaaccgagcccctgctcgtcgcactcgcagcagatgtacggccctcctcccgacttgtcagacacgatgcttagctcgtggcggtggccggtgtggcgcagcgacggcgggtaccccttggcatcctcgtcctccatctcctgcagcagcctgatctgctcgtcggtgaacgggaacgccatgtcgaagtagaggttcaccaggttcctcccctccctcgtcaccgtcttgccgtcgggcccaaccaccaccagcgtcgggatctcccggacgtcgaagtacctggccagcgcccccgacgacgcgccgtcgtcgtacggcagcgccagccacggcatgtcgctgcacgaccgcaggtacccgtcctcctccttgtccatggggatgtagattatctcaaagtcctcggccttgcccttcaggttgctgtatatggcggccagcttcgcggtgaacttgatgcacggcgcacaccggtgcgccgagaagtagagccctaccgtcttcccgactaggctcgagatgggaacccacgttcccacgattccctctgcaacactaacccacgttcccacgattccctccgcaacagcgcgtccacgttctttctcctgatagataaggaggccgcgagttcgatccgtcttcttcgcttctttcccggtgttagtttctccttctccgcgcctgagttgctctcgcttcctcgcttctgatctcttgcgcgcacgagagattggaaagagcagtgcctccgaaaccacaccttcgcctgagatctgcaccgggtaggcgggtgagcagtgcctccgaaaccacaccttcgcctgagatctgcaccgggtaggcgggtgatcaggtttttggggagtgcctcccgcacgactgctcgtcgccatgtctggagttgccgccgccactgccagcggaggtggtacgccgccgacaggagctggatccggatccggagctggtgcgccaggaggaggtgccgtgaacgacaacaacaacggaggcaattctgcctcaccatccagcggagggccattctcggggtataatcttctcctcctgctactgttgttagcgctatccat

SEQ ID NO: 86719 - DNA, 4005 bp, Oryza sativa
  Clone ID: PAT_MRT4530_85733C.1
catgagaacatgctaaattactgagcgcctgaatctaacacgaacgtcaacaccaagggaggcaattctgcctcacaatccagcggagggccattctcggggtcattttcggtagttggctttgctgctgcactgaaaccacatgcttttgatggttctaactataagagatggaaagcacgtgcactattgtggttgacagcgatgcaatgcttctatgtttcatggggcaaacgaagtgaaccacctctttctcctggggaagaggctaagttcgaggcttcggattgcctgttccgtggagcattgatcagtgtactcgctgacaacatagtggacgtgtacatgcacatgccttctgggaaggacatgtgggatgcacttgaggccaagttcggattttctgacgccggcagtgagctgtatgtcatggagcagttctatgactacaagatggtcgatgactgttctgtagtagaacaagctcatgggattcagatgctggctaaggaacttgagaacaacaactgtgagttgccggacaagtttgtggcgggtggcattattgccaaattgccacctgcttggtcggactttgccacttctctaaagcacaagagacaagagttcagtgtttctgatctcattggctctttgggtgttgaggagaaggcaagggcaaaggacgtccggggcaaaaaggttgagggaggttctagtgccaatatggtacagaagaagaaccctcatgcatcccacaacaacaagaaagtcaagcctgatgtcaaacccaaggctgcaaccaactttaagaagaaaggcaagggaaaggcaaaaggagactgctttgtgtgtggcaagtctgggcattgggccaaggactgtcctgagcgcaaaaacaggaagtctgccaacatggtcgttagcgagggcagaggaacatcgaggtacggtaaaatattacctacagttctctctgtttttcactcacctgattggtgggtggatactggtgctaatattcatgtatgtgctgacatttctctgttttcttcttatcaggtcgggagaggttccttgttgatgggaaacaggtcgcttgcggctgttcatggtgttggtacggtcgatctgaagtttacttcgggaaagaccatgcagctgaagaacgtgcagcatgttccttcaataaagaagaatcttgttagcggctctctattgtgtagagaaggttttagacttgtgtttgaatccaataaatgtgtcgtatctaaatatgagacttttgttggaaaaggttatgacagcggaggcttgttccgcttttctttgaatgacatgtgtaataatcataatgttgtgaaccatattagcgagaatgatgagtctaatgtgtggcattcacgactctgtcatgtgaatttcggttgtatgacgcgcttagctaacatgagtttaattccaaaattcactttggtcaaaggttccaagtgccatacttgtgttcaatcgaaacaacctcgcaagcctcacaaggcatctgaggcgaggaatttggcacctctagaacttgtttattccgatttgtgcgaaataaacggcgtgttgactaaagggggaaagaaacatttcatgacactgatagatgattgcactagattttgttatgtgtatctattgaaaacaaaggatgaagcattgcattactttaagacctataaagctgaggtagaaaaccaacttgaaaggaaaatcaaacggttgaggtctgatagaggtggggagtattttttcaatgagtttgcatctttttgcaaagagtttggaattattcatgagaggacgcctccctattcaccccaatcaaatggggtggccgaaagaaagaactgtactctaactgagatggtgaatgccatgttagacattgcggggctttccaaggaatggtgggttgaggcagttttgattgcgtgtcatgtcctgaataaaatgccaatgaagcataaggaagtaacaccattcgaggaatgggaaaggaagaaattaaatctctcatacctacgaacatggggctgtttggccaaggtaaatgtacctatagccaaaaagcggaaacttggaccaaatactgttgattgtgtgttccttagttatgctattcacagtgtgggttatagattcttaataataaactctggagtacccgacatgcatgttggtacaattattatgtccagagatgctacattctttgagaatgaatttcccatgaaacatacacctagcacctctagtcaagaaactgtcacgccccatgagcactttacaccgatagaacacaatgatcaaacgcctgaggaaaatcctgaggaggacaacattgtagatactcgcaagagtaagagacaaagggttgcaaaatcctttggagatgactacattgtatacctcgtggatgacaccccaagaaccatagaagaggcatattcatctcctgacgctgactactggaaggaagcagtacgcagtgaaatggactcgattatgtctaatggtacttgggaagtcgttgagcgtccatatgggtgcaagcccgtaggatgcaaatgggttttcaagaaaaagcttaggcctgatggtacaattgaaaagtacaaggcaaggcttgtggccaagggttatacccaaaaggaaggcgaggacttttttaacacatactcaccagttgctcgcttgaccacgattcgagtactacttgctctggcagcctctcatggtcttctcgtccatcagatggacgttaagacagctttcctgaatggagagctggaggaggagatctatatggatcaaccagacgggtatgtactagaaggtcaggagggaatggtgtgtaaactgttgaaatccttgtatggcctcaagcaagcacctaagcaatggcatgagaagtttgataccacgcttacatctgcaggctttgttgtgaacgaagctgacaaatgtgtgtactatcgctatggtgggggagaaggagtgatcttgtgcttatatgtcgatgacatattgatctttgggaccagcctcaatgtgattgaggaggtcaaggactatctgtccaagagttttgaaataaaggatttgggacaggctgatgttattcttaacatcaaactacaaagaggagatgagggtgggattacacttgtgcaatcccactatgtggacaaggttttgagtcgctttggatatagtgactgcaagccagctcctactccttatgatcccagcgtgctattaaggaaaaaccgaagaatagtaagggatcaactaagatactctcaaatcattggttcattgatgtacctggctagtgcaacgaggcctgacatctcatttgctgtaagcaagctgagtcggtttgtctcaaatccgggagatgatcattggtaggctcgggaaaaagtaatgcgctatctaaagggcactatgagctatggaattcactataccgggtatccaaaagtactagaagggtatagtgactcaaactggatatctgatgctgatgagataaaagccacaagtggatatgtgttcacacttgcaggtggcgctgttttctggaagtcttgcaagcagaccatcttaacgaggtcaacaatggaagcagaacttacagcactagatactgcgacagttgaggccgagtagcttcatgaactcttgatggatttgccggtggttgaaaaaccagtgccagctatcctaatgaactgtgataatcaaacagtgattattaaagtgaacagttcaaaggacaacatgaagtcatctaggcatatcaagagaagactgaaatctgtcagaaagcagaaaaactccggagtgatagctttggactatatccaaacggttagaaatctagcagatcagtttaccaaggggctaccacgtaatgtgatagacagtgcatcgagggaaatgggcttgatacccacc

SEQ ID NO: 86720 - DNA, 451 bp, Oryza sativa
  Clone ID: PAT_MRT4530_85734C.1
gacaacaatgggatgttggtgcaatgtgcagatggacaatgcaagacaaagggcaactgtggaactggatggctgagaaacacacaagtggtttcgcagatgtggtggattgcaacaatggcactcaagtgaccaagggggtttggaccaactgaaagtggttaatgcgtgatgctctgacaaatgtgtgttgtgcgctgttgatgctccagtgcgtggaagttttgcatgcagcaaatgcaggatgaatgcaacaatgcacttgctgatggtttgccaacctgtgggaaagtgtgttggatggctggtgctgaactgtgtggtggtgaccactatctcaagaattattcatgctatttatcttgctgtaaaattagtttgtaatgactgcaattttgtattgatgttccatgtataggccaagatctatcaaaaaaaaaaaaaaaaaaaa

SEQ ID NO: 86721 - DNA, 3861 bp, Oryza sativa
  Clone ID: PAT_MRT4530_85735C.1
atggcttctactggagagaacagaggagacaacatcaacggaggcaatacgactacctcaaaatccagcggtgggacgttctcggggtatattttcattctcccgattctattagatgtttctttgttaatactcttcgcaatggcagcattgcgttactatgtaaatgttgatgcttatttcatattaagcatgctcaagttgtatacatctagcactgtcactagatttactcatattgcaaatgtcatgtttattgtcttaatattttggattaaaatatgccgaattataaccaaatttccaacaatccaaaaacttgataggtcttttttggtagttagctttgctgcatcactaaaaccacatgctttcgatggttcaaattataaaaaatggaaagcacgtgcacttttgtggttgacggtgatgcaatgtttctttgtttcacggggcaaaccgagtgaaccgcctctcttccctgaggaggaggctaagttcgaggctacggattgcttgttccgtggagcattgatcagtgtgctcgccgatagtattgtggatgtgtatatgcacatgccttcagggaaggacatgtgggatgctcttgaggccaagttcggggtttccgacgtcgacagcgagctgtatgtcatggagcagttctatgactacaagatggtcgatgactgttctgtagtgggacaggctcatgagaatcagatgttggcaaaggaacttgagaacaacaactgtgagttgccggacaagtttgtggcaggtggcattattgccaaattgccaccttcttggacggactttgctacttctctaaaacacaagaggcaagagttcagtgttactgatcttattggctctttgagtgttgaggagaaggcgagggcacaggacaaccggggcaaaaagatcgagggaggttctagcgccaatttggtgcagaagaagaaccctcacgcatcccacaacaacaacaagaaagtcaaacctgacgtcaaacccaaggctacaaccaattttaagaagaaaggcaagggaaaggcaaaaggagattgctttgtgtgtggcaagcctgggcattgggccaaggattgtcctgagcgcaaggacaagaagtctgcaaacatggttattagtgagggcggaggaacattggggtatggtaaatttttacctacagttctctctgtctgtcactcacttgattggtgggttgatactggtgctaatattcatgtgtttgcggacatttccctattttcttcttatcaagttgggagaggttcctccttgttgatgggaaacggatcgcttgtggctgttcatggtgttggtacggtcgatctgaagtttacttcgggaaagatcgtgcagctgaagaacgtgcagcatgtcccttcaataaagaagaatctagttagcggctctctactgtgtagagatggttttagacttgtgtttgaatccaataaatgtgtcgtatctaaatatggaacgtttattggaaaaggttatgatagcggaggtttgtttcgcttttccttggatgatatgtgtaataaagttgtgaaccatgtaagcgatgatgatgatgagtccaatgtgtggcattcgcaactttgccatgtgaattttggttgtatgacacgcttagccaacatgagtttaattccaaaattcactttagtcaaaggctctaagtgccatacttgtgttcaaacgaaacaacctcgcaagcctcacaagtcatctgaggcgaggaagttggcaccactagaaattgttcattccaatctgtgcgaaatgaacggcgtgttgactaaagggggaaagaaatatttcatgacactgatagatgattgcactagattctgctacgtgtacctattgaaaacaaaggatgaagtattacattactttaagatctataaggctgaggtagaaaaccaactggaaaggaaaatcaaacggttaaggtctgataggggtggagagtatttttccaatgagtttacttctttctgcaaagagtatggaattattcatgagaggacgcattcctattcaccccagtcaaacggggtagccgaaagaaagaaccgcactctaactgagatggtgaatgccatgttagacactgcaggactttccaaggaatggtggggtgaggcaatattgactgcgtgtcatgtcctgaatagaattcctactaagcataaggaagtaacatcattcgaggaatgggaaaggaagaaattaaatctctctcacctgcgcacatggggctgtttggccaagagatgccacatttttgagaatgaatttcctatgaaaaatgcacctagcacttctagtcaagaacctattttatcccctgagcactttgtgctgatagaacacattgatcaaacgcttgaggaaaattctgaggagaataacattgtagcaactcgaaagagtaagagacaaaggactgcaaagtcttttggagatgactacattgtatatcttgtggatgatactccaagaaccattgaagaggcatattcatctcctgacgttgactattggaaggaagcggtacgcagtgaaatggactcaattatgtctaatggtacttgggaagtcatcgagtgtccatatgggtgcaagcctgtaggatgcaaatgggttttcaagaaaaagcttaggcctgacgcctctcatggtctactcgtccatcagatggatgttaagacagctttcctcaatggagagttggaggaggagatctatatggatcaaccagatgggtatgtactagaaggtcaggagggaatggtatgcaagctgttgaagtccttgtatggtctcaaacaagcgcctaagcaatggtatgagaagtttgacaatacacttacatctactggctttgttgtgaacgaagctgacaaatgtgtgtactatcgtaatggtgggggagagggagtgatcttgtgtttatatgtcaatgacatattgatctttgggaccagcctcaatgtgattgaagaggtcaaggactttctgtccaaaagctttgaaaagaaggatttgggagtggctgatgttattcttaacattaaactactgagaggagatgagggtcggattacacttgtgcaatctcactatgtggacaaggtcttgagtcgctttggttatagtgactgcaaggcagctcctactccttatgatcctagtgtgctattaaggaaaaaccgaagaatagcaagggatcaattgagatactcccagatcattggttcattgatgtacttagctagtgcaacgaggcctgacatctcatttgctgtgagcaagttgagccggtttgtttcaaatccgggagatgatcattggcatgctcttgaaagagtaatgcgctatctaaaagggacaatgagctatggaattcactatgccgggtacccaaaagtgctggagggctatagtgattcaaactggatatctgatgctgatgagataaaggccacaagtgggtatgtgttcacacttggaggtggcgctgtttcctggaagtcttgcaagcagatcatcttaacgaggtcaacaatggaaacagagctcacagctttagatactgccacagttgaggccgaatggcttcgtgagctcctgatggacttgccggtggttgaaaaaccaataccagcaatcctgatgaactgtgataatcaaacagtgattattaaagtaaacagttcgaaggacaacatgaagtcatccaggcatgttaaaagaagactgaagtctgtcagaaagcagaaaaactccagagtgatagcattggactatgtctag

SEQ ID NO: 86722 - DNA, 4105 bp, Oryza sativa
  Clone ID: PAT_MRT4530_85736C.1
cttgcacttcgagttcctcctccttttttcctgagctgcctacgcgcacaggtgtacaggatgagcaggtgcctccggaactccatccgcttgagaacttgcacgggtaggcgggcgatcaagtttttgggtatcgcttcaaacgcgactgctcttgttcttcgcggctactgctgctgcatcggtgccttcaccaagatgtcaacggagattggagacaagaagatgaacgacatcaacggaggcaatactgcctcaaaatccagcggtgggacgttctcggggtctttttcgatagttgactttgctgcatcactcaaaccagatgctttcgatggttcaaattataaaagatggaaagcacatacacttttgtggttgacggcgatgcattgcttctttgtctcactgggcaaaccgagtgaagcgcctctctctcctgaggaggaggctaagttcgaggcttcggattgcctgttccgtggagcattgtttagtgtactcgctgacaaaatagtggacgtgtacatgcacatgccttcagggaaggacatgtgggattctcttgaggccaagttcggggtttccgacgccaacagcgagcggtatgtcatggagcagttctatgactacaacatggtcgatgaccgttctgtagtggaacaggctcatgaaattcagatgctggcaaaggaacttgggaacaacaactacgagttgccggacaagttttactgatcttattggctctttgggtgttgaggagaaggcgaaggcaaaggacaactgaggcaaaaggatcgagggaggttttagcaccaatttggtgcagaagaagaaccctcacgcatcccacaacaacaacaagaaagtcaaacctgacgtcaaatccaaggctacaaccaattttaagaagaaaggcaagggaaaggcaaaagaagattgctttgtgtgtggcaagcctgggcattgggccaaggattgtcctgagcgcaaggacaagaagtttgcaaacatggttattagtgagggcggaggaacattggggtaaggtaaatttttacctacagttctctctgtctgtcactcacctgattggtgggttgatactggtgctaatattcatgtgtatgcggacatttccctgttttcttcttattaagtcgggagaggttcctccttgttgatgggaaatggatcgcttgcggctgttcatggtgttggtacagtcgatctgaagtttatttcgggaaagatcgtgcagctgaagaacgtgtagcatgtcccttcaataaagaagaatctagttagcggctctctactgtgtacagatggttttagacttgtgtttgaatccaataaatgtgtcatatctaaatatggaacgtttattggaaaaggttatgacagcggaggtttgtttcgcttttccttggatgatatgtgtaataaagttgtgaaccatgtaagcgatgatgatgatgagtccaatgtgtggcattcgcaactttgtcatgtgaattttggttgtatgacatgcttagccaacatgagtttaattccaaaattcactttagtcaaaggctctaagtgacatacttgagttcaatcgaaacaacctcgcaagcctcacaaggcatctgaggcgagaaatttggcaccactagaacttgttcattccgatctgtgagaaatgaatggcgtgttgactaaagggggaaagaaatatttcatgacactgatagaagattgcactagattctgctatgtgtacctattgaaaataaaggatgaagctttacattactttaagatctataaggctgaggtagaaaaccaactggaaaggaaaatcaaacggttaaggtctgataggggtggagagtatttttccaatgagtttacttctttctgcgaagagtatggaattatttatgagaggacgcctccctattcaccccagtcaaatggggtagccgaaagaaagaaccgtactctaactgagatggtgaatgccatgttagacactgcaggactttccaaggaatggtggggtgaggcaatattgactgcgtgccatgtcctgaatataattcctactaagcataaggaagtaacaccatttgaggaatgggaaaggaaaaaattaaatctctctgacctgcgcacatggggctgtttgtccaaggtaaatgtacctatagccaaaaagcgtaaacttggaccaaagaccatagattgtgtgttccttggttatgctatccacagtgtgggatataggttcttaatagtaaattctggagtacccgacatgcgtgttggtacaattactgagtctagagatgccacattttttgagaatgaatttcctatgaaaaatgcacctagcacttctagtcaagaacctattttatcccctgagcactttatgccgatagaacacattgatcaaacgcttgaggaaaatcctgaggacgatagcattgtagcaactcgaaagagtaagagacaaaggactgcaaagtcttttggagatgactacattgtatatcttgtgaatgatactccaagaactactgaagaggcatatccatctcctaacgctagctattggaaggaagcggtacacagtgagatggactcaattatgtctaatggtacttgggaagtcgtcgagcatccatatgggtgcaagcctgtaggatgcaaatgggttttccaaaaaaagcttaggcctgatggtacaattgaaaagtacaaggcaaggcttgtggccaagggttatacccaaaaagaaggtgaggattttttcgacacttattcaccggttgctcgcttgaccacgattcgagtactactcgcgctggcagcctctgatggtctactcgtccatcagatggatgttaagacagctttcctcaatggagagttggaggaggagatctatatggatcaaccagatgggtatgtactagaaggtcaggagggaatggtgtgaaagctgttgaagtccttgtatgttctcaaacaagcgcctaagcaatgacatgagaagtttgacaatacacttacatctgctggctttgttgtgaacaaagctgacaaatgtgtgtactatcgctatggtgggggagagggagtaatcttgtgtttatatgtcgatgacatattgatctttgggaccagccacaatgtgattgaggaggtcaaggactttctgtccaaaagctttgaaatgaaggatttgggagtggctgatgttattcttaacattaaactactgagaggagatgagggtgggattacacttgtgcaatctcactatgtggacaaggtcttgagtcgctttggttatagtgactgcaaggcagctcctactccttatgatcctagtgtgctattaagcaaaaacggaagaatagcaagggatcaattgagatactcccagattattggttcattgatgtacttagctagtgcaacgaggcctgacatcttatttgctgtgagcaagttgagccggtttgtttcaaatccgggagacaatcattggcatgctcttgaaagagtaatgcgctatctaaaagggacaatgagctatggaattagctccactgggtacccaaaagtactggagggctatagtgattcaaactggatatctgatgctgatgagatcaaggccacaagtgggtatgtgttcacacttggagggggcgttgtttcctggaagtcttgcatgcagaccatcttaacgaggtcaacaatggaagcagaactcacagctttagatactgccacagttgaggccgaatggcttcgtgagctcttgatggacttgccggtggttgaaaaaccggtaccagcaatcctgatgaactgtgataatcaaacaatgattattaaagtgaacagttcgaaggacaacatgaagtcttccaggcatgttaaaagaagactgaagtctgtcagaaagcagaaaaactccggagtgatagcattggactatgtctagacggctaaaaatctggcagatcagtttaccaaggggctaccacgtaatgtgatagactgtgcatcgagggagatgggcttgagacccact

SEQ ID NO: 86723 - DNA, 393 bp, Oryza sativa
  Clone ID: PAT_MRT4530_85737C.1
atgtggatgctgaactgccggcatcaaccgtatcgcgaagaggatggtgagctaaggattgttggtcctccacaccagcacgctcatctcaaacgcgttcgcatcagtggtttctttggccacaaagaccaggtggagctagcacttcacatccttcgcagctccatgaccctcgagcagatggtgatcaccccaaagctagagattggcaacgatctggcgttttcagacccttgtgctgatgagtacgagaagaagcattacgtggatggccatcgagtcgccactgaatttgtttgcaagacagaccatcgcaatgttgtcactgtggaacgggtggtgccagagcctgccgacggcgaggtggagcgaaaacggagaagggcaaattag

SEQ ID NO: 86724 - DNA, 2679 bp, Oryza sativa
  Clone ID: PAT_MRT4530_85738C.1
atggcttcagggaacgacatgtgggatgcacttgaggccaagttcggagtttctgacgccagcagcgagctatatgtcatggagaagttctatgactacaagatggtcgatgaccgttctgtagtggaacaagctcatgagattcagatgctggctaaggagcttgagaacaacaattgtgagttgccggacaagtttgtggcgggtggcattattgccaaattgccacctttttggtcggactttgtcacttctctaaagcacaagagacaagagttcagtgtttctgatcttattggctctttgggtgttgaggagaatgcgagggcaaaggacaacttgggcaaaaaggtcgagagaggttctagtgccaatatggtacaaaagaagaaccctcaagcatcccacaacaacaagaaagttaagcctgatgtcaaacccaaggctacaaccaattttaagaagaaaggcaagggaaaggcaaagggagactgctttgtgtctcgcaagtctgggcattgggccaaggactgtcctgaacgcaaagacaggaagtctgctaacatggtcattagcaagggcggaggaacatcggggtacggtaaaattttacctacagttctctctttttttcattcacctaattggtgggttgatattggtgctaatattcatgtcgggagaggtttctccttgttgatgagaaaagggtcacttgcggctgttcatggtgttggttccaagtgccatacttgtgttcaatcgaaacaacctcgcaagcctcacaaggcatctgaggcgagggatttggcacctctagaacttgttcattccgatctgcgtgaaatgaacggcgtgttgactaaagggggaaagaaatattttatgacactgatagatgattgcactagattttgttatgtgtatctattgaaaacaaaggatgaagcattgcattactttaagacctataaagctgaggtagaaacccaagttgaaaggaaaatcaaacggttgagttctgataggagtggcgagtatttttccaatgagtttacatccttttgtgaagagtttggaattattcatgagaggacgcctccctattcaccccaatcaaatggggtagctgaaagaaagaatcatactctaactaagctgcataaggaagtaacaccattcgaggaatgggaaatgaagaaattaaatctctcatacctacgaacctgggactgtttggccaagtccagagatgccacattctttgagaatgaatttcccatgaaaaatacgcctagcacttctagtcaagaaattgtcataccccatcagcactttgcaccgataaaacacaatgatcaaacgcctgagggaaatcctgaggaggataagattgtagatactcgtaagagatgcaaatgggtttttaagaaaaagcttaggcctgatggtacaattgaaaagtacaaggcaaggcttgtggccaagggttatacccaaaaagaaggcgaggaattttttgacacctactcaccagttgcccgtttgaccacgattcgagtactacttgcattggcagcctctcatggtcttctcgtccatcagatggacgttaagacagctttcctaaacagagagctggaggaggagatctatatggatcaactagacgaatatgtactagaaggtcaggagggaatagtgtgtaaactgttgaaatccttgtgtggccttaagcaagcatctaagcaatggcatgagaagtttgacaccacacttatatctgctggttttgtcgtgaatgaagctgacaaatgtgtgtactatcgctatggtgggggagaagaagtgatcttgtgtttatatgtcgatgacatattgatctttgggaccagcctcaatgtgattgaggaggtcaaggactttttatccaagagctttgaaatgaaggatttgggagaggctgatgttattcttaacattaagctactaagaggagatgagggtatgattacacttgtgaaatcctactatatggacaagattttaagtcgctttggctacagtgactgcaagccagctgctactccttatgatcctagcgctctggaaagagtaatgcgctatctaaatgacactataagctatggaattcacactaccgggtacccaaaagtactggaagggtatagtgactcaaactggatatatgatgctgatgagataaaggccacaagtggatatgtgttcacacttggaggtggtgctgtttcttggaagtcttgcaagcagatcatcttaacgaggtcaacaatggaagcagaacttacagcactagatactgcgacagttgaggccgagtggcttcgtgaactcctgatggatttgccggtggttgaaaaaccagtgccagctatcctaatgaactgtgataatcaaacagtgattattaaagtgatcagttcaaaggacaacatgaagtcatctaggcatatcaaaagaagactgaaatatgtcagaaagcagaaaaactccggagtgatagcattggactatgtccagacggctaaaaatctggatggcttatgccttaatgtggttcaagtggcttttctaagcagagatattgacctgcaaaacatctcagaaggaacacacctatatgagttcgactgctag

SEQ ID NO: 86725 - DNA, 384 bp, Oryza sativa
  Clone ID: PAT_MRT4530_85739C.1
atgtctggagttgctgctgccactactggcggaggtggtacgccgccgccgacaggagctggatccggagctggtgcgccaggaggaggtgccgtgaacgactacaacaacagaggcaattctgcctcaccatccagcgaagggccattctcggggtataatcttctcctcctgctactgctgttagcgctatactatgtgagctatgttcttgttcctgttctacatgatgcctctagcatgttatcgcgttactggtatgttcctgtttctgacattcatgatgtgcatagtatgctactggttatgtctgcttatgccatgatcattgtttcaatttcttggattaaaatatgccgaataatgactatatttccaacatag

SEQ ID NO: 86726 - DNA, 246 bp, Oryza sativa
  Clone ID: PAT_MRT4530_8573C.1
atggctgatgcaaccaatagagctgatatagctgatttcgatggagatagcttcgaggctgtttctggaatcaatcgatacgactggcgcactggcgcggcggcgggaggcgtccccggtggcggcggctggcgcggtgtggcggcgagcagccggagcgtggggctgcagttccggcgccgccacaaccggatccagcggttcagcgttcgatctggccggggtggattcggcgcgagggcataa

SEQ ID NO: 86727 - DNA, 275 bp, Oryza sativa
  Clone ID: PAT_MRT4530_85740C.1
ctgcaggaattcggccgaggctcctcctctggtgttgccgccgcgccgcgccgcgccgcttctcccccccaactcatccgccgctcgcccgacgacctcgtcggcgggcggatctactcggcggcggagcgtccaggtccagcgcctggcggagcagagcttcgcgggccagcaagcgagcctctccggcggctgcgcgcttaggcaaggcgagaagctaaggccttgtgcaagaccaggctctcctctccgttctgcgtcgccgtctccgacga

SEQ ID NO: 86728 - DNA, 540 bp, Oryza sativa
  Clone ID: PAT_MRT4530_85741C.1
atggtgggttctcaccctcctcttcttcctcctctctacccaactcccctgtattcactctctctcccctctcctctgtcctctccgacggccgaagagagatgcggcgcgcggcagccgggcgaggaggggcggtgccattctgctgggcatcgtgggcggagcggcgggcggctgaacaacccctaccaggacctcaatatcccctacaagcagctctatgacctccccacctccctggagttcctcttccaggagtcgctcgcccagcgctgctcatgggggccactgcatggggaacacgctcagggtcatcggcctgctctatgccgggagcccgggatcgagagtggcatggtcaccgtgcgcgaccgtgacgactggatcaacagcgtcaccgtggggctcagcactggcgcgctcttccgcgccgccgacgggtcacgctccgccgccatcactagtgccatcggtggggtcctcaccggtgccgccatgtcaggcaagcaggcggcgaagagatatgtgcccgccctctga

SEQ ID NO: 86729 - DNA, 3357 bp, Oryza sativa
  Clone ID: PAT_MRT4530_85742C.1
atgcagtgcttctatgtttcacggggcaaacgaagtgaaccacctctttctcctgaggaagaggctaagttcgaggcttcggattgcctgttccgtggagcattgatcagtgtactcgctgataacatagtggacgtgtacatgcacatgccttctgggaaggacatgtgggatgcacttgaggccaagttcggagtttctgacgccggcagtgagctgtatgtcatggagcagttctatgactacaagatggtcgatgaccgttctgtagtagaacaagctcatgagattcagatgttggctaaggaacttgagaacaacaactgtgttgaggagaaggcgagggcaaaggacgtgcggggcaaaaaggttgagggaggttctagtgccaatatggtacagaagaagaaccctcatgcatcctacaacaacatgaaagtcaagcctgatgtcaaacccaaggctgcaacaaattttaataaaaagggcaagggaaaggcaaaggggagactgcctttgtgtgtggcaagtctgggcattgggccaaggactgtcctagagcgcccttacaggaagtctgccaacatggtcattagcgagggcggaggaacatcggggtacggtaaaatattacctacagttctctctgtttttcattcacctgattggtgggtggatactagtgctaatattcatgtcgggagaggttcctccttgttgatgggaaacgggttgcttgcggctgttcatggtgttggtacggtcgatctgaagtttatttcgggaaagaccgtgcagctgaagaacgtgcagcatgtcccttcaataaagaagaatctagttagcggctctctattgtgtagagaaggttttagacttgtgtttgagtccaataaatgtgtcgtatctaaatatgggacttttgttggaaaaggttatgacagcggaggcttgttccgcttttctttgaatgacatgtgtaataatcataatgctgtgaaccatattagcgagaatgatgagtctaatgtgtggcattcacgactctgtcatgtgaatttcggttgtatgacgcgcttagctaacatgagtttaattccaaaattcactttggtcaaaggttccaagtgccatacttgtgttcaatcgaaacaacctcgcaagcctcacaaggcatctgaggcgaggaatttggcacctctagaacttgttcattccgatttgtgcgaaatgaacggcttgttgactaaagggggaaagaaatatttcatgacactgatagatgattgcactagattttgctatgtgtatctattgaaaacaaaggatgaggcattgcattactttaaaatctataaagctgaggtagaaaaccaacttgaaaggaaaatcaaacggttgaggtctgatagaggtggggagtatttttccaatgagtttgcatccttttgcgaagagtttggaattattcatgagatgacgtctccctattcaccccaatcaaatagggtggccgaaagaaagaaccgtactctaactgagatgcataaggaagtaacaccattcgaggaatgggaaatgaagaaattaaatctctcatacctacgaacatggggctgtttggccaaggtaaatgtacctatagcaaaaaagcggaaacttggaccaaaaactattgattgtgtgtttcttggttatgctatccacagtgtgggttataaattcttaatagtaaactctggagtacccgacatgcatgctggtacaattcttgagtccagagatgctacattctttgagaatgaatttcctatgaaatatacacctagcacttctagtaaagaaactgtcatgccccatgagcactttgcaccgatagaacacaatgatcaaacgcctgaggaaaatcctgaggaggacaacattgtagatactcgcaagagtaagagacaaagggttgcaaaatcctttggagatgactacattgtatatctcgtggatgacaccccaagaaccatagaagaggcatattcatctcctgacgctgactactggaaggaagcagtacgcagtgaaatggactcgattatgtctaatggtacttgggaagtcgttgagcatccatatgggtgcaagcccgtaggatgcaaatgggttttcaagaaaaagcttaggcctgatggtacaatcgaaaagtacaaggcaaggcttgtggccaagggttatacccaaaaggaaggcgaggacttcttcgacacatactcaccagttgctcgcttgaccacgattcgagtactacttgctctggtagcctctcatggtcttctcgtccatcagatggacgttaagacagctttcctaaatggagagctggaggaggagatctatatggatcaaccagacgggtatgtactagaaggtcaggagggaatggtgtgtaaactattgaaatccttgtatggcctcaagcaagcacctaagcaatggcatgagaagtttgacaccacgcttacatctgcaggctttgttgtgaacaaagctgacaaatgtgtatactatcgctatggtgggggagaaggggaggtcaaagactatctgtccaagagttttgaaatgaaggatttggaagaggctgatgttattcttaacatcaaactacaaagaggagatgagggtgggattacacttgtgcaatcccactatgtggacaaggttttgagtcactttggatatagtgactgcaagccagctcctactccttatgatcccagcgtgctattaaggaaaaaccgaagaatagcaagggatcaactgagatactctcaaatcattggttcattgatgtacttggctagcgcaacgaggcctgacatctcatttgctgtaagcaagctgagccggtttgtctcaaatccgggagatgatcattggcaggctctggaaagagtaatgcgctatctaaagggcactatgagctatggaattcactataccgggtatccaaaagtactagaagggtatagtgactcaaactggatatctgatcctgatgagataaaagccacaagtggatatgtgttcacacttggaagtggcgctgtttcctggaagtcttgcaagcaaaccatcttaacgaggtcaacaatggaagcagaacttacagcactagatactgcgacagttgaggccgagtggcttcgtgaactcctgatggatttgccggcggttgaaaaaccagtgccagctatcctaataaactgcgataatcaaacagtgattattaaagtgaacagttcaaaggacaatatgaagtcatctagacacatcaagagaagactgaaatctgtcagaaagtag

SEQ ID NO: 86730 - DNA, 216 bp, Oryza sativa
  Clone ID: PAT_MRT4530_85743C.1
atggagatgatgatgcggttgttggaggagaatgagagtgacatggcgcagccgcaggtcggcgacgtcggcgacgccaccgactctggcacggaggtggccaagagcccgctgcctgtttcagtggttaaagctattgacactgcaaggaaaaatgcctttggaggggaaacaacccaacttcaactagaagatctcttgcttcttgggatctag

SEQ ID NO: 86731 - DNA, 480 bp, Oryza sativa
  Clone ID: PAT_MRT4530_85744C.1
catattccaaaaataaatggcgatattccttctgccattgaagcctttgcagatcaccaaagactgcttgacaggttggtgctgtatgatctggctgaagtcaaggttaaaggagacaggaattgccagcatgtgtcttttactcagttccgagcattgtcagatcaaatgtaccacaccaccgaacaccacaggtttgttcgtcagcaagtagtgaaacagcttgagtcttatcctgaaatttatgcgggttatgtccctatggattatagggaatatctgaagaagatgacagaggatggagagtggggtgaccatgttacgcttcaggctgctgccgacttggattatgtgaatgatctagggatgttgtatgtcgatccttgttataaatgtgaaactcaagtatccgcattggtttttgcagtatggtgtaaagataaccctgctgacatcatgcagagataccttttacattga

SEQ ID NO: 86732 - DNA, 4848 bp, Oryza sativa
  Clone ID: PAT_MRT4530_85745C.1
atgccctacgtcacgtcggaggcgcaggcccgcgccctcctgcaggtcggcgggtggcccgtcggaactctggtccatgtcgtcatcgtcgacgccgcctgccgtgcccgccgtctcgaccacacgctgcgggcgatggtggcgcgcagggggtgggtcgtggtcaaccgccacgccgtgcttcgagtcatccgcgtcagcgacctggtccacaacatcctcgacatcaccctcccccgcctcctcgacgacgcctacgacgccacgcagctcactcacttccggaggcaggcggcggctcttcgtacgatggcgggtgtgatcggagggaacttccgcaaccgcgcctacgtcgtcgtccgcaagattcgcttcgtcgccagcagcgcccgcaaccactccatggcggcggcgaggctccagcagcgtctgctcgacatcaggcgtcgcctcagtggtctcgtcgaagcacctgatatgaacttacaaaggctttgtgcagactgctcctatctaataaatcagattgctggtgaattgttggctcttcttgctgatgctgcttttgaaacagttagtatcccctttcgtttcatatttgccaaggttattggtgattgttccttggttgccaagcaaagagcgtttattattcatgctgcatgtgcgctagataaagctatgatggtgcggttatgtgaaaagagcggcaacttttattgcacagaacttggtcgaattgcaaaccacttttaccttcagtactccagtgtggagacttacaatgagatgctttggcatcacatgaatgagagtaagataaggaggccgcgagtccgatccgagttcctcgcttctttcccggtgttagtttctccttctccgcgcctgagttgctctcgcttctccgcttctgatctcttgcgcgcacgagagattggaagaagcagtgcctccgaaaccacaccttcgcctgagatgggtgatcaggtttttgggggagtgcctcctgcacgactgctcatcgccatgtctggagttgctgccgccgctattggcggaggtggtgcgccgccgccgacaggagctggtgcgccaggaggaggtgccgtgaacgactacaacaacggaggcaattctgcctcaccatccagcggagggccattctcggggtataatcttctccttctactgctgttagcgttactcctgttcccattgttagcgctatactgtgtgcgctatgttcttgttcctgttctacatgatgcctttagcatgttatcgcattattggtatgttcctgattctgacattcatgatgcgcttagtatgctactggttatgttaagatcaccctacactgcttatgccatgatcatagtttcaatttcttggattaaaatatgccgaataatgactatatttccaacaatccaaaaacctgataggtcattttcggtagttggctttgctgctgcactgaaaccacatgcttttgatggttcaaactataagagatggaaagcacgtgcactattgtggttgacagcgatgcagtgcttctatgtttcacggggcaaacgaagtgaaccacctctttctcctgaggaagaggctaagttcgaggcttcggattgcctgttccgtggagcattgatcagtgtactcgctgacaacatagtggacgtgtacatgcacatgccttctgggaaggacatgtgggatgcactcgaggccaagttcggattctatgactacaagatggtcgatgaccgttctgtagtagaacaagctcatgagattcagatgctggctaaggaacttgagaacaacaactgtgagttgccggacaagtttgtggcgggtggcattattgccaaactaccaccttcttggtcggactttgccacttctctaaagcacaagagacaagagttcagtgttcctgatctcattggctctttgggtgttgaggagaaggcgagggcaaaggacatccggggcaaaaaggttgagggaggttctagtgccaatatggtacagaagaagaaccctcatgcatcccacaacaacaagaaagtcaagcctgatgtcaaacccaaggctgcaaccaattttaagaagaaaggcaagggaaaggcaaaaggagactgctttgtgtgtggcaagtctgggcattgggccaaggactgtcttgagcgcaaagacaggaagtctgccaacatgatcattagcgagggcggaggaacatcggggtacggtcgggagaggttcctccttgttgatgggaaacgggtcgcttgcggttgttcatggtgttgttccaagtgccatacttgtgttcaatcgaaacaacctcgcaagcctcacaaggcatctgaggcgaggaatttggcacctctagaacttgttcattccgatttgtgcgaaatgaacggcgtgttgactaaagggggaaagaaatatttcatgacactgatagatgattgcactagattttgctatgtgtatctattgaaaacaaaggatgaggcattgcattactttaaaatctataaagctgaggtagaaaaccaacttgaaaggaaaatcaaacggttgaggtctgatagaggtggggagtatttttccaatgagtttgcatctttttgcgaagagtttggaattattcatgagatgacgcctccctattcaccccaatcaaatggggtggccgaaagaaagaaccgtactctaactgagatggtgaatgccatgttagacactgcggggctttcgaaggaatggtggggtgaggcagttttgactgcgtgtcatgtcctgaataaaattccaatgaagcataaggaagtaacaccattcgaggaatgggaaaggaagaaattaaatctctcatacctacgaacatggggctgtttggccaaggtaaatgtacctatagtcaaaaagcggaaacttggaccaaaaactgttgattgcgtgtttcttggttatgctatccatagtgtgggttatagattcttaatagtaaactctggagtacccgacatgcatgctggtacaatttttgagtccagagatgctacattctttgagaatgaattttctatgaaatatacacctagcacttctagtaaagaaactgtcatgccccatgagcactttgcaccgatagaacacaatgatgaaacgcctgaggaaaatcctgaggaggacaacattgtagatactcgcaagagtaagagacaaagggttgcaaaatcctttggagatgactacattgtatacctcgtggatgacaccccaagaaccatagaagaggcgtattcatctcctgacgctgactactggaaggaagcagtacgcagtgaaatggactcgattatgtctaatggtacttgggaagtcgttgagcgtccatatgggtgcaagcccgtaggatgcaaatgggttttcaagaaaaagcttaggcctgatggtacaatcgaaaagtacaaggcaaggcttgtggccaagggttatacccaaaaggaaggcgaggatttcttcgacacatattcaccagttgctcgcttgactacgattcgagtactacttgctctggcagcctctcatggtcttctcgtccatcagatggacgttaagacagctttcctaaacggagagctggaggaggagatctatatggatcaaccagacgggtatgtactagaaggtcaggaggaaatggtgtgtaaactattgaaatccttgtatggcctcaagcaagcacctaagcaatggcatgagaagtttgacatcacgcttacatctgcaggctttgttgtgaacgaagctgacaaatgtgtatactatcgctatggtgggggagaaggggtgatcttgtgcttgtatgtcgatgacatactgatctttgggaccagccttaatgtgattgaggaggtcaaagactatctgtctaagaattttgaaatgaaggatttgggagaggctgatgttattcttaacatcaaactacaaagaggagatgagggtgggattacacttgtgcaatcccactatgtggacaaggttttgagtcgctttggatatagtgactgtaagccagctcctactccttatgatcccagcgtgctattaaggaaaaaccgaagaatagcaagggatcaactgagatactctcaaatcattggttcattgatgtacttggctagcgcaacgaggcctgacatctcatttgctgtaagcaagctgagccggtttgtctcaaatccgggagatgatcattggcaggctctggaaagagtaatgcgctatctaaagggcactatgagctatggaattcactataccgggtatccaaaagtactagaaggatatagtgactcaaactggatatctgatgctgatgagataaaagccacaagtggatatgcgttcacacttggaggtggcgctgtttcctggaagtcttgcaagcagaccatcttaacgaggtcaacaatggaagcagaacttacagcactagatactgcgacagttgaggctgagtggcttcgtgaactcctgatggatttgccggtggttgaaaaaccagtgccagcaatcctaatgaactgcgataatcaaacagtgattattaaagtgaacagttcaaaggacaacatgaagtcatctagacacatcaagagaagactgaaatctgtcagaaagcagaaaaactccggagtgatagcattggactatgtccaaacggctagaaatctggcagatcagtttaccaaggggctaccacgtaatgtgatagacagtgcatcgagggaaatgggcttgatacccacctaa

SEQ ID NO: 86733 - DNA, 611 bp, Oryza sativa
  unsure (1)..(611): unsure at all n locations
  Clone ID: PAT_MRT4530_85746C.1
ccttggaggatcntactcaggattttgatcgtaaatgggtgctgtatgttgggactttttggttctcaatnttccgtgacctatccagtgtatttntcgaacctacgtgatcctccacgttncatctgatgtttcnactgccaacgttgaagaaaggttggatgaagtnttccaaggcncaantcacagtatangcnggattagtatgcatcttccacctgcnacaaggcaactcacatgtgaaagtgaacctgatgcgatggtgtgctggtggaaccagcatgctggaaccgatgcatggaaacctgatgatgtgaggatgcatgcctgtgtgtggctgagcagtgaaagcacatgtgcatgcgctgatggaaaggatggaacccactgcaccagaccctgacccacctgatgtgacctgatggctgaattcacgctgctggcgtgctgtgcaccttgctgtgatgcagaaagtgactggagctggcctgtgacatgatgcttacatacnaccatctatatatgtttattattaaagactcctatgtatcgaaatacanatangtaattagtgctcagtttgtttatctataaaaaaaaaaaaaaaaaaa

SEQ ID NO: 86734 - DNA, 216 bp, Oryza sativa
  Clone ID: PAT_MRT4530_85747C.1
atggagatcggcgcccctcccctgttcagcagagagatgacgcaaggagcggaggagacgagacgggatacctcggcgaggacggagacggagacgcggacgacggcggcggcggcggcggcggcggcggcgacgagtggagcgcagccgcagggacgggacagtgagggagacgagggttttgggttttccgtctcggagggctggtttgaataa

SEQ ID NO: 86735 - DNA, 5077 bp, Oryza sativa
  Clone ID: PAT_MRT4530_85749C.1
aaagcctggtgggcccgcggcgtcgcgctttgggagcgcgagaccggtcgcggtttcgctttaggcgtgcgcgagagcgactgtagagagggagcggcagtgggctcggtctcgcagtatgtgcgcgcgagacctccctcgctatcgcgctccacatgcgcgagagcgtccaccgatatctgtgttttctacaatggcaggaatgtcggtatttagagtgtatttcggtgaaggtgaaattatggaaaatgaaagtggtgtcgatctgagcaactttaggcaatgcacactataccatccaaatcctgacacacttaccatgcccgaagtttggtactggttaactagcacattttctttagatccgggtatatatagtgttaacgtgagggttatgtggagccgatcggccaacaacataaaatgggagttaaaaaatgtgacacggagtaaggcctggcaggattggctcgctggctgtaggagacggggatatgaatatgtcatgctggtgcaagcatgtcaaggaagagtccccacggagagcgcagcggggcaatccaacaatcgtgaggagatgggtctagttcacacgaagaagatgaagttgtagctccccatcatggtggcgatgttggtcctgacattcaaaatctatccatacaaggagatgaagtggtcaaccgccatccaactggtgaagccgatgaaggggaggacatacctgctatagttgaagaaattgagagggtggaccgacatgcagtcgaagatgaggaaaacctcgctgctgaagagaatgatgacgaagatgaacaagaagttgaggaagtacctatgcctgcttcgtggaaccttgaagaccctggttatattgcagaaaactcttgtcatgattcaatatggttctacggggatggccaaatcaatctgggtgcaatgttccgtgacaaaattgggttgcaagacgcagtgaagtcatggtcattctagatgcaaaggcagttcagggttgtgaagtctaacaagactgagtacacggtcgtcatggtcacgtgccaaagtacgagtcttactggattgtgtccaaattgcaggaacactcctgtctgattcggaatactagggagtcgcaccgcaacttgaccgcggcgtacgtcgcgaacaagtactacaaggaaattattgaaggtgatgacctgcctgtgcggcacataataaaactggtggagaaaggtgaacaatacacaattagttaccacaaggcttggagggcgaagcagaaggccatggagaaaagatatgggacatttgaggaagcatatgacacattgccacagatgctaaacattctaaagagcaggaaccctgggacctatgttgctgtgcaggattgggagtcaattcgtcctccaaattatcttgtgatgcaacgggcattctttgcattcggagcatgcattcatgtgttcaagtgctcgaggccggtgctgtgtgtcgacggtactttcctatctgggaagtaccgaggccagatattaacagccattggtgcggatgcgaacatccagataattccggtagcttttgcttttgttgaaagcgagaactacgaaagctggttgtggttcttgcaacatcttaagtggggagtggtgcaaaaacacacatcgatatgtatcatccatgactggaatgccggtctgttgaaggcaatcaaagagctccaggaggatggtgatggtgcatactactggcctgacatgcatagccgttggtgcatgcggcacatgggggccaattttttcaaacaattcaacagccggcggctgatgaacatgttcaagcggttgtgcaaggaaaatcagtctacaaagttcgatgagctttgaaaacaacttgacgaggggacaaggacacatatccggtcaaagcagaccaacaacaacccgcaggatgtacatgtcccccaggccctggaaccaatggatgatcttattccatcaaatggaaagaagcgtaggtcatcaaagaatatcaaatgctttacccattggattgagtgcaagccgaatgataagtgggcactcttgcatgacactaatggggctaggcatggcataatgaccactaatcttgcagaggcgtacaatgcggttcttcgcaaattaaggcctttacctctaactgctattgtagaaggcattatgcacaggacaacgatgtggatgaggacgaggcgggccatagcgttgcaacaaatgtctaacacacaaacacctttctgcaaaaagatggcagagtacctccaagagaaggctgagaaggcaagatttcacacggtcattaccactgggaacgtcagacgaaggtgggaagtcacatgtcgcactaaggggggttttggatcttctaatggggtcatcacgcatgaagttactctagggcacgaatctgataacacatgttcgtgcttttgcaataagccgaagcttcttcataagccatgtagccatgtcctggccgcgtgcgctaaaattaagcttgattcaacatcatacgtgtcgacgttctacctaaaggatagagttctgaatgcatggagtgctgagatcctcgggtggaggtccctccaacacttagtcgaaactgggggtgataaaaggatctatgtgccagacttggttttgttgaaggctggtaagggtagaagactgttaacagtgaaatttggtaatcggcaaagacaatttacccttcatgatgcacatgcagatatggaagaggaatggccttacccgttgcttagcaaagagatcgatgcacgacatcatgcaaagaagatatctgatggaaattcatgctctagtctagttgtcctgattccacgtacagccggatggtgggggattgatccacgatggaagccgagatgacgcgggcaaggatgcattacgatgctagagaacctaaacaaaaacaaatgggggcacatagcaaacgacgacaaaatatcgacaagtccctacttatggcactggttgataggtggaggccagagacacatacattccatctaccgtgcggagaaatgaccataactttgcaggatgtgtccatgctcacggggctgccactagccggccaggcaattgtacgtccggaccctccggaagattggagagatgatattgtatcatgatatgcctgtattttgccacggtacgctaccggtgatacagacgctcatggccccacattgaagtggttgtcacagtttgagtgcgatatatgccccgacgatgtccaggagtaccaactgacgttataccttgaggcttatctactttggctatttggttgggtcatgttcaccggctcgcacgggaacactgtggacgccaggctaatcccccttgctcgccaaattgctgaaggtaatatagcgccttctgcatagtttagctggggatcagccgtccttgcagccacataccatggattctgcgacgcatgtattaagaccggacaaagggaggcgattttcacggggtgtccacttttggtcatgttgtggtcgtacgagcgcttctcgttcagacgtccatacatgagcgtggccgtggcccacaaggacgattacactgacgcagttgatgatcgtcctaccttcggtactcgctggtgctacggaccaccacagtgggcgagaatccaggtgcacaatgtgtacgagtacttcaccgaggcgttcgaaagccttagggaaaacgaagttcggtggactccgtacacgaacgaagaggctattttgcgtgcaccacatggagtaagcatcttatgttaccacgatgaagcgtactggatgacacgaaaaatgctggtgtacgacatattcgtcgaggggtataatgttcaaagggtaatgcgtcatatgggactgtaccaacaagtcccagttcctattggacttcaccttccaccagatgtaaacacgtatcaaaagaggcaagctgacaacaggtttcatcgatctatgcactcaaggatgaccccatggatagaggcgtggtcacaggccttgaatgatgccgtccaggagaccagggcatacgaccacaacacttacgaacaatacatggcctggtactcatcgcagactcgcatccggctacttgcacccgaggaccccgacgagcgaggtccaccaacaattgatcaaatatatgatatgcagctagcaccccccgctcacttgacggctccatgcagaccgacattgcaagggagttagtaagggatgcgaagacattgtgggagaagctcagagatggaatggcgggtaccaaccaggaagttatggccccggtcgactccctgcgtagaaaaggaaagcgaatcatgcggctcgcatcgtgctgacattcctcggacgtctatactccggtaacatcaagaaggacgatcgagccaatgccggagcgtccctctacctcttcccggccgtccacctctgcccgcccttcagcctccgcgcgacgatccagtgatggttgtgcaggagtaaggtcaacttcgtttcgtgagttcgttcgcagcacaaccggaacgggtacccccgcatagttctacgcccatcacctctcaatggcagggtgggtttgcgtcgtttgctgtattgactatttacttcctgatattaacagggcctactcagtcagttccactgcatgcacctacatatgtcaccaacccatggcaaggacaatccatggattacggtggtacgcacagccatcattctccatacacatatatcgatggcacattcatgccatacatgactcccacttcaacttaagacaataactccgtgacactttatatggatgcaaggcacgtcgcgccccaagtgacacagcccacacaaccagaggttggggaaggaaacgacaatgacccgcgcagatctaaccgtgagcgccatgagccaaaccgtctgtccctctcaggccctcgacatgccgcaggacaaaggaaaaaaactacaaaaaagcaaggtggaccatctaggact

SEQ ID NO: 86736 - DNA, 285 bp, Oryza sativa
  Clone ID: PAT_MRT4530_8574C.1
aagttttcctatagagatccttgcctaagggcaaaggggcacctcgacagcgtcgccagaaaggttaccacgctcgaaagtatgaccgtgcccattgctggtctagtgaacactgggctaggctttcgtctgggaccctcttcatccctactgttatggttcgtcgtccccaactccgatactactcgtcaaggcttgcagctaggtatggtctctcgcgctcgcgcccacccgcccctcgtgatgctgccgttcagcgcgtgctcgatgccctactcagcttag

SEQ ID NO: 86737 - DNA, 912 bp, Oryza sativa
  Clone ID: PAT_MRT4530_85750C.1
ccgtgcagcgaccgcggcgacgacggcgacggcgacggcccacggatccaccgaagccggcgccgcagcgaacatacggccgcacctgcccgcgcgcacgtcttatctggtttgctacggcccaaattatcagctgctgccgccgccgcactgcgcgcatccatcatcatccatgcgcctcgccatgcatgctacacggtgacgcaaaagaagacggcacccgacacggcaagcaacatgcatgtagagcctccatcttgtgattctccctttttcgcttacggcagcagcattctttttccttttaaatgtgcaagacggcgcggcgaggcgagtctctctctttctcctctttcagacggcgcggcggcggcggcggcggaggaggaggcgcggcggcgaggcgagcggcgggggcggaggaggcgaggcgacggcggcgaggcgagcgacggaagcggaggaggcgaggcggcggcggcggcaaaggaggcgcggcggcgaggcaagcgacgggagcggaggaggcgaggcggcggcgggggcggaggaagtgcagcagcgaggcgagtggcgggggcggaggaggcacagcggcgaggcgagcgacgggagcggaggaggcgagacggtgggggcggaggaggcgaggcggtcgccttctcgtcacgcgccgcctcctcgtctcgcacagccgtctcgcctcgcgccgccagtcgccaccgagccgcacccgccagccgcctcgccgccgctactgcctcgcctcctccaccgccgcgctcacctcctcgcggcgacgtcgtccccccgccagccgccttgccgccgcctcgcctcgcctcgtcgctacctccgccgctgcctcctctgccgcgccgttgtcgccgtttgaaggaggagagagagaga

SEQ ID NO: 86738 - DNA, 5667 bp, Oryza sativa
  Clone ID: PAT_MRT4530_85751C.1
atgcggctcgaagaagaggtggagcgggaagacgacccccggcaggaatcaagattcttagatgtaccggcttccttggttgcaagctaggaacacacaacccacacgcctcgctgcctcgattgattgattgattccttggagaagaagaaggaggaggaggagatcgagcagccgctgacgctcgtcgtctacctcccgatctgatccgaggagcgaagcgaacaggggcaagatgcattcgacgaatctgctgctggaggagcccatcaggatggcatccatcctggagccatccaagccgagctttttcccggcgatgaccaagatcgtggggacgctgggtcccaagtcgcgcgccgtcgacaccatctcctcctgcctcaaggccggcatgtcggttgccaggttcgatttctcgtggggagacgctgagtaccaccaggaaaccctcgaaaacctcaagctcgccatcaagtccaccaagaagctctgtgctgtcatgctcgacactgtcggcccggagttgcaggtggtgaacaagagtgaggctgcaatctcccttgaagcgaatggcactgttgttctcacccctgaccaggggcaggaggcctcctccgaattgctgcccatcaacttctccgggcttgctaaggctctgaaaccaggtgctacaatttttgtggggcaatacttgttcactggcagtgagactacttcagtttggttagaggtttctgaagttaaaggagatgatgttggtttgtgtgataaaaaattctgcttctctggctggttcactgtccacccgtagattgttctcagcttcatatcgatttaagtagagtgtttaatgaggagacggaagttgttagacgagggagatcttcaaaaaaggattgacttggccctctatgcgaatgaatggcaacgtttaaagtgtatgactgtgacgagcatcttctacaaaactaaggaggagtcggtcagagtaaattttaccatatgatccgaaaatgtagtccgtcaaaaacaattactctgttcggatgaggttcaggatgaggtttgaaggagaagaggcaccagagcagagtgtttactggtactataattggcagtgagaatctcgacccagtgtggcctgaatcaagttggagatccctgaaggtgcggtgggatgaaccatcaactattccgcggccagatagagtctctccttggaaaatagagcctgcttcatcacctcctgttaacccccttcctctttctagggttaaaagacctaggccaaatgctcctccagcatctcctgaatctcctattcttacgaaagaagctgctagtaaggttgacactgatcctgctcaaccacaaagaagtcaaaacggtacggtcttgcaaggtcaagagcaactgaccttgaggagcactcttacgcagagtgacgactctgatctaactgctaataagacaatgaggcgggcttcttgcccaaatgcagccaaagcctacctgttgaaattttagtctattccccctataaaacatttcatctagggtggaatttctctggctcatttgaagcatgacaaatcggctcatagatatagggctctttccgctgctttctgatcccaaagcatccagctggattcaaacaacctctatcataatgaatccgttttgaaggttgctcttgctgacggtcaagtttctggtgcgaaaaagtcgcatttatcgcgttgttgtctgccagaaaatgggacattccgcggttgagaagatcagatgacgttggactattagacaaggagcgtgtgctcgtcgtcgagtaaactatgacatgttctgccagattttgactgggccaaaaaggtcgcttcttggctatgtataatcctatagcttcaaatgcgcagtttttcctatggtgtattcataggattttcccttgcagcttgaaaccattatgatttagttgaagtaaattaaatttgcgcgagttttacctaatggtgttaatcagagggatttaccttaacatatattgaaacaactacgttttagttatgtaaagttatcagatttcaatgcatcatatcacttcgatgggcaaatggaataatgaaatcggtaatgtaccctttggtcttatcagaaaaaaaaaataaaaaaagcggtcaaaaaactcaacaaagttccaaaagatgttcaaagcaagaagcagacgaacaacaacccgaaggatgtacatgtcccccaggccctggaaccaatggatgatcttattgcatcaaatggatacaggcgtcgggaatcacacaatattgagcgttatacccattttaatgactacgaggagattgagaagtggaaactcctgcatgacactaatggggctaggcatggcatagagaccacgaatgttgcagaggcgtacaatgaggaatttcgcaactttgtgccggtacatttatattttatcgaaggaggagttctgcacagtacatcgaagttgaaaaggcccaaggaaagatgactcttcaaaaaatgagaaaggtcatctgccgatgcccaacaaatcagataactaggttcagtgaagcgagatgatacaagaggtagatcgcatggagtcttgagagagagatgccattctgcgggtcccagtcaagtaaaccccctgatgtgttggtgatcacccctgcccccccttttgcttatctgatggctgatgcaatgcaaaccctatggctttagctagtatgagatgtagactgcctattgtttatccttttgttcctttttcttctcttggcagaaagatttagggccaagatttatcattattgctattgcccctctcaactcctcccaactctctgatgtaaatatttatctacgtagccagccacccagccagaagtagagcagtagtagtagagttaccccctaccttgtattaaccagcagcctattcccccggataaatttgtgtaagctctgtagctcgagataaaaaaaaatggcgatcgaacgaacgaacaaatggcgtatgtattgtctgatctttgatataaatatttatcaatgaatgtatcataaatggaaacaaagcaacaacgtgcgaggaggaatagaaggggctctcaagatatggaagaggagtggccttacccgttgcttagcaaagagatcgatgcacggcatcgtgcaaagaagatatatgatgggaattcttgctctagtctagctgtcctgataccgcgtacagccggatggttgtcagctgcaggtcttcttaccttcgtgcagatgacgcaggcaaggatgcattacgacgcaagagaacctaaacaaaaactaatgggggcacatagcaaacgacgccaaaatatcgacaagtccctacttatggcactggttgataggtggaggccagagacacatacattccatctaccgtgcggtgaaatgaccataactttgcaggatgtgtcaatgctcacggggctgccactagccggccaggcaattgtacttccggaccctccggaagattggagagatgatattgtatcacgatatgcctgtattttgtcacggtacgctaccggtgatacagacgatgatgaggacaaaatatttttctctgaaaaagaaactcatggccccacattgaagtggttgtcacagtttgaggtgcgatatatgcccgacgatgtccaggagtaccaactgacgttgtaccttgaggcttatctactttggctgtttggttgggtcatgttcaccggctcgcacgggaaccctgtggacgccaggctaatcccccttgctcgccaaattgctgaaggtaatatatcgccttctacacagtttacctggggatcagccatccttgcagccacataccgtggtttctgcgacgcttgtattaagaccgggcaaagggaggcgattttcacggggtgtccacttttggtcatgttgtggtcatacgagcgcttctcgttcggacgtccatacatgagcgtggccgtggcccacaaggatgattacactgacgcagttgatgatcgtcctaccttcggaactcgatggtgctacggaccgccacagtgggcaagaatccaggtgcacaatgtgtacgagtacttcaccgaggcgttcgaaagccttagggaaaacgaagttcggtggactccgtacacgaacgaagaggccattttgcgtgcaccacatggagtaagcatcttatgctaccgcgatgaagcgtactggatgacacgaaaaatgctggtgtacgacatatttgtcgaggggcaaaataggcaagctgacaataggttttgtcgatctatgcactcaaggatgaccccatggatagaggcgtggtcccaggccttgaatgatgtcgtccatgagaccagggcatacgaccacaacacttacaaacaatacatggcctggtacacatcgcagactcgcatccggctgcttgcaccggaggatcccgacgagcgaggtccaccaacaattgatcaaatatatgatatgcagctagcaccccccgctcacttgacgaccgacattgcaggggagctagtaaaggaggcgaaaacattatgggagaagcttagagatggaatggcgggtacgaatcaggaagtaatggctgcggtcgactccctccgccgaaaaggaaagcgaatcatgcgcctcgcatcgtgccgtcattcctcggacatctataatccggcaacatcaagaaggacgttcgagccaatgcgtgagcgtccctctacctcttcccggccgtccacctcatcccgcccttcagcatccgcgcgacgatccagtgatggtcgtgtaggagtaaggtcaacttcctttcgtgagccacccactattccgactatcccaaaaatcactgaaatttctgaacgcctaggaggctttggttcaactcaagcacaaccggaatgggtacccccatatagctctacgcccatcacctctcaatggcagggtgagagtgcgtcgtttgctgagggaacgcgaatggtccgtcccgtgcctcatatgcctcctgctaggccacaaatgattcgtcaaatggctcccgatgtgccaacctcacactggcaaggaggatttgcaccatttgcagggactagccaaggtatccctaccataccccaaatgtctgcagattttatcggtcaaggagggtttacgtcgttaggcgggcctactcagccggttccactgcatgcacctacatatggcaccaacccatggcaaggacaatccatggattacggtgggtcatttcgccctgaactaatgtcagggtttaggccttacactacatcgtacggcgacatgtcctgcttcggtggagggtcgtcatcggtacccaatgagcttcgcacttcacaaactgatgatgcaccccaagtgacacagcccatacaaccagaggttggcgaaggaaacgacaatgacccgcgtagatctaaccgtgagcgccatgagccgaaccgtctgtcactctcaggcccgcgacatgccgtaggacaaaggaaaaaaactacaaaaaaacgaggtggcacatctatgactacgactgaccatgacgatgatgacgagtacaactga

SEQ ID NO: 86739 - DNA, 408 bp, Oryza sativa
  unsure (1)..(408): unsure at all n locations
  Clone ID: PAT_MRT4530_85752C.1
tggtgggaaagcatggcggcgccggatgttgagtaccgctgcttcgtcggcggcctcgctgggccaccgacgaccgctccctcgaagccgccttctccaccttcggcgagatcctcgagtccaagatcatcaacgatcgggagacggggaggtcgcgcgggttcgggttcgtgacgttctcgagcgagcaggccatgcgcgacgncatcgaggggatgaacggcaaggagccctcatggccaagttatctatctatctaatcgagctaccatcatcatcatcccgatcgttatcatcgttagtttttgtgtggactactatctagtttgtgttactgtgtggttgcccatctgtgtttttnatcgaaagaaggaagttcgtctcgtgtttctttgatcaaaatgaatg

SEQ ID NO: 86740 - DNA, 213 bp, Oryza sativa
  Clone ID: PAT_MRT4530_85753C.1
atggagtatgaaatacagaaggaccgagcaccggcgcgcctacgatgcagcccgacgtcccatgacgcgcatcgccactcactcgccaacggtaggcggaggcgcagagccgcgcggatcgtcagaaaaacggggacgtctcgtgtcgaatttccggagaaatacacgcgtgacgcgagcctggggcctcaggcctcaggccagcacgcgtga

SEQ ID NO: 86741 - DNA, 1470 bp, Oryza sativa
  Clone ID: PAT_MRT4530_85754C.1
atgccgccgccgccgccgccgccgcggcttctcgccggcggcgaccaccacccgtcacccacctccgcgtcctcgccggagcacccggttcctctccgcccacctccctcctcccttccccctccccctccgacctcccctcccttcacctccctctcgccctcgccttctccttcctcgccgacccttcccccctcccccgccgcctcctcgtcgtgctccacgccgccggcggccgctaccccgccttctaccacgccttcgcctccgcgcttctctcccttccccttcccgctcctcctcccccacccgcgcaaccgcctcctcctcgccgcctccgagctcgcccgcgcggcggcgccggggttcgcgccattgctcgtctcgctcctccgccgcctccccttccccggcgacgcccgcctgctcgatatcttccacgagcacgcctccttcctcgccgacgaagagccccagctcctcgcctccgccgtcttcgccttcctccgcctcctcgccaagaaccgcctcgatccggccccgcagtgtctcgagtgcagcgactgtggcgagtgcaagaacgcgaagaatcttgcaggatgcagggagaatctggtgtcgttttgcgcctccgtgttgcgggatcacacccaagtgtgtgagctgatcgggagggacctcgtgaggtgtctccatgaactggtgctcgtgcaggagttccatgaactgtggaaggactcgatgctgggccgtgcggcggagatctgccgcattggcatgccgggttggtgcaccgcgatggccgtctcaccggagatggagacgcagctgctgttcatgatgaacaatgtgaggtgggggaatcagaagaggtaccagctgtggtttgcgaggaagcatttgatggtgcctggaggggaggagaggatacccgacattgtccggttcatctgttgcgggtatcacccaacaaataaggttatgcagtctggtgtcattgcccgatgggcggtcataggttggctgctgacaagctgcaataagagctatgtgcaggcgaatgcaaaggttgcgctgttctatgactggttgtttttcgacgagggtaagggcaatctcatgaatattgagcctgcaatgctcctgatggtaaactcagtgtctcagtatactgatatcacaaacatgctacttgagttcttgtttcttcttgtcgagaactatgacgtgcggaggaaggaggcgattgctgagtgtgtaaggaacgcatttgcggtactggtgaagaaaggagtggtcccttccttggatatattgacatgctgtgagaagctttcaccgatgctgaggcagaaacttgtggcatttttatcttctgctagtcctgaagaaaccgaaaaaacttgtgggcaacccattgatgaggcttctaaagcaatggatttgaacaacagagtttgctcaaactag

SEQ ID NO: 86742 - DNA, 394 bp, Oryza sativa
  Clone ID: PAT_MRT4530_85755C.1
tacgtgcgcggctacggtgtgtgcgcggcgtgctacggccagcgccgtgaaggcggctacgcggtgcggtggctacggtgcgccgtggtggcggcggctacggtggtggctacggcacccggcggcggcaactccgacgggaactggaggaactgagcggtggggccctcatggccacagttatctatctatctaatcgagctaccatcatcatcatccgatcgttatcatcgttagttttgtgtggaactatctagtttgtgttaactgtgtggttgcccatctgtgtttttgatcgcacagaagaaagctcgtctcgtttgctttgatcaaatgaatgaatgaatgaatcttagtgtgctccgctctcgtccaaaaaaaaaaaaaaaaaaaa

SEQ ID NO: 86743 - DNA, 372 bp, Oryza sativa
  Clone ID: PAT_MRT4530_85756C.1
cgtcggtgctacgtccagctcgcggagtgcggaggtctacgttggcgtcggctacggtgttgttgtcggcgtgcggtggctacggccagcgccgtgatagtgcggttacgccggtgcggtggctacggtggcggcccgtggtgcggcggctacggtggtggctacggcatgccgcggcggcggcaactccgacgggaactggaggaactgacggtggggccctcatggccacagttatctatctatctaatcgagctaccatcatcatcatccgatcgttatcatcgttagttttgtgtggaactatctagtttgtgttaactgtgtggttgcccatctgtgtttttgatcgccagaagaaagctcgtctcg

SEQ ID NO: 86744 - DNA, 536 bp, Oryza sativa
  Clone ID: PAT_MRT4530_85757C.1
gacgccatcgaggggatgaacgcccaaaggagctcgacgcccgcaacatcaccgttaacgaggccccagtcgcgccgctccggagccggagccgccagtgtggctacgccagcagcgccggagccggaggtctacgtgtggcggcaggctacagttgttggtgcggccgccaggtggctacggccagcgccgtgaaggcaggcttacgcgcaggtgccaggtggcttacaggtgcagcccagtggtgccagcagctacaggtggtggctacagcagccagcggcagcagccaaactccgacgggaactggaggaactgacggtgggcccctcatgcccaagttatctatctatctaatcgagctaccatcatcatcatccgatcgttatcatcgttagttttgtgtggaactatctagtttgtgttaactgtgtgttgcccatctgtgtttttgatccaagaagaaagctcgtctcgtttgctttgatcacaatgaatgaatgaatgaatcttagtgtccaaaaaaaaaaaaaaaa

SEQ ID NO: 86745 - DNA, 1580 bp, Oryza sativa
  unsure (1)..(1580): unsure at all n locations
  Clone ID: PAT_MRT4530_85758C.1
ccggccgggaacccaccccaccaccgacactctctcttctccgctcctcctccgccgatcacgcgctccgcatccgcatcgccggcgacgatgaggacgtcgcgtgcggcggcggcggcggcatctctgccgctgctgctgctggtggcgctactcgtggcggcggaggggaggaggcacaaggacggcagcggcgacgaggaggcgaaggcgtgcgacaaggggtgggagtgcagcgggagccggttctgctgcaacgacaccatcaccgactacttcaaggcgtaccagttcgaggagctcttcgcccaccgcaacgaccgctcgctcgcccacgccgccgggttctgggactaccacgccttcatcaccgccgccgcgctcttcgagccccgcgggttcggcaccacgggagggaaggaggttgggatgaaggaggtcgccgccttcctcggccacgtcggcgccaagacctcctgtggatatagtgtcgcaactggtggtccattggcttgggggctttgctacaaccatgaattgagcccaagccaaagctattgtgacaacagcaacgaattgtatccttgtgttgaaggagtcgagtattatggtcgaggcgctcttcctgtttactggaactacaactatggtattatcggtcagggtatcaaacaggatctgttgaaccacccagagttattggaacagaatgcgaccctagcatttgaagcagcaatctggaggtggatgactccaatgaagaggaagcaaccatcagcccatgatgtattcgttggcaactggaaaccaaccaagaatgacactttgtccaagaggtatcctggctttggtgctacaatgaacatcctgtatggcgatctcatctgtggtcaaggctccatcgataagatgaacgtcattgtatcccactaccaacattatctcgacctgatgggtgttggtagtgacaaagctggagataacttggattgtgctgaccaggtggcgttcaatccatcctcaaagaatttggactcctaagcaatctgtgttatatagacggataattccctgtaaatttgaggcacagacagctagcttcccaaacaaagaaaagcgtatacatggtacttttaatagctcccaagtaccacctgtgtttgtttgcgaaatttgtagcctatttatgtaagtgtccactatgttctctcatttatatgtgacaatacatattacacactgaagcagataattcacattcaaacatgcaatgactgttgtaaataagcatataatttcattgcagtttgcttagaaagttctgtactacctgtttacatcaacaaactatgatttttctcaaaaaaaaaaaaaaaaaaaaaaaaaaaaaaaaaaaagggggggggggggagaaaaaaaaataaaaaaaaaaacaaanaaaaaaataaaataacaaaannaaaagtatattttaaaatttaattattttacantcaattaaaattttaaaaatatgggggggccctnttgggggggcccctctttcctttccctgtttttggctttttttcttttttttt

SEQ ID NO: 86746 - DNA, 934 bp, Oryza sativa
  Clone ID: PAT_MRT4530_85759C.1
cggcacgagctcgtgccgaattcggcacgagggcttctcctccccctcccggttcggttcggttcggttcgggtccggttcaatttcggtttttccttcggttcgggggttggtgggaaagcatggcggcgccggatgttgattaccgctgcttcgtcggcggcctcgcctgggccaccgacaaccgctccctcgaagccgccttctccacctacggcgagatcctcgagtccaaaatcatcaacgatcgggagacggggaggtcgcgcgggttcgggttcgtgactttctcaagcgagcaggcccatgcgcgacgccatcgaggggatgagcggccaaggagctcgacggccgcaacatcaccgtcaacgaggcccagtcgcgccgctccggaggcggaggcggcggtggctacggccagcgcggccggaggcggaggctacggtggccgcggctacggtggtggtggcggcggcggtggctacggccagcgccgtgaaggcggctacggcggtggcggtggctacggtggcggcggtggtggcggcggctacggcggcggctacggcggcggctacggcagccgcggcggcggcaactccgacgggaactggaggaactgagcggtggggccctcatggccaagttatctatctatctaatcgagctaccatcatcatcatccgatcgttatcatcgttagttttgtgtggaactatctagtttgtgttaactgtgtggttgcccatctgtgtttttgatcgcaagaagaaagctcgtctcgtttgctttgatcaaatgaataatgaatgaatgaatcttagtgtgctccgctctcgtcaaatccatcgaaaaaaaaaaaaaaaaaaaaaaaaaaaaaaaaaaaaaaaaaaaaaaaaaaaaaaaaaaaaaaaaaaaaaggggggcctcgtgc

SEQ ID NO: 86747 - DNA, 2769 bp, Oryza sativa
  Clone ID: PAT_MRT4530_8575C.1
gtgcctgtggtgctcccctccgacgcgttccgttgtggggcgtcacttgtcctgctactgtcttgtgttgttgcgcgggagcactaataatgcccagcaggcaagccggcgcgtgctccatcatcggacatctcccctcacccttcatccttctgtctggcattttggacactttcgtagttactttgtagtgaagaaggacaacttgctctatattattccccacttccgttcaataatttcagtgaaaacttttgtctaccaactgtcatcccttcctaatctgtgggccactatcctaacagagaacaacagttgtagtagctttccccaaaatcatgatcacactcagattaactttgcaatgctttctactttttagcactagttcttcttgggttggtacattagatgggatacgtcgctggcaatccgaaaacagaatcattactacaaaaagcatcataactcagaccctcccatgtcgccgacgaattcatccttgaaccgtgccgtcttggccctatcctccctagcctctgcatcctggtctcgctggtccctctgctcctcgcctcccgcttcagaggggcggaaagaggcgtcgctgatctgatttttgtcactcggtccctcccacttcagaaacttgcggtcggctccatcatcgctgccccagcactgaaacaaggatccggtgagaactcggagccatatcctgaaagagacagatttgccctgaaatgatttgagaggttttcccgacttgttgctgtcaaactgaaccttgaatgatagccatcagctgaacacaactcattttgagcaaaagagtctgttggcaaccggaacaaaccagcaaggcccaccggcactttcacgtcatcccgtggtatgatcctgctgcgatactctgctggttctggtagcgccaatatttcctggctaggaaacgttgacatgcaaagtgaaagctctgtgtctctgactggcgaatcatccgttgcgtagtgatactctggtgctggaagtgctaacatttccaggctaggtggacttggtttgctcagcttttctctaagggacatcttggcacgttgaagggcctccaaaacacctcccacaccatcacttgaaggttgatgcatcgcagttgaatcacgggaattgttgaatttcctttcccactccctctgagcatattcttcttcctcgtattgcccaattaactctgcctgcttttcaagaactctctccatctccccatccttctcatactccacagtatatggattgtcatcatctccatctcttccattgccacaggaaccctgcccatcttggctcacctcaccatcaatatcaggctgctcatcagtacagacagtacaatctgatctctcgtgcccctcctcagtactttccatggcattgtccttcccctcgtctccttcagtgtgaagcctcagctccttcctcttgaccttccggcacgattgccctgggtggtacttgggcgacgaatccgcggccaccaagtaaaagtagcctctcctatggctatgcctcggcctaagatgcctgcctttcagttgctgctgctgctgctgccgccgcctctgcgactcgtggctcgcggcgcggcccttccacgacagccccccggccgccgccgcagtagcagtgcctccaaactctgaccccgacagcgcatcctccgcgtccccacgagccttgctgccgctctcggcggactcgaggccgtcctcatcgtcggaacctgaaccggaatccgccacatcggagaagcgggcgaggccctgggactcgaggatggcgagcacctcccccgcggcacgctccgccttccggcgctgcgccgtcaccgcccgcacctgctcctccagctccgccacctgcagcagcagcagcgacaccgtgagccggagagaaaatgcggtcgatagggagagtgactgcagctcacgcacccgcttggtgagctggtcggcgcgctccttggcggcgcgggagacggagcgctcggagaggaggcgcgcgcggaggaagtcgattgtcatcgccgtcgtcgcgtccgccgccgccgccatctcgaacccctcctctccgctgccttctcgtcgcagctcagggtgccgctcgtgccgccccgccggcgccgggaagcccctacaccgctcgacgccggaccgcgccaccccgacctcaccgcggcggtcggaggacgaggaggagaggcatggcggccggaggaggggagaggagcggcggaggtcccgggaggccacgccggcgcccccccggggaaggggggggggggagggccgcgtcacgccagatccgcccggggcgctagtgcctgcacagcagcgtgccgacgaagaagctgacgacggcgacggccatgatgtcgccgaacccccgacaaagaagctgacgatggctaccgtcggcggctgcccctcgacgccctcctgtgctagcgccgctccatggtccccggtctccatcgccaccgaggggagggccgccgccgccatcctcctccactcccttagtcccttctccgccacccggatgccacgccgccttcgttcgccatgccggacgccgtttctccggagaccggggggacaagcgcccgccctggagggcctcgccgccagagccgggtgcttgtggccatcgccgaccggcgtgccggccatcatccgcgagccaggacggctcgggctctgccccgcttaa

SEQ ID NO: 86748 - DNA, 453 bp, Oryza sativa
  Clone ID: PAT_MRT4530_85760C.1
agtctccggaggcggagcggtcggtgtgctacaggccagcggcggcggaggcggaggctacggtgcaggcaggctacgttgtgtgtgtggcgcagcagtgtggctacaggccagcacccgtgaagcaggctacgccggtgcggtggctacggtgcagccagtggtggcaggcagctacaggtggtggctacaggcagccagcagcgcaggcaactccagacagggaactggaggaactgagcaggtggggccacatcatggcacaagttatctatctatctaatcagagctacacatctatcatcatccgatcgttatcatcgttagttttgggtggaactatctagtttgtgttaactgtgtggttgcccatctgtgtttttgatcgcaagaagaaagctcgtctcgtttgctttgatcaaatgaatgaatgaatgaaaaaaaaaaaaaaaa

SEQ ID NO: 86749 - DNA, 496 bp, Oryza sativa
  Clone ID: PAT_MRT4530_85761C.1
cgccaaggagctcgacgccgcaacatcaccgttaacgaggcccaatcgcaccgctccggagcggagcgccggtggctacggccagccgcggagcggaggctacggtggcggcggctacggtggtggtggcggcaggcggtggctacggccagcccgtgaaggcggctacggcggtggcggtggctacggtggcggcccgtggtggcggcagctacggtggtggctacggcagccgcggcggcggcaactccgacgggaactggaggaactgagccggtggggccctcatggcccagttatctatctatctaatcgagctaccatcatcatcatccgatcgttatcatcgttagttttgtgtggaactatctagtttgtgttaactgtgtggttgcccatctgtgtttttgatcgccagaagaaagctcgtctcgtttgctttgatccaatgaatgaatgaatgaatcttagtgtgctccgctctcgtccaaaaaaa

SEQ ID NO: 86750 - DNA, 156 bp, Oryza sativa
  Clone ID: PAT_MRT4530_85762C.1
atggatcgcaccagccctcgtggcctccacctcggtgtcatgccatcggggaggatacatcggctgctcgtcgacattgtgcgcagggctagtactagtggtatcatggttgatacctacaggtttcagacctggtaccagtggtatcatggttga

SEQ ID NO: 86751 - DNA, 508 bp, Oryza sativa
  Clone ID: PAT_MRT4530_85763C.1
cggccaagggagctcgccgccccgcaacatcaccgttacgaggcccattcgcccgctccggaggcggagcgcggtggctacagccagccgcggagcggaggctacggtggcgccaggctacggtggtggtgcgcgccaggtggctacggccagccccgtgaaggcgggctacgccaggtgccggtggctacaggtgcgcgccctggtgcggcggctacaggtggtggctacggcaaccacggcggcggcaactccgacgggaactggaggaactgacggtggggccctcatggcccagttatctatctatctaatcgagctaccatcatcatcatccgatcgttatcatcgttagttttgtgtggaactatctagtttgtgttaactgtgtggttgcccatctgtgtttttgatcgccacagaagaaagctctctctttctttgatcaaatgaatgaatgaatgaatcttatgtgctcccctctctccaaaaaaaaaaaaaaaaaaaa

SEQ ID NO: 86752 - DNA, 411 bp, Oryza sativa
  Clone ID: PAT_MRT4530_85764C.1
atggctcgactaagaccatgccacttgccccgctctgccactcctgcctcctcactgtcgctggccactgccttggccctccgccgatttctggtgcttggtgaacagtgtgtccccttgttggcgacgttggatctggaagtgaggggtcagaggaggagcatgctgcccatctccaccggatctggctggactcccctctccggtgacctctctccccaggcggcagcgttcagatcagcccctcagcagacggacagtatagcaatattggaaccaaggactatacatctaaattatcagtgtgctgaggcaattggcaatgtcatgctgcattgcgaaccttcttattaccctttgatgggttggaggtatagaatcgagatgattgccaaaaatattcagggttga

SEQ ID NO: 86753 - DNA, 2895 bp, Oryza sativa
  Clone ID: PAT_MRT4530_85765C.1
atggtctttgtttgggcagaacggttgtatgtgggccgggcctttacaaaagctgatttcccttcctcgaggaaaccttaccgggccgaaccttgggcccacacgacagatcgtgacagccgagcaacacggcccagagcccgtgtccccaccgagtcaccgacccgcacctccctgggccccacctgtcatccaccattccccatacccgtccgtgtcacggagaccgccaccgaccccaccacctcgttaccccccgccgtgctcgtcccagtctctgccacgtgggccccacacgcaccacactatttattcctacacgcgaatccgtacgcgtacacttcgactcgacgcgtattcccctcgccgccgtcgccgactcgccgtcgattcgccgccaccgttgccgccgcttcgcgcctagggtttcgtcgccggccgccgctgtatgagcagtcgccccatcgtcgccaacctggaccgtcaccaccaccaccaccgccccgatgtcgtcgtcgaggaagaccgcgggcccccgcggcggcggcggccgccgcagggacgaagaaggtgggtagtgggccgagccgggtgacgctggagaggctccgggaggggatcgagcggcgggcggaggaggaggagaggcgggcggaggaggagaggagggcggaggcggagagggccgccgcggaggagcgggcgaggcgggaggaggaggaggggagggcgcgggcggaggaggagaggaggcggagggaggaggagaggcggcggaggaggaaaggggagaaggtgagggaggaggcgcggcggagggaggagcagcggcggcggctcggcatcaccgtcgtcgctgattctcccggcggaggcggtgatggcgatcgtcgtcggcctgtgtacgactccaggaagactaaattgcaggccaagcctcatggggatgcccagtctgaagctgatacggcagaattgctgagctcgaagccgcaattggaggacgagcagatcaatgcattatctatcgaggttgctgctgccgcagacgcagtagaattgggagtgggaaggaaaactggatcatcagaagaggatggcactgttagtgatggtggtgatgattcttgtgaggacaagagcttggatggttttgatgtccaatctgatgggaattctccctgtgttgcagagggggaaacagaggacaaacttgcgacttctgcttcccaggttgttaatccagtcgatatcgatgtggctggtgaggttgaggaagatgggatccttgattctcaagatgcgtgtgcaatcgagggtgacagggtgctccgtgagacgatatgttgcatccttggccatgtggatgctggtaagacaaagctccttgattgcatcaggcacaccaatgtgcagaaaggggatgctggaggcatcacgcagcagattggcgctacctacgtacctgttgaatacgtcaaggagagggccaaaccccataaagatgcaccgataaagaaggcactcgagaaccaatctggtgatgtcaaaagggaatttgggtggaggttgactaaggttgtgacacaactgaaggaaaatggctttaacactgcactatactatgacaatcaaaagtttcggaaagtgtttgacatagtcccaaccagtgccataagcggtgaaggcattccagaccttctactaatgctggtgttaaggtcccaagcgacaatgatggagaagctaacctttgtcaatacagtggagtgtactgtcctagaagtcaatgatgacaaagatttaggaactactattgatgtagtgctgattaatggtgtgctgcacaaaggtgatcaagtgaatgtttgcactaaacaggggcctgtcacaacaactattagagatttgttgacccctcatccattgaaagaactgagagttaagggcatatataagcatcacaaggagcttaaagctgcacagggggtaaagattgtggcacggggactgaaatatgcaattccaggcacttctctcgttgtagtgaagccaggggatgatctgggacaatctgaagccaaaagccagaggaatgagaatgaagagggaaatgtaatacaagaaataagtaggctcaaaacttgcaaggaaggtgtctatgtgcaagcttctacttttggaatcttggaagcaatcattgagcatttgaacagccctggtgtgaatgttcctgtcagtggttgcaacttaggcccaattgagaagaaagatgtcatgaaggcaagtgctatgctgaagcggaaagaagagtatgcagccatcttagcatttaatgtcagggtgatgcctgaggcagatgtccttgcatcagaatcaggagtgaagattgttacagctgacacagtgtacaagcttgttgacagctttaatgaacacattaaaagatcaaaggagttgaagaaaatgcagtgtgcagccaatgcagtgttcccatgcaccctgaagattctgccaaaccgtgtataccgtaagaaggatccatttctttgtgatgttgaagtcttggaaggtgtcgtcaaggtgggaacaccaatttgtgtctatgttggaggcacagtccatggtcttggaaggatctcctcaatgcaaacatcaaatggtaatcagattgattcggcaaagcgaggagtagtagtatccgtaaagataaccggggagagccccaaggagaagacctggttgtatggacgccattttgatgagagcaatgagctgatcagccaaatctcaaggagatccattgatgtcctcaaagagtactatcgagatgaaatgaatgatgagaattggcagcttatccgcaggctaaagaaactactcgatatagcctga

SEQ ID NO: 86754 - DNA, 445 bp, Oryza sativa
  Clone ID: PAT_MRT4530_85766C.1
acgaggcccacgtcgccccgctccggagcccggagctcgccggtggctacgccagcagcggcggagtgcggaggctacggtgcggcggctacgttgttgtgtcgcgtcggtggctacggccagcgccgtgaagcggctacggcggtgcggtggctacggtgccgcctgtgcgcggctacgttggtgctacgcacccgcgcggcaactccgacgggaactggaggaactgagcggtggggccctcatgccaagttatctatctatctaatcgagctaccatcatcatcatccgatcgttatcatcgttagttttgtgtggaactatctagtttgtgttaactgtgtggttgcccatctgtgtttttgatcgcaagaagaaagctcgtctcgtttgctttgatcaatgaatgaatgaatgaatcttagtgtcaaaaaaaaaaaaaaa

SEQ ID NO: 86755 - DNA, 519 bp, Oryza sativa
  Clone ID: PAT_MRT4530_85767C.1
atggcagcgccgacgtccaagaaccttctcctcgtcgtcgtcgtggccgccaccgcggtcggcatcgtcgcgccgcacggctccgaggccgcggcgggtagggctgtcacgggcctcgtcaccggcgtagtcccgtgcagcgccgggagctccatcaacgccgcgtcggtccccgcgttccccgacgccggcgtgcagatggtgtgcggcggcagggtggtgggcggcgcgacggcggacggcacgggggcgttcaccatcaacatgggcgcgctcaacgcgacgatgctcatggccatggccgggaaccagtgcaaggtggtggtgaccaccccgctggcggcgtgcgacgcgtccctggccgccgtcgccgggacgctcacggcgccggtgcagctcctcggcggcaccggtggcctcggagggctcggcggcctcatcaccctcatcacgcagatcctcagtggcctcctcggcgagatcctcaacatcatccccttgccattctccctcgtctag

SEQ ID NO: 86756 - DNA, 443 bp, Oryza sativa
  Clone ID: PAT_MRT4530_85768C.1
aaaggccaaaaagggggggggaatttttttttgttttttacagaccgaaaagatgtgcttttatccccgggggaaaacaaccgaacgcggggggaggggcgtaaagggtcaacggggcaatatccccccaaaaacaaccttaaaaagctttaggattccggggcttttttactttgggcatcccctcaggagggaacaaaacagggggggcaaaattttactgcccccaggggggggaagggcccaggatggggcccccattcttaaggtccttccatatcgaggcaaacagaggaacaggctaatccatggaactcctacttccttagcagggaggacccatccctcatctccagcttttggggggacactaaaccaaaaagaaaactctgcaatggctgcagggatttatcatatgagggctcggctatgcaaaacatttt

SEQ ID NO: 86757 - DNA, 546 bp, Oryza sativa
  Clone ID: PAT_MRT4530_85769C.1
aagggacttaaaaaggttggtttttcttttaaattccaaggaaaaaaaaccccacagcccaacatattccatgcccaaaaacatactgttttaccatatcatgcatgaaaccaatttcaccacaaaaacccccacttattctacgtataatataggaaagtaccataccatcaggggcatgaagaatcctgcccttgagggggcacccaacaggacaatcagtagttgttcttctaaaacggacctgggaccaaatttatgatctttttatccccctgaaaccccttcataaaaatatcatctgaaataggggggttcaacccaaaccccgctttggcaatagaaatacccccggaattttggctactcagggcaccaatggcaactgccggtttgggggggttaggattgaactggaaggggatgaccccctaaggaaacacaaacacatcacccttgttgacccccttgaacaataccctgttatctgggttggacgtaacaaacccaacgtaaagggttccttcaacccccggaaaaatctcg

SEQ ID NO: 86758 - DNA, 2337 bp, Oryza sativa
  Clone ID: PAT_MRT4530_8576C.1
atggagagtgagagaccagatgcatctgcagaagatagaagattagaagacctgcgcaaacgagaggagagatgctgctcgtacagaagtcaggagattgcacagaagaagaaacattttgatgagcttgcagcaagagaagaaatacagtcgtacgtaatgcaattgtttatttgtttaggaatggcaaactttagagtatattatggcgacggagaaattatatcgaacaaaatgggtgttgacttgagcaactttagtcagtgcacactgtatcacccaaatcgggacaatcttagaatgcccgaagtgtggtactggttgacatgctcattctcattggacccacaagtctatagtgttaatgtcagtctgttatggagtcgttcggccacggacatccaatggcaactgaaagaagtaaccggaagtcaatcatggaagaattggttgcaaggttgcagacgccgaggatacgagatggccatgttggtgcaggcttgtccaaggagggctcgaccaaacagttcgttcggtcagtccgatatgcagggagaggcatgtgctcaatcgagtgcatttcatgtggaagtctcccggcataatgaagacaatatcagcattgacatgcagagccttcatattgaacaagttgaacaaacggtggttgcgatgccgagcacggtgcaacaagatggttcgggtgaagccgatgaaggggaagagataaatgctatagtggacgagattgagagggttgataggaatgctcgtgaggatgaagctaacttggcttgggaggaggatgaggaggaagatgatgaagagtacgaagtccaacctgttccagcatcatggaaccgtgaagatcttggatatatcagagagaacgagcttcatgactcaatatggttctatggtgatggcccaatcaacaagggcgcaatgttttcgacgaagtctgcatttcaggatgcagttaagtcgtggtcctttaagatgcagaggcagttcaaagttctcaaatcaagcccgaccgtctacaccgtgttgtgtgagacggaagggtgcaattttagggttcatgggcatgtgccaaagtacgagtcgtacaggctcgtgtcgagagagggcacaactgcagtagagactggtgaatggtacactattagctaccacaaagcgtggagggcaaagcaaaaggcgacggagaaaaggtatggatcattcgaggtggcatatgacacattgccgcagatcctagatatcctgaaacagagaaatcatggtacctatgttgctgtccaagacagggattctatgcgacctccgaatttccatgtaatggaaagggcattcttttcattcggagcctgtattcacgcatttcaatggtctagacccgttctatgcgtgcacggtacttttcttaccagaaagtaccgtgggtctattctgatagctgttggtgccgatgcgagcaaccatataataccggttgcattcgcttttgttgagagcgagaactacgacagttggttgtggttcttgcagcatgtcaaatggggtgtggtgcaaagcagatcgaatgtctgcattattcatgatagaaatgctgggttgcttaaggcaatcaaggagctcaaagaggatgagaacggagcatactactggccggatttgcatagtcgatggtgcatgcgtcacatgggcgcaaactttttcaaacagttccatagcaaaaggctaatgcaaatgttcaagcggctgtgtatgcaaaaccagcgacagaagttcgaagatctttggaggcagctggatgaagcaacatcagcacatgttaagtcaaaaaaggattccaagaaaaatgaccaaccagccccggaggccttagaaccaatggacggtcttattacttccaacgggttggacagcacagcatacgtctctcctttctacttgaaggatagagtgttgcaagcttggtccgcagatatactaggctatcgggcacatgagaacctcatacgaaccggtggagacgatactgtgtgggttcctgacttacatctgttaaagggtggtaaaggccgacgacaaacaagacgtttaagaaatgacatggatgagtccgaagctggtggccccattaggagatgtgaaacttgtctgcagtatggtcacaggactagagattgcacgaacaacaacgatggtacctcgtcgacagctcagcaaggccaacaaacatgggaatcatcacgtgctacaagggctaggaggacaagaaggggcacgggttcctcccgcaacacaccggaaggcaccaccctttga

SEQ ID NO: 86759 - DNA, 747 bp, Oryza sativa
  Clone ID: PAT_MRT4530_85770C.1
atgcgctcctgctgctgctgctgcccctgcccggcggcgctcgggatcgggatcgggccgcggctgcgctccttcctccgcgactacgacgcgctccagtcgctcgccctcgccctcatctacctccagattggttgtgcgctgattgggtcacttggagcattgttcaatggcgttcttgtgatcaacctggtaattgggctctttgctgttgttgcaattgagagtagcagccagacacttggtcggacatatgcagtccttctgttcttcgctattgttcttgatgttgcttggtttattctcttctcacatgctatatggaatattactcctgaagagaagtatggtcaacttttcgttttatcactcaaactagcgttgtggatgcaaattattgggttttcaatgtataggctgggggtttcatcaagcaccccaacatatcatgaagtaaactatgatggaagaaatagtttcttgagcccaagatcaagttcagttagacgaaattccatggctgatgatatattgggtggttctatttatgatcctgcctactattcttctcttttcgcggatgtccgaaacaacacatgcactcatcagggtgataaacaaagtggtagtaatgatagtggatcaacatctgcgggtcaatctccacgacttaaatcttttgccagtagatcttttgtggccaatgatttggaggaccacactttccagttctcggattttagttga

SEQ ID NO: 86760 - DNA, 2388 bp, Oryza sativa
  Clone ID: PAT_MRT4530_85771C.1
atgaaggttgatggtaatccttttcctatgaacatggttcgtacaagtgggaaaacagccgatagcaagaattatcggtctaaacagctcaattatgttaggattatcaacaagtatcaaagaaagcatgatcggcaggaagaaagattaggtccaattcatcaagattattttcaagattctgaagatgaagatggaaccaagaagcaatggtgtccttctggtattttcaccaagaaccagaagagaagagttcaaaggatgaggaatagggagcaattccaagaggtacaagaggaaattaatcatcggttgaagaaggctaagccaaagcaagagtggtgtgtgaagagcaaggtggtatcagccgatgagattgaggctgacaaagtaaagaggttggctaaaggaaaatctgttgcatctacatcggttaatatggtttttgtgttaccagctgaatttggaattagtcaagcccatgccgatgcagatgtagttgaagaatctttggctctgttggttttgtcaccagaacaggctatctttgagaagccagaggggacagaaaatcggcaacttaagccattgtatctcaagggatttgttaatggcaagccgatgtccaagatgttggttgatggtggggctgctgtgaatctaatgccatatgctacatttacgaaattgggcaagaattcggatgatctcattaagactaacatggttctcaaagattttggtgggtatcggccatataaacaaccacctaggagatgtaaagccgatatgtatgatgctataaaggccgaaattactcatttgtatgatgctggttttattcggccatgtcgatatgctgaatatttgaataaagctacacctaaggatgaatacccaatgccgattgccgatcaattggttgatgctgcttcaggacataagattatatgttttatggatggcaatgcaggatataatcagatttttatggcagaagaggacatccacaagactgctttcaggtgtcctggtgaaatcggcttgtatgagtgggttgtaatgacttttggtttgaagagtgctggagctacatatcagagggctatgaattatatctttcatgacttgatcgacttgttggttgaaatctacattgatgatgtggtggttaaatctagggaacttgatgatcatatagccaatttacgaaaagtttttgaaagaacaaggaaaaatggtctaaagatgaatcccacaaagtgtgctttcggtgtatcggctggacaatttttgggctttcttgttcatgagaggggaattgaagttacacaaagaagtattaatgcaatcaagaacattgaacctccagaggacaagaacaagttacagtcatgggtcggcaagataaatttcattaggagatttatttctaatttgtctgggaggatggagccctttacacctttactcaggggggcatgttttgagtttgcttacacgattaaaccttatgctaccaataatcaagttgagtatgaggcagtgctcaagggattgcaacttttgaaggaagttgaagccaatgctattgaaatcatggaagattctttgctagtcattagtcaattagctggagaatatgagtgcaagagtgatacattgatgatctacaatgagaaatgccgagagttgatgggtggttttcggctggtgacattgaaacatgtttctcgagaacaaaatattgaggctaatgatttggctcaaggagcatcgggttataagccgatggtcaaggatgttgatatagaggttgccacaattacagtcgatgattggaggaaattgaggtacaaagctttaagatatgttttgctggaggatgaattatattatcggacgattgatggggtgttgctcaagtgtttgagtattgatcaagcaaaagttgtcatgggagaaatgcatgagggcatctgtgcaaccgattatttcacaaagtgggttcaggcaattcctttgaagaaagttgattctagggatgcaattcagtttgtcaaagtgcatatcatatatcgatttggcgttcctcagactatcacaaccaatcaaggatctatctttgtgtcagatgagtttgtccaatttgcagaaagcatgggaattaagttgttaaattcttccccatattatgcgcaagctaatgggcaagcagaagcatctaataaaagtttgattaagttgataaaaagaaagattgccgattatccaaagcaatggcataaccgattggctgaggcattatgggcttatcagatggcttgtcatggttcgattcaagttcctccttataagctggtttatggacatgccatgggaaattaa

SEQ ID NO: 86761 - DNA, 838 bp, Oryza sativa
  unsure (1)..(838): unsure at all n locations
  Clone ID: PAT_MRT4530_85772C.1
cccgggctgcaggaatcggcacgaggagtttcaaattcttttggaagttaagggaatccttcaaattttctttttcccattggtgacaattgcactggtatcaggccacttgccagtgtagattttgcattattttgttatggaattaagtgtgttatggaagtacctttgtatgatgaaacctgtttggatttatgtgtgatggcgcttggttgcttctagtattccatgccttgcatcaacttataacctgaaaacataagtttgttgttatgcttgctattggatggacatggaaatatttgccaatacacttcttttttaagatacagggagaatattttgatattgtacagagttttaatctaatattatatttatacaggaatattactcctgaagagaagtatggtcaacttttcgttttatcactcaaactagcgttgtggatgcaaattattgggttttcagtaaggtttttgtcttccttcatatggatccagatgtataggctgggggtttcatcaagcaccccaacatatcatgaagtaaactatgatggaagaaatagtttcttgagcccaagatcaagttcagttagacgaaattccatggctgatgatatattgggtggttctatttatgatcctgcctactattcttctcttttcgcggatgtccgaaacaacacatgcactcatcagggtgataaacaaagtggtagtaatgatagtggatcaacatctgcgggtcantctccacgacttanatcttttgccagnagatcttttgngggccccggtgggggngctgggctgnggaggcccctgggctgtgg

SEQ ID NO: 86762 - DNA, 444 bp, Oryza sativa
  Clone ID: PAT_MRT4530_85773C.1
atgggtccagtgacgttcatcgtccttgtcatcaatgtgcgcttagactttaggcctttaggtttaatgctggtccgtgtctcttctcccatcaccttgtcgcaccggcgacttgcaacctgctcggctgctaatctctatctgcaccgcagctgccacaaatctctccccttccttgctctggccggctgcgctatgcgtcctagcttcctccccttcaacgccatgccgcgccgttcctcgccgctctcctcttgttggatgcagtggcaagcgctgcattggaccactgagatgcggaaaggcgccgcggcagaaggaggccgacctgacgtcgtcgtcactcccgccgaggtcgggattgagaaggttgctttgcttgtttgggctggaccgctggagacgcagacgctcctatccactagaatgaacgaatgtgaatgc

SEQ ID NO: 86763 - DNA, 645 bp, Oryza sativa
  Clone ID: PAT_MRT4530_85774C.1
atggaaaactcagtggtagccatcgggagacttgccatggaaaaccctaacgggtatgcccagcagctgaaccacctactccagcaactaggcttctttaaggagccagtctaccgaggcgaacaagttgtccagggatttcagaagagctggaaggtgataatcttcttccactttcaaggagatggagaagaagtgatcgcttttcaaacccgccatcctcgtaccactcttgaatccgccatccaggatgtgttccgtgaagccctcctgcggttttgtggggtttgcgttcccttgggtgtagccaacaattttggcctacacccataccgcaaagaaggcgataactggtgccacctccatcctactgaatggcccgaaggaagcaggttcaccctcctctctgagctagcctgcaccactgagaatgtatatgagcaggtcctcaaagagctggatgaactccgggatagatatgcagatctggaagcccgctatcaacacctaactctggcgcacactactacgttgctcctggaggcgtccaggagagctcgtcgcatgaagtacaagaagaaggctaggctcctcaggaagctcccactggaagttgatccactcacgcctccaccatcaccatga

SEQ ID NO: 86764 - DNA, 3564 bp, Oryza sativa
  Clone ID: PAT_MRT4530_85775C.1
atggacacttatcctttcagcaatgttgagatagacaatagtggatttcatgtttgtgatcttatatacagctttcggccttcaccgagagaatccttccccggttctgttcacctgcgcgcacaggtgtacgggacgagcaggtgcctccggaactccgtccgcttgagaacttgcacgggtaggcgggcgatcaagttttttggtagcgcttcaagcgcgactgctcttgttcttcgcggctactgctgctgcatcggcgccttcaccaagatgtcaacggagattggagacaataagatgaacgacatcaacggaggcaatactgcctcaaatccagcgatgggacgttctcgggggaaggacatgtgggatgctcttgaggtcaagttcggggtttccgacgccggcagcgagctgtatgtcatggagcagttctatgactacaagatggtcgattaccgttctgtagtggaacaggcttatgagattcagatgctggtaaaggaacttgagaacaacaactgcgagttgccggacaagtttgtggctggaggcattattgccaaattgccaccttcttggtcggactttgctacttctctaaaacacaagaggcaaaagttcagtgttactgatctcattggctctttgggtattgaggagaaggtgagggcaaaggacaaccagggcaaaaagatcgagggaggttctagcgctaatttggtgcagaagaagaacactcacgcatcccacaacaacaacaagaaagtcaaacctgacatcaaatccaaggctacaaccaattttaagaagaaaggcaaaggaaaggcaaaaggagattgctttgtgtgtggcaagcctgggcattgggccaaggattgtcctgagcgcaaggacaagaagtctgcaaacatggttattagtgagggcggaggaacattgtgtgtgggacataggttcttaatagtaaattctggagtacccgacatgcgtgttggtacaattactgagttcagagatgccacattttttgagaatgaatttcctgtgaaaaatgcacatagcacttctagtcaagaacctattttatcccctgagcactttatgccgatagaacacattgatcaaacgcttgaggaaaatcctgaggaggataacattgtggcaactcgaaagagtaagagacaaaggactgcaaagtcttttggagatgactatattgtatatcttgtggatgatactccaagaaccattgaagaggcatattcatctcctgatgtgactattggaaaggaaagaagcggatgcaaatgggttttcaagaaaaagcttaggcctgatggtacaattgaaaagtacaagatggatgttaagacagctttcctcaatggagagttggaggaggagatctatatggatcaaccagatgggtatgtactagaaggtcaggagggaatggtgtgcaagctgttgaagtccttatatggtctcaaacaagcgcctaagcaatggcatgagaagtttgacaatacacttacatctgttggctttgttgtgaaagaagctgacaaatgtgtgtactatcgctatggtgggggagagggagtgatcttgtgtttatatgtcgatgacatattgatctttgggaacagcctcaatgtgattgaggaggtcaaggactttctgtccaaaagctttaaaatgaaggatttgggagtggctgatgttattcttaacattaaactactgagaggagatgagggtgagattacacttgtgcaatctcactatgtggacaaagtcttgagtcgctttggttatagtgactgcaaggcagctcctactccttatgatcctagtgtgctattaaggaaaaaccgaagaatagcaagggatcaattgagatactcccagatcattggttcattgatgtacttagctagtgcaacgaggcctgacatctcatttgctgtgagcaagttgagccagtttgtttcaaatccgggagatgatcattggcatgctcttgaaagagtaatacactatctaaaagggacaatgagctatggaattcactatgccgggtacccaaaagtgctggagggctatagtgattcaaactggatatctgatgctgataagataaaggccacaagagggtatgtgttcacacttggaggtggcgctgtttcctggaagtcttgcaagcagaccatcttaacgaggtcaacaatggaagcagagctcacagctttagatactgccacagttgaggccgaacggcttcgtgagctcctgatggacttgctggtggttgaaaaaccagtaccggcaatcctgatgaactgtgataatcaaacagtgattattaaagtgaacagttcgaaggacaacatgaagtcatccaggcatgttaaaagaagactgaagtctgtcagtaagcagaaaaactccggagtgatagcattggactatgtccagacggctaaaaatctggcagatcagtttaccaaggggctaccacgtaatgcgggcgatcaagtttttggtagcgcttcaagcgcgactgctcttgttcttcgcggctactgctgctgcatcggcgccttcaccaagatgtcaacggagattggagacaagaagatgaacgacatcaacggaggcaatactgcctcaaaatccagcgatgggacgttctcgggcagcagcagcagcaacgcgaacaccctcgcctacatggcagagggcacctacaagaccaacctgctcaacctcgccaaagacctgatcgccaatgtcaccaagacggggtcgcactcggccgccggcgccacggctgggacgacaggtcccgacatcgtctacggcgccgtactctgccggggagactccaccaactgcagcagccgcttacagagagtgctcgacacagccagcatcagtaataatggatctaccagtagtgagagtgactcccagtcccagtcgcacaagagtactgtaaccttgtacgaccatgagttccaggcgctgctaagcttctctgacacggacttcatctccagcttcagcaacgcgccggcgtgcatagtgagcaattacctgaaccctgctgtccctcagagggatgctgatcgcacgcggttcagcgagcttttctctgagctcatggagaggatctccgacgccatggtgagtagtcgggccagctacttgacgggcaaggggaaggggtggttcgacggccaggagagtcagccagtagtatacgggctggcgcagtgcatggacggcatgccgccggagcgttgccggagttgcctgggcggcatcaccgaccaagggaaggagatggtcagcaatggcctgacggaaggcatggtgctcggggtgcgctgcagtctgtggtaccactaccagacggacggagaattcttcgccggcgagccaggggtgttagcgttcctaaacatgccttcttctagagacgaaagcaagttcgggctctgggctacaattggatcgttcttcctcatgaagcaagatttaaactacgactga

SEQ ID NO: 86765 - DNA, 3327 bp, Oryza sativa
  Clone ID: PAT_MRT4530_85776C.1
atgtctgcgcctggagccggcgccgctgctgctgctggaggagatggcggaggtggtgcgccaccaggagctggagctggaggtggtgcgccaggagctggagcctgtgccgcgaacaacaacaccaacggagtcaattctgcctcgcaatccagtggagggccattctcggggtatatccttctcctgttcctgttcccgttgttagcgctttactgctatgttcctgttcctgatattcatgatgtctctagcatgctactgcgttactgctatgttcttgttcctgatattcataatgcgcatgatgccattagtatgctactggttatgttacatgttgtcactagatcaccctacactgtttatgccatgattattgtcttaacattttggattaaaatatgccgatttatgaccatatttctaacaatccaaaaacctgataggttattttcggtagttggctttgctgctgcactgaaaccacatgcttttgatggttctaactataagagatggaaagcacgtgtactattgtggttgacagcgatgcaatgcttctatgtttcacggggcaaacgaagtgaaccacctctttctcctgaggaggaggctaatttcgaggcttcggattgcctgttctgtggagcattgatcagtgtactcgctgacaacatagtggacgtgtatatgcacatgccttctaggaaggacatgtgggatgcacttgaggccaagttcggagtttctgacaccggcagtgagctgtatgtcatggagcagttctatgactacaagatggtcgatgaccgttctgtagtagaacaagctcatgagattcagatgctggctaaggaacttgagaacaacaactgtgagttgccggacaagtttgtggcgggtggcattattgccaaactgccaccttcttggtcggactttgccacttctctaaagcacaagagacaagagttcagtgtttctgatcttattggctctttgggtgttgaggagaaggcgagggcaaaggacgtccggggcaaaaaggttgagggaggttctagtgccaatatggtacagaagaagaaccctcatgcatcccacaacaacaagaaagtcaagtctgatgtcaaacccaaggctgcaaccaactttaagaagaaaggcaagggaaaggcaaagggagactgctttgtgtatggtaagtatgggcattgggccaaggactgtcctgagcgcaaagacaggaagtctgccaacatggtcattagcgagggcggaggaacatcggtgtacggtaaaatattacctacagttctctctatttttcactcacctgattggtgggtggatactggtgctaatattcatgtcgggagaggttcctccttgttaatgggaaacggttcgcttgcggttgttcatggtgttggtacggtcgatctgaagtttacttcgggaaagaccgtgcagctgaagaacgtgcagcatgtcccttcaataaagaagaatcttgttagtggctctctattgtgtagagaaggttttagacttgtgtttgagtccaataaatgtgtcgtatctaaatatgggacttttgttggaaaaggttccaagtgccatacttgtgttcaatcgaaacaccctcgcaagcctcacaagacatctgaggcgaggaatttggcacctctagaacttgttcattctgatttgtgcgaaatgaacggcgtgttgactaaagggggaaagaaatatttcatgacactgatagatgattgcactacattttgttatgtgtatctattgaaaacaaaggatgaagcattgcattactttaagatctataaagctgagtttggaattattcatgagaggacgcctccctattcaccccaatcaaatggggtggtcgaaagaaagaaccgtactctaactgagatggtgaatgccatgttagacactgtagggctttccaaggaatggtggggtgaggcagttttgactgtgtgtcatgtcctgaataaaattccaatgaagcataaggaagtaacaccattcgaggaatgggaaaggaagaaattaaatctctcatacctgcgaacatggggctgtttggccaaggtaaatgtacctatagccaaaaagcagaaacttggaccaaacactgttgattgtgtgttccttggttatgctattcacagtgtaggttatagattcttaatagtaaactctggagtacccgacatgcatattggtacaatttttgagtccagagatgctacattctttgagaatgaatttcccatgaaacatacacctagcacctctagtcaagaaactgtcatgccccatgagcactttgcaccgatagaacacaatgatcaaacgcctgaggaaaatcctgaggaggacaacattgtagatactcgcaagagtaagagacaaagggttgcaaaatcctttggagatgactacattgtatacctcgtggatgacaccccaagaaccatagaagaggcatattcatctcctgacgctgactactggaaggaagcagtacgcagtgaaatggactcgatcatgtctaatggtacttgggaagtcgttgagcgtccatatgggtgcaagcccgtaggatgcaaatgggttttcaagaaaaagcttaggcctgatggtacaattgaaaagtacaagacaaggcttgtggccaagatggacgttaagacagctttcctaaacggagagctggaggaggagatctatatggatcaaccagacagcctcaatgtgattgaggaggtcaaggactatctgtccaagagttttgaaatgaaggatttgggagaggctgatgttattcttaacatcaaactacaaagaggagatgagagtgggattacacttgtgcaatcccactatgtggacaagattttgagttgctttggatatagtgactgcaagccaactcctactccttatgatcccagtgtgctattaaggaaaaaccgaagaatagcaagggatcaactgagatactatcaaatcattggttcattgatgtacttggctagtgcaacgaggcctgacatctcatttgctgtaagcaagctgagccggtttgtctcaaatccgggagatgatcattggcaggctctagaaagagtaattcgctatctaaagggcattatgagctatggaattcactataccgggtatccaaaagtactagaagggtatagtgactcaaactggatatctgatgctgatgagataaaagccacaagtggatatgtgttcacacttggaggtggcgctgtttcctag

SEQ ID NO: 86766 - DNA, 531 bp, Oryza sativa
  Clone ID: PAT_MRT4530_85777C.1
atgcattgtttctttgtctcacggggcaaaccgagtgaaccgcctctctctcctgaggagaaggctaagttagaggcttcggattgcttgttccgtggagcattgatcagtgtactcactgacaatatagtggatgtgtacatgcacatgctttcggggaaggacatgtgggatgcacttgaggccaagttcggagtttccgacgccgcagcgagctgtatgtcatggagcaattctatgactacaagatggtcgatgaccgttctgttgtggagacaggctcatgagattcaaatgttggcaaaggaacttgagaacaacaattgtgagttgccggacaagtttatggcgggtggcattattgccaaattgccaccttcttggtcagactttgctacttctctaaaacacaagaggcaagagttcggtcttactgatctcattggctctttgggtgttgaggagaaggcgagggcaaaggataacttgggcaaaaagatcgagggaggttctagcgccaatttggtgtag

SEQ ID NO: 86767 - DNA, 3831 bp, Oryza sativa
  Clone ID: PAT_MRT4530_85778C.1
atgtctggagttgctggcggaggtggtgcgccgccgccgacaggagctggatccggagctggtgcgccgccgccgacaggagctggatccggagctggtgcgccaggaggaggtgccgtgaacgactacaacaacggaggcaattctgcctcaccatccagcggagggccattctcggggtataatcttctcctcctactactgttgttagcgctatactgtgtgagctatgttcttgttcctgttctacatgatgcctctagcatgttatcgcattactggtatgttcctgtttctgacattcatgatgcgcatagtatgctactggttatgttaagatcaccctacactgcttatgccatgatcattgtttcaatttcttggattaaaatatgccgaataatgactatatttccaacaatccaaaaacctgataggtcattttcggtagttggctttgctgctgcactgaaaccacatgcttttgatggttcaaactataagagatggaaagcacgtgcactattatggttgacagcgatgcagtgcttctatgtttcacggggcaaacgaagtgaaccacctctctctcctgaggaagaggctaagttcgaggcttcggattgcctgttccgtggagcattgatcagtgtactcgctgacaacatagtggacgtgtacatgcacatgccttctgggaaggacatgtgggatgcacttgaggctaagttcggagtttctgacgctggcagtgagctgtatgtcatggagcagttctatgactataagatggtcgatgaccgttctgtagtagaacaagctcatgagattcagatgctggctaaggaacttgagaacaacaactgtgagttgccagacaagtttgtggcgggtggcattattgccaaactgccaccttcttggtcggactttgccacttctctaaagcacaagagacaagagttcagtgttcctgatctcattggctctttgggtgttgaggagaaggcgagggcaaaggacgtgcggggcaaaaaggttgagggaggttctagtgccaatatggtacagaagaagaaccctcatgcatcccacaacaacaagaaagtcaagcctgatgtcaaacccaaagctgcaaccaattttaagaagaaaggcaagggaaaggcaaaaggagactgctttgtgtgtggcaagtctgggcattgggccaaggactgtcctgagcgcaaagacaggaagtctgccaacatgatcattagcgagggcggaggaacatcggggtacggtaaaatattacctacagttctctctgtttttcattcacctgattggtgggtggatactggtgctaatattcatgtcgggagaggttcctccttgttgatgggaaacgggtcgcttgcggctgttcatggtgttggtacggtcgatctgaagtttacttcgggaaagaccgtgcagctgaagaacgtgcagcatgtcccttcaataaagaagaatctagttagcggctctctattgtgtagagaaggttttagacttgtgtttgagtccaataaatgtgtcgtatctaaatatgggacttttgttggaaaaggttatgacagcggaggcttgttccgcttttctttgaatgacatgtgtaataatcataatgctgtgaaccatattagcgagaatgatgagtctaatgtgtggcattcgcgactctgtcatgtgaatttcggttgtatgacgcgcttagctaacatgagtttaattccaaaattcactttggtcaaaggttccaagtgccatacttgtgttcaatcgaaacaacctcgcaagcctcacaaggcatctgaggcgaggaatttggcacctctagaacttgttcattccgatttgtgcgaaatgaacggcgtgttgactaaagggggaaagaaatatttcatgacactgatagatgattgcactagattttgctatgtgtatctattgaaaacaaaggatgaggcattgcattacttcaaaatctataaagctgaggtagaaaaccaacttgaaaggaaaatcaaacggttgaggtctgatagaggtggggagtatttttccaatgagtttgcatctttttgcgaagagtttggaattattcatgagatgacgcctccctattcaccccaatcaaatggggtgcccgaaagaaagaaccgtactctaactgagatggtgaatgccatgttagacactgcggggctttccaaggaatggtggggtgaggcagttttgactgcgagtcatgtcctgaataaaattccaatgaagcataaggaagtaacaccattcgaggaatgggaaaggaagaaattaaatctctcatacctacgaacatggggctgtttggccaagataaatgtacctatagccaaaaagcggaaacttggaccaaatactgttgattgcgtgtttcttggttatgctatccacagtgtgggttatagattcttaatagtaaactctggagtacccgacatgaatgctggtacaattcttgagtccagagatgctacattctttgagaatgaatttcctatgaaacattcacctagcacttctagtaaagaaactgtcatgccccatgagcactttgcaccgacagaacacaatgatcaaacgcctgaggaaaatcctgatgaggacaacattgtagatactcgcaagagtaagagacaaagggttgcaaaatcctttggagatgactacattgtatacctcgtggatgacaccccaagaaccatagaagaggcatattcatctcctgacgctgactgctggaaggaagcagtacgcagtgaaatggactcgattatgtctaatggtacttgggaagtcgttgagcgtccatatgggtgcaagcccgtaggatgcaaatgggttttcaagaaaaagcttaggcctgatggtacaatcgaaaagtacaaggcaaggcttgtggccaagggttatacccaaaaggaaggcgaggacttcttcgacacatactcactagttgctcgcttgaccacgattcgagtactacttgctctggcagcctctcatggtcttctcgtccatcagatggacgttaagacagttttcctaaacggagagctggaggaggagatctatatggatcaaccagacgggtatgtactagaaggctttgttgtgaacgaagctgacaaatgtgtatactatcgctatggtgggggagaaggggtgatcttgtgcttatatgtcgatgacatactgatctttgggactagccttaatgtgattgaggaggtcaaagactatctgtccaagagttttgaaatgaaggatttgggagaggctgatgttattcttaacatcaaactacaaagaggagatgagggtgggattacacttatgcaatcccactatgtggacaaggttttgagtctctttggctatagtgactgcaagccagctcctactccttatgatcccagcgtgctattaaggaaaaacagaagaatagcaagggatcaactgagatactctcaaatcattggttcattgatgcacttggctagcgcaacgagacctgacatctcatttgttgtaagcaagttgagccggtttgtctcaaatccgggagattatcattggcaggctctggaaagagtaatgcgctatctaaagggcactatgagctatggaattcactataccgggtatccaaaagtactagaagggtatagtgactcaaactggatatctgatgctaatgagataaaagccacaagtggatatgtgttcacacttggaggtggcgctatttcctag

SEQ ID NO: 86768 - DNA, 4515 bp, Oryza sativa
  Clone ID: PAT_MRT4530_85779C.1
atggcgcgccgggaaccggagccgttgcgaacgtcaacaccaacggaagcaattctacctcacaatccagcggagggccattctcgggtcgtgctagtcgcaagtcaattgcgtccttggtatgtgcatgatgcttatgataccttaagcatattactggttatgctacatgttatcactagatcaccccacattgttcatgccatggttattgtcttaatattttggattaaaatatgccgatatatgaccatatttccaacaatccaaaaacctgataggtcattttcggtagttggctttgctgctgcactgaaaccacatgcatttgatggttctaactataagaggtggaaagcacgtgcactattgtggttgacagcgatgcaatgcttctgtgtttcacagggcaaacgaagtgaaccatctctctctcatgaggaagaggctaagttcgaggcttcggattgcctgttccatggagcactgatcagtgtactcgctcacaacatagtggacgtgtacatgcacatgccttccgggaaggacatgtgggatgcacttgaggccacgttcggagtttccgacgccggcagtgagctgtatgtcatggagcaattctatgactacaagatggtcgatgaccgttctgtagtagaacaagctcatgagattcagatgctggctaaggaacttgaggacaacaactgtgagttgccggacaagtttgtggcaggtggcattattgccaaattgccaccttcttggtcggactttgccacttctctaaagcacaagagacaagagttcagtgtttctgatctcattggctctttgggtgttgaggagaaggcgagggcaaaggacaaccggggcaaaaaggttgagggaggttctagtgccaatatgaacaacaagaaagtcaagcctgatgtcaaacccaaggctgcaaccaactttaagaagaaaggcaagggaaaggcaaagggagactgctttgtgtgtggcaagtccgggcattgggccaaggactgtcctgagcgcaaagacaggaagtctgccaacatggtcattagcgagggcggaggaaaatcggggtacggtaaaatattacctacagttctctctgtttttcactcacctgattggtgggtggatactggtgctaatattcatgtcgggagaggttcctccttgttgatgggaaacgggtcgcttgcagctgttcatggtgttggtacggtcgatctgaagtttacttcgggaaagaccgttcagctgaagaacgtgcagcatgtcccttcaataaagaagaatcttgttagcggctctctattgtgtagagaaggttttagacttgtgtttgaatccaataaatgtgtcgtatctaaatatggaacttttgttggaaaaggttatgacagcggaggcttgttccgcttttctctgaatgacatgtgtaataatcataatgttgtgaaccatattagcgagaatgatgagtctaatgatgaagcattgcatttctttaagacctataaagctgaggtagaaaaccaacttgaaaggaaaatcaaacggttgaggtctgatagaggtggggagtatttttcgaatgagtttgcatccttttgcgaagagtttggaattattcatgagaggacgcctccctattcaccccaatcaaatggggtggccgaaagaaagaaccgtactctaactgagatggtgaatgccatgttagacactatggggctttccatggaatggtggggtgaggcagttttgactgcgtgtcatgtcctgaataaaattccaatgaagcataaggaagtaacaccattcgaggaatgggaaaggaagaaattaaatctctcatacctacgaacatggggctgtttggccaaggtaaatgtacctatagccaaaaagcggaaacttggaccaaatactgttgattgtgtgttccttggttatgctattcacagtgtgggttatagattcttaatagtaaactctggagtacccgacatgcatgttggtacaattattgagtctagagatgctacattctttgagaatgaatttcccatgaaacatacacctagcacttctagtcaagaaactgtcatgccccataagcactttgcaccgatagaacacaatgatcaaacgcctgaggaaaatcctgaggaggacaacgttgtagatactcgtaagagtaagagacaaagggttgcaaaatcctttggagatgactacattgtatacctcgtggatgacaccccaagaaccatagaagaggcatattcatctcctgacgctaactactggaaggaagcagaagtcgttgagcgtccatatgggtgcaagcctgtaggatgcaaatgggttttcaagaaaaagcttaggcctgatggtacaattgaaaagttcaaggcaaggcttgtggccaagggttatacccaaaaggaaggcgaggattttttcgacacatactcaccagttgctcgcttgaccacgattcgacaagcacctaagcaatggcatgagaagtttgacacaacgcttacatctgtaggctttgttgtgaacgaagctgataaatgtgtgtactatcgctatggtgggggagaaggagtgatcttgtgcttatatgtcgatgacatattgatctttgggaccagcttcaatgtgattgaggaggtcaaggactatctatccaagagttttgaaatgaaggatttgggagaggctgatgttattcttaacattaagctacaaagaggagatgagggtgggattacacttgtgcaatcccactatgtggacaaggttttgagtcactttggatatagtgactgcaagccagctcctactccttatgatcccagcgtgctattaagaaaaaaccgaagaatagcaagggatcaactgagatactctcaaatcattggttcattgatgtacttggttagtgcaacgaggcctgacatctcatttgctataagcaagctgagccggtttgtctcaaatccgggagatgatcattggcaggctctggaaagagtaatgcgctatctaaagggcactatgagctatggaattcactatactgggtatccaaaattactagaagggtgtagtgactcaaactggatatctgatgctgatgagataaaagccacaagtggatatgtgtttacacttggaggtggcactgtttcctggaagtcgttcaagcagaccatcttaacgaggtcaacaatggaagcagaacttacaacactatatactgcgacagttgaggccaagtggcttcgtgaactcctgatggatttgtcggtggttgaaaaaccagtgccagctatcctaatgaactgtgataatcaaatagtgattattaaagtgaacagttcaaaggacaacatgaagtcatctaggcatatcaagagaagactgaaatctgtcagaaagcagaaaaactccggagtgatagcattggactatgtccaaacggctagaaatttggatggctcataccttaatgtgatccgagtggctttttcaagcagagatgttgacctgcagaacatctcagaaggaacacacctatatgagttcgactgctactcatatcctaggtggaagttcaacttaacagtctccaccaaaacacagaaggagcagggcctccggaactacaccttcgccagagatctgcaccagaaatgtacatcgtactactgctgcttccatgttttttttacttcaattttggcacagcaacagtcatccgtggtggaaattgttgcagccgtcatgcacggggaggaagtcaccaggcagcgatgcagacgtccagccgtcctgcgcggggagcggatcacccggcggcagcgtagccggctggctcgaaggtgcaaacctccggtcggcaacgcagtagccatcctacgcggggagcggatcacccagaggcggcgtatgcggtcggcacgaaggtgcaaggctccggtcggcaacgcagtagccgtcctgcgcggggagcgtatcacccggtggtggcgtatgcggtcggctcggaggtgcaagccttcggtcggcaacgcagtagccatcctgcgcggggagcggatcacccggcggcggtgtatgcggtcggctcggtgcaagcgttcggtcggcgatgaagtagccatcctgcgcggggagcggatcacttggtggtggcgagtagtacccaggcagcgaggggtgtcaagcccccgagcccgtggcaaggtcggtgaagagcacccggacgacgcgggaggcgaagcccccgagtccgtggcgaggtcgacgaagaatgcccaggcaacgagggaggtgaagcctccgagtccgtggcgagtcggtgtagagcacccggacgacgcgggaggtgaagcccccgagtccatggtgaggtcggcgaaaaatgcccagacaacgaggaagcgaagcccccgagtccgtggtaagtcggtgtag

SEQ ID NO: 86769 - DNA, 1002 bp, Oryza sativa
  Clone ID: PAT_MRT4530_8577C.1
atggcctcgccggcgacgttgaccccttccagccagccgatgaggtcgggtggcagcgatgatgcaggaggcggagaggcatgtgctcaaccgattgcatttcatgtggaagtctcccagcataatgaagacaatattggcattgacatgcagagccttcatattgaacaagctgaacaaacggtggttgcgatgccgagcacggtgcaacaagatggttcgagtgaagccgatgaaggggaagagataaatggtatagtggacgagattgagagggttgataggaatgctcgtgaggatgaagctaacttggctcaggaggaggatgaggaggcagatgatgaagagtacgaagtccaacctgttatagcatcatggaaccgtgaagatcttggatatatcggaaagaacgagttgcatgactcggtatggttctatggtgatggcccaataaacaagggcacaatgttttcgacgaagtctgcatttcaggatgcagttaagtcgtggtcgtttaagatgcagaggcagttcaaagttctcaaatcaagcctgaccgtctacactgcggtgtgtgagacggaagggtgcaattttagggttcatgggcatgtgccaaagtacgagtcgtactggctcgtgtcgagagtggaggagcacaacaactgtatgctaaggaacacaaggtcgtcccaccgcaacctcaccgcggcgtatgttgctaacaagtactacagcaacattattgaagcggacgacctgctcgtgaggcatataataaaggcagtagagactagtgaacggtacactattagctaccacaaagcgtggagggcgaagcaaaaggcgatggagaaaaggtatggatcattcgaggtggcatatgacacactaccgcagatcctagatatcctgaaacagagaaatcctggtacctatgttgttgttcaagacagaaatcctggtacctatgttgttgtccaagacagggattccgtgtga

SEQ ID NO: 86770 - DNA, 222 bp, Oryza sativa
  Clone ID: PAT_MRT4530_85780C.1
aaaaaaagaagtgttggaacttaatttgtttatactattttttaggacaataactagagggttttcacacagtgatggacaaccggaaaatttcgaataaacatgcagtgttgcagaacaaacaaaaggggggggaactccccaaatgtgtcaggcatttgagcgaaagtgaacactttaaacttccggcaaaggaagagataaaaaaagggaaggcaaatt

SEQ ID NO: 86771 - DNA, 1056 bp, Oryza sativa
  Clone ID: PAT_MRT4530_85781C.1
atgactccgaacattaccctcgcgctcgcatatagatactccgcagcaaccagaaggacagagaagttcttcacgactcttgcacttcgagttcctcctccttttttcctgagctgcctacgcgcacaggtgtacaggatgagcaggtgcctccggaactccatccgcttgagaacttgcacgggtaggcgggcgatcaagtttttgggtatcgcttcaaacgcgactgctcttgttcttcgcggctactgctgctgcatcggtgccttcaccaagatgtcaacggagattggagacaagaagatgaacgacatcaacggaggcaatactgcctcaaaatccagcggtgggacgttctcggggtatactttcattctcccgattctattagatgtttctttgttaatactcttcgcaatggcagcattgcgttactttgtaaatgttgatgcttatttcatattaaacatactcaagttgtatatatctagcactgtcactacatctactcatattgcaaatgtcatgtttattgtcttaatattttggattaaaatataccgaattatgaccaaatttccaataatccaaaaacttgaccggtctttttcgatagttgactttgctgcatcactcaaaccagatgctttcgatggttcaaattataaaagatggaaagcacatacacttttgtggttgacggcgatgcattgcttctttgtctcactgggcaaaccgagtgaagcgcctctctctcctgaggaggaggctaagttcgaggcttcggattgcctgttccgtggagcattgtttagtgtactcgctgacaaaatagtggacgtgtacatgcacatgccttcagggaaggacatgtgggattctcttgaggccaagttcggggtttccgacgccaacagcgagcggtatgtcatggagcagttctatgactacaacatggtcgatgaccgttctgtagtggaacaggctcatgaaattcagatgctggcaaaggaacttgggaacaacaactacgagttgccggacaagttttactga

SEQ ID NO: 86772 - DNA, 245 bp, Oryza sativa
  Clone ID: PAT_MRT4530_85782C.1
aatttcccgatgattttttgcatggacatctcaaataacacatagaagggatctgcaaagtttcgtagcgtttcgataacgtctcgatttattttgaattttcgttccgaaacgcgtgtaattgagtttttttcaaggggcggaagaaacaaacgcgggctacggaatgagttccggtctggaatttttcatgcattaatctgccaccaaatgagatggcatccaagtttcatgccattcggcga

SEQ ID NO: 86773 - DNA, 3699 bp, Oryza sativa
  Clone ID: PAT_MRT4530_85783C.1
atgtctgcacttgtagccgctgccgcctcacctagagccggcgccgctgccaccgtccctggagatggcatgccgggagccggagccgctgtgaacgacaacgtcaacggaggcagttctgcctcacaatccagtggagggacattctcgggatcaccccacattgttcatgtcatgattattgtcttaatattttggattaaaatatgccgatatatgaccatatttccaacaatccaaaaacctgataggtcattttcggtagttggctttgctctgaaaccacatgcatttgatggttctaactataagaggtggaaagcacgtgcactattgtggttgacagcgatgcaatgcttctatgtttcacggggtaaacgaagtgaaccacctctctctcctgaagaagaggttaagttcgaggcttcggattgcctgttccgtggagcattgatcagtatactcgctgacaacatagtggacgtgtacatgcacatgccttccgggaaggacatgtgggatgcacttgaggccaagttcggagtttccgacgccggcagtgagctgtatgtcatggagcagttctatgactacaagatggtcgatgaccgttctgtagtagaacaagctcatgagattcagatgctggctaaggaacttgagaacaacaactgtgagttgtcggacaagtttgtggcgggtggcattattgccaagttgccaccttcttggtcggactttgccacttctctaaagcacaagagacaagagttcagtgtttctgatctcattggctctttgggtgttgaggagaaggcgagggcaaaggacaaccggcacaaaaaggttgagggaggttctagtgccaatatggtacagaagaagaaccctcatgcatcccacaacaacaagaaagtcaagcctgatggcaaacccaaggctacaaccaattttaagaagaaaggcaagggaaaggcaaatggagactgctttgtgtgtggcaagtctgggcattgggccaaggactgtcctaagcgcaaagacaggaagtctgccaatatggtcattagcaagggcggagaaacatcggggtacggtaaattattacctacagttctctctgtttttcattcatctgattggtgggttgatactggtgctaatattcatgtcgggagaggttcctccttgtcgatgggaaacgggtcgcttgcggctgttcatggtgttggtatggtcgatttgaagttaacttcgggaaagaccgtgcagctgaagaacgtgcagcatgtcctttcaataaagaagaatcttgttagcggctctctattgtgtagagaaggttttagacttgtgtttgaatccaataaatgtgtcgtatctaaatatggaacttttgttggaaaaggttatgacagaggaggcttgttccgcttttctttggatgacatgtgtaataatcataatgttgtgaaccatattagcgagaatggttctaagtgccatacttgtgttcaatcgaaacaatctcgcaagcctcataaggcatctgaggcgaggaatttggcacctctagaacttgttcatttcgatttgaaagcattgcattactttaagacctataaagctgaggtagaaaaccaacttgaaaggaaaatcaaacggttgaggtctgatagaggtggggagtatttttccaatgagtttgcatccttttgcgaagagtttggaattattcatgagaggacgcctctctattcaccccaatcaaatggggtggccgaaagaaagaaccgtactctaactgagatggtgaatgccatgttagacactacggggctttccaaggaatggtggggtgaggcagttttgactgcgtgtcatgtcctgaataaaattctaatgaagcataaggatgtgacaccattcgaggaatgggaaaggaagaaattaaatctctcatacctacgaacatggggctgtttggccaaggtaagtgtacctatagctaaaaagcgaaaacttggaccaaatactgttgattgtgtgttcattggttgtgctattcacagtgtgggttatagattcttaatagtaaactctggagtacccgacatgcgtgttggtacaattattgagtctagggatgctacattctttgagaatgaatttcccatgaaacatacacctcgcacttctagtcaagaaactgttataccccatgagcactttgcaccgatagaacacaatgatcaaacgcctgagggaaatcctgaggaggacaacattgtagatactcgtaagagtaagcgacaaagggttgcaaaatcctttggagatgactacattgtatacctcgtggatgacaccccaagaaccatagaagaggcatattcatctcctgacgcttactactggaaggaagcagtacgcagtgagatggactcgattatgtctaatgcctctcatggtcttctcgtccatcagatggatgttaagacagctttcctaaacggagagctggaggaggagatctatatggatcaaccagacgagtatgtactagaaggtcaggagggaatgggttgtaaactgttgaaatccttgtatggccttaagcaagcacctaagcaatggcatgagaagtttgacaccacacttatatctgttggctttgttgtgaacgaagctgacaaatgtgtgtactatcgctatggtgggggagaaggagtgatcttgtgcttatatgtcgatgacatattgatctttgggaccagcctcaatgtgattgaggaggtcaaggactttctgtccaagagttttgaaatgaaggatttgggagtggctgatgttattattaacattaagctactaagaggagatgagggtgggattacacttgtgcaatcccactatgtggacaaggttttgagtcgctttggatatagtgactgcatgccagctcctactccttatgatcccagcgtgctattaaggaaaaaccgaagaatagcaagggatcaactgagatactctcaaatcattggttcattgatgtacttggctagtgcaacgaggcctgacatctcatttgctgtaagcaagctgagccggtttgtctcaaatccgggagatgatcattggcaggctctggaaagagttatgcgctatctaaagggcactatgagctatggaattcactataccaggtatccaaaattactagaagggtatagtgactcaaactggatatctgatgctgatgagataaaagccgcaagtgaatatgtgttcacacttggaggtggcgttgtttcctggaagtcttgcaagcagaccatcttaacgaggtcaacaatggaagcagaacttacagcactagatactgcgacagttgaggccgagtgccttcgtgaactcctgatggatttgccgatggttgaaaaaccagtgccagctatcctaatgaactatgataatcaaacaatgattattaaagtgaacagttcaaaggacaacatgaagtcatctaggcatatcaagagaagactgaaatctgttagaaagcataaaaactccggagtgatagcattcgactatgtccaaacagctagaaatctggcagatcagtttaccaaggggctaccacgtaatgtgatagacagtgcatcgagggaaatgggcttgatacccacctaa

SEQ ID NO: 86774 - DNA, 2934 bp, Oryza sativa
  Clone ID: PAT_MRT4530_85784C.1
atgtggggtgctcttgaggccaagttcggggtttccgacgccggcagcgagctgtatgtcatggagcagttctatgactacaagatggtcgatgaccgctctatagtggaacaggctcatgagattcagatgctggtaaaggaacttgagaacaacaactgcgagttgccggacaagtttgtggttggaggcattattgccaaattgccaccttcttggtcggactttgctacttctctaaaacacaagaggcaagagttcagtgttactgatctcattggctctttgggtattgaggagaggcgagggcaaaggacaactggggcaaaaagatcgagggagcctaggcattgggccaaggattgtcctgagcgcaaggacaagaagtctgcaaacatggttattagtgagggtggaggaacattggggtatggttatgacagtggaggtttgtttcgcttttccttggatgatatgtgtaataaagttgtgaaccatgtaagcgatgatgatgatgagtccaatgtgtggcattcgcgactttgtcatgtgaattttggttgtatgacacgcttagccaacatgagtttaattccaaaattcactttagtcaaaggctctaagtgccatacttgtgttcaatcgaaacaacctcgcaagcctcacaaggcatctgaggcgaggaatttggcaccactagaacttgttcattccgatctgtgcgaaatgaacggcgtgttgactaaagggggaaagaaatatttcatgacactgatagatgattgcactagattctgctatgtgtacctattgaaaacaaaggatgaagcattacattactttaagatctataaggctgaggtagaaaaccaactggaaaggaaaatcaaacggttaaggtttgataggggtggagagtatttttccaatgagtttacttctttctgcgaagagtatggaattattcatgagaggacgcatccctattcaccccagtcaaatggggtagccgaaagaaagaaccgcactctaactgagatggtgaatgccatgttagacagtgctggactttccaaggaatggtggggtgaggcaatattgactgcgtgtcatgtcctgaatataattcctactaagcataagaaagtaacaccattcgaggaatgggaaaggaagaaattaaatctctctcacctgcgcacatggggctgtttggccaaggtaaatgtacctatagccaaaaagcgtaaactaggaccaaagaccgtagattgtgtgttccttggttatgctatccacagtatgggatataggttcttaatagttaattctggagtacccgacatgcgtgttggtacaattactgagtctagagatgccacattttttgaaaatgaatttcctatgaaaaatgcacctagcacttctagtcaagaacctattttatcccctgagcactttgtgccgatagaacacattgatcaaacgcttgaggaaaatcctgaggaggataacattgtagcaactcgaaagagtaagagacaaaggactgcaaagtcttttggagatgactacattgtatatcttgtggatgatactctaaaaaccattgaagaggcatattcatctcctgacgctgactattggaaggaagcggtacgcagtgagatggactcaattacatctaatggtacttgggaagtcatcgagcgtcgatatgggtgcaagcctataggatgcaaatgggttttcaagaaaaaacttaggccttatggtacaattgaaaagtacaaggcaaggcttgtggccaagggttatacccaaaaagaagacgaggattttttcgatacttattcatcggttgcacgcttgaccacgattcgagtactactcgctctggcagcctctcatggtctactcgtccatcagatggatgttaagacagctttcctcaatggagagttggaggaggagatctatatggatcaaccagatgggtatgtactagaaggtcaggagggaatggtgtgcaagctgttgaagtccttgtatggtctcaaacaagcgcctaagcaatggcatgagaagtttgacaatacacttacatctgctggctttgttgtgaacgaagctgacaaatgtgtgtactattgctatggtgggggagagggagtgatcttgtgtttatatgtcgatgacatattgatctttgggaccagcctcaatgtgattgaggaggtcaaggactttctgtccaaaagctttgaaatgaaggatttgggagtggctgatgttattcttaacattaaactactgagaggagatgagggtgggattacatttgtgcaatatcactatgtgaacaaggtcttgagtcgcttttgttatagtgactgcaaggcagctcctactccttatgatcctagtgtgctattaaggaaaaaccgaagaatagcaagggatcaattgagatactcccagatcattggttcattgatgtacttagctagtgcaacgaggcctgacatctcatttgctatgagcaagttgagccgatttgtttcaaatccgggagatgatcattggcatgctcttgaaagagtaatgcactatctaaaagggacaatgagctatggaattcactacgccgggtacccaaaagtgctggagggctatagtgattcaaactggatatctgatgctgatgagataaaggccacaagtggatatgtgttcacacttggaggtggcgctgtttcctggaagtcttgcaagcagaccatcttaacgaggtcaacaatggaagcagagctcacagctttagatactgccacagttgaggacgaatggcttcgtgagctccttatggacttgccggtggttgaaaaaccagtaccagcaatcatgatgaactgtgataatcaaacagtgtga

SEQ ID NO: 86775 - DNA, 736 bp, Oryza sativa
  Clone ID: PAT_MRT4530_85785C.1
ttgtgtgtggcaagtctgggcattggccaaggactgtcttgagcccaaaacagaaagtctgccaccatggtcattagtgagggcagagaaacatcggggtacggtaaattattacctacagttctctctgtttttcattcacctgattggtgggttgaatctggtgctaatattcatgtatgtgctgatatttccctgttttcttcttatgaggtagggaaaggtttctccttgttaatgggaaatgggtcacttgtgcctgttcacggtgttggtacggtcgatctgaagtttacttcgggaaagaccgtgcagctaaagaacgtgcaacatgtctcttcaataaagaagaatctagttagcggttctctactgtgtagagaaggttttagacttgtgtttgaatccaataaatgtgtggtatctaaatatgaaacttttattggaaaaggctatgacagcggaggcttgttccgcttttctttggatgacgtgtgtaataataataatgttgtgatccatattagcaagaatgatgagtccaatgtgtggcattcgcgactctgtcatgtgaatttcggttgtatgacacgcttggctaacatgagtttaattccaaaattcactttagtcaaaggttctaagtgccataatgtaaggtcaatcgaaacaacttcgcgagcctcacaaggcatctgaggcgagggattttgcacctctagaacttgttcattcc

SEQ ID NO: 86776 - DNA, 509 bp, Oryza sativa
  Clone ID: PAT_MRT4530_85786C.1
aggaatagcgctaacaacaggaacagtaggagaagattataccccgagaatagccctccgctggatggtgaggcagaattgcctccgttgttgctgtcgttcacggcacctcctggcgcaccagctccggctccggatccagctcctgtcggcggcgcaccacctccgccatctcctccagcagcggcggcggcggcaactccagacatggcgatgagcagtcgtgcgggaggcactccccaaaaacctgatcacaagcctacccggtgcagatctcaggcgaaggtgtggtttcggaggcactgctccttccaatctctcgtgcgcgcaagagatcagaagcgaggaagcaagagcaactcaggcatggagaaggagaaactaacaccgggaaagaagcaatgaaactggatcggactcgcggcctccttatctatcaggagaaagaacgtggacgcgctgttgcggagggaatcgtgggaacgtgggttagtggctgcaaaaggata

SEQ ID NO: 86777 - DNA, 871 bp, Oryza sativa
  Clone ID: PAT_MRT4530_85787C.1
ctcgagacgactcatcaacaaccgccgcgccattgatgactaattgagatcgatcgatagatagtgtaagacccacgcgtccggctctcgatcagcctagctatagctatagatagatatacaatctctctctctctctctctctctctctctctctctctgattgttctcttctgcttgcctcttccatggagtgggctcgaggtccagccatggcggcagcggcagcggcagcggtggtgatggtcgccgccgttctggccggccaggcgatggccgccggcgcgacgacgtacacggtgggcgcgccggatgggctgtgggacatggagaccgactacaaagagtgggtcgctcgccggacattccaccccggcgacaagctcacgttcacgtactcgcgtgagctgcacgacgtggtggaggtgacgaaggcggggtacgacgcctgctccaacgccaacaacatctccgccttccgctccggcaacgacctcgtcgccctcaccgccgtcggcacccgctacttcctctgcggcctcaccggccactgcggcagcggcatgaagatccgcatcgacgtcgtcgccgccgcctcctccggccccgcagccgccgccgcgccgctgccgtcgacgtcgtccgtgaccgccgccgtcgccggaagccgcctagtcctcgtgctcttgtatgctcttctgccattgtggtagcattaattaattagtctcttgtgtgtatatttttgtaattgtaagtttaagtacacgtatatgctttgatttagttaatattttgtacttctggttttaatttgtggttattgatcggattttagatatgcatgcatgccttaatttggtttcatttg

SEQ ID NO: 86778 - DNA, 195 bp, Oryza sativa
  Clone ID: PAT_MRT4530_85788C.1
ggccgcccctttttttttttttttggtgaagagaacacgatgaggacacacacacaaagatacatcaatgacataaagaccatgagacattgagttaaaataggctatagactgagaggaagaggcgagagggaatataaaactacggagaatccggtgccaaagcctaaagatagccaagacaacggcgagggg

SEQ ID NO: 86779 - DNA, 325 bp, Oryza sativa
  Clone ID: PAT_MRT4530_85789C.1
gctttgttttcataggcgtctccaggctggaccatggaagaatggtttgcacccgatgatgggataacagatgctttatgcctctccactgcaaagatggagactgctcacgaggcgaaaacagctgctgcatgctacgagaatacaaaccaagccaaagatgcaggcgccgacacatatgatgcttccacgaactgaaaaggtaccaggtccaacaagaagactgcctggcgaaaaaccgcataagtacgtgcacgacacagatggaccggactgtcagaaacccagggcagatgaacggacaattatgagcatggccggaacc

SEQ ID NO: 86780 - DNA, 238 bp, Oryza sativa
  unsure (1)..(238): unsure at all n locations
  Clone ID: PAT_MRT4530_8578C.1
cacctgatgaacctgttgtgagaagcatcgttccttctattcatgatcaccaacaaagtatagtatgggattccataatatccacatcacaagaactttggcgttcactcttgtcatatatacagtcaagtcagctcgggccggngttagcactgncactngtagccatcatcgttctattgcaggtaaccatcatagttctactactcagatccnccaaggtgtatatggttaacca

SEQ ID NO: 86781 - DNA, 333 bp, Oryza sativa
  Clone ID: PAT_MRT4530_85790C.1
atggagatgaataaggatattgcttcactcttctggagtcatgaaactcaagcaaagaagattgcagactcctatcctaatcctgcatcgccgccgccgctcactgcctcccacaatcgctgcccgccgccgcctgtcgtcgcccctcccactggatccggcagaagggagggcaccgccgctgcctcccgcccgcccgccgctgcctaccgcccaccgcccgccgcctgcctcctctcctctgccggatccggcagagggaagggcaccgccgccgcccgccgcctccccttcgtgcgctaccatcgcccgctacccaccgccgctgcctag

SEQ ID NO: 86782 - DNA, 606 bp, Oryza sativa
  Clone ID: PAT_MRT4530_85791C.1
atgggatcaactttgggagccgactatttcgcctttcatccgggccaggcgtatagatttagcgacctcgactcaccgacgacttcgacaagatctctctcctcgactcggaaccagttggggagggactccacatcattagccccgtttggtatcccgaatgccgccgagacctactcaagtatcttctctgagtcagctccaagctacttgagggaatcctcatcaacaaatcaccgtcttcgcagcctctccaacaacgcagcaatctatccccagattgctatgcgactccctccgttccttgccacaacttttggaacaagattagcctctcctcccaagacacgaccaagcctagttccacgttcgcttgagattggatctaggaggtggggggttatgctccaaccactcggatcctgtagccccatagagattgtcaatagctttagcctttcggatggctacagtgacttcgacaccgaaagcttcaacaactccgagttcactgacaactacacaccgctcttcttcgaattcttcaagactgatgctccaggtgctactgacatcgaagaagttgcttgcctagcaagagagtag

SEQ ID NO: 86783 - DNA, 1215 bp, Oryza sativa
  Clone ID: PAT_MRT4530_85792C.1
atgaagaagattcctgaaaaacttggtgggtacttagaatatgaagttattagctctacattgtctaatgtggtgtatgattcattaaacagagatgattttgataagggatggatgaaaatgattgatgaatttagcttacaggataatgaatggcttgctgggttatatgataacagggaattatgggtgccggcttatgtgaaagacacattttgggctggaatgtcttcgtcgcaaaggagtgagagtgtgaatgccttctttgatggttatgttaatgctagaaccacacttaagcaatttgtggagcaatatgacaatgcactaagagacaaagtagagaaagaaaacaagtctgattgtaaatcattccaagaggcaattccttgcattactcactatgaatttgagaggcaatttcaggtggcatataccaacaagaagtttaaagagtttcaggatgagctaagaggcaaaatctactactatgcaactcttcggaagacagaagggttggttcatactttcagtgtcagagaggaccgaaaaattggagagcaaaggcaaggaaattcaggaatatcagcaaaatggaagaataaagatatggtgctgaaacaaggaaaaatggtgctaagcccaatatcagttcgtagaagaggtcgtcctccttcactgagaaaacaatcaaaattggatcaagtggtaaggagattgagaatgaagaagcaacaagaatctacaattgaagtacaaagtcgaagaaggagaaagacaaggaccaaaaatgttatatcaaaagataaacagcttatcaatattcagaactctagacaaatggaggtaaattttgatcattgctatggtggagcatatgaggcaggcagtgcagagtttgctgcaaatgagtttcagggactccaatcaaatcacccggcaccaccatctcacattagttcttacatggatcttcttcagggaaatgtcgtacaagcgtcggacacatgcgtcggacgtatagcaaagttgattgaaaatctaatgggtctcacaacttccaagtctgccaccggcgacggcggcaaaaccacgtcgtcgtcggccatcgacagcaagagagcaatggaaaccgggtcagtcaccatccaggtcgccggctacagtagaaccaaagggatcggcgtcggcaagagcatcaactcctatgtttag

SEQ ID NO: 86784 - DNA, 2511 bp, Oryza sativa
  Clone ID: PAT_MRT4530_85793C.1
atggctttgcaattgaggaggttgagagtgattcaaatgctctgttatgctcgaaagttaggattcggtgtgataaaaagaggatctaagaaaactgaggatggcaaggtgagatatttcacacttgcttgtagcagacaaggtaaggcacagtacacatcaacaaataaattcaagcctaacccctccacaaggcagcagtgcccagctaaagttaacttttatcttcatgatgagaaattctgcattagtacgcttactcttgaccataatcatgttgtaagtcctagcaaagcaagacatctcagatgtcacaagaaacttgatttgcaagctaagagaaggctagagttgaatgaccaagcaagaattcgtataaacaagaattttagttctctagttatgcaagctggaggctatgagaatcttcaatttggtgaaaaggagtgcagaaattatttgcaagatgtacgaaagcttaagcttggtgctggagatgcacatgcagtttatcagtatttcctgcgtatgacgtccaaagatccaaactttttctatgtcatggacgtggatgaggactctcgactaaaaaatgttttatgggtggatgcaagaagtagggctacctatgaatctttttcagatgttgtgacatttgacactacgtacttgactaacaagtaccatatgccatttgctccttttgtcggtgtaaatcatcacggggaatcagttctattaggatgtgctctgctatcaaatgaagaaactgagacttttgtttggttattcagatcatggttatcatgtatgtcaaataaagcaccaaacgccataattaccgatcagtgcagagcaatgcaaaatgctattatggaagtatttcctgaagctcgacacagatggtgtttgtggcatatcatgaagaagattcctgaaaaacttggtgggtacttagaatatgaagttattagctctacattgtctaatgtggtgtatgattcattaaacagagatgattttgataagggatggatgaaaatgattgatgaatttagcttacaggataatgaatggcttgctgggttatatgataacagggaattatgggtgccggcttatgtgaaagacacattttgggctggaatgtcttcgtcgcgaaggagtgagagtgtgaatgccttctttgatggttatgttaatgctagaaccacacttaagcaatttgtggagcaatatgacaatgcactaagagacaaagtagagaaagaaaacaagtctgattgtaaatcattccaagaggcaattccttgcattactcactatgaatttgagaggcaatttcaggtggcatataccaacaagaagtttaaagagtttcaggatgagctaagaggcaaaatctactactatgcaactcttcggaagacagaagggttggttcatactttcagtgtcagagaggaccgaaaaattggagagcaaagggttgtttcagagttacttgttttgttcaaccaagaggattgtgacttgcattgtgaatgtcggcatttcgaattccgagggatcttgtgtagacatatcctttcaatactccctcttgttgatatagaaaaagtcccttccaaatatatactacaacgatggagaaaggatttcaagcgcaagcacacatttattaaatgctcctatgatgatcagcttgacacgccaattgttaggcgttttgatacgttgtgcaagcgttttaatgaagtggcagagaatggttcagtttcagatgcattgtgcaatttagtgatggatggcctaaatgaattgcaaataaagattgatgcacaccatggcagcaaggaaattcaggaatatcagcaaaatgggaagaataaagatatggtgctgaaacaaggaaaaatggtgctaagcccaatatcagttcgtagaagaggtcgtcctccttcactgagaaaacaatcaaaattggatcaagtggtaaggagattgagaatgaagaagcaacaagaatctacaattgaagtacaaagtcgaagaaggagaaagacaaggaccaaaaatgttatatcaaaagataaacagcttatcaatattcagaactctagacaaatggaggtaaattttgatcattgctatggtggagcatatgaggcaggcagtgcagagtttgctgcaaatgagtttcagggactccaatcaaatcacccggcaccaccatctcacattagttcttacatggatcttcttcagggaaatgtcgtacaagcgtcggacacatgcgtcggacgtatagcaaagttgattgaaaatctaatgggtctcacaacttccaagtctgccaccggcgacggcggcaaaaccacgtcgtcgtcggccatcgacagcaagagagcaatggaaaccgggtcagtcaccatccaggtcgccggctacagtagaaccaaagggatcggcgtcggcaagagcatcaactcctactcaaatgagttgtag

SEQ ID NO: 86785 - DNA, 846 bp, Oryza sativa
  Clone ID: PAT_MRT4530_85794C.1
atggtgaggaccgggactatgctcatggagaagcagaagtctagtacggtcaggataccatgtgagaaggtaactagagttcggattcttggaggtcaacttcagtcaacggtggggatcgggactaaactcagggaggagttgagatccagacggtcaaggataccgggtgacgaagttggatacgagatggcatacggtggatggacatcgtgtgggagagatcttcgcaacgggtttcacgaggctgggcaggcgcgcggcttgctggagccggcccaggacgtgcggcgagaggagaccgagtgcgagctggcgaaggatcggtctgaaggagtccgacccggagcaggatttcagatggccggtgcggctgcagttttggagaaaaaggaaattgagggattgagtcccattgtgtgcgcgcggtctgaccggtgggatagcggcggtctgaccgcagcacgggattggacgatcaactcagctcttgcgatcccttccatccagcttgcagagcttgatgctgctttcaacgaggaggaggttcggcatgtcattagagagatgccttcaaacaaacctccttggtcggatgggtccaccgaccatttttacaagagttgctggcccatcaccaagaaggagatcatgtcagcgcttaacgctccgcatgtgactaacggtcagggcttctacaaactcaattgtgctctcatcactctcctcccaaagaaggatggtgtcatactcatcaaggatttttggcctattggtctaatccatagctttggcaagctcttttccaaactccttgtctcgcggctctccccttgtctcggttag

SEQ ID NO: 86786 - DNA, 1730 bp, Oryza sativa
  Clone ID: PAT_MRT4530_85795C.1
atgccactcctcgacaccccctacctggccctgcgcgttcgcttctcatgcttgaagaataatcatgaccacagaaactttctttgccacgaatgccatgcctcccttcagtcgggtcagaccttgcgtgtggtttgccaggaagatcgtctcgcagggaatttcattgcaggggtaacggatgccgttgagatacttgagaactatggctgtgttttgcgtgtgatatcgcctcggagacctgatgcaattatagggactggaggtagtcgtattgagatatggttgccaacttcacagacagaactatctgagatcactgaaggagcttagctgaattttagtaatcaacgcatgtttagaagataaagccggtcatgtttaattggcatgatggagatcataccaccttttctgttttggaaatgttcgaacgacggctgcaaagtgagcttatacttctgattagatcagtcatcagtgaagcaccatatgaacatctttacacgcattccagtaaagcatgttacctgtggaaaaagcaccatatgaacacctttggacgtttttgtagcataaggaactgtagcacggtatacagtttgtatggtagagctagataccgcacttatgaaaagaagtacttttttgttgtttcgcaaaaaaaaaaaaaaacaaagaactccgagacttctgatattcagataccatcacactcattcttagacaagtcatcagatataactccatatactaaaggggaaacttgggattttcaaacttctggagaccaagctaatagttatgctcagttagttactgaatggaaaaatagtgcacttatgatttctcgaactttagcaatggcttatgtcatggaccagattcgaggacccctcgctaatataagagctcttgcaaagatgttatcagttcatacaaagagaaatgagatctcttatgatattgttgaagacgttatgatccaaggtgatcatttgaaagatgctttgcaacagattcaagatgcagtttatctgactaaggtgaacatagttaggtacaatgaggaaaccttaaagaaaattcaggggtcaccttcttcaagaactctaccacactatcaatcagatcctaagaatagttcacagaaagttgattcgttgtcatcacatgattctgacaatggagacatggtgatacccatgccacctctctggctggcccctcttcaaccccaagacgctagaccatgtgatctctctgttgtactggaagatttggttggagcagctcaaccgcttgcttttaggcagcaacgcactctagatgtaacaggaatttcacacccgcttcaagttgctgttgaggaatctgctttaagacaagcgctgagtaatctcatagagggtgctcttctacgcactcagcttggtggccgagttcagatatatgctggtgaagcacctgcaggaggcattctcgttgtcattgatgatgatggtcctgacatgcaatacatgacacagatgcattgccttgctccattcgggtcagaccttgcggatggattaacagttgcccgtgagatacttgagaactatggctgtgttttgcgtgtgatatcgcctcggagacctgatgcaattatagggactggaggtagtcgtattgagatatggttgccaacttcacagacagaactatctgagatcactgaaggagcttag

SEQ ID NO: 86787 - DNA, 1470 bp, Oryza sativa
  Clone ID: PAT_MRT4530_85796C.1
atggagttttctttggtcgtagcattgatcgccgtggcatcatcatgcgtgttcgtccatttcttggcgcggggcgccaccaagaaacggcgatcgccggcggccaagaagctgccgccgggctccctcggcctgccggtgatcgggcagagcctcggcctcctccgcgcgatgcgcagcaactccggcgagcggtgggtgcggcgccggatcgacaggtacggcgcggtgtcgaagctgtcgctgttcggcaagccgacggtgctggtcgccggcgccgcggcgaaccggttcgtcttcttcagcggcgcgctggccctgcagcagccgaggtcggtgcagcggatactgggcgacaggagcatcctggacctcgtcggcgccgaccaccggcgcgtccgcggcgcgctgtcggagttcctccgcccggagatgctgcggatgtacgtgggcaagatcgacggcgaggcgcggcgccacgtcgcgggctgctggtccgggcgcgccgccgtcacggtgatgccgctgatgaagcggctgacgttcgacatcatcgcctccctgctcttcggcctggggcccggcgccgccgcgcgagacgcgctcgccggcgacttcgagcgcgtgatggggggcatgtgggccgtgccggtggacctgccgttcacggcgttcaggcggagcctcagggccgccgcccgcgcccgccggctgctcgccgggatcacgcgggagaggaaggccgcgctggagcgcggcgcggccacgcggagcagcgacctcatcgcctgcctgctcagcctcaccgacgaccgcggcggcgcgccgctgctgtccgaggaggagatcgtcgacaccgccatggtcgccctcgtcgccggccacgacacctcctccatcctcatgaccttcatggtccgccacctcgccaacgaccctgacaccctcgccgccatgcacgaggagatcgcgaggagcaagcgcgacggcgaggcgctgacatgggaggacctgacgaggatgaagctgacatggcgcgtcgcgcaggagacgctccgcatggtgccacccatcttcggcaacttcaggagggcgctcgaggacatcgagctcgacggctacgtcatccccaaagggtggcaggtgttctgggtggcgagcgtgacgcacatggacgcggccatcttccacgacccggacaagttcttgccgtcgcgcttcgacagccagtcgtcttctccgtcgacggcgaaggcggcgccgccgtgctcgtacgtggcgttcggcggcgggccgaggatctgccccgggatagagttcgcgaggatcgagacgctggtgatgatgcaccatcttgtcaggaagttcaggtggaagctctgctgcaaggaggacaccttcgcgagggaccccatgccgacgccgctgcacggtctgcccatcgaaatcgagccgaggatttctccttga

SEQ ID NO: 86788 - DNA, 599 bp, Oryza sativa
  Clone ID: PAT_MRT4530_85797C.1
atggtctgtaggatcattgccttaagggactcagttagtgaatatatcgctgtgaaggaagtagccaaataactctacgtcagaggactctgaggcattgatgatggagaccatggacttagtgcaggccttgtactaacttctcctattctacaacaacggtataaacttggacgccttcaactaggacatgaacgacggtgcagtttcactgtgcaccaccgacatgcattgcaaggtcgtcaagggtgacaaccacagctacaagatcctaacttcgtgccttgaggttcattttgcttgatagcgtggacccacttgatgtgcaccatagtccagtgtcgacgtgacacactgttcgcctcttctgcgcccgaggcgacgactacttcctcagcgagcatatcagcaaactctgcctgaatgtggataaccacagtgtcgacataccattaatggatcaatgtcatgaggcacagcaacggaatccgtgcgaggactgatagatggagctagtctcggcaagaagggcaccgtctaaaacatccaacactacattggactgggtccaacggtgaagctggtttattgcgacccat

SEQ ID NO: 86789 - DNA, 2075 bp, Oryza sativa
  Clone ID: PAT_MRT4530_85798C.1
ttttttttttttttttttttaagttcaatgaagcattttccatggtagctccccatctttccttggttatctataactcaccttctttcaatgccatcaatcaaattttactttctaagtttgcctcaatcaaagccctcttacaaccagcagctgaattaacatcagcatgacaatttattcgaagggcacatctataacaggatacagatttagctagctgatgagatatctataacaggatacagatttagctagctgatgagatagtttatggcatggattttgcagaaacaaattttagaaaaatccatggatgattcagcccttaaagtagagtacaaagggggagttcaggtgaaaagcagccgaataagttagaattggccaggtacacgcacatgtagccttttcctttcaaagtcaagcactttcttaacccgttcatttgcagcagatgttcctccactgacattttcaggcaggtatggattgcatacacgaacctccttcattacaacaatgtcagtcttgtcccactgaactggaagcctgagaagaatataagtcttggacaatgcatcaaatatgctttgagcttctggggtgacaccaacaccaattctctcggcttcaatctcagcttgtctgagagcggcctcctcccgggcgtggatggcggcgaggtcgagcacgcagccggccgggtcgagcgggtcgtcggccttgcctacaacggagaactcccggatgtagttcgccttgagcacccgcacgttcctccgctcacctctctctgccctccccacgccttcctgtgatcggatggggagggatttggaaaggatatgaatgacgaggaggttggtcgggcggtcgaaggagacgatctggccttcgaactcctcgccgagggtggtcttcacggagatcagcaccccgatcgcgaactcctcgccgccaccctccatgtcgccgccgccgcccgccggtgggtagatgggagaggcggaggggaggtgggttgtgagattttgggggttcagcgaagaactcggccttgctggcgaaaaaaatctgcaccgcagtcactcacaactcggcccgcttggccgttggaaccgaaatccccaactttgtgctctaccggtgagaccgccgttgtgaggccggtcagaccggacaactttgtaacggctagaaaactagccgttacagggcaatcattgagcccactcaacctggccggtctgaccgcagtgtagtggccggtcagaccgtccacggctcggtcagaccgccgtcggctcggtctgaccggttgcggctctggcggctctgtatcgccaccaaaaaccagaccagtgcaacagaccaatggggccggtcagaccggccttaccacgccggtcagaccggctaacaggcccggtcagactggcctaaggcccacggcacttgaacttacacttagcgtaccaaatttggagctgatgggcattgctcttcgctcccggtggtcatggatgcaaagagtgccatcggacaagccatggcaaggtttgacaatcccaacattgcataaggagcaggcctttgtagcggcatcaaccatttgtcacttgggggatgggaggacaatcctcttttgggaggatagctggttgcgagagggatgcatacggtccattgctccgtccatctttgagcatgtgccccctcgcatcaggagacgccggacggtgtcgggagcgctccttaaccgccgatggatcagagacatccagggcgcgctggggacgcaagcaatcctagattacctgaagctttggtcgcttgtacaatccgttgattgttctactgctgtctcggatcgtctaagttggaaatgggagagctcagagagaatagattggtcaattcttcaaattgtgcaaggtcctgatgagcgggagagggatgtacccatggaacatgatgagatgtttgtgttattggggttgagggatgaagatgggagggcagcagaagcgttgaatgccggtgttgtggaagagagtacaaatgatctgtaa

SEQ ID NO: 86790 - DNA, 1418 bp, Oryza sativa
  Clone ID: PAT_MRT4530_85799C.1
ctctcttctccgctccccccgaaatcctcgcgcgagccgccgccagccacgccatggccggcacgtgcgcgcacgccgagttcttccgcgcgcagccgacgtgggcgctggcgctggcgcacgtgtgtgtttttaattctgaaaggcatactcaaatttttcgagttaatttcagttctttgaaatctggcgttacagtaggaaatcaaggactacaggttcatgtttcataatcagtggaaggaatataactcacgatctaaacactgggaatgtaatgtatctatgaagttgtacagcggagccacgtacttgtccaacatgctcaggaaacagtaaaatctcaaacaagaatgactaatctgaagcatcactgcgctttcttcttagcatctttggcttgccccttcttgcggatcttgatgcacattcccaggcgaatgctgtcaatgagtgactcggggagaatggagatcaggaaccacattacagagtgtggccagtacggtgtgcacctcggctcatagcctatgtgacgaatggcagcacgggcgtaggtgtccgcggatgggacaaagaacgaggatttcctgatagaggccatctttgttgccacatacaagggcacctggcattgcacatcaatacccttgctcttgtactcaacataaaggcatcttgagaattggtcaacgtaagctttggtggcggcgtagacggagtagagcggatcggacggcatgacggaggaggagccggagccgatgttgacgatggcgccgcgcttcctctccaccatggccgggagcacggcgtgcgtgacccgcgtgaggccctcgacgttgacccggatcagggtgcgcatgagctcctcgtccacctcgtggaggtagcgggcgtacgggtacgagacaccggcgttgttgacgagcacgcccacctcgagcccacggatggcctccctgagcccctccaccccggcggcgaggccgtcggcggcgaagtcgagcacgaacgtccgcacctccaccctggggtacctccccctgatctcctcggagaccgaggccagcttgtcggggctccggccgacgaggacgaggccgagccccgaggcggcgaggcggaacgccatggcgcggccgatgccgtcggtggcgcccgtgacgaccgcccaggcgccgtagcggcggcgcaggggcttccccgggcggaggaacgcggcgtagagccagagcgcgaggcggagcgcggcgcgggcggcggcgaggaggccgacgcccgccagcgccagcgcccacgccggctgcgcgcggaagaactcggcgtgcgcgcacgtgccggccatggcgtggctggcggcggtcgcgcgaggatttcggggggagcggagaagagagcggtcccgtgcctcgtgc

SEQ ID NO: 86791 - DNA, 204 bp, Oryza sativa
  unsure (1)..(204): unsure at all n locations
  Clone ID: PAT_MRT4530_8579C.1
gaaacctgggatgcgcaaggaagctgacgagcggcgggaggtacgtgccccgtgccnttgctnnatgggtccttgagccngggnaccatgngttttccgttnggttnntggcccnttttggnccagntntttctgccccnganaaactttcngtnttngggnagtncggntgccggaaacaacttngggccaagggttantaca

SEQ ID NO: 86792 - DNA, 467 bp, Oryza sativa
  unsure (1)..(467): unsure at all n locations
  Clone ID: PAT_MRT4530_857C.1
caaataatgccatctactacaatactacacgcatcatgagaaatgtgcacatcaccaaccacaacccaaagctatagctgtatctttcctactagttcctaaccctaacaattaacatatcaacagcagcttccatccaagcgtctaactaaccgtatgcatatgcgcaacggcgaggagcccgtgatgtcgatcagattatgacaaccaatcaaccactccatctccactccccttgctaattactttctccgcaccataatatatatagcaacctaatactagatgagacattatctagtattacgtatgcagacaagttttttattcagatacatagtattatgtgatattatatctagttctaggttgttatattatgggacggaggaagtaatactatcgngtatctcgatttgtgcccccaattttgatgtgacccaacaacaaacgaaccaatcgaagat

SEQ ID NO: 86793 - DNA, 120 bp, Oryza sativa
  Clone ID: PAT_MRT4530_85800C.1
atggcgtcggcaaacggcatcatcgcctacgcatgtgtgttcagagaatgggagcagcacatgcgcgaggacatggacgcaccttcagatggcgacccctcagtgcaggcaagcagctag

SEQ ID NO: 86794 - DNA, 264 bp, Oryza sativa
  unsure (1)..(264): unsure at all n locations
  Clone ID: PAT_MRT4530_85801C.1
gggtgtggtggtatattttntcctttttcctggttacgaccttcctaggttgtaatcttgtaatttttttccagccatatcaatagaacttcgcaccgtctcgtgcgagttgttaaaaaaaagctatgttgttatcaggaataatcctgaggagatagtgtctctatgtctttaataattttccattagaaaatggattaattggatcatgccattatgaatttactgaacaagttctttttttacataaaaaaaaaaaaaaaa

SEQ ID NO: 86795 - DNA, 1114 bp, Oryza sativa
  Clone ID: PAT_MRT4530_85802C.1
tcggtctgcgcatgacatggcgaccagcagcaagctccggtcgccggtgctcccgcgccgtcgacttgcggagcccttccttctgctgctcctgctcctgctcctggccgccgtagcccgcccaacggcggcggcggacgtcgtcgagctgaccctcctcgccggcgctcaggagaagggcgcagtgtgcttggatgggagcccgccggggtaccacctgcagagaggcttcggctccggtgagcacagctggctcgtctttcttgagggaggagcctggtgcaacagcatcgaaagttgttccaggcgcaaaatgggcgtgtatggttcatccaaattcatgaaagcagcagagttcaatggaatactcagcaatgaccaacaactgaattctgatttttataactggaacaaagttgccataaggatgggagcacacttcatttcaggggattgcgcatctgggaagcagttgttgatgagctcatgggaaaaggactcgcaactgctaaacagtattgtgtactacttgcacttaagtgccagtttctgctccagtgaggatttatctggcgagaggcacatgtggtccgtattcaatggaactgttcatcttcagaatgttagagaagttttgtcaaaagattgtcttacaaagaaggatccaacagagtgcttctttcctgctgagcttgttaagagcatcaccgctcccacgcttattctgaactctgcttatgattcttggcagataaggaatgcccttgctccagatggatcctttcctggacagtcatggtccagttgcaaaactgacattcggaattgcagttccacacaaatccaagtattcaatggattcaggaacaaatttgtcgatgatgtagagattgtcaaagacaaaaaggactggggactgttcattgattcatgcttcacccactgtcaaacgccattcaacatctcatggagctcacaggcctccccagtgctcggtagcaagactgttgccgaggctgttggggattggtatttcgagagaagctatgaagtgaaagagatcgactgcgagtatccttgtaaccccacatgtagcagccagctgcctacatga

SEQ ID NO: 86796 - DNA, 387 bp, Oryza sativa
  Clone ID: PAT_MRT4530_85803C.1
atggggttggtacctacaagcatcggaggctttgattggtaccttccagtgaaggataggggtaccagcctcacaaaatacaagtaccagggtctggtgcttagaaacaacctaggtatcaggtctgaagaaggagcactcctgctcggagtgaggcgtgccgggttctggctggggctgctcggagtagttgcggcgtcgcggagcgtcgccggcgaggcggtgccggcgaggtatcgaggattcggggcgaaggaaggagcgctcttgctcagagtagttgcggcgtcgcggagcgtcgccggcgagttgcatatcagccgggttctggatagggaatcgagcagagttggccttggtcggaaaaatgacgaagtgtggtattaa

SEQ ID NO: 86797 - DNA, 938 bp, Oryza sativa
  Clone ID: PAT_MRT4530_85804C.1
agtggatccccggggtacccgggttgcagaccatcacttacgtagccctgtgtgcaacggcgcaagtgcttgtacgctttcagctagcgtagccatggcttccagggcattcctcctcgtggctctaaacctggtcctcttcttcaccgtggccagcgcctgcggcaagtactgcccgacgccttcgacgccgtcgacgacgccatcgacgccgtcctacaacaccaagtgccccaagaacgcgctcaagttcgcggcgtgcgccgacgtgctgggcctcgtcagcgccgaggtcggccagccgccgtacgagccgtgctgcggcgtcctcggcggcctcgccgaccttgaggccgccgtctgtctctgcaccgccatcaaggccaacgtgctcggcatcaccctcgacatccccgtcaagctcagcctcctcgtcaactactgcggcaagaacgtccctagtggcttcatctgtgcttaagctacgtaacgcgcgtacggtgtaacgacgtgctagctttgcatgcatgcagcacgcatgcacgaacacatcgttcgttcttgagtgcctgcatgcatatcggtcgagtctttacttactctgttattagttctgaatgtagaactgcttcagatatcaatccagcgagttaactgtacttgatttgtttatgtttcttcagttaatcagtttctgtcatcatttggtcaattaatggaggttttgttctccaaggaattgcatccaatggatactcttttagattgaatttggcgtgtctatgtctgggtgtggttgtaatttgcttgcagtacgttctcgtagtttaattgtaagcaagcaattgtacgacaaaatgtacttaggacagttaatttgttggaaatttcggtgtgaattattttttaaaatttaaataaaaaaaaaaaaaaaaaaa

SEQ ID NO: 86798 - DNA, 645 bp, Oryza sativa
  Clone ID: PAT_MRT4530_85805C.1
cccacgcgtccgcccacgcgtccgcccacgcgtccgatttgtacaagtcgagctcgggcagaatttgtttttacatcttagtccacaaattgatgacattgtacagtccttgtgtacacatttgaagatgtggtacatgcctaaaagtgttgttaattttccatgttctagtaatcacagaggccacatattctaagctagatgggagatgttttttaagtatgtgaatgggaaaatccattcgttagtaggtgaaggcacctctgaggtggggtattacagctgttctaaagttacaaaggatgacagataatatgcattctttaactatcgtttggctaaaatcattttttttccttctcttccttgctgtttcttactggcaagtggcaacccaggtttgatggttcataatcatttgattccttgctttacaactccaaattcttgtcatgcctaacccccaaagatgattttaggtggaagaggatgatacattaaccaagaagcactgcctcgtgggtcacaaaaatccaatttcttttgttgcctggagcccaaatgacagaatgctgctcacttgtggtaatggagaatcagtaaaactgtggaacgttgctactggtgaatgcagtcttaaattta

SEQ ID NO: 86799 - DNA, 2667 bp, Oryza sativa
  Clone ID: PAT_MRT4530_85806C.1
tccttttaagtatgtgaatgggaaaatccattcgttagtaggtgaaggcacctctgaggtggggtattacagctgttctaaagttacaaaggatgacagataatatgcattctttaactatcgtttggctaaaatcattttttttccttctcttccttgctgcttcttactggcaagtggcaacccaggtttgatggttcataatcatttgattccttgctttacaactccaaattattgttaagcctaacccccaaagatgattttgccggaaaaaaaaaaaaaaaaaaaaaaaaaaaaaaaaaaaaaaaaaaaaaaaaaaaaaaaatgcccgaattatccgataattttttgcggattttgagctctccctgtcattttctgtcatttagtgcgtggaatttttgatcgctttcgaggcttttcttgttgcgtctgtgttggagcggagaaatttttgacccctttttgttactctcttgaagttttgatttgatccgctcggaaatttgatcttcttttgtgttcggaactcggatttttgagggggttttggtcttggcggctgcttggggtgtgagatccctcaagctggcgaaggaaatcagccgtgtccatggagatgcacgcgagctctgtctcttcccatggcgaggcccggctcggcggcgagcgggggctcgtggaccgggaggagctggtgcgcgtcatcgcgagtcgctctactcgctcggttaccggagggcggccgcggcgctggaggcggagtccggcatgccgctgtacccggcggagcacgaccgcctcctgttcgacgtaatgtctggccggtgggacgcgtgcgtggcggcgatccgcgccgtggcgggcctcggggaccgggagcgcgcggcggcggagttcttggtgtggagggggcacttcctggagcttctggggatcggcgacgctgggctgccgcgcgccagggaggtgctctggcgccggattgcgcccctcggcgttgacagggagtgtgtgcactggctggcacgcgcaatggtctcgtgcgagggggcggtcgcgccggatgccgtggtcgggtggaggattgggcttttcttggatctggttgatgctttcccgccatggttccatgtgccaagcggtcggctagagcttctggtggagaatgcagttgttaagcaggtttcgtcttgtgtatatcacaatttaccggacgaggtcactttgtttgaggatcataagtgccctgaagagcagattccttccaagtgttcgcaggtcttctgtggagttctgatttttcaaattctgttatattctaaaagaaatgatcataacttgagatacttcaaaaccaatgataataatgttattagattcttttttagccaagaggggattactattcagatattatgtggtcataacaatgaagtttggtttgtaaggttctcaaatgatggaaactatctggcatcatcttcaagtgattgcacggccatcatatggaaggtggaagaggatgatacattaaccaagaagcactgcctcgtgggtcacaaaaatccaatttcttttgttgcctggagcccaaatgacagaatgctgctcacttgtggtaatggagaatcagtaaaactgtggaacgttgctactggtgaatgcagtcttaaatttagcagctcagttggccatattatcaattcatgtgcatggttccctaattcggagaaaatagtatgtgccagctgtgagcctgaaagttctccaaagaggatcttcacttgtgacctagaaggtcaagaactggaatcatgggttggagatagaatacctaaagtcagtgatatagctgtgactcctgatagcaaacatcttatctgtgtatgttccaatgaaatttggattcgagaacttccaaaggggcgggaatggagaatacgtgagcagcagacgatttcgtcgctatctctctctggtgatggacaatcactgattgtcaacctcaacagccaggaaattcatttgtggagaatcagtgaaagttctactgcggcggataataaattcaagggacacaagcaaggaaagtttgtgattagatcttgctttggtggatcaaactctctgttcatagctagtggcagtgaggattcccaggtctacatttggaaaaggcacctggagacgccaataaaggtcttatacggtcattcacttactgtaaattgtgtgagctggaatcctgctaagccacatatgctggcttcggcaagtgatgaccgcacagttcggatttggctagcacacaaaggctcacatcgcacacggttgacggcttgatgtggaaagttttgtatgttttccttgtaaatatatagttgtacatcttgactgtagtagtgtagtgtgcacagagcagttgagattttttttccccgtagagcttttagctacttcagaggtaaactttgaacaggcagaggcccagaagtagcagtatacttcatatatatgcctgtctcggattaaagttttgctcgtctactctgtaaagaatcaaagatgcatcagaattcagaaccttgtataaatctgaaagatgaaacgtaattggtaggactatgctggatggactgcatggattcctccggcttgtgt

SEQ ID NO: 86800 - DNA, 198 bp, Oryza sativa
  Clone ID: PAT_MRT4530_85807C.1
atgaaccatattattaatccgtggccgttcaaagatcaaggttcaatcttcgtgtccgatgagtttgttcagtttgctgatagagtgggtatcaagttgttgaattcttcaccttattatgcacaagctaatgggcaagccgaggctaaattcggcaagtggtcgccgaattgggaaggaccgttccaaattcataag

SEQ ID NO: 86801 - DNA, 5357 bp, Oryza sativa
  Clone ID: PAT_MRT4530_85808C.1
atggtgtgtggcaagctcgtggtcatcgagttcggtgcatcctggtgtgaaccttcacgcaggatcgctccagttttcgctgagtacgccaaggagttcgctggagtagttttcctgaagttcgatatcgatgagctggaggaaattgcagactcgtatgatgtcaacggagtagtacccaccttcaccttcgtcaaggctgggcagaagattgacatgatccaaggagccagatatagagagggcctggcggtcaccgggaaattcttcccgggtgcgcacgagagacgttcccggcctgggttgaccgacgaggacgtcggtgtcttaagggggagagaatgtgacatcccggctcagggcttaaagaggattaatagaatactcataccaacaagttgcaacttcttttccggaagccgatctcgaaagaactctaagctgccagatgtaacagggcccggcctcgagtgtggggcgtcacaccaggtctctccgttcgaagattcaaatgcacactgcttctccttacttcctgggttgcagctgctcaaggcagttgctgctacactcggaggggagaccatcttccaccacgaggcataccaacgcgatacatgaacaatggagaggacaaagagacacttggagaaggacttagagttatggaggatcatcaaggacgtccaagtcaaggtggagggccaaagcaagccaactttgagtgcaattcggagtccagaaccagtctacactaaaacgggcgtccagtataactgctgctctgctagtgctagcggctactgtggtgctgctccgcgcgccgccatggcgcctactgacggcttcgcgcagccgctccgcctgcagcctgccggcttccgcgcctgcggccgcctttgtttgctcttactcgccaccagacagctagctacggcgctgcagctcgaggcctcgagctcttgcgacttgcgtcggcgtcggctgctccagccgccaccagttgccagcgacagctcccacccggcggaggtggtacgccgccgccgacaggagctggtgcgccgccgccgacaggagctggtgcgccaggaggaggtgccgtgaacgactacaacaacggaggcaattctgcctcaccatccagcggagggccattctcggggtataatcttctcctcctgctactgctgttagcgctattcctgttcccattgttagcgctatactgtgtgcgctatgttcttgttcctattctacgtgatgcctctagcatgttatcgcgttactggtatgttcctgtttctgacattcatgatgcgcatagtatgctactggttatgttaagattaccctacactgcttatgccatgatcattgtttcaatttcttggattaaaatatgccgaataatgactatatttccaacaatccaaaaacctgataggtcattttcggtagttggctttgctgctgcactgaaaccacatgcttttgatggttcaaactataagagatggaaagcacgtgcactattgtggttgacagcgatgcagtgcttctatgtttcacggggcaaacgaagtgaaccacctctttctcctgaggaagaggctaagttcgaggcttcggattgcctgttccgtggagcattgatcagtgtactcgctgacaacatagtggacgtgtacatgcacatgccttctgggaaggacatgtgggatgcacttgaggccaagttcggagtttctgacgccggcagtgagctgtatatcatggagcagttctatgactacaagatggtcgatgaccgttctgtagtagaacaagctcatgagattcagatgctggctaaggaacttgagaacaacaactgtgagttgccggacaagtttgtggcgggtggcattattgccaaactaccaccttcttggtcggactttgccacttctctaaagcacaagagacaagagttcagtgttcctgatctcattggctctttgggtgttgaggagaaggcgagggcaaaggacgtccggggcaaaaaggttgagggaggttctagtgccaatatggtacagaagaagaaccctcatgcatcccacaacaacaagaaagtcaagcctgatgtcaaacccaaggctgcaaccaattttaagaagaaaggcaagggaaaggcaaagggagactgctttgtgtgtggcaagtctgggcattgggccaaggactgtcctgagcgcaaagacaggaagtctgccaacatgatcattagcgagggcggaggaacatcggggtacggtaaaatattacctacagttctctctgtttttcattcacctgattggtgggtggatactggtgctaatattcatgtatgtgctgacatttctctgttttcttcttatcaggtcgagagaggttcctccttgttgatgggaaacgggtcgcttgcggctgttcatggtgttggtacggtcgatctgaagtttacttcgggaaagaccgtgcagctgaagaacgtgcagcatgtcccttcaataaagaagaatctagttagcggctctctattgtgtagagaaggttttagacttgtgtttgagtccaataaatgtgtcgtatctaaatatgggacttttgttggtaaaggttatgacagcggaggcttgttccgcttttctttgaatgacatgtgtaataatcataatgctgtgaaccatattagcaagaatgatgagtctaatgtgtggcattcgcgactctgtcatgtgaatttcggttgtatgacgcgcttagctaacatgagtttaattccaaaattcactttggtcaaaggttccaagtgccatacttgtgttcaatcgaaacaacctcgcaagcctcacaaggcatctgaggcgaggaatttggcacctctagaacttgttcattccgatttgtgcgaaatgaacggcatgttgactaaagggggaaagaaatatttcatgacactgatagatgattgcactagattttgctatgtgtatctattgaaaacaaaggatgaggcattgcattactttaaaatctataaagctgaggtagaaaaccaacttgaaaggaaaatcaaacggttgaggtctgatagaggtggggagtatttttctaatgagtttgcatccttttgcgaagagtttggaattattcatgagatgacgcctccctattcaccccaatcaaatggggtggccgaaagaaagaaccgtattctaactgagatggtgaatgccatgttagacactgcggggctttccaaggaatggtggggtgaggcagttttgactgcgtgtcatgtcctgaataaaattccaatgaagcataaggaagtaacaccattcgaggaatgggaaaggaagaaattaaatctctcatacctacgaacatggggctgtttggccaaggtaaatgtacctatagtcaaaaagcggaaacttggaccaaaaactgttgattgtgtgtttcttggttatgctatccacagtgtgggttatagattcttaatagtaaactttggagtacccgacatgcatgctgctacaatttttgagtccagagatgctacattctttgagaatgaatttcttatgaaatatacacctagcacttctagtaaagaaactgtcatgctccatgagcactttgcaccgatagaacacaatgatgaaacgcctgaggaaaatcctgaggaggacaacattgtagatactcgcaagagtaagagacaaagggttgcaaaatcctttggagatgactacattgtatacctcgtggatgacaccccaagaaccatagaagaggcatattcatctcctgacgctgactactggaaggaagcagtacgcagtgaaattgactcgattatatctaatggtacttgggaagtcgttgagcgtccatatgggtgcaagcctgtaggatgcaaatgggttttcaagaaaaagcttaggcctgatggtacaatcgaaaagtacaaggcaaggcttgtggccaagggttatacccaaaaggaaggcgaggatttcttcgacacatattcaccagttgctcgcttgactacgattcgagtactacttgctctggcagcctctcatggtcttctcgtccatcagatggacgttaagacagctttcctaaacggagagctggaggaggagatctatatggatcaaccagacgggtatgtactagaaggtcaggagggaatggtgtgtaaactattgaaatccttgtatggcctcaagcaagcacctaagcaatggcatgagaagtttgacaccacgcttacagctgcaggctttgttgtgaacgaagctgacaaatgtgtatactatcgctatggtgggggagaaggggtgatcttgtgcttgtatgtcgatgacatactgatctttgggaccagtcttaatgtgattgaggaggtcaaagactatctgtccaagagttttgaaatgaaggatttgggagaggctgatgttattcttaacatcaaattacaaagaggagatgagggtgggattacacttgtgcaatcccactacgtggacaaggttttgagtcgctttggatatagtgactgcaagccagctcctactccttatgatcccagcgtgctattaaggaaaaatcgaagaatagcaagggatcaactgagatactctcaaatcattggttcattgatgtacttggctagcgcaacgaggcctgacatctcatttgctgtaagcaagctgagctggtttgtctcaaatccgggagatgatcattggcaggctctggaaagagtaatgcgctatctaaagggcactatgagctatggaattcactataccgggtatccaaaagtactagaagggtatagtgactcaaactggatatctgatgctgatgagataaaagccacaagtggatatgtgttcacacttggaggtggcgctgtttcctggaagtcttgcaagcagaccatcttaacgaggtcaacaatggaagcagaacttacagcactagatactgcgacagttgaggccgagtggcttcgtgaactcctgatggatttgccggtggttgaaaaaccagtgccagctatcctaatgaactgcgataatcaaacagtgattattaaagtgaacagttcaaaggacaacatgaagtcatctagacacatcaagagaagactgaaatctgtcagaaagcagaaaaactccggagtgatagcattggactatgtccaaacggctagaaatctggcagaccagtttaccaaggggctaccacgtaatgtgatagacagtgcatcgagggaaatgggcttgatacccacctaa

SEQ ID NO: 86802 - DNA, 1408 bp, Oryza sativa
  Clone ID: PAT_MRT4530_85809C.1
tttttttttttttttttttttttgcaaaatgcaatccagaccatcttcgcaaccaacaccaaaactattaacaccagatagatgctttagacaaaactggggttatcttctgttgcataacccttttgtgaatcctccaaacattgcatccacgtaaagggcaaatacaacatagcaaaaaactgacagggaaaaccttagattccacggcggtacatcggtacatcatatctccgtaccagtgatcataggtatagttggataagctcatcgctcacaacagatggtgtcagaacaccgagatcagtcagaagcagcgtaagatactggggaggagtgtagtctctcgctgaagtctcaacctccacaccagccggaattggaactccaaaatcaatgggtcggtgagctggtgtcatgtccttctggtccaacggatataggcgtgcaaacttgtaactttcagcagccacataaacaggtttgttcatactgtgagcgacgagagctatctgataagtgcccatcatattgattattcctccactttcaacaaccccatcagcaccaacaaacaccatgtcaacttcatccatggaataagcaacagctgaatcaattagcaccttaacaggaatgcctaatgctgccagttcatttgacattcgtaaaccagttctgtccggcctgccctctgtgcaaagtaccctgaagagtttgcggtttgatgcagctagctttagaacttccaaaacaactctggaataaccatgtaccagaatagtacaaccatctgaaataaaatcctggctgagcattgcaattgtcttacgagcctttaaggatatctctccaaatttttctcccctctcaattaggcgtgattttgcagcatcaaacttctcatgctccaaatgtgatgttcttgttacaaaccgcatgaacaaatcacatgcggcagacaaagaaatggaagtggcatcccaagacttgagcttgtcggatgccttcttgagctcgatctcgagctccatcatggtggtggccctgctggagcggatgacggcggcgagcgccatgatggccgccacggcctccgcggcctcgggcttgcggcgccagaagttgaactcctcgatcaccccgccgccgccgccgttgctcccgggggagagcagcgccgcggcgtcggaggcggcgtccgcgtcggcggcatcggaggagggagggagcgaggccgcggcggcggcgtgcgcgagccagtcgctggagacgacggcgtggtgctccgcgcgcgtctggtagtaggcggagatgggcggcagccccgtgctagggttagggttagggttttgggcggcggcggcggaggaggcgtcgggctccatgtagagaggagaggagagag

SEQ ID NO: 86803 - DNA, 1718 bp, Oryza sativa
  Clone ID: PAT_MRT4530_8580C.1
atgatgctcgcgtacatggaccacgccgccgcggccgcggagccggacgccggcgccgagccggcggtggccgcggtcgacgcggccgagttcgcggcggcgatggacttcggcggcctggtgagcgcccgccccgccgccgtcgtccgcccggcgagctcggacgacgtggccagcgccatccgcgcggcggcgcgcaccgcgcacctgaccgtggccgcccgcggaaacggccactcggtggccgggcaggccatggcccgcggcggcctcgtcctcgacatgcgcgccctccctcgccgcatgcagctcgtcgtcgccccgtccggcgagaagttcgccgacgtcccgggcggcgcgctctgggaggaggtgctccactgggcagtgtcgaagcacggcctcgcccccgcctcctggacggactacctccgcctcaccgtcggcggcacgctctccaacggcggcgtgagcgggcaatccttccggtacgggccccaggtgtccaacgtcgcccagctcgaggtggtgaccggcgacggcgagtgccatgtctgctcccgctccgccgaccccgacctcttcttcgccgtcctcggcggcctcggccagttcggcgtcatcacccgcgcccgcatccctctctcccccgcgccccaaacggtaagcaccacaccaccacccaatcggaacgaacgacggcccaatcgcccggcggccgctgaccggcgagagctggctctgcaggtgcggtggacgcgggtggtgtacgcgagcttcgcggactacgcggcggacgcggagtggctggtgacgcggccgccgcacgaggcgttcgactacgtggagggattcgcgttcgtgcggagcgacgacccggtcaacggctggccaacggtgcccatcccggacggcgctcacttcgacgcctccctcctcccggccaacgccggcccggtgctctactgcctcgaggtcgccctgtaccaacgcggcggcggcggagacggcggtggcgacgacatggacaagagggtgggggagatgatgcggcagctcaagtacgtgcggggcctggagttcgcggcgggggtcgggtacgtggacttcctctcgcgcgtgaaccgggtggaggacgaggcccgccgcaacgggagctgggccgcgccgcacccgtggctcaacctcttcatctcctcacgcgacatcgccgccttcgaccgcgccgtcctcaacggcatgctcgccgacggcgtcgacgggcccatgctcatctaccccatgctcaagtccaagtgggacccggccacgtcggtggcgctgccgaatggcgagatcttctacctggtggcgctgctccgattctgccggccctaccccggtggtggcccgccggtggacgagctggtggcgcagaacaacgcaatcattgacgcctgccggtccaacggctacgactacaagatatacttcccgagctaccacgcccagtccgactggtcgcgccacttcggcgccaagtggagccgcttcgtcgaccgcaaggcacgctacgacccgctcgccatcctcgcccccggccagaacatcttcgcccggaccccctcctccgtcgccgccgccgccgccgtgatcgtgatgatggtgatgatggggatgaagaggagggatcgggacgagcacaatgatgatggtgatgatgatagggtcattgttag

SEQ ID NO: 86804 - DNA, 513 bp, Oryza sativa
  Clone ID: PAT_MRT4530_85810C.1
aggaatagcgctaacaacagtagcaggaggagaagagtatactccgagaatagccctccgctggatggtgaggcagaattgcctccgttgttgttgtcgttcacggcacctcctggcgcaccagctccggatccagctcccgtcggcggcgtaccacctccgccagcagtggcggcggcaactccagacatggcgatgagcagtcgtgcgggaggcactccccaaaaatctgatcacccgcctacctggtgcagatttcaggcgaaggtgtggtttcggaggcactgctccttccattctctcgtgcgcgcaagagatcagaagcgaggaagcgagagcaattcaggcgcggagaagaagaaactaacaccgggaaagaagctaagaaaacggatcggactcgcggcctccttatctatcaggagaaagaacgtggacgcgctgttgcggagggaatcgtgggaacgtgggttagtgcctgcaaaaggatagcgaccacatttttcttgattt

SEQ ID NO: 86805 - DNA, 2016 bp, Oryza sativa
  Clone ID: PAT_MRT4530_85811C.1
atggccatggcgacgccaatggctccccgctccacgttcgccatcttcctcatcctcctgctccgttccggccactctccggcggccgcgttctatctcccgggcagctacccgcaccgctaccgccccggcgaggcgctggccgcgaaggtgaactccctcacctcgccgtcgtccaagctccccttcccctactactccctcccgttctgcgcgccgcagggcggcgtcaaccgcgccgccgagagcctcggcgagctcctcctcggcgaccgcatcgagacctcgccgtaccgcttctccatgctcaagaatgccaccgccttcctctgccgcaccgacccgcttccccccgccaccgccgacctcctcatgttccgcatcgacgacgcctaccacgtcaacctcctcctcgacacgctccccgtcgtccggtatgtcaagaacctggccgcgccaggggtgttcgtccggtctaccggcttccccgtcggcgtgcgcgccgacgacggcgagtactacgtgtacaaccacctcaagctcaccgtgctggtcaacaagccgcggaacggcaccaccagggcggaggccctgatggcgaccgccgacgccgtcgagctcatcagcttcgccggcgggagcaaggacggcggcgggtacaccgtcgtcgggttcgaggtcgttccgtgcagcgtggagcacgatgcggcggcgatcaagggcaagaagatgtacgacgagctgccggcgagggcggccgccgggtgcgacccttcggtggtcggcatgcgcgtgcgggccaaccggccgctcgtcttctcctacgaggtggcgttcgtggagagcggcgtcgagtggccgtcgcggtgggacgcgtacctggagatgggcggcgccaaggtgcactggttctccatcctcaactccatcgtggtggtggcgttcctcgccgccatcctgctcgtcatcctgctgcgcaccgtgcggcgcgacctcgcgcagtacgacgagcacggcggcgaggcggggttggcgccgcaggcggacgagctcgccgggtggaagctcgtcgccggggacgtgttccgggagcccgcccacccggtgctcctctgcgtgatggtcggcgacggggtgcgcatcctggccatggccgtcgccaccatcctcttcgcggcgctcgggttcatgtcgccggcgtcgcgcggcgcgctcgtgacgggcatgctcggcatctacctcctcctcggcttcgcggcggggtacgccgccgtgcggctctggaagacggtgcggcacggggacagcgccgggtggaagcgcgtggcgtggcgcgcctcctgcgccttccccggcgcgggcttcgccgtcttcaccgcgctcaactgcgtgctctggtacaacggcagcacgggcgccgtgccgttcctgctcttcgccgtgatcctcctcctctgggcgttcgtctccgtgccgctcaccctcgccggcgggctggtggcatcccgcgtcgggcacctcgagtacccggtgaagacgaacaagatcgcgaggcaggtgccggcggcgcagtgctcgccgtgggtgttcgtggcggtggcggggacgctgccgttcgggacgctgttcatcgagctgctgttcatcatgtcgagcctgtggctggggagggtgtactacgtgttcgggttcctgctggtggtgatggcgctgctggtggccgtgtgcggcgaggtgtcggtggtgctcacctacatggggctctgcgtggaggactggaggtggtggtggcgcgccttcttcgcctcgggctccgtcgcggcctacaccctcggctacgccgtctactacctcgtcttcgacctgcacagcctcagcggcccggtctccgccgcgctctacgtcggctactcgctgctcatggcgctcgccgtcatgctcgccaccggcgccgtcgggctcgccgcctccttcgccttcgtctactacctcttctccgccgtcaagctcgactga

SEQ ID NO: 86806 - DNA, 4086 bp, Oryza sativa
  Clone ID: PAT_MRT4530_85812C.1
atgtccgcctctgttggcggaggtggtacgccaccgccgacaggagctggagctggatccggagttggtgcgccaggaggaggtgccgtgaacgactacaacaacggagacaattctgcctcaccatccagcggagggccattctcggggtataatcttctcctcctgttcccattgttagcgctatactatgttcctgttcctgttctacatgatgcctctagcatattatcgtgttactggtatgctcctgttcctgacattcatgatgcgcatagtatgctactggttatgttaagatcaccctacactgcttatgccatgatcattgtttctttttcttggattaaaatatgccgattaatgactatatttccaacaatccaaaaacctgataggtcattttcggtagttggctttgctgctgcactgaaaccacatgcttttgatggttcaaactataagagatggaaagcacgtgcactattgtggttgacagcgatgcagtgcttctatgtttcacggggcaaacgaagtgaaccacctctttctcctgaggaagatgccaagttcgaggcttcggattgcctgttccgtggagcattgatcagtgtactcgctgacaacatagtggacgtgtacatgcacatgccttctgggaaggacatgtgggatgcacttgaggccaagttcggagtctctgacgccggcagtgagctgtatgtcatggagcagttctatgactacaagatggtcgatgaccgttctgtagtagaacaagctcatgagattcagatgctggctaaggaacttgagaacaacaactgtgagttgccggacaagtttgtggcgggtggcattattgccaaactaccaccttcttggtcggactttgccacttctctaaagcacaagagacaagagttcagtgttcctgatctcattggctctttgggtgttgaggagaaggcgagggcaaaggacatccggggcaaaaaggttgagggaggttctagtgccaatatggtacagaagaagaaccctcatgcatcccacaacaacaagaaagtcaagcctgatgtcaaacccaaggctgcaaccaattttaagaagaaaggcaagggaaaggcaaagggagactgctttgtgtgtggcaagtctgggcattgggccaaggactgtcctgagcgcaaagacaggaagtctgccaacatgatcattagcgagggcggaggaacatcggggtacggtaaaatattacctacagttctttctgtttttcattcacctgattggtgggtggatactggtactaatattcatgtatgtgctgacatttctctgttttcttcttatcaggtcgggagaggttcctccttgttgatgggaaacgggttgcttgcggctgttcatggtgttggtacggtcgatctgaaatttacttcgggaaagaccgtgcagctgaagaacgtgcagcatgtcccttcaataaagaagaatctagttagcggctctctattgtgtagagaaggttttagacttgtgtttgagtccaataaatgtgtcgtatctaaatatgggacttttgttggaaaaggttatgacagcggaggcttgttccgcttttctttgaatgacatgtgtaataatcataatgctgtgaaccatattagcgagaatgatgagtctaatgtgtggcattcgcgactctgtcatgtgaatttcgggtgtatgacgcgcttagctaacatgagtttaattccaaaattcactttggtcaaaggttccaagtgccatacttgtgttcaatcgaaacaacctcgcaagcctcacaaggcatctgaggcgaggaatttggcacctctagaacttgttcattccgatttgtgcgaaatgaacggcgtgttgactaaagggggaaagaaatatttcatgacactgatagatgattgcactagattttgctatgtgtatctattgaaaacaaaggatgaggcattgcattactttaaaatctataaagctgaggtagaaaaccaacttgaaaggaaaatcaaacggttgaggtctgatagaggtggggagtatttttccaatgagtttgcatccttttgcgaagagtttggaattattcatgagatgacgcctccctattcaccccaatcaaatggggtggccgaaagaaagaaccgtactctaactgagatggtgaatgccatgttagacactgcggggctttcgaaggaatggtggggtgaggcagttttgactgcgtgtcatgtcctgaataaaattccaatgaagcataaggaagtaacaccattcgaggaatgggaaaggaagaaattaaatctctcatacctacgaacatggggctgtttggccaaggtaaatgtacctatagtcaaaaagcggaaacttggaccaaaaactgttgattgtgtgtttcttggttatgctatccacagtgtgggttatagattcttaatagtaaactctggagtacccgacatgcatgctggtacaatttttgagtccagagatgctatattctttgaaaatgaatttcctatgaaatatacacctagcacttctagtaaagaaactgtcatgccccatgagcactttgcaccgatagaacacaatgatgaaacgcctgaggaaaatcctgaggaggacaacattgtagatactcgcaagagtaagagacaaagggttgcaaaatcctttggagatgactacattgtatacctcgtggatgacaccccaagaaccatagaagaggcatattcatctcctgacgctgactactggaaggaagcagtacgcagtgaaatggactcgattatgtctaatggtacttgggaagtcgttgagcgtccatatgggtgcaagcccgtaggatgcaaatgggttttcaagaaaaagcttaggcctgatggtacaatcgaaaagtacaaggcaaggcttgtggccaagggttatacccaaaaggaaggcgaggatttcttcgacacatattcaccagttgctcgcttgactacgattcgagtactacttgctctggcagcctctcatggtcttctcgtccatcagatggacgttaagacagctttcctaaatggagagctggaggaggagatctatatggatcaaccagacgggtatgtactagaaggtcaggagggaatggtgtgtaaactattgaaatccttgtatggcctcaagcaagcacctaagcaatggcatgagaagtttgacatcacgcttacatctgcaggctttgttgtgaacgaagctgacaaatgtgtatactatcgctatggtgggggagaaggggtgatcttgtgcttgtatgtcgatgacatactgatctttgggaccagccttaatgtgattgaggaggtcaaagactatctgtccaagaattttgaaatgaaggatttgggagaggctgatgttattcttaacatcaaactacaaagaggagatgagggtgggattacacttgtgcaatcccactatgtggacaaggctctggaaagagtaatgcgctatctaaagggcactatgagctatggaattcactataccgggtatccaaaagtattagaagggtatagtgactcaaactggatatctgatgctgatgaaataaaagccacaagtggatatgtgttcacacttggaggtggcgctgtttcctggaagtcttgcaagcagaccatcttaacgaggtcaacaatggaagcagaacttacagcactagatactgcgacagttgaggctgagtggcttcgtgaactcctgatggatttgccggtggttgaaaaaccagtgccagctatcctaatgaactgcgataatcaaacagtgattattaaagtgaacagttcaaaggacaacatgaagtcatctagacacatcaagagaagactgaaatctgtcagaaagcagaaaaactccggagtgatagcattggactatgtccaaacggctagaaatctggcagatcagtttaccaaggggctaccacgtaatgtgatagacagtgcatcgagggaaatgggcttgatacccacctaa

SEQ ID NO: 86807 - DNA, 3810 bp, Oryza sativa
  Clone ID: PAT_MRT4530_85813C.1
atcaaattgatccaatgagaaatatgcaacagcagtagatgaattgtatggattgatttcggccgcacagccgaaacagacgtggtactcgtctcgacgaaacacagatgggtagattgcaaattcggctattaaagaggtgtcgcactctcgcagcggcggcggacggtttacggtgcaaaccgacaaagatggactaaacctgtggtctgaccggccctgtgaaggaaacccgtcactttctaaactttggcaattttcccctatttcgtccataggtgccaaatttgggtgtaaacagctggctaaggaacttgagaacaacaactgtgagttgctggacaagtttgtggcgggtggcattattgccaaattgccaccttcttgctcggactttgccacttgtctaaagcacaagagataagagttcagtgtttctgatctcattggctctttgggtgttgaggagaaggcgagggcaaaggacgtccagggcaaaaagattgagggaggttctagtgccaatatggtacagaagaagaaccctcaagcatcccacaacaacaagaaagtcaagcctgatgtcaaacccaaggctgcaaccaactttaagaagaaaggcaagggaaaggcaaagggagactgctttgtgtgtggcaagtctgggcattgggccaaggattgtcctgagcgcaaagacaggaagtctgctaacatggtcattagcgagggcggaggaacatcggggtacggtaaaatattacctacagttctctctgtttttcactcacctgattggtgggtggatactgtgctaatattcatgtatgtgctgacatttctctgttttcttcttatcaggtcgggagaggttcctccttgttgatgggaaacgggtcgcttgcggctgttcatggtgttggtacgatcgatctgaagtttacttcgggaaataccgtgcagctgaagaacgtgcagcatgtcccttcatatataaagaagaatcttgttagcggctctctattgtgtagagaaggttttagacttgtgtttgagtccaataaatgtgtcgtatctaaatatgagacttttgttggaaaaggttatgacagcggaggcttgtttcgctttgctttgaatgacatgtgtaataatcataatgctgtgaaccatattagcgagaatgatgagtctaatgtgtggcattcgcgactctgtcatgtgaatttcggttgtatgacgcgcttagctaacatgagtttaattccaaaattcactttggtcaaaggttccaagtgccatacttgtgttcaatcgaaacaacctcgtaagcctcacaaggcatctgaggcgaggaatttggcacctctagaacttgttcattccgatttgtgcgaaatgaacagcgtgttgactaaagggggaaagaaatatttcatgacactgacagatgattgcactagattttgctatgtgtatctattgaaaagaaaggatgaagcattgcattactttaaaatctataaagctgaggtagaaaaccaacttgaaaggaaaatcaaacggttgaggtctgatagaggtagggagtatttttccaatgagtttgcatccttttgcgaagagtttggaattattcatgagagaacgcctccctatttaccccaatcaaatggggtggccgaaagaaagaaccgtactctagctgagatagtgaatgctatgttagacactacggggctttgcaaggaatggtggggtgaggcagttttgactgcgtgttatgtcctgaataaaattccaatgaagcataagaaagtaacaccattcgaggaatgggaaaggaagaaattaaatctctcatacctacgaacatggggctgtttggccaaggtaaatgtacctatagccaaaaagcggaaacttggaccaaatactgttgattgtgtgttccttggttatgctattcacagtgtgggttatagattcttaatagtaaactctggagtacccgacatgcatgttggtacaatttttgagtccagagatgctatattctttgagaatgaatttcccatgaaacatacacctagcacttctagtcaagaaactgtcatgccccatgagcactttgcaccgatagaacacaatgatcaaacgcctaagaaaaatcctgaggaggacaacattgtagatactcgcaagagtaagagacaaagggttgcaaaatcctttggagatgactacattgtatacctcgttgatgacaccccaagaaccatagaagaggcatattcatctcctgacgctgactactggaaggaagcagtacgtagtgaaatggacccgattatgtctaatggtagttgggaagtcgttgagcgtccatatggctgcaagcccataggatgcaaatgggttttcaagaaaaagtttaggcctaatggtacaattgaaaagtacaaggcaaggcttgtgcccaagggttatacccaaaaggaaggcgaggacttctttgacatatactcaccagttgctcgcttgaccacgattcgagtactacttgctctggcagcctctcatggtcttctcgtccatcagatggacgttaagacagctttcctaaacggagagctggaggaggagatctatatggatcaactagacgggtatgtactagaaggtcgggagggaatggtgtgtaaactgttgaaatccttgtatggcatcaagcaagcacctaagcaatggcatgaaaagtttgacaccacgcttacatctgtaggctttgttgtgaacgtagttgacaaatgtatgtactatcgctatggtgggggagaaggagtgatcttgtgcttatatgtcgatgacatattgatctttgggatcagccttaatgtgattgaggaggtcaaggactatctgtccaagagttttgaaatgaaggatttgggagaggctgatgttatccttaacatcaaactacaaagaggagatgagggtgggattacacttgtgcaatcccactatgtggacaaggttttgagtcgctttggatatagtgactgcaagccagctcctactccttatgatcccagcgtgctattaagaaaaaaccgaagaatagtaagggatcaactgagatactctcaaatcattggttcattgatatacttggctagtgcaacgaggcctgacatctcatttgctgtaagcaagctgagccggtttgtctcaaatccgggagatgatcattggcaggctctggaaagagtaatgcgctatctaaagggcactatgagctatggaattcactataccgggtatccaaaagtactagaagggtatagtgactcaaactggatatctgatgctgatgagataaaagtcacaagtggatatgtgttcacacttggaggtggcgctgtttcctggaagtcttgcaagcagaccatcttaacgaggtcaacaatggaagtagaacttacagcactagatactgcgacagttgaggccgagtggcttcgtgaactcctgatggatttgtcggtggttgaaaaaccagtgccagctatcctaatgaactgtgataatcaaacagtgattattaaattgaacagttcaaaggacaacatgaagttatctaggcatatcaagagaagactgaaatctgtcagaaagtagaaaaactccggagtgatagcattggactatgtccaaacggctagaaatctggcagatcagtttaccaaggggctaccacgtaatgtgatagatagtgcatcgagggaaatgggcatgatacctacc

SEQ ID NO: 86808 - DNA, 503 bp, Oryza sativa
  Clone ID: PAT_MRT4530_85814C.1
aatgcacaatataccatagacgtacatatatgttgaacatgataatttcaaatcatgttccatatgtaacgttgttttgcacatgcatgaacattccagaaaatgatctgtatgtgataattctatttaattactacgagctctcttagccatgtagcgaagacgctcggctatatctgtcatttctggtctttgatccacctcaagatttagacattgcgcaatcatgcctgctagattaacaagaagctcatgatcatttgccgctgcaatttcctcatcaacaaactccgtcactgtcttcccacttgtgtaagcatcaagaaaattccgaagtaagctgtttttgtcggagtgtgaggccttcttccttgtaatgagctccaagagaacaactccaaaactataaacatcgctcttgtcggttagaagacctgtctgaaaatacactggatccatataactcatatcaccaatgacagacattgtgtgatcattatcta

SEQ ID NO: 86809 - DNA, 3333 bp, Oryza sativa
  Clone ID: PAT_MRT4530_85815C.1
atgtctgcgcctggagccggtgccgctactgctgctggaggagatggcggaggtggtgcgccaccaggagctggagctggagctggaggtggtgcgccaggagctagagccggtgccgcgaacaacaacaccaacggaggcaattctgcctcacaatccagcggagggccattctcaagatcaccctacactgtttatgccatgattattgtcttaacattttggattaaaatatgccgatttatgaccatattttcaactatccaaaaacctgataggtcattttcggtagttggctttgctgctacattgaaaccacatgcttttgatggttctaactataagagatggaaagcacgtgcactattgtggttgacagcgatgcaatgcttctatgtttcacggggcaaacgaagtgaaccacctctttctcctgaggaagaggctaagttcgaggcttcggattgtctgttccgtggagcattgatcagtgtactcgctgacaacatagtggacgtgtacatgcacatgccttctgggaaggacatgtgggatgcacttgaggccaagttcggagtttctgacgctggcagtgcgctgtatgtcatggagcagttctatgactataagatggtcgatgaccgttctgtagtagaagctcatgagattcagatgctggctaaggaacttgagaacaacaactgcgagttgccggacaagtttgtggtgggtggcattattgccaaattgccaccttcttggtcggacttcgccacttctctaaagcacaagagacaagagttcagtgtttctgatttcattggttctttgggtgttgaggagaaggcgagggcaaaggacgtccggggcaaaaaggttgagggaggttctagtgccaatatggtacagaagaagaaccctcatgtatcccacaacaacaagaaagtcaagcctgatgtcaaatccaaggctgcaaccaactttaagaagaaaggcaagagaaaggcaaagggagactgctttgtgtgtggcaagtctgggcattgggctaaggactgtcctgagcgcaaagacaggaagtctgcgaacatggtcattagcgagggcggaggaacatcggggtacggtaaaatattacctacagttctctctgtttttcactcacctgattggtgggtggatactggtgctaatattcatgtcggaagaggttcctccttgttgatgggaaacgggtcgcttgcggctgttcatggtgttggtacggttgatctgaagtttacttcgggaaagaccatgcagctgaagaacgtgcagcatgtctcttcaataaagaagaatctagttagcggctctctattgtgtagagaaggttttagacttgtgtttgagtgcaataaatgtgtcgtatctaaatatgggacttttgttggaaaatgttatgacaacggagctgaggtagaaaaccaacttgaaaggaaaatcaaacggttgaggtctgatagaggtggggagtatttttccaatgagtttgcatccttttgcgaagagtttggaattattcatgagaggacgcctccctattcaccccaatcaaatggggtggccgaaagaaagaaccgtactctaactgagatggtgaatgccatgttagacactgcggggctttccaaggaatggtggggtgaggcagttttgactgcgtgtcatgtcctgaataaaattcgaatgaagcataaggaagtaacaccattcaaggaatgggaaaggaagaaattaaatctctcatacctacgaacatggggctgtttggccaaggtaaatgtacctataaccaaaaagcggaaacttggaccaaatattgttgattgtgtgttcctttgttatgctattcacagtgtgggttatagattcttaatagtaaactctggagtacccgacatgcatgttggtacaatttttgagtccagagatgctacattctttgagaatgaatttcccatgaaacatacacctagcacttctagtcaagaaactgtcatgccccatgagcactttgcaccgatagaacacaatgatcaaacgcctgaggaaaatcctgaggaggacaacattgtagatactcgcaagagtaagagacaaagggttacaaaatcctttggagatgactacattgtatacctcgtggatgacaccccaagaaccatagaagaggcatattcatctcctgacgctgactactggaaggaagcagtacgcagtgagatggactcgattatgtctaatggtacttgggaagtcgttgagcgtccatatgggtgcaagcccatggacgttaagacaactttcctaaacggagagctagaggaggagatctatatggatcaaccagacgggtatgtactagaagatcagaagggaatggtgtgtaaactgttgaaatccttgtatggcctcaagcaagcacctaagcaatggcatgagaagtttgacaccacgcttacatctgcaggcttcgttgtgaacgaagctgacaaatgtgtgtactatcgctatgatgggggagaaggagtgatcttgtgcttatatgtcgatgacatattgatctttgggaccagcctcaatgtgattgaggaggtcaaggactatctgtccaagagttttgaaatgaaggatttgggagaggctgatgttattcttaacatcaaactacaaagaggagatgagggtgggattgcacttgtgcaatccccactatgtggacaagatgatcattggcaggctctggaaagagtaatgcgctatctaaagggcactatgagctatggaattcactataccgggtatccaaaagtactagaagggtatagtgactcaaactggatatctgatgctgatgagataaaagccacaagtggatatgtgttcacacttggaggtggcgctgtttcctggaagtcttgcaagcagaccatcttaacgaggtcaacaatggaagcagaacttacagcactagatactgcgacagttgaggccgagtggcttcgtgaactcctgatggatttgccggtggttgaaaagccagtgtcagctatcctaatgaactgtgataatcaaacagtgattattaaagtgaacagttcaaaggacaacacgaagtcatctaggcatatcaagagaagactgaaatctgtcagaaagcagaaaaactccggagtgatagcattggactatgtccaaacggctagaaatctggcagatcagtttaccaaggggctaccacgtaatgtgatagacagtgcatcaaggaaaatgggcttgatacccacctaa

SEQ ID NO: 86810 - DNA, 461 bp, Oryza sativa
  Clone ID: PAT_MRT4530_85816C.1
aatatatttattttacaaaacttctgttaacctagctatatcaacacatcaaaacaccatctcggccctaacaacaccttggtgcctgacgacaccccaggtgcacaagaaaacgaagatgttgctattaaccaagatgcacctgttattgaagattcagattcttctattgttgagcagtctacaaaacattctattgcaaaagataagctcaaaagaaatactaaacctcctcgaagatatattgaagaagcgaacatagttgcttatgcttttagtgtggcagaagaaattgaaggtaatacagaaccttctacgtatcctgaggctattgtttctgatgattgcaatagatagatttataactgctatacataatgagatggagtcacttgaaaaaaatgggaattgatgaagttaccaaatgagaagaaatctatccgttgcaagtggtatcagag

SEQ ID NO: 86811 - DNA, 973 bp, Oryza sativa
  Clone ID: PAT_MRT4530_85817C.1
ctcggtactggcggaggagagggagtgatcttgtgtttatatgccgatgacatattgatttttggaaccagcctcaatgtgattgaggaggttaaggactttttgtcccaaagctttgaaatgaaggatttgggagtagctaatgttgttcttaacattaagctactgagaggagatgagggtgggattacactcgtgcaatctcactatgtggacaatgttttgagtcgctttggttatagtgactgcaagccatctcctactccttatgactctagtgtgcttttaaggaaaaaccgaagaatagcaagggatcaattgagatactcccatatcattggttcattgatatacttggctagtgcaacgagtcctgacatctcatttgctgtgagcaagctgagcagatttgtttcaaatccgggagatgatcattggcaagctctggaaagggtcatacgctatctaaagggcacagtgagctatggaattcactatactgtgtacccaaaagtactggaagggtatagtgactcaaacttgatatctgatgctgatgagataaaggccacaagtggatatgtgttcacacttggaggtggcgctgtttcagaccatcttaacgaggtcaacaatggaagcagaactcacagcactagatactgccacagttgagactgagtggtttcgtgaactcctgatggatttgccggtggttggaaaaccagtgccagctatcctaatgaattgtgataatcaaacagtgattattaaggtgaacagttcgaaggacaacatgaagtcatctaggtatgtaaagagaagactgaaatctgtcagaaagcagaaaaactccggagtgatagcattggactatgtccagacagctaaaaatctggcaaatcagtttaccaaggggctaccacgtaatgtgatagaaagtgcatcgagggaaatggacttgagacccact

SEQ ID NO: 86812 - DNA, 642 bp, Oryza sativa
  Clone ID: PAT_MRT4530_85818C.1
ctacacttttgcaaccatgaacccacgttcccacaactgcctccgcaacggcacgtccacgatcccacgttcccacgactgccgacttcgcctgagatctgcaccgggtaggcgggtgatcaggtttttggggagtgcttcccgcacgactgctcgtcctcgcccaccatgtctgcgcctagagccggcgccgctgctgctggaggagatggcggaggtggtgcgccaggagctggagcctgtgccgcgaacaacaacaccaacggaggcaattctgcctcacaatccagtggagggccattctcggggtatatccttctcctgttcctgttcccgttgttagtgctttactgctatgttcctgttcctgatattcatgatgcctctagcatgctactgcgttactgctatgttcttgttcctgatattcataatgcgcatgatgcctttagtatgctactggttatgttacatgttgtcactagatcaccctacactgtttatgccatgattattgtcttaacattttggattaaaatatgccgatttatgaccatatttccaacagccattggggatgatgtgtctggcctcaaaggcgacagatctagcttccaacaaacggagcagcaaggggtttag

SEQ ID NO: 86813 - DNA, 357 bp, Oryza sativa
  Clone ID: PAT_MRT4530_85819C.1
tcgtgaccgccctcgcccttttttttttttttttagtgttaaattaacgagttggggggtatatattaattttattttacacacatctatacttttgcaccctgcgatccaaaaaaagcccgtagtgtaccactggtttgaaagcaaacattttgtccaaacaaggggttctaaaaattatagcaccgctctacgaaaacgcctgccctctttttggggggggggtggggggggttttgtactactctccgcattgatcaatcaaagatttttacccatatatcattctttatttaccccgcccaataaccgcaacggttgaggacgttcttcattatatccctgacctgctcctgg

SEQ ID NO: 86814 - DNA, 297 bp, Oryza sativa
  Clone ID: PAT_MRT4530_8581C.1
ccattgggagacaaaagagggactctgcaatctgcacctaaaacggggggtcataatatgtccaagggatgggattatggttactaataaccataaccatggttgaacaagggaggatgagggggggacccaagaccatcccctggattcctccagggttttttgggacaaaaaccccacactcatcatcatcatcatcctcacaacaacaacaaattggggagagatagagagaggagaggagcttaacaaactcaccactagcttcctctccttcttttttcctggggattcttt

SEQ ID NO: 86815 - DNA, 154 bp, Oryza sativa
  Clone ID: PAT_MRT4530_85820C.1
gatgtgtccgcagctggctatggatagcatctgtgacttttttatctagtcctatcgtactgagcaaacatggtgatgcagctgctccatggcttctctgacgactggctcacacttgtgtctcaatacctccctcgatcgatctatacaagct

SEQ ID NO: 86816 - DNA, 2607 bp, Oryza sativa
  Clone ID: PAT_MRT4530_85821C.1
atgtctgcgcctggagccggtgccgctactgctgctggaggagatggcggaggtggtgcgccaccaggagctggagctggagctggaggtggtgcgccaggagctagagccggtgccgcgaacaacaacaccaacggaggcaattctgcctcacaatccagcggagggccattctcaagatcaccctacactgtttatgccatgattattgtcttaacattttggattaaaatatgccgatttatgaccatattttcaactatccaaaaacctgataggtcattttcggtagttggctttgctgctacattgaaaccacatgcttttgatggttctaactataagagatggaaagcacgtgcactattgtggttgacagcgatgcaatgcttctatgtttcacggggcaaacgaagtgaaccacctctttctcctgaggaagaggctaagttcgaggcttcggattgtctgttccgtggagcattgatcagtgtactcgctgacaacatagtggacgtgtacatgcacatgccttctgggaaggacatgtgggatgcacttgaggccaagttcggagtttctgacgctggcagtgcgctgtatgtcatggagcagttctatgactataagatggtcgatgaccgttctgtagtagaagctcatgagattcagatgctggctaaggaacttgagaacaacaactgcgagttgccggacaagtttgtggtgggtggcattattgccaaattgccaccttcttggtcggacttcgccacttctctaaagcacaagagacaagagttcagtgtttctgatttcattggttctttgggtgttgaggagaaggcgagggcaaaggacgtccggggcaaaaaggttgagggaggttctagtgccaatatggtacagaagaagaaccctcatgtatcccacaacaacaagaaagtcaagcctgatgtcaaatccaaggctgcaaccaactttaagaagaaaggcaagagaaaggcaaagggagactgctttgtgtgtggcaagtctgggcattgggctaaggactgtcctgagcgcaaagacaggaagtctgcgaacatggtcattagcgagggcggaggaacatcggggtacggtcggaagaggttcctccttgttgatgggaaacgggtcgcttgcggctgttcatggtgttgtgtgggttatagattcttaatagtaaactctggagtacccgacatgcatgttggtacaatttttgagtccagagatgctacattctttgagaatgaatttcccatgaaacatacacctagcacttctagtcaagaaactgtcatgccccatgagcactttgcaccgatagaacacaatgatcaaacgcctgaggaaaatcctgaggaggacaacattgtagatactcgcaagagtaagagacaaagggttacaaaatcctttggagatgactacattgtatacctcgtggatgacaccccaagaaccatagaagaggcatattcatctcctgacgctgactactggaaggaagcagtacgcagtgagatggactcgattatgtctaatggtacttgggaagtcgttgagcgtccatatgggtgcaagcccatggacgttaagacaactttcctaaacggagagctagaggaggagatctatatggatcaaccagacgggtatgtactagaagatcagaagggaatggtgtgtaaactgttgaaatccttgtatggcctcaagcaagcacctaagcaatggcatgagaagtttgacaccacgcttacatctgcaggcttcgttgtgaacgaagctgacaaatgtgtgtactatcgctatgatgggggagaaggagtgatcttgtgcttatatgtcgatgacatattgatctttgggaccagcctcaatgtgattgaggaggtcaaggactatctgtccaagagttttgaaatgaaggatttgggagaggctgatgttattcttaacatcaaactacaaagaggagatgagggtgggattgcacttgtgcaatcccactatgtggacaaggctctggaaagagtaatgcgctatctaaagggcactatgagctatggaattcactataccgggtatccaaaagtactagaagggtatagtgactcaaactggatatctgatgctgatgagataaaagccacaagtggatatgtgttcacacttggaggtggcgctgtttcctggaagtcttgcaagcagaccatcttaacgaggtcaacaatggaagcagaacttacagcactagatactgcgacagttgaggccgagtggcttcgtgaactcctgatggatttgccggtggttgaaaagccagtgtcagctatcctaatgaactgtgataatcaaacagtgattattaaagtgaacagttcaaaggacaacacgaagtcatctaggcatatcaagagaagactgaaatctgtcagaaagcagaaaaactccggagtgatagcattggactatgtccaaacggctagaaatctggcagatcagtttaccaaggggctaccacgtaatgtgatagacagtgcatcaaggaaaatgggcttgatacccacctaa

SEQ ID NO: 86817 - DNA, 309 bp, Oryza sativa
  Clone ID: PAT_MRT4530_85822C.1
gatcgtaaagggtctttcccatcacaaaaactagccattgaagtgaggggggctcccccacttgtattttaggtcttttgtccttccacaaccaatgtgtaactattcaacaatctcccccttcacacattagtgtctctcagcacttcacggcccctttaccgtataccaattgtaaagggtcattcccaccccaaaagctagccattgaggtgaggggcccccacttatatcttaggttctctgctcttccacaaccaatgtgggattattcaacagcctcttatgaatatacttctagcaatacca

SEQ ID NO: 86818 - DNA, 668 bp, Oryza sativa
  unsure (1)..(668): unsure at all n locations
  Clone ID: PAT_MRT4530_85823C.1
tccngggtgnnggattcggccgancanaaancaaatggctttgaagctataggaagctcntgccgaccanaaaggncacacttcccgatgggcnggttatnacaattgaaaaagaanggtncnttgttggtgaanctttatttcccccccccttttgggcttngaaaatatatggaattgttcctcccctggtttcaaacgtctcnaatgtntcncccnaatncctccnccgctgcttnaaaanaccntnttttntnntggnnctgcctccatgantggttttgaaaanangttcccnaaaaaaanaaatctgtntnnttcnncaatctncccntctcttgttnngccnccccaanatntttcccnaaaccactangttctccgccnggctgggnggggcaatattttggncccggggttttccccccnaaaacccactnntccccggggaaaaanaanaaaaanaggtccccccnccctcnccnnaaatttttccccaanaaaaacccccccctggggggggttaaaacccnttcccngggggtntgtntcccnaanctccccttttntnnggnttttttggggccccccncccccttntttccccccnccccccnttttnaanntccccccnccaaaaaatnnngggnncttcnaaanannnnccc

SEQ ID NO: 86819 - DNA, 2064 bp, Oryza sativa
  Clone ID: PAT_MRT4530_85824C.1
tcagctgccgctccccgtccatcctgccggcaccgcaacaagatggcgcggctcaatcacgactgccccctcgtcgtgagcgccagcgcggagtttgccgccgctagccatcgtcgtcgccgccgccgacgtttccccgcgccgtctccaccaccgcatcccagtgaccaccactgttgtccacgagaacaccgctgacaaggcgcccgtcgtcgtcatcgatgcgggtgcttcgacggcggtgtccggtcgccaccgccgcggtggtcgactccgttttttgtctactccgatgtcgttcgacgcggtctcccggcgggagatgtcgccgccgccggcgttggaggaggagatggcgactgtgactcaggcgccggggctgtcgacgccgtccatgctcggtaatccagatggtggagctccggcggcggccacggaccagagcgcgccgtgcgccaccggcggcgaggcgttggagggcgagggccggctgcggaaggggaagatggtcgccgaggaccagagcccgccgagcgtgagcggcggcgtaccggctgacctgccttccggcggcgacaagcttgctgagaacggcggtgacactgacaccctcctcctggccttctcccatgtctccccgtggcctcacctcctctccccgtcgccctcgtctctcccgtgccgccggccacctccagccgcctctgccgcctcgcccgtgcgccgtccggctgttccgtcgccatcgtcgacgtcacagctgcctccccttcatcggcatcgcctccgtttcacgggaaaatcaccggagccgcatcctagccggcaaacagtggtgttgccgccactgcaccacctccagccgcctgtgccgcctcgcctgtgcaccggccgacgtctccaccacctccctcagctctgcgacgccaccaccttccccgaccttaccgtcccctcgcccgaagctcgccggaacccacgccggcttctccatcctcctcgccggagtccctccggcagccccttccaccgtgcccgtgcgccggccgtcccgcaggtgttgttcgtcgtcgtccctgtccgtcctcgccaacgactccttcagttggccgttcatcctcaccggctcgtcgtcccgtagcgccacctccgtcatcgtcattgcagcgccgtcctcgcatccgtgcagctgctgccggctgccctcgtcgcctcctcgccggccccggtcgtcgtcgtcctctcgtcgttcccgcttgtcgtcagccctcccttcatcaagccgtgctcgttcgtcgcccgcgtttcatcaagagtgcgtcgcagccccgtcgtcgtcttcgtcctcagctccgtgtcatcaagcgttgcgccggccgcgtctcgcccgtgtaccggtttcggtagttgttcgtgtgtgcatgtggtgaccatgtttgtgtgcccgctcggtagccgcgtggtttccatgtgtgcagcccgcgcggtgtctagtagggtccgtttgtcggccacttgcctcgattgacacaaggggtccgcttctgtcgacccgtggatcgtctctatgtacctggttttctttttatctattgttattgcttctttataggcttgtagcttcgcttgtatgcttcacgtagctttcgtcgttccgaaggttcccgaagcatggtttgcggtcgtcgccgaaggttcggaaagccattctccccccccccctctattcaaaactccaaaaatggttttaggctgggctcgaggtgcatggttttgctaggagcacctcggccaccataaggaccagtcttcgggactctgttgcaaagcactaccgtactaaccacatgtctaattggtaaggcttaactcggtgctcaatctagtcctggcaagaggacacggatagagatggacgaagtcagggctcgatggacatctcccggcttttcctaggacggggattaatacactagcgttcgggaaaaggtatttttccaggtgtgacactgggcaagtgccagtgaggatagtgctctaattactgttatgtctttcaaccgc

SEQ ID NO: 86820 - DNA, 2637 bp, Oryza sativa
  Clone ID: PAT_MRT4530_85825C.1
atgtcgacaaccggtgacaacaacaacactggagacaaggacaaggcaatactgcctcaaactccagcggagggccattctcgggttggctttgctgcatccctaaaaccacatgctttcgatggttcaaattataaaagatggaaagcacgtgcacttttgtggttgacggcggtgcattgtttctttgtctcacggggcaaaccaagtgaactgcctctctcacctgaggaggaggctaagttcgaggctgcggattgcttgttccgtggagcattgatcagtgtgctcgccgacaatattgtggacgtgtatatgcacatgccttcaaggaaggacatgtgggatgcttttgaggccaagttcggggtttccgatgccagcagcgagctgtatgtcatggagcagttctatgactacaagatggtcgatggtcgttctgtagtggaacaggctcatgagattcagatgttggcaaaggaacttgagaacaacaactgtgagttgcctgacaagtttgtggcaggtggcattattgccaaattgccaccttcttggacggactttgctacttctctaaaacacaagaggcaagagttcagtgttactgatcttattggctctttgggtgttgaggagaaggcgagggcaaaggacaaccggggcaaaaagatcgagggaggttctagcgccaatttggtgcagaagaagaaccctcacgcatcccacaacaacaacaagaaagtcaaacctgacgtcaaacccaaggctacaaccaattttaagaagaaaggcaagggaaaggcaaaaggaggttgctttgtgtatggcaagtctgggcattgggccaaggattgtcctgagtgcaaggacaagaagtctacaaacatggttattagtgagggcggaggaacatcgaggtatggtaaatttttacctacagttctctctgtctgtcactcacctgattggtgggttgatactggtgctaatattcatgtcgggagaggttcctccttgttgatgggaaacggatcgcttgcggctgttcatggtgttggttatgacagcggaggcttgttccgcttttccttggatgatatgtgtaataaagttgtgaaccatgatgaagcattacattacttcaagatctataaggctgaggtagaaaaccaactggaaaggaaaatcaaacggttgagaattcctactaagcataaggaagtaacaccattcgaggaatgggaaaagaagaaattaaatctctctcacctgcgcacatggggctgtttggccaagagatgccacttttttgagaatgaatttcctatgaaaaatgcacctagtacttctagtcaagaacctattttatcccctgagcactttatgccgatagaacatattgatcaaacgcttgaggaaaatcctaaggaggataacattgtagcaactcgaaagagtaagagacaaaggactgcaaagtcttttggagatgactacattgtatatcttatggatgatactccaagaaccattgaagaggcatattcatctcctgatgctgactattggaaggaagcggtacgcagtgagatggactcaattatgtctaatggtacttgggaagtcgtcgagcgtccatatgggtgcaagcctgtaggatgcaaatgggttttcaagaaaaagcttaggcctgatggtacaattgaaaagtacaaggcaaggcttgtggccaagggttatacccaaaaagaaggcgaggactttttcgacacttattcaccggttgctcgcttgaccacgattcgagtactactcgctctggcagcctctcatggtctactcgtccatcagatggatgttaagacagctttcctcaatgaagagttggaggaggagatctatatggatcaactagatgggtatgtactagaaggtcagaagggaatggtgtgcaagctgttgaagtccttgtatggtctcaaacaagcgcctaagcaatggcatgagaagtttgataataaacttacatctgctggctttgttgtgaacgaagctgacaaatgtgtgtactatcgctatggtgggggagagggagtgatcttgtgtttatatgtcgatgacatattgatctttgggaccaggctcaatgtgattgaggaggtcaaggactttctgtccaaaagcattgaaatgaaggatttgggagtgggtggtgttattcttaacattaaactactgagaggagatgagggtgggattacacttgtgcaatctcactatgtggacaaggtcttgagtcgctttggttatagtgactgcaaagctgctcctactccttatgatcccagtgtgctattaaggaaaaaccgaagaatagcaagggatcaattgagatactctcagatcattggttcattgatgtacttagctagtgcaacgaggcctgacatctcatttgctgtgagcaagttgagccgtgttttttcaaatccgggagatgatcattggcatgctcttgaaagagtaatacgctatctaaaagggacaatgagctatgaaattcactacgccggtacccaaaagtgctggagggctatagtgattcaaattggatatctgatgctgatgagataa

SEQ ID NO: 86821 - DNA, 3060 bp, Oryza sativa
  Clone ID: PAT_MRT4530_85826C.1
ttaggtcggtatcaagcccatttccctcgatgcactgtctatcacattacgtggtagccccttggtaaactgatctgccagatttttagccgtttggacatagtccaatgctatcactccggagtttttctgctttctgacagatttcagtcttctcttgatatgcctagatgacttcatgttgtcctttgaactgttcactttaataatcactgtttgattatcacagttcattaggatagctggcactggtttttcaaccaccggcaaatccatcaggagttcacgaagccactcggcctcaactgttgcaatatctagtgctgtaagttctgcttccattgttgacctcgttaagatggtctgcttgcaagacttccaggaaccagcgccacctccaagtgtgaacatatatccacttatggcttttatctcatcagcatcagatatccagtttgagtcactatacctttccagtacttttgggtacccggtatagtgaattccatagctcatagtgccctttagatagcgcattattctttccagagcctgccaatgatcatctcccggatttgagacaaaccggctcagcttgcttacagcaaatgagatgtcaggcctcgttgcacttaccaagtacatcaatgaaccaatgatttgggagtatctcagttgatcccttgctattcttcggtttttccttaatagcacgctgggatcataaggagtaggagctggcttgcagtcactatatccaaagcgactcaaaaccttgtccacatagtgggattgcacaagtgtaatcccaccctcatctcctctcaatagcttaatgttaagaataacatcagcctctcccaaatccttcatttcaaaactcttggacaaaaagtccttgacctcctcaatcacattgaggccgtctggttgatccatatagatctcctcctccaactctccgtttaggaaagctgtcttaacgtccatctgatggacgagaagaccatgagaggctgccagagcaagtagtactcgaatcgtggtcaaacgggcaactggtgagtaggtgtcgaaaaaatcctcgccttctttttgggtataacccttggccacaaggcttgccttgtacttttcaattgtaccatcaggcctaagctttttcttgaaaacccatttgcatcctacaggcttgcacccatatggacgctcaacgacttcccaagtaccattagacataattgagtccatctcactgcgtactgcttccttccagtagtcagtgtcaggaggtgaatatgcctcttctatggttcttggagtgtcatccacgaggtatacaatgtagtcatctacaaaggattttacaacccttagtttcttactcttatgagtatctacaatgttatcctcctcaggatttccctcaggcgtttgatcattgtgttctatcagtgcaaagtgcttatggggtatgacagtttcttgactagaagtgctaggtgtatttttcatgggaaattcattctcaaagaatgtagcatctctagactcaataattgtactaacacgcatgtcgagtactctagagtttactattaagaatctataacccacgctgtgaatagcagcataaccaaggaacacacaatcaacagtattcggtccaagtttacgctttttggctataggtacatttacctttgccaaacagccccatgttcgtaggtatgagagatttaatttcttcctttcccattcctcgaatggtgttacttctttatgcttcattggaattttattcaggacatgacacgcagtcaaaactgcctcaccccaccattccttggaaagtccaacaccatgaacaaccgcaagtgactcgtttcccatcaacaaggaggaacctctcccgacatgaatattagcaccagtatcaacccaccaatcaggtgaatgaaaaacagagagaactgtaggtaataatttatcgtaccccgatgttcctccgccctcgctaatgaccatgttggcaaacttcctgtctttgtgctcaagacaatccttggcccaatgcccaaacttgccacacacaaaacagtctccatttgccttttccttacctttcttcttaaaattggctgtagccttggctttgacatcaggcttgactttcttgttgttgtgggatgcatgagggttcttcttctgtaccatattggcactagaacctctctcaacctttatgcccccaatgtcctttgccctcgccttctcttcaacacccaaagagccaatgagatcagaaacactgaactcttgtctcttgtgctttagagaagtgccaaagtccgaccaagaaggtggcaatttggcaataatgccacccgccacaaacttgtccggcaactcacagttgttgttctcaagttccttagccagcatctgaatctcatgagcttgttctactacagaacggtcattgaccatcttgtagtcatagtactgttccatgacatacagctcattgccggcgtcgggaactccgaacttggcctcaagtgcatcccacatgtccttccaaacggcgccgggcttccaccacaatctcctcggagaggtcaccgggcaacacctacacaagccgtctaggaggcggcaacctccaagagtaacaagtctaggatgcttgccgaggatgatcaagtgccacactagcgtccacggctcggtcagaccgccgtcggctcggtctgaccggttgcggctctggcggctcttcatgatctccatgttctcaatataaatgtgactcttatcatttttactttcatatccaaatgagattttgtacagcggctctagtaaaccaactcgagttagttcatgtaccaaggacatgcacttcccagctgaaggagctgatgatgggggatcaccttccagtagtgtgctcgtctcacacgcccagacttctgctgtagctgtggctggaacctcgcagtatttggtgccagcagttgttgcggggccgcacattggaatgagtagttgtcccat

SEQ ID NO: 86822 - DNA, 1020 bp, Oryza sativa
  Clone ID: PAT_MRT4530_85827C.1
gtggatccccgggctgcaggcgctgccggattagctcctgagagtgaagcccctatagctgatcgaagctatgaagaagatgtggcgcgccaacgcgagagtggtggaaaggagaggtggtcgcgaggccgaggagagagggggagtaattagcgtggtgcttgcccatggctatggcgcgagccaggcggtgtgggacaagctcgtgccctccctctccaagagccacaacctcctcctcttcgactgggacttcaccggcgcaggcgccgggaaggacgacgacgagtacacttacggcaggttcgccgacgagctcatcgcggtgatggaggagcggggcgtgggcgcgtcgggcgcggtggtggtggcgcactccatgtccgccatggccgcctgcatcgccgcccaacggagacccgacctcttcgcccacatcttcctcgtctgcgcctccccgaggtacataaacttggaggaggaagggtatgtaggaggctttgaggaggcggcgatccacggcatgctggcagccatggagtcggacttcgacggctgggtcaggagcttcctccccaacgccgccggcgacgcgtccgccgtggagcacctcctcaagagcttcctcgccatggacccgaccgtcgcgctcaagctggccaagatgatcttcctcggcgaccagcgggaggtcctcgacggcgtgaagacgccgtgcaccatcgtccaggtgaaggccgacttcgcggcgccgcccagcgtggcggagtacatgcacctcaggatgaagggcgccgccacggccgtcgagatcatcggctccgtcgggcacttcccccagctcgtcgcgccgcagcagctgctggacatactcgccggcgtcctgcgcctccgggaggcggcggcggaggcggagcacgacgacgccggcaccgtggagattgccggtggcatcgatgttgccatataggttgtgcatcatgcatgcatgcttgtaaaaagtctggacatatatgcgtc

SEQ ID NO: 86823 - DNA, 304 bp, Oryza sativa
  Clone ID: PAT_MRT4530_85828C.1
cccaacaacggctgggggtccaaacaaaatcataatatttagttcggaccccaaaatcggggggggggggatcccccaaaaaaaacaactacgagggagccttcgggccccattggggggccactgggaaaattctaagggttccccagggagggggcaagcatggcccaagttctccataaaaaaaaaactggctaacggggaaaaggggccacaaaaaaaggaacgggggggaaaaagaaagaaaaaccctaggccccaccatacataaaaaaagggggtaaggctaagttttcaaaaaggg

SEQ ID NO: 86824 - DNA, 200 bp, Oryza sativa
  Clone ID: PAT_MRT4530_85829C.1
ggaggcggcaggggctatatgatgagcttgcctctgtcgagatatcatcgaaggagaagagctcaccttcagttatggtgatgctagacttaggccgaatggcttgccgtgcttttgcggagtcaggaggtgatgaagatgaatcctttgacaaagaagactcctggagagagtggaggactcaacagaaaaacaacctt

SEQ ID NO: 86825 - DNA, 603 bp, Oryza sativa
  Clone ID: PAT_MRT4530_8582C.1
atgacggatggacagcggttggatctggagtttcctcacctagatctagcgctgcaacatgtatctaggacctgttatccctcccatggtgatgatggtggttggggtggtgaggagatggccatggactcgacccagcagtggccgcaggcgagcaagcacttggtcaaaggagggttttggtccaggcctcaggtcgggagaggtagcacggaccgactaacgatgcgggcaagcaaacatgaggtgatgctacgagttagttgctctgctagggaagaaagcgagggatcccgtgtgggttttctctcccatatgagagaggtggcgatgcaagcagttccgattgagcaaccatgcattaatgtgttgggggcgaaagcggagccgcttggccgatgtggcaagcttgacaacgataactctcaactattttcgttctggctgtgtggcaagggttttttaggtggagtggtgctgatggcttctgtagagcaattgagttgtcgtggaggcggagctactgcgccgggtggcaagctgagcaacgataacccgcaatacctttgttccggcaacactagaggtgttcgacaaatgtga

SEQ ID NO: 86826 - DNA, 459 bp, Oryza sativa
  Clone ID: PAT_MRT4530_85830C.1
caaagctgtctaaagaacattcagaaaaagctttcttcaatagagctgtcgatgattgaatacactaaaatactgtaaagagcaataaatttgagcattatgtatctgccaattctaagttatgaacatatggaattttcttttcataattagctccaaatccaatactatgtgcagcattgcaatagcagatagacatcactaaaacactaaccagcatagggtacaaaagtttaggagtaccttactccacagcccaccatggtgagcaccaccgtctgccactcccacggcacatcccatcggcgaaggattggccattcgtctgaattctgctcacatccaaattatgtcacaaaatcttcagcaagagaaaccatcgcaaaagagaggaatacttacatccaactaaactagacatgttttccatcataataagatactcctatcaaatgcaca

SEQ ID NO: 86827 - DNA, 780 bp, Oryza sativa
  Clone ID: PAT_MRT4530_85831C.1
atggcggcgtcgcagcggagcgtggccgtgtcggcgaaatgcgccgccgcgtcgtgggcggaggagcggcgtccgttcacggacccgatcgagatcccggcgccctcgggcgcggcgacggcgaggcgggaggacacggagtacggggagggtgactacggcggcagcggcagcggctgcggcggcgaggtggtgccgccgcacgtgctgctggcgcggcgcagggcggcgttctcgatgtgctcggggcaggggcggacgctcaagggccgggacctccgccgcttcaggaatgacgcattcagacagccaagatatctatgggcacttgggcattacaccccaagcaagaagatgctacgcattgagcagcagcagctggacaaagaggaattccaagaggcagatatcctatggccagatgcagcacaagacctggattttccccagatgtactactctctcgtcgacgccgacgaggacgacgacgagcaccgctccgtgaagcagcatggcaaccggcagaaagcttcttcccctatcgacatccccgcccggaaggtcagctctgccggtgcgaaaggcgcgagagcaccggcgggattcagcaaattcggccagaccctcgccggcgccggtggcggaagcttcttcgttggcagtcatgtcttcgtgccgccgcatgtcatcgttgatcaccggagggccaagagagagaaggcgatgatgatgctcgtcgtgccgaaggggagggcgaggaagatggtgatgcgtgagtag

SEQ ID NO: 86828 - DNA, 126 bp, Oryza sativa
  unsure (1)..(126): unsure at all n locations
  Clone ID: PAT_MRT4530_85832C.1
tagctatggggtgtgctangttcccatcnnanttagnngtttaattgnagntgaancgntgtgncgtnanagttgnaagtttgtgcgtaggnnagtttcgatgtgntganaaagttgaaagtttgn

SEQ ID NO: 86829 - DNA, 309 bp, Oryza sativa
  unsure (1)..(309): unsure at all n locations
  Clone ID: PAT_MRT4530_85833C.1
catgaacttgtatgaaggacatatgcccnccaatttcnggtcganctgancagaattcggatggtcannancgattgggatggtannnaatctatatgcatnacaatcacagtaacctgtaacttgttccagatactagtgtacctgtacatccgcttcttcttcttttttcttttcttttttttcttttttttttgctggtttggatgtgtgtagtttanggtagtnnanaattgatgtgggttttaaaaaatnacaattatttccncgtttcttttaaaaaaaaaaaaaaaaaaaaaaaaaaaaaaa

SEQ ID NO: 86830 - DNA, 1545 bp, Oryza sativa
  Clone ID: PAT_MRT4530_85834C.1
accttcttcgcgaacccgcatgtgaagcatttgcccggacctttcctccggccgtcgcctcattacggggccctagtccaccttccctccttccggaacaagacaccgatctcgatcgccatggccgcgtcgccgtcgccgccgccgctgcaggagctcaccatcacgcggcccgacgactggcacctccacctccgggaaggcgatgtcctcgcggccgtgctcccccacagcgcgatgcattttgggagggccatcgtgatgcccaacctgaagccaccggtgaccacgacagcacgagctttggagtacagggaggagatcctcagggcgctgccgcctgggagcaactttgtgccgctcatgacgctctacctcacggacaatactagcccagaggagatcaagctcgcaaaaaagagtggcgtggtttttgctgtgaagttgtacccttctggagcaactaccaactcccaagatggtgtcactgatatatttgggaagtgcttgcctgtgcttgaggaaatggctaggcaggagatgcctttgcttgttcatggagaagtcacagatcagcatgttgatacctttgatcgtgagaaggttttcattgagaaaatattggcaccacttgtacaaagactgccacagctgaaaattgttatggaacatatcaccactatggatgcggttaacttcgtagaatcatgcaaagaaggtcatgttgctgcaacggtgactccccaacatcttcttctcaacaggaatgcgttatttcagggtggcttgcagccacacaactattgcttaccagtactgaaaagagaaactcatagacaagcaattgtgtctgcggtaacaagtgggagtaaacaatactttcttggtactgacagtgctcctcatgataaacggagaaaagaatgctcctgtggttgtgcaggaatatatagcgctcctgtggctctttctctttatgcgaaagtattcgaacaggccggtgctcttgataagctagaagcatttacaagcttcaatggcccagatttttatggccttccaaggaacacttcaaagattgtccttagaaagagcgcctggaaagtacctgatacatactcatatagttcaggagagatcgtgcctatgtttactggcaacaccctcgaatggcttccatccgatcaacttgaagagtaaacagaataaatttatgcttggggtcgggggagaacattcctggagttatattatcatgccttcccctgtccccaactctgtaagaatcaatttcaaacttttccagtcatcactcatcagcctccccttttggaattctcgaagcaatattgctgagaagaacttattgaaagcaagtaagcaatgaagaaactgcttgtcatgctgttgtatacatttgatcgagtgctagaagggcaccagtgtaaactttatattggtgattcagacatcacagaaccgataatgatgaataaatatcaatcttgcagttaaccctttaaaaaaaaaaaaaaaaaaaaaaaa

SEQ ID NO: 86831 - DNA, 826 bp, Oryza sativa
  Clone ID: PAT_MRT4530_85835C.1
ggcacgaggggcgctgctgaatttccaagaggaggcagcacggctgaccatatacaaccccacgcccagcggcggcaatggccgatttgaagatcggcaggccagtggctggtgtggcttccctcaaccagccactggctgaatcatgcaaagccagcgcctcccaaccaggagacgactcgaattccgagtgctcgtccggcgcgtcgtcggccattgccctgggcatcgttgccgctaactgtggcgctgccatctaccactcgtggcacgacccctggtccgtggcgttcgtggtcgcctccttcctcatcctcgttttgctattcctcgcgcttcgtgtgtacgagagctcacctcgcggctcacgccgaagtctccatgtcaaggccggcgtttgggccctttccacggcgctcacgatcatgttttcttacaaagtggctgcgtttatgcctttcccagtagccgctgtcgtttgggttacggctggctccacgatttttgcaggattctacatgttgttcttctgccgcgacgaggtcgagcccgcggtggaggagaagccagcaaaggtatctgacatggcttagagtgaccgaccgaagagaaatcaaatcacctgcgggctgcggctgcggctgcggctgcggcttggttccgtagaggcaggggggaggctgctcgccagctctgctgcggtgcccagatacgccggcgacaccaaaaactccttagcgctgaacctccggtctccggaccatcctgtttgatgctgattcaccggcagttcctggttgatacaggcacagtttgatgccgattc

SEQ ID NO: 86832 - DNA, 613 bp, Oryza sativa
  Clone ID: PAT_MRT4530_85836C.1
atgactaaagccgatgattatcagcaagtcgtggactgcggtcagatccaagtttttagtttcgggctccgacaagccaaggcagggccagctgtaggtggcacacgctgtcgacgccgatacggtggtggtcggtgggagtacggtcgtggtggaggcggaggatggatccggcggccggcgaggcagcgtggaggcggagggcggagacggcgccggcgatgtggaggcggaggtggcggcgcggcgcgatggatccggcagccgctggcccggtgcgaccggagaggcggcgcggaggcggagggtggagacggcaccggcgatgtggaggcggagggcggaggcggaggcggcggcggcggcgtgggatggatggggatgcggagggctgagggcggtggcagcggaagcgtggcgcgatggaggcggtggcggaggcggaggcggtgcggccgcgcgggatggaaacgagggcagcgcgatggggatgcggagccggagggtagcgcgatgggatggatggggatgcggccggcggctgccccccggtgctgctcgccacctcgccgtcggccacggacccacccgccaacgccgccgacaccgccat

SEQ ID NO: 86833 - DNA, 676 bp, Oryza sativa
  Clone ID: PAT_MRT4530_85837C.1
actttgcaactctcttaaaatttacctagagtagttgatagagccgagattgaagtgagggctgttggagacctcacacatagactccctagcggctgtaatttaattttaaataatgtcttatttgctccatctattaagagaaatcttatttcggttaagagtcttagtagagacaggttatgactgtcattttacaaaaggaacatgtttaagtttaataataaagttgtgggtcttgccttcgtgcgagacaaactctatttgctctctttggatgattttgtgatgaatgttataaatgcatataatgataaagctgagatgtcatcaaaattatggcactatcgtttgggccacatttctagagaaagaattgaatgtctcattaaagaataaatactccttccttcagatttttctgaagtagatcattacgtagattgcattaagggaaatttcactaagacaattaagaaaggggccactagaaataattcagatcaatatttgtggactgttcccaatgacatttctggatggctttgactcattcattacattcacaaatgattattcccgttttggctatatttatcccattaatggttgttctaaatctcttgagaaatttaaggccaaagtggaaaatcagcataatgctaaacttaaactc

SEQ ID NO: 86834 - DNA, 1391 bp, Oryza sativa
  Clone ID: PAT_MRT4530_85838C.1
gccccccgccacgtggctttttttttttttttttttataggacacaatcaaaacttcactttcatatgaaaggggctggccaacattttattacaaggacgataggtaaactgcgactgttacaacggtagaaaaaccacgatgccgaacaaaacacgtagtgacgacgtactggaggccgggccagacaatctgcgacaaattaatcgacacggcgcgcaaatggcaaaggcgcaagtaaagtaacagtaggaagcatacgtgacaaccccttggaactcatgcagctcgatcgtcgatatgcccatgtttagttgttgtagttctcgacttgctcgttgcggtagtgctgctggccctggccctggccctgctggtgctggtagttgttgccggcggacggcgattgctgctgctgctgctgctgggcgttgccggcgtgcgcggcggacggcgggcgctgcaggctcttgacgtactcccacgactcgcggctggagatgttgttccaccacctgctcacgttcttgcgcgcctcgaacatgcggcgggagcgcgggtcggaggcgaggcggtcggcgttggggaggtgggacaggtcggcgatggtgaacttgtcgccggccaggtacgccgcctcctccagccgctgctcgtagatgtccagcagcttctccaggtccttcttgctcttctcgaacaccttccgcatctcctcctccttctgctgctgcttgttgccgttggcgccgctcgccgccgtcttcccgtccgtcgcgccggccaccacgcgcttgctcgacgcgttcgccacctggacctccctgccattgctgttgccgtagccgttgccgttgccgttcccgttcccgttgtcgttctgcttgggcatgttgggcggcaggaaggcgaggctgtagaccatctcggcgctgggcacgtcgaagctctgcgcctccgtctgcagccactgctcgatggacgcgcgctccagcgcgcccgtgccgatcaggtccgggtttccctgcctcgcgtacttgtgcgctatgtggcgaaggatccccctcgactcggacagggtgaggttgtcatcttcgaacgtgagcgcctcgccgagcggctgaagcttgagatattggggcatgcgctgcgtgccgcggtacgcgtcgacacggacgagctggaactcgacgtccttctcgaagaggcacatgagcacgcgggcaacctccgccgaggtgggtgacccgaaaaccttcacgctcgccggcgccatttcagttgcagtgggcggctagtgactctactgcaactgttggttgggatttgagaaggaagtattatgcagatggtggtccctcgtgccgaccccgggcccccgggagccgccc

SEQ ID NO: 86835 - DNA, 795 bp, Oryza sativa
  Clone ID: PAT_MRT4530_85839C.1
cataaggaagtaacaccattcgaggaatgggaaatgaagaaattaaatctctcatacctacgaacctgggactgtttggccaagtccagagatgccacattctttgagaatgaatttcccatgaaaaatacgcctagcacttctagtcaagaaattgtcataccccatcagcactttgcaccgataaaacacaatgatcaaacgcctgagggaaatcctgaggaggataagattgtagatactcgtaagagatgcaaatgggtttttaagaaaaagcttaggcctgatggtacaattgaaaagtacaaggcaaggcttgtggccaagggttatacccaaaaagaaggcgaggaattttttgacacctactcaccagttgcccgtttgaccacgattcgtgtactacttgctttggcagcctctcatggtctgctcggccgtcagatggacgtaaagacagctgacaaatgtgtgtactatcgctatggggggggagaagaagtgatcttgtgtttatatgtcgatgacatattgatctttgggaccagcctcaatgtgattgaggaggtcaaggactttttatccaagagctttgaaatgaaggatttgggagaggctgatgttattcttaacattaagctactaagaggagatgagggtatgattacacttgtgaaatcctactatatggacaagattttaagtcgctttggctacagtgactgcaagccagctgctactccttatgatcctagcgtgctattaaggaaaaaccgaagaatagcaagggattaa

SEQ ID NO: 86836 - DNA, 456 bp, Oryza sativa
  Clone ID: PAT_MRT4530_8583C.1
gtggaaataaaaagggggtttttggaccccccacggggccaactagggtggtgcaaggtacaaactgtttattctgaatttaggaaaaaactaaggaaacgggaaaaaaccttttgggttttttgaaaccccactgcaataaaccctttggaactaaaagaacctgtttcattcagtaaaaagggttgagagcttataaacggcggaacccaggttgtcttcaccacaaacctcattaggggggggccctgaactggggaaccgtttaaaattaccgcttccggccttgctttggggaccaaccccagccgaaacttaattagacacgggggggcttctcccggggcctgaaaaaaaagaggctttaacggggtggaacctcgaaaacattggttaacggttgcgattctgggggaaaaaacccctaattcacaaaaaacgggttttcattccttg

SEQ ID NO: 86837 - DNA, 4172 bp, Oryza sativa
  Clone ID: PAT_MRT4530_85840C.1
gtttatttctatatcctcaatgcatgtaaagacttaaaaaagatattctgtaaaatattatgcgctagtgttttttcctaaaatcatatcatacctttcaaagacgggtgggtgatcagttttttgaggagcgcaaggcgcgactactcactattcatcaacatctacttcaccttcaccaatatgtcgaatactggagataacagcaacactggatacaaggagaaggagcctcccgtcaataccaacagaggcaatatgcctcaaactccagcggaggaccattcttagggtcattttcggtagttggctttgctgcaacactgaaaccacatgcttttgatggttctaattataagagatggaaagcacgtgcactactgtggttgacagcgatgcttctatgtttcacggggcaaacgatgtgaaccgcctctctctcctgaggaggaggctaagttcgaggtttcggattgcttgttccgtggagcattgatcagtgtactcgctgacaatatagtggacgtgtacatgcacatgccttcagggaaggacatgtgggatgcacttgaggccaagttcagagtttccgacgccggcaacgagctgtatgtcatggagcagttctatgactacaagatggtcgataaccgttctgtagtggaacaggatcatgagatttagatgctggcaaatgaacttgagaacaacaactgtgagttgccggacaagtttgtggtgggtggcattattgctaaattgccaccttcttggtcggactttgctacttctctaaaacacaagaggcaagagttcagtgttattgatctcattggctctttgggtgttgaggagaaggcgagagcaaaggaaaaccggggcaaaaatatcgagggaggttctagcgccaatttggtgcaaaagaagaaccctcacgcatcccacaacaacaacaacaagaaagtcaagtctgatgtcaaaccaaaggctacaaccaattttaagaagaaaggcaagggaaaggccaagggcgactgctttgtgtgcggtaagcctaggcattgggccaagaattgtcctgatcgcaaggacaagaagtctgccaacatggttattagcgagggcggaggaacatcggggtacgacaattttttacctacagttctctctgtttttcattcacctgattggtgggttgatactggtgctaatattcatgtgtgtgctgatatttccctgttttcttcttatcaggtcgggagaggttcctccttgttgatgggaaacgggtcgcttgcggctgttcatggtgttggtacggtcgatctgaagtttacttcgggaaagaccgtatagctgaagaacgtgcagcatgtcccttcaataaagaagaatctagttagcggctctctactgtgtagagatggttttagacttgtgtttgaattcaataaatgtgtcatatctaaatattgaacttttattggaaaaggttatgacaacggaggtctgttccgtttttctttggatgacatgtgtaataataataataatgttgtgaaccatattagcgagaatgatgagtccaatgtgtggcattcgtgactttggctaacatgagtttaattctaaaattcactttggtcaaaggttccaagtgccatacttgtgttcaattgaaacaaccttgcaagcctcacaaggcatctgaggcgagaaatttggcaccactagaactagttcattccgatctgtgcgaaatgaacggtgtgttgactaaagggggaaagaaatatttcatgacactgatagatgattgcactagatattgctatgtgtacctattgaaaacaaaggatgagacattgcattactttaagatctataaagctgaggtagaaaaccaacttgaaaggaaaatcaaacggttgaggtctgataggggtggagagtatttttccaatgagtttacgtccttttgcaaaaagtttggaattattcatgagaggacgcatccctattcaccccaatcaaatggggtagccgaaagaaagaaccgcactctaactgagatggtgaatgccatgttagacactgcgggactttccaaggaatggtggggtgaggcaattttgactgtttgtcatgtcctgaataaaattccagtgaagcataagaaagtaacaccattcgaagaatgggaaaggaagaaattaaatctctcatacctacgcacatggggctgcttggccaaggtaaatatacctatagccaaaaagcgtaaacttggaccaaagaccgtagactgtgttccttggttatgctatccacagcgtgggctataggttcttaatagtaaactctggagtacccgacatgcgtgttggtacaattactgagtccagagatgccacattttttgagaatgaatttcccatgaaaaatacacttagcacgtctagtcaagaacctgttttaccccatgagcattttgcaccgatagaacacaatgatcaaacggctgaggaaaatcctgaggaggataacattgtagcaactcgaaagagtaagagacaaaggactgcaaagtcttttggagatgactacattgtatacctcgtggatgacactccaagaaccatagaagaagcatattcatctcctgacgctgactattggaaggaagcggtacgcagtgagatggactcaattatgtctaatggtacttgggaagtcgttgagcgtccatatgggtgcaagcctgtaggatgcaaatgggttttcaagaaaaagcttaggcctgatggtacaattgaaaagtataaggcaaggcttgtggccaagggttatacccaaaaagaaggcgaggatttttttcgacacctactcaccagttgcccgcttgaccacgattcgagtactacttgcttttgaagcctctcatggtcttctcgtccatcaaatggatgttaagacagctttcctaaacggagagctagaagaggagatctatatggatcaaccagacggatatgtactagaaggtcaggagggaatggtgtgtaaactgttgaaatccttgtatagccttaagcaagcacctaagcaatggcatgagaagtttgacacaacacttacatctgctggctttgttgtgaacgaagctgacaaatgtttgtactatcactatggtgggggagagggagtgatcttgtatttatatgtcgatgacatattgatttttggaaccagcctcaatgtgattgaggaggttaaggactttttgtccaaaagctttgaaatgaaggatttgggagtggctgatgttattcttaacattaagctactgagaggagatgagggtgggattacactcgtgcaatcttactatgtggacaaggttttgagtcgctttggttatagtgactgcaagccagctccaactccttataactccagtgtgctattaaggaaaaaccgaagaatagaaagggatcaattgagatactcccaaatcattggttcattgatgtacttggctagtgcaacgaggcctgacatctcatttgctgtgagcaagctgagccggtttgtttaaaatctgggagatgatcattggcaagctctggaaatggtcatgcgctatctaaaggatacaacgagctatggaattcactatactagttacccaaaagtactgtaagggtatagtgactcaaactggatatctgatgctgatgagataaaagccacaagtggatatgtgttcacacttggaggtggtgctgtttcctggaagtcttgcaagcagaccatcttaacgaggtcaacaatggaagcagaactcacagcactagatactgccacagttgaggccgagtggctttcgtgaactcctgatggatttgccggtgattgaaaaacctgtgccagctatcctaatgaactgtgataatcaaacagtgattattaaggtgaacagttcgaaggacaatatgaagtcatttaggcatgtaaagagaagactgaaatctattagaaagcagaaaaactccagagtgatagcactggactatgtccagacagctaaaaatctagcagatcagtttaccaaggggctaccacgtaatgtgatagatagtgcatcgagggaaatgggcttgagacccact

SEQ ID NO: 86838 - DNA, 239 bp, Oryza sativa
  Clone ID: PAT_MRT4530_85841C.1
aattaatagagcaatccagtagggggtggttggggggccttggtggtttggggctgaggtcgccttagcttagttggttggctacgggcagctgtggatgtaacgggatgatgaagagtactgctactctagtagctgtcactaaatacagtgacttagctcgcacgtcacacactcttaacgcagtggaggtagatccggatgccagtgctacgagctacagtcagcaatacggacgg

SEQ ID NO: 86839 - DNA, 2529 bp, Oryza sativa
  Clone ID: PAT_MRT4530_85842C.1
atgtcgacaaccggcgacaacaacaacactggagacaaggagaaggagcctctcgtcaacaccaacagaggcgatactgtctcaaactccagcggagggccattctcaggtgtgctcgccgacaatattgtggacgtgtatatgcacatgccttcagggaaggacatgtgggatgctcttgaggccaagttcgaggtttccgatgccggcagcaagctgtatgtcatggagcagttttatgactacaagatggtcgatgatcgttctgtagtggaacaggctcatgagattcagatgttggcaaaggaacttgagaacaacaactgtgagttgccggacaagtttgtggcaggtggcattattgccaaattgccaccttcttggacagactttgctacttctctaaaacacaagaggcaagagttcagtgttactgatcttattggctctttgggtgttgaggagaagtcgggggcaaaggacaaccgggccaaaaagatcaagggaggttctagcgccaatttggtgcagaagaagaaccttcacgcatcccactacaacaagaaagtcaaacctaacgtcaaacccaaggctacaaccaattttaaaaagaaaggcaagggaaagacaaaaggaggttgctttgtgtgtggcaagtctgggcattgggccaagcattgtcctgagcgcaaggacaagaagtatgcaaacacggttattagtgagggcggaggaacatcgaggtatggtaaatatttacctacagttctctctgtctgtcactcacctgattggtcggttgatactggtgctaatattcatgtgtgtgccgacatttccctgttttcttcttatcaggtcgggagaggttcctccttgttgatgggaaacggatcgcttgcggctgttcatggtgttggtatggtcgatctgaagtttacttcgggaaagatcgtgcagctgaagaacgtgcagcatgtcccttcaataaagaagaatctagttagcggctttctattgtgtagagatggttttagacttgtgtttgaatccaataaatgtgtcgtacctaaatatggaacctttattggaaaagagtatggaattattcatgagaggacgcctccctattcaccccagtcaaacggggtagccgaaagaaagaaccgcactctaactgagatggtaaataccatgttagatactgcaggacattccaaggaatggtggggtgaggcaatattgactgtgtgtcatgtcctgaatagaattcctactaagtataagaaagtaacaccattcgaggaatgggaaaggaagaaattaaatctctctcacctgcgcacatggggctgtttggccaaggtaaatgtacctatagccaaaaagcataaacttggaccaaagaccgtagattgtgtgttccttggttatgctatccacagtgtgggatataggttcttaatagtaaattctggagtacccgacatgcgtgttggtacaattactgagtccagagatgccacattttttgggaatgaatttcttatgaaaaatgcacctagcacttctagtcaagaacctattttatcccctgagcactttgtgccgatagaacatattgatcaaacgcttgaggaaaatcttgaggaggataacattgtagcaactcgaaaaagcaagagacaaaggactgcaaagtattttggagatgactacattgtatatcttgtggatgatactccaagaaccattgaagaggcacattcatctcctgacgctgactattggaaggaagcggtacgtagtgagatggactcacttatgtctaatggtacttgggaagtcgtcgagcatccatatgggtgcaagcctgtaggatgcacatgggttttcaagaaaaagcttaggcctgatggtacaattgaaaagtacaaggcaaggcttgtggccaagggttatacccaaaaagaaggcgaggactttttcgacacttattcactggttgctcgcttgaccacgattcgagtactactcgctctggcgacctctcatggtctactcatccatcagatggatgttaagacagctttccttaatggagagttggaggaggagatctatatggatcaaccagatgggtatgtactagaaggtcaggaggaaatggtgtacaagctattgaagtccttgtatggtcccaaacaagcgcctaagcaatggcatgagaagtttgacaatacacttacatctgttggctttgttgtgaacgaagctgacaaatgtgtgtactatcgctatggtgggggagagggagtgatcttatgtttatatgtcgatgacatattgatctttgggaccagcctcaatgtgattgaggaggtcaaggactttctgtccaaaagctttgaaatgaaggatttgggagtggctgatattattcttaacattaaactactgagaggagggtgggattacacttgtgcaatctcactatgtcgacaaggtcttgagtcgctttggttatag

SEQ ID NO: 86840 - DNA, 4622 bp, Oryza sativa
  Clone ID: PAT_MRT4530_85843C.1
atggcgagcttgggggcgaacccatcggtcttcgtcgcttggcttcgcccaagcgcttcaccctattgcttcgccccgagcgcactcctttggactcagtcgacgcctagtggattcggtggtttcagcagtcccactagttgcaaccgctcctcggcatgcttgtggtctctgcagaaggataggggcgacgccgacatgtgcgagaacgagatgaagcgtgagcctccacaaagacaagtagtcctgccaactgtaataacagttcttcagccatgtcagcactgccattggagacgggcgggcgatcaggtttttgggagctcaaggcgcgactactcactgttcgtcaacatctacttcaccttcaccaacatgtcgaacactggagacaaggagaaggagactcccgtcaacaccaacggaggcaatactgcctcaaactccagcggaggaccattcttggggtataaccttattacattatttcaattagaagttttactgttaatgttcatcgcaatgtcaacattgtgtcattatgtgattgttgatgcttattcaacgttaagcatgctcatgttgattacattcaccactatcactggatcaaatcctattgtaaatatcatgattattatcttgttattttggattaaaatatgccgaattatgaccaaatttccaacaatccaaaaacctgataggtcattttcggtagttggctttgctgctgcactgaaaccacatgcctttgatggttcaaactataagagatggaaagcacgtgcactattgtggttgacagcgatgcagtgcttctatgtttcacggggcaaacgaagtgaaccacctctttctcctgaggaagaggctaagttcgaggcttcggattgcctgttccgtggagcattgatcagtgtactcgctgacaacatagtggacgtgtacatgcacatgccttctgggaaggacatgtgggatgcacttgaggccaagttcggagtttctgacgccggcagtgagctgtatgttatggagcagttctatgactacaagatggtcgatgaccgttctgtagttgaacaagctcatgagattcagatgctggctaaggaacttgagaacaacaactgtgagttgccggacaagtttgtggcaggtggcattattgccaaactaccaccttcttggtcggactttgccacttctctaaagcacaagagacaagagttcagtgttcctgatctcattggctctttgggtgttgaggagaaggcgagggcaaaggacgtccggggcaaaaaggttgagggaggttctagtgccaatatggtacagaagaagaaccctcatgcatcccacaacaacaagaaagtcaagcctgatgtcaaacccaaggctgcaaccaattttaagaagaaaagcaagggaaaggcaaagggagactgctttgtgtgtggcaagtctgggcattgggccaaggactgtcctgagcgcaaagacaggaagtctgccaacatgatcattagcgagggcggaggaacatcggggtacggtaaaatattacctacagttctctctgtttttcattcacctgattggtgggtggacactggtgctaatattcatgtatgtgctgacatttctctattttcttcttatcaggtcgggagaggttcctccttgttgatgggaaacgggtcgcttgcggctgttcatggtgttggtacggtcgatctgaagtttacttcgggaaagaccgtgcagctgaagaacgtgcagcatgtcccttcaataaagaagaatctagttagcggctctctattgtgtagagaaggttttagacttgtgtttgagtccaataaatgtgtcgtatctaaatatgggacttttgttggaaaaggttatgacagcggaggcttgttccgcttttctttgaatgacatgtgtaataatcataatgctgtgaaccatattagcgagaatgatgagtctaatgtgtggcattcgcgactctgtcatgtgaatttcggttgtatgacgcgcttagctaacatgagtttaattccaaaattcactttggtaaaaggttccaagtgccatacttgtgttcaatcgaaacaacctcgcaagcctcacaaggcatctgaggcgaggaatttggcacctctagaacttgttcattccgatttgtgcgaaatgaacggcgtgttgactaaagggggaaagaaatatttcatgacactgatagatgattgcactagattttgctatgtgtatctattgaaaacaaaggatgaggcattgcatttctttaaaatctataaagctgaggtagaaaaccaacttgaaaggaaaatcaaacggttgaggtctgatagaggtggggagtatttttccaatgagtttgcatccttttgcgaagagtttggaattattcatgagatgacgcctccctattcaccccaatcaaatggggtggccgaaagaaagaaccgtactctaactgagatggtgaatgccatgttagacagtgcggggctttccaaggaatggtggggtgaggcagttttgactgcgtgtcatgtcctgaataaaattccaatgaagcataaggaagtaacaccattcgaggaatgggaaaggaagaaattaaatctctcatacctacgaacatggggctgtttggccaaggtaaatgtacctatagccaaaaagcggaaacttggaccaaaaactgttgattgtgtgtttcttggttatgctatccacagtgtgggttatagattcttaatagtaaactctagagtacccgacatgcatgttggtacaattcttgagtccagagatgctacattctttgagaatgaatttcctatgaaatatacacctagcacttctagtaaagaaactgtcatgccccatgagcactttgcaccgatagaacacaatgatcaaacgcctgaggaaaatcctgaggaggacaacattgtagatactcgcaagagtaagagacaaagggttgcaaaatcctttggagatgactacattgtatacctcgtggatgacaccccaagaaccatagaagaggcatattcatctcctgacgctgactactggaaggaagcagtacgcagtgaaatggactcgattatgtctaatggtacttgggaagtcgttgagcgtccatatgggtgcaagcccgtaggatgcaaatgggttttcaagaaaaagcttaggcctgatggtacaatcgaaaagtacaaggcaaggcttgtggccaagggttatacccaaaaggaaggcgaggacttcttcgacacatactcaccagttgctcgcttgaccacgattcgagtactacttgctctggcagcctctcatggtcttctcgtccatctgatcagatggacgttaagacagctttcctaaacggagagctggaggaggagatctatatggatcaaccagacgggtatgtactagaaggtcaggagggaatggtgtgtaaactattgaaatccttgtatggcctcaagcaagcacctaagcaatggcatgagaagtttgacaccacgcttacatctgcaggctttgttgtgaacgaagctgacaaatgtgtatactatcgctatggtgggggagaaggggtgatcttgtgcttatatgtcgatgacatactgatctttgggaccagccttaatgtgattgaggaggtcaaagactatctgtccaagagttttgaaatgaaagatttgggagaggctgatgttattcttaacatcaaactacaaagaggagatgagggtgggattacacttgtgcaatcccactatgtggacaaggttttgagtcgctttggatatagtgactgcaagccagctcctactccttatgatcccagcgtgctattaaggaaaaaccgaagaatagcaagggatcagctgagatactctcaaatcattggttcattgatgtacttggctagcgcaacgaggcctgacatctcatttgctgtaagcaagctgagccggtttgtctcaaatccgggagatgatcattggcaggctctggaaagagtaatgcgctatctaaagggtactatgagctatggaattcactataccgggtatccaaaagtactagaagggtatagtgactcaaactggatatctgatgctgatgagataaaagccacaagtggatatgtgttcacacttggaggtggcgctgtttcctggaagtcttgcaagcagaccatcttaacgaggtcaacaatggaagcagaacttacagcactagatactgcgacagttgaggccgagtggcttcgtgaactcctgatggatttgccggtggttgaaaaaccagtgccagctatcctaatgaactgcgataatcaaacagtgattattaaagtgaacagttcaaaggacaacatgaagtcatctagacacatcaagagaagactgaaatctgtcagaaagcagaaaaactccggagtgatagcattggactatgtccaaacggctagaaatctggcagatcagtttaccaaggggctaccacgtaatgtgatagacagtgcatcgagggaaatgggcttgatacccacctaa

SEQ ID NO: 86841 - DNA, 384 bp, Oryza sativa
  Clone ID: PAT_MRT4530_85844C.1
ggggggcaatctttttcacatttttcattacaggaagaccgttccacatttaatttacttttcgttgatctgccactaaaaatactgttggggcccaccccttggaacaaaaacagccattttattgccggggttaaactttacatgcctaaagtcctcccttgaaagcctataaacattggcgaccacctcaacgggtaaaacccaaaaaatgggggccttccctgcaatctgactggcaaaagaattgtgattggtcttaaaggaaacccatgcaaatccttaaaggggagccttcaccaccactgtaaaattttgggggatcaacaaaatctgctgttggggaagctcaccattaaaaaccctcctaccagggggatcccc

SEQ ID NO: 86842 - DNA, 3853 bp, Oryza sativa
  Clone ID: PAT_MRT4530_85845C.1
acgagtgtgtgcacacgcgttgggagagtaggcctccgaaaccacgcgttgctgcgacgtttgcacagacgggcgggcgatcaggtttttggggagcgcaaggcgcgactactcactgttcgtcaacatctacttcatcttcaccaacatgtcgaacactggagacaaggagaaggagactcccgtcaacaccaacggaggcaatactgcctcaaactccagcggaggaccattcttggggtataaccttattacattatttcaattagaagttttactgttaatgttcatcgcaatgtcaacattgtgtcattatgtgattgttgatgcttattcaacgttaagcatgctcatgttgattacattcaccactatcactggatcaaatcctattgtaaatatcatgtttattatcttgttattttggattaaaatatgccgaattatgaccaaatttccaacaatccaaaaacctgataggtcattttcggtagttggctttgctgctgcactgaaaccacatgcctttgatggtccaaactataagagatggaaaacacgtgcactattgtggttgacagcgatgcagtgcttctatgtttcacggggcaaacgaagtgacccacctctttctcctgaggaagaggctaagttcgaggcttcggattgcctgttccgtggagcattgatcagtgtactcgctgacaacatagtggacgtgtacatgcacatgccttctgggaaggacatgtgggatgcacttgaggccaagttcggagtttctgacgccggcagtgagctgtatgttatggagcagttctatgactacaagatggtcgatgaccgttctgtagttgaacaagctcatgagattcagatgctggctaaggaacttgagaacaacaactgtgagttgccggacaagtttgtggcaggtggcattattgccaaactaccaccttcttggtcggactttgccacttctctaaagcacaagagacaagagttcagtgttcctgatctcattggctctttgggtgttgaggagaaggcgagggcaaaggacgtccggggcaaaaaggttgagggaggttctagtgccaatatggtacagaagaagaaccctcatgcatcccacaacaacaagaaagtcaagcctgatgtcaaacccaaggctgcaaccaattttaagaagaaaagcaagggaaaggcaaagggagactgctttgtgtgtggcaagtctgggcattgggccaaggactgtcctgagcgcaaagacaggaagtctgccaacatgatcattagcgaggacggaggaacatcggggtacggcaaaatattacctacagttctctctgtttttcattcacctgattggtgggtggacactggtgctaatattcatgtcgggagaggttcctccttgttgatgggaaacgggtcgcttgcggctgttcatggtgttggtacggtcgatctgaagtttacttcgggaaagaccgtgcagctgaagaacgtgcagcatgtcctttcaataaagaagaatctagttagcggctctctattgtgtagagaagattttagacttgtgtttgagtccaataaatgtgtcgtatctaaatatgggacttttgttggaaaaggttatgacagcggaggcttgttccgcttttctttgaatgacatgtctaataatcataatgctgtgaaccatattagcgagaatgatgagtctaatgaaaatcaaacggttgggtctgatagaggtggggagtatttttccaatgagtttgcatccttttgcgaagagtttggaattattcatgagatgacgcctccctattcaccccaatcaaatggggtggccgaaagaaagaaccgtactctaactgagatggtgaatgccatgttagacactgcggggctttccaaggaatggtggggtgaggcagttttgactgcgtgtcatgtcctgaataaaattccaatgaagcataaggaagtaacaccattcgaggaatgggaaaggaagaaattaaatctctcatacctacgaacatggggctgtttggccaaggtaaatgtacctatagccaaaaagcggaaacttggaccaaaaactgttgattgtgtgtttcttggttatgctatccacagtgtgggttatagattcttaatagtaaactctggagtacccgacatgcatgttggtacaattcttgagtccagagatgctacattctttgagaatgaatttcctatgaaatatacacctagcacttctagtaaagaaactgtcatgccccatgagcactttgcaccgatagaacacaatgatcaaacgcctgaggaaaatcctgaggagggcaacattgtagatactcgcaagagtaagagacaaagggttgcaaaatcctttggagatgactacattgtatacctcgtggatgacaccccaagaaccatagaagaggcatattcatctcctgacgctgactactggaaggaagcagtacgcagtgaaatggactcgattatgtctaatggtacttgggaagtcgttgagcgtccatatgggtgcaagcccgtaggatgcaaatgggttttcaagaaaaagcttaggcctgatggtacaatcgaaaagtacaaggcaaggcttgtggccaagggttatacccaaaaggaaggcgaggacttcttcgacacatactcaccagttgctcgcttgaccacgattcgagtactacttgctctggcagcctctcatggtcttctcgtccatcagatggacgttaagacagctttcctaaacggagagctggaggaggagatctatatggatcaaccagacgggtatgtactagaaggtcaggagggaatggtgtgtaaactattgaaatccttgtatggcctcaagcaagcacctaagcaatggcatgagaagtttgacaccacgcttacatctgcaggctttgttgtgaacgaagctgacaaatgtgtatactatcgctatggtgggggagaaggggtgatcttgtgcttatatgtcgatgacatactgatctttgggaccagccttaatgtgattgaggaggtcaaagactatctgtccaagagttttgaaatgaaagatttgggagaggctgatgttattattaacatcaaactacaaagaggagatgagggtgggattcacttgtgcaatcccactatgtggacaagcgcaacgaggcctgacatctcatttgctgtaagcaagctgagccggtttgtctcaaatccgggagatgatcattggcaggctctggaaagagtaatgcgctatctaaagggtactatgagctatggaattcactataccgggtatccaaaagtactagaagggtatagtgactcaaactggatatctgatgctgatgagataaaagccacaagtggatatgtgttcacacttggaggtggcgttgtttcctggaagtcttgcaagcagaccatcttaacgaggtcaacaatggaagcagaacttacagcactagatactgcgacagttgaggccgagtggcttcgtgaactcctgatagatttgccggtggttgaaaaaccagtgccagctatcctaatgaactgcgataatcaaacagtgattattaaagtgaacagttcaaaggacaacatgaagtcatctagacacatcaagagaagactgaaatctgtcagaaagcagaaaaactccggagtgatagcattggactatgtccaaacggctagaaatctggcagatcagtttaccaaggggctaccacgtaatgtgatagacagtgcatcgagggaaataggcttgatacccacctaa

SEQ ID NO: 86843 - DNA, 1777 bp, Oryza sativa
  Clone ID: PAT_MRT4530_85846C.1
atgcaatgcttctatatttcacggaaaaaacgaagtgaactgcctctctctcctgaggaggaggctaggttcgaggattcggattgcctgttccgtggaacattgatcagtatacttgctgacaatatagtggacgtgtacatgcacatgccttcggggaaggtcatgtggaatgcatttgaggccaagttcggagtttccgacaccagcagcgagctgtatgtcatggagcagttctatgactatgagatggtcgattaccgagaaggcgagagcaaaggacaacagggcaaaaatatcgagggaggttctagcgccaatttggtgcaaaagaagaaccctcacgcatcccacaacaacaacaacaagaaagtcaagcctgatgtcaaaccaaaggctactaccaattttaaggataaaggcaagggaaaggccaagggcgactgctttgtgtgcggtaagcctaggcattgggccaagaattgtcctaatcgcaaggacaagaagtctgccaacatggttattagcgagggcggaggaacatcggggtatggtaaatttttacctacaattctctctgtttttcattcacctgattggtgggttgatactggtgctaatattcatgtgtgtgctgatatttccatgttttcttcttatcaagtcgggagagattcctccttgttgatgggaaacgggtcgcttgcggttgttcatggtgttggtatggtcgatttgaagtttacttcgggaaagaccgtgcagctaaagaacgtgcagcatgtccctttaataaagaagaatctagttagcagctctctactgtgtagagatgcttttagacttgtgtttgaatccaataaatgtgccgtatctaaatatggaacttttattggaaaaggttatgtcagcggagttctgttccgtttttctttggatgacatgcgtaataataataatgatgtgaaccatattagcgagaatgatgagttcaatgtgtggcattcgcgactttgtcatatgaatttcggttgtatgacacgcttggctaatatgagtttaattgcaaaattcactttagtaaaaggttctaagtgccatacttgtgttcaatggaaacaacctcgcaaacctcacaatgcatctgaggcgaggaatttggcacccctagaacttgttcatttcgatctgtgtgaaatgaacggcgtgttgagtaaagagggaaagaaatatttcatgacactgatagatgattgcactagattttgctatgtgtacctattgaaaacaaaggatgaagcattgtattactttaagatctataaagctgaggaatggtggggtgaggcaattttgactacttttcatgtcctgaataaaattccagtgaagcataagaaagtagcaccgttcaaggaatgggaaaggaagaaactaaatctctcatacctacgcacatggggctgtttggccaagaacacagtaatcaaacgcctgaggaaaatcctgaggaggataacattgtatactcgaaagagtaagagacaaagggttgcaaaatcctttggagatgactacattgtatacctcgtggatgacactccaagaactatagaagaggcatattcatctcctgacgctgactattggaaggaagcggtacgcagtgaaatggactcaattatatctaatagtacttgggaagtcgttgagcgtccatatgggtgcaagcctgtaggatgcaaattggttttcaagaaaaagcttaggccagatg

SEQ ID NO: 86844 - DNA, 1307 bp, Oryza sativa
  Clone ID: PAT_MRT4530_85847C.1
aacattaacaaccatttcagattactctagtgacccaaggccaagatgttcaaggaaattggttggtacgatacaaatcagtaggatagtacaagactctttgctcaaatacttaaatacacgcctgcaatgctacatttcaaacctaacaaagttgagacttggagtaaatttgttaaacagttaattccattagctgcacgaatgcttctgaagcataaacaatgctttaatctgaaaacctcagctttccctcaataatatgaagcgccttgcgaggtctcgatggcgaaatcagaaccaagtcatactataaataatatgggatcacgttcctttccttgtgaccctccggaacatgtctttgatgttcttcgattctacctcagccttttgtttctttgctggcctccctttgcttgacctagtgctactacttccaagcttctcctcagcagggtggaaaggtacaggagaattctctgcacagaaggaagcttcgctagttttgttcgcttcaatgatctccttgatatccaactgcaacttcttgcagagtaacgttaaccatggttcgtcgttcaggtattcgcgaattatttggacggcatccttcaataattctttttctccttgggcagcataatttttgcctagcttggggaaaacctcttttagattgtgaaccttacagcacaaccaagataagaccttggaatcgtccagcctaaagaacttcacattagcaacttctttaacttcacagaccagatcaatatggtttcctgctatacccatgaggtgttgatatccaggatatccttcaacatacaatatttcatccagttgcctaaattttcctggatctttaccattcgacatacgtgcagctttcaaaattggtagaagaataaaaatgggatcaacaactgtgcagtagtagaggctgccatcttcacaaacataatcacccaagaaccaagatccaaatcgctccttaaaccaattgaactcgtgaagttgaccgtcgatgaacagataccctgtttcttcatctgatctcgggtggcggagagacaaaacattcccttgacaattgccatcagaaggacgaggggcgacgaggaggcggggcggcgcagccaggtcgccgcaccacgacgccatcgacagccccggccagcctcctctcggatctcgtcgccggcggttcgtgggcggctgcggcctgcggctactaaatgttggcgccgccggctgggaagggagcgcagcggagaggaagaggattatcgcgccccacgcgt

SEQ ID NO: 86845 - DNA, 2278 bp, Oryza sativa
  Clone ID: PAT_MRT4530_85848C.1
ttttttttttttttttttttgggaatcttatcctttcgtcttttttttatacatttccttgggtttctttccttcaaaaataaaaatgaaattattggagtgaatgaaataaatacattcagatacaaaaggtgttacataagtacataactcagcaaaattatcttctgattgcctgttcttttccaaggatgtgttcactgtgaaaaactataaaacctctctataggaagacttacatgtattatttcaaagacaacaagaaagcattggtgcaatttatgtcctattcaatcctcttctttcttttctcaatttactgtaaattaatgctaccatgatgagggtatatgtaactccaataatctccaaatatgcatcaatcctcacaattgaggaatgatcaatatgggaaagaccctgtcattttcatatgattaagggtacttctcaggccatagctttcgacagcccgattggcagctcgaaaaccatctccgtatgcctcagatgaatccgtttcgatctgatgtttgatgaatgctccgagcttcttctcgaattcggtctttgcgcccttctttgatgtggttggagttgaagatgacgacgacgaagatgccactgaggtggctgatatgtcgatactagaaccaaagatgatctctgactcgagccacatgtgggaaagaacttggcatatgccttcttcaacctgaggactaagagaccgaaatcctttcagacgtagataagcatgcatcatttcatgggcgagaattgagccagtttgtaatctcggcaacccatataatatcaggattgcagtcacttcacatcgtctttccagcttatatggtgctgtgatcatatctataattctgtttcccggtccaattattggtcttcttaagatcgttctgacaatttgctcttcagaaagacatagtccccttgtttcaggaagatgatgcccatttttctcagtttctaaagcctcatttagagcctgtctctcaaccaagagtattggaacttgttgctccactttcatgttcagaccttcaaaaaattcctgaatgtccatatacagctgttgacactctggtgtatccattattgaagaattgagacattccaagcagagtttcctcccatcatctaatgtgatgtatttgatgtccatcggctccattctttcacaactgcaacacctaggagtgccatcatcttcatgggaaggacagtacttttgcatccagaatggatgtgctcggtattcgatcagcccattcctgttcgttggaataaagttcttgcagacatcacattttggatggaaaaaatctttgtagcatgatttgtggtatggctgatcttcatgcatagcaaactcatactcagagatgggcttgttacaagcaaaacacctgaagcactgaggatgccatactgaatccatacagctaagaaaacgtccatgaccaattgggtttttgcatccagcacaagttctggatccacttgaggcaaatagaatcggaggcagctctcttgggggctctgatggaacattctcaacaggaatattctgacgtggaggagagtcagcattaaggctctcctggagagctcgtgcaagttgttcatcttcctccaaattataatcgatatcaacagcttttcccttattttgttcttctgataaagacagtgcaatagcacgatctatatcttcattatcactttcatcatacgctcccaacccatgactcgaggttatctgagggtcgaattttctgtagccagaagacaaaaatctcacaaacttttcgccaatcgagaacgtttccagtacttcagaaaaccaaagcttgagcctgcaacaaactaggaattcagttcgccgtcgatcgcctcgcctcccgctcagtccgctttcacctcgaagtgaccctgaaactcccacaagaaactccaattctctgtagtcccgattgaccacgcaccaagaaccgagacaaagggtaactaatcgagctcgggacaggcgaaccaccggccacggacagctccggttcttgatctctccccacccaagaacgcccctatgaacccctacccctatgagcaaatcgttgccaacatgcttgatgttggcggagcaatggtacgagtggcaagttgccaagtaggcggcaagcgaaagccttcccttgcgcttgttgggtcgacaacgacgacacttccaaggaccatgaccactccttaacggcat

SEQ ID NO: 86846 - DNA, 3024 bp, Oryza sativa
  Clone ID: PAT_MRT4530_85849C.1
atgtctgcgcctggagccggcgccgctgctgctgctggaggagatggcggaggtggtgcgccaccaggagctggagctggaggtggtgcgccaggagctggagcctgtgccgcgaacaacaacaccaacggagtcaattctgcctcgcaatccagtggagggccattctcggggtatatccttctcctgttcctgttcccgttgttagcgctttactgctatgttcctgttcctgatattcatgatgtctctagcatgctactgcgttactgctatgttcttgttcctgatattcataatgcgcatgatgccattagtatgctactggttatgttacatgttgtcactagatcaccctacactgtttatgccatgattattgtcttaacattttggattaaaatatgccgatttatgaccatatttctaacaatccaaaaacctgataggttattttcggtagttggctttgctgctgcactgaaaccacatgcttttgatggttctaactataagagatggaaagcacgtgtactattgtggttgacagcgatgcaatgcttctatgtttcacggggcaaacgaagtgaaccacctctttctcctgaggaggaggctaatttcgaggcttcggattgcctgttctgtggagcattgatcagtgtactcgctgacaacatagtggacgtgtatatgcacatgccttctaggaaggacatgtgggatgcacttgaggccaagttcggagtttctgacaccggcagtgagctgtatgtcatggagcagttctatgactacaagatggtcgatgaccgttctgtagtagaacaagctcatgagattcagatgctggctaaggaacttgagaacaacaactgtgagttgccggacaagtttgtggcgggtggcattattgccaaactgccaccttcttggtcggactttgccacttctctaaagcacaagagacaagagttcagtgtttctgatcttattggctctttgggtgttgaggagaaggcgagggcaaaggacgtccggggcaaaaaggttgagggaggttctagtgccaatatggtacagaagaagaaccctcatgcatcccacaacaacaagaaagtcaagtctgatgtcaaacccaaggctgcaaccaactttaagaagaaaggcaagggaaaggcaaagggagactgctttgtgtatggtaagtatgggcattgggccaaggactgtcctgagcgcaaagacaggaagtctgccaacatggtcattagcgagggcggaggaacatcggtgtacggtaaaatattacctacagttctctctatttttcactcacctgattggtgggtggatactggtgctaatattcatgtcgggagaggttcctccttgttaatgggaaacggttcgcttgcggttgttcatggtgttggtacggtcgatctgaagtttacttcgggaaagaccgtgcagctgaagaacgtgcagcatgtcccttcaataaagaagaatcttgttagtggctctctattgtgtagagaaggttttagacttgtgtttgagtccaataaatgtgtcgtatctaaatatgggacttttgttggaaaaggttccaagtgccatacttgtgttcaatcgaaacaacctcgcaagcctcacaagacatctgaggcgaggaatttggcacctctagaacttgttcattctgatttgtgcgaaatgaacggcgtgttgactaaagggggaaagaaatatttcatgacactgatagatgattgcactacattttgttatgtgtatctattgaaaacaaaggatgaagcattgcattactttaagatctataaagctgagtttggaattattcatgagaggacgcctccctattcaccccaatcaaatggggtggtcgaaagaaagaaccgtactctaactgagatggtgaatgccatgttagacactgtagggctttccaaggaatggtggggtgaggcagttttgactgtgtgtcatgtcctgaataaaattccaatgaagcataaggaagtaacaccattcgaggaatgggaaaggaagaaattaaatctctcatacctgcgaacatggggctgtttggccaaggtaaatgtacctatagccaaaaagcagaaacttggaccaaacactgttgattgtgtgttccttggttatgctattcacagtgtaggttatagattcttaatagtaaactctggagtacccgacatgcatattggtacaatttttgagtccagagatgctacattctttgagaatgaatttcccatgaaacatacacctagcacctctagtcaagaaactgtcatgccccatgagcactttgcaccgatagaacacaatgatcaaacgcctgaggaaaatcctgaggaggacaacattgtagatactcgcaagagtaagagacaaagggttgcaaaatcctttggagatgactacattgtatacctcgtggatgacaccccaagaaccatagaagaggcatattcatctcctgacgctgactactggaaggaagcagtacgcagtgaaatggactcgatcatgtctaatggtacttgggaagtcgttgagcgtccatatgggtgcaagcccgtaggatgcaaatgggttttcaagaaaaagcttaggcctgatggtacaattgaaaagtacaagacaaggcttgtggccaagggttatacccaaaaggaaggcgaggacttttttgacacatactcaccagttgctcgcttgaccacgattcgagaactacttgttctggcagcctcttatggtcttctcgttcatcagatggacgttaagacagctttcctaaacggagagctggaggaggagatctatatggatcaaccagacagcctcaatgtgattgaggaggtcaaggactatctgtccaagagttttgaaatgaaggatttgggagaggctgatgttattcttaacatcaaactacaaagaggagatgagagtgggattacactt

SEQ ID NO: 86847 - DNA, 1122 bp, Oryza sativa
  Clone ID: PAT_MRT4530_8584C.1
atgccgacgccgtcgcacttgaagaacccgctctgcttcgacttccgggcggcgaggcgggtgccggagacgcacgcgtggccggggctggacgaccacccggtggtggacggcggcggcggcggcggcgaggacgcggtgccggtggtggacgtcggggcgggcgacgcggcggcgcgggtggcgcgggcggcggagcagtggggcgcgttccttctggtcgggcacggcgtgccggcggcgctgctgtcgcgcgtcgaggagcgcgtcgcccgcgtgttctccctgccggcgtcggagaagatgcgcgccgtccgcggccccggcgagccctgcggctacggctcgccgcccatctcctccttcttctccaagctcatgtggtccgagggctacaccttctccccttcctccctccgctccgagctccgccgcctctggcccaagtccggcgacgactacctcctcttctgtgacgtgatggaggagtttcacaaggagatgcggcggctagccgacgagttgctgaggttgttcttgagggcgctggggctcaccggcgaggaggtcgccggagtcgaggcggagaggaggatcggcgagaggatgacggcgacggtgcacctcaactggtacccgaggtgcccggagccgcggcgagcgctggggctcatcgcgcacacggactcgggcttcttcaccttcgtgctccagagcctcgtcccggggctgcagctgttccgtcgagggcccgaccggtgggtggcggtgccggcggtggcgggggccttcgtcgtcaacgtcggcgacctcttccacatcctcaccaacggccgcttccacagcgtctaccaccgcgccgtcgtgaaccgcgaccgcgaccgggtctcgctcggctacttcctcggcccgccgccggacgccgaggtggcgccgctgccggaggccgtgccggccggccggagccccgcctaccgcgctgtcacgtggccggagtacatggccgtccgcaagaaggccttcgccaccggcggctccgccctcaagatggtctccaccgacgccgccgccgccgccgacgaacacgacgacgtcgccgccgccgccgacgtccacgcataa

SEQ ID NO: 86848 - DNA, 770 bp, Oryza sativa
  Clone ID: PAT_MRT4530_85850C.1
cccgcgtccgctcccttgtcctctttcccctccccctggattcctacctgtcgcctcgccggctaagggtctctctcgcgtctccgtctcatcccttctcgcctcttattattcttcttcttcttttctttatcctgtggaaggcgttcttgggtggggagagatcaagaaccggagctgtccgtggccggtggttcgcctgtcccgagctcgattagttaccctttgtctcggttcttggtgcgtggtcaatcgggactacagagaattggagtttcttgtgggagtttcagggtcacttcgaggtgaaagcggactgagcgggaggcgaggcgatcgacggcgaactgaattcctagtttgttgcaggctcaagctttggttttctgaagtactggaaacgttctcgattggcgaaaagtttgtgagatttttgtcttctggctacagaaaattcgaccctcagataacctcgagtcatgggttggttaaataaaatatttaaaggttcagtaaatagagtttcaaggggccattatgatggaagctggcatgaaggtcattcatcagataacgccagaggagcgtatgatgaaagtgataatgaagatatagatcgtgctattgcactgtctttatcagaagaccaaataagggaaaagctgttgatatcgattataatttggaaggaagatgaacaactggcacgagctcttcaggagagcccttatgctgactctcctccacgtcagaatattcctgttgagaat

SEQ ID NO: 86849 - DNA, 5446 bp, Oryza sativa
  Clone ID: PAT_MRT4530_85851C.1
ttagacatagtccaatgctatcactccggagtttttctgctttctgacagatttcagtcttattttgatatgtctagatgacttcacgttgtcctttgaactgttcactttaataatcactgtttgattatcacagttcgttaggatagctggcactggtttttcaaccaccggcaaatccatcaggagttcacgaagccactcggcctcaactgtcgcagtatctagtcctgtaagttctgcttccattgttgacctcgttaagatggtctgcttacaagacttccaggaaacagtgccacctccaagtgtgaacacatatccacttgtggcttttatctcatcagcatcagatatccagtttgagtcactatacccttccagtacttttaggtacccggtatagtgaattccatagctcatagtgccctttagatagcgcattactctttccaaagcctgccaatgatcatccaccagatttgagacaaaccggctcagcttgcttacagcaaatgagatgtcaggcctcgttgcactagccaagtacatcaatgaacctatgatttgtgagtatctcagttgatcccttgctattcttcggtttttccttaatagcacactgggatcataaggagtaggagctggcttgcagtcgttgtgtccaaagcgactcagaaccttgtccacatagtgggattgcacaagtgtaatcccaccctcatctcctcttagtagcttaatgttaagaataacatcagcctctcccaaatccttcatttcaaaactcttggacagaaagtccttgacctcctcgatcacattgaggctggtcctaaagatcaatatgtcatcgacatataaacacaagatcactccttctcccccaccatagcgatagtacacgcatttgtcagtttcgttcacaacaaagccagcagatgtaagtgtggtgtcaaacttctcatgccattgcttaggtgcttgcttaaggccatacaaggatttcaacagtttacacaccattccctcccgaccttctagtgcatacccgtttggttgatccatatagatctcctcctccagctctccatttaggaaagctgtcttaacgtccatctgatggacgagaagagcatgagaggctgccagagcaagtagtactcgaatcgtggtcaaatgggcaactgatgagtaggtgtcgaaaaaatcctcgccttccttttgggtataacccttggccacaagccttgccttgtacttttcaattgtaacctctggcctaagctttttcttgaaaacccatttgcatcctacaggcttggacccatatagacgctcaacgacttcccaagtaccattagacataattgagtctatctcactacgtactgcttccttgttcatacgccacactttgctcctagtcctcttctcggcttcatccaatatccggatcgggtgttctggatacgtaagatcattgctaatgtgaatctcttccagcggagcttgttcttccggcactcgtaagcatttctttaattgagacacatggaagactgggtgcacatcagcgatattctctggtagctgtaactgatatgcgacttctcctcttctagccgtgatttgaaagggtcccacgtatcttggtgctagttttcccttaaccctaaacctttttgttcccctcatcggagaaacctttaaataaacgtaatctccttccttaaattctaggtttcttcttcgggtgtcggcataactcttttgtcgtgattgtgctacctttaaacggtcacggatcaagcgaaccttttcttcggcctcattgataatgtcaggtccaaataccgcccgttcacctgtctcagaccacatcagcggcgtccggcatcgtcgaccaaacaatgcttcattgggggacatcttcaggcttgcttgaaagctgttgttgtaggagaactcggcgtagggcaaacacctctcccagtctttgctaaaatccaacgcacaagctctcagcatgtcctccagtacctggttggttctctccgtctggccatctgtctgtggatgataagctgtgctaaaagcaagataacttcctagggcttcatgtactttttcccagaaatgcgaggtaaactgtgtgcctcgatcggatataatcctcttaggtataccatgaagacacactatcctggtcatatacaactcggcaagtttagcactgctatagtttgtcttgacggggatgaatcttgccgtcttggtgagtcgatccacgatcacccaaatggaatcatatcctgttgcggtcttgggcaatccaacaataaaatccatacctatctcatcccatttccattcaggaatcctaaggggttgcagcaagcctgccggtcgctgatgctcagccttcactttttggcatacgtcacagagtgctacgtattctgccacatctctcttcatgttgggccaccagtatccttccttcagatcttggtacatcttcgtacttccggggtgcaatgagtatgccgattcgtgagcttcctttaaaattaatcccctcagtccaccctgttcgggtacgtaaattctctttttataccatagaacatctttttcgtcgattgaaaattcctttgcacgtcctgcagctaagcgttccttcaactctcggatttcctcgttgtccttctgggcttcttctatttgggttctcaaaagaggttgaatgtccagggtgtttattttgttcataagattcatgaagtaggctggggcattggttagaccaaatgacatcactgtgaactcatacaatccatagtgtgttgaaaacgcggtcttgggaatatccttggtcctaatcttcagttggtggtatcctgatcgaatgtcgatctttgaaaacaccttagctcctttgagttgatcgaagagatcatcaaaccttggtagtaggtacttgttcttaatagttacttcgttcagtgatcggtagtccacacacattctcatgctaccatctttcttcttgacgaatagcactggggctccccaaggtgacgaactggggcgtacaaatcccttttcttgcaactccctaatttgctttttaagttcttctaactcattaaccggcatccgatatggtctcttggatatgggggcggttccaggtatcaggtcaataatgaactttatgtcacgatctggtggcattccaggtaaatcttctgggaacacatcaggaaatcgctgcactacaggcattccctttaggggtagcatggtaaatatacctccggcacgttcggttagcctaggatcttgatccatggttgctctcatatccgatccccagggtgtggttaaggtcacctctctacgcccacagtcaattacacctctattctttgttaaccaatccatgcccagtatgacatctagggtctgaggtattaagatcataagattggagggaaacaccacgtccctaagacgaattggtacgtctatgcaagcatgactcacagttatctcgcccccaggtgagtgtactatcataggctttctaagtcccactagggttaagttgtgcttttgactagccttcagagatataaatgaatgcgatgcaccagaatcgaagagaactttaaccggggtagaattgatagagaacatacccatgagtatgccctgatcttcctgggcctcttcagctcggacatggttcacttgtccgcgcccaagtccagtggcggtcctgttagattgcggagtcttgaatagacctcgcccggtaacaggggtagtagtgccacgaacagtcattgcattcgtgccggtccggacaggagtcttgcgtggatgagggcagttgttggcgtagtgcccataccccccgcaattgaagcagttcacattcatcttggctccaggggcagccaaagttggtgtaggggtgcggttctgaattgcaactggcctgttgaagttgctaggtgcagcgggacggttggttgccacgatagggggcttccatccggatgaagtggctcccttgagtcgctgaggcactatctgaggtaggcgactcatagcaagcctcctcttgcggttgtgttccaccgtcctttgatcgttctctagcctgacgactttgttgatcaggctctggaaactctcgtgatcctgcccgatcataggtccacgcaattcatcattcagcccttctatgaacttgtcgatcttttcttcttcatccgctaggtctccaattgcatagcgggccaactgagtaaacttgttcagatattcttgcaccgttgtattcccttgccgcagccatctaaactcgttcttcttcatgcgcatcactgcagcaggtacgaagttctcgcgaaatgctgcagtgaactcctcccaagtgggttctccagcatcgttttcccgagcttccttgtaggtgtcccaccaatcactagcgggtccttccagttggtttactgcgaagattactttgtcggtttcgcgtaccctgacaagagtcagtttcttctctatgatgcgtagccagtcttctgcctccataggctcatctgccgtagcgaaagtgggtggcttagtcctcataaactctccaaagctcgatcctccgcagttgtcttgattgtttgcaatggcttgcagaagttgggtttgagtggccataactctggccagggtggttaggtcgggtacttgagtttcttcattgctggttgacgccctacgtcggcttgccatctgtgtaggccgatgaggtatgtatcctattttcctaactagcccttttggttttatcccgttaagggagttgttttgattgtgaactgagtccccacggctcggaagtagtggcctctggatctggcttgggcttcttgcccggaggtcgtgtgctcttgcgagcagtgctgagggtacgagggcctccgacaaaggtgatgcggtgggcaggagtctcatcctctgaaagatcagtgatgtccggctctatctctggcttagtgtcggtcccctctgtctcggagtcgacctggattggagtctccaaactggaacccagtgccccaagccaggtgctcctcctctagctgaagctgctgcactgtgaggtcagtcacctcagtctctctaactctcccacacgcctctactggtcgtcgatctctaacagagcctcctcgtagaagtcgtctactgcctcagcccatcgggacagtcgagtcactgtcgggttgtagcagcaaggtgtgtcctggactgtgcagacggagttgctctcctctcgaaatgggtggtgagcaaactcggtactcgctaactcagctcggtgaatagagctaattcggagaaaggcctctccggtaagtcgcgacgg

SEQ ID NO: 86850 - DNA, 315 bp, Oryza sativa
  Clone ID: PAT_MRT4530_85852C.1
cgcttctccttctcccctgcgcatgtgctcgcttctcctccccgcgtcgcactggcggcctcatcccgcacgcaccagccacgccgcggagccgcgcgtctgtagcgtcggctgcaggtatcgcgagatggagatatgcgccgggagccctagcgccatgctggcctcaaccgtccctacaatggccttcgctgactcccctcccgggtcctccctcgccgctgtcgccgccgtgatctcctcctcctccccatcaaaacccctctcacgagcaaagacccctccaccagctctcctccaggctattctccccac

SEQ ID NO: 86851 - DNA, 591 bp, Oryza sativa
  Clone ID: PAT_MRT4530_85853C.1
atggtggtttcccccaccatttgcaatgtgaagttggggcgtgtcctcatagacgggggtgcagccctcaacatcctttcccccgcagcctttgacgccatcaaggccccagggatggtgctccggccgtcccagccgatcatcggtgtgacgccggggcacacctggccgctgggtcatatcgacctcccggtcaccatcggtgattccgccaacttccgcacggagcgggtggacttcgatgtggcggacctcagtctgccctacaacgcggtcctggggaggcccgcgttggtgaagttcatgtcggcggtccactacgcctatcttcagatgaagatgccgggacccggtggccccatcaccgaccatggcgacctcaaagtcgcgcttgcttgtatggagcagcgcgcggaccatctcgccgcggcgtccaagcccgcgggtggcgacgagaggctcagcacctccgtcccggccgccccaaggcagcggatggtcacgtgcgacgaggtcccagtcaaggaggttgccctgggcgacggcccgtccaagaccacacgaatcggtggtcttctggacaacaaatag

SEQ ID NO: 86852 - DNA, 3513 bp, Oryza sativa
  Clone ID: PAT_MRT4530_85854C.1
atgtctgccgcacctggagccgccgccgccgctgctgccgcacctggagacgcgccgggagccggagccgctgcgaacgacaacgtcaacggaggcagttctgcctcacaatccagcggagggacatttacagggtcattttcggtagttggctttgcttctgcactgaaaccacatgcatttgatggttctaactataagagatggaaagcacgtgcactattgtggttgacagcgatgcaatgcttctatgtttcacggggtaaacgaagtgaaccacctctctctcctgaggaagaggttaagttcaaggcttcggattggctgttccgtggagcattgatcagtgtactcgctgacaacatagtggacgtgtacatgcacatgcctttcgggaaggacatgtgggatgcacttgaggccaagttcggagtttccgacgccggcagtgagctgtatgtcatggagcagttctatgactacaagatggtcgatgaccgttctgtagtagaacaagctcatgagattcagatgctggctaaggaacttgagaacaacaactgtgagttgccggacaagtttgtggcgggtggcattattgccaaattgccaccttcttggtcggactttgccacttctctaaagcacaagagacaagagttcagtgtttctgatctcattggctctttgggtgttgaggagaaggcgagggcaaaggacaaccggggcaaaaaggttgagggaagttctagtgccaatatggtacagaagaagaaccctcatgcatcccacaacaacaagaaagtcaagcttgatgtcaaacccaaggctacaaccaattttaagaagaaaggcaagggaaaggcaaagggagactgctttgtgtgtggcaagtctgggcactgggccaaggattgtcctgagcgcaaagacaggaagtctgccaacatggtcattagcgagggcggaggaacatcggggtacggtaaattattacctacagttctctctgtttttcattcacctgattggtgggttgatactggtgctaatattcatgtcgggagaggttcctccttgttgatgggaaacgggtcgcttgcagctgttcatggtgttggtacggtcgatctgaagtttacttcaggaaagaccgtgcagctgaagaacatgcagcatgtctcttcaataaagaagaatcttgttatcggctctctattgtgtagagaaggttttagacttgtgtttgaatccaataaatgtgtcgtatctaaatatggaacttttgttggaaaaggttatgacagcggaggcttgttccgcttttctttagatgacatgtgtaataatcataatgttgtgaaccatattagcgagaatgatgagtctaatgtgtggcattcgcgactctgtcatgtgaatttcggttgtatgacgcgcttagctaacatgagtttagttccaaaattcactttggtcaaagattctaagtgccatacttgtgttcaatcgaaacaacctcgcaagcctcacaaggcatctgaggcgaggaatttggcacctctagaacttgttcattccgatttgtgcgaaatgaacggcgtattgactaaagggggaaagaaatatttcatgacactgatagatgattgcactagagtttgttatgtgtatctattgaaaacaaaggatgaagcattgcattactttaagacctataaaactgaggtagaaaaccaacttgaaaggaaaatcaaacggttgaggtctgatagaggtggggagtatttttccaatgagtttacatcattttgcgaagagtttggaattattcatgagaggacgcctccctattcaccccaatcaaatggggtggccgaaagaaagaaccgtactctaactgagatggtgaatgccatgttagacactgcggggctttccaaggaatggtggggtgaggcagttttgactgcgtgtcatgtcctgaataaaattccaatgaagcataaggaaatgacactatttgaggaatgggaaaggaagaaattaaatctctcatacctacgaacatggggctgtttggccaagggaaatcctgaggaggacaacattgtagatactcgtaagagtaagcgacaaagggttgcaaaatcctttggagatgactacattgtatacctcgtggataacaccccaagaaccatagaagaggcatatttatctccttacgctgactactggaaggaagcagtacacagtgagatggactcgattatgtctaatggtacttgggaagtcgttgagcgtccatatgggtgcaagcctgtaggatgcaaatgggttttcaagaaaaagcttaggcttgatggtacaattgaaaagtacaaggcaagacttgtggccaagggttatacccaaaaggaaggcgaggattttttcgacacatactcaccagttgctcgcttgaccacgattcgagtactacttgctctggcagcttctcatggtcttctcgtccatcagatggacgttaagacagctttcctaaacggagagctggaggaggagatctatatggatcaaccagacggcctcaatgtgattgaggaggtcaaggactttctgtccaagagttttgaaatgaaggatttgggagaggctgatgttattcttaacattaagctactaagaggagatgagggtgggattccacttgtgcaatcccactatgtggacaaggttttgagtcgctttggatatagtgactgcaagccagctcctactccttatgatcccagcgtgctattaaggaaaaaccgaagaatagcaagggatcaactgagatattctcaaatcattggttcattgatgtacttggctagtgcaacgaggcctgacatctcatttgctgtaagcaagctgagccggtttgtctcaaatccaggagatgatcattggcaggctctggaaagagtaatgcgctatctaaagggcactatgagctatggaattcactataccgggtacccaaaagtagtagaagggtatagtgactcaaactggatatctgatgctgatgagataaaagccacaagtggatatgtgttcacacttggaggtggcactgtttcctggaagtctagcaagcagaccatcttaacgaggtcaacaatggaagcagaacttacagcactggatactgcgacagttgaggccgagtggctttgtgaactcctgatggatttgccggtggttgaaaaaccagtgccagctatcctaatgaactgtgataatcaaacagtgattattaaagtgaacagttcaaaggacaatatgaagtcatctaggcatatcaagagaagactgaaatctgtcagaaagcagaaaaactccggagtgatagcattggactatgtccaaacggctaaaaatctagcagatcagtttaccaaggggctaccacgtaatgtgatagacagtgcatcgagggaaatgggcttgatacccacctaa

SEQ ID NO: 86853 - DNA, 201 bp, Oryza sativa
  Clone ID: PAT_MRT4530_85855C.1
atggggaagagggccgacctcggtgctggccagcggtggagtgcacggcggtgtcggtggcggcggaaggggccgagatcggctccggccacggcggtgatgaagaatggcggcggcttcggcgagttttcagtggagcggcggcagcggggaggagctcctgcgaggatgcggcttcagtacatgcggggaggaggatga

SEQ ID NO: 86854 - DNA, 123 bp, Oryza sativa
  Clone ID: PAT_MRT4530_85856C.1
atggcatcccccatcgtgaggaagacgatgatcagcgcactcctggatttcgacgagatgggtttaagagatggattctccaacaacaagctgctcgataacttcggctgtgggaagatctaa

SEQ ID NO: 86855 - DNA, 192 bp, Oryza sativa
  Clone ID: PAT_MRT4530_85857C.1
gttacgcggttcgtctagcgtttagtgggttgagatggcgagcgccagatgtcgagtaccgctgcttcgtcgaaatcatcgcctgggtcaccaaccaccgatcacttgcttcatcctacaaaacaaacagatatatattcatccacaaaacataaactgcatcattactaaaaaataacataattatataat

SEQ ID NO: 86856 - DNA, 311 bp, Oryza sativa
  Clone ID: PAT_MRT4530_85858C.1
gggttttgttttttaaaaaaattttttttttttttttttttttttttttttttttttttaagtccaactggatttctgcaaataaattattccatcggtttactgctacaaaccccccaaaaaatacaaaacttgaacacacttttttcaatggagaagccccccattacaccactataattttaaaaaaaaaaaggtggtacatttctcaccctattgcaagggttattcttgaacaaaaatacaaacttctctcttgtttcataaattaacaaatccccgacccctgggccgacccctgggccgacccc

SEQ ID NO: 86857 - DNA, 197 bp, Oryza sativa
  Clone ID: PAT_MRT4530_85859C.1
tagatacctctgtaattgtgttgtgtaccacatagttttcgggttttcttttggtcaaccatatcccgaagccacatcttgttcattattatccccaactactactcccgtactactcccaactacctgtgttagatagaaccccttttcacggcccttcatattcatattaaaccagagttgttccaaaaaaaaaa

SEQ ID NO: 86858 - DNA, 588 bp, Oryza sativa
  Clone ID: PAT_MRT4530_8585C.1
cgcgacgcgacaactcaccggtggcttggacgacgacggcagcgaggtcgaggcggcggcggtcttcgggtcgtcgatggcggcggcgctccggcagtctttggcagaaacggaggacgggatgaggacggtggcgaccttgcgaacctggcgatggccttccggagcgacggcggtgactggagcagcggcggcgcttggctggactcgcggcagcgacggcggcgcacgggctgacgcggaggcggcgctacaagcgacggcgggctagggcgaaggtggcagcgaaaagaggaggtcccaggggtccttttataggggctaagaggcggcgatggaggcccatggccggcggcaaggagatggaaggtctagggttagggaatccgaatcaaaatcgaatccgagctatttccaaacaaaattagctaaagtttctataggggaaaagatagaggagatcaaggggatcctttcccgtctatcaatttgatcggagaaggaaaggggtggcccgatttggaaggggtatcggcggctgcgtgacatggttggttgaagacaaccctgacaggtggaagaggaggg

SEQ ID NO: 86859 - DNA, 1168 bp, Oryza sativa
  Clone ID: PAT_MRT4530_85860C.1
ctcgagaatgcgagaatctcgactcgagcagacaggaagaatggcttcctccacctgcgggagaagaggacgaggacgactcctctcgcctgcggcggttgtgctggcggccgtggctgtgctgctgtcggcgtcacaggcactggcggcgccgtgctacccgcgcgtgttcagcttcggggaactcgctagctgacacgggcaacggccctttcctctacggcaacgagtcccgccggccaccgctgtggccaccctacggcgagaccttcttccaccgcgccaccggccgggcctccaacggccgcctcatcatcgacttcatcgctgacgcgctggggctgccgttcctgcggccgtactggggcgggcggaccacgggggacttcgccagcggggccaacttcgcggtgggcggcgccacggcgctcagcccggacttcttctgggagagaggcgtgcacgtgcgcgacaccgtgcacctcgacatggagatgaactggttccgcgatctgctcggcctgctctgcccagacgatcttgccgacatggatgggcctggggcaacggcctcggccgtggggcagataacggcctcttggtggaactggccagatctgcttcacagcgaagggctcggcggtagagcggccagcgagcaccgtgatagtggtgtagtggaggccacgatgtgggtatgtggccgagttccatggattcccctcgcaagaccggaccagcgccggcgtcggtggtggcaagggaagagcgagcgcggtggacgcagtggtggtgttgacgggagctcaacagtgttggaagaccagaagagcgagcatggcgttggggaagaccatggctccgtcttcggcgggggcagcggtggaatgtggcggcggcggcggatggggacgacctcggctccagccgcagtcgatggggaagaccggctggggacgacctcggtggccagcggtggagtgcgcggtggcggcggtggcggcggaaggggttgtcctcggctccggccgctgaggagcggcagatggggaagaagtaggatccggcagcggctggagaagtcggctccggcgaggatgcggcggtgcggcgcggtgccaatacatgcggggaggagcgaggaggagtagcgagcatacatggcgac

SEQ ID NO: 86860 - DNA, 455 bp, Oryza sativa
  Clone ID: PAT_MRT4530_85861C.1
atggcgcggcgacaacagcagaagaggtcctcgcggcctcacctcctgccagtgacagcagcggaaggggtagcggtgtcggcttcccagatatggctggaggggatgtggccagtggctagtgagctcgtcgtggaggcggtcgcgcgactgctccagtggtgggctctcttctccctctccctcctccactgccgccagctgccatcgccaccactgccatgggctgtcgtcgcctctaccgccgtgagctcggggccggccggatccggccgccacgacaacgggggtggccggtggccggatccaccaccgctgctgacgggggcagcgccgcgatgacttcaaatttttgttgattgttgtgatgcttgaatgcttgggtgaaatttttttactgtaaattgttgatgtaaatttatgtggatatttgaatgcttgggtaaatttctgtg

SEQ ID NO: 86861 - DNA, 486 bp, Oryza sativa
  Clone ID: PAT_MRT4530_85862C.1
agtggatccccgggctgcaggctcgtcttcttccccggaaacggtcacgcgactcgcgagctcccgccgcgccgcgccgtcgccgtcgcgtcgcggctcccacctctccctctaccccaccacactcgccgccggcgaggcctgacggcgatccccaacactgccccccggcggctgccgttggatcgtgggagggaggattggccggttgtactacagttgagggagggaggagctaccgtttgtgatccgccgcctgcgaccgggcgtccccgtagttagatccggctcgaccaccacggcctccggcgctctgagcggctgctctgtgtgagaggccctcgataccttgatcggccagcttgctcaacatgcggaccgtggctgctcgtcgtggtcgtggcttgggtcttgggcgttgcggccgcctcgtcgtcgtcgtcatcgcctgggcaggtaccagccagaaattcaacaagtgtatgc

SEQ ID NO: 86862 - DNA, 309 bp, Oryza sativa
  Clone ID: PAT_MRT4530_85863C.1
atggtggcgatgagtggcgagaggaagcacactggcaggcccatccggttgttgacgctgacggcccacggtagcacgaaagtgtcggctataatgccggaggagatcagcaggcattgggtggagactcaggtggagggcaagacgttggggatggcctcgaggcggacgccgccctccgccgccgcggccgccgcgccgccgagcaggccgaggcggtgggtggttggtggaagcggcggtggcgagctcggccaatttatactcgccggaaagctacggatttggggggaggttggcggtaggtga

SEQ ID NO: 86863 - DNA, 268 bp, Oryza sativa
  unsure (1)..(268): unsure at all n locations
  Clone ID: PAT_MRT4530_85864C.1
tccgcgattcgagccacgcgtcacgcgcttcggcgcgcagctactttgaagaaatntagagtgctcaaagcaagcgcatcagctctgcgatacatgtagcgatgcggataaccatcatagggagttccggtccttattggtgtgtggcncgttcgaggatccgtgagtcaatgattacataggcgacagggtcggggnngcattcgtatttcaatagtcanggaggtgannaattcttggatttaattgaaaganctgaacaagatta

SEQ ID NO: 86864 - DNA, 270 bp, Oryza sativa
  Clone ID: PAT_MRT4530_85865C.1
atggtcgccggcggtgaccatcggggcgcgggcgcgttccctcccgtcggccgtgccggcgaggccgccttcgggcgcgccctcgcggctgccatgtggggcccggctgtcagccgcccgcgcccgcgggtgcggctgacgcgtgggacccacggcgccgaccgccgccagccgcgtgcgcccgacgctgcagcttcggaagatccgctcttcgtggaagtcgaagccgtcgattggggaaaacgagcaaggcaagacacatcatcttga

SEQ ID NO: 86865 - DNA, 480 bp, Oryza sativa
  Clone ID: PAT_MRT4530_85866C.1
acggaggggcgaagaatgtagcagctaacgtcctactacggtgctagtgtactggattgcatgtgtgcagttgatcgagggggtgaccggtcaagtcaatcgtccgaatgacgacgcggacaaaaggtgctggctgactgggtctagccacgcgcacaagctggattcgcttgatagttttcgcggaaggacgcttatgattttgctttgtgagagagaagcctctgctgctgcctttttgcatggttcggtttcagcggtcggagcgtgataactagccataggttacgccgtgtaaacagtgagcgacattgggctcaagaacgtcggaagcctcacgaacgtcttgggatggaagtacgcagatggctgtgctgtgtcatgtttgttttcggtcaccaaaaattacgcactgttaagctcaaattgcagtgctatgtgatagcctgataggtggtagtattagttttccccatcttt

SEQ ID NO: 86866 - DNA, 867 bp, Oryza sativa
  Clone ID: PAT_MRT4530_85867C.1
cgacccaacgggtcacaacattttcttgaggtcgatcagtagtacccatggccggtggtggaggcgccgtcggagaacactacatgcgggtgatccgcggcgacgacgggtacggcgacgacggcggccagcaccaggagaagccgggggcggccgtgtccgttgcgaagggcgccgcggcggcggcggcggcggggtcgatgctggcgctggcggggctgacggcgacggggacagcgctggcgctgatcgtggcgacgccgctgctggtgctcttcagccccgtgctggtgccggccgccttcgcggcgtcgctgctggcggccgggctcgcgtcctccggcgcgctcggcgccgcggcggtgggcgtgctggcgtggatgtaccggtacctgcagtcgccgtccggcgagcacgcgcccgccggcgccggcaaggtggagcacgcccgcgcgctgctcgacgccaaggcgcacgacgttggggactgggtccagcaccgcctcgaccaggcgcgcacctagaaaaattagctacggattagttcaaatcaactcgcctatagctagctgatgcaatcacacatatgcatatgccttcgtgtttgtgtaatgttccgtgtgtgtacaataattagttgcaaaatgctggattgctggtacggcgacatctgaaaaaaaaaaaaaaaaaaaaaaattaaaaaaaaaaaaaaaaaaaaaaaaaaaaaaaaaaaaaaaaaaaaaaaaaaaaaaaaaaaaaaaaaaaaaaaaaaaaaaaaggggggggggcccccttttttttttttttttttttttttttttttttataaaaaaaaaaaaaaaaattttttttttttttattacccca

SEQ ID NO: 86867 - DNA, 119 bp, Oryza sativa
  Clone ID: PAT_MRT4530_85869C.1
tacactctacgcgagccgatcctactcatcgggctacgtcgacgtcgacgggtaccctcggagcccccctctccgacggacgacgatccggtcccgcgagttgaaggaatccttgataa

SEQ ID NO: 86868 - DNA, 259 bp, Oryza sativa
  Clone ID: PAT_MRT4530_8586C.1
aactaattgaattcatttttttttcttgacaaagtaacaagcaaatccatatttacaatttgtaggcttctaggcacacacctaccaaaaaaatcaacgcctagttcttaacgatccccccggcgtcggcggcgcagcatccaccaggttctggtcaacgaagtttaccagccctaggataacttaccaaatgtcatagaccatcagggacttttggggtgagtggtttacacaaccccgggagggtacgaacaggatc

SEQ ID NO: 86869 - DNA, 899 bp, Oryza sativa
  Clone ID: PAT_MRT4530_85870C.1
gtgcaatctacaaaaagtttactagggttttctttgcttctctcgcatccccttctgaagtgatcggcggcggcggcggcggagcagggcagggggaggtctcgttgcgatggcgggaaggggcgagatgccgatgaggcctgtgcggccagggccgccgatgcagtaccgggggcctcctcccatggctcgcgcgcgcgtcgaacccgtcgatcgcgagaagacgtgccctctcctgctccgggttttcacaaaggttggtggccatcaccaaaatgaagagtttgccgtgagaggaaaggagccgaaagatgaagtgcagatatacacgtggaaggatgccacactccgagagctcactgatcttgtgaaagaggttgctcttgcagcaagaaaaagaaatgcaaggctttcttttgctttcgtgtaccctgataagcatggtcgtttcgttgtcaaagaggtgggttcaaccttctcttatggccatggaaggggagatgatgctaaaactcttgcagagctaggattccagataggggattacttgagtgttgcaatctattgagtgacactgcttcacgaaatagtgtgtttctccctgcctaccatgctgaatccagctttcctgtggcggtacccagctttcctgtggtggtgaatatctctgtagtactagagacgtgataccagaactgtttgttatggtagtaaccttggaattcactcagtatttcgagtgtgttgaacacttaaaacgtttgatgtgattgcgtgttatatacctgttcgtggtttccttggaaaagaaaaatctgaacatcacgcgttttccattgattctctgcgccgagtaggattaaatgtgttctgtgctaaaaaaaaaaaaaaaaaaaaaa

SEQ ID NO: 86870 - DNA, 619 bp, Oryza sativa
  Clone ID: PAT_MRT4530_85871C.1
gagccggccgggaagatgacggcggcggcggcggcttcgcgattcctccccttctcgtcggctccaagcaaaagcgtagctagggttttaggtttttggaggctcggagccatggagaactccgccgagatgcagagattcatcgagcaagagcagcagaaggcaatggtgagcgagatggtcggcaagctcacaagcgtgtgctgggacaagtgcatcaccagcactccaggaagcaagttcagctccggggaaacgacttgcctgaccaactgcgctcagaggttccttgacatgagcgtgatcatcgccaaacggtttgagatgcagtagcatggcagcacctgaagtggactacttatatcaaatgcctctttcttttttcacttagcttcctttgaacatgtgaacaatgacaaatttaacagtgaattgttttatgtaattctgggacaaaagcgcgctgttgtctccagttttttgtcatgtgatgctttgatctctacccggcgacgccccatttatattgcaggcaatctctaggcataatgcttattacttccgcagtgcatgatattgattaatcttttatttgcttaaaaaaaaaaaaaaaaaaaaa

SEQ ID NO: 86871 - DNA, 2586 bp, Oryza sativa
  Clone ID: PAT_MRT4530_85872C.1
aaatggaatttctcataatcaaattgggcctcattatgctcgccaatgaggatcgagcatacaccaaaacagagaaatatcgtatcaagggaaacaatggcagggagtacgaattcccatttagtgaaatattcatctttactatatctccttatcactgcagctaagctagctagtatgtcttaaaaccctactaatatttatttttaaaataccataccctcacactcattttacttttaaccgaacaatataatagtccatcagatgcaatgtttaacccctaactccggctctggctacacattgagataaaatgttttgacctctaactttggctatggcttggcttggtggttagtccgaacccaaatgggaacagcgggttgtaatgcttgtcgccgaaattcatcggcagctggtccaccgatttgaaccaagtacgtggcagcttgccggtgaagccgtgatccccgaacagcacgtcggcgacgccgtggccctccgtgccggggagccaggcggcgacgaacgcgtccatggcgccgatgtacggctccaccacgagcggacgcccggagacgagcaccaccacgcacttgacgagcccgcacacgtccttgatcaccttcggccccggcgacgggatggtcaggttcaggttgtccccctccgtctccgcgtacggctcctcccccaccaccaccaccgcgtagtcgtactccttggcgctctcggcgatcgagctcttgtccgggtgctccgtgtagtcgatcaccgtgctctcgtccaccgccgccttgatcgcctccaggatcgtcgtcccggcggtgacgttgttgccgccctggccttgccaggacacggtccagccgccgcactggaagccgaggttgtgggcgtggctgccggcgacgaggatcttgtcggccttcttggacagcggcagcacgggcttctccccgtgcttgccgttcttgagcaggacgagcgacctgcgcacggcctcgcgcgcgatctgccggtgctccttgtcgccgagctcgccggcgaggcgcgggtccgggagcgggttctcgaagaggcccatggcgaacttgacgcggaggatgcggctcacggcgtcgttgatcctgtccagcttgatcgacccgttcgacacctgcgtcgtcaggtcggcgacgaactccgggtagtcgtacgggatcatcaccatgtcaatgcccgcgtggatcgtctcctggatcgagtggtagtagtgcttgtgcggcggcgtcgtgatcctgtccaccgcttgccagtccgtgatcacaaatcccctgaatttcaacttgttcttgaggatgtcggtgatgaggaagcggttctcatgcatcttgacgccgttccagctggagtaggagatcatgacggaggcgacgcccttgatgacggcgtcgtcgtagggcggcatgtggatgcgcatcaggtcgtggaagctgagcaccgtgttgttctcgttgatgccgtcccgcgtcccgccgtcgccgacgaagtgcttggcgcagccggccacgttcatcccccccgccacgaacggcgtccccttggggtacctcgccggcgcgtcgccctgcagcccgggcaccattgccgacgtcatcagctgcaccagcttcgtgtcctcgctgtagctctcgtagcaccgtccccatctcgggtcgcggcaaacggcgacgcatggggcgaaggtgtaggggatgccggtggcgcgggcctcgtgggcggtggactggccgatccgcttgacgagcttggggtcgcgggtggcgccgaggccgacgttgtgggggaagatggtggcgttgtggacgttgttgtggccgtgcacggcgtcgatgccgtagatgatcgggatgccgaggcgcgtcttgagcgccgccttctgcatcttggccaccatctgctgccactccttcgccgtcgccttctccgacggcacgctcccgccgccgctcagcacgctcccgacgaagtacttctcgataacggcggaggtcgcgttggcgcgctcgatctgcatacatctggccagattttctccgcgagcgtcatccggctaaggaggtcgtcgacgcgctcgccgatcggcttctttgggtccttgtacttcacgtactcctcccccgctgtcgccgccgccaccgccgacaggagaacggcggcgacgaggatacacaccggctccgccggcgaacgccacatagcaagctcccgatgaagtagtccttgaggacctgcggcgacgcgacctgccgctcgatctgcgtcatctggccgatcttctccgcgagcgtcatccgcgccaggaggtcggtgacgcgcgcctccaccggcttggtggcgtccttgtacagcacgtattgggcctcgccgtacgccgcccaggtgagcagcagcacggcggcgaccaccggcgccgcgagcaccgccatcctctgccggcgaaggagcgggagcagccgcctccggaccagaaagccgagttgcaccaaggaagaaggtggctatgctgggtgagaagatggagaagaagaagaagaggag

SEQ ID NO: 86872 - DNA, 301 bp, Oryza sativa
  unsure (1)..(301): unsure at all n locations
  Clone ID: PAT_MRT4530_85873C.1
ttctgagttcctnaantcatcaccaccattacctgttcaaacacctacatgtntaatttttcntcanttcntctttcttttgttctgtncgattaaatgccttgtgttagantgntcttgttggtantagtgatctcttcttccactttttttgancgttttgttactaaaaaaagaggtcatttgtatcctactctacaggtttggaaagcttgcagcctcagcatcatcataaatnaaaagcacagaaaaatagacattgcagcagcatgtgttcttcttcaaaaaaaaaaaaaaaaaa

SEQ ID NO: 86873 - DNA, 517 bp, Oryza sativa
  unsure (1)..(517): unsure at all n locations
  Clone ID: PAT_MRT4530_85874C.1
ggcgagctctggccctggggagcatatagtcagatcatcgcagagtatgtgtgtgtcctgcctcgctgatagatattcngcgctctgctctgctcgccgaggatagagatattatatatatatatatctatatattgcggcngcctcatcggcngcgcatgccgagggatcagagatcgcgatccagagcctcgatnattggatcctccatatcnatgatgccatcatcgccattatgctggttgngattnatcttcnctgcatcatggtgcggatccattccccatcatttgctccatgtctctgcccattctatcccatatgcatatatattgctgtctttctgatagttgactgtcgatgatactgattccctatctgctgatcatnttcatntggttgatggctattgccattcatntccnggcttattatatgatgggatgattcttattagatcatgggttggtcgnctgcctattgatatgattgatctctggccgatccatagccttga

SEQ ID NO: 86874 - DNA, 517 bp, Oryza sativa
  Clone ID: PAT_MRT4530_85875C.1
cccacgcgtccgcccacgcgtccgaaccaaccaaccaaccaaccaaccaaccagccagccttcagaatgtctgcccccaacgccaacaagcctaacgagggtatcgtcggccaggccgtcaactccatctccaacgccgccaactacgtctccgagaccatccagggcacctctgctgaggcttccaaggaggccaacaagcagcaggccaagggcaacgttgccggacaggactccctgaccgaccgtgcctccggtgctctcggtgctgccggcgacaagatcgaccagcacaagcacgagggtgctgcttccgccaacaagcactccatctaagtgtgttcttctcgaatgacttgtggacgtcagcataatacttcaacaaccttacacggtcggagacatcacgatgcggtctactagaacattgctaggatcagattggaaagcagagtgacatttgtccctgctacacgattatgaagctatgagataccaataaatacctttcaccttt

SEQ ID NO: 86875 - DNA, 744 bp, Oryza sativa
  unsure (1)..(744): unsure at all n locations
  Clone ID: PAT_MRT4530_85876C.1
cggacgcgtgggcgccgcggccacccgtccataattggtggacggggaggccctactcggcaaggtacctcgagatcctctagaagcaccgcacgctccccgtgtggcagcagaaggacgatttcctcgccgtcctccgtgacaaccagaccctcatcctcgtcggagaaaccggaagcagcaagaccactcagtacaggggagcggtgctccggtaggcctctcatcgagttgtctgaattcccgggcctccgctcatccgccaccacgcgtgttccatggagcatgagctcctctttagggtttcagtacggagtagagtaagtgtgttccggccactgccgtcattgccttccacgggacagtcagctccagcaagcggatatagatctgcattttcatccgcaacagcgctttatctggaaaattcatggacggtttacaatgtaaatttaatgttgggtggtgtcttatcttgaccaaagtatgtcagattcactggcctgctgctgcgttgtataacttgaaagctatttttcttatagccatgccataagcttagatgcaccttctactccattgcagnctgtgttttgatatatatgggtgcagtgacttntgtgaagcagctcagtttaatagaaccaagtcttataggtaagatgggttgatctcaatcattggttcanattgattgcctacaactctttgaataggagagtatcatatcatgacacacaagat

SEQ ID NO: 86876 - DNA, 530 bp, Oryza sativa
  Clone ID: PAT_MRT4530_85877C.1
agctggcacgcctgcatgtgccggtacgctatagagcggtcgacctacgcgttcggtttgatgctatgagacaaagttatagcacgatatcacactacagatcgcatgattctgctacagaaacatgggctcattctacgctgagagttcataaggcaacaccataacctaggggaatgctccttgtggcaaccagctacgtttgaattgataaacatccagtcatgcagcatcagggctgccaacagctcacgctggctgcgcaacaatctaactaccaggccattacctgctgtcaggcgattgtgcgaacactacagttagcgctagtaagggtcggctactgtgatcagactgatgctaaagctcactctttgctgcactgaaactggacatccatatggggtatctatcctaactactacattggtccgaggagcattgccaccgttgtaggcgtctggctctgaaacgtaatagtataacggatcacatgttgatgataaaggcatgcctcatcatgcgtgaca

SEQ ID NO: 86877 - DNA, 483 bp, Oryza sativa
  unsure (1)..(483): unsure at all n locations
  Clone ID: PAT_MRT4530_85878C.1
gcctttttctgtgggggcggccgatctactactgccggagggctatcgtactgccctgtctcgctttgctggtcaggcttcttgtgcgctcgcgcactcgatgagaggctgctgcaccttggaaactggatgagtcaagtcggcatggctcatcatatgcgggaagcagccagcaacacctgcgactgcgataaatagtgtgcatcaatactgccagttgttgtctgggctgtttctgaaaaggagcacattccgacatctgacgcttatcatgacacgaatggcgatgaacctcatggaggacatgcctctggaaaggaaaacacggtggcngcagacccgtgtgtttcagatgagagagcacctacccactcgaatgctgcatgtggccatggggtgatcttgactagagcggaagctgctgctgcatacgacaagggtcgcatgcatactatggaagatgcaggctgctgctcctgatgc

SEQ ID NO: 86878 - DNA, 1074 bp, Oryza sativa
  Clone ID: PAT_MRT4530_85879C.1
atggccaccaccctcgccttcaccgtgaagaggtcggcgccggagctcgtcgcgccgtcgagggcgacgccgcgggagctccggccgctgtccgacatcgacgaccaggacggcctccggttctaccggtcgggcctccacttcttccggggccgcggcggcggcggcgccgaccccgccgcggtggtcaggagagggctcgccgacgcgctcgtgcactactaccccgtcgccggaaggatcagtgaggtggaggcgccggcgcggaagctggtggtggattgcaccggcgacggcgtggtgttcgtcgaggcggacgccgacgtctccctctccgacttcggcgacgtgctctgcccgccgttcccgtgctaccaggagctcctgtgcgagcccgacggcaactgcgccgccgtcgtcggccgcccgctcctcttcattcaggtgacgcgactcaggtgcggtggcttcgtgttcggcctgcagatatgccacaacatcgccgacgcggctggcacggtgcaactcctgcgagcgatcggcgagatgtcgcggggcatgcccgcgccgaccgtgccgccggtgtgggcgagggagctgctcatggcgcggtcgccaccggtggtcacgcaccggcacccggagtacgacgagacggcggccggcggcaaccacgacgtgcttgcccaccatgagccgctcgtgcagcgcgcgttcttcttcgggccgaaggagatgtccgcattgcgagagctcgccgccccagccggcgccgccgccggcaagaggatctcccgcttcgacatgctcgccgctttcctctggcagcgacaaaaagcggcgctggagtacgacgacgacgacgaggtgcgcgtcatgatcgtggtgaacgcgcgcgggcgcagcccaccgctgcccgcggggttctacggcaacgcgttcgccttcgcggtggcggcgtgcacggcggggcgcctccgtgacagcccgctcgccgacgtggtgggcatggtcgccggcgcgaaggccagggccgacgtcggaggggaacctgcagtcggtggccgaccctga

SEQ ID NO: 86879 - DNA, 648 bp, Oryza sativa
  unsure (1)..(648): unsure at all n locations
  Clone ID: PAT_MRT4530_8587C.1
nnncgaggccggccgggaaaaaaagaacctccccatccttcaaccgaagcctcacaacgcccgtcgcagacgtccaccaccgactcctagccgtgttccagacgcccaattgcgcaattcagtcaaaatggccttcgccaacaccctctacaggagcctgttctccaccaactacctgatgctcgcgaccgttttctctgccggcttcgcttgggagattggcttcaacaacgtcatggacaaggtctgggataaccacaaccgaggccgacaatggaaggacattcgacacaagttcatcgagggtggcgatgaggacgaggaataaagaggttgaccgggaaattgattatcgagcaacaaacgaggcgagggactgaatccatgtcactagccgtgtacaaattagaagagaattagaggcaggatttcacacacaaggcttccctatatcctttggctcgaggtccatacagtttgatgcttgtgttggcgctcgcctactgcgtttgcattgccgaattacattgcatgttgactgaatcgccgggttggcccgtttgccttagtgcataccaggtagtaggtatcatgaattgcatttactaggttatcttgctccaaaaaaaaaaaaaaaaacccgcggcc

SEQ ID NO: 86880 - DNA, 429 bp, Oryza sativa
  Clone ID: PAT_MRT4530_85880C.1
ctctccgcccaaaaatttccccaccggggatccctttcatggcaggacttcctttttgaatggcctgcgacgccaagcccgactccccggccgccggcgtgaacccccccgccttccacggtggacgcgaaggccgagaacgtgggggagggggaggagcctcagacgggtgggcggaagcgcgggcggaggaagaagggggaggccgagaaggaaaaggagaagcccgcccacgtcacctccaccaatgagaggccctccaaggagaggaagaccgtcgagcgctactccgagctcctcccccgtgacacccccgacaagacgtcccccgccattctccagggctctggatcgaagctgaaggacattcccaacagtcaaaccaaactatcaaaaggaaaggcagacgacaacctgccaagccttcat

SEQ ID NO: 86881 - DNA, 270 bp, Oryza sativa
  Clone ID: PAT_MRT4530_85881C.1
atggcgcgacttctgctgcttcaattatatgctggagaggagcaggagaaggagtactatttacggcagggggtgcaagtctactcaccttcctctttcccattcacctcatggaacggcttcaactcgtggttgttggatctagtggctttgcccgtcaaggttggttcgagcgacggggacgagaagtgtgagcaacgaacagtagccagagaggtcaaagaagtggcaagcggtggggctaaaggaccagaatgggtgggggagtag

SEQ ID NO: 86882 - DNA, 983 bp, Oryza sativa
  unsure (1)..(983): unsure at all n locations
  Clone ID: PAT_MRT4530_85882C.1
ccgcggggcttcggccccaagcttcggcttcgcttgaagccaccgcaatctccccaacttccgaacaaaaaaaaaaaacaaaacaaaaaaatcatcacttacagcgacgctccaccgcctctcctccgctttgaatcccctcgccgcgaacggttcgggcggcggcgggggctagggtttcgcgtttcgaggttttccttctagaagcttccgcgggcggatggccaccgacgagctccactccgccggcgcgccagcgggcgtggcggcggcggaggagggggagggggaggcggcccacgggttctcgttcagcatctggccgccgacgcagcggacgcgggacgcggtggtgcggcggctggtggacaccctgggcggggacaccatcctctgcaagcgctactgcgcggtgccggccgccgacgccgagccggccgcgcggggcatcgaggccgaggccttcgacgccgcggcggccagcggcgaggccgcggcgacggcgtccgtggaggagggcatcaaggcgctgcagctctactccaaggaggtcagccgccgcctcctcganttggtcaagtcccgttccgccgccgccgccgccgccgccgccgcggcgccgcccgagggagaagcccccgctgctccttccgagagcgaggtggtggatccgcagcccgcggaatgagcggctctcagttcgttacaatctcattgcctgagaagatgacttgcatctaagagttcgtttggagaaatgtggctttggtctgggaaccgatgtaggtttcttgctctgattatccgtgcagtttgttctttgatgagtagctcctggctctctttgttcttagtattttacctgtttgcttcccagttgtactatctcgtagcaagattatgttccgtttattatgataatgatcaagatttgaaccaaaaaaaaaaaaaaaaaaaaaaaaaaaaaaaaaaaaaaaaaaaaa

SEQ ID NO: 86883 - DNA, 138 bp, Oryza sativa
  Clone ID: PAT_MRT4530_85883C.1
ggcatatgcaccgccgaaccatcatgctgttggggttctaccaaagacagcttgtcatgtacatcggccttcgtctttaccattcttggcatgaactgcggcgcagctatctaccattcgcggcgtgacccatgctca

SEQ ID NO: 86884 - DNA, 805 bp, Oryza sativa
  Clone ID: PAT_MRT4530_85884C.1
ccatatcctgaatattccacgcatgcattcatgtttgcatacataagatgcacatatatactaaacagtacatgacacctagtacatgatttcttgtgctaataacatactacacacaactacatgttcatgatttaattttgtggcagctagctggctagctaatctatatatgatgcatgcttacggcacatttatattaatacgaggattgaaaaagagctctcaatgggatggagccaaatcaaacaagcaagctagctagctagagagctcatgtgaagagctagtcatgaactctagctatagctatagcttagctagagctagctctcgtcgtcgtcgtcgtcgtcggagcccttggatgccgcggcgtcggagagcatcttctggatccgctgcatcgtctccgcctcgatgttgcgctccgccctgtccttgttgtaggtctcgaagaactccttgttctccttctccagctccttccatactgtggaagtgacgacagggttgatgttggcatgcttctccagggcctccatgcactcctccttgttcaggttgaagcaaatgcacttctctatcaggtggtgaaccattctgatgtacgaagctgaggatgatgagtctcccatggcgcctagcttgagagagacagagatcaccactaattaagctccagctagcttagctaatggcagagtagtactggactactggatcagcaagctccaggagacaggagccgctgctgattcagctcactgttagctagctagctaggtagctcactgcttacttatct

SEQ ID NO: 86885 - DNA, 399 bp, Oryza sativa
  Clone ID: PAT_MRT4530_85885C.1
cggacgcgtgggcagtgagctacctagctagctagctaacagtgagctgaatcagcagcggctcctgtctcctggagcttgctgatccagtagtccagtactactctgccattagctaagctagctggagcttaattagtggtgatctctgtctctctcaagctaggcgccatgggagactcatcatcctcagcttcgtacatcagaatggtatatatacttatatgctagtatgagtttcttctgggttgtgtgtgttagctgggtgtgcatcaaatgagaggtgtttacaattaagctgccattgttaattaattactgcaggttcaccacctgataaagaagtgcatttgcttcaacctgaacaaggaggagtgcatggaggccctggagaagcat

SEQ ID NO: 86886 - DNA, 209 bp, Oryza sativa
  unsure (1)..(209): unsure at all n locations
  Clone ID: PAT_MRT4530_85886C.1
attaatcaggcattctcacacctctgagttgcaacgntcgcttagatttagcaaccaaaattgcagtagttaattgttgttgccacactcaagctagctaggtgtactagcagctgcttgctgttcgtggtgcgtacgtgtcatgacgnaggacggatcagtgatggagcacggggagatcagctcgaaggngcccctggtggcgccgg

SEQ ID NO: 86887 - DNA, 1276 bp, Oryza sativa
  Clone ID: PAT_MRT4530_85887C.1
caaacaaacagtcctttagtttctacaatctgacaagttacaaccaaaacaaaatctagaggtacaagagaactgagaaactaaaaagcaagggtacaacattagctaagtaatcatacaatatccatagactaaattaaggtagctcaaataattatgtcttcctacataatagaccaacaattgcttggcagtaccccaagcatttccttcaggactacatttggtaactaccaggccagtacctctccaccagctgctctacatccaaattctggtatctgatgccagtgcctccaacaacaacatccgtggtaaaacctccatctgttccctgtgggatgacaccattggctagtcctggaatcatttgctctgttaccataacctggtttgtagtacttcttggttggttcatcggcatcgacatcgcttggaggatggattgtggtggcggtggtggtggtggaggcatggctggcgaggatccaaggttgaggttaaggcctgatagtgtaaaaggcgcagccgggttgatgtaaccggggtgtggttggatgtgtgggtgcaaccccggcgtacctctagcaaaccgggagagttccgccatgtcaacggggttcatgtaagggtggtgtccacgaccaaatgggtcttgttgcaatagagctgggaggagaggtgggaccatgtctagtgtgtatgggtggtgggatcgggaatgagcattgttggaggggtatttcttgacgccggcagtcttggcaaatatgcgacagacgacccactcatccttgtttgatttggggattgatttggagtggagtcggtactcatgcatgacccaattggttttctcacctcttggagcccttcctttgtagaacactagggttttcttcattccaactaactccggtgttgctggtggttgtccagtgaagatttccttatcctttcccgttgttttccaataaccagcattagttgctcggtttgtgcgcacgccagttgggtactttcgatcccttaggctaaagaagtaccattccttctctcccatttttgccttctctgggagatcccatggctcgcacttgttgagatcgacctcggcgatggccctcgccgtgaagccgccgtcggcgatcttctgccgcaggtagtaggtgatgagctcctcgtccgtcgggtggaacctgaaccccggcggcaagctctcctctttctttttcgccgaccctcctcctcccgatccttccattcccatagccat

SEQ ID NO: 86888 - DNA, 372 bp, Oryza sativa
  Clone ID: PAT_MRT4530_85888C.1
ttggttttttaactgggggggattaaaaaacattcttaatttgggtgactacacatatacttggctaaacaaagctaaatatatctttatcattgggaagaagttcacgcaagctgcaggacttaacctgcaactacattggtaacactggatacccagtcgaatcaaaacgatgacaaatgctgggtggttcgatgccgatcaccgtagcaaacctgcacggtattgggccgattatgaagaatggattctagcgttcagagttttacgcctggcctgagccacctgcgcgcttcagtaccttgtaaaccgatgagaaattcaggtcgcctaatcccaagcttgttgctttcttgaacgccttggtggaag

SEQ ID NO: 86889 - DNA, 2247 bp, Oryza sativa
  Clone ID: PAT_MRT4530_85889C.1
atgctgccgtcgagggggaggccgtgggggaaggcggccggctgccggatccgtgcggggacggccgccgcccaccagatcccgcgcctccaccgctggaggggctcgccgtgcaccggagagcgtgcaaggccaagtcaggtttcacacccatgggtgagcggcggtgggggaggttatattcaccctcgggtgacccagcggggccccaggctattagcgcgcgatgctgcaaccaccctccgtctctccttctccttcgagtcgtcggcttgccctgcctatcaaagcatgacgccgcaaccacccttcgtcccttcccctcatcggagctgcggggcccactcaactgtcgggtcctctacaggggcgggggtggctcaggttattcacccggtggccaatgtgaggccgggagcggggagaaatgtgggggcgttcctgcccaacctggccccgccccaccccgctgccactcctaattgccattggaatattgttcttctcctcctcgcctgcctgctgcttgatgctcctcatcttagtagtgctgcagccacagttccaacaccacccttctccttcaacttcgacttctccaacatgtccacatacaagccggatgacttgagatttgagggcaacgcgactgtgcacggcagcttcgtcgacctcacctgcaacgcatatgggctggacatctctcagtgcacggctgggcggatgtcgtacaatcacccggtgcccttctacgaccaaaccaccaaggaggttgccagcttctccacacagttcaccttcaagattattgtaccaagatttaacaacgacaaggagaagggagatggtatggctttcttccttgcacgttacccatcaagaatgcctccagattcaggcggcggcagccttggtctcatcaccaacaacaactatagtagctttggcccggaccagttcgtatccgtcgagtttgacacgtacaacaacacctgggagcagcctaagcagactggtgaccatatgggcatcaacatcaacacagtcactttttcgactaacacaacaagtgtatccagcttcagcccgaatgagagcatgatgaaggcgtccatcacctttgacagcaagacctcgatgctggtcgcctctctgcagtataccgccaccggggcagccttcgagctccatcaaatacactcatggtctttcaactcaactattgctgccccgcaattgacaccgatctgccgtaacatcgatgcagatcacaagaaagccattgccgtaggggtctcaattggaggaggtctcatattggtgctcctggtgtggtctattctctcatggtggaagtggagaaaaacaaaccgtgaatttgacaagggaactcgtggggcttgtcggttcaactaccaccgcttggctgctgcaacaaaccatttttcaatggataataggattggagcaggaaacaaggacttttttgacgaagtccagaccatcagtagagcaaagcagaagaatcttgttgaacttcttggttggggaatgaagggcagctcgatcattgatttcgtcatgtgctggcgtaggcagaagaacaccgaccttttcctggtatatgaatttgtggataacggcaacctacatatgcacctgtatgagaaggaggccctgctgtcatggagaataaggaagacgggaaagttcaaccgtagctcagatgtcttcagcttcgggctcgttctgctagagattgcttgcaagaaagacgagaatagctatgcacaagtctgggaaaggtacatcgacaaaactctgatgcaggctgctgacgataggttacaaggtgcgttcgataagaggcagatggagcgtgtgatcgtcttggggctgtgggagaagctgggagaaagtgtcatggagggcggagcctcgcgcgagtggcttcgcgcaggcatcggcgatgcccccaccgtccatcgctcccgtgctagaggaggaggaggaggagaaggaggggaggtgcggcggaggagaagagaagaggacatccggcgtcgattcggagctggcgagctcaatctgccgacggcgccgtcgctgctagggccgcccgacgttgttatcaccgctcgcgcctcgcgccgccctcgatccgccaccgcgtcgtcgcctttagggctgcctggtgccgctcgggctgtcctggcacttgcaccgcccttgatccgtgttatctag

SEQ ID NO: 86890 - DNA, 4205 bp, Oryza sativa
  Clone ID: PAT_MRT4530_8588C.1
atggcctccttcccctcccctccgctcgccgcggcggcggccgcagcgccgccccgcctcgacccgggcctgcctcgggctgatgccgccgttcgcaggccgtgggagggcaacagaagattctgaatctaagggatctgttattgttggtgttcgtactttgagtgaaggtggctgtgttggcaacttttgaagaggaagagggtgaacttttctgtgtgaataatctcataaactgctcattagaatccaatgaggagttcatttttatggagttcagatttgctttaagagacaatggcatgcgcgctgctttccaactcctccatatggtccttgagcataatgtgtggctagaagatgcatttgatagagcaactcagctatacctgtcttactatcgctccattcccaaaagtttggagcgctctacagcccacaagcttatgttagccatgttgaaccatgatgaaaggtttgtagagccatcaccacattcattgcagaaattgactctccaatcagtcaaagatgctgttatgaaccagtttgttggtgacaacatggaggtcagtattgttggtgatttcactgaagaagaggtcgaatcttgtgttcttgactatcttgggagtttatgtgctccaaaatgttcagaaacaaaggagcatattgagaacatttcctttctgccatttccctcggccttgcattttcaacaggtatacataaagggtaacaatgagagggtctaatgcatatacgcagttccaccataccgtggtccatatacattctccaactaaaacaaaggaatatggtgaagacttgctcccttctgtgttggatgcattgaatgagttattgcaacatttgcactcagaaaacaaactgagcgaaagattccctattggacttgaagagcagatacataaatgggatcctgataagatccgcagatttcatgagcgttggtattaccctgctaatgctactttatatctggtaggagagatcgatgatattcccagagcaatacgagaaatagaggctgtgtttgaacatacacttccagaaggtgaagcagcccctatgtcaactgcaagtccatttggtgctatggcaagcctttttgcaccaaagctacctggtggcttggctgcaagcctaactggtgaaagatcacctgctgcggataaaataaagcctgtgaaaagggaaagacaggcaattaggccacctgtagaacataagtggtctcttcctggagttgcccaggatgccaagcctccagcaatttttcaacatgaattgatccagagtttctcaatcaacatgttctgtaagatacctgttaaccaagttcagacatataaagacctgcgaagtgtcctgatgaagcggatatttttatctgctctgcattttcgaatcaatacaagatataagagctcaaatcctccttttacatccgtcgagctggatcatagtgactctggaagggaaggttgcactgtcactactcttacagtaacagctgaaccccagaattggaggagtgccatcaaagttgccgttcatgaggttaggagactcaaagagtttggtgtcacaatgggggaaatgacccgctacatggatgcactgataaaagatagcgagcaactggctatgatgattgatagtgttccctcagttgacaacttggacttcattatggagagtgatgcacttcgccatactgttatggatcaattgcaggggcatgaaagtttgcttgctgttgctgaaaccgtcacccttgaggaggtcaacactgttggtgcagaagttctggaatttatttcagattatggaaagcctgatgcaccgcttcctgctgctattgtggcctgtgtacccaaaaaggtccacatggatggagtaggtgaaactgattttgagatacatccggaagaaataactgattccatcaaggcgggtcttgaggaacctatttacccagagcctgagctcgaggtgccaaaagaactgattactcggtctgagcttgaggacttgaaattgcaacgcaaaccatcatttgcttctctgagtaaagaggagaatgttgtgaaaatatttgacgatgaaactggtatagcacagcgccgcctttctaatggaatttccatcaattataagatcacacaaaatgaggcaagggttggtgttatgcgactgatagtaggtggtgggagggcaacagaagattctgaatctaagggatctgttattgttggtgttcgtactttgagtgaaggtggctgtgttggcaacttttcaagggaacaggttgaacttttctgtgtgaataatctcataaactgctcattagaatccaatgaggagttcatttttatggagttcagatttgctttaagagacaatggcatgcgcgctgctttccaactcctccatatggtccttgaggagaactccgttttccctaatgcaaatatctcatgcttacaaatttttgtctccattttacagcataatgtgtggctagaagatgcatttgatagagcaactcagctatacctgtcttactatcgctccattcccaaaagtttggagcgctctacagcccacaagcttatgttagccatgttgaaccatgatgaaaggtttgtagagccatcaccacattcattgcagaaattgactctccaatcagtcaaagatgctgttatgaaccagtttgttggtgacaacatggaggtcagtattgttggtgatttcactgaagaagaggtcgaatcttgtgttcttgactatcttgggactgtatacataaaggatactgatgagagagcttgtgcctacattgctggccctgcacctaatcgctgggggtttgcaactgaagggaatgatctattcaatgtcatccggagttctagtggagatgctcaagtttctgaatcagcaaacacagatcttacggagaggaaacataatgacgttcgcagccattctctgttctttggcatcactttgagtttgttggctgaaattattaattctaggctattcacaacagttcgagattccatgggattaacctacgatgtttcttttgaactaaacctttttgacaaattggaccttggttggtatgtgattgcagtaacatcaaccccgagcaaggttcataaagctgttgatgcatgcaaaggtgttctcagaggattacatagtaacaaaattgttgaaagggagctggaccgggcaaagaggacgttattgatgaaacatgaggctgagacaaagacaaatgcctattggcttggtttactagcccatctgcagtcttcatctgtgcctagaaaggaaatatcctgcatcaaggaattgacgatgttgtatgaaagtgccacgattgaggacttgtatcttgcatatgagcacctaaaagttgatgaatcttctttgtttgcttgcattgggattgctggtgctgaatctggcgaagagacgactgatgatgagctcgatatgggcctgcatggcatgggtcctattggaggccgtggtctatcaacaatgaccagaccaaccacatgatttctgcaacttccgatgactgaacttttgtaaagggatcgagctagctcctcaagctaggagttgtatgatcctgttcgagacaaatgttgacagttgtgcgttggcacatactgttttagactcctcgtgcgttgagatcggatcaaatcgctatttcttgtgcattgcaaccgaaggcttggctgccacaattctttttgtgatattgcgttgattgatggcgaggtcctgaaaggtcaggcagcttcacatgtatagtaaagaactaaaaaggttcatcgttgttgtaactaggatacatcaggtcattgaaaaggtaggggccagtagaatctcagataaattgctgtgcgacggctatagcgtaggggtcttataacgcaataatgcaagcccacaagttgtaacattctagtattatttttctcgaaaatgtatatttgagctatttatatttattaggtttcacaattttgtgatgattctactatcctatctaattgcctcatattttttactgccgcttatcgtgtactactagtacataaaaaaaaaaaaaaaaaaaaactcgagactagttcctcgtgccgaat

SEQ ID NO: 86891 - DNA, 186 bp, Oryza sativa
  Clone ID: PAT_MRT4530_85890C.1
atgtgctacgagacggggaggcctagctttgacctccaggagatgctatgcatctgggacatgccggcgttcacggcggacgccggctaccttgccgatggcctcctcgacgtgcccttcgcacgcgagctggagctcgccacgaagctcttgctcctccgcttcgtcatgccgccgttcatctga

SEQ ID NO: 86892 - DNA, 150 bp, Oryza sativa
  Clone ID: PAT_MRT4530_85891C.1
aagctgatgaacgttgcttaattatagagcgggacagactgacatcgcgttgtgtatagcattccaccacttatagctatactgaaccatggtcagagtaatgggagtccaatggtttgactccgctgcctcgatggtatgtttgacgat

SEQ ID NO: 86893 - DNA, 255 bp, Oryza sativa
  Clone ID: PAT_MRT4530_85892C.1
atgacggcaaggacctgcaccgctcctcctccctcctccctctcccaactcagggctcatagtgtgccaaggcgcacggactggaagcgaacaggcaagcgtgccacctatgggctcagtgcagcacgcgaagaggctgggtcagtgatgctccgtttcggcctccaccacgcctccacggatgggctggcgagctctcgctcactggctacctctcctattccatcactcagatccaccgagggcccatcctaa

SEQ ID NO: 86894 - DNA, 4269 bp, Oryza sativa
  Clone ID: PAT_MRT4530_85893C.1
atggaggagatgaacgaggtgcgtactgagttggctgggatgaagaaagacttattagatctgaagaatcttaaatcagaagtgagggaggtcaagaagttgctacaagaactttgcaagcagaaagggggagaaactggaaatactgaggcaggaggaggagctacgggtggaatctctgaaactggagtgaatgccatagaagctgctggtactagtgagttaaggggtccagatggaggcatgcccagcaccgctcttccaacctctgccgtgtttgagcatagacatgagatgttttacgagcaaaatcaagggaatcctagagtaaggatgtttgatgagcagagaaatttctatgtgggacaccagggtgatggaggtcactatgctgaagcagtactcaagggccctaggttggaaatacctctgttcaatggtgatgatcctatcgattggcttaagcaatgtgagaaatttttcgagctgactggaacaccgatggatcaatgggtcaatatgtctttagctcatttccaaggaagggctgctaagtggttcaggggagtggggctaccttggcagatcatctcatggccacagtggtgtgccatgattagtactagattttcagcagccaatgttcatgaggcagtggaattatttcagaatgtcaagcagtatgggatgactgttgagcagtatattgataagtttgaggaatatgttgatttagtgagaagagatcacccttatttacaagagcaatacattaccagttgttttattgggggactcagaagtgacattaaacatgatgtttgtgggcaaaaaccacagggcttactagagtcatattggtatgctaagacatatgagaaagctgcaaatgcaaagaggaattcctttagcattaacagaaacagaaaccagaactttaatatggggaatcagggaaggaaccaggctggcaaggctccgcaaagaaatgaaggcgaaaagaaagaagaaaagaaatgttggttctgtaaagaaccatggttccctagacaccagtgtaaggtaaaacaggcattgcatgctcttttactggaggatgaagaggtagaagaaaacactgaagagaaaaatggggaagtagaccttactgaggaaaatgatgacatggcagacactgaagaaaaggggaaagaagaggagctaatgtttgtgtcactgaatgctttacagggtacatcaagacctgataccttcttggtgattatactgataaatgggaggaaagcagttggtctgattgacagtggcagcactagcactttcatggaccaggagtttgctatcaagagccaatgcccacttaaaaattctgaggtaaaaaaggtagtagtagctagaggaggagagttaaggtctgaagtgcaggttcctgagattcaatatgtgattcagggagagcaattttcaaatcctttcaatttgatcccactgaaaggatatgatattatccttggggcagactggatttttcagtatagtgctataactctttatttgaagaagagaatcctggaaattacaactggtgggaagaagttgatattacaagacttcactaaacctgggaaacatgtgttcatcagtaacaagaaaatggagagagtagtgaaaaagggggcagtgggctgtgtatttcaagtctgtgaagtaacagaagaaaagaaggagcaacaaattcctattgacatctctaatatactgaagaaattccctgcagtaatgaaagaaccacagggtgaaagcccttatgcatcaccagctgtaatggtaaggaagaatgatggttcctggaggttgtgtgtagactacagagagcttaattctcaaactgtcaaaaacaaatttccaatgcctattattgaggacctatttgatgaattgcatggagctaggatcttctctaaattggacttgaagtctggttattatcagataaggatggctgaaaaggatgttcacaaaactgcttttaggacacatacggggcattatgaatatcaggtgatgccttttggattaacaaacgctccggctacctttcagtctctaatgaatcaggtgctcaaacctttcctgaggaaatttgtgctagtcttctttgatgacattctcatctacagtcagaacagagaagaacacttggagcatctgaggttagtgttgcaggctttggagaagcataacttggttatcagacttaagaagtgtgactttggtttgactaagatatcttatttggggcatattatttcacaacaaggtgtagccacagatcctagcaagatagagaagatactagggtggccaactccacaagatgtgactcaactcacgaaattccttgggatgacagggtactacagaagattcattaagaattatggactaatctgtagaccaatgcatgatatgctcaagaaggggagtttccaatggggaccagagcaaacagcagcatttaacaccttgaaggagaaaatgtgttccagccctgtgtttgctatgcctgattttgacaaagagtttgtcattgaggcagatgcatgtggatcaggaattagggccgtgttaatgcaatctggtaggccaatagccttctttagcaaagcatttagaccaaaagctaacagccaatctgtctatgaaaaggaagcaattgccattctggaagcacttaagaaatggaggcattacttccttgggggaagttgtataattgggacaatggttgatccaaatcaagaatataagctggaatctgggttgttgaaatataaaggaaggatttatgtgggagaagccacagaaattaggggagaattgctgagggcctaccactcttcttcttttgggggtcactcaggaatgagggcaacttatcatagaatcaaaacactattttactggtctgggttaaagagaagtgtagataagttcataagggaatgtcccatatgccaggttacaaagggggaacacatacatgtgcctggtttactagatcctttagcaattcctgacatggcatggtcccatattacaatggatttcatagaagggcttccggtatcaagagggaaggatgtaattctggttatggtagatagattgactaagtatgctcatttcttagctctatctcacccatatactgttgagcaagtggtgtgggaatgtcccatatgccaggttacaaagggggaacacatacatgtgcctggtttactagatcctttagcaattcctgacatggcatggtcccatattacaatggatttcatagaaaggcttccgatatcaagagggaaggatgtaattctggttgtggtagatagattgactaagtatgctcatttcttagctctatctcacccatatactgttgagcaagtggtggaagtgttcatgaataacatacacaaattgcatggcatgccgacggctataatcactgatagggacagaatttttacaagcaacctttaccaggaaatttttaaggcaaaaggggtgcatttgcggtttagcactgcataccatccacagaccgatggacaaacagagagagttaatcagtgtttggagtcctatctgaggaacatgacattccaagagcctagaaactggtattcttggttaccacttgctgaattgtggtacaataccacctatcatactgcgattcagatgacacccttcaaggccctaggccagagtcactttgggagggaagccatcattcaaaagttgaaagacagtttggatgttgcacagaaaagaatgaagcattttgctgacaggaacaggatggaaaggaccttagaagtgggagatatggtataccttaaattacaaccatatagacaagctgctttggggatcagagaatctttgaaattgagatcaaagtactatggaccttccaaggtgattcagaaaatagggagagttgcatataagctgcaattgccggctgaagctctcatccaccctgtgtttcatgttagccagctgaagaaacatctgggatcacatgcagtgccaatggccaacttacctgctgcaggccctgagggacagatcaagacggagccagtagcaatcatgcggagaaggatgatcccaaggagaggagttgcagttactcaatggctagtgttttggaagaatctaagtccggcagacgcaacttggaagatgctacggtga

SEQ ID NO: 86895 - DNA, 2489 bp, Oryza sativa
  Clone ID: PAT_MRT4530_85894C.1
gcacggcggccggggctagtctccagttttttttttttttttttttcagtaaagtaatatatgtaatccattaattggttgtaaagatcattgcaaggagtatagttgcatgaatcttgtatatatggtatctatgtggcctacaaacatgtaacacagctgatatcgctgtgaaagaatatgtatctgcagcctagaatactacccaaagcttctctgtccaatgaggaatccagataataatttggcaacttataatcattgcaaaattgagtaatcctatatctgagtctgctcttgcaaagcaaagcagctccaaaaaattgcaggatgcttgagtaacctccactgcattatcggtttttcttcgaaactttcgggttcttgcacatgcggatgcttgcaggagtaacctccactagctcatcttcttgaataaactctatgcagtcgtccagactgtagcttaacgcttcatcgagaaccactgtagtttccttgttggagcggacatttgttgcagcctttttcttgcacacattaattgctaaatcacctggtcgctgatggataccaactatttggcccttgtaaacatcctgtcctggactcacaaatagtatacctctttcttgagcattaagaagtgcatacgatgtagtacttccatcctcaaatgcaaccaaggagccttgatcacgtgaactaagatctccagcccatgggccatagctgtcaaaaattgtgttgagtattgctgtgcccctagatgctgtcaaaactgcattcctgagtccaatgaggcctctagtaggaatcttgtattttagtaatgttgttccctctggcccactaggttgcatgtcaaccatttgtccacgccttttccccaaaagctcaacaactgaacccatatattcctctggaacttccacagcagctatctcataaggctcttgcagctttccatcaactgtcttgttaatgacctttggaggtccaatcataaactcaaatccttctctccgcatgttttctatcaatatagtgaggtgcagtgtgcctctgccactaacaagaaatgtatcagcagtttccccgtcttctactttcatagctaagttcctttcaagctcacgatataacctatcacggagattacggcttgtgacatatttcccctctttaccgacaaaaggtgaagtgttgatggaaaaagacattctgactgtcggttcctctattttgatggtgggcaagggtgttccagaaactttatctgctatggtttccccaatcatgatatcattgattccacatactgcacaaatgtcaccagcactaacattatcaactggaactcggctgaagttctgataaacgaaaagctcacttattttgctaattctacaagcatcatctggtgtacaaaccttcacttccatgcctcgctgcagttctcctgcatgcagtcgcccaatcgctatccgtcctttatgttcatcatattcagtattagacacaagcaattgcagtgcaccgtctttctcaatacgtggctctggtatgcatctaaggattgcctcaaaaaggggtccaagatcgtcacccaaattttctggagataacccagccttccctttaataccacttgcatagactgtttgaaaatcacactgttcatcagttgcatttaattcgataaatagctcaaatgttgaattcaccacaaactcaggacgagcagtaggtctgtcaatcttgtttacaaccactacaacagcatgtccgaattctagagctttcttcagaacaaatcttgtctgtggcataggtccctctacagaatcaaccactaggagaactccttccaccatgttgagaacgcgttccacctccccaccgaaatctgaatgtccaggagtatcgatgatgttgattttagtacccttataagttatcgaagtgtttttgctaagtatagtgattcccctttcccggacccgtgcgcttacgtccgggattctttcctgtacaacttgattgtctcggaaaaccttggcttgccttaacattgaatccaccagagttgtctttccatgatcgacatgagcaacaattgctatattcctcacatctcttctagttgcttgaccactcttcccagcggcgggggaggcgcgctccttgacctcctggtcgagggaggcggaggccctgagggaggagcgcgcgctcctcctccgggacctccccgccgcgacgacggagacgctcgaggggcggcaccggttggcctgcggctgcggcttcggcgcgaggcggcccgcggcggtggtggtggtggccgcctgcatctgcatggctgcggaggcggaggcggaggtgggggtgggagggtgtgccccggcgagtgggtgaggggtgggggtggaggtgagtttgtagggcgggggtgtggcggtgggggcttgggggataacggccat

SEQ ID NO: 86896 - DNA, 136 bp, Oryza sativa
  Clone ID: PAT_MRT4530_85895C.1
atggggctgatgatgcatattggaggcccagccaactactgggctcatcatggatttggggaaagcccacctaaatggcatatgccctacgtgggtttacgggtggagaaagttcaaatttggttcctcattatag

SEQ ID NO: 86897 - DNA, 304 bp, Oryza sativa
  Clone ID: PAT_MRT4530_85896C.1
aacattaaacttccattttttattccaactggcctcccatttttaaggcagggccccatttaaggaatccgaaaaaaatttggagtcgttgacaaccatgggaatgcctgaaaacatatttgggagcaaagtaagacaggcaagctccctgatattatatcgggttcaaaattttggggcttccaaactaaaatattttttaaacactggttgatctacctataatttccctttgaattaaggggccgggctaaaatcaacagggcccatttttttataaaggctttgccccccccccttgaaa

SEQ ID NO: 86898 - DNA, 414 bp, Oryza sativa
  Clone ID: PAT_MRT4530_85897C.1
ctaccttccttcactcctcatagtgttaacaaccaaatttcgtaatccaagtatcggagatggagataaaaccgaagcggaatctaagatagaaatcgttccggaaatagagcaaggatcggctaaaatccgaatcggccgcgaccgagatcggcagagttcgagtcggacaaggttagttgattgagctgattccgacaatatgactcgtttaggcaaaagtctgccgcaaagacttatggtatcttaaagtttgttagagataagagtcgtgtccgacatggacatattttgatcaaatcaactggcacactcacgaacctaaaggcaagatttttggacctgcactgaagttaagcagatcttctaggcttcgtgttttcgcatcaacagatagagattaagctatcacgt

SEQ ID NO: 86899 - DNA, 243 bp, Oryza sativa
  Clone ID: PAT_MRT4530_85898C.1
atggtcaagctcagggcatgctccgtgctcaagctctgcttcgtgcttggggaacctctgtgttcggggcctgctcttcgcatgcgtcctgagcacggggcgcaactagccaaaccatgggggccaggtccttggctccactcgcggttgatactgttgagcgatcttggaggcccttggtgccctgagcaactggaggtggggactcgggtttccactttttcatcattggtgttattgtag

SEQ ID NO: 86900 - DNA, 223 bp, Oryza sativa
  Clone ID: PAT_MRT4530_85899C.1
ctttctggttttccccgcagcgaaaaatactactagaatgttacaacttgcgggcttggattattgcgttataagacccctacgctatagccgaggcacagcaacttatctgatattctactggcccctaccttcacaatgacctgatgatatcctagtttacaacaacgcatgaagcctttttagtgtcttttactatacaatgtgaaagcctgcactgacc

SEQ ID NO: 86901 - DNA, 343 bp, Oryza sativa
  Clone ID: PAT_MRT4530_8589C.1
gtgaagcgggaggaagaagaagacgagaagaagagaaagaagagaaaagggaataggcactgacaggcggcaactgcgcatagatcgattgatcggtcaagaagatgatcatatcgcaatggtgagaaaggcggcagcgatgacgactggtggagttgtggtgttagtatcggtggaggtgacaagacaacgacactatgcggctatgacgacatgatggctaacatctcggcagagacgatggttgtgggttggtggtgttgatcaaccaactaaaagcagttgtgtgccatcataagccgcaacagcggtacccatttgacaccgaccatccccaaaggtc

SEQ ID NO: 86902 - DNA, 489 bp, Oryza sativa
  Clone ID: PAT_MRT4530_858C.1
atggaggggagggggggcggcggcttaccgacggcgacggcggcgacggcgacggcggcgcagggcggcgacgcacggcgcggcggctccggggcgacggtgcggcggcttcgaaggcggcagcgcggcggcacgacgacggcggcgcgtggagaagggggagagggagaggaggagggaatggagtggggtggagaagggggaaggggccgggacggcgacggcgacggcgcggggctagggaccgcatcgaacacctacgccaaaatgaacaggtgttacatccttggatttgttgctccatctgatctagctggttatattgaggcagatattgaggctgaggtgatcctcctggccgatactatatctaaggagagtagggctggcgaatgttgtcccatggttatctgtggaatcggctcaactatcggctgccttggtctgaacatggacgcgacttggtttggggagacccgtggaatgtag

SEQ ID NO: 86903 - DNA, 567 bp, Oryza sativa
  Clone ID: PAT_MRT4530_85900C.1
atggtcggcctcggccgcgggctgctgtcgctggtgagccagctcggcccgtcgaggttctcctactgcctcacgtcgttcctctcgccggagccgagccggctcaacttcggcgtgttcgcgacgctcaatggcaccaacgccagctcctccggcttgccggtgcagtccacgccgctggtcgtcaacgcggcgctgccgtccctctacttcatgtccctcaagggcatcagcctcggccagaagcggctgcccatcgacccgctggtgttcgccatcaacgacgacggcacgggcggcgtcttcatcgactccggcacgtcgctcacctggctccagcaggacgtgtacgacgccgtgcgccgcgagctggtgtccgtcctccggccgctgccgccggcgaacgacactgagatcggcctggagacgtgcttcccgtggccgccgccgccgaccgtgaccatgacggtcccggacatggagctccacttcgacggcggcgccaacatggaggacaagggcgattttttcctgaagttcggctcttgcaatcctattctccgttga

SEQ ID NO: 86904 - DNA, 250 bp, Oryza sativa
  Clone ID: PAT_MRT4530_85901C.1
ctcacgcgcatgattactaaatcaaacactgcactgcatgaacggccgggaacacacatggcgctatcatacccggtgatggcgccgagcagcgccggctaaccttctccatgctcttcggtaaggcaccaaacaccatgcgcaggaccgacatacagccaaagccgcatgaggagcaaccgagcccgataaacggggcctagcggagtcaatacatgaggcagctctaaagcgagccgccgagctacct

SEQ ID NO: 86905 - DNA, 940 bp, Oryza sativa
  Clone ID: PAT_MRT4530_85902C.1
atggatccaaggcccgtcattacgacagaatgccttaaatgtggcgtctgccgatcgtgtgacagttagattgaaaccaacaccgatggagtcacccacttatagacttggtgctaataagatttggcaaaattttgaaattggatccgggggttatcgatgtcggtacattatgttttggctttggcgatggagattactttctcatacgaacaagggtcaagacaaagtttatatggaaattaggagaagcacactgattatagtgaaaaaaaccattgacatgtatgatcaaatcaacgacggcataaatggtacttcctccatatttgaatgccgcgtgcaggcgccggccattgaggagaacacaactagctcggatataaccatggctactctatgtattaatcaaccaaagcatcaacttcaaacggaactagccgctggtctagaaggaatttcggggcccattagtacttggtggaaagcttatggagtctactttcagatggttttggtcccacgtcaaagttcctaccgagctgccgggaaactgcaaaacaagccacggattagccttctcggcgaggtcatcagggtttcgacacggttgataaccagaggaaacgtggtgctgcaattgcagggctcagtagcgtattcgctcagaagccggatcgagttgtgtcgcgacttcgctcaaatcaagtgtttatcaatacctatcagaagatcgggatctatcatccctcatcagccgtccccacctgttccattccagatctccctcgaggcctcgagcccatcttggacatcagcctctaaagttagcccaaaagccaacaccctcgagcctatccgccggtcgcccttgtgccatcaccatgccgtaggccctgtttggttctttagcccttgggctaatttgagggctaaagtt

SEQ ID NO: 86906 - DNA, 411 bp, Oryza sativa
  Clone ID: PAT_MRT4530_85903C.1
cagctaaaaataataattttaaaatggtggcccacatgtcagctactcctcccttcttccccctcccttctctctcatattcatcgtcctctcttcttcatgtgcgcagggggaaggaggcgaggcggggcgacgcatcccccacaccgacaccacccccagcgcgccgccaccgccggcatcttcgtcttcctcctcgccgccgctgctgccgccagcatcttcgtcttcctcctcgccgccgccgcggcaatcgcggcaagcaggccggcgacgactacgtggagatggccgaggggaggaacaacaaggtcgccgacggcggcagcgccgatgactcgacgaccagcggcaaggcggacaccaaggtgtagctctggcgtctcagtcaatccatgagcggtcgagtag

SEQ ID NO: 86907 - DNA, 270 bp, Oryza sativa
  Clone ID: PAT_MRT4530_85904C.1
atggtggttcagatacagacgtgcaacgttgaagcaggaaagcaccagtcctttgttgttgctgttgcctattgctgccttggcacgggatttaaggaggcgcaccaagccaaaaccgaacaaacgaaaaaggaaaaactataccaccacccacacgccgacatcgccaacacacaagccaaggagaaggctaacaccggaccggccgccgctaagcgtgaccgaccgccactagaccaacaaagggacacagacgagaacgccccctag

SEQ ID NO: 86908 - DNA, 126 bp, Oryza sativa
  Clone ID: PAT_MRT4530_85905C.1
atggggaggaatagtgccgaacgatgcgggggcattcatgcaagtaaatttgttacttttgaagggggcatttatgtgagtaaatttgttacttttgaaggtgcagaggtgggatactgggaataa

SEQ ID NO: 86909 - DNA, 1066 bp, Oryza sativa
  Clone ID: PAT_MRT4530_85906C.1
tcagtgcccatcggcctgccttctcagtgcaacggagagcgtcgcgcttgccgagatttcgaagaggctgatggacttggcagagcaagtccaggctttagtggctctatcagccgagcaggccatgtctctcggagccaccgagcgatctgaccggcaggtcgtgatgttcctgcgaccacggcagcacaatttcaagcgtcggttgcgaggtgccagctcgaggaagaagatgagccgcctcgcggtcaatttcaagccaaagatggctgcccctcgcggtcgtctgccaggagctctgctgctcatcttggcggaaacaagatctggtggcgtggtgttggggatggcatcaacgacagctcctctgcccaagccgccgaacaaggccgacagaaccaggtcatgggagatccagcctatccagcactcgatcacaccgctgggcctggcgatggcgtcatcgccgttggcgccctcgacggaggcagcgaagacgacggcgagttccacttcgacggcgacacaacacggcttgggcgttcggttctcaagcgcaatttctaggagatgtgacgcggtttccgcagttagcggcgcaaatttcgctgacggttggagcagagccatgggaggcggagcagtttctttgagcgcctggtttggcacgatctactcgcgaaccgcgtgcttcgcggggttggcccatttcgtgcgctcgatgggtagaggcgtggaggcggcacagatcgcgccaagtccaagcgctagaagtttgcagctcgtcgctcgtagcggcgtggtctccggaagaaaagggagatatggtttctgtcctctcctggttgggctggttggtttccatgttggcccatacgtaaaggtggatcattatcatattttgggccaaggatttttggtcaaggcctccgtcggaatctactggtgggctgttctggtggtcaattggactggagattgggttactattcgagccctcctttcactcaaggttcttgggtggggtcctcctgtgcatgctgcttgcatagtagcctggcaataa

SEQ ID NO: 86910 - DNA, 197 bp, Oryza sativa
  Clone ID: PAT_MRT4530_85907C.1
tgggtttttttaatttttgtgtatggaaagaaattttcaaatgatcataacatcatcagcatttgctggttatgtcagaccttgactaacccaattctaataccagttgctatacttcatatggctagacgctcattcatacaaattactatcctccagtaataagtgaaaatttgtgaactaaactagcatgcttc

SEQ ID NO: 86911 - DNA, 447 bp, Oryza sativa
  Clone ID: PAT_MRT4530_85908C.1
aatcacatagctcaatgagggtagcatgacactattattgaacatgcataacatatctaaactagagacatgcattattgctttacgatctaccctctactggaccccaattataccagctggtaacaggcgcatttatcgcaagcttactatactaactactatcatacatggcctctacgccacaatccaaactgacactatttgcataccttgggtacctgcacgtttcctgaaacatacctacctccaattttaactccacaaaaacgcaggccccaaagacttagagcatacggaatgaaataattgagttccatgcactaaccacttaaactccaaagcttaagctcaacagcttaagcggacaattcaggacatatacatcgtgggcatgatcagcgattgtgagttcatcaccctgcaagattttctgacctagccgga

SEQ ID NO: 86912 - DNA, 149 bp, Oryza sativa
  Clone ID: PAT_MRT4530_85909C.1
agcagccctaaagtgccacggctgcggatatttattccatgatccaaaacccgcacacttgcaatactcccattgcccggggacgaaccccaacgcgtacacattaacaaaacacatttccccgggacctaaccgcacccctggtgtcc

SEQ ID NO: 86913 - DNA, 817 bp, Oryza sativa
  Clone ID: PAT_MRT4530_8590C.1
tgctggacctgatgaacccatgttgcaagtccaacttggtctgaaactgctctggataaacattatgtagatcagccaattgggaaggaggaacttgaaggttttcttaacacaccgcttccttctcatccaaagctagtccgaggacaattgaagaatggcctccgatatcttattctaccaaacaaagttccagcaaacaggtttgaggctcacatggaagttcatgttggatcaattgatgaggaagaagatgagcagggaattgcacatatgattgagcatgttgcatttcttggcagtaaaaagcgtgaaaaacttttggggacaggtgcaaggtctaatgcatatacagatttccaccataccgtgttccatatacattctccaactaaaacaaaggaatatggtgaagacttgctcccttctgtgttggatgcattgaatgagatagcttttcatccaaaattttcttcttctcgtgttgagaaagagagaagagcaattctttcagagctccagatgatgaacacaatcgagtatcgtgttgattgtcagttattgcaacatttgcactcagaaaacaaactgagcgaaagattccctattggacttgaagagcagatacataaatgggatcctgataagatccgcagatttcatgagcgttggtattaccctgctaatgctactttatatctggtaggagagatcgatgatattcccagagcaatacgagaaatagaggctgtgtttgaacatacacttccagaaggtgaagcagcccctatgtcaactggcagtccatttggtgcta

SEQ ID NO: 86914 - DNA, 127 bp, Oryza sativa
  Clone ID: PAT_MRT4530_85910C.1
ttaatttaattttttttgtataacacagctatagaattttgttagggcttcatagatttgtaacataaccgccacaaacttacatacccatagtacgtccgtatttaattttgttactcctaaacta

SEQ ID NO: 86915 - DNA, 271 bp, Oryza sativa
  Clone ID: PAT_MRT4530_85911C.1
tgattccacagtacgcgggttcgccaaccgccagccgtaagggagcagccatcttcctttcatgcctcgcccagtaaaaggcggcgccgtccgcgcaagtcggtgcctccccgtagacgcccgcgccgttctcgcctcgctaccgcctgccacttccccaagcccatctttgaccgtcgcggaactccgttgggctgcaacggctgccgtcagccgtcggggcgccgccctcctcctctcccgccttgcctcgcggagtcgccgactggcc

SEQ ID NO: 86916 - DNA, 593 bp, Oryza sativa
  Clone ID: PAT_MRT4530_85912C.1
cggcacgaggctcgggtggtggtcgtcgccgcgccgctcgcccggaccggatcctgctcacgcgcgggggtcccactcctcctggctctatgcccccgtgccgcgtttgggggcgatgctatccctgacgtgccattgctctccttccatgatgacctcctccggcttgctcctgtcaaggttgtcgctggtcctgtggttggtgagatggttgttgaggatgtggccgtcgactgcgcgccacgttcggctgaattgcgccgccgattgcggttcaagcggatgccgttccttgttcagacgcaggtgcgccttgtgcggcaattatcgccgggtgattctttgatgttagatgcattggatgaggttggaggtggttcattgcagcctgaggtgggtggagagctggtccagccttacctacaggcaatggccgctggtcttgcggtgatcgccccttccatggatgagagctttcggttgggtggcaagccgaggtgtctttgtgctggtatcggtggcggcgctcttctgatgtcaatcagaatggggcttcagtgtgatgtactagggatagaggctgatggtgttgt

SEQ ID NO: 86917 - DNA, 491 bp, Oryza sativa
  Clone ID: PAT_MRT4530_85913C.1
agcaccgaatcataccacttgccgggggctggaaaatataggcttgcattacaacacatacaacccaaccagtcgcaatagccccacttaactcattcagtttcaagtgcgaacaacgttactcaaattgaacaattccctgacccatactacccagacgcccattatttgacctattaaaggattttctgatctacacattgaaacatacatgaccaactggctaaatattgcctatcacagatactatgcacaccatcaatcctgtacactatattaacccacttatgatactcatatctgcatcttcactcactatggcttgaatcgctacacaaggaactgttacttatcaacagatttacacatccgccatggctatcccacgcttccgggtggctggcgggcggggtctcctcctcctcgcgatcgagaatgggaggaggaatggatctgactccgatggtagcagagtcccagacgcgtgggtc

SEQ ID NO: 86918 - DNA, 497 bp, Oryza sativa
  Clone ID: PAT_MRT4530_85914C.1
gaacaggaaacatcacgtaaaagttctttgctagccggtttgcaaggaagggaaacgacattggaggggacaatatatggatatttacacatgaaaagatccaacaaagaagtcataatcgcactagactattattattacacactaagggattattattattacagcataaaaacactctcactaaacttgagcagattgttgctctgcttctactagagccactcacctgttaacgcaggagagaattcagcttctgggttatactatgcgaacttctccctttaagcgtttgatccgcttcaattggatctccagatctgtctccctgtgcccacgtgaatgccgcatctcatggactttaaatgtgctgtccacatcatctttgagggctgattcaaggtcttctgttagaagcgccggtaaatttgaccacaatcggcctgaggagaacgcaattgaacttatgctctgtggcgacaagaaaatgctctttg

SEQ ID NO: 86919 - DNA, 330 bp, Oryza sativa
  Clone ID: PAT_MRT4530_85915C.1
ggagtataacttggcaggtggaagttctactttaactacaacccaacctgcattacatgatgtgagtctaaaacaaaaaaacccctttttttttttcaaatttttgcccacttacctccccccgctgccgtttaactttttccaggccaaccctggaacccgcccgggggctcttccatttccaacatttctattttaaacccccgtttttgtttttgaaaaagtttactccccaaatgggggggtccccctttcctggttgcttgggcctaaaaaacaaacatcccctttttttttttttgacccttggcaacctccttactctcaatg

SEQ ID NO: 86920 - DNA, 429 bp, Oryza sativa
  Clone ID: PAT_MRT4530_85916C.1
atggagttcgggaggcctgcttgcttccgagcactcttgcgtgcaagtgctcagaaccggggaaaatggatgtgccatatctttgttcatcatctcagggatgcaaatgatgcgcgactgctctgcatcatcttcaccaacatattgacaaccggcgacaacaacaacactggagacaaggagaaggagcctcccgtagctgacgaggatcttaaagcaatctccttcccaccactcatcctccggcctgcgcgcttgatggacgttggtgtggcaactgccggcaccaccggcctcctgccctggttctgtgctaccattccctcctcctccagtagcactggcaccgggtggacggagttcgggaggactgctcgttctgagcactcgtgcgcgcaagtgctcagaactgaggaaaagcagaagtag

SEQ ID NO: 86921 - DNA, 242 bp, Oryza sativa
  unsure (1)..(242): unsure at all n locations
  Clone ID: PAT_MRT4530_85917C.1
gctgttctatatctcgagctgcctctctcaatctataactactcccacctgttngatattttntatgtgactgttccaccaatcaactggaaaacacaattttattatttcaaccttacactcaattntattccatnttnacanttntctttataacacatagtgaaaaaacttctttattctaatttttcatataacttaacaatcactcttcttttaaatcttattatttatattcaatt

SEQ ID NO: 86922 - DNA, 1209 bp, Oryza sativa
  Clone ID: PAT_MRT4530_85918C.1
tcaaacatgcaagaaccatgaacattcagacttgtagccatctcttcccatacaaatcaccactgatatcaacttccctgtcaaatagaagcttgaatggggataaacccaatgcaacctctccatagggagcaccagcttgaactccatagtatcaagctggagcatgatgacgccatttggcgtctgtagaaatgccacactaccatcctcagtaaaaccaagtagcccagaccacgctatcaatcgatcaaaaagcgcctccaattgccgcaatggtggatgaggaggaggaatgaacatgcacagtttaattctcttcctcatcacccaactggcagtgctatccgagtcactcttgcgcacccacaccggggggcccctagagtccaccgccccgcagccaagcttgctaccaccctcagccagcataatctgcagactccaattcggagccggaaaatacataagatctgggccagaaaccacattcacagccaagctcttggcatccatgttgaactcaaggatgcagttctccacgagcagccagtagagaacattcccaacaagaacaggaggcttcatgtcaatggcagaaatcttttcccccgagatggattcatcaagatgtctaagccctaatcccaaatccaaatcgtgggggatcaccgtcctcccacagaccacctcgccccattcgccggaaagcgaggagtagacgcaggcgcaggggcggcggcgcatgaggaggcggcacaccgagaacggcgaggcgaggagcgcgcgcccgccgcggcagccgaggaagagccagcggccggggtggcggcggagggagaaggcctcggcggggacgcggtcgggggctcgcccggtggggacgaagcaggggacgttgaaggagttgtggaagaagccgaggaggggagctcggcggcggcgggcgtgggagtggaagcggcggtggaaggccgggtcggagacgaggcggcgccagcgcttgcagaccagggagaggcaggggagggaggaggggtcaggcgggaggatgtggaggatctcggccagtacgtcgtcggggaggatggacaccggcgatggctcgtcgccggcgtcgccgagcccgcggcggcggaatgggcttggcaccgccggcgggtccatgacaaacagttgtggactcgaatgggaagttctcttctttag

SEQ ID NO: 86923 - DNA, 181 bp, Oryza sativa
  Clone ID: PAT_MRT4530_85919C.1
tttttggggtttttttttttttttgtttttttttttttttgggcaaaacataggatgacttaacagaatgatctaacaaaagacagtccctgtcacaccgtttctgacagtaatcatttgagcacaagaaagacaaggctatgatctgtttccagtccttttatgagatggttaggcacat

SEQ ID NO: 86924 - DNA, 676 bp, Oryza sativa
  Clone ID: PAT_MRT4530_8591C.1
cccacgcgtccgcttatgttagccatgttgaaccatgatgaaaggtttgtagagccatcaccacattcattgcagaaattgactctccaatcagtcaaagatgctgttatgaaccagtttgttggtgacaacatggaggtcagtattgttggtgatttcactgaagaagaggtcgaatcttgtgttcttgactatcttgggactgtgagtgctccaaaatcttcaaaaacacaggagcatattgagaagatttccttcctgccgtttccttcggacttgcattttcagcaagtatacataaaggatactgatgagagagcttgtgcctacattgctggccctgcacctaatcgctgggggtttgcaactgaagggaatgatctattcaatgtcatccggagttctagtggagatgctcaagtttctgaatcagcaaacacagatcttacggagaggaaacataatgacgttcgcagccattctctgttctttggcatcactttgagtttgttggctgaaattattaattctaggctattcacaacagttcgagattccatgggattaacctacgatgtttcttttgaactaaacctttttgacaaaatggaccttggttggtatgtgattgcagtaacatcaaccccgaacaaggttcataaagctgttgatgcat

SEQ ID NO: 86925 - DNA, 210 bp, Oryza sativa
  Clone ID: PAT_MRT4530_85920C.1
atggacggcgacaaacgcgcgcggccaccgacgcacccggcgccggccgccgagcccatgcgccaaggaaccctcaaaccagacgctcgccggagcgcttacaagcgcggagtcgacgtgcaggtttcgtcgggcgggcgagcgggcggcggcggcggtgaggcgcggctagggctcgcggagtcgcgagaagagcacggcggcggctag

SEQ ID NO: 86926 - DNA, 108 bp, Oryza sativa
  Clone ID: PAT_MRT4530_85921C.1
gctcgtgctgcacacagatcgcgtggtgtgttgctcgcggcggtgccgtcgctccaattccttattgatccccgatggccgtgtatccttgccgctccaacattcagg

SEQ ID NO: 86927 - DNA, 557 bp, Oryza sativa
  Clone ID: PAT_MRT4530_85922C.1
tcccctctccctctctttctctctctctctctctcccacgccaaacgcagtgccgccgacgccgccgccatcgagccgccatcggttcccgccttcagatcgatggcgtcggcacccctagggccggcccggccttcgcgccgccgtcgattcccgtctctccaccgcgaccctcacgccgaccgtcaacgaatcctgactcaagatcgacgccgccgacaccccacccagcgcgtcgattcccgcctccagatgatgccgccggcgctccgccggtgctccgccgagtgcaccgccgccccaaactccgccccacctcgatctgattcgccgagagaatcattcctgttgagccagcgaccccgacaactcttcttgccaccaacaccaccgtcttctccctttgtccagccaatcgccgggaaggcatcgctgcccttttcccctgatcgagtgctcgacctgcctggacacggtggtctacggcaagtctgcctggactcgggattctcacactgtcagctctggatctgcctttatcatagacattctcccac

SEQ ID NO: 86928 - DNA, 285 bp, Oryza sativa
  Clone ID: PAT_MRT4530_85923C.1
gcaacagggacaggcatggggtaacagcaattccccccgcagatcagaaaaggacacgggaaaggataaccccttggatccccgccccgaggccatcatccaaagctacaagccaatcaacaaggtgaaggacatggtgaggatcatgaccgggggcgactcctgcatcggctggccggtgtgcctgtgcttcacgctggagggcaccacggtgaccttcacgtacgtgaaggggcaggaggaaaaggacgcgaagaagaccctccgcgcgctgcgggacatcag

SEQ ID NO: 86929 - DNA, 228 bp, Oryza sativa
  Clone ID: PAT_MRT4530_85924C.1
atgaggcaaagcaactctatatcactatgtgtgcctgcttacgagattgtaaagatggaaccacaggagaagaactcacagagcacatcacttggtgcaaggagtagtaatcatttattcttctatatggtggtttgcaagaatatatttaagatgaatgggacactaccacactggggttgcaatggtatcaaaggtggcaattggcctcagtttaatgctagatga

SEQ ID NO: 86930 - DNA, 657 bp, Oryza sativa
  Clone ID: PAT_MRT4530_85926C.1
atgccggcggacggagcggcggaggggcgggcggagcggcggcaggccgcgggcggcggaggagggtggctttgggagtttggactatacgtgcgccgcgtcgttaccgggctcgccgtcgccgacactcccaccaacaacaccaaagtccaaagacacccgcttccctccaaccacccgccgcaaccggtcagacgcaagcaacgcaacgccacgcacgcacccgcctcaccctcatgcgccggcacgcgtaccgccacgcccacaccgagatatagcagaaagccgcaccccgcaccctgcgccctcaccgcacgcacgcacgcaaaagccttcgaccctgccgtgcgcctgtgccgtgcactcatcagctggcgaggaaatagaaaagagtatatgaaaaaccaccaagccggtcccctgtaccacactgtgggttctccggttcgcaactatatcgtctttattggggattccgtggtaccggcggtccagaccgcttgttctccctttcactctctcttcagtatcctgtcgattctttgtgatggctacagttcgattcgtatcggcgctagcaacaaaattgcggcactggcacacatcgatcgatacggacgatggaaacggagacgcggctgttgtgtaatggcatct

SEQ ID NO: 86931 - DNA, 307 bp, Oryza sativa
  Clone ID: PAT_MRT4530_85927C.1
aggcgtgcggatcatcacatatttacttgaataatagcgcggcagactcactgcgccagtggagcgtgaatgcggataaggggattggaagacctgtttcagattcagtcactggatccaattcttccaagaggatcttgacatatgctttttttaaaaaggacacaacatttttgcgaggattacaaaacccgtaaatataggaggcgtcatttctctaccccagcagtggcatttaaggctgtgggaggtggctcctggttattaaagttctcctgggaagatatcgcaaagatggcaatgccct

SEQ ID NO: 86932 - DNA, 314 bp, Oryza sativa
  Clone ID: PAT_MRT4530_85928C.1
ttttctgtttcctgtcaccgtcgccgttgatctcaagcgagatttgaggtttggccacgacgacgcctgctataagtaccaggtggtggtcaccgcccggcggcgtcgatcgatccgtcgcagtcgtctccggcgagaaatcggctgcgccccgtctctctctctcgaacgcttccatggcgcgcttcctcctcctcgtcgccgtcgccgctgccgccgccgtgctttcggtacactcatgatgccgctactcagctgagccatgcaccgttgcacccgtatactaacgatcgcttcgatcgaccgacgatgtg

SEQ ID NO: 86933 - DNA, 308 bp, Oryza sativa
  Clone ID: PAT_MRT4530_85929C.1
gcattataaaaacaacgaaacatttttattttgggggaaggccccaagacttaaaaaacttaaaagtgtccctgatgtgttacatcataccttctgtcactcacaaatgggctgaaaatacagacccatttcaattgctgggtccaaccaaaatattaacttgctaattgaatgtgtcttgtttttctaaaaacttcagatttttacagaccaatccccatacataataaattccaattcaaaacttcttgtcatgaaacaaattttgttggtatttatttgcacccgattcattcttccaatttctt

SEQ ID NO: 86934 - DNA, 3531 bp, Oryza sativa
  Clone ID: PAT_MRT4530_8592C.1
atggaaacccaacggacggcggaccaaggcggcaacggcggcgccggcgccggcggctacccacggtgggtgatactctgccgctacggcgagtaccagggctacgagcgcgacgactccttcccgcccttctccacaccggacgccaagaccgaggcggcctccgtcttctcctccggcggccaccacgtcctcgtctccctctgcctcgacgcgccaccggcgtcgtcgcgcgtatgcttcgacttcttcccgcgcatcggcggggggcggggcgccagcctggccgtcgtggctgcccatggcgactccgtgctcgtccggttgagttaccaaggagaaggataccggtacggcgacgacggcgtgctcgactacttcgtctacaacgccggctccgccgccgcagacccgccacggccgccgtcgctgtcgctgctccctgcctacgtcaccaccgacgcggatgaagaagagagtgaaacctggcggccgcgccacgatctggatgaaaggaccaccggcctcctgcgccgcggcgaagacgacatggtggtggtggatctcgccgtgatggaggagggcgacgagctggaggaggccgagctcctcgttctccgctccggcgagtggaccgtcacacgggcgccggtcgtccacttcgacggtagagccgagaagctgccgtcgtggatcaccgacatggccgtccccgtcggcgagcggcggatgtgctgggccgacctgtaccgcggcatcatcctctgcgacgtcgacgacgtgttcgaccagaatccgcagctgcggttcgtgccacttccccccgaggccctcaccgatgaatccaacgacgacgacgacgactacgacgaccacacgcggaaatacgtcatcgcagagcgaagcgtctgcgtcaccggcggcggcgccgcgctgaagttcatcgacgtcatcccccgctgctgctgcggccgccccggcccgacctactgcggccattctaccggtgccttcatcatcaagacctggatactcagggtagacgacggcagcggcgacatggcctggaccatggacgccatggtcgacgccagcgagctctggtcatcccacgcctacgccggcctcccacacgccattccagaacaccccatcgtgagcatagacgatccccacctcatcagcttcatggtggatgagcgagaatccgaggggagatattgccgcatcaaagaaacatggatgatcctcttcgacacaaggagcaagacactcttgtcagcgatctcctgcagccatggacgcaatttccttcctagcaaggtctccagctacttcacttcctccaatggaagctgcagcaatggcggagcgatgtcagagccagctgtgatcatcgacaaggcgccaacacatgatgccatcatcggtgattcagtgcgaatttcatgtgagtcatctggtgctaaacatttcagagtgtcaggatcagtagcttctcctgatgagatctttgctgccctggaagagataccggagttgtctcgtcatgatttgctaagagcttatagcatgctttgtcatgataatggccgccgattcaaatctcttttggggcttccgatgagcctgaggaagacttggttgttgatggaaattcagacattttgtgtcaccctaagcttccaccagtcgccgccgccatcgccgccgaccatggaaacccaaccgacgccggcgactctccgacgcgtcggctgctacgacccacggtgggctttactcgagcgcgacgtccgacgcaagcacaagaaaggtagcgatgatcagggagaccgggacgactcctccaacccctgctccgccgccggcggcagctgcgccgagaccgaggcgagctgccgcaactccgccggccatgtcgtccgcctctccctgtgccgcgaggcgcccccggcgtcgtcgcgcatgtggtacacctcctccccgagccacgacgaaggaggagggcccctggtgtgcgtcgtcgccgcccaccgcgactccgtgctcctccagatgcactataaaaacgaagcgcgccgcggcggcgagtacggcctctatcacttcgtctacagcgccggcgatgccgccgccggtgacccgccatcgttgtcgctgctcccaattcactgggttcactacgggttgagtgacaggacgccgaaccggctggacgacgctagaaccggcctcctgcgccgccgccgccgccgctgcggcgacaacgaccttgtggtgtcgaagctcaccgtgacggagggcgacgacggagtggacgccgagctcctcgtgtttcgttccggcgagtggagcgtcacgccggcggagatcatccacgacgacggcaaggccgacgagctattccattggaagaccgacatggtcgtccccgtcggcgaccggcggctgtgctgggtcgacctgtatcgcggcatcatcctctgcgacatgttcgacgacgatgagcctctccggccgcggtacgtgtcacttcccgtcgagccccccgccggtgaattcgacgacgacgactacggctaccgctactacgagtacgagagcggcggcggccgcggccgcaaccctcggctttgcctgatgaaagatcgaaccgtctgcgccaccaacggcggcggcggcggcggcgacacgctcaagttcgtcgacatcttcccccgctgctgctgcggaggccccggcgtcaccacctgcgaccattccagctccgccttcgtcatcaacacctggacactgaggacgagcgacatgacatggaccatggacgccatcgtcgacgccaccgagctctggtccctctccctccacgccgacgccggcatcccaccacacaaaagaccgtactaccccgtcgtgagtacacgcgactctcacatcatctgcttcctggtttacgaccacgattactgcgtgaaagagaaattttggaagatcatgcttgacacgacgaacaagacgctgccatcagtctttgcctacaaaaatcagtcttcgccatgtttacggtgcattcccagcgagatctccggttacctcctcacttcatgcagcagcgattcaacaaagccggcagccatcgtcgtcgacgtactacctgcagctgcagcgacgacgacgacgacgactgccgtcatcagtaagaaatcacatgaactgtccaccaatgtgtcagagatggcttctcctgaggagatcttggctgctcttgaagagatacctgatttgggatgtgacgatttgctcgaggcgtatagccttcttattaacgatggcagtggacgccgattcaggtctctcttggtgctgccaatgggtctcaggaagaaatggctgctgattgaagtgaagaatagccaggcttgttccatctgctccgcatgcacaacccaacccacaacatggatgggggctgaagctgaactccaaggctctgatgtgctgagcaaacatctctctcgagttttatga

SEQ ID NO: 86935 - DNA, 476 bp, Oryza sativa
  Clone ID: PAT_MRT4530_85930C.1
atccctttgatctctctctctccctctctctcagtggctgctgcttgcctggctagctagcttccagctgcttgcttctctctctctcttctcttgagcatccttgatgtgttctacacttggtgatgctgctgcttctgctctgagtgtgtgtagactgtagagagagagaggagaaggaggaggaggaagggaaagaaagaagaatctgaaaattgctttagagtcattgaccaccctagtttcctccttgaatgtccccccctccccttctccttgttgtttgttccttccttgagattctctgaactcccttcatcctacatgccctcctgtctcctgcctccattcttcaattttaatgcatcctcttcatgactttacttgagcctcccaaaatttattgcttccatggtgaggcagatgctgcatgctatgtagcaagaaaagatcgaagctcctatgttttatcacca

SEQ ID NO: 86936 - DNA, 234 bp, Oryza sativa
  Clone ID: PAT_MRT4530_85931C.1
gccgattgaaatttcgatggtttatataggaatttcgccaaagctgaccaattttcgctcagaagcactacacttctgaaaatggggaacaatatcaaggctgagtacagccaccatactcagcaagccacaccaatgatgcagacgtgcaaggggatataaggacggtttgtggctatttgcataaaggcggttgtaaaacatttcattaagcaaaacggtaaaactgttgag

SEQ ID NO: 86937 - DNA, 410 bp, Oryza sativa
  Clone ID: PAT_MRT4530_85932C.1
gtccgtttagcgctaatgattatcaagatctacttcttcttgggaaggacttctcttcccttcctaagaaggattatggatcgctacgaagaggacagcagttggggaagctgctgccagaccgggtgctgagtgggctgcatgcaggatgggagctgatgtggaagtccctgtcaccaccacacaactgagtctctcggtggtcttcccacgcgtggatctctggaggagtgaatactgcaggcccaacagatcatagctgaggactgcagctgcaacatctgcagctgagcgacagactgtaaaggatggtgctgctgatgatgcaactgaagagtatccaggacgggatccggatgcttgaagatgtatgcccttgacttctcgctctaggccatcatgagctgttg

SEQ ID NO: 86938 - DNA, 363 bp, Oryza sativa
  Clone ID: PAT_MRT4530_85933C.1
atggcgacggcggcgggcggcgtggaggccgagagaagcggcgccgacgagaggctgttgggcagtggatcggatgaaatgggcactttccttgcgatggcagcgttaaccttccaagtgatgcttcttggtggtgccgtcgtcgccggcggctgcaacgatacacggcggtcgtcggtcccggcgatcttcctgttcggcgacggcgcgctggacgtcggcaacaaccaatacttgccgtcgtccgaggccggagacccgatccgcgccgatcaccccttttacggcatcgacttccccggtggcaatgccaccggcagggtcagcaacggctacaccatggccgatttcattggtaattaa

SEQ ID NO: 86939 - DNA, 2760 bp, Oryza sativa
  Clone ID: PAT_MRT4530_85934C.1
atgcgccaccaggtaggccttctctcccgcctcctcctccggcgccacgtacaccgccgctccaagccggccaccgcgccacccccgcccccgcccccgaccccgccgcggccgccgcagaagcccgagccggtctccatccacggggagacgtggcacgacagctacgcgtggatgggcgccctctccgacgccgccgccatgcgccacatggacgtgcacatggaggccgaggagaagtacgccgaggcctgcctcgccgcggcgggcgccgaccgcctcgcgcggaagctccagctcgagatggcctcccgcctcgcctccgacgcctgcacgccgcccgtccgctggggaccctggctgtactaccgccgcgcggacgagggcaagcagtaccctgtgctctgccgccgctccgcggcgctacacagcgagttcatctcgtatagcgacccctctgccggattcgacttcaccgccgggaagcgcatcgagcagaaattggtggattacaacaaggaggccgagcggttcggaggatactcatacgaggaactgtctgaagtgtccccagatcaccggttcattgcatacactatgtatgataaagataaggattccttcactttaatggtcagggacctagtgacaggaactctttgtgataaacctcgtgctgaccgggtctcaaacatatcctgggctatggatgggaaagcactggtatatttgataaatgcttctgatcccctgtccagaatgagattggtttgggaaggtgaatcccaagttcattgtattgttgaacaccatcatggacgcctatatttatttactgatgcttcaagagaaggcacccctgttgattctcattatctaatgctgtctgatgtggaatctcctgggccgaagagctggaaggatgtttttcttgaagaaccaggcgttattcttgaagatgttgacttctgtgatactcacatggtgcttgttctgagacaaggcagaaagctgaagctctgttcagtaaagttacctttccctgaacacatcagaattttacctggcccaaattacgattatcgttcctcaacaatgcgtttcacaatatcatcacctgtgatgcctgatgcagttgttgactacaacttaccgaatggtaagtggcgaatagtgcaacagcaaaacatgcttcatgaaagaacgaaagcactatatgggaatgcttttgctgctagtatggttaagccatcttcaaaaggaggtgatttgtcaagtgaggactttggagattgtgattggaatgaactctctgaatactatgcttgtgagtactatgatgttccatcaaaggatggagttttggttccacttacattagtatattcgcaaaagcacaagcaagagggaaatccagggttacttcatggacatggtgcttatggtgagattctggataagcgctggcgcagtgagttaaagagcctacttgatcgtggctgggtgattgcatttgctgatgtcaggggtggtggaggttatgggaagaagtggcaccaagatggtgcacgtacaaaaaagatgaattctatatatgattttatctcttgtggtgagtttcttcttgagaagggtatcataaaagaaaataaacttgctggatggggatatagtgctggaggacttctggtggcttcagcaattaatactcggcccgatttgtttcgtgctgtcgttttgaaggtccctttcttggatgtttgcaatactcttctccaccctattctacctcttacagctattgattacgaagagtttggatttcctgtggaccatgaagagttcctttcaatcaggaagtattctccttatgataacatccagaaggatgttccttacccagcagtgtttgtgacatcatcatttaatacaaggtttggtgtatgggaagcagctaaatgggtcgcaaaagtccgagaagttactcgctatgatccagagcggccttctcagttatatggtctgatgatttggaagccaaaattcctgtctactggagatcgtctgactctgatcaagtctgtcctgtttgccttgccggtgcactacctctcggtgcttgagctgccacagtgttcgatcaaagagattaatagaaagtgtcgggggttcctgtggaaggggcaggaggagggtgagcagcaagaccggccttggacaacagttgcgactgtggagccgaaagatctgagagacctctactactcagcatcacggcaagaggtaggagatggaaaaaacacgaagtttcggcttgcggactggttgccaatgggaagcataaaatcgaggttccagttgattttcagccatgtggaacgcaccggcttgacagtggctcaggggttgaggaaccacaggtgggtgtgtgacatcaaaggtgcgccatctaatcgagccatcggggagtattttcagatttgggatgcagtccaggaggtgcaggtgcaagggggagaggaggatgtgactgtttggaagagggctgcaaatgggaagttcacccctgcttcggcttacgaactgttcttcatggcaaatacagaagcgagatgtggcagtctgatttggcacactagagaaccttccaaagtgaaattttttatgtggttggccgagagggaggtgtctcacggccgacaatctcaccaagcgaggatggccacaccaacaatcctgccccctctgcatgagcaatga

SEQ ID NO: 86940 - DNA, 787 bp, Oryza sativa
  unsure (1)..(787): unsure at all n locations
  Clone ID: PAT_MRT4530_85935C.1
tgctgctgctgctgccaacctcggcgatggggagttcagtgaggctgacaagaagacgatcatggcgagtgagtacctctcgcagctcgtgttgagtgatccgaagaaggtcaagagggttctatgcaataggagatctgctgcgaggtccaaggagcgcaggttgaactataccttgagcttgaaagtaaggtgctggtgttgaagatagagattgagaagttgtctgaaaaattggcgacggctcagaggacatttaatgagcttttagctcaaaacaatgagctgaaaatcaagatacaagaaacgggtagggaacgccagatgaaagaaagctatattcaaatcaataggttatgagtcactttcaagttgttgtttgatggtgagttcgtcatgnccaaatggtacccacggagaaacggtcgctcggttgatcgaactgctggagccagaaacacaggctggaccatcacaaatccaggggatatcagccataacaaagtttgaagctttagggtgatttctgatgagaggaaacttttgaaaggggaatgtcaaactatactgcagattcaaacatgaattcgcttagacagccgaaccaatagataattcatctattactgagtgttgtgctacagttattttgctaaaagtttgggtgaactgacacccatgtgggcttctgtaatatcaaatttgcctgcatctggaccgatgttttaattagaatcatcagttcattttggggattttattagtgtgtttaaaaaaaaaaaaaaaa

SEQ ID NO: 86941 - DNA, 885 bp, Oryza sativa
  Clone ID: PAT_MRT4530_85936C.1
atggagaatgttactggagaaggaatctcggatcagatagagagatttcaaacacagctacaaatggatgggcgagggagaaagcacaggattttgatggtgtcagatttcttctttccaaactttggcggcgtggaaagccacatctattatctgtcgcagtgtctccttaagcttggccataaggtgattgtcatgacgcatgcatatgggaatcgttctggagtacgatatgttacaggtggcttgaaggtttattatgttccatggaagccattcctgatgcagaatacattgcctacattattcttgacatttccgattgtgaggaccattcttattcgtgagaagatctctgtggtgcatggacatcaggctttctcaacattgtgccatgaagcactgatgcatgctaggacgatggggtacaaagttgtcttcacagatcactcgctttacggttttgctgatgctggaagcattcacatgaataaggtgctgcagtttactcttgcagatattgatcaggccatatgtgtctctcacacaagcaaagagaatactgtcttgagatcagggatatctccagagaaggttttcatggttcctaatgcagttgatactgcaatgtttactccctctccagatcgcttgagctgtgatgaaattgttattgttgtgataagtagattagtgtatcgaaagggtgcagaccttcttgtggaagttattccagaagtatgccgtctttttcctaaggttcgctttattgttggaggtgatggtccaaaacgtgtgcgaattgaagaaatgagggagaagttttcccttcaggatagagttgagatgttaggagctgtgcctcatgctcaagtagctatttaa

SEQ ID NO: 86942 - DNA, 618 bp, Oryza sativa
  Clone ID: PAT_MRT4530_85937C.1
ctgcaggaattcggcacgagggctcgcgttgtcctcacgtgggcggctcggggcgaaaccctagccatccgacgccgcccctcttccccctctcctttgcctcaccgccgccggagcacgtcgcccggaaagccgggcggcgagtcgtgatggtggcagcggggctaagccccagcgacgctccgcctcttgcgtgagaaggaggagctccgtgaagacggcggcggcgccggcgagtctccggcttggagatgcaaatgcgacgaagggcgacgggaggctgtagcgggagacggcgcgagcagtggcgggcgacgggccggatgcgtcgtcgtttggcgcgacggcgatcgtggaccgtgggcgactggcagtcacgacagcccacgacaggaggatgcgtgctgcggtggtaggtgcaggagctgtgcgtgtggtgccaggcgcggcaaccacgtgggagtaggcgcgggagcggctggcggaggaggagggcgttgtgggagatgacagggaggtcgtcacgtcccgcaagaggccggcacgcccggcggcagggagagggaggccggcgcgtcccggcaggttgatggcagcgggtgctgctgatggcggcat

SEQ ID NO: 86943 - DNA, 2334 bp, Oryza sativa
  Clone ID: PAT_MRT4530_85938C.1
atgtcgcggcgcagggcggccgctgtggcggcggcggcgcgggaggaggaggaggcgtcgcccgctcagcgtctcgtggaggctgccctacggggggacgtggtgaccatggaggcgtgcctggcggccgccgccgccgctgccgcagcggacgacgacacggacgatggcgtgcccgcggcgagccgcgtcggggtggcgcgcctgcgggtgaggtgcgctgaggtggccctccgcgaggaggcggccggggaggtgatcgtggagtcccgcgagctcaagaccgacgtctcgccgctcttcgccgccgcgcacgccggtcatgccgaagttgttcgcaccctcctgagtggaggtggtggaaaggtggctggtgtatcaagttgtaaaaaagtatactgctcggtatttgaggttgctggagctgatgttaatcaaaagttatttctaggctatgcaacaacagctgccgcacgtgaaggaaacatccatattctagagatgcttctgcaggctggagtcactcgggaagcttgtgaagattccctatcagaggctgctctttttgctgaggctgaagccgttcggctattagtctgttcagagatgatacagcctgaagctgcagcacatgctttggtgactgcttcttcaagaggctttgatgatgttgtggtcatactactgcagaatggggttgacgttaattccatggctagggtcctcttgaggtctgttaagcctgcactacatgctaatgtgaattgcactccactggtggcagcagtaatgagccggcaaatttcaactgtgaaactcttgattgaggaaggctcttacttggactgtcttgtgcaagttggttcttggtgttgggactctgcaacgggtgaagaacttcgtgttggtgcatgccttggggaaaaatacaacgccatttggtgtgcagtagagtactacgaatgcagtggtgaaatcctcaaattgctgctcgataaagcaccatggttgctggaaaccccacgcaagggtcgaaatcttctttgccatgccatactctgtcagaacccgaatgcagtaagcgtgcttctaaatgctggtgccaatcccagatttcccataatgatgacaaacggcacacacgtctcctacccaatacattttgctgcaaggttgggtcatgcgcccgtactgaaacaactcatgttggatggggctaatatcaatgcgcagacttctactggggacactcctctgatggtctctgcgaggtgtggacactccgattgctttcttgaactgatcaaatcaggggcagaccttgggatagtgaacaatgcaggtgacacagcaataatgcttgctaagaaaagctcatttagctcaaccatcatcgacattctttccagagcattgagttgcggaggctgcatcacttcatcggatatcaccgtcttctctccgctgcacttcttcgctgcaagtgacagtgcagaagctcttctaatgacgctacactactcagcagcagatctgaacaggcctgatggttcagggctcactcctgttatgatatcgctgccacgagtgccgaagggaaatccgcgatgtcgatcatccgaagcagagctcctgaaccaagatcggttcgaacagatcttactccaggcttcgctcgcggatgcgatcgcaggccagcagccatctttcagacccctgcactacgcggcccggatcggcgacacctcctccctgacgcagctcctgaagatgggccacgatcccaacgcgatggacgaggatggctacacgccgctgatgcacgcggccgccgcaggcaagctggaggcgtgcagggcgctggtgtcgcgcggcggcgccgccgacgcggggagcgagacggcgctgtcggtggcgaggaggagcggcaggtcgaacaaggcgacggaggagtggctgctggaccacgtggcgcgcgcccacgtgctcgccggggaggagctgacgaagcacacgcgcgggggccggggtccgccgcaccgcaaggcggtgcggatgatgcggtccggcgtgctgacgtggggggcgacccgccggaggaacgtggcctgcagggaggcccgggcggggcccagcgcggcgttcaggaggaacaggaggatcatcaggacgggcagcgaggagcagctgatcctaatggtggagacggtgaccgggagggagatccacttcgaggccacctccgcgtccagcgtcgagctatgggtcagaggcatcaatctcatcgtgcaagactgcgcgtggtcaaggccggatgaagctgagcaagcatag

SEQ ID NO: 86944 - DNA, 2395 bp, Oryza sativa
  Clone ID: PAT_MRT4530_85939C.1
atgtcgcggcgcagggcggccgctgtggcggcggcggcgcgggaggaggaggaggcgtcgcccgctcagcgtctcgtggaggctgccctacggggggacgtggtgaccatggaggcgtgcctggcggccgccgccgccgctgccgcagcggacgacgacacggacgatggcgtgcccgcggcgagccgcgtcggggtggcgcgcctgcgggtgaggtgcgctgaggtggccctccgcgaggaggcggccggggaggtgatcgtggagtcccgcgagctcaagaccgacgtctcgccgctcttcgccgccgcgcacgccggtcatgccgaagttgttcgcaccctcctgagtggaggtggtggaaaggtggctggtgtatcaagttgtaaaaaagtatactgctcggtatttgaggttgctggagctgatgttaatcaaaagttatttctaggctatgcaacaacagctgccgcacgtgaaggaaacatccatattctagagatgcttctgcaggctggagtcactcgggaagcttgtgaagattccctatcagaggctgctctttttgctgaggctgaagccgttcggctattagtctgttcagagatgatacagcctgaagctgcagcacatgctttggtgactgcttcttcaagaggctttgatgatgttgtggtcatactactgcagaatggggttgacgttaattccatggctagggtcctcttgaggtctgttaagcctgcactacatgctaatgtgaattgcactccactggtggcagcagtaatgagccggcaaatttcaactgtgaaactcttgattgaggaaggctcttacttggactgtcttgtgcaagttggttcttggtgttgggactctgcaacgggtgaagaacttcgtgttggtgcatgccttggggaaaaatacaacgccatttggtgtgcagtagagtactacgaatgcagtggtgaaatcctcaaattgctgctcgataaagcaccatggttgctggaaaccccacgcaagggtcgaaatcttctttgccatgccatactctgtcagaacccgaatgcagtaagcgtgcttctaaatgctggtgccaatcccagatttcccataatgatgacaaacggcacacacgtctcctacccaatacattttgctgcaaggttgggtcatgcgcccgtactgaaacaactcatgttggatggggctaatatcaatgcgcagacttctactggggacactcctctgatggtctctgcgaggtgtggacactccgattgctttcttgaactgatcaaatcaggggcagaccttgggatagtgaacaatgcaggtgacacagcaataatgcttgctaagaaaagctcatttagctcaaccatcatcgacattctttccagagcattgagttgcggaggctgcatcacttcatcggatatcaccgtcttctctccgctgcacttcttcgctgcaagtgacagtgcagaagctcttctaatgacgctacactactcagcagcagatctgaacaggcctgatggttcagggctcactcctgttatggttgctgcagagtcaggccatgctgacattttcaggcttctagtgatggcgggggcagatatcgctgccacgagtgccgaagggaaatccgcgatgtcgatcatccgaagcagagctcctgaaaccagagatcggttcgaacagatcttactccaggcttcgctcgcggatgcgatcgcaggccagcagccatctttcagacccctgcactacgcggcccggatcggcgacacctcctccctgacgcagctcctgaagatgggccacgatcccaacgcgatggacgaggatggctacacgccgctgatgcacgcggccgccgcaggcaagctggaggcgtgcagggcgctggtgtcgcgcggcggcgccgccgacgcggggagcgagacggcgctgtcggtggcgaggaggagcggcaggtcgaacaaggcgacggaggagtggctgctggaccacgtggcgcgcgccccacgtgctcgccggggaggagctgacgaagcacacgcgcgggggccggggtccgccgcaccgcaaggcggtgcggatgatgcggtccggcgtgctgacgtggggggcgacccgccggaggaacgtggcctgcagggaggcccgggcggggcccagcgcggcgttcaggaggaacaggaggatcatcaggacgggcagcgaggagcagctgatcctaatggtggagacggtgaccgggagggagatccacttcgaggccacctccgcgtccagcgtcgagctatgggtcagaggcatcaatctcatcgtgcaagactgcgcgtggtcaaggccggatgaagctgagcaagcatag

SEQ ID NO: 86945 - DNA, 680 bp, Oryza sativa
  unsure (1)..(680): unsure at all n locations
  Clone ID: PAT_MRT4530_8593C.1
attggttgaagtatcattttgaagaatctgaagattttttcctactccgctcggtcgctccgccccaggggcgacgcgagcggcgaaacccgccgccgccccacccttcccctcctccccccgcctcgccgccgctcgagcagccgccggcaaagccgggcagctgcaaagacggcggcggcggggctccccatctccctcactccatggtcaacgcagttggggcaccgacgagatcggaggcaggagcacggcaccggcgacgacgttcggatccggcgccggtgagctcggatccggccctcgcttggcggcagcgagcctacgaggggctggcgggatggtggcggagtcggcgcgagctacgcaccgacganggccgggcggcggcgacggcgacgagcccaggccagcgcgtggtgagctcggatccggccctccattggccggatctggtacttccaccggcggcggcgagccgacgaggggctggcgaagcggcggcgggcggcggccctcggtcccgaccagcgacgtcgaggccgggcggcggcgtcgacgggcttcttcggcgcgggctcgtcggcgacgacggctgctccggcggtggctgccgcggacctggccgggggctgccgacctgctgcggtctgccggtggcaaggacggcgccttaatgt

SEQ ID NO: 86946 - DNA, 573 bp, Oryza sativa
  Clone ID: PAT_MRT4530_85940C.1
cggggcacaacctaaaaaccaaactgcaaaaaaaactgaaagcaaaccccaaatgaaaccgggggggatacactgccagctaaacccaactgtacatgcacaccaaaacccaagcgtattattctccaaactcacagaccttacatttctgccatgaacaacaacaacaacaactttaggcaaaaaccttatccacactgtgagggacaccttaaacccacctcaccttggcaaatctaaccccaggaagaataactgggcataccgaagagctaaaaacctgggagaaaaacgcccttaacaaactgtggcttatcgcatggaaaaaaaccagacttttgaggggttcgggaaggataccatctagctcttgtggggggaagcccaaataacggaggaggaggacacccaataaggagacgaggggggggccccctcagcccacaaaagaaagggtgcctgcacccacccaaaaaggggccccgaaaacttgcaaaaacgggaaccaccctacttacaaggtccagtgaaaaaggggtaaacctttcccggaaaaccgggggccaccgtttt

SEQ ID NO: 86947 - DNA, 4314 bp, Oryza sativa
  Clone ID: PAT_MRT4530_85941C.1
atggatgctccggtacttagttcttcgcttgcccttggtgccatgagtcccctgctcggtaagctcgatgaactccttgctagtacggagcacacggcaccgagcatccagcaaatcagagccaatcttggcatcacaagcacacgcctggtcgagctctccatgttgcaagatcctcccctcgtggccaagtactggatgaaggatgcgcgcgagctgtcctatgacatggaggactgcctcgacctcgaccaggtcgccggcggcggcgaggaggcggattggatcgatcgcatcgctgggttcagatctcgcgtggaggaggccaatagacggtacgagaggtacaatcttgattccatccttggctcctccacaaacattccaatcgaccaccgccttaagccggccgtcgggaagccggcgatggagcatgttggtatggaagggccgatggatgagctccgccggtggctgaccgacgaggcgcaggagctcaaggtggtatctatcgtcggcgttggaggggtgggtaagagcacgtttgcgcagaaactatggcggaaacttggtggacaattcgattgccgggcttttgtgcacacggccaagaagcctgacatgaggaggattttgaggagcatactctctcaagttcgtccgcgacaacagcccgaggtttgtgaggtgcataacctcttagaagatctcagaaaacatctactagataagaggtacttcattatagtggaagatttatgggatacatcagtatgggatgttgttagccgtgcttttccaaagggtaattgtggtagcagaatagtaacaacgacaaaatttgaggaagttgctctgacttcttgtggttatcactctaagtacgtatttaagataaaacctcttagtgaggatctctcgaaggaattgattgtcagaagagtttttgtatccggcaaaggatgtcctcaacaatgcagtgccattttagatgagattacaaacaaatgtggcggtttaccactagctctaaacatcatcgccagtcttctatcttgccaacatgaagtattagagcactggaaacatgcaagggattttttatgcaacagtttgaggacaaatccaacttttgatgagattctgaaacaagtagtaaacctttgctacaatagtcttccccattgtttgaagacatgtctactttattttagcatatatccagagaattacacagttatgaaggaagatttggtgaagcagtgggcagctgaaggttttctctgtgcaacaaaaggagaagaaattatggcagttgcagtgagctgttttgacaggcttgtcaatttaggattgattcaacctattgatatcaattataatgataaggtggtgcactatgcagtgaataacatggtacttgatattattacttataagtccatagaagaaaattttatcactgtaatggataaggattgttatcagatgagtatagaactttctgacaaggttcgccgactgtcgctccactttggcagtgcaacatatgcaactataccagcaggtattggactatcccaagttcgatcacttacctttattggtttgttcaattgcctgccttccattgtgaaatttaagcttgtccgagttgtgatccttcattttttgggtgatcatggaaacttgagtttgaatctcagaaaactaggtgaactgtctcagttgaagtatctgcagataaaatgtaatgtcaccgtggagctaccatatcagatgcaagggctaaaacatttggaagcattggaaataagagcaagaacagtgtctattccatcggacatttttcatctgccgatgttgtttcatctcctccttcgagccgacagaaatctgtccccgcggattgctaaatctttttgtctggaacctaatccttcagggaagatcagttccttggataacctgaacgtcctgtcgtcacctcccatctttcttcagacatttgaagtgttgccacctattggcgtctattcaagacttcctgagtggatccaacaactccgcaaactccgcattctgaaaattgcgatcagacaattgatgaggaatgatattgatattctttcaggattgcctgtgctcactgctgtctcgctgcatattcggcaatccatggaagaaatcattgtcttccaccgcgagtcattcccagctctcgactgtttgaagctatcatgtagtgtactgtacctcacttttcaggaagaagcaatgccgaatcttcggaggctgaagctaggattcaatgctcacagaagagagttcttttacgtcaatatgctttctggcattgagcacctgaaaaccctgcaggaggtagtaggacaaattggtttaggctttggtgcaggggaatcggagtgggcagctgcagagtatgcattcaagaacgcctttagcaggcattcaaacttaacaagcttcaatatacgaagagttggtggtgttgatgaagataactgggaaccccaaattttggatcagacagaaagctcttcactttccttgtctgctccaggagtaagtagccttgaaaagttcatatttactaaaacagaatttagtcagttcccgggatgtgtagatgtgtcggatcagaaagaaaactcttcactttcattgtccttgggagtaagaaaccctggaaagtgcgcagttgatacagaatccagtcagttcccaggatgtatagatgtgtcggatcagaaagaaaactcttcactttcattgtccttgggagtaagaaaccctggaaagtgcgtagttgatacagaatccagtcagttcccaggatgtatagatgtgtcggatcagaaagaaaactcttcactttcattgtccttgggagtaagaaaccctggaaagtgcgcagttgatacagaatccagtcagttcccaggatgtatagatgtgtcggatcagaaagaaaactcttcactttcattgtccttgggagtaagaaaccctggaaagtgcgcagttgatacagaatccagtcagttcccaggatgtatagatgtgtcggatcagacggaaagctcttcactttcgttgttattgggagtaagaaaccccggaaagtgcgtagttgatacagaatccaaccagttcccaggatgtatagatgtgtcggatcagaaagaaagctcttcactttcgttgttattgggagtaagaaaccctgaaaagtgcgcagttgatgcagaatccagtcagtttccaagatgtgtagatgggtcggatcagaaggaaagctcctcgcattccctgtgcgcttcggtagtaagcgatgcttcagaaatgctcgcagctaacactgtaaaatccagtggtggaagtgtggcgggtgcaagtggtagcgggaaatgcaagaaacaaggctgcgaggagaaagccggaggaaaaaccatcttctgcagggcccatggcggaggcaagaggtgctactatcctggctgtacaaagagcgccgaagagcacacagacttctgcttagctcatattagtcgccgctgcatgcacgagggttgtttccggtttgcacgccggaaaactgacttctgcagcaagcatggaggcggcaaaaagggtgagactgagacccataagaagtcgtccaggagtgcagaatctcgctctggagccaccatcactcacgtgagttcaggtaaaaattgcaagtctccaggatgcacaggaaccgcagacggagtcaccatgctctgcgagaagcatcgcatgaaaatggcctgctcatttccaggctgcaccaagatggcatgggggccgagtgcacactgtgtacgccacggagccggcaagagatgtaagtttctgggctgcaccaagagcacaaggcgaagcaccgatttctgcaagacgcacggtggatcaggaggtgcagatgatactctgtgctcatggcgaggaggggaatcaagcgttggtggtggcgaggacaagtgtgatagaattgctcggggaaggtctggtctatgtgcagctcacagcgctcttgtcctggacgaccgtgcttcctgcgatggcacaatagccccagcagccgcccagctggtccaggcagatgaactcatcaaacccgatgtgatagaacaccctgccgtggaggcaggtcgcgatgacaaagctgatggtggtgttggaggatcaggatcagcagcggctgtggctgaccaaagactagatttgaatgccgaggcgattattacacaacatttctttgtttga

SEQ ID NO: 86948 - DNA, 414 bp, Oryza sativa
  Clone ID: PAT_MRT4530_85942C.1
ggccgccccttttttttttttttttttttcggggcaaaactacactgccagatgctttaaaacattaaataaattcataatactcaattaatcgtacgttaattatatttcgttttatcgtatagctaatcatccaaaccggctagatgaaaagaacgcggccttctaaacaggcctaaattaggcgcgtacacgcgcggatgcacaaccacaaatgctctgggtaggagaaccgagaatgccagcacgttactccctggggatgtctccactccccagatggaccaggccaggttttaaaatccggcgctgttgcttcacgagaaatggcccgcggcgtcacgcagctgcagcaactactgggagcgggccgcggccccgccactgagggctagaatgcctgttccttggccc

SEQ ID NO: 86949 - DNA, 1836 bp, Oryza sativa
  Clone ID: PAT_MRT4530_85943C.1
atggttgtggcgctgccggccttcaccgacaacctcaaggaggtcgtttgtagcagctgggataccacgggcaagggacgagctgttggctttttgcaaacctaccacgccgccgccgccgccgccgccgacgaggaggagatgtggcggcgttcgggagctcgtgctctcctcctcctccgctcctccatccacaggcctctcccgccgccgccatctccacttcgagccttaacccgagcgccaccgcctccccgccccctctcccgcttcctctcctcctccccggagcccctcccggatgccggcggcggcgctgcttccgcgtcctctgatcccaccgatgccggggaggatggcctcgcctctgatcccaccgaagccggggaggacaacctggcctcgctctgggaggaggacgccggggacgccgacgacgtcttcgccgccgacgcctcccccgaccccgccgatgctgtggtcgacgaggtgctggccgcgcgcgtcggcgccgtcgtggagtccacccccgaggatcagatcccctccgccctcgccgacatggtcgtggacttcaacgagccactcctcgccgccattctcgtgtccgccgccgagagctgctccggtaaaaagctgctccgcctgttcaaatctgccgggaagaacaaccccgcggccaagagcctcgccaatcttgagatagtcgtcgacaagatcgctgattccgatgagatcgacaagatggatgtatatttgctctgggatttggttaaggaaatgggagctgtgcctggatcagtgaatacacaggtgctgaataaactgcttgcgatgttctggaagctcgagaagtcaaaggctgcattggaggcgtttgacatgttcagtgagttaggatgcgctccggatggcgacagctattatctggcgattcaagcagctgggaggaagtccatggttgatgctgcatggagagtttgcgatgggatgattagctctggctgcttccccgatggcgagaaggtcggtgacattgtgatgttcttttgcaagaagaagaaggtgaaggaggcacattcagtatacataactgcaaaggaaaagaaggtgcaggctccgacctcggccttaactttccttgttagcgctttggcgaggaatgacgagaccattaatacagctcttgagctgctggaagagtaccagggggaatctcttaaggatgctggccagtcctatgctgcggttatacatggtttgtgtaatacaaacaacgtggaagatgcaaagaaagtgctgatgaggatggtaaatctaggcccagctcctggtagcgcagtgtttaactttgtcatcacggcattgtctaaaaatggagaaatggaggatgcaaagggtttgatgagagtgatggagaaccaagggatctgccccgacatttatacatacagtgtgatcatgagtggctacgccaaaggaggcatgatggatgaagcccatgcactacttcgtgatgctaagaggattcatccaagactaagcagggttacatatcacacacttattcgtggttactgcaagatggaggagtttgagaaggccttggagtgcctaaaggagatgaaggaagatgggatggagccaaatatggatgagtacaacaaacttatccagtcactttgtctcaaggctttggactggagaactgctgagaatctcctgaaggaaatggaggatggtggattatgccttaaaggcactactcgaagccttatagcagcagtcaaggaattggaaatggatgagctgtcaaaagccagccaagaagcatag

SEQ ID NO: 86950 - DNA, 477 bp, Oryza sativa
  Clone ID: PAT_MRT4530_85944C.1
atgcggcagaagcagcaggctgctactcgccctcgcgagatggagatcggcgcaggcggcgggcggctctcctcgtcgccctcgtcgacaaagctccggcggcgagggtggtcctactcgtcgcccttgcggccgccaccggagagagagagagctggggtgggtggcgacgatggcgtgacggagaaggccagggaggatgccacccgcctctcgccgcttgccgtcggccaccgcagcgattttgaggagcccatccaggggtatcctccattccgagctgagttcctctacagcactctagaagccgacagtgtgggcggggcagtctcgtctccggcaagcaccaagtggagcaacgtcggggccatcgcgacgtggagcatcgacggcatcctcgggctcatctctggcaagcggcgagtagagcagcggcaggcccactcgtggtcgttgccacgtccggaaattcactag

SEQ ID NO: 86951 - DNA, 1485 bp, Oryza sativa
  Clone ID: PAT_MRT4530_85945C.1
atggcgccgccggagaaaggcgcggcggcgcacggcgcggtggccaagaacggtggcgagggggaggtgagcgccgtgaggcgcccggggcggcctcgcgtcgtgcaccctgacgtggcggagttcctcttgaacttccgccgcttgcggagggagaagaagaagcgtgcgacgccacggccggcggtggtggtggtgcccggcgagcgcgcgaggtacgactgcgccttcgaggacgagggggaggtcgggcggcgaggagggttcgcgcccgggcggcttgtgtggggcaaggtgaggtgccacccgtggtggcccgggcaggtgttcgacccggctgacgcgtcggagcaggcgctggaggagcggaggaagcacggcgccaccctcgtcgccttcttctgggacaagacgttcgcgtgggtcgacgcggatgagctcctcccgttccgcggtgacggcggcgacttcgcgctcctcgccggccagagcgcccacgccatgcccgcgctcaccgcctcggtggacgccgcgctgggcgaggtcgcgcgccgcgtggccgcggggctctcgtgctgctgctgctgcgacggcgccgccgtggccaagaagcaggtgatcgagaacgccggcatccgggagggagcgcacggcgcgacggtcgacgcggcgttcacgcgtggcgcgctccgcggcgaggccttcgtcgggtacgtctccgcgctggcggtggcgccgctcgccggagccgacaggctcgacctcgccatcgccacggcgcagctgaaggcgttcgaccggtggaggggcgccgccgcgaggagcctcccggagtacacgtgtcaccacggcatcgaggcgaacgccatggcgccacgccgcaagagaggaagagcaaccaagaacacgatcactggcaatgtggatgacgatgcatcggaactggagaatttcgagccaacgccacagccactgtcccatcagatgtccacaaagatcggcaagctcatgagccgcgccgcgcagcagatgtcgcggtcaccggcggtgatccaccgtgacaccaccaccaccaccaccaatggcgatgcgccgcctcctcctcctccggcgatttcactcacaatgggaaggtgcacaagaagtgcagatgagaagaagaagaacagtgacatcagagaagatccttttctggctggattggtgctgaatttcatctgcccaagtgctgttcttcctctaagtgaacttgtcaacatcttcagcaagtttgggccgatcatggaggccaagacagagaatgcatatgccatggtgatgttcaagaggcgtgcagatgctgaggctgcattctcaggcacaaccaagatcaacgctcttagctcttctctcatcagcttccggctcaactactcgatgtcggcttcgccgatcgattctccagagtgctcactgaacactgccatggatcgcctgctcttttga

SEQ ID NO: 86952 - DNA, 528 bp, Oryza sativa
  unsure (1)..(528): unsure at all n locations
  Clone ID: PAT_MRT4530_85946C.1
ggctngcgggcgggggccgactgtggtttctcctttgctggttgcggcgctgcccgccgaaaaagcggttgttgggcggggcagcacattgaattcatccttcttgctgggtggggggccctctttccttcggtgggggggggccctgggntgatgattgatgctagggtatgtgtctaagcgcccatcccaccctttctgcggagctactaactgcttggggggctcagatgccgggcgggcggcggggcagtccggtgggtggggtcaccagacattttggtgacgaaggggcggggggttgtttgaggactttacagactctggttggccattatngggagagacccctgtctggtcgcgtgcctgtggagtcgggttggagattcacagtttttttctgctcttggtaactgcggcaggtgggggaacaggcacagaggggtggggccttttgccttagctcggccggagctgggaattgtcacttcggggatattatgccctccacgcggtgggtaccagctt

SEQ ID NO: 86953 - DNA, 2982 bp, Oryza sativa
  Clone ID: PAT_MRT4530_85947C.1
atggtgaagacaaggaacgatccccgtgactccaacgacgccagtggtagcgaagagcagaccgatggagctcataccagtggtgcatctggcagcagtgcatctccaccgcccgagaacccaacggtcactcagatgatgacaatgatgatgcaacagatgcagcaacattaccatcagatgttgcagcaggcgcagcagaaccagcagtctggtcctccaccatcacacctgtccaaactgttagactttctccgtatccagccacccactttctcaagcaccaccaacccaatggaggccaacgattggctccgtgctattgagaagaagctgaaccttctgcaatgcaacgaccaagaggaggttgcatttgctaacaccagctgcaaggtcccgcttctgcatggtaggacaactacgtggaaggcacagattcctgaggggattatggcacaaaagaaaagagagttccgtgcattgcaacaaggaaccaagacagttacagagtacttgcacgagttcaaccgccttgcgcgctacgctcctgaggacgtgcgcactgatgccgagaagcaggagaagtttttgtttggtcttgatgatgagttgaccaaccagctaatctccagagtctatgaggactttgagaagcttgtggacaaggctatccgtcaggaagagcaacgcaataaaatggactgtgcctcgcattctttcatttccaagagatttgctggaacacatggattatcggtagtggtacttaaaataccgatgcaggttcatacccctagaagtgacatgaagacagcacactactgtccctcagtgaatatagagatcaaaaagtcactgttcctatccaacctcatccttctcgaatccaaagacctagatgtcattctcggaatggattggttgaccagacacaagggagtgattgactgcgcaagtcgcactatcaccctaaccaacgacaaaggggagaagatcaccttccggtctccagcaccgcagatgtccgtagcaagtctgaatcaggctgctactgaggatcagacagaaataatggagaaaagtctcaagaggttggaggatattcctatagtacaagagtatcctgaggtgttcccagaagacctcactacaatgccaccgaagagagaaatcgagttctggattgatttggcacccggaactgctccaatttacaagaggccatacagaatggcagctaatgagctagcggaagtcaaaaagcaaggtgctccggtcatctttgtggagaagaaagacaagaccaagaggatgtgcgtcgattatcgcgccctcaatgaggtcactatcaagaacaagtatcccttgccaaggattgatgacctgtttgatcagttaaagggagctaaagtgttttccaagatagatctgcgatcaggctatcaccagttgagaattcgggaagaggatattcccaagacagccttcaccacttggtatgggttgtttaagtgcacggttatgtcattcggactcaccaatgcaccggccttcttcatgaacttgatgaacaaagtgtttatggagtttcttgacaagtttgtcgtggtgttcattgacgatatacttatctattcaaagtctgaagaacaacatgagcaacatcttcgtctggtactcgagaaattgaaggagcaccagttatatgccaagtttagcaagtgtgacttctggttgttggaagtcaagtttcttggtcacgtcattactgctcaaggtgtggcagtggatccatcgaatgtggagtcagttaccaagtggaccctacctaagacagtttctcagatccggagttttcttggacttgcgggttattatcgtcggttcattgaaaatttctccaagattgccaggcccatgacacagttgcttaagaaagatgaaaaattcaagtggtcagctgagtgcaaccaaagttttgaagaacttaagaagaagttagtctctgcaccagttctgattctgccagacaagacgaaagacttacagcggcactatctcattggcaaccgctgtgaagtctacactgaccacaagagtctgaagtacatcttcactcagcccgatctgaacctccgacagcgaagatggctggagttgataaaagattatgacatggggatacattatcatccaagcaaagcaaatgtggtggcagacgctttgagcagaaagagctattgcaatgcagtatgtactgaaggcatgtgtgacaaattgcagcaagatcttgagcacctaaatttgggcatcgtggaacacgggtttgtagttgctctagaggcacgccctacgctcgtggatcaagttagagcagctcaggatcaaactggagaacgccaactgtttaggacagaagtgctaattgaggcagaggagaaagttagaaccatcagagagaggctgagaattgcacaatctcgacagaaaagctacgcagacaaccgccgaagagagctcactttcgaagcaggagactatgtgtaccttcgtgtcactccgcttcggggagtacaccgtttccagactaaaggcaagttggcaccacgctttgtgggaccaaacaggatcttggaacgcagaggtaaagttgcttaccagcttgagctcccatctaatatggttggtatccacgatgtgtttcatgtatctcagttgaagaagtgtttgagggtacccgaggaacaagctagctcagagcacattgacatccaggaaaatcttacatatgtggagaagccgatccgtatccttgagactagtgagagaaggactagaaacaaggtgatcagattttgcaaagttcagtggagccaccactcagaggaagaggccacctgggaaagagaagatgaattgaaggccgctcatccgcacctcttcgccagctcttccgaatctcggggtcgagattccgtttaa

SEQ ID NO: 86954 - DNA, 1659 bp, Oryza sativa
  Clone ID: PAT_MRT4530_85948C.1
atggcaccagcacagccagctccaccagctcaagcaaaggagaccggggcaaagccagggccctgctacaactgtggcgagcatggccactttgctgacaagtgcccaaagccgtgccgtgccgggccaaggtttgttctagcccgcgtcaaccatgcgtctgcagaggaggcacaaacagcaccagaggttgtactagacctagatgtcattcgtgggatggattggctgaccatgttcaagggcgtcattgattgtgtgaatcgcacggtcaccttggtcaatgagaaaggagaaacagtggtgtacaagtctccagcctcacccaagcaaggagcctcattgaatctggttgaggcgaaaagttctgtgaccgcagaggagaagagttcgacgaaattggaagatattcctatcgtctatcaatatccagaagtgttccccgaggacctcactaccatgccacccaagagagagattgagttccggattgattttgcactgggaactgctccaatctacaagaggccgtatagaatggcagccaatgagctagcagaggtgaagaaccaagtcgacgaacagcagcagaaacgatacatccgaccgagtacttcaccttggggtgctccgatcatttttgtggagaagaaggacatgacgaagaggatgttcgtcgattatcgcgcacttaatgaggtcacgatcaagaacaagtatccgttgccgagaattgatgacctattcgatcagttgaaaggagctaaagtgttttccaagatagacctgcgatcaggctatcaccagttgagaatccgggaagaggatattcccaagtcgggagaagagcatgagcaacatcttcgtctggtactcgagaagttgcaagagtaccagctctatgccaagttcagtaagtgtgacttctggttgtcggaagtcaaatttcttggtcacgtcattactgctcaaggagtggcagtggacccatcgaatgtggagccagttacaaagtggaccccacctaagacagtgacccagattcgaagtttccatggacttatgggttattaccgtcggttcattgagaatttctccaggattgccaggcctatgactcagttgcttaagaaagatgagaaatttaagtggacagctgagtgtgataagagttttgaggaactcaagaggaaattagtgtctgctcaagaagaactactgcaacgccttgggtttgaagacatgagcgtcaaattgcaacaagagcttgaacatctcaatttgggaatcgtggaacataggtacgtggctgccctaaaagcacgacccacgctcgtggatcaagtccgagcacctcaggtaaatgatcctgaaatagctgaactgaaaaagaatatgaggttcggaaaagcccgtgatttccatgaggatgagcatggcacaatctggttgggagaaagattttgcgtacctgaagacaaggagttgaaagacctgatactcaccgaggctcatcagacccaatactccattcatcccggcagtaccaagatgtaccaggatctcaaagaaaaattttggtgggccagcatgaggagggaaatggcggagttcgtcgcagtctgtgatgtttgtcagcgagttaaggcagaacattag

SEQ ID NO: 86955 - DNA, 3525 bp, Oryza sativa
  Clone ID: PAT_MRT4530_85949C.1
atggtgaagacaaggaatgatccccgtgactccaatgacgccagtggcagcgaagagcagatcgatggagctcataccagtggtgcatctagcaacattccatctccactgcccgagaacccaacggtcactcagatgatgacaatgatgatgcaacagatgcagcaacattaccatcaaatgttgcagcaggcgcaacagaaccaacagtttggtcccccaccatcccacttgtccaaactgttagactttctccgcatcaagccacccactttctcaagcaccaccaatccaatggaggccaacgactggctccgtgctattgagaagaagctgaaccttctgcaatgcaacgaccaggagaaggttgcttttgctacacatcagttgcaaggtcccgcttctacctggtgggacaactatgtggtaacccgtccagatgcaacggaagttacttgggcagagttttgtcaaagcttcaggaaggcacaaattcccgaggggattatggcacaaaggaagagagagttccgtgcactccaacaaggaaccatgtcagttacagaatacctgcatgagttcaaccgccttgcgcgctacgctcctgaggacgtgcgcaccgatgctgagaagcaggagaagtttttgtttggtcttgatgatgagttgaccaaccagctaatctcgggagtctatgaggactttgagaagcttgtggacaaggctatctgccaggaagagcaacacaacaaaatggaccgtaaaagaaaggcaactcaattcagggctcctcaggggaacaatcagaagcctcgcttcatgacgggacaacaagctcagttagatttaccagctgtgttagctcagtcagaacagctcaagaaggagtctgcaggaaagccaggaccctgcttcagctgtggcaagcacggccactttgctggcaagtgtccgaagctgaagcgcgctggacctaggttcatccaggcccgcgtcaatcatgcgtctgcagaggaggcacaggcagcaccagaggtcgtgctgggcacgtttccagtgaactcatatctggcaacagtactttttgattcgggtgcctcgcattctttcatttccaagagatttgctgggacacatggattatcagtagtggaacttaaaataccgatgcgggttcatacccctggaaataacatgaagacagcacactattgtccctcagtgactatagagatcaagagatcacagtttctatccaacctcatccttcttgaatccaaagacctagacgtcattctcggaatggattggttgaccaggcacaagggagtgattgactgcgcaagtcgcaccatcaccctcaccaacgacaaaggggagaagatcaccttccgttctccagtgtcgcagaagtccgtagtaagtctgaatcaggctgctattgaggatcagacagaaatagtgaagaaaagtctaaaggaattggaggatattcctaaagtacaagagtatcctaaggtgtttcctgaagacctcactacaatgccaccaaagagagaaatcgagttccggattgatttggcacccggaaccgctccaatttacaagaggccgtacagaatggcaactaatgagctagcagaggtcaagaagcaagttgatgaacagctgcagaaaggatacatccgaccgagtacttcaccttggggtgctccggtcatctttgtggagaagaaagacaagactaagaggatgtgcgttgattatcgcgccctcaatgaggtcactatcaagaacaagtatcccttgccaaggattgatgacctgtttgatcagttaaagggagctaaagtgttttccaagatagatctgcgatcaagctatcaccagttgagaattcaggaagaggatcttcccaagacagccttcaccactcggtatgggttgtttgagtgcacggttatgtcattcggactcaccaatgcaccggccttcttcatgaacttgatgaacaaagtgtttatggagtttcttgacaagtttgtcgtggtgttcattgacgacatacttatctattcaaagtctgaagaacaacatgagcaacatctttgtctggtactcgagaaattgaaggagcaccagttatatgccaagtttagcaagtgtgacttctggttgtcggaagtcaagtttcttggtcacgtcattactgctcaaggtgtggcagtggatccatcgaatgtggagtcagttaccaagtggaccccacctaagacaatttctcagatccggagttttcttggacttgcgggttattaccgtcagttcattgaaaacttctctaagattgccagacccatgactcagttgcttaagaaagatgaaaagttcaagtggtcagctgagtgcaaccaaagttttgaagaacttaagaagaagctagtatctgcacccgttctaattctgcccgaccagatgaaagacttccaggtctattgtgatgcatctcgccaagggctgggatgtgtactgatgcaggaaggcagagtggtcgcatatgcttcgcgacagttgcgtccacacgagaccaattaccctactcatgatcttgagttggcagcagtggttcacgctctgaaaatctggcggcactatcttattggcaaccgctgtgaagtctacactgatcacaagagcctgaagtatatcttcacccagcctgacttgaatctccgacagcgaaggtggctggagttgataaaagattatgacatggggatacattatcatccaggcaaagcaaatgtggtggcagacgctctgagcagaaagagctattgcaatttagtatgtactgaaggcatatgtgacaaattgcagcaagatcttgagcacctaaatttgggcatcgtggaacacgggtacgtagctaccctagagtcacggcctacactcgtggatcaagtcagagcagctcaggagaaagttaggaccgtcagggaaagactgcgaatcgcccagtctcggcagaagagttatgctgataactgccgaagggagctcactttcgaagcaggagattatgtgtaccttcgtgtcactccgctccggggagtacaccgcttccagacgaaaggcaagttggcaccacgttttgtgggaccatacagaatcttggaacgcagaggtgaagttgcataccagcttgagcttctatccaatatggctggtattcatgatgtgtttcacgtgtctcaactgaagaagtgtttgagggtacctgaggaacaagctagctcaaagcacatcgacattcaagaggatctgacatatgtggagaagccgatttgtatcctcgaaaccagtgagagaaggaccagaaacaaggtgatcaggttttgcaaagttcagtggagccatcactctgacgaagaagcaacatgggaaagggaagatgagttgaaggccgcccatccgcacctctttgccggctcttccgaatctcggggtcgagattccgtttaa

SEQ ID NO: 86956 - DNA, 229 bp, Oryza sativa
  Clone ID: PAT_MRT4530_8594C.1
aacacccaaccaacagttcatcatcacatcattttccagggggaaattaattaattaacatatccaccctgttttccaatgggggctaagaattaatcagcaccatccaaccacagcactggttaagttgaaactggaaattaagggacaaaacaataattggagggggtttttttcccttgttttttaattttcacagagctagactaataaattacctttttttttt

SEQ ID NO: 86957 - DNA, 204 bp, Oryza sativa
  Clone ID: PAT_MRT4530_85950C.1
atggcggacttcgacaaaggagaggtggacgagatagccctcgagcatgcgaacccgaaggcgatgacagcacggcttggcggcggccctaacggcggcggcgcgcggcggagctcgggagagcggcacggcagcggtaggaagcgcgggaggacgcggcgagagcggaaaaagagagaggggaacacaaggagcattttatag

SEQ ID NO: 86958 - DNA, 427 bp, Oryza sativa
  unsure (1)..(427): unsure at all n locations
  Clone ID: PAT_MRT4530_85951C.1
ggcgtgcgcgcggtggtgtgtttgggccctcttctgggcgcgctcttttttttttggtgtgttttttgggntttcggggggtttccaaagggggggctcatgttttatgaacaacaacccagtttgggcatatttggtggaactttactctttctccaaccaaggggacggccgaaggcaacatagctcactctcagggggtctcactgggttaccttaccacaccacaaagatggtcagtcagtcagtccaacggctggcaacatctctgaataattggcagttctcctacgggccagcagccgcagggcagctggatctacaggctggcttcaatttcttccagggggggccctttcgtctggggcccgatgaagaatttgaaaacatgggacgcccctgcaatcaccccaaacggcgagaagag

SEQ ID NO: 86959 - DNA, 181 bp, Oryza sativa
  Clone ID: PAT_MRT4530_85952C.1
aaaattacaagggaactaggaatggtagcacacgcgcatttcgcgtgggcatgtatcgtagctgtatttgagataatcgtaagtaataggctgattgtgttaaaatgttgcatttgttatatagtaaactataggcatatggatcttatatcgttggtttgattataaaaaaaaaaaaaaa

SEQ ID NO: 86960 - DNA, 1938 bp, Oryza sativa
  Clone ID: PAT_MRT4530_85953C.1
atgtcagctcagtcaaaacagctcaagaaggagtctgcaggaaagccaagaccctgcttcaactgtggcaagcacggccactttgctggcaagtgtccgaagctgaagcgcattggacctagacataagggagtgatcgactgcgcaagtcgcaccatcaccctaaccaacgacaaaggagagaagatcaccttccgttctccgacaaaaatagcggaaaaaaatcccaagaagttggaggatatacctatagtacaagagtatcctgaggtgttcccagaagacctcactacaatgccaccgaagagagaaatcaagttccggattgatttggcacccgggactgctccaatttacaagaggccgtatagaatggcagctaatgagctagcagaggtcaagaagcaggttgacgaacagctgcagaaagggtacatccgaccgagtacttcaccttggggtgctccggtaatctttgtggagaagaaagacaagaccaagaggatgtgtgttgattatcgcgcccttaatgaggtcacaatcaagaacaaatatccgttgccaagaattgatgacctgtttgatcagctaaaaggagctaagttgagaattcgggaagaggatattcccaagacagccttcaccactcggtatgggttgtttgagtgcacggttatgtcatttggactcaccaatgcaccggctttcttcatgaacttgatgaacaaagtgtttatggagtttcttgacaagtttgtcgtggtgttcattgacgacatacttatttattcaaaatcagaagaggaacatgagcaacatctctgtctggtgctcgagaaattaaaggagaaccagttatatgccaagttcagtaagtgtgacttctggttatcagaggtcaaatttctcggtcacgtcattactgctcaaggtgtggtagtggatccatcgaatatggagtcagttacaaagtggaccccaccaaagacagtttctcagattcggagtttccttggacttgtgggctattaccgtcggttcattgaaaatttctccaagattgccagacccatgacacagttgctaaagaaagatgaaaaattaaagtggtcagctaagtgcaaccaaagttttgaagaacttaagaagagcaattatcctactcatgatcttgagttggcagcagtggttcatgctctgaaaatctggcggcactatcttattggaaaccgctgcgaagtctacactgaccacaagagtctgaagtacatcttcactcagcccgatctgaacctacgtcagcgaagatggctggagttgataaaagattatgacatggggatacattatcatccaggcaaagcaaatgtggtggcagacgctctgagcagaaagagctattgcaatgcagtatgtaccgaaggcatgtgtgacaaattgcagcaagatcttgagcacctaaatttgggcatcgtggaacacgggtacgtagctgccctagaggcacggcctacgctcgtggatcaagtcagagcagctcaggtaaatgatcctgaaataactgagttgaagaagaatatgagggttggaaaagcccgggatttccacgaggatgagcatggcacaatctggttgggagaaagattgtgtgtacctgacgacaaagaatttaaggatctgatactcacagaagttcatcaaactcagtattcaattcatcccggcagcaccaaaatgtaccaagacttcaaagaaaagttctggtgggtcagcatgagaagggagatagccgaattcgtcgcactctgcgatgtttgtcagactaacgtgccatctctgggaggtaacacgctagctccagctggggacgagcgcctagaagccctcgtcctgacgggatggggcgaggcgtgcgtcagattgcctgtcgccacctaa

SEQ ID NO: 86961 - DNA, 3795 bp, Oryza sativa
  Clone ID: PAT_MRT4530_85954C.1
atgatcgtccttcagcaccgtccctataatccgggcaacttcaacaacgactacaacagtggcagtcacaacagcagtgaggagcaccatcacaactcaactccacccccactaatggcaccagctcagtcagatctaccagctgtgtcaactcagtcagaacagccccaggggtctgcaggaaagccagggccatgcttcaactgtggcaagcacggccactttgctggcaagtgtccgaagctgaagcgcgctggacctagatttgctgggacacacggattaacggtagtggaacttaaaataccgatgcaggttcatacccctagaagtgacatgaagatagcacactactgcccctcagtgactatagagatcaaaaggtcaccatttctatccaacctcatccttctcgaatccaaagacctagatgtcattctcggaatggattggttgaccagacacaagggagtgatcgactgcgcaagtcgtaccatcaccctaaccaacaacaaaggagagaagatcaccttccggtctccaatgccgcataagtccgtagcgactctgaatcaggctgctattgaggaacagacagaaatagcaaagaaaagtcccaagaagttggaggatattcctatagtacaagagtatcctgaggtgttcccagaagacctcactacaatgccaccgaagagagagatcgagttccggattgatttggcaccgagaactgcaccgatctacaagaggccctataggatggcagctaatgagctagcagagttgagaattcgggaagaggatattcccaagacagccttcaccactcggtatgggttgtttgagtgcacggttatatcatttggactcaccaatgcatcggctttcttcatgaacttgatgaccaaagtgtttatggagtttcttgacaagtttgtcgtggtattcattgacgacatacttatctattcaaagtctgaagaagaacatgagcaacatctccgtctggtactcgagaagttgaaggagcaccagttatatgccaagtttatggatccatcaaatgtggagtcagttacaaagtggaccccacctaagacagtttctcacatccggagttttcttagacttgcgggttattatcgtcggttcattgaaaatttctccaagattgtgaggcccatgacacagttgcttaagaaagatgaaaaattcaagtggtcaactgagtgcaaccaaagttttgaagaactcaagaaaagctgccctagaggcatgacctacgctcgtggatcaagtccaagcagctcagtgcacactacctatacggggaaaaggttggcagagctctacctttcaagaatcatgtgtttgcatggggtgcctaagaagatagtatctgatcgaggaagtcaattcacttcaaagttctggcagaaactgcaagaagaattgggaactcgtttgaatttcatcatagcctaccatccacaaactgatggccagactgagcgagtgaatcaaatattggaagatatgttgcgagcttgtgcgcttgactttggcggagcttgggataaaagtctaccgtatgctaaattctcttacaacaacaattaccaggacagtttgcaaatggcaccgtttgaaacattgtatggccggaagtgccgtacaccgctcttctgggatcaaactggagaacgccaactgttcgggacagaagtgctaaccgaggcagaggaaaaagattacccaaccaagaccgagatcgtcaggtgtaatagctctggagacctctaccccttcccggcggacgatttttcctcggcagcctccgctcgtgctttcattgctacggagtccaccacggacctttggcatcaccgtctagggcacattggtcacgaagctctcacccgcttgtcacaggcttctgtcataccaccacccaggggtgctgcccctgttgtcatgcttgccaacttgacccagttctccaccaccattcgcaacatacaatgtgacaatggccgcgagtttgataacctcaccgcccgcacctttttcctcactaacggtgttcacatgcgaatgtcgtgcccccacacctaccccagaacggattttacagcaccttcgctgactccgatcagtcgtccccactccggccgctctggcccagcggcgcgcgtggctcctgccggccctactgctgaggtggctcgctccactgagccgcccacgcctcctgttggctcggctcctgtcagctcggcccctgctggcccggcctcgacggctccctctgctgagctgcctgcccacgagtcggcttcccctgggccgccatctaccgggtcggctgcccggcgccctcctgcgtcgccatcctccaccagcagcatgctctggcgaccgccgggaccacctcccggctttcctgcgctgccatctaggccgccaccactgctggcgcctcctagcggtgccccgacacgtgcgcgcagttcacgcgttcccgatgctgttataccaaaccaactcggtgtttcgcccggtgtcaacacacatggcatgacgactcgcggcaaggacgacatccacctccctgttacacgctacaacctcaacgcaactaccctctctccagtgcctcgcacttatcgtgccgccttggaagaggagtttgctgcattaatgccttcctgcatggtactttacaagagaccgtctactgcactcagccatctagatttgaagaccacaccaggcctcatatggtgtgtcgcctcaacaagtcgctggtacagtcggtttgctagctacttacttaccctgggtttcattgaggctaagtttgatacttctttgtttatctatcatcatggctctcacttggtctacttgcttctatatgtggatgacattgttttgactgcatcctcagctggtcttctccgttgggctattcaggctctccagtctgagttttctatgaaggaccttggttctctacaccattttttgggtatcacagtcaccggtgacagctccggtcttctcctgagtcagcaccagtatagcattgaggttctcgagcgtgctggcatgtcagattgcaagccgtgctctacaccagttgacaccaatgcaaagttgtcctcctctgatggctcacctgttgtagatcccactgactgtcacagtttagctggtgctctacattatttgaccttcactcggcctgatatttcctatgctgttcagcaggtttgtctccacatgcatgacccagggattcccatcgtgccgctctcaagcggatactccgattgggcgggttgtcctgacactcgcaagtccacctggtcattcaagcggcagaacacggtgtctcgatccagcgacgaagcagagtacagggttgtggccaatacagttgctgaaacttgttggctatgccaattattacatgagcttacaccgccctcccgggctaccttggtttattgcgacaatgtcagcgccatctatctctctactaatcctgttcagcatcaacggaccaaacatgtggagattgatttacattttgttcatgatcgcgttgctgctggttctgttcgagtgcttcatgttccaacgacatcacagtacgcggacatcttcaccaagggtttgcctacatccatttttgtggagtttcgttccagtctcaacgttcgttgcaccaacgttgcgactgcgggaggtgttagttgtatatatgtatttcatgtttatctctaa

SEQ ID NO: 86962 - DNA, 611 bp, Oryza sativa
  Clone ID: PAT_MRT4530_85955C.1
ttcaacacgtccagatatgccaccatctcttaccagccttgcacatctatggctccagctctgagctcaagaagagatcccaaaacactgtagccatgattgggttaagattgcacatatcagtgatgccgacattcggtgagatatgatacatgacatggaatgggatttggtacacagagcatatgtgaacaatgcatggagttttctcaaacttttcaagttctctgtcatcattacagcttacctttgtgattgttactaacattttgttagcctaaattgctaggaattccattggaaccacagcttgagttcagttgcctggtgacagtaacacggagaagctattaattcttaatcttcataatccactgtgtacttcatttcacggactgtaatgtcaatttcataaaccagcagttaatttggcactctgccatggttttggtatagttcactctatgataaataccattctgctcaatatttctacccttgcattcatcgtattcacattttttgtttgcatgagtttaccttgtggtttgacacattcctgttataaaaggttttcttgtaaatatttgtaaaaaaaaaaaaaaaaaaaa

SEQ ID NO: 86963 - DNA, 3930 bp, Oryza sativa
  Clone ID: PAT_MRT4530_85956C.1
atggtgaagacaaggaatgatctccgtgactccaacggcgccagtggcagcgaagagcagacagatgaagctcataccagtggtgcacctggtagcagttcatctccgccgcccgagaacccaacagtcactcagatgatgacaatgatgatgcaacagatgcagcaacattaccatcaaatgttgcagcaggtgcaacagaaccagcagtttggtcctccaccatcacacgtgtccaaactgttagactttcttcgtatccagccacccactttctcaagcaccaccaacccaatggaggccaacgactggctccgtgctattgagaagaagctgaacctactgcaatgcaacgaccaagagaaagttgcttttgctacacaccagttgcaaggaagacagctggaccgaaaaagaaagacagctcagatcagctttcctcaggggaacaatcagaagcctcgtttcatgacgggacagctaggtgggccttccaccctgatcgtctgtcagcaccgtccctatcgcccgagtaacttcaacaactattacaatggtggcagtcacaacaatagtaagcagcacaaccacaactcgactccacccccactaatggcaccagctcagtcagatccgccagctgtgtcagctcagtcagaacagcccaagaagggggctgtaggaaagccaggaccctgcttcaactgtggcaagcacggccactttgctagcaagtgtccgaagctgaatcgcactggacccaggttcatccaggcccacgccaatcatgtgtctgcaatggaagcacaggcagcaccagaggtcgtgttgggcacgtttccagtgaactcatatccagcaacagttctctttgattcaggtgcctcgcattctttcatttccaaaagatttgctgggacacatggattatcggtagtggaacttaaaataccgatgcaggttcatacccctggaaatgacatgaggacagcacattattgcccctcggtgactatagagatcagaagatcaccgtttctatccaacctcatccttctcgaatctaaagacctagatgtcgttctcggaatggattggttgaccagaaacaagggagtgattgactgcgcaagccgcaccatcaccctaaccaacgacaaaggggagaagatcaccttccgttccccagcgtcgcagaagtccgtagcgagtctgaatcaggctgctattgagggtcagacagaaacagtggagaaaagtcccaggaagttggaggatattcctatagtacaagagtatcctgaggtgttcccagaagacctcactacaatgccaccgaagagagaaatcgagttccggatcgatttggcacccgggactgctccaatttacaagaggccgtacagaatggcagctaatgagctagcagaggtcaagaagcaggttgacgaacagctgcagaaagggtacatccgaccgagtacttcaccttggggtgctccggttatctttgtggagaagaaagacaagaccaagaggatgtgcgtggattatcgcgcccttaatgaggtcacaatcaagaacaaatatccgttgcccagaattgatgacctgtttgatcagctaaaaggagctaaggtgttttccaagatagacctgcgatcaggctatcatcagttgagaattcgggaagaggatattcccaagacagccttcaccactcggtatgggttgtttgagtgcacagttatgtcatttggactcaccaatgcaccggctttcttcatgaacttgatgaacaaagtgtttatggagtttcttgacaagtttgtcgtggtgttcattgacgacatacttatctattcaaagtctgaagaacaacatgagcaacatcttcgtctggtactcgagaaattgaaggagcaccagttatatgccaagtttagcaagtgtgacttctggttatcggaggtcaaatttctgggtcacgtcatttctgctcaaggcgtggcagtggatccatcaaatgtggaatcagttaccaagtggaccccaccaaagacagtttctcaaatccggagttttcttggacttgcgggttattaccgtcggttcatcgaaaatttctctaagattgccaagcccatgacacagttgctaaagaaagatgaaaaattcaaatggtcagctgagtgcaaccaaagttttgaagaactcaagaagaagttagtctctgcaccagttctaattttgccagatcagacaaaagacttccaagtctactgtgatgcatctcgccaagggttgggatgcaaagcaaatgtggtagcagatgctttgagcagaaaaagctattgcaatgccttatgcactgaagacatgtgtggcaaattgcagcaagatcttgagcacctaaatttgggcatcgtggaacacggatacgttgctgccctagaggcaaggcctacgctcgtggatcaagtcagagcagctcaggtaaatgatcctgaaatagctgagctaaaaaagaatatgagggtcggaaaagcccgagatttccatgaggatgaacatggcacaatctggttgggagaaagattgtgtgtgcctgacgacaaagaactgaaggatctcatactcacagaagctcatcaaactcagtattcaattcatcccggtagtactaaaatgtaccaggacctcaaagagaaattctggtgggtcagcatgagaaaggaaatagccgaattcgtcgcactctgcgatgtttgtcagcgagtcaaagcagaacatcagaggcccgcaggactgctacaaccccttcagatcccggaatggaaatgggaagaaatcggaatggatttcatcactggtttgcccaggacatcgtcagggcatgattcaatttgggtagtcatggatcgcctcacgaaagttgctcattttattccggtgcacactacctatacggggaaaaggttggcagagctgtacttagcaaggatcatgtgtctgcatggggtacctaagaagatagtatctgatcgagggagtcagttcacatcaaaattttggcagaaactgcaagaagaattggggactcgtttgaatttcagcacggcttatcatccgcaaacagatggtcagaccgagcgagtaaatcaaatcttggaagatatgttgagagcttgtgcacttgactttggtggagcctgggataaaagtctaccgtatgcggaattctcttacaacaacagctatcagtccagtttgcagatggcaccgtttgaagcattgtacggacgaaagtgccgcacaccacttttctggaatcaaacaggtgagcgccaactgtttgggacagaagtgttaaccgaagcagaggagaaagtcaggaccgtcagggaaagactgcgaatcgcccagtctcggcagaagagttatgctgataatcgccgaagagagcttactttcgaagcaggggattatgtgtaccttcgtgtcactccgctccggggagtacaccggttccaaacgaaaggcaaattggcaccacgctttgtgggaccatacaggatcttggaacgcagaggtgaagtcgcttaccagcttgagctcccatctaatatggttggaatccacgatgtgtttcatgtatctcaattgaagaagtgtttgagggtacctgaggaacaagctagctcagagcacattgacatccaggaagatctgacttatgtggagaagccgattcgtatcctcgagaccagtgagagaaggaccagaaacaaggtgatcaggttttgcaaagttcagtggagccaccactcggaagaagaggccacctgggaaagagaagatgaattgaaggccgctcatccgcacctctttgccaactcttccgaatctcggggtcaagattccgtttaa

SEQ ID NO: 86964 - DNA, 3735 bp, Oryza sativa
  Clone ID: PAT_MRT4530_85957C.1
atggaggccaacgactggctccgtgctattgagaagaagctgaacctactgcaatgcaacgaccaagagaaagttgcttttgctacacaccagttgcaaggtcccgcttctgcctggtgggataactacgtggtgacccgtccagatgcaacgaaggttacttgggtagagttttgtcaaaactttaggaaggcacagattcctgaagggattgtggcacaacagaagagagagttccgtgcattgcaacaaggaaccagaacggttacagagtacctgcacgagttcaaccgcctcgcgcgctacgctcctgaggacgtgcgcaccgatgctgagaagcaggagaagtttttgtttgggctcgacgatgaattgaccaaccagctaatctccggagtctatgaggactttgagaagcttgtggacaaggctatccgccaggaagagcaacgcaacaaaatggaccgaaaaagaaaggcagctcagatcagctttcctcaggggaacaatcagaagcctcgcttcatgacgggacagctaggtgggccttccaccctgatcgtctgtcagcaccgtccctatcacccgagtaacttcaacaacgattacaacggtggcagtcacaacaatagtaagcagcacaaccacaactcgactccacccctactaatggcaccagctcagtcagatctgccagctgtgtcagctcagtcagaacaacccaagaagggggctgtaggaaagccaagaccctgcttcaactgtggcaagcacggccactttgctggcaagtgtccgaagctgaatcgcactggacccaggttcatccaggcccacgccaatcatgtgtctgcagaggaagcacaggcagcaccagaggtcgtgttgggcacgtttccagtgaactcatatccagcaacagttctctttgattcaggtgcctcgcattctttcatttccaaaagatttgctgggacacatggattatcggtagtggaacttaaaataccgatgcaggttcatacccctggaaatgatatgaggacagcacactactacccctcggtgactatagagatcaaaagatcaccgtttctatccaacctcatccttctcgaatctaaagacctagatgtcattctcggaatggattggttgaccagaaacaagggagtgattgactgcgcaagccgcaccatcaccctaaccaacgacaaaggggagaagatcaccttccgttccccagcgtcgcagaagtccgtagcgagtctgaatcaggctgctattgagggtcagacagaaacagtggagaaaagtcccaggaagttggaggatattcctatagtacaagagtatcctgaggtgttcccagaagacctcactacaatgccaccgaagagagaaatcgagttccggatcgatttggcacccgggactgctccaatttacaagaggccgtacagaatgacagctaatgagctagcagaggtcaagaagcaggttgacgaacagctgcagaaagggtacatccgaccgagtacttcaccttggggtgctccggttatctttgtggagaagaaagacaagactaagaggatgtgcgttgattatcgcgcccttaatgaggtcacaatcaagaacaaatatccgttgcccagaattgatgacctgtttgatcagctaaaaggagctaaggtgttttccaagatagacctgcgatcaggctatcatcagttgagaattcgggaagaggatattcccaagacagccttcaccactcggtatgggttgtttgagtgcacggttatgtcctttggactcaccaatgaaccggctttcttcatgaacttgatgaacaaagtgtttatggagtttcttgacaagtttgtcgtggtattcattgacgacatacttatttattcaaaatcagaagaggaacatgagcagcatctccgtctggtactcgagaaattgaaggagcaccagctatatgccaagtttagcaagtgtgacttctggttatcagaggtcaaatttctgggtcacatcatttctgctcaaggcgtggcagtggatccatcaaatgtggagtcagttacaaagtggaccccactaaagacagtttctcagatccggagttttcttggacttgcgggctattaccgtcggttcatcgaaaatttctccaagattgccaggcccatgacacagttgctaaagaaagatgaaaaattcaagtggtcagctgagtgcaaccaaagttttgaagaactcaagaagaggttagtctctgcaccagttctaattctgccagatcagacaaaagacttccaagtctactatgatgcatctcgccaagggttgggatgtgtgttgatgcaagaaggcagagtggtcgcatacgcttcgcgacagttgcgtccacacgagaccaattatcccactcatgaccttgagttggcagcagtggttcatgctctgaaaatctggcggcactatcttattggcaaccgctgtgaagtatacactgatcacaagagtctgaagtacatcttcactcagcctgacttgaatctccgacagcgaagatggctggagttaattaaagattatgacatggggatacattatcatccagacaaagcaaatgtggtagcagatgctttgagcagaaaaagctattgcaatgccttatgcactgaagacatgtgtggcaaattgcagcaagatcttgagcacctaaatttgggcatcgtcgaacacggtactaaaatgtaccaggacctcaaagagaaattctggtgggccagcatgagaagagagatagccggattcgtcgcactctgcgatgtttgtcggcgagtcaaagcagaacatcagaggcccgcaggactgctacaaccccttcagatcccggaatggaaatgggaagaaatcggaatggatttcatcactggtttgcccaggacatcgtcagggcatgattcaatttgggtagtcgtggatcgcctcacgaaagttgctcatttcattccggtgcacactacctatacggggaaaagttatcaagccagtttgcaaatggcaccgtttaaagcgttgtacggacggaaatgccgcactccgatcttctgggatcaaattggagaacgtcagttgtttgggacggaagtattaactgaagcagaggagaaagtcagaaccgtcagagaaaggctaagaattgcgcaatctcgacagaagagttatgctgacaaccgccgaagagagcttactttcgaagcaggggattatgtgtaccttcgtgtcactccgcttcggggagtacaccgcttccaaaccaaaggcaagttggcaccacgctttgtgggaccatacaggatcttggaacgcagaggtgaagtcgcttaccagcttgagctcccatctaatatggttggtatccacgatgtgtttcatgtatctcaattgaagaagtgtttgagggtacctgaggaacaagctagctcagagcacattgacatccaggaagatctgacttatgtggagaagccgatttgtatccttgagaccagtgagagatggaccagaaacaaggtgatcaggttttgcaaagttcagtggagccaccactcagaagaagaggccacctgggaaagagaagatgaattgaaggccgctcatccgcacctcttcgccagctcttccgaatctcggggtcgagattccgtttaa

SEQ ID NO: 86965 - DNA, 4881 bp, Oryza sativa
  Clone ID: PAT_MRT4530_85958C.1
atggtgaagacaaggaatgatccccgtgactccaacgacgccagtggcagcgaagagcagaccgatggagctcatgtcagtggtgcatctggcagcagatcatctccaccgcccgaaaacccaacagtcactcaaatgatgacaatgatgatgcaacagatgcagcaacattaccatcagatgttgcagcaggcgcaacagaaccagcagtttggtcctccaccatcacacgtgtccaaactgttagactttcttcgtatccagccacccactttctcaagcaccaccaacccaatggaggccaatgactggctccgtgctattgagaagaagctgaacctactgcaatgcaacgaccaagagaaagttgcttttgctacacaccagttgcaaggtcccgcttctgcctggtgggataactacgtggcgacccgtctagatgcaacggaggttacttgggcagagttttgtcaaagcttcaggaaggcacagattcctgaagggattatggcacaacagaagagagagttccgtgcgctccagcaaggaaccatgtcagttacagagtacttgcatgagttcaaccgccttgcgcgctacgctcccgaggacgtgcgcaccgatgctgagaagcaggagaagtttttgtttgggctcgatgatgaattgaccaaccaactaatctccggagtctatgaggactttgagaagcttgtggacaaggctatccgccaggatgagcaacgcaacaaaatggaccgaaaaagaaaggcagctcagatcagctttcctcaggggaacaatcagaagcctcgcttcatgacgggacagctaggtgggccttccaccctgatcgtctgtcagcaccgtccctatcacccgagtaacttcgacaacgactacaacggtggcagtcacaacaacaaacaacccaagaagggggctgtaggaaagccaggaccctgcttcaactgtggcaagcacggccactttgctggcaagtgtccgaagctgaatcgcactggacccaggttcatccaggcccgcgccaatcatgtgtctgcagaggaagcacaggcagcaccagaggtcgtgttgggcacgtttccagtgaactcatatccagcaacagttctctttgattcaggtgcctcgcattctttcatttccaaaagatttgctgggacacatggattatcggtagtggaacttaaaataccgatgcaggttcatacccttggaaatgatatgaggacagcacactactgcccctcggtgactatagagatcaaaagatcaccgtttctatccaacctcatccttctcgaatctaaagacctggatgtcattcttggaatggattggttgaccagaaacaagggagtgattgactgcgcaagccgcaccatcaccctaaccaacgacaaaggggagaagatcaccttccgttccccagcgtcgcagaagtccgtagcgagtctgaatcaggctgctattgagggtcagacagaaacagtggagaaaagtcccaggaagttggaggatattcctatagtacaagagtatcctgaggtgttcccagaagacctcactacaatgccaccgaagagagaaatcgagttccggatcgatttggcacccgggactgctccaatttacaagaggccgtacagaatggcagctaatgagttagcagaggtcaagaagcaggttgacgaacagctgcagaaagggtacatccgaccgagtacttcaccttggggtgctccggttatctttgtggagaagaaagacaagaccaagaggatgtgcgtggattatcgcgcccttaatgaggtcacaatcaagaacaaatatccgttgccaagaattgatgacctgtttgatcagctaaaaggagctaaggtgttttccaagatagacctacgatcaggctatcatcagttgagaattcgggaagaggatattcccaagacagccttcaccactcggtatgggttgtttgagtgcacggttatgtcctttggactcatcaatgcaccggctttcttcatgaacttgatgaacaaagtgtttatggagtttcttgacaagtttgtcgtggtattcattgacgacatacttgtgtattcaaaatcagaagaggaacatgagcaacatcttcgtctggtacttgagaaattgaaggagcaccagttatatgccaagtttagcaagtgtgacttctggttatcggaggtcaaatttctgggtcacgtcatttctgctcaaggcgtggcagtggacccatcaaatgtggaatcagttacaaagtggaccccaccaaagacagtttctcagatccggagttttcttggacttgcgggttattaccgtcggttcatcgaaaatttctccaagattgccaggcccatgacacagttgctaaagaaagatgaaaaattcaagtggtcagctgagtgcaaccaaagttttgaagaactcaagaagaagttagtctccgcaccagttctaattctgccagatcagacgaaagacttccaggtctactgtgatgcatctcgccaaggattgggattggttcatgctctgaaaatctggcggcactatcttattggcaaccgctgtgaagtatacactgatcacaagagtctgaagtacatcttcactcagcctgacttgaatctccgacagcgaagatggctggagttaattaaagattatgacatggggatacattatcatcccggcaaagcaaatgtggtagcagatgctttgagcagaaaaagctattgcaatgccttatgcactgaagacatgtgtggcaaattgcaacaagatcttgagcacctaaatttgggcatcgtggaacacgggtacgtagctgccctagaggcacggcctacgctcgtggatcaagtcagagcagctcaagtaaatgatcctgaaatagctgagctgaaaaagaatatgagggttggaaaagctcgagatttccatgaggatgagaatggcacaatctggttgggagaaagattgtgtgtgcctgacgacaaagaactgaaggatctcatactcacagaagctcatcaaactcagtattcaattcatcccggcagtactaaaatgtaccaggacctcaaagagaaattctggtgggtcagcatgaggagagaaatagctgaattcgtcgcactctgcgatgtttgccaacgggtgaaggcagagcaccaaagaccagcaggtttactccaacctcttcaaatcccggaatggaaatgggaggagattggaatggactttataacaggactgccccggacatcatcggagcacattgacatccaggaagatctgacttatgtggagaagccgatttgtatcctcgagaccagtgagagaaggaccagaaacaagccaacgctcgatgccatctcaccgggacaagagctcgccgccggcgacaagctcgtgtccagcaatggcaggttcgccctcggcttcttccaaaccgacagtaacaagtcctcctccaatagcactccgaacatttacctaggcatctggttcaacaccgtccccaaattcacccctgtatgggttgccaacggcgaaaaccctgtcgcggatctcgcgtcgtgcaagctcctagtttccagcgatggcaacctcgccatcgttgcaacgacccatgccaagaactcctccatggtctggtccagcaaagccaacatcccaaccaacaccacccatgctgttctcctggacgatggaaaccttgtcctgcgtagcactagcacaaccaatgcatcatccaccattctctggcaaagctttgatcacccgacagacactgttctgcagggtggaaagatcggctggaacaacgccaccggtgtgaaccgccgtcttgtctccaggaagaacaccgttgatcaagctcctggcatgtattccttcgagttgctcggacacaacggccctacctccatggtctccacgttcaactcctcgaatccgtattggtccagcggagactggaacggccggtacttcagcaacataccggagacggtaggacagacatggctatcactgaattttacaagcaatgagcaagagaagtatatcgagtatgcaattgcagatcccacggtgctatcacgtaccatactggatgtctccggccagctgaaggcgcttgtgtggttcgaggggtcgcgggattggcaaaccatcttcacggcacccaaatcgcagtgcgatgtctacgctttctgtggacctttcacggtctgcaacgacatcacattcccctcctgcacctgcatgaagggcttctcagtacaatcacctgaagattgggagctagatgaccgaacaggtggatgtgtgagaaatactccgctgctctgcaacagcaataaaactgcagcaggcacggcagataagttctatcctatgacttctgttcagcttcctgataaagcccagagcataggagcagctactagtgcagatgaatgtgcagctgcctgcctcagtagctgctcatgtactgcgtattcctacggtgaaggtggctgctctgtttggcatgacaagctgctcaatgtacgacaacaaggtaatggtgttctctaccttcgcctttctgcaaaagaagtactggaaagtaggagaaacaatagatggggggtgatccttggtgcttcaattggtgccagcactgctgctttgggggagaaatcacgtgaatttccgaccttctctacctacgattcatgctccaagatcttctccagctccggcaactctagcaagctcgagctgccgaagacggaggaggatggtggcaccgaagctagggagtgtaaataa

SEQ ID NO: 86966 - DNA, 138 bp, Oryza sativa
  unsure (1)..(138): unsure at all n locations
  Clone ID: PAT_MRT4530_85959C.1
atggccataaagcccgaggcccgaaggcctggcccacggcacggcattttggcctggcccaagcatggggtcgggcccggcccgnccgccgggccgtgcctgggcctccccaccggcacgctggggtggcccggcacg

SEQ ID NO: 86967 - DNA, 245 bp, Oryza sativa
  Clone ID: PAT_MRT4530_8595C.1
gggaacaccgctgacttggaaaaacccccaggaatcccaaaccacaggggcaaatccatctaattaaacatgaagactcggttaaacaaaaacccgccaaaattaaaaaacaggaggttgttgcacaaaacggggtacacgggtcatttaattggggggttccgttccaccatcagattgatataatacaccccaacaagcaaaaacattcgggaacaatttctccaaaaaaatcgcggcctatt

SEQ ID NO: 86968 - DNA, 594 bp, Oryza sativa
  Clone ID: PAT_MRT4530_85960C.1
ctagtccagcacccatgcaccatcatggtcaccatcaccatcatcaccatcaccatggtcatgaagacagcaggcattcggctccggctcaggctccagtacattaccctgtgcatgaacccagatatggagctccacctccatctcggtgtccatatggtactgacaagccaaagaataaagctcatgtaatgccagctcctgagcctttgcccactgtttcttttgctcatgctcatcctccaagtgaacatacatcaagaagagatcctgctggattgtcggctctggccccacgcagtaagaggaaccctgctcacagtgcgtcctggaaaatgctacgcctgggcttccaattgggctctcctcgtcgaggccgaaggcggcgatgtcattgttcgatagcgtcggcggagcggcggcggcaccgagctctacgcctccatctctcctcgtcggggctggaggcggcgacgcgacccatgctgcgggcggagctccccgtccggcctcctcccttggtggcaggcatggatcggggggctgcgcggccagcgagcttcggctggcgcagatcggggaggacgacggcat

SEQ ID NO: 86969 - DNA, 1029 bp, Oryza sativa
  Clone ID: PAT_MRT4530_85961C.1
caccgtccctactacccgagtaacttcaacaacgactacaatggtggcagtcattacagaagtgagcagggcaacgacaactcaactccccacccattaatggcaccggctcagtcagaactgccagctgtgtcagctcagccaaaacagctcaagaaggagtctgcaagaaagccaggaccctacttcaactatggcaagtatgaccactttgctggcaagtgtccgaagctgaagcgcgctagacctaggttcgttcaggcccgggtcaatcatgcgtctgcagaggaggcacaggcagcaccagaggtcatgctgggcacatttcctgtcaactcacacccggcaacagttctttttgattcgggtgcctcgtattctttcatttccaagaagtttgctgggacacatggattatccgtagtggaacttaaaataccaatgcgggttcatacccctggagatgacatgaacaccgcacactactgcccctcaatacacaagggggtgattgactatgcaagtcgcaccatcaccctaaccaacgacaaaggggaaaagatcaccttcctttctccagtgtcgcaggagtctgtagcaagtctgaatcaggctgcaattgaggatcagacagaaatagtgaagaaaagtctaaaggaattggaggatattcctatagtacaagagtatactgaggtgtttcctgaagacctctctacaatgccactaaagagagaaatcgagttccggattgatttggcacccggaactgctctgatctacaagagtccgtacagaatggcagctaatgagctagcaaaggtcaagaagcaggttgatgaacagctgcagaaagggtacatccgatcaagtacttcaccttggggtgctccggttatctttgtggagaagaaagacaagaccaagaggatgtgcgttgattatcgcgcccgtaatgaggtcacaatcaagaacaaatatccattgccaagaattgatgacctgtttgatcagttaaaagaagctaaa

SEQ ID NO: 86970 - DNA, 541 bp, Oryza sativa
  Clone ID: PAT_MRT4530_85962C.1
aatgcaaaactgcaggcacgcctcgagagcttctagtgaacctaccgtacacagacaggatcacatcccaaaggccagccgggacctatttcaaaccgtttggctggctgaagacacaagccacttatatctcctgaaccctcgcccctacagcttatccagcatgcatgtaatgactacctagagatgaggacagcaccgtcggtacacttgttatgatactttctgaccatgaacataagataggcctatgttcatcctgggcctgagctggggaagcatgcccttacgcgatgcacgttgtgagcaccctacagtatgaggttcctgttgttgttgatggcaccgaccggcctcttcaaccttgagggccacaacaatggaccagactcgctcgaagtgtgaaccgacagcaatgaaccctggtgcagaactctcagtgcaaatgatggcctgccttgccaaaccctcctgaatgactctggtggaacaaaaagcaatgctgtggtatccgtgctttgctaacgccgtcttggagatg

SEQ ID NO: 86971 - DNA, 1414 bp, Oryza sativa
  Clone ID: PAT_MRT4530_85963C.1
ttgtctaatgtggaaaagcctgtttggcatttactgtttactgaaattgctgatatagtggcaagctttaggctgcacaagatggttcctgagctgaatggaaatgcatcaaagcttgaattggacatttatgaggaaatcggcattcctaactccactaaacctcatgcaacttttaacttcactcttaatttcccaatctacaaagtgcaagacagaatcgatgagctaaaggatcaaatgaaaactgggttactgctcaattcctatgagaatctgtatatcaagttggcgaatttgaatggttcaacggttgaccctccaactattgttgagacctccatttttcttgaagttgggaatcaccagccatctgtaccaaggatgaagcagttggcacaaacaattactaattcatcttcaggaaacctggtgggggtggttctgaagcacctagtccagcacccatgcaccatcatggtcaccatcaccatcatcaccatcaccatggtcatgaagacagcaggcattcggctccggctcaggctccagtacattaccctgtgcatgaacccagatatggagctccacctccatctcggtgtccatatgttcttccagaaccacctttgcccactgtttcttttgctcatgctcatcctccaagtgaacatacatcaagaagagatcctgctggattgtcggctctggcccctgcacctcattcattttggtggattgtttctgatcagtttgcttctgaaccgtacaaggcatggatcggggggctgcgcggccagcgagcttcggctggcgcagatcggggaggacgacggcatcggtgcttctcccctccctcccccttcttcacctcttctcttctccggtgatcatcggctgatcgccatgccgtcgtcttacctgatgagcaggaggttctcctaccgcaggctcaagaagcttccaacggcggcggtggcggcgccgcctgatgtgccgcagcagctgcaggagcagtactacgcggctatcaccgccgccgccgcggccgccgcgcagcatggcggcggcggcggcattggcaggaggaggaggaggaggatgaggccgaggctgaggatctcgaggctggcgagggtgctgcggaggaaggcggcggcggtgggcggcgcggtgagggcgtcggtggcgaaggtggtgcggcggctcaaggaagggagcccctacgtcggggacctcttcgccgggaactacatgttcatgcaggtcaccccgtcgccgaccatggttcttcgccgccggcctggccaagaacggcgtggtgccgtactaccaccacggcatcatcggcggcaagaacagcaagctcggcacgacgtgttcacctagcgtgatgtacaaagttaagttcaat

SEQ ID NO: 86972 - DNA, 3831 bp, Oryza sativa
  Clone ID: PAT_MRT4530_85964C.1
atggtgaagacaaggaatgatccccgtgactccaacgatgccagtggcagcgaagagcagacagatggagctcataccagtggtgcatctggcagcagatcatctccaccgcccgagaacccaacggtcgctcagatgatgacaatgatgatgcaacagatgcagcaacattaccatcagatgttgcagcaggcgcagcagaaccagcagtctgattttctccgtatccagccacccactttctcaagcaccaccaacccaatggaggccaacgactggcttcgtgcgattgagaaaaagctgaaccttctgcaatgcaatgaccaagagaaggttgcttttgctacacatcagttgcaaggtcccgcttctgcctggtgggataactacgtggtgacccgtccagatgcaacggaggttacttgggcaaagttttgtcaaagcttcaggaaggcacagattcctgaggggattatggcacaaaagaaaagagagttccgcgcactacatcaaggaaccaggacagttacagagtacttgcatgagttcaaccgccctgcgcgctacgctcctgaggatgtgcgcaccgatgctgagaagcaagagaagtttttgtttggtcctgatgatgaattgaccaaccagctaatctccggagtctatgaggactttgagaagcttgtggacaaggctatccgtgggccttccaccctgatcgtctgtcagcaccgtccctatcacccgagtaacttcaacaacgactacaacggtggcagtcacaacaacagtaagcagcacaaccacaactcgactccacccccactaatggcaccagctcagtcagatccgccagctgggtcagctcagtcagaacagcccaaaaagggggctgtaggaaagccaggaccctgcttcaactgtggcaagcacggccactttgctggcaagtgtccgaagctgaatcgcgctggacccaggttcatccaggcccgcgccaatcatgtgtctgtagaggaagcacaggcagcaccagaggtcgtgttgggcacgtttccagtgaactcatatccagcaacagttctctttgattcagagatcaaaagatcaccgtttctatccaacctcatccttctcgaatctaaagacctagatgtcattctcggaatggaatggttgaccagacacaagggagtgattgactgcgcaagccgcaccatcaccctaaccaacgacaaaggggagaagataaccttccgttccccagcgtcgcagaagtccgtggctagtctgaatcaggctgctattgagggtcagacagaaacagtggagaaaagtcccaggaagttggaggatattcctatagtacaagagtatcctgaggtatttcctgaagacctcactacaatgccaccgaatagagaaatcgagttccgaattgatttggcacccggaactgctcctatctacaagaggccgtacagaatggcagctaatgagctagcagaggtcaagaagcaagttgatgaacagctgcagaaagggtacatccgaccgagtacttcgccttggggtgctccggttatctttgtggagaagaaagacaagactaagaggatgagcgttgattattgcgcccttaatgaggtcacaatcaagaacaaatatccgttgcctagaattgatgacctgtttgatctgctaaaaggagctaaggtgttttccaagatagacctgcgatcaggctatcaccagctgagaattcgggaagaggatattcccaagacagccttcactactcggtgtgggttgtttgagtgcacggttatgtcatttggactcaccaatgcaccggctttcttcatgaacttaatgaacaaagtgtttatggagtttcttgacaagtttgtcatggtattcattgacgacatacttatttattcaaaatcagaagaggaacatgagcagcatctccgtcttgtactcgagaaattgaaggagcaccagttatatgccaagttcagtaagtgcgacttctggttgtcggaagacaagtttcttggtcacgtcattactgctcaaggtgtggcagtggatccatcgaatgtggagtcagttaccaagtggaccccacctaagacagtttctcagatccggagttttcttggacttgcgggttattaccgtcggttcatcgaaaatttctccaagattgccaggcccatgacacagttgctaaagaaagatgaaaaattcaaacaaaagacttccaagtctactgtgatgcatctcgccaagggttgggatcggcactatcttattggcaaccgctgtgaagtatacactgatcacaagagtctgaagtacatcttcactcagcctgacttgaatctccgacagcgaagctggctggagttaattaaagattatgacatggggatacattatcatccaggcaaagcaaatgtggtagcagatgctttgagcagaaaaagctattgcaatgccttatgcactgaaggcatgtgtggcaaattgcagcaagatcttgagcacctaaatttgggcatcgtgcaacacgggtacgtagctgccctagaggcacggcctacgctcgtggaccaagtcagagcagctcaggtaaatgatcctgaaatagctgagctgaaaaagaatatgagggttggaaaagctcgagatttccatgaggatgagcatggcacaatctggttgggagaaagattgtgtgtgcctgacgacaaagaactgaaggatctcatactcacagaagctcatcaaactcagtattcaattcatcccggcagtactaaaatgtaccaggacctcaaagagaaattctggtgggccagcatgagaagagagatagccggtttcgtcgcactctgcgatgtttgtcagcgagtcaaagcagaacatcagaggcccataggactgctacaaccccttcagatcccggaatggaaatgggaagaaatcggaatggatttcatcactggtttgcccaggacattgtcagggcatgattcaatttgggtagtcgtggatcgcctcacgaaagttgctcatttcattccaatgcacactacctatactgggaaaagattggcaaagctctacctttcaagaatcatgtgtttgcatggggtacctaagaagattgtatctgatcgaggaacgttgtatggacggaaatgccgcactccgctcttctgggatcaaactggagaacgccaattgtttgggacggaagtattaactaaagcagaggagaaagtcagaaccgtcagagaaaggctaagaattgcgcaatctcgacagaagagttatgctgacaaccgccaaagagagcttactttcgaagtaggggattatgtgtaccttcgtgtcactccgctcaggggagtacaccgcttccagactaaaggaaagttggcaccacgctttgtgggaccatacaggatcttggaacgcagaggtgaagttgcttaccagcttgagctcccatctaatatggttggtatccatgatgtgtttcatgtatcccagttaaagaagtgcttgagggtacccgaagaacaagccgattcggagcacattgacatccaagaagatctgacctacgtggagaagccagttcgtatccttgagaccagtgaaaggaggaccagaaacaaggtgatcaggttttgcaaagtccaatggagccaccactcacaggaagaggccacctgggaaagagaagatgaattgaaggccgcccatccgcacctcttcgccagttcttccgaatctcggggtcgagattccgtttaa

SEQ ID NO: 86973 - DNA, 1828 bp, Oryza sativa
  Clone ID: PAT_MRT4530_85965C.1
gcacgagggtttcaccttccggctcggtgcggtgcggttacctctcactttctctcaccttcccgcgccccctcaatctcctcctccttaagcaacgacgccgcagcagcggaggaccaccaccaccaccacccagccctagctccaccaaccggatcgcccccccccccccagcaatggcgtccaaggaggcggaggcggcggctgcctggcgccgggatgcgtcgtggtgagatcgcgccgcatggggaaggaggccgtcggcgaggggcagcaccagcagcagcgcccgccggatggggcagggggcggaggaggcggaagaggaggaagaggaggaggaggaggaaggggaggtagcgggcgactggggtggtggtggtgctgctgctgcggtgtcggtggggtggtgcggctgaaatgcgtggcggcgctcgtgctcggcgtcgccgtgctgctgtcggcggtgttctggctcccgccgttcgcgcggcgcgggaggggatcggagggcccggatccgggcgccggcttcgatgctgatatagtggcaagctttaggctgcacaagatggttcctgagctgaatggaaatgcatcaaagcttgaattggacatttatgaggaaatcggcattcctaactccactgtggtagtaaattcactacaattagttggatcaaactggacaaatgttatcttcagcattgtgccttatccaaagaatttgactttatcgtcaacagggctgagcattcttaggtcttattttatgtcctttgtcgtgcggcagtcgacactccagttaaccgagtccttatttggaaattcatcgtcctttgaagtgcttaaattcccaggaggaattacaatcattccgccacaaactgctttccttcctcagaaacctcatgcaacttttaacttcactcttaatttcccaatctacaaagtgcaagacagaatcgatgagctaaaggatcaaatgaaaactgggttactgctcaattcctatgagaatctgtatatcaagttggcgaatttgaatggttcaacggttgaccctccaactattgttgagacctccatttttcttgaagttgggaatcaccagccatctgtaccaaggatgaagcagttggcacaaacaattactaattcatcttcaggaaacctgggtctgaaccataccgtatttggcagggtgaagcagataagcctttcatcctatcttagacattctttacatagtgggggtggttctgaagcacctagtccagcacccatgcaccatcatggtcaccatcaccatcatcaccatcaccatggtcatgaagacagcaggcattcggctccggctcaggctccagtacattaccctgtgcatgaacccagatatggagctccacctccatctcggtgtccatatggtactgacaagccaaagaataaagctcatgtaatgccagctcctgagcctacagccaatggccatcattttgcttcaccagttgctttgccacctcactcactgtcaccacggaatcccaatgtgcacagtaggtcccctattccatcccctccagttcttccagaaccacctttgcccactgtttcttttgctcatgctcatcctccaagtgaacatacatcaagaagagatcctgctggattgtcggctctggcccctgcacctcattcattttggtggattgtttctgatcagtttgcttctgaaccgtacaaggttactggccgagcgtttgcaatctcattttgggttgaaacgcaatccagcgcgatgacgaatttcatggaattttgttaa

SEQ ID NO: 86974 - DNA, 212 bp, Oryza sativa
  unsure (1)..(212): unsure at all n locations
  Clone ID: PAT_MRT4530_85966C.1
acagaatagacccagaaatatagctggagaaatttggtgagtggttgtgttgtcccctaacgttttggtgtagtaggtcacccngtgcatgctgatacctctgtgttgcacgtgcgatgaaggagagtagatattggtggagataagtgtncaaacctggagacccactggaggcctcatacttccacggtggtgtgcacaacatgcnaaan

SEQ ID NO: 86975 - DNA, 1122 bp, Oryza sativa
  Clone ID: PAT_MRT4530_85967C.1
atgtctttcgccggcgtgtctctcgtccgcgacgggaggctgcagtcgccttcgtcgtcagccatcacctccggcgccaccagcgggtactacctcctcgtggtcgaaggctactcgcgaaccaaggacaccgtccccaatggcgacttcatcaggtctcgtcctttcagggttggaggctatcgctgggttatcgactactaccccaatggcgaaagttcggatgatgccgattccatctcagtttctcttcagcttgatcaggatagtgaacggcctttcatggcgcattacgagtttagtttcatcgacgaaactgagagacaaaagtcgacacatatttgttcggaagcattattcgacttctctgatgacaatcgttggggctacaccaatttcattagaagggaggagctagaaaaatccaagcatctcaaggatgattgtttcaccatcaggtgtgacatcatcctgaagaaggacggcagcaacaccaccggcgacgacgtggcggcgccgctcgtcgcggtgccaccgtccgacatgcaccggcagttcaccgatctgctcctgaccaaggtcggcgccgatgtgacgttccaggtcggcggcgagacgttcgccgcgcaccggtgcgtgctcgcggcgcggtccaccgtcttcatggtggagctctttggccccatgaaggagggcgcaacgacagcaagcgtacatatcagcgaaatggtgcccgaagcattcaaggccatgcttgcattcatctacaacgacaccccgccgccggagacggaggaagacgaagacggcaaggtcgccatgtggcagcacctgctcgtcgcggcggacaggtacgatctcccgaggctgaagctgatatgcgaggagaagctgtgcggccacatcggcgtcggcacggcgaccaccatcctcttgctggccgacaagcaccattgccgcgggctgaaggaggcgtgcctggagttcctcagctctcctgcgaacctggaagaagtaatggagcatggcggattggaggacgtcgtgggaacatgcccgtcagttctcgtggagctcattgcgaagcttgctctgctcaggactcagagagattataagtag

SEQ ID NO: 86976 - DNA, 156 bp, Oryza sativa
  Clone ID: PAT_MRT4530_85968C.1
atcatggacacccagcttttataattactaataatcaggtataatcacaaaggtcattcgcggtaaattacccattccgaacactaatgcgtacaaggcaacgtattattgatttccctactgcatacgaattcgttggactggtcggacgacacg

SEQ ID NO: 86977 - DNA, 242 bp, Oryza sativa
  unsure (1)..(242): unsure at all n locations
  Clone ID: PAT_MRT4530_85969C.1
caactatcgtttgccttcgttataggatgttgaggatgacgtccttttgaaacaaaacctccggattattggattgcatgagctgccttaaatgtttggaacgatattaattgtggctttggtgatgggcctggagaaagaccatacctaggtggggataggacatgtcctacatgtcctaagtggtgtctcatcctcacgtagtcngttttttttttttctaaaaaaaaaaaaaaaaaaaa

SEQ ID NO: 86978 - DNA, 249 bp, Oryza sativa
  Clone ID: PAT_MRT4530_8596C.1
tcttttttatctcctcctgctacgcagccttgggggtgtcatcacctagggacgggaggtataagagggcgaactaaaacaggctggctcctgctatgtgcacatctgtgggtacgggtactggactacctaacggggcttcgatacatgagctcaccactggggtgcgaggagcattgtaaaccggaagattttgactgattgtaaggattacacgagactgttgcaggagaactgagacccactaca

SEQ ID NO: 86979 - DNA, 429 bp, Oryza sativa
  Clone ID: PAT_MRT4530_85970C.1
atggcttattccaagatcgctcccctcctcgccctgaccatcctcctcttcgccgccgctgcgcacggctgcgcgccatactgccccggaggggcgccgccggtcatcccgacgccgccggtggtggtgccgacgccgccgtcgcaccaccaccacggcggccacggccatgggcgctgcccgatcgacgccttgaagctgagggtgtgtgccaacgtgctcaacgggctcgtcggcgtcaagatcggagctggccccgacgactgctgcccgctgctgtccggcctagccgacctcgacgccgccgtctgcctctgcaccgccatcaaggccaacgttcttgggatcatcaacctcaacatccccgtcgatctcagcctcatcctcaacaactgcggcaagatctgtccctccgatttcacctgctaa

SEQ ID NO: 86980 - DNA, 790 bp, Oryza sativa
  Clone ID: PAT_MRT4530_85971C.1
ggatccccgggctgcaggaattcggcacgaggaacaaaccaataacaagtactagaatatgttcaccaactggtatgttatgtatactttggtaccggccgggcagctgtgatgagcattgctttcttctgacacctcttgtatgagaagtgcttctcccagagaagctcttcgttgagcagagtatagcaattgtctgagctctcctcatgccatctctcatttctcacctctgagcatctcttgtgcatttatagaagaaagttttgggtacaaattaagaggcttgttgtacacctataaattctttaagtgtttgatttggtgtgtgcactatgtatgattttctcaccaaaatttctgttcactttcacgaatattgctctcagctaacatttcagatggttcaagtttgaacaccaaggagcatatgaatggtctatcttgtcttggaggggtgcataatccattgatcagaaatgggtcgattttaaggagtgggcttatgaacttaacctgcaaacaacttacaactgaatgtacttgctgcaatgttggttctctttcttttaatttttacaaagctggcagcagcattcttgagctatatacttctgtatgtaaagttgtaaaaagtttggagaaaaaaactagcattggtgacacaaaactatatagcacaattcatagtgcactttgtcatgtactcaccatatgatggtgtatctgtttatattctgcactcaagttcaactgcttgtccaaaaaaaaaaaaaaaaaatttgcggcc

SEQ ID NO: 86981 - DNA, 599 bp, Oryza sativa
  Clone ID: PAT_MRT4530_85972C.1
tttatcttggttattggctttttgactcaagttagagcttttctttcctggctttttcactcgagttgtttaattgttcgcttggctttagctcatttttttgtccatttcttctctttacagatcccctcgaagtaggaagaagaatggcaatgaaaaataatagcaatagtcgtctcgtaggtgcaggtgctggtgaaagaatagcttatggggctggagtcaaaggagctttcatagacatagaaatcataatagaaagagcaggcctgcgagcagcgagtgccctttgtaagttgcgagcctgtcaaaccataggcgccttaccgccccccctttcttttttgaattagaaagaaggggacggggggatgaaagacaaagaaagagatcaggttatttatgatcggagaaaaggaaggggcgtgggttgatgtgtcactggggaacccgtaggaaggggagacgcccggcctcattcacatctgaaatcgccaacatgaacacaaacgatatcgtcgaatttcgtatagaaagaaaaggaaccacttctattctcttttcttagggatatgaagaaatgcttttttggtcccttt

SEQ ID NO: 86982 - DNA, 771 bp, Oryza sativa
  Clone ID: PAT_MRT4530_85973C.1
atggactcctccgcggcgtcggcggcggctgcggcggcggcgccggtggtgctggtgacgaacgacgacggcatcgacgcgccgggactccgcttcctcgtcggccagctcgtcgccgcccgccgctaccgcgtcctcgtctgcgcgcccgacactatctattctggaacagttggcggtgctagggaggcattcttgtacgggattccttcattagccatgtcatatgattgggtcgcaagtcagagcagtgttaacgacctcaaagtagctgcagaggttgttatgcctctgataaataatgtgatggctgagataaagaatgggacatatcctcaaggatcattcttgaatatagatataccaactgatgctgcacaccacaagggatacaaaattacaaagcaaggaaggtatatggccagaattggttgggagcaaacagtttataagaagcctgcggtagaaagttaccagacagcaaacatggatgttgacagtgaaaaggacagtgaaaagctggccgacatccaagcatacctccgctgtgctccctacagcttgtgctgcaccaaatccttgcgcagctcaaccagcgagcgtgcgccctgctcctccttcacgctgctcgcgtcgagaacctctgcagcagccgtcgccgcctccgccgtcgacactgccgctccacctccgctgtccgacgtcgccgctccgcctcagccgtcgacgtcgccgcagaacccctctggtcacagcgccgccgccgactag

SEQ ID NO: 86983 - DNA, 486 bp, Oryza sativa
  Clone ID: PAT_MRT4530_85974C.1
catcgaccaaacgaataaccatcctcgaatcatcctacaaatggaacctcttattgcaccctcccctgctctaattcatgctctaaaaatcgggtggtccaaagcctccggtctctcttaggctgaaggatacacgaccacgtgacatcgacaaatttgttcgttactgtgtgacaaaaattttaagacaaaaagttaagcgtgtttcacctgcctacacctacacatacttgcctgtgtacttacgcttgtagtccctggctatggccggcttcccttctgcggcggtggaggcctgatcgtaggggctcaacacggaggagtggaggatcccctcctccatccacttatggcggttctccctgaactcgcggagccattcctccggcgccttctggacctcctcggggtaaggcccgaccttcaccatggacagcaggacccggctgaacctcatgctcaggatctgctcgcagaaggcaccca

SEQ ID NO: 86984 - DNA, 1228 bp, Oryza sativa
  Clone ID: PAT_MRT4530_85975C.1
aaaatataataccaaagaattattgtggaactgtagttataaatagtaagagctatgtgatacatatgctctgaataatcacggaagtacataatatggcaatacatcagtaacaatcatctagaataactgaaattcatgcaactttatttgcaacttgcaaccatgacaccaactttttcagtttagtgggccacaaaagtatcctgatcacgtgacaagcaagctttgtagtatggtatgacatcagcttctgcgcgggatagagctcccaaaggggtaacagtaatatatccatctacaaggcacttgtggtcgatatcatccccttcctcttcatcataacttcgcctcacaagcactcttttaaacaataggtcattctctgatgaagtatctacttcactgtccttttcactgtcaacatccatgtttgctgtctggtaactttctaccgcaggcttcttataaactgtttgctcccaaccaattctggccatataccttccttgctttgtaattttgtatcccttgtggtgtgcagcatcagttggtatatctatattcaagaatgatccttgaggatatgtcccattctttatctcagccatcacattatttatcagaggcataacaacctctgcagctactttgaggtcgttaacactgctctgacttgcgacccaatcatatgacatggctaatgaaggaatcccgtacaagaatgcctccctagcaccgccaactgttccagaatagataacatggcatccacaattgttgccaacattgattccactgactaccagatcaggaaccaaaccatcaaagagcttcccagatatgcctaaagaagcacagtcagcaggagtccctgaggctgcaaatgctgtagcaccatctatatcaactcgtttacagcggagtgcagggcgccatgtgatggagtggctaacacctgacctgtctgtgtcgggcgcgcagacgaggacgcggtagcggcgggcggcgacgagctggccgacgaggaagcggagtcccggcgcgtcgatgccgtcgtcgttcgtcaccagcaccaccggcgccgccgccgcagccgccgccgacgccgcggaggagtccatcgaggagacttcggttttccgttctgcgctcgcgggtttctgctgtttcgctgctgcacggtgttttcggtgattggtgattggttggctccttccgcctgcag

SEQ ID NO: 86985 - DNA, 421 bp, Oryza sativa
  Clone ID: PAT_MRT4530_85976C.1
ctccttaatacgaaacggtaaaaaattcatacagttcgaacaactactacaagaagaagggtggagagcagattcaaacaagagagaagctgctaatacatatatatatatattgtcacaagcaatctagaggcacggtcctctgcaggtattacgcatgcgaattcctcagggttaatgggaaataaagggttaacgcagaggatctgcctagaatagaatatcaaacaagctttgacgatacatgcattacaaatgtgcagcgcgatctctgtcacttcatccaccgtgagtgctgtcatatcaaaggatagttcttcgacccagagagcatcctggtaggcggaccgccggcctgcctgcgaagattgtgaggtataggcggagccagcgtccgcctgggaagacccatttccaccgc

SEQ ID NO: 86986 - DNA, 489 bp, Oryza sativa
  Clone ID: PAT_MRT4530_85977C.1
ctagtcggcggcggcgctgtgaccagagcggttctgcggcgacgtcgacagctgaggcggagcggcgacgtcggacagcggaggcggagcggcagtgtcgacggcggaggcggcgacggctgctgcagaggttctcgacgcgagcagcgtgaaggaggagcagggcgcacgctcgctggttgagctgcgcaaggatttggtgcagcacaagctgtagggagcacagcggctgagagacgcgcagctgttggatgtaggatcaacagagaaggatttggtgctattggctattgttgtccgttccagtggtggtgactttggtggtgctgttgctggtgctgctgctacttgagaaggtgaggatttggaggtgaagtggaagcttggtttgctgttgctgttgttctgatttggggaagaaactgagtacgagagcttggcttgctgctgctgttgtgataagcagaggacttcgaagcattttgccat

SEQ ID NO: 86987 - DNA, 1239 bp, Oryza sativa
  Clone ID: PAT_MRT4530_85978C.1
atggcgtcgctcgtctgcctcgtcctgctcccagtaatcttcttgctcacgttctgtttctctgatttgcgttttacagtccaggggaagccgtccaagaccatggtggattgccgtaccaggtttgcggctacctgaaccttttctcagatggtgttcataactttactgatggaatggccctagggagtgcttttccgctacatggttgtgttggaggatggtcgagcactctatttctgcttgcacatgaactttctcaagaggtcggagattttggtatcctggtgcgctcaggattcactggtaactaaagccctatttttcaattttctctctacattggatgctcttgctggaacagcactgggcattgtctttggggaaaagatccagggcattcttgtatgattagagggattcactgctggtggctttgatttatattggtgatcatggagtccacccagagctgaatgataagaaaaaaaccgtcaagaattcgatgattcagttgcattccctggactatgtgaatgctggttgcaatcgacatacttatcttcgggttccaattccgctgatagagagcctgtcaattctgaaagtgaccctgcccctaacaaagcattatcaagtgaagattcctctgtttccaattcgaatatggtgttcggctacctcaaccttttctcagatggtgttgtcggagattttggtatcctggtccgctcaggattcactgtaactaaagccctatttttcaattttctctctgcgttggttgctcttgctggaacagcactggcattgtctttgggaaaagatccagggcattcttctttgattgagggattcactgctggtggctttatttatattgctgttgctggagtcctcccagagatgaatgatcagaaaacaaccgtcaaaagctcgatgattcagttggtttccctgacaatgggaatgctggttgccctcggcatatctctagtagaatgatgacggaatttctggttgcagctttagggcctattgtacttaagccaagcgggtaattcttgaacagctccagcctgtaagatcaattcttctcgatagtttcaccgactgtgttacagaaattttgacaattttcaaaaaaaaaagagagagaaaatttggttcttaaacttcttaaaatatgggtctgttgcttaagcgcaattcatgccgacaagctgattagctgagctc

SEQ ID NO: 86988 - DNA, 915 bp, Oryza sativa
  Clone ID: PAT_MRT4530_85979C.1
ttatttataggttgacaagaaatgtgctctttttttaatggtgtaacaataagtgaagaacaagctcggtcaggcattgtagtcagagactcagagtcacctcagccgcacaaagtaaatttaagatatgagctacttttcttcgaacaagaaattgatggaggttatggactagctctgcaggcatccaagctgaggtgaatcacatgagacaaaatggcagtcttgctttcaatgaaagccttgttgctggtatatttcttcattttgccggtgcaagacccacactggtcttccagaccatggaatggtagtgcatcaatagggctgcagcagggtgacacaccagcaccacggttattggattcaggagtttgccaaggagcagcaattaaatgattagcttccacctttaattttgctggcaggtagtctgtcgagggcttcttttttccagttatggcaatgtagagcacttttcagagtttaatatgacacaaaggcttcagggaacatatatagtcaactgcttggtaagccatgatatcttcactgaaatgtttcataggatatatgtatgcaatgcaagaaaatttttgtttgtattattattgtgtaatttacagaacatacttatcattgagggcttcaaatttaacttcaagtatgctatgcataaccacttgcagttgactatatacgtcattctagagcacttttcagagtttaatatgacacaaaagctttccaaacgatggcgatgcctacggataatcattttcctgctgctcttacatatttctatatattatataatcttttatttacttatttattttgactgataagagctggagactgcgctatatttcataaaatatattcctcttttatggttgaatcatttagtttgat

SEQ ID NO: 86989 - DNA, 325 bp, Oryza sativa
  Clone ID: PAT_MRT4530_8597C.1
atgcagctcaacccgaaagcaagaactcgtcgaaacaaaacgaaagtaaaagggtggcgatgcgccgagattgtattgaacgtgactctatccatacgcggcaatcatcatgaagcacatcaacctaaaccgacaacgtttgctgcatcatattgtcggattcggctcaatcggctaacactgtccgactcgaactctgccggtcttagctgtagccgattcagacttcagccaattcttactctgttttcgcgacactcttcatctttgattctgcttcgatctaatcttcttttccgatgctgacattaccaaatttggccgt

SEQ ID NO: 86990 - DNA, 661 bp, Oryza sativa
  unsure (1)..(661): unsure at all n locations
  Clone ID: PAT_MRT4530_85980C.1
gagctcactattttgaggcctccctttnnnnnnnnnnnnaaaaggaaaatttatccttatgtgaattctaagcaaggttcaaagtttactgaaataagcagacataagcactaaaaagccggagcgaaaaattgacattaaaaagaaattatacagtaagatggaatcaaatcattctttcacaaaatcaactaaatcaatttcacgtccaatagctataacctctcgtacaagaacccaaattagcagcacttgtttggcagcgactcccaccaatcactggagatgtgtttaattgttaggctgcattatttttgaacataatatcattgattctgtcaataccaatatctgaaatgggctcgatgggtttctcatcttctagggtacactcgagactcaaaggatccctactgaattcatcaaaaactgtgtttaaagatgcaggggaaggtgttgaaatgaaattaaggccaatgtagaatcccagcatcaatacaatggtcaccattacataagttggtactgctagagcccaatatctgctaggatagtaagagatgccaacagattgtagccatgattctggaacatatgcccataccaagaaaataactgtagcaacaacagtagtaatagaacctacaaaaccataaacttc

SEQ ID NO: 86991 - DNA, 423 bp, Oryza sativa
  unsure (1)..(423): unsure at all n locations
  Clone ID: PAT_MRT4530_85981C.1
gagaaatatttgttgctagtgtttgtgattgttttgattaatttctcgcatggtaagttctgactatataagtaggagtcttagttgtacattgtgaaacggaggaagtatgaaacatttcactcagttggcactcttttaggccctttttttgttctgactttcttgagtgaatgtggtcttgttgtttttgctggaaagaaaaaatcaaccatcaacagttatcgcagtttaataagatgacaattgaccttgcctctcactaatctctgggtatattaacccagtattgagtctcgagcaatgaattatgcaagagantctcataaaactccattcagacaccacctttatccgnccagaattttttgggtaatgtttattcaagnactcaccatttaaatcaaggtaatttttccactt

SEQ ID NO: 86992 - DNA, 222 bp, Oryza sativa
  Clone ID: PAT_MRT4530_85982C.1
atgtgaacccaagacctcttcaagagaagccatccaccacatctgcctcaaccagcaaagatcatagcagtaaagacacggtccagcaaggacgaccttgtctcatctcctctcatccgctcccaaagaaattatggcaagaaccaagaatgcaggcacaatgtgcagaagcagaagaggatagcagaaagcgaatcttattactcgctggccatcgaatga

SEQ ID NO: 86993 - DNA, 1582 bp, Oryza sativa
  Clone ID: PAT_MRT4530_85983C.1
gtcgttggtagttacagtggaaagatgtgaagcagtctgacaggtgaggtgaggccaaaaggacgatgcagtagctgctcaagggttattcggatcttcagatcaagcagctctcttcagacactcgatcgcctcccttaacgcgttcttgacctcgtcgctcatggggtcaagtttcagtgcctccccgaatgcgtccactgctcctttgtagtccttcatgaaactgagagctgcgccctcacggtaccatgccttggaccaaccagggcgcagcatcctgcactgctgtgcatccagtaaagctctgtccccttctcgctgccgcagccagcaaaggctccggttggcaaacaaggtggcatcaagtggggatttatccattgccagggtgtagaagtagatggctgtaaggtagtcaccctttgcaaatgcttcctttcctttcgactttgcatcagacacttgttcttccacaggactacatacctgaggttcaatacgtgtggttctcatagttctaattatcccgtcaacattccaatctggcagacatggaataggttttgtccgaggaaatagaatttcaacaagctctcgttgaccacgagctgctgccaccatgataggaatcctcccttcctgctcgtcaggaatgttagggtcagctccagcccctaccaagaatttgacaacatcggttaaactgtcatcaaccgcttcagttaaaggggtaggtccattggtactattaccgttcacatcagcgccagcctcaacaagtagcttcacgcatttcaaggagtgcccgcagcatgccatcatgagtggtgaaaagatatgattgacaactgataacaacgagaaccaccacttacatcagcacgctgtgcaacccgaacattcatgggatgaacccgatcctctgatgcagacaagtacagtcgcaccacacgaaaattcagaggctccacaggaactcctttggacagcaatccccctacatcaggtatggctgggtcaccaccatgatcaagaaggtatattaaaacattaatgtcccccaatgcgcgagaaatcattgatgtgcacgcacctctgtgagagcctgagttgacatcaaggcccgattcctccaccaggaacttgcagatctccagatgcccatagcttgcagccaagtgaagcgcatttcgcccattcatgtccttgaatccccgcaggtccaacttcttggccatttcacacaggaggtggaggtcgccgtcgagggcggcctgcaggacgacggcggagggggaggaggccatttctgcggcggcgtcgccttcgcgggggcgagggttccagaaggttctagaaggagaggcgcccggcggtcaaacagaacgaaatcaacacccgattcgtcaatcgccacccagatttttgctatgagctaccgcgcagggaacatcgcagctgcaaccaccccagatttccccccacatccggttgcgtgcgttgcagtccactacgccacacgatcgcaccttgccgaatcaatgggagatgctcgcctccaaaaaaaaaaaaaaaaaaa

SEQ ID NO: 86994 - DNA, 197 bp, Oryza sativa
  Clone ID: PAT_MRT4530_85984C.1
ggcccggaatttccgggcggggctacccacgctttttttttagatctcaacccttcagaacggcgggggacgttcctaaagttcagcctgcttccatacaacttaaacgtgttgctggtcaagacaccctcgtgaaaccaggactggcacctaaaattagcatggacagtaaatgcaccagttgtgggaacaatggg

SEQ ID NO: 86995 - DNA, 750 bp, Oryza sativa
  Clone ID: PAT_MRT4530_85985C.1
atgtggtcatcaatgagggccaattccagggagtcaaccgctgggtctgaaccatcggcgcagttgttggctggttgcggcaacaactgcggaggtggttgcagcaaagatggggccggaagcaccaagacgccggcggtggaggcgaggtcaacggcttgtcgcggtgacgctagggaaggtggttgcggcggaggggaaggtagcaccaagatgccggccgtgggtcgcagccagcggccggttgcgcccacgctgctgcatagttggccggccggcggtgcgtggatggggagcctggcgaccggccatgcccgagcgtcgatgaggttcccggcgaccggccgccgctgcgcatcgattgggatgctggcaaccggccgcgcccatgcgtcgatggggatcccggcgaccggccaccgccgcacgtcgatggggagccctgcgctcggccgcgcgtcgatggggagcccgtcgaccggccaccgccgctcatcgatggagagcccggcgaccggccgccgctgcgcgtcgatgggatccctgcgcccagcggcacatcgatggggagccaggcgggttagtgttttcagtcaacaggttcggaagacgaaggagaagcttgaccgcacctccgcttcacttgggcatcgccggagcgccaccgtcgacatcaacccgaggccgccaccttttcaagctcggcgccggccactcctatcgccgctcgtcaatttgcaacggttttga

SEQ ID NO: 86996 - DNA, 467 bp, Oryza sativa
  Clone ID: PAT_MRT4530_85986C.1
ggggttctcctcaccacggcgcacctacggcggaggcgacgacgcgacacgactgaagaccggccggcgacggcggcggctaagtgcacgcggcggcggcgctacggtgcacgggagaggacgagagaggggccaaacgaaagagggcgacgaggggatgctttatatagccttggattgaagagatcagactccaaacgagaggaatcgatccgagaaaatcaaaactcggttttggagataaactcgaaaacgagtttgattcgaacaagatacacaacgatttgctccaaaacttgggggaaaagatagaggagaacgagaggatcaaaacccctcaaaaatccggaagaaaagaggccggattggagcggatttgagaggagaagaaagcggctcgggcgacggcttgggctcggcctgtgccggcggctggaggtagaagattgtcgcgtcccaaaacgact

SEQ ID NO: 86997 - DNA, 464 bp, Oryza sativa
  Clone ID: PAT_MRT4530_85987C.1
tttgtttttttttttttttggtttttttttttttttttttttttttttttttttttttttttttttttttttttggaaaccaaaggggaaccacaggggttttgccaaatggaaaaaacaattgcccaaaaaaagggggggaaccaaaaaatggggggccaccacaaaaaaaggttgggtttcaaccaacaaaagggggcagacgacgtctccatgacccaagagagggtaagaccaccaaggccagggggcccaaaatttggggccccccccattagggggggttaaaaccgggaccggatttcctggggggcccccagccaaaaaagggggcgacccactgccttggtcattggggggggccccccccccaagatttgaaggcccccgggggggggggggaaaagagctttaaaaatagcctgggaaaaaaacccaacgcccccgtttcaaactttaggggg

SEQ ID NO: 86998 - DNA, 849 bp, Oryza sativa
  unsure (1)..(849): unsure at all n locations
  Clone ID: PAT_MRT4530_85988C.1
atggcgccgtgcctttataacgcgaaggcaaggaatttgtttcccaggaaaggtgagggtgacgtcgttggcgcttcgacagcctgtggtggtgggggtgatggcggcggaggcgaaggtgaagacggtgttgcactcggcctcggtctggatggtggtggtggtgaagggttcacgggagaaagaggtgaagggctcacggaagaaggtggtgagggaacccccgaagaagaagaagaaggaggtgggaattgcggattaggcctaggatttggggaaggtaccggattcggagtaggggccggaccaggtgctgggactggggcaatcactggagaagcgggtggtgaaaaaggtggtgaaggtggtggtggtgnaaatactggaggaggcataggggggtccaccggaggtggagnacgtggagctggagcaggcgtggggggaatcaccgaaggaggagatgggggatttcctggaggaggcggcggtgggttctccggaggaggtggtgtagggttccctggaggaggttgtggtggaataaccggaggagacggtgaaggtgttgttggagtagacggcggaggtgttgttggtgacgattggggcggatttgctgaagaaggtggctgtggaggccgatcagggggagctggtggcgattggggcggatttgctgaagcaggtggctgtggaggccgatcagggggagctggtggcgattggggcggatttgctgaagtaggtgcctgtgtagtccgattagcggaagcaggaggggtcggcgacgggctggacatggttgcgcggcgtgcaagtgcaacgtacgtgcagctcccagcgtga

SEQ ID NO: 86999 - DNA, 902 bp, Oryza sativa
  Clone ID: PAT_MRT4530_85989C.1
caccgcggcgacagccacgcccacacccactgtggtcccgctgcttttggatgatgatgaaggtgagggtgacgtcgttgggcgcttcgacagcctgtggtggtgggggtgatggcggcggaggtggagagttttggacctcgggtggtggagggcttgcaataggcggaggtggagacggtgttgcactcggcctcggtctggatggtggtggtggtggagggttcacgggaggaagaggtggagggctcacgggaggaggtggtgaggggacccccggaggaggaggaggaggaggtgggaattgcggattaggcctaggatttggggaaggtaccggattcggagtaggggccggaccaggtgctgggactggggcaatcactggaggagccggtggtggaaaaggtggtggaggtggtggtggtggaaatactggaggaggcataggggggtccaccggaggtggaggacgtggagctggagcaggcgtggggggaatcaccggaggaggagatgggggatttcctggaggaggcggcggtgggttctccggaggaggtggtggagggttccctggaggaggttgtggtggaataaccggaggagacggtggaggtgttgttggagtagacggcggaggtgttgttggtgacgattggggcggatttgctgaaggaggtggctgtggaggccgatcagggggagctggtggcgattggggcggatttgctgaagcaggtggctgtggaggccgatcagggggagctggtggcgattggggcggatttgctgaaggaggtgcctgtggaggccgattagcgggagcaggaggggtcggcgacgggctggacatggttgcgcggcgtgcaagtgcaacgtacgtgcagctcccagcgtga

SEQ ID NO: 87000 - DNA, 683 bp, Oryza sativa
  Clone ID: PAT_MRT4530_8598C.1
tgtaaacgacggcagtgccacctagattacctcactaagggaatagctgcggcctctcatgtctgtgatgcgcaagaagcgtgataacgtgaggccctcactgaccgggccatgggcgaccctgctcttctgagacgggtacgaatcggagcacgcctgtcgggacccgtaagagagtgacctatgcctgaggggggcaatgcctgacgaatgtctggtggcggctcgatccgatactgagttgtgaatcgtacgtctgacttgggtttctgggcgacagactaatcgaaccatctagtggctggtcccctccggcgtgtgtttcaggctcactggacgccctccgaccttctatcggatacagcgaatacttagacggatccgtggcgcattgccctcgacctgtactgtggtctttgtcttggtttgccggtgcgggtgctccggtgcgccgcgcccgggactcgggagctccatgtgggccatttcgggttagccgacgtggcgatacgtgatgatccggatgccagcttactgccgcgagctgaatgctaggcttcaagggacaaagggtgtaggtcgattaagatagcaggacggtggtcatggtagtcgaatcctgggtctcgagggcctaagtcccatatagtgagtcatattacatgcgtgatcctgtcatagtt

SEQ ID NO: 87001 - DNA, 308 bp, Oryza sativa
  unsure (1)..(308): unsure at all n locations
  Clone ID: PAT_MRT4530_85990C.1
ctggttatcaccgctttgcctgggggaatgaataggtggaatggaaggcctgagctgtgtgctgggcttggctgttgtgtgtgtgccctgttgtgatgtgtgcacgtgtggtgttttgttcaaggatggtgccacctggctgaggcctgaggtggtaattgaaaatttattgtgctgtgaatggtgatgctgaactgggccaatgtgttgtgaattaccgtgtctgtggcattcttttctacttagtagtgtatataaataataatatatangcngtgtgcatcttctatctgtccgaaaaaaaaaaa

SEQ ID NO: 87002 - DNA, 345 bp, Oryza sativa
  Clone ID: PAT_MRT4530_85991C.1
atggctgacgacgacatgggtggcgacaatgccgaggcggaacaagtgtggcccgtgggaggaggacatggcggcgcggtgatgggattcgtaccggcgggcaccgctgtcgatgccctcctcctcctcctcgtccgggcccgccgccgcgttgcccgcctgcgcccgggctgccgccgctgcgtcgccacgccaccccgccgcccgtcgctggccaccccgagcagagagcgacaagaaggaaggagaggaatagagaaaaagaaagaggaaagagattgggtgacgtggccagctgacatcttgggcacatgtgggtctcacgctgatttagccgccacgtag

SEQ ID NO: 87003 - DNA, 927 bp, Oryza sativa
  Clone ID: PAT_MRT4530_85992C.1
atggcggcgaggagcagcagccgcgcgtcctcgccgacccgaccaagccacggcgacgagcaggagggcgtggcggcggggaacgaacagcagccgtcgttgacgacagggctaggtggccgtgacctgaccaggtcgtggcggcaaggaggtgcagggtcggttcggctcggctgcaagcaggtggctaagggaggagcagcaggctgtgggttggttttggtgtcgacgctgcttgagcatatcttgcaaatggaggagattttcatggttgataatactgagatgaatatgcggcagaaatgtaatgtgattggcgttggcaaaagattgactcctacaggcccgaatccagtccacaatgaatttcaacctccacctccacctccacctccaagtcctcctaatggtggtaatgtgattggcaatggcaagagattgactcctacaggcccggatccaatccacaatgaatttcaacctccacctccacctccacctccaagtcctcctaatggtggtaaggtgattggtgatggcaagagattgactcctacaggcccggatccagtccacaataaatttcaacctccacctccaagtcctcctaatggtggtaacgtgattggcgatggcaagagattgactcctacaggcccggatccaatccacaatgaatttcaacctccacctccccctccacctccaagtcctcctaatggtgctaatgtgattggcgatggcaagagattgactcctataggcccggatccaatccacaatgaatttccacctccacctccaagtcctcctaatggtgctaatgtgattggcgatggcaagagattgactcctacaggcccagatccagtccacaatgaatttcaacctccacctccaagtcctcctaatggtatgatagcatag

SEQ ID NO: 87004 - DNA, 191 bp, Oryza sativa
  Clone ID: PAT_MRT4530_85993C.1
actctatatgagagctgtcgcggcatgcgcgcgcgcgcgtgcgcggggcctctatagtgggcgccctctttttttttttttttttttttatcaatgatcactgtgaaactattggttatcacaccctccattctaccgcaaaaaatgagtatggtggagattttcaaaagatacatacagggtttcagtta

SEQ ID NO: 87005 - DNA, 1448 bp, Oryza sativa
  Clone ID: PAT_MRT4530_85994C.1
tcgccctttttggccacccttaaggttttgggtgtcataccaaaagagagccgagtactcccagccccgggtgtctgtaaagcttctccaattcctgccagttgatcctcaggtagctccccccaagcaaaaaaaaaaaaaaaaactcgagttttttttttttttttttttttttttttttttttttttttttttttttttgaatattaaatctgatgattcacaatttcaattcggttttacaacagctcacattgtctcatctctggtaatgagctaatacagcattgacaatcacgagtgcacggacacgcgcatttagactgcttttgcccacttccttggcagcaaagttaacaacggtgacacattgacacattacttaatacacgatttcacctgaatgaaatcagcatccaacaacacacgtgcggactgccaactacacaaggataacaaatagatactgcaactcacctgaactagtgattgcatcttgattctgggtgagtatcccagcttaggtaagaaaaagaaaaacaccaatatcccaaaggttaagtcaagggttgataagtccctgctattgaagaacatattaaaacatggaaaggtaagaaaatcattaaaattaaaaggcatgctctcaataaagcttttccgcactgaatcccctgagaattgaacataaccaccatttggtaacgaagagactgaagcccgaaaaatcttgtcatcacagtggtctccaattaatcgtttgtcccaatcttcccgtttcaactcaagctcattctgctcctcattccggacaactgataagttgggtaagttctcctgaaaatattgcaaggcacatccctcttgttgctccttggaaatgtaggattcaaccaaacgcaaccgagaaagtatactctcaatctcagctgcttgaatagctttaatggcagcactccgatgttcatattcctggtcgttgagccacctcagccggtcccgcagcggcgcgtcggcggcgggtggctccggcggcttctgcttggcggcgacgcccttcttcctcctcggcggcatcgcgcgcgcgcgccgggcctccgctcgtagtagtcgggaagatctcgacgacggagggggaacggtgggattgtgggggactggagcgagcccccctcaccgacaaccccggcggcggcccgacggttcccttcccccgaggtggcggagggcagcggcggaggcggacagaggcgcaaggtcggcggatttcgccgaggccaccgagcccccggggccaaagcccaaagcttggtttgaagtttgaacccatgggccacacgactaaacgaaaagagtggatagatcacatagcatccttagtatgctatatgtggcaactggtactatgaggcagcatcttcacttccatttgtagattcatgaacagc

SEQ ID NO: 87006 - DNA, 894 bp, Oryza sativa
  Clone ID: PAT_MRT4530_85995C.1
atggcggcgccgggcctggacgaggtcatggcgttcctcaccgaccacgggttcgcgggcgccgcctccgcgctccgcgacgacgtcctcgcccgcgccgcgtccgccgccggggacgccggctccgattccgatgccgcattagatccccagctcccgcccctccggttgccggcgtccacgtccggaggcggtggggcgccggcggcgccgcctgcaagccctggctccagctctgactcggcgtcgtcctctgccttcgtcagcatgcgctcctcgccctcaggttggctttacgacgaccatctcttccatagcaagtcggagctggacgacgacaatggagaagacaaagaggaggacaagtttgttcttggtgtccacgatggctcagggaggatagagatgggagtgcttagtgccggtgatgaccaccgtcatgaacatgttggcaatgacggctgtgagggatgtgctgagttgaagcaccctgcggatgttgtgcttgagtgtcatttgccaagagattctggggaaggagatgagcgatcggagctgagtgtagtggagaaggagcttcaaatgctcagttcatttggtactagggttgatgcagatgcttttacaagtcctggacttgtacacgatatcacagacaatgccaaactggatgatagcattgaaaagaatatgaaaaacagtagcgacaaatatctgaaggaaggttatagcatagagcctttccctgagagttctgttgatgatacctttgagtttggagatattggaccattgaatactgatgcgcaaaactcaactgctgctaaagctgaggaagaaaatccagagacaaatgttgatctcgctctcgctaatttccatcgagaatatgag

SEQ ID NO: 87007 - DNA, 450 bp, Oryza sativa
  Clone ID: PAT_MRT4530_85996C.1
atgatgccatctccaagcgcttcaaatgagttgatgccacacgtcgccggatcttcttgcccctcctggactcctagctcaccaccgcccctagggccgtcagctccgccagagtcctctgcagtcacagtcgaggaaatcctctttcacccgaattcccaggcatctgccgctcctaggtccgccgccgccgaggggatccgccttctcctcaccttgaaccttgcaccagcactcaagccaccgccgtctcgggccgcctctgcccctagggttgccactgccgccactagagaagtcttccgccggacttataagccattgctgctagtcaccgctgcgaacaagaccaccttcaccaaatcctgccatgtccttgccaaggatacgccgacgatgcttaggccgccgccatcctctgcccgaagggatgccgccgacgacacctag

SEQ ID NO: 87008 - DNA, 1087 bp, Oryza sativa
  Clone ID: PAT_MRT4530_85997C.1
ccggccgggcccttccttccccacagccggcggcaggcagctcagctcagctccgatcggcggcggcggccatctccggtaataatgtcgtcgtcctcgtccaagctgcatctcccggctgacgacagcgtcctcctcctcctcacgcactccaacctctccaccttctcctccgacatccgcgtctccaagcagacctccgtcgaggcgctcaaggacaagctctggaggaagaccggcacatccgttgccttcatgcgcctccagctccgcgacgacaccggcgccatgatcgccgacctcgaccacgatgacgccaccctcgcctcctactccccatacgacgggtaccgtctgcacattatcgatctcgatccttcgtcaatcacctctggtggttggttggaggatacttcccttgttgaaaagtacaccatctcagatgaagcatataataatcttgatacaaactttcgaaaattcaaagaaaagatggcctttaaaaaccctacgtcagatgataaacaacaacaatctgacaagcatatggaggaattgtgcgccaacatcaaggtgggtgatagatgtgaagtcgagccaggtgctaagaggggtactgtaaaatttgttggcagagctgaagctcttggacgtggattttgggttggagtccaatatgatgaaccacttggaaagcatgatggcatggtgaaaggcattcgctttttcgagtgtcctcaagggcatggagctattgttaggccagagaaagtaaaggtcggggactacccagagagggacccttttgaagaggaggagatctaggcggtgcgccatttacgttggacatggtcctctagggatacccatattcagaattgctcccgttaaaatctttcgccctttttttggtctattggtttgagaattaagatcattgaacatgaagaatatatgtgcgtgtgcttgttcctgatcccattctgggatgaccatggtgaaattggggatactgttgtacttttaagtactgagccatctggacgcttgagttggaagtttggttgaaattggaacgatgtgacag

SEQ ID NO: 87009 - DNA, 323 bp, Oryza sativa
  Clone ID: PAT_MRT4530_85998C.1
ccccaaaaggggggtttttttggacctaaaaccgtttgggttaaaaaactaaattttttttttttgttaaaaaccaccatttgttttttttgggccacccggggttttggttttttaaagggggcttttagctggttttttgtttttttggaaaaaatttgggggttgccttgggtttgggggaaggaaccagcccaaatggtttaatggcttttggaatacaagttttccatttaatgagttttaaactcttttggggttttttttcggaaaagggttttggaaccctttaaggaccacccttttgaaatcccccctttttt

SEQ ID NO: 87010 - DNA, 2487 bp, Oryza sativa
  Clone ID: PAT_MRT4530_85999C.1
atgaagacgctaggtccatttgaagtcagtactgtctccgaaggccgaactggacttggacttggaattatcattggaacatgtgaagttatgagcgtatccgacaaagtgatgtcctcatcaattggaaaccggatcatcgggcggcagaggtggggacggacgggcgcccgggtccagccttcactggcgagcggtgaatggggtggggtggacaccgagccggttaataattttcgcgccatccgcccgaccacggtggacgcgagcaggaggggtgatgccgttgtggtggtggatgagatcggagcaccggcacggcgcgggaagcgacggcagcgaggcgaggagagcggtgcaagcaacacgggcagcggctccgaggatggggggcggccccgccatgtggcgtccgggaggggtctccacatcagttggctctgctctctgccctgcctcgaccaaggaaggcttctcgcctctcgccttcgcctcgcttcgcttccaagtcccaatgccgacgcaacagcttacctcacgcggcgcgccacgcgcttgagaggggccgccaaccgcatggcggcgccgggcctggacgaggtcatggcgttcctcaccgaccacgggttcgcgggcgccgcctccgcgctccgcgacgacgtcctcgcccgcgccgcgtccgccgccggggacgccggctccgattccgatgccgcattagatccccagctcccgcccctccggttgccggcgtccacgtccggaggcggtggggcgccggcggcgccgcctgcaagccctggctccagctctgactcggcgtcgtcctctgccttcgtcagcatgcgctcctcgccctcagggatgctgaatccatatggagtctggtcgccgcggcactcggacacgtcgtcatcggagatggagtttggcacagcgcgtcagtacgacgccaccgacttctttttccaagaaggttggctttacgacgaccatctcttccatagcaagtcggagctggacgacgacaatggagaagacaaagaggaggacaagtttgttcttggtgtccacgatggctcagggaggatagagatgggagtgcttagtgccggtgatgaccaccgtcatgaacatgttggcaatgacggctgtgagggatgtgctgaggtgtacacatgttcatcaccgctctgcggatgctgtggtgagggactgaagaacggggggctagaggtggtgaaggattctagctccactgtctatgggaggtaccagatcattgatgaccagacagagatacttgatgagtgtggcatggatgggtttcagttgaagcaccctgcggatgttgtgcttgagtgtcatttgccaagagattctggggaaggagatgagcgatcggagctgagtgtagtggagaaggagcttcaaatgctcagttcatttggtactagggttgatgcagatgcttttacaagtcctggacttgtacacgatatcacagacaatgccaaactggatgatagcattgaaaagaatatgaaaaacagtagcgacaaatatctgaaggaaggttatagcatagagcctttccctgagagttctgttgatgatacctttgagtttggagatattggaccattgaatactgatgcgcaaaactcaactgctgctaaagctgaggaagaaaatccagagacaaatgttgatctcgctctcgctaatttccatcgagaatatgaggtatttgaactgagaattgtccaccgcaagaacaggaccggctttgaagtaagcaaagatttccccattgtcataaattcagttatagcaggaagatattatgtcactgaataccttggctcagctgcattcagtaaagttgtgcaagcacatgatcttcagacaggaactgatgtttgccttaaaataattaaaaatgataaggatttctttgatcagagtctggatgagatcaagcttctgaagtttgtgaacaaatacgatccattagatgagtatcatgtgttgcgtctctatgactatttttatcatcagaaatataatcaggaatctggtggtgaagcatacttcacattgcctagaatacagcctgaaaacatccttatcaagagctacagcagatgtgaaattaaggttatcgatcttggaagtagttgcttcttgacagacaacttatgtctctatgtacaatcacggtcatatcgagctcctgaggtcattctggggcttccttatgatcagaggattgatatttggtctcttggttgcatccttgcggaactctacactggtgaggtactatttcctaatgaaccagtgcccataatgcttgctcaaatgattgggataattggcccaattgacatggaaatgcttgccctgggagaggagacgcaaaagtatttcactgatgattacgaccttttcaccaagaatgaggagaagaccaacggcaagtga

SEQ ID NO: 87011 - DNA, 1138 bp, Oryza sativa
  Clone ID: PAT_MRT4530_8599C.1
gcgcaattggtcattcagggatacaagttacttatagccgagtgcgcaagttattcgcttggctaggattgaaactatctatttgtgagtttgtggaggattgtgctatatgcaaacatgcggaagctaaaagagtgtgttaccctggattattgcaactcttgcctattcctgatcacgcctggcagattgtttcattggactttattgaaggactgctattgtcatcaggatatgattttattttggtggtggtggataagtttttctcggtatgctcactttatctccttagctcaccctttttaccgcactcgactttgttatggcttatctatcgtatattaccagtatgttgtggactgagctattccatttggcggatacacaactgcggatgattttagtgtaccatcctcaaactgatggtcaaatggaatgggtaaatcaacagcatttgtgcatgcttgcccaaaaagatggtatcgccggatagctttgacggagttttggtacacacaacaaatcattgggcattgggctcttctccctttatggtcttatatgggcattcctcatgctactttggtattcgggatattttttcatgtacgatgtcagatctagaggagtggatgaaggaatgcaaggtggtgtccagtctattgcgtaaacacctgcatcgggcacaatagagaatgaaacatcaacctgacctcaagtgctctcagcgtgagtttttgcctagggattaggggtgtttggcgattggcgctctgtaccttttggacagacatcgatggcggtgcgcactaatcacaagttttctaccatttctgtccctttcatgtgcgggagaatataggatcagtggaatattgcctggagttgccggtcgattgcgctatccaccccatggtgcatacctcttagctaagcaaggccacaccgtctacttcccctgctttggcaagtctaccagtagctgggcacttggaggaactggtcccaatgcaggtcttgctacgacgtcgatgcaacaaaaaagggagcagctgcgccagaacaactcaagtgagttgtttctagttctttgtcgaccgaaacaacctgggaagatgtggtggcgttgcatgcc

SEQ ID NO: 87012 - DNA, 3398 bp, Oryza sativa
  Clone ID: PAT_MRT4530_859C.1
cacgcgtccgcccgctgccgctgccactgcacacgcacgcagcgagtcgcgacacgagaccgtaccgtggaaagaagagagcgaggcgaggacaccactccgctccgctccaccgccgggtcgccgcgccgcgcgcggcccgagctcgccgatcgagagccatgagcctcatcctttcccggcggcgcctcgccgccgccgtccggcggtcaggccccgccgcgctcgcctccaggtggatgcacacgccgccattcgcgacggtgtctcctcaggaaatttcaggttcgagcccggcggaagtgcagaattttgtgcagggcagttggacaacatctggtaactggaattggctagttgatcctttaaatggtgaaaaatttatcaaagttgctgaggttcaggaagcagaaataaagccatttgtagagagtttatctaattgcccaaagcatggacttcacaacccacttaaagctccagagaggtatctcatgtatggagatatatctgccaaagctgcaaacatgcttggtcaacctgtggtttcagatttctttgctaaacttatccagagggtatctccaaagagctatcagcaagctcttgcagaagttcaagtctctcaaaaattcttggagaacttttgtggagatcaggtacgctttctggctcgatcatttgctgtacctggcaaccatcttggacaaagcagtaatggttaccgttggccatatggtccggttgcaattatcacaccgttcaatttcccattggagattccattactgcaactaatgggagcactgtatatgggaaataaacctgtcctcaaagttgacagcaaagttagcattgtgatggaccagatgcttaggttgcttcacgcatgtgggatgccagcagaggatgtggacttcataaattctgatggtatcacgatgaacaagctgctgttagaggcaaatccgaaaatgaccctcttcactgggagctcacggatagcagagaaattggctgctgatttgaaaggcaaaatcaaattggaagatgctggttttgactggaaaattcttggtccagatgttcaagaggttgattacattgcatgggtttgcgaccaggatgcttatgcttgcagtggtcagaagtgctctgctcagtctattctattcatgcacaagaattggtcgtctagtgggcttcttgataaaatgaaaagtctttctgaaagaaggaagcttgaagacttgaccattggcccagtccttactgttacaacatcaagcatgatagagcacatgaaaaaccttctcaaaataccaggatcaaaggtcctgtttggtggtgaacctctggagaaccattctatcccagaaatatatggtgccttcaaaccaactgctgtatttgttcctctatcggaaatccttaaaagtggcaattttgagcttgtgacaagggagatctttggtcctttccaggtggttacagagtattctgatgatgagcttgaattagtattagaagcctgtgaaaggatgaacgctcatctgacggctgcagttgtttcaaacgaccctttattcctgcaggaagtacttgggcgatcagttaacgggacaacatatgccggcatccgagcaaggacaactggtgctccacagaaccactggtttgggcctgctggtgatccaagaggtgcagggatcggaactccagaagccattaaactcgtttggtcttgccacagggagatcatatatgacattggccccttgcctaagaaccgggcactaccttccgctacataaatactatgtcaaggctagattagcttgtagcatgttattctgaataatttgccccgtctgggcaatcatgtgtttcattaaccccgagagcataataaaaaggcaggaaatggttgtgaaaaaaaaactgaataaaaaaagatagctacatgctacattggaggccaagaaccaagttacatcatgatggtgaagaatgagattgaaaactactcaggatcatctccagcaatgatcatcaatgcgctggaaggcggcgccgaggcgggcccggttgtcaggaggagaaggagggagccgtctttgctcgcaccgatcaatggtgatggtgacaccaatggtggtggcattggcaagtcgtccttgtcaggcatcactgtcaagaggagctctaggtttcgtggagttagcagattcagagcttgtagagatgacaagaagatgttgtcatgtaggcatcggtggacaggtcgtttcgaagcacatttgtgggacaagaactcgtggaatcctacacagaggaagaagggcaagcaggtctatcttggagcatatgatgaggaggaggcagcagcaagggcttatgaccttgctgctctcaagtactggggaccaactacctatacaaattttccggtaatggactatgaaaaggagttgaagataatggagaatcttactaaggaagagtatcttgcatctctaaggaggaagagcagtggcttctcaagaggtgtgtccaagtacagaggggttgcgaggcatcatcaaaatggaagatgggaagcaagaattgggcgtgttttcggaaacaagtacctctacctaggaacctacagtgagtacaagaacagtgcttatactctattctacattgtgaattggtattccaatgcatccaaaacttcacatcttaacatcggcccatctgccattcttcctaaatctttttctccaggcactcaagaagaggctgcccgtgcctacgacatcgccgcgatcgagtacaaaggcgtaaacgccgtcacgaacttcgacctcagatcatacatcacatggctgaagccaacccctgctcatgttgccatgaaccctgcagaagctcttgcaatgcagatccctgtagatcacttcctcccaatggaaacccagatgatgatgctccctcagagcaatcctttcacctcatatcacaatgcacaatcactgggtggtggtgacggtggcagtagcagtactaataatcaagaagcctccatgataatctctcccagtggctcatctagaaagagatcatcatccactgctcttagccttcttctgaaatcgtcgatgttcaggcagctggttgagaagaattcagatgcaggtgaagaaaatggaggtgagatgagagagccgggtgcccatccaggagaaggatatgaataccacaacttcttccagggagatgctgctccggacatggacatgtgtgatctgctttcatcaggaaatgtgcatgctgcaagtggtagtgctggatttgaagaggacatcgcatgttatagtggttttggaagcatgcagtcgctgcagcaatag

SEQ ID NO: 87013 - DNA, 213 bp, Oryza sativa
  Clone ID: PAT_MRT4530_85C.1
accagtcaccaagtccaatgggcatggtattgcccgaacagataaagctagcatgccaccggtatacagcgagtcgctctttgtgaaggtgacgattacctaccaatcgcggcggggagctggggaggtcgaatccgcggtggctgtagtgatgggggtcgagcccaacagctacgccgtgggggaagtcgagttcgacggttgctacaacgg

SEQ ID NO: 87014 - DNA, 211 bp, Oryza sativa
  Clone ID: PAT_MRT4530_86000C.1
cgtggggctgagtgagtgcgtgaggactggatgcaagacctgttgatgcgatggcgtgaagtgatgctgtggtgaatgtgcaggagtgcctgagctgcccaaattgacacactgtgcgggttgatgtgtggtgatggctgtgttgaaccccatgatgaatgtggggaatgactggaaaggggcaacctcccccttgacatgggaaaaaaaa

SEQ ID NO: 87015 - DNA, 1489 bp, Oryza sativa
  Clone ID: PAT_MRT4530_86001C.1
ccggccgggaagtagtctcgcctttttcacagcgaatttcccccacccgtccccatcgcagagaggcagagagaatccacactccaaaacccaccgttccccatggagaagggcgacgaaaccctcgcctaccccgccgccgccgccggcggccagaagaccgcgcccatcggatgcttcgccggcgacgacgttgccgccaccaccgacgggcaccccaccaagtcctacgccgccgtcgccgccgagaagaccttgcccaacggcagcgtcgaggaggacgaggtcaccgtcaccgccgccgagaaccccgccaagtcctacgccgccgtcgtcgctgagaagaccagccccaacggcagcgtcgcggaggacgaggtcaccgtcaccgccgccgagaaccgcgccaagtcctacgccgacgtcgccgccgagaagacctaccccaacggcaacgtcgaggaggacgaggtctccgtcaccgcggccgtgaaccccgccaagtcctacgccaccgtcgccgccgagaagaccgtgccggacggcagcgttgcggaggatgaggtcaccgtcaccgccccggtgaaccccgccaagtcctacgccgccgtcgccgccaacgccgagatcgaggacctccgcaccaccaatcacgacctggaggagaagctcgccgctgccgaccgtgagaagaaggggcgtgccacggagatcgacggcctgaaggacacctccgataaggccaagcagaactcggtcgtcttccagtacatcgcctcttcttccgacgcgaaggtgcttgcgctccgcgaggagctcgaggatctgcagaaactcctccaagcagagaaagatgaattcaaggcggacaagcgcgactccaatcagctcgccggcaaggtggggtccgaacgcgcggtgaagatgaggctcgaggaggaggtgattgccatgaaggagagggccagggccagggccgccgctgccgctgccgctgccgctgcggaggacgagagggtggctgctccgacacctgggaccctgcagggagcgcgggtcgcgtggccggtgatggctggagctgcggccgtcggcgccgccgcggcagctgttgccgtggtgatcttcctccgcctcaagagtttgcatatctggatgtgcccttatattgatctgatgcacaggaagttttgctctgctgcgacagcctatggaagatttgatgagtttttttgtggtgatgaactgatgatggtagagtgctggatgagaatagtatgacttctatgagctagttgcttaatagcctacagaaacatagggatctgaacacttgttatgttccattcctgtttttccttttatcattctaccttcttcggtggtgacgctaaatgtctgaaacaatttgtgatgcgtaactgaggaacgccgaatggttgctgtgcggttatgctttttctccattctgagcttctcattacttctt

SEQ ID NO: 87016 - DNA, 471 bp, Oryza sativa
  Clone ID: PAT_MRT4530_86002C.1
tcgtggacgcgtgagcgagcccgccggaggccaaaacgccttctgcggcagcatccaccaattcgccatggcctccgagaccgagcccgacgccgtggtgttcgaggctccggcgcacttccgcatctacaagagcggcaagatggaccgccttcaccgaccaccctgcctgcccgctggcgtcgacgaggccaccggcgtcgcctccaaggacgtcgtcatcgacgccggcaccggcctctccgtgcgcctctacctccccaagatccaagagccatccaagaagctccccgtcctcgtcttcttccacggaggcggcttcctcatcgagtcggccgactcctccacgtaccacaactacgtcaaccccttcgccgccgcggccggcgtcgacgtggtgtccgtcgactaccgcctcgccccggagcacccgctgccggcggcctacgacgattcctgggccgggctact

SEQ ID NO: 87017 - DNA, 837 bp, Oryza sativa
  Clone ID: PAT_MRT4530_86003C.1
gcacgaaattgaggatagatccatgtctctttcttcttcatccattcttcctccgttttgctagagaagaagaacagctctggcactagtactactactactacgacaaagcctgaatttgttttttggtacgaaaggagtatacacgaaatgcatggcctgctttctgacatctcgtctataaataccctgatgtgcatcctttccctacaccaccacatcgataacattcgatcacattcggctagtaaccaagcagttcttacgctagagctagctcgagcaatggtgaagtgggcagctgtgatggagatgcttctgctgacggcagcagcgacggcggtagcggtggtggcggcgcagtgtgaccctgagcagctatcggcgtgcgtgagcccgatcttctacgggacggcgccatcagagtcgtgctgctccaacctacgcgcacagcagaaggaggggtgcctctgccagtacgcgaaagacccgacgtacgcgtcctacgtcaacaacaccaacgcacgcaagaccatcgccgcctgcggcatccccattcccagctgctaggctcgatctcccgccgccgccggccatgatgcgtacgtggcatatatacgcgtggtgtgtacgtgcgcttgaagaaaagggcgtgagtttgaattaataattatccagtacgcgatgtttgatcgatcgatgatgtgccttttttttttggtatttgaagtttgaactctgaatttcatcttgtgttaattggagtatgatagctgtgtgtacattcgttttggaggtagaggccggtttaattaaaaaaaaaaaaaaaaaaaaaaa

SEQ ID NO: 87018 - DNA, 183 bp, Oryza sativa
  Clone ID: PAT_MRT4530_86004C.1
atgggcggtgaggaggctggcggccgacggcgggtggtgaggaggacggtcggctggcggaatccaccaacagggatccagcgggacactggcgacagtgccttacccacacgcagcaactcccatcccaagatctacacacagataaagacgtccgacagcagcgcacggccgtggcgatga

SEQ ID NO: 87019 - DNA, 138 bp, Oryza sativa
  Clone ID: PAT_MRT4530_86005C.1
atggaaaccggctccaaatctgcaaccgagctcgcagattggcgaccccggaacatggagaggcgagagctaggggaaagctcgattgagcagcagccagtggttgacctgaagaagtggtctctcctcctagattaa

SEQ ID NO: 87020 - DNA, 192 bp, Oryza sativa
  Clone ID: PAT_MRT4530_86006C.1
atggaagaaatgctcccgcttgtcctccagcgcgtggacgctccgcaccaggtcgggagacgtggaggaatctcctccgtccgccgctgcctcgagatccgcggtgaacaggccatttttcttgtcaccgctgcttccacgatcgggagcgtgggggggaaggcggtgtggacatcccgctgcgcgtcgtag

SEQ ID NO: 87021 - DNA, 243 bp, Oryza sativa
  Clone ID: PAT_MRT4530_86007C.1
atggaagaaatgctcccgcttgtcctccagcgcgtggacgctccgcaccaggtcgggagacgtggaggaatctcctccgtccgccgctgcctcgagatccgcgggctctgctttgttggtgtggaaacagtagagctttttagccgaaggctgcaacctcaggccatttttcttgtcaccgctgcttccacgatcgggagcgtgggggggaaggcggtgtggacatcccgctgcgcgtcgtag

SEQ ID NO: 87022 - DNA, 288 bp, Oryza sativa
  Clone ID: PAT_MRT4530_86008C.1
atggctgccgaggataacatcacttgcagcggcagcggcaatggcagcagcagcaacgacgaccatgcgccgccgccgccgcagcagctcgccgttgcccgcggacggcggcgtgctgaaccgccgatgcgcctctccgcgctgtacctcatgctgttcggggcgaccgtgatcgttggcgccgcgggcgtcggggcgcccgtgaccccgctgccacggctgttcgcggcgctcgtggcctggctcgtcggctgcctctcgctgctcgtcccgctcccgccgccgtga

SEQ ID NO: 87023 - DNA, 2459 bp, Oryza sativa
  Clone ID: PAT_MRT4530_86009C.1
gtggatccccgggctgcaggaatcgcacgagggagaactagtctcgaggctcgtggaaccatgaatggctaaaacagtaatttgactgaacactgctgcttctttatgtctatattatacatcataatggatctcacagtagcctatcaaatggaatcaatatccccaggactacagtgagatacagaagcagcaatgctccagctggcccacaaaggccaacctgatctttttcttcagtactgtagtgcatacattacaagttaccctaaaacaagagaaatgaagcatggaaatactcttgggattattccttggattaaattctaggcttacaatgttttccctattcggtggtcgtggcaactctagatcttctgcttgagcacttgccggagctggaccttctggctctccatccgtgcctccatgagcttggatttcaggctgtgcttctgggatgtccgtgggtactccatgcagcccttgaagccccggttgaattgcatgctcattgaatccggggagctccattgccctatgctcggcgagctgaggcctatttcttgaatgccactgtcaatggtagaatgggtcccaacggatagccgaacattagatgatcttccattgatcgtctccacagcatctttcttgcagacgtcattgttctttggacgggacgacttccagagctttgataaggctgattctttcttcttgggttggttcatgtttgtcaggtatatatcagtcgaatcatccttcagtttctcagcttccttgtactcaaaatcgtttcggctcgtccaagagatgcttccatcacagatcttgttaactgacggttcacttccatccggtgaaccacttgaagcctgcatatcttcatggcttattgtctcccagctgctgccatcttcagtgtcactctcattctgagggcttttacttgagtacaccttggttggcttttccaggaatatatcagtcattgggctagcctcttggatttctgattcgcacatagcagagttgttcttgtagcatggctcaatctcctttatgacaggctcttcacttggacgcagctcttcaaaaatggaaaatatgtcttctgattgtgccggtggctcatatctgaattcaatatcttgtgctctaacagatttgatcgcctgtattatgttctctgcttcttccacaaccataatgtctcctctagcacaactgcatgcagcaatgaaagcctcaacatcctgttgcagtttgctcaattgtgtgtatttggcatcaagagtaagttttgcatcaacaagcttcatctgcacccgttcttcacgccaaacctcagccatctgtagcatcttgcgctcctcatcaacctcctctcgcagcttgagggaatcatgtttcaaggcttcaatctcggctttgtcttcctccacctcccttgccagttcattgcacacctcctcagtgagctcgcgtgctttcctctcattatcatattcttgcagtagctgctttgctgacatcttggcttccttcaactcattgacaagcttcaagttaatcatctccaggcgtctcctgtttttcttctcatggtcaagatctgccttcatatcttcaagaattgcgcgcactttctcatgctctctactccgccaagctgccttttcctctgcaagtttcttgaacaagtgatccagcttcttcttagccgcacgtcgctcggtttccagttcacttacccgatcacgtgcttgctggagctccatctggaggttagcaacataagttgcatcttgctgctcgttgagaagatttagttgactagctatcagataggcatcatgtgcttccattccctccaagctctctggctcccattttgttgccttctccatagcggtgactggtagcacagctgtagcagcatgaagcggtaccttatggagctctccactctttcgttccaaaacagaaattgggcttgaaatctcattcttaagggtttggtgatgaaccaaattattctgtttaataagctggacttgtagatgtcttgggatatgctcgaggccgacgtgaaccctcctcctctccccgctccccgcggcggcgcccccggccaccgcctccggcggccgcagccgccacactccagccgcgagcctcctcaccgacacatcccgcgccgcagccgccttctccgacgggccacctgccttctcgccgccgccaccccccttctccgcgccattccccacatcccacttgagcagcggcgtggcgggcccgctccgccgccccccaccgccaccgccaccgccaccggaccccgacgccgtcttcagcgggcgcctccgcagccttcgaggcgtccggacagcagacggcggcgccgccgcaggagcagcggcggcggcggcggagcggtgcttggagctcat

SEQ ID NO: 87024 - DNA, 315 bp, Oryza sativa
  Clone ID: PAT_MRT4530_8600C.1
tttcgagtgattccctatcccccttcaagagaacggaccaccgtacaggcatctaaccacagtccgcgagcttgatctgtgttgaatgcacatggatgccactgctaggatgtgagccatttcttctggatcatatccaacatcaagagaaggatccagctagttccttcatggttggttcgagtcgagcaatggtgttgtgcctatgcacatggacaaacacagcctgtgaattcaagggcttcagatgtatgtgattataccgttcatgttatccattcaagtattgtagaattaacttttgatcatcactgg

SEQ ID NO: 87025 - DNA, 624 bp, Oryza sativa
  Clone ID: PAT_MRT4530_86010C.1
atggacgatcgcaggaggggagcagacgcaacgtggcctccattccccgccgacacgttcctctgcacccacccacgcggaccgttcggcctcgtcgaacagcagcactatagcggcagcatccatcccatccagccgtccaaaaccttgctatctcttgcagccctcccgtcctctggcacagtatataaagcgtacctgcaggtgcagcacctgatacctgcaaagcagaggcactggggctcctgggtcgccgagatccgccaccctctcctgaagacgaggatatggctggggacgtacgggacggcggaggacgcggcgagggcgtacgacgaggcggcgaggctgatgagcggcccagcggcgcgcaccaacttccctctcagcagcagcggcggcaacgcccgcagctgcctctccccgaccctgcgcgcgcggctggagaaatgctgcggcgcggggtcatcagcgcaggcgcaacagggcgccgtcgctggccaggacaacgacgatgctgctgcggcggcggcggcgatgggcgtcgacgacggcgacgagtacgtcgaggagatgatccaggagctcacgttctacggctccatagagatcgtccagccctga

SEQ ID NO: 87026 - DNA, 533 bp, Oryza sativa
  unsure (1)..(533): unsure at all n locations
  Clone ID: PAT_MRT4530_86011C.1
ctccttttctgagtcagattgagacagatggtggcaagtccgtggacctcagcaactatgcttacatattcatgagatggaaagagcagtactttgtcaatgttggagtggactgtgggttgaccatagctggtttctactatgtctgcttttcatgtagcgacggttccattagcgggtattattatgatccaaacagcagtccgtttcagaagcttgaactgaagtgtaccaatgagaaagattctggatttaccttttcgtcctacgagctgcagtgagagactgacaggcctgctgtcattatagtatgtgcggatgttaatatacacaatgtatgtactgaactcataattctgaatggtgtcccattaaaagggctgagatggcatgtttgtaacagtgatttggagcaagatgtattttattctctttgtaatatgaatataagctggtaaactgtctagtttgaactacttgtgtgttctttttgtgctaatcatggcatggntatgtccaaaataatatgacag

SEQ ID NO: 87027 - DNA, 289 bp, Oryza sativa
  Clone ID: PAT_MRT4530_86012C.1
ctgcaggaatcggcacgagggacgccaccgccggcgcccgcatccacgccgccgacgccactccccaatctcaactgatcccctaaccccagcgccacatcccaccctctacctccccctttggccttcgaggcttcgctccgcgccggcactcaatccagccgtcgccgaaggcggctcccacaccaacatgaggtaccgcggctgcagcgccaccactgttttctcagctaagatttggaatcctgtgtgcaaggagtggctgatgactctatcctcaatttgttta

SEQ ID NO: 87028 - DNA, 681 bp, Oryza sativa
  Clone ID: PAT_MRT4530_86013C.1
atgccagtgagggtggtcgacaccgcaaccccatcctcccagcccacctcaggtcaagatgcaaatgctgggcatccgtctcctcctagctgttccctcttaagtgctggaagatgttatgctggaacccagaatgtctctactatacaaaaagaagaagcttggaaagttaatgtgcggatcaatgactgtgatcttgaacagggttatttatgtggaacaatggaagcagttaatgttcccttagctgatacccctgtggtaacattctgggagggggagatagtggatgctaaaaattatacatttttcactggcaagtgggaggcatccccagaggatgatattagacactggtccaagttcccatcatttacacctcttctgagtcagatagagacagatggtggcaagtctgtggacttcagcaactatgcttacatattcatggtactgcaccatctgacctttcatagatggaaagagcagtactttgtcaatgttggagtggactgtgggttgaccatagctggtttctactatgtctgcttttcatgtagcgatggttccattagcgggtattattatgatccaaacagcagtccgtttcagaagcttgaactgaagtgtaccaatgagaaagattctggatttaccttttcatcctacgagctgcagtga

SEQ ID NO: 87029 - DNA, 188 bp, Oryza sativa
  unsure (1)..(188): unsure at all n locations
  Clone ID: PAT_MRT4530_86014C.1
ataaccgcctcgaccccacgtccgcttccctggcgggcttcctttgttgcggtcctggtcgcgcgaaaaactcgcctcgcctttggtccctgccnngcccctcgctccccattccgcgatttctgttcgctcgttcgttngctcgctccggctcccgtcttttctttgctccccttttctcttttgcc

SEQ ID NO: 87030 - DNA, 2081 bp, Oryza sativa
  Clone ID: PAT_MRT4530_86015C.1
gaagaaaattgggcattatcaggaacaattacacaaggttactggtcttatttttgtcaaccaggatgactattttacaagagcagattaacagatcaacatcagaggccaagatcacaagtgttaaaacaagaaaagaggtgtcacttgccagctccaggccctcccagcgtgagcacaacatcgtgcaggtcactgccgcccctctccggttcagacttgatgatcttcgccgctgccgccgctgcagacgccgggaatgcttgccgggcatggttgctgcagtccggcagcacgaagcccgtcgcctgtggcacgggccgggcatgaaccgggatggcgtgggcgagcaccgggcgctgctgctgctgctgcgggggaatggccgagctcatcagaatcggatggtgcaacgtcggtctcggagccgttactcccggaccaggagcgaaaaggacgcctctgaagagctgtccattcacgacagcggtcatgaggtaccctgaatcgaaagctccatcgatagtcccatgaacctctgcgccgataaggggtggagtaggcgggcggtggtgcagcttgggttcagctgctaggaactgcacttcatgccgctgctgcggagcaatggtgcggaggaactgatccgtcttcagggtcctcggtgacacacctccagcagccctcagagtgccattggtgttgaggtgaacaaacggttgcagggctgagattgatccgttaggagatgccgaaagcttctgagctccattctgctcctgatcagattgggatggtgaagagtgctgagaaagtgatagtgagtgctcctcctgctccgactcggtctctttcagtcgaacatcgccagttctcctccttttcacatggccattctcgagaccacgcaagaacgggtttctttgttcgatttctgcttcccgagatcttggaccaagttctccattactcatgtttggatctctttgattttctgttctcaagaattttcgcctctcctggctccagtggttgcttagaactttgcacattgagatgttgtaacggccatttggatgctcagagcccaactgaagaatgagcagctcattcaggggccgttcatcttcaccacaccctccgtaaattgcgatatcggtattcaggacaaccgcgctatgagaaaaccgtccttgcggttgctgcccacatatctcaagctgtgtccacgaccgatttgcaacatcaagaatccaggcatcactgtagtattgcttatcaccaactcctccaataacatagaccttagatccaacacctacagcagcgtggccagctcgaacaccaggtgaggccccttttactgcaaaccttgaccacgccatggcgtccatgtcgagcacgtccacctcgccgtggtaccggtcgccgcagtcgccgccgtagacgaccagccggctgcccacagcgacggcgccgtggctgtccctcggcgcgggcacgacgtcgcccttcacctccggcgacgaccacgtcatggtggccacgtccaggacgtgcacgtcgttgaggtagttcccctccccctcgccgctgccgccgaacaccaccagccggtcgcagccgccgcacgcagtcaccgtgtggctctcacgcggcgacggcggcgtgcccttgcacggcggcttggtccactccttggtccggaggtcgagcacgtggaggtcgttcaccttcttggacccgttggtgccgccgaacaccatcatccggtggccgaccagcgccgcgccgtggctgtcgcgcgtccccggccgcgcccctgtcgtcgccagcgagctccacgccatcgtctccaggttcagcgtcagcacgtcgctgaaatgcagcccgccgcagcaccccccaaagacgtagacgacgccctcgaagaagcaagcggagtgcccccatctctccggagggttgaagcccaccacctttggatacagccacattgccttcctcctcctctccatctctctacctctctctctctcacacacacacacacacttcttgtctacactatctcctcgtgc

SEQ ID NO: 87031 - DNA, 303 bp, Oryza sativa
  Clone ID: PAT_MRT4530_86016C.1
caaaaaaaaaaaaaaacctgtcctgatttttttttcaggggaagaggggtttaggacccggtttaattaaggcttaattcccccaatttccaggtaattcccactccattccattccaccgtttgggcggccccccgaaaattcctttgagtttaatttttgcaaacgtcctccccaggggggatacttaaccctttacctacaaccctgcccgggtcgggtcccccaccccctattttccattgtttccggttaggactacgggggtctttaatcccattggcccccctagctttggttttt

SEQ ID NO: 87032 - DNA, 2241 bp, Oryza sativa
  Clone ID: PAT_MRT4530_86017C.1
atggagaacgagtggatgcacgccaggctggagaagctacgtcgcagcggtagacagtgcatctcagcagcagaagaaaatggtaacataaacaatgcttgcttgtgctgtatctgtgcatgcagcaggatgcatgttgctgccggaggaggtcatggtggtggcgccgacgacggcatggttgtcgactaccggggtaacccggtggacaagtccaagaccgggggatggctcggcgccgggcttatcctagggacggagctggcggagcgggtgtgcgtgatgggcatctcgatgaacctggtgacgtacctcgtcggcgacctgcacctctccaacgccaagtccgccaacatcgtcaccaacttcatgggcaccctcaacctcctcgccctcgtcggcggcttcctcgccgacgccaagctcggccgctacctcaccatcgccatctccgccaccatcgccgccaccgtacgctctcgctctcgcacacacagaacaacacatcttcgatcatcctcgcgcggtgcaggaatctcactacgatctgctgccatgcagggggtgagcttgctgacggtggacacgatggtgccggggatgcggccgccgccgtgcgcggacgcgcgcggcgccggggcgcacctgcggtgcgagccggcgcgcggggggcagctggcgatgctgtacgcggcgctgtacacggtcgcggcgggcgcgggggggctcaaggcgaacgtgtccgggttcggctccgaccagttcgacggcggcgacccgcgggaggagcgcgccatggtgttcttcttcaaccgcttctacttctgcatcagcctcggctccctcttcgcggtcaccgtgctggtgtacgtccaggacaacgtcggccggggctggggctacggcgtctccgccgtcgccatggtcctcgccgtcgccgtcctcgtcgccggcacgcccaagtaccggtaccgccgccccgaggggagcccgctcaccgtgatcgggcgggtgctggcaacggcgtggaggaagcgccgcctgccgctccccgccgacgccggcgagctccacggctaccacacatccaaggttgcctacaccgaccgcctcagagtttacgtgacacgatgtgctctgctgatagtacaatactgctgctgtcaaccggtcactgtcaaggctgagatggacacgagctatagagaagaagctgaggacgacaactcagttcgccctcttgctaacacagcacgcaagagcaaatcatgcatggtactagatgaaatgaatgagtggtcaaagtgcctggacagggcggccatcatggaggcggacctggcagcgtcgccggcgaagacgaaccagacatcggcggcgccggcggcgacggtgacggaggtggaggaggtgaagatggtggtgaagctgctgcccatctggtcgacctgcatcctcttctggacggtgtactcccagatgaccaccttctccgtcgagcaggccacccgcatggaccgccacctccgcccgggcgccgcccccggcgggttcgccatcccggcgggctccctctccgtcttcctcttcctctccatcctcctcttcacctccctcaacgagcgcgtcctcgtgccggcggcccgccgcctcacccgccgcccccagggcctcacctcgctccagcgcgtcggcgcgggcctcgtcctcgccaccgtcgccatggccacctccgcgctcgtcgagaagaagcggcgcgacgccgccaacgacggcggcggcggcggcatgatcagcgcgttctggctggtgccgcagttcttcctggtgggcgccggcgaggcgttcgcgtacgtcgggcagctggagttcttcatccgcgaggcgccggagcggatgaagtcgatgagcacggggctcttcctggtgacgctgtccatgggattcttcctcagcagcttcctcgtcttcgccgtcgacgccgccacgcggggggcgtggatacggaacgacctcgacgccggcaggctggacctcttctactggatgctggccgtgctcggggtggccaacttcgccgtgttcctcgtgttcgcgaggcgccacgagtacaagcagcccgccggcacggccgccgtggtggtggcgcccgccgctgccaaggacggcggcgccggcgaggagaaggagatggacgacttcgtcgtggtcaaggaggccgtagaagggatggatgtgtag

SEQ ID NO: 87033 - DNA, 196 bp, Oryza sativa
  Clone ID: PAT_MRT4530_86018C.1
gagcctgaacatggtaaatcttcattcaactcttacatggcacataagtacaaaccttcaactggacagtacagccttgaacatactctacttgcaacatatgatttgcttatacttgtactctcaatagccttagaagcacatgtcgaggaggcaacagcagcaaagggcagcacagctgcaaaacaacagaacg

SEQ ID NO: 87034 - DNA, 284 bp, Oryza sativa
  Clone ID: PAT_MRT4530_86019C.1
cggacgcgtgggctgacgcgtggggaaagcataagcaacacaagggattatactttcattcacttagctaattaaatcttcgggatgtcttacaagtgcggcaactgtgactgtgcttacaagagccagtgcgtgaagaaaggtaccagctatggcgtcttcatagttgaagcctagaagaggttactaactatctcaatattcttcaaccaaagcatattttttgagtgaattttacagatataatttcttcggctttgctctcttacacacactctattcta

SEQ ID NO: 87035 - DNA, 1237 bp, Oryza sativa
  Clone ID: PAT_MRT4530_8601C.1
gcgcaattggtcattcagggatacaagttacttatagccgagtgcgcaagttattcgcttggctaggattgaaactatctatttgtgagtttgtggaggattgtgctatatgcaaacatgcggaagctaaaagagtgtgttaccctggattattgcaactcttgcctattcctgatcacgcctggcagattgtttcattggactttattgaaggactgctattgtcatcaggatatgattttattttggtggtggtggataagtttttctcggtatgctcactttatctccttagctcaccctttttaccgcactcgactttgttatggcttatctcaacaatgtatataagctgcatggcttatcttggatcaagatcgtatattaccagtatgttgtggactgagctattccatttggcggatacacaactgcggatgattttagtgtaccatcctcaaactgatggtcaaatggaatgggtaaatcaacagcatttgtgcatgcttgcccaaaaagatggtatcgccggatagctttgacggagttttggtacacacaacaaatcattgggcattgggctcttctccctttatggtcttatatgggcattcctcatgctactttggtattcgggatattttttcatgtacgatgtcagatctagaggagtggatgaaggaatgcaaggtggtgtccagtctattgcgtaaacacctgcatcgggcacaatagagaatgaaacatcaacctgacctcaagtgctctcagcgtgagtttttgcctagggattaggggtgtttggcgattggcgctctgtaccttttggacagacatcgatggcggtgcgcactaatcacaagttttctaccatttctgtccctttcatgtgcgggagaatataggatcagtggaatattgcctggagttgccggtcgattgcgctatccaccccatggtgcatacctcttagctaagcaaggccacaccgtctacttcccctgctttggcaagtctaccagtagctgggcacttggaggaactggtcccaatgcaggtcttgctacgacgtcgatgcaacaaaaaagggagcagctgcgccagaacaactcaagtgagttgtttctagttctttgtcgaccgaaacaacctgggaagatgtggtggcgttgcatgcccgttttcccagcagctccggcttggggacaagctgcttataaaggggaggggatgttat

SEQ ID NO: 87036 - DNA, 1311 bp, Oryza sativa
  Clone ID: PAT_MRT4530_86020C.1
atgtgcaagttttacatatgctacatatgccttttaagttgttcggtactccactgtatcccagggatattcactgaatttgccaatttgccatttcatgagcttttttttgggcgttctctgaaaacatctgtgtctttcccgcttctgcctttatttgcgtgcttgaaaaaggatggcgctaagaacaattctgatgagcaactactttacacaactcatttacagatattatcctttaagcgttatgaagtatcatgggttcatcgacgagcagttggccattcaattccttatcgctttcttcagggtgatttcgacattattggaggtgcttcaccaataccagaggctgaaattgtaaaggtcactttggatgttggggcacacttttatgatccgaaggcaataattatccgtctgaatcatagcaaacttgctgaagcagtttgttcctgggcaggagttcctcaagaacggcgacaaaatgttgctgagtttttctcttcaactcttgttcagtattggccaaataaggctgatcgcaagtcacaatggagtttgattcgtgggcaactattacaggatcttcgtctttcggaagaggtggttgagaagctacataaagctgatcagagattttgtggttctgcagatcaagtacttgctagattaagagggaccctgttctatgataaatctgcttgcaaggctctcgatgagatctcagcatttctcaaatgtttgagaatatggtcaatcgaagaacatattactattgatgtactcatgcctccttcagaatgttactacacagatctgttttttcagatctatgtgaaagaaggaaaccctggatcaagttcccatgaaaagttacttgccattggggggcgatatgattggttgatagagcaagcttgggataggacatataaatccaaacccccgggtgctgttggtgtcagcattgcacttgagaaatttcttcctaatagtccttcgtctgacattgggttcccaaggattgaaccgagcatcagtgttcttgtttgttcaaagggaggtggcggtcttttgaatgagcgtatggaacttgttgcagaactttgggaagctaatataaaggaagatccaagtcttcaggaacaatatgaatatgccagtgatcatgacatcaaatgccttgtgttcatcactgaagcaggtgtctcacaaacagaacttgtgaagctgtactttcaatcttggttgcccttctgtgaaccaagattacgcaccgtggcttcggttcaaggttcaaggcagtga

SEQ ID NO: 87037 - DNA, 286 bp, Oryza sativa
  unsure (1)..(286): unsure at all n locations
  Clone ID: PAT_MRT4530_86021C.1
aagactatgggtgatcattggcccatacttaattctaacatangcattagagtagacatgggcagttcaaaactatatttattttaaaacagagggaaggaagatttaaagaagacagttgcttgattgccgactcaaggttaatgaccccggaagcacagccataacccaaacctgagattcatgcacccatgcaaccagtgatcaacctggtgggcggacagaggccacccaccgcccgacaaaagaggacccgcttacaccgggtgtaccctggcgcatgtta

SEQ ID NO: 87038 - DNA, 782 bp, Oryza sativa
  Clone ID: PAT_MRT4530_86022C.1
caacggcaagaagactagcgactagcgagagatcgatcgaagagaagaggagagatggtgcacgggaagctggaggtcctcctcgtctgcgccaagggcctcgaggacactgacttcttgaacgacatggacccctacgtgatcctcacctgccgcactcaggagcagaaaagcagcgttgcaaaaggagcaggaagcgagcctgaatggaacgagaccttcgtcttcaccgtctccgacgatgttccacagctcaatgtcaagatcatggacagtaatgccttctcagctgacgatttcgtcggtgaagcaaacattcctctggagcctgtgttcctggaaggcagccttcctccagccgtccaccgtgtcgtcaaggaggagaagtactgtggagagatcaaggttgctctcaccttcactccagcagcggaaactcgccatcatcacaaccacgagaacgaggggacgagaacgagggggagggttacagcagctggaactgattgcctgctactaatgagcatcaacgagaggagatcttgtctcaagaattaatgtgcttgtcaacaatactccgtgctatgatgtcctaagaactgaaacatccatttatatgtatatcccagaccattgacttgctctgcctaaattttgtatattttttactacaaagatgtgatggtgtgaaatccagaatatttttatcgaatcatgcactttctttcatgacgagggcaaatctactttgcgaacgcgacaccgacgcatattttcgctgg

SEQ ID NO: 87039 - DNA, 201 bp, Oryza sativa
  Clone ID: PAT_MRT4530_86023C.1
atggatctaacagtcggaggccaaacggtgtatggagctgtggatgtagacctggtgtactcatggggcattcctaggaagggaagggaagccaagagaaggaaagggaagagaagagatgcagcaggcagcaggcagcagcagcagcaatggtggtgtaataataaaggtgtgtcaatgaatgagatgagatgctgctga

SEQ ID NO: 87040 - DNA, 1193 bp, Oryza sativa
  Clone ID: PAT_MRT4530_86024C.1
gatgacaaggtttttttttttttttttttttttttttttttttttttttttttttttttttttttgttcgatgaactgtaatttcacataacatagatgcacaacagctgcattacaacataatcatcatataacagtaatacagatctaacccaatgaacgaataatatcccatcccaagatgcagtaatgcatcaaacagtaccactatttttttttcttccaagaactcacagttctcagttcttcttccttctcaaacacccgctacttgtctcgcagaagtccattcttggatggatcacacctgaaaaggccatggccaggtgccggcgccgtcctcgccgccgaccttggcgctgcggcgcagcgggttgccgccgcactccctgtcgacgtaggcgtagtacctcagcacgaaggcgagggcgagcgcgatccactcgaggcagaagatggccacgccgagcccgccgatcatcctcaggatgacggcgccgtcctcctcgcggacgtaggacttgaggccgtcggcgaggaagtccgaggtgcgggagaaggtgagcacggcggcggcgccctggaggatggagacgaagacggtccctgccatgtgggtggtgtagacccgccccctcggcgggtcgggcgccgcgatgacggcgcacccggcgacggcggcggcgacggtgatcgcgtggaggaggatgaggaggaagccgtcgacggagggcacgaggcggagcgagagcgtgaggaagccgcacccggacgccgcgccgaggatcatgtagttcgacaccaggaacgcgcggcgcgcgcggcggtgcgccggggacgccgagtcgcccgccggcggcgcgattacggagaggccacccatctgcttctgctgctgatgctgctgctgactgcgaccgaggaggtgaggaggcggaggcgcttgtgcgtgcgtggattgcgacgaggagaggagatcgtagtggggagtgaagtgtcccggccggcggctttccctcggagggcagaagccgcaaaaccgaccctggtctcggatcattctggaaaccccagcctccaaaccgcgcccccaaattccccctcttccgcctctccggccgccgcgtcgtacacaacctcgcgccggtgagcggcggcgccgacgaagcaggactccctccgcccagccccat

SEQ ID NO: 87041 - DNA, 2679 bp, Oryza sativa
  Clone ID: PAT_MRT4530_86025C.1
atgccgccaactcctccgctcgccgccctccaccgcttcctcgcctcgccgtccccgccgccgctcccctcgctgctcaccctccacgcgctcgccgtcacatccggcctctccccgcgccccgacttcgccgccaagctcgtctccgcctactcctccgccggcctccccgccctcgccgcgctcgccttcgccgcctccccctgcccggacgccttcctctggaactccctgctccgctcccgccaccgcgcctccgacttcgcctccacgctctccgcgcaccgccgcatgcgcgcctcgggggcgcggccctcccgcttcaccgcgcccctcgtcgcctccgccgccgcggagctcggcgccctccctgtaggcgccgccgtccacgcctactccgtcaggttcggcctcctggagggcgatggttcagtcgcggtcgcgtcgtcgctggtctacatgtacgccaggtgcggcagcgtccgcgacgccgtgaggctgttcgacgaaatgcccgagagggacgtggtcgcgtggactgccgtgatctccgggtgcgtgtgtaacgggcagtgcggggaagggctgagctacttggtgcgaatggttcggtctgcaggtgatggcggtgcgaggccgaactcacggacgatggagagtgggttggaggcctgcggggtgctaggggagctctctgttgggacatgcttgcatgggtttggggtgaaggccggggttggacactgcccgtcggtggtttcatcgcttttttctatgtacactaagtgcgatagcactgaggatgcacggattttgttcccggagttgccggagaaagatttggtttcctggaccagcttgattggagcatactgtagggcaggccatgctgagaaggctgtggagttgttcctgggcatggaggagtctggtctgcaaccagacgaggttgttattagttgtttacttgcagggttgggtaatgatgctaaggtgcgtggagggaagacgtttcatgcagctatagtgaggagaaactttggagatagtgttctgattgggaatgctttgatctcgatgtatgcaaagtgcaaacaggttgatattgcagccacggttttcagaatgttgcatcaacgagacacagactcatggagttcaatggttgtagcatattgcaaagctggacttgatttgaaatgcttggagttgtatcgagaaatgcagttcagagacaaggatgagtttgaatatgacaccaacagtttgatttccattatttcttcttgttcaaggcttggtagactacgattaggtcaatcagcacattgctattcaatcaaacacttagccggtgaaaattcatcagttgcaaatgcactaattagcatgtatggaaggtgtggtaattttgacgttgcacggaaaatatttggtatggtcaaaacaaaggatgttgtcacatggagtgcattaatttccagctattctcacctggggcattcaaaggatgctttgttactgtatgatcagatgctcactgaaggtgttaaacccaactcagcaaccttggtctctgtcatttcatcttgtgcaaatttggctgcattggaacatggagagctcatacattctcatgtgaaagatgtggggctggagtgtgatttgtcaatttgcacagcacttgttgacatgtatatgaaatgcggacaacttggcatcgcaagaaaaatgtttgattccatgctcgaaagggatgttgttacttggaatgtgatgatatcaggctatgggatgcatggtgaagcaatacaagcattaaaactttttagtatgatggaaagaggaaatgttaagcctaatagcctcacttttcttgccattctgtctgcttgctgccatgcaggacttgttgacaagggcagggagttgttcactagaatggaggaatactcccttgagcctaacctgaagcactatgcctgtatggtggatcttctagggaaatctgggcatcttcaagaagcagaagatgtggtttctgcaatgccaatagaacctgatggtggaatatggggaactttacttggtgcctgcaaaatgcatgacaattttgaaatgggtttacgggttgcaaagaaggcgtttgcttctgacccagaaaatgatgggtactacattttaatgtcaaattcgtatggtagtgctgagaaatggaatgaaatagagaaactaagagacatgatgaagaatcatggagtggaaaagagtataggttggagcacaattgatatttgtgggtttatgaaaaatcaactgacccaatggcagcattctctctttgaacaatctgaatttagaagttcagaggatatgtgcatttcttttgtctctggaatctggagtgagtcaatggtcaatggattgacagaatgggggaatgaggtagtagattcatcagaatttaggaacaaagcccaaaggcttaaggtggctgccatgcttatgttcttacgtcatagcactgagccaggaacttcccatgtggaaggacatatctcgtaccagagctatgaggtagagtgggttatcataccaaaatctccacatgcttttggtgccacatacccacaacgatccgagctagtggcgctggtagcacttcactggagcaaatga

SEQ ID NO: 87042 - DNA, 934 bp, Oryza sativa
  Clone ID: PAT_MRT4530_86026C.1
atctggatgcatacatgttcatgtttgttaataagattggatttttttttgacgaaagatagcaaaaagtacgaattaccccccgaactatcgcggtcgtccgaattacccccctgaaccacaaaacagaacattcttcacccccaactatataaactggacgaattacccccctcgacccaatccgcggtggttttagtctacgtggcgtacgcgtggcagtccatgggaggggcgggctggaggaggcgaggcggcggcggcggggtgcggcggaggaggcgaggcggctgcggaggggtgcggcagaggaggcgaggcgaggcggcggcagggtgcggcggaggaggcgagcacggcggcagcggtggcgaggcggttgcggggggacgacgtcgccgccttctcgtctcgcgccgccagtcgctcccagccgcacccgccgccgccgttcggcacccagctgccgctcgcgcccacccctgcgctgccctgcctcgccgccgccccctcgcctccttcgccacaaccgctcgcctcgccgccgcactcgcctctccaccccctcgcctcctccaccgtcgccaccgtggcctcgccacgccgccacctctcctcctctgccgccacctttcctcgcctctgcctcctccgccgcctctcctcgccgctgcctcctccgccgcactcgctgcctccgcggtcaccgtctgaaggagaagaaagccgcgacgccgccgtccgccgtagccgcgatgccgccatccacagtatgacaggcgggtcccactattttttttattaaaaaacgttgactgggatgccacgtgtacgccacgtagaccaaaaccaccgcggattgggttgaggggggtaattcgtccggtttatatagttggggagtgaagaatgtccggttttgtggtttaggggg

SEQ ID NO: 87043 - DNA, 684 bp, Oryza sativa
  unsure (1)..(684): unsure at all n locations
  Clone ID: PAT_MRT4530_86027C.1
ccacgcgtccgctctcctcctcttcttcttctccaccgaataaacccccgcaaaaaggtggtgagttcgagagagagagagagagagagtggaaggctagggttagggttagggtttcctcctcgccgccgtcgcgtggcgcgatggccgccccgccgccttcctccccgtcgccgccgccggcggcggcggctgcggcgacgcagcagacgcagccgcacccgcagacgccgttctacgagctcgtcaagggaaactccggcatcgagaaggtccttctccgcggcacgcgcggcttctccgctgaggtctatctttatggagctcaagtaacctcatggaagaatgaccatgcggaggagttgctttttgtcagcagtaaggctattttcaaacctccaaaagccattcgtggtgggatacccatttgcttcccccaatttggaacacatggaaatcttgaacaacatggatttgcaaggaaccgattatggactattgatgataatccaccacctttaccagtaaaccctgctattaaatcttttgttgatctgattctgangccttctgacgaggatttaaagatctggcctcacagtttttgagttccgcttgagagttgctctttggtcctaatggggattttgagtctcacttctcggattaggaacaccaacactg

SEQ ID NO: 87044 - DNA, 206 bp, Oryza sativa
  Clone ID: PAT_MRT4530_86028C.1
gtgtaaagcgcaacggagaccaatctgggtgtgcgagcgagcggcagcgactgcgaggcagcatcaggatcgcagagttacaagttgcaagttgcaaggcctttccgagctccggcggcttctctcggttcgcctgcgagtgcgaggcagctcatgcacgcgttgtgttccccctgtctcgagagggtgttgtactgggcctctag

SEQ ID NO: 87045 - DNA, 1956 bp, Oryza sativa
  Clone ID: PAT_MRT4530_86029C.1
acagcgtattgctacccgacctgttgttcctttgcgtgagactgtccttgtgaagtcgcgcctaactgctatgaaaaaggtggtgagttcgagagagagagagagagagagtggcaggctatggttagggttaaggttttctactcatcgccgacgcgtggcgcgatggccgccccgccgccttcctccccgtcgccgccgccggcggcggcggctgcggcgacgcagcagacgcagccgcacccgcagacgccgttctacgagctcgtcaagggaaactccggcatcgagaaggtccttctccgcggcacgcgcggcttctccgctgaggtatccgatccgttctcccccgccaatcccaacccaaccctcgcctctgtgcctctgtctctccttccgtttgtggtctatctttatggagctcaagtaacctcatggaagaatgaccatgcggaggagttgctttttgtcagcagtaaggctattttcaaacctccaaaagccattcgtggtgggatacccatttgcttcccccaatttggaacacatggaaatcttgaacaacatggatttgcaaggaaccgattatggactattgatgataatccaccacctttaccagtaaaccctgctattaaatcttttgttgatctgattctgaggccttctgacgaggatttaaagatctggcctcacagttttgagttccgcttgagagttgctcttggtcctaatggggatttgagtctcacttctcgaattaggaataccaacactgatggaagatctttctcttacacatttgcatatcacacatacttctctgtctctgacatcagtgaagtgcgtgttgaagggctggaaacaatggactaccttgacaatttgaagggaaaggagcgttttacagagcaaggggatgctattgtatttgaatcagagattgataaggtataccttgctgcaccttcaaaaattgcaattattgatcatgaaaagaaaaggacatttgtcttgacaaaagaaggacttccagatgctgttgtttggaacccttgggacaagaaggcaaaagctatgcaagattttggagatggagaatacaaacacatgctttgtgtggagcctgcagctgttgagaagcctattactctgaagccaggtgaagagtggaaaggaagacttgcactctcagctgttccttccagttactgtagtgggcagttagatccattgaaggtccttcaaggttgagaattctcatttctgcgtcttgtacaggagcacctcattgcccttaatatttgatgctgggctggcgcgcgaccttttctttctttgccattttaaatcccccgtgcttcgttctttttttgtacctagaagtgagtagtagggtacctccgaaataacagactgtgccacctgcttcgaccctagagcggatcatctccttggtgaatgaattcgaccagtggacacaagccattcgtgccctggtgatatgattcatcgtccatattccaggaaatattcgccatgctgcataaggtccgtagcattctcagttaatctgtagttatgatcattgggagcatttgagttacactggcttgctactgtgcttcaaagcctagttctttgcctccttgtgcaaacgcctctaaagaatgatgtcaggtgcagctagtagtaatatgttgtcatccggggaggccggaggcagctgcggcgccggtggaagagctagcgaaatctctgcagggggtggaggtgttcgatctgagaggaaaggcggttcccgttgttgatctgtggaaggacatgaattttttgtcgtgctttggaagattgattgtgtatgagacaattgatgctggttgtttgcagctccgctccgccgccgccaacggttgtgaggaagagaagaacgaacagggtgttggtatttcttaa

SEQ ID NO: 87046 - DNA, 917 bp, Oryza sativa
  Clone ID: PAT_MRT4530_8602C.1
gcggttatacccccaaacacatcagcagcagcctccgtcatctccacgcagagattgatcaaactcgtcagttaatcaccagttggaacaagatcgcatcagagtttccggaaaactgttggtataatttgatgggggcgctggcggcgtcgatcgcgtcgcacctgccgtcgggggtgtcggcggcggtggcggcgctggcggcgagcccgggggaggtggtgaggagggcggcggggctggaggacgagctccgggagcttctccggctgaacggcggcgggcgcgggcggggcggcgcggcggcggagcaggggcagggcgagcagacgagggacaggttcgtgcgcgcgtacgagcggctcaagagtgagctgctcaacgaccgagccttcaacttcgacttcactgaggagaccaggcagtgggtcgccaagatgatggactacaacgtgccaggagggaaactgaaccgtgggctctcggtggtggacagctacatgctgctgagacaaggaaccgaggttgacgacgaggatttctacctcgcctgcgtgctcggttggtgcgtcgaatggctgcaagcgtcagcccttgtgctcgatgacatcacggacaacgcgtacacgaggcgagataacctctgctggtacaagctaccaacggttggcatgtctgctataaacgatggtgtgctgctcaagtgccatgtccaggcaatcatcaagagatacttcaaggagaagttctacttcctggacctcatggagctagtggaacgagataggcttgcagactgccatggggcagatgctggatctcatcaccactcataccggcgccaaggatctcgccagatacagaattcaggggtaccgtcgcattgtcaagtacaagacatcatactattcgttcta

SEQ ID NO: 87047 - DNA, 198 bp, Oryza sativa
  Clone ID: PAT_MRT4530_86030C.1
atgacgcatgtgttatgttccatgttcctaagtgttgcggcgttcgatggcagcttcgaggcagcggcgaaggtgctcgcgttcgtcgctggaggtgacggcctgatggggttgtcgtcgagtgctgtggctgtagctagctgccatgaaggggcggacccaagccctgggcaagctggtccacggcctagggcctag

SEQ ID NO: 87048 - DNA, 248 bp, Oryza sativa
  Clone ID: PAT_MRT4530_86031C.1
gcacgaggaaatactacaaggtcccacctctccaccttcgatacgcacctacgtacgcgtggggacgtatgcttcccctcccttttatcatttttccctttcttcttttcttcatatatacgcttccctctctttcttactatatcatgcgccttcatgagacgatttaatcacaagaattttgagtatcttgctctcacatttttaatttggagccatactacaagcaatatatagtttattattta

SEQ ID NO: 87049 - DNA, 332 bp, Oryza sativa
  Clone ID: PAT_MRT4530_86032C.1
atgggcataagtcagatctctgatgaaagcggccacacctttggggagcgaagcggcgggagagtcggagaccgtgaggccgcagcaagggtgagcgcctgtgcacaagagacattagaccggactcgaaggaagagagagagtgagagctcaccggaggaggagagaggaggcggccgccgtgagcttcgccgccgcggccatggccgccatgagagaagcttcgggagtggtggtgggttgcggccgtgcggctcccaggccgcgtgctgggatagtggtgggtatccgactcgacgaccgtccgatctaacatcgacggcccagatggg

SEQ ID NO: 87050 - DNA, 452 bp, Oryza sativa
  Clone ID: PAT_MRT4530_86033C.1
cccaatcctcctgtctaccaaaaaatgcattaaaaagttctagaccatactgaccttgggacagtctcttttaggaagaggctacacatatactacctcatttattcaaagaatcatcttctaaccaaaataaatcaaattcaacctatgaaaaaacaacaccttttcttatctctacctctcaatgaataggacaatctgtaagctacaatttttaataacccttcaaatagttctctagaacctaactccagccccatggcatgaaccacacttttctatcatctcattatcaagagcaaatactggaaaatcacaacgttacattgtatcaagtacttgaccatttctagctatctgcacaccttgttcaaaaatatataaaagcttcatgtctttcaaagctctcaattcttcataccattcttaaatccttttcggatatacaactg

SEQ ID NO: 87051 - DNA, 691 bp, Oryza sativa
  unsure (1)..(691): unsure at all n locations
  Clone ID: PAT_MRT4530_86034C.1
acacgattgaacccagcaattaattagagcctttctgagttgtcacttcactgattacaatcaatataaaacctttcactaaataaatgatgttaatgacataatacagctaaacactacattgtttaaaacatgctatctaccagccctgtcttacccaaaagtgggacagtaggctaaaaaagagtaacaaaaattaaatattccgttgtgcagatgctattctgaagccattagcactctcgggaggcggtggcttcttcttatagttcgcgaggctgcagtgggggcagatatattccaacccatctgtcttcgcatagtccttgaatgtgcctagcccttgccgtctatcacacccaaagtgcgcccattcaccgcacaacccacagttaacccaatcacctggagcactactgtggcagagtaagcagcattccccaccgacatcatcatgtgaaagttcgtattccaacaagtatgtctcgtaatgtctctttaacgtgtttccaacacccgtcattttgtttgtaacagtatggttgctcatctttgaaaagacttgacctttccaatttatgccattgcctacataaaatccgcctctggataccacctctntatacaagttatataaatcaaggcgttntgcatttagtactgcatcaggaaattcggctagtcctccttg

SEQ ID NO: 87052 - DNA, 122 bp, Oryza sativa
  Clone ID: PAT_MRT4530_86035C.1
atgagctgcagaagcgtcgtcgtcggcttcggctgtacagcacggtggcgcaccggcgttggtggccagcggcggtggcccggtgtgaatatcgtgcgccgcgtcgtcgagcggctgacgct

SEQ ID NO: 87053 - DNA, 2766 bp, Oryza sativa
  Clone ID: PAT_MRT4530_86036C.1
atggctcaaatccaaagcagctcactggtgaactgcacgctgcttgcggtgctatgtgggaaggttacagacaaacagcagaagccacctggtctggtgcccgaggtgaagcgaccacggctttcatatccattcccagagctgatctcgtctgggagattggaggtgcatacgctgatcaatcccacagttgatcaattccggaaagcgcaacaggctgtgcagcccaacttgatgtacctccagggtcagcagcttgagaatgaggaagaaattggtacacttgtctggggcgatgctgatgtatctgatccacagatatttagttcactcattagtccaccttttccgaccatagtttatttggaagttcctgctggggaaaagcttgctcaatctcttcagttaaaggggattccatatgtattatattggagaaattcattttcatcgtatgcagcatctcattttcgccaagccttgatatcagttgttcagagctcctgcagccatacatgggatgcatttcagcttgcacaagcttcttttcgactgtactgtgcaagaaataatgatgcgcaaagtgttaagcttgggcctcgtttactaggggatgctccaaagataaatatcttccttcctgagaatgaaatggttgaggaagaaggtagctctgaacattttccagccataaagatatatgatgaagatgtgaacatgaagcttcttatttgtggagcaccatgcatcttgattcgagggtgtagactccagaacagagtcagtgctgctcctccacctcttcatgctgaaactcttccacatggggtggttacaatgcgttgtgatatcacaacatgcagttcttcacacgtgtcattgcttgtttctggcagtccgcaaacatgttttgatgacaagcttttggagaaccatattaaaaaggaaattgttgagaagggccagttagttcgtgctgtcttagttagggaggacgacaaaccatcttcagttgagcctttgacttcgatatctgtggcttctggagcttctacttttgaagtctggatgaccctacctaagtgggcaggacaggttttgaaatatcttgctccggaaatctcttacaaaagcctggttccacttggaattgcttgtgtaaatggaactccagtttcttcgtttgatagacaagatgtggatcggcttcttttcttttgcaaaaatgaagctattgtaaatggtctatattctcatctgccaagatggtcagcatcccttgttaaggacagactgaagggaactccagagtcaaaatcaagtacttttagtgcaaatggagttggagagtaccagaaacatccaatgaaagggacttccctagtagtcaaaccaaagctgaaatctgcaaaaatgaggcctattccacactcttcgaagcggcagatgcacccttttgtgggtatccctccgtcctttattcatgatgctagtcaagttaagcctagcttgccagcacctccggtaaggcataatgcattacctgttgctccaacaactcaaagaaaattatcatctgggacatcacgtgttgaaccagctgttccgttaaatcctctgccaatgaagaaacatgggtgtgatcggttgcctattggaatttgctctgaagaagacttcttaaaagatgtcatgcaatttctacttcagagggggcacacccgacttgttcctcaaggaggactagccgaatttcctgatgcagtactaaatgcaaaacgccttgatttatataacttgtataaagaggtggtatccagaggcggattttatgtaggcaatggcataaattggaaaggtcaagtcttttcaaagatgagcaaccatactgttacaaacaaaatgacgttgttatgctacttagatttactctactatatgggtcagcctggtgttggaaacacgttaaagagacattacgagacatacttgttggaatacgaactttcacatgatgatgtcggtggggaatgctgcttactctgccacagtagtgctccaggtgattgggttaactgtgggttgtgcggtgaatgggcgcactttgggtgtgatagacggcaagggctaggcacattcaaggactatgcgaagacagatgggttggaatatatctgcccccactgcagcctcgcgaactataagaagaagccaccgcctcccgagagtgctaatggcttcagaatagcatctgcacaacggaatatttaatttttgttactcttttttagcctactgtcccacttttgggtaagacagggctggtagatagcatgttttaaacaatgtagtgtttagctgtattatgtcattaacatcatttatttagtgaaaggttttatattgattgtaatcagtgaagtgacaactcagaaaggctctaattaattgctgggttcaatcgtgtattccattgccatatcggttacaagggcagcgacaatgtggagtggggcaaaggcggtgtcaatgctaaagttggtgattactcactcgcacatgaacagtatgtcatagcatgggcaaggctcattgtttggcacaatgaactgcatgaaaatttggatgcgatattcaaagaatcgagctgtcagtagtcatatgtgagggaatccaaacttgtagtttgatgaacctaacttatttttagtgttgatctgaatgttacttgttggtttattaactgcaaccaaaatttgaatcttg

SEQ ID NO: 87054 - DNA, 2448 bp, Oryza sativa
  Clone ID: PAT_MRT4530_86037C.1
atgccgagcggagggaggcggctgccgccgtggacgtcgccgaggggggcggcgccgaggtggagcccctgcacgcctgcgggcgcggacggttcgggccgcgccgcccacgccacgccgccggcgagcggcgggtgctcctcgcacgtgacgcccccggcgagcggtggtggcgggtgttacggttaccgtgtcacgccgccgacgagcggcgggtgttcccggcctcctagggcgccgctgtcgtcggtggattcgccctacgtgcgggcgaagcaggctcaggtgattgaaaaggacccaaacaaggcagttccattgttctgggcggctataaacagtggtgatcgaattgagagcgcactgaaggatatggctactgtactgaagcaagcaaatcgagccgaagaggctattgaggcaataagatccttccgtgatcgttgcccaaatgaagctcaggaatctcttgacaatattcttcttgacctgtacaagaaatgcggcaggacaaaagagcagattgaaatgctgacattgaagttgagaattgttgatgaggagctagcttctggcaggtggaaaaccaagttgtctaaatctcatggaagagtagtttatttgtctctcagggatgaaaaagcaaggttgttgggtaaccttgcctgggcccatatgcagtctgaaaattatgatgaggccgaaatgctctacaggcaagctcttgctatagaagctgattataacaaagagtgcaacttagctatctgcctgataaagaccggaaaggtagccgaagctaaataccttctccaatctatacctgacaactgcagtgatgaaagccatgtgaggtctcttgctcgggccagagaaatgcttatggaacttgagtcaccaacactccattctcccataactcagatgaaatctaaagaatcattaatctggcttgctattgatgcggagaaccttgggcatttacagccacaggtatcctcaactgctttgactcaactgaaatctgaagaaccacatatttcagttgctgctgatgcagagaagcaggaggattgcaattcacaagtatttccatctcccattactcagatgaaacgtgaagaaccagaaagtttgattgctaccagtggggagaataatgagaaatgcctgaatgaataccaagatctttctcgactgttcaatgatgctgctacaccccagtcgttgcttgagaaactacgaaaacggctggtgaaagaggacacactaaatatcagcatacagcaccaagttcagattcctagttttgttgaatgcttgccaaactctggtggctccacagatgctggtgagaatactaggccagagggaaaggctcttgtcaatggtgttagaaaaacatgggctgatatggtggaagaagatgaacgtcaattgggtgatgtcagctcaacgatcggtatggacactactaagcgaaatgtaagctgcaagcatgcaaatgaggagatgtatagaacaccctcattctctcaagaaagcagcgccttaaaaagatcaagcgtggatgatcacccacagagttcttcagcggattcatggagacacagtgactccaaaatatccacagatgagaacgtgaacatgaagtttgtcaggactgctccacaatggagacagcagaaggtgcaagattacagtaaccgagtctcccaaaggctcgacacaagccatctcagtgatagagctgaaggcacagagcaaccaccttggagaagcagcacagctcagcgttcgctttttcctgactggaaatccaagtgtgaaagatatggacatggttatgtgccatttggtgacaatgaacattttcaaggttccagtcactttgaggccaccaatcgttggcctaagaatgcgagaccatggaggcctcagaaccgcctctgggtcttccaagaaatcacaaatgagatcaaccaaaaacagactagagcactgtggcttaccatatacaccacgttgttgtttggcactactgctttagatgatactgcatggttccttgttgaatgttttcatctgttggctggacatctgctgctccatgatgggctgcaagatctgagtgttgctcccccctctgggcaatttgcagaaatggcaatgcaaatgcatccagccactgggttgtctacacactggagtcaggtggattccccaccactgaagctgagagagggtgctaacatggtggtgctgctccaagatcagctgctaccaatggccttctccattgcaaatgtttgtgaagactgtatcatggcatacatgtcagcatcagcaagcagtgtactgttctacacatcttgcttggatatgcagcagctaccttacaccgggcatgtgatcaccatcaacaaatctgaggctgctactatatga

SEQ ID NO: 87055 - DNA, 303 bp, Oryza sativa
  Clone ID: PAT_MRT4530_86038C.1
cccacgcgtccggactagttctagatcgcagacgcccgttgtagaggatcacaagctggacgtacccgtgcatgcgatccaagcacacgtacgcttgcgtgcgataaaatcaactcactgtacggcgacctacaacgaattgactggccaaaccctgacagcgcccagcctaatagaaccgcagcacatcccaacttagtcagctggcataacatccaacaggcccgagctgatcgaccttccaaacagccgcgcaccctgaatggttaaagcaacgcgccatgctgcatggcattaagcacg

SEQ ID NO: 87056 - DNA, 577 bp, Oryza sativa
  Clone ID: PAT_MRT4530_86039C.1
acattgggggaaaaagagggaacccccaaagtcccagggattcccgaggacatgataaagatttattaaagtgtttgttattgttgtccctgaggggattcttcctgatagattgttgtaggacaagtttaaccagctcaaaaaagtaaggtctgataaactcgaggggatttcaccaactaaatcattgtaggataggtccagggactccacatctccttaaaatgccacatatcatttggaattgttccacttaattgattgcctgatagattcaaaactttgaagccccttgagtagagttaattctcttggaataggtccagtgaaactattgtacgacatgtcaatcaacatatatattatttgtggattgaaaggtatagttaagctcctggtcttttatggaccactggatatgctagcaccccgtgtagttgtcccaccctgatgtgtgtgaatatttcatggctgtcaagcttcttatagacgaatctgtatactacctgtatgtgtggcctgtgaatcgatttggttactgccaagttttgcgtataaaaaaaaaaaaaaaaaaaaa

SEQ ID NO: 87057 - DNA, 1556 bp, Oryza sativa
  Clone ID: PAT_MRT4530_8603C.1
cctcccctctcccttatcccctccggcctctccctcacgttctccggcgccgtcccgatccactcaccgcccggcgcaccacccctcggcggcggatggcgaggtcggcggcgcggagcggtgggacggtgggagctcctcccttctccttccacggacggcgctcctcctacgtcgcggcttcctctctcctctcctcacatcatggcggcggtcaagaggccggggacgcggcggcggaggaggccgagacgggggtggagccaccgattccccgcgccccgacgagctcggcggagtggcgcggactcgccggcgtggagcgggatggcacggagctcggccaggtgagagagagagcagaggccctaagatctaataggtcaggatcaagaaatcccttgccagtcgccgccgtccgtctcctcctcctcaacaccaccacaccttcggagccgcagctcatcggcggctacctcctcttcttgggtgtcatgcccctgccggcgactcccgcctacggcgccgtccatctaccgcgccacaccggtgtctccatggacaccagcgctgaggccatcttcgtcggaccatcaccgcctgttacggctgacatcgaggagtccttaagtgattacacaagtatgatggagggttggactaaagagcatgtattggcagcacgtggtcttcgtaataaggttgcgcctattcgtgttgaggccatgcgcctagggattgctgctgacagtgctggaatcacatgttttttggatgcttttgatgagtgtatgaagcgagttgatctgcatctagttactcagaagaactcatttcaagaatttcttggtagtccactacagcaaacagttccagacacttgtgcgattgtctcttccaccaagtgcgtagaggtacagcatagaagggagtacgagactatgcacgggactggctccttcccctgcaacgccgcggccccccgcaagctgcgtagggcctgcttctgccagaaggtgtggaagccgaaagaaggagctcgagtgggagatgtgattgatatgatacagaggttaggtggagcgaggacgacaagcgcaccagctccagcgccatatatgctgccagtgcgctcgtggcagcggcaccggtgggacgttggtggtggcctgactgcggaccgcatcgccgagcttcttgacacacgcgggcctttcattggaaccatatgggtatgcccatggtatgatttgttcaactcggttgaagatgaagatctggtttacaggtcaggctgtgcacggagcaagatgcttcagaggttgagcaagttctgttttggaaaggatctcgtcggccttcattcagtgttgtgctttgaataccgcatctgcgacggacaactccacatacacatcttggataaccacgagaccactggaccgcagcgatggattcatcactccgagttggaggaggtgcataccatcactgtggagcggatcaatcatcttggtgaccgccacatcaggtatccacacagcggagtgtcttga

SEQ ID NO: 87058 - DNA, 814 bp, Oryza sativa
  Clone ID: PAT_MRT4530_86040C.1
catgccactagaggaatgtccactagcttatcattcattgctaacgaaatttgattgatcctcttgattatgatagaaagaatgcagaacacacaggttcaactgtggctcaagcacctcacaatgatggacatcaatggaggaagtatggtcagaaatggatctctagagcaaaacattccaggagctactataggtgtgccaatagtaaagtgcaaggctgtcctgctacaaagacagtgcaacaaatggattccagtggaaatggaacacctgagttgttcaaccttgtctactatcgcctactctcatgcaggggggagggctttccccggccacatcttgtcgtcacagcccatcacagtatgggaacctatcaatcaaaacgaatgcaatagccctacacttgaacacgaagcccatggaagttcaagatgaaagatttgaaaacttgtgtatggtacaaaatatgccagagtatttgatagattttgaattggagagagccttcgagtttattgtgaactcaccattgggttctgagcattggacgttcgatgattcaataagatgtgagcacagtccaatatgcatatggggatgatgacttgatgttagctataagctagcttggagtttcttccaggatgtgctgtaatgataagttgtgacctggtaaaaatacatagcattttgctcatgactaagaagtaaacctgaaattaagaagcatgtgtataagctattactaccattataaaaattgaagatgtttccgcggtccaaaaaaagaaaaaaaaaaaagaaaagaaaa

SEQ ID NO: 87059 - DNA, 2763 bp, Oryza sativa
  Clone ID: PAT_MRT4530_86041C.1
atgacgatgctatcaattcttgtgaggaattttgctggaaacactagttcaaagttcaataaagttgcactgctgaagctgagtaggtggctatcaggatccactcccaacacaaattcattatctagcaagaaacataattttgacaagtctgctctgttgttccaaggctgtgcagatgttaggtttctaaagaagatccacgctaatgttttcacacatggactttgctgggatgtgattcttggctctaagattctgagttgttatgctaatttaggtgcattgcatgagtcaaggcttgtttttcagaaaattgtaaacgatgatatttccctgtggaattcagccatggttgattattttagagcaggttatccggaggaggttataattttgtataagagattgaaattgaaccagattggtttcaatgggaaaactattacttttgttatgaaaagctgcactgagcttaagaatctgtacttgggtaaaggagtgcatgcagattcacttaagcttgctctgtctgggaataaattcgtcggctcctccctcattggcttatactccaagtttagcaagacgaatgattcacgtggagtgtttgaagagatcatcaacaaggacattgttgcttacacttcgatgatcactggttattcagaaactgtggattcaattgcatggaacgcatttgaaattgccactgatatgctgcagaacaacttggaagtaaaccgtgtgactctggtaagcttactgcaaatagctgggaatctgggagcacttcaggagggtaaatctctccattgctactccataaggagagcaattggtgtctcagatgatattctagagaccagcattgtgaacttttatactcgatgtggagcttatcagtcagcggctactgttctgcaaaattcaaagggaactgttgcttcatggaatgctctgctttctggtcttaatagagctggacagagtttcaatgcaatccagtatttgcctgtgatgctgcatgagcataaagtaactccagattctgtcacttttgcaaacgtgctttcagcctgtgctgagctatgctatttttgctttgctgctagtattcatgcctacttcataagaagatttatacctatggatgttgttttgaccactgcacttattgaggtgtacaccaaatgcacaagagtcatgagatcgaagtatctctttgatcaacttattattaaagatgttgtatcctataacgcgatgatttatggttacctacaaaatgacatggccaatgaggccacctcattactcaattacatgatggcagaaggtgttgctccagattttgcaactgttcttagcctgcttgctgcttttgctgaccaaagagatttagttagagggagatggatccatggttttgcaattaggcatgggttttgttcagatgtggacgttgaaaatcaaattctatatatgtattcagcctgcggaaaaattgcagcagcaagggctatatttgactcattggaaaagaaaaacttggtttcatggacagccatgatgaaaggttgcttatccaatggacatgcagatgaggtggttcaattatttcaagtgatgcaaaaatatggggagaaacctgattctgtttctcttgtaactgcagttcaggctgtttctgatcttggacatctaaatggtctaaaacaaattcattgttttgtttaccgttccttgttggagaaagataagattactgctaattcattgataagtgcatatgccaagtgtggaaagctggatttgtcagcaggtttgttctttagtttgaaatatagaaacttggatacttggaatgcaatgatcagtgcttatgcaatgcatggattccatattaacgtgcttgaaatgttcaagcaaatggaagaagaaaacattcagcctgatgagttaacattctccactgtgcttactgcttgcagccatgctggtcttgtcaaggatggttggcgtattttcaattccatgacctcagtatattcagttcttccacaggaagagcattacggttgcatggttgacttgttgggtcgtgctgggcatctagaagatggatacaaatttataaagctatctaccttaaaagataaatccactatattttgtgctctgctctctgcttgcagaactcatggaaatacacgacttgcacatgctattagcaaagagctccttgagcatggacctcagaatccagtgccaggtcaaaccagttggcagaatgacacttcctggagacttacattacattgtagaggggtcagctccaagctcgtaggcgctgatcctggggcaacacaatcatggattgaggctgtagtggtctatcccactctctgcctgccctcctccctcatgcaaagaacagaggtgcatgaccctcaaatccctctcaaattagccccaaatcaaagggttttctgtggacttcacatggagatcgtgttggaagcttacatgtttgatactgagacgcttgatgacgatgaggtggtcagcaacctcaactgccgtccgatggctgctagatcagctatatctattgttgctcttacactaaattataaaatggcaaggaaaaaccggatgcaaaaccacggaaagggtggcataaaccgcctaaaggaattctcaaggcacttgcctcatgttgctgatgcaacgatggcagaagcctacgccctcaagtaa

SEQ ID NO: 87060 - DNA, 538 bp, Oryza sativa
  Clone ID: PAT_MRT4530_86042C.1
acgagggctgaacgagcgggaggtgcagattgtggacaccacctgcccctgggtctccaatgtgtggacgccgttgacaaccaggcgcgcaagggacacaccagcgtcatccacggcaagtgggcccatgaggagaccattgccacggcgtcctttgcgggcacctacattgtggtcaaggacctagcagaggcccagtatgtgtgtgattacaggctccatggcggcgacaagcaggccttcctcaagaagtttgccaacgctgtgagccagcgctttgaccccgatgtcgacctggacaacgtgggcgttgccaaccagaccaccatgctcaagggcgagacggaggcgatcggcaagctgctagagaagacgatgatgcagaagcacggccccgcggcgctgagcgagcacttcatggtcatggacaccatctgcgacgccacgcaagaacggcaggacgccatctacagcatgaccgggaagcagggacacagaggagaagttggatatgctgctggtggttggcggcttcaac

SEQ ID NO: 87061 - DNA, 1307 bp, Oryza sativa
  unsure (1)..(1307): unsure at all n locations
  Clone ID: PAT_MRT4530_86043C.1
cgggctgcaggaatcggcacgaggatattaacgtgcttgaaatgttcaagcaaatggaagaagaaaacattcagcctgatgagttaacattctccactgtgcttactgcttgcagccatgctggtcttgtcaaggatggttggcgtattttcaattccatgacctcagtatattcagttcttccacaggaagagcattacggttgcatggttgacttgttgggtcgtgctgggcatctagaagatggatacaaatttataaagctatctaccttaaaagataaatccactatattttgtgctctgctctctgcttgcagaactcatggaaatacacgacttgcacatgctattagcaaagagcgccgttgagcatggacctcagaatccaggtatttatgctctgatttcagaagtatatgctcaggaagggcagtggaacgaagttgctaatacaaaggccagagctgatttaagtgggttaaagaaacatcctggttctagtttgattgaatcaatggagcaaggaatgtcctgacgtcggcatgttgcacttatggtgtgggaatttttcactatggcctgtttgaaattcttactttacaaatggacccatgcaaaaactatcgcaggaatggaccttgggttattatcgattatgcagtgccaggtcaaaccagttggcagaatgacacttcctggagacttacattacattgtagaggggtcagctccaagctcgtaggcgctgatcctggggcaacacaatcatggattgaggctgtagtggtctatcccactctctgcctgccctcctccctcatgcaaagaacagaggtgcatgaccctcaaatccctctcaaattagccccaaatcaaagggttttctgtggacttcacatggagatcgtgttggaagctctccgctcatctaccttccaatcagtaatagcgggcctggtaggccaagcctcccaagcgattcactgttgctgcctttgctccattgcgtcttctgctgccaacaagtcgattcgtgcgtcatactccctgactccctgacgactagtcacaagacttgattacaggttacttagccgatatcaaatgagcaatggttcaagatgtggagagaagattccacattggttgcctcgccatggtcacttctccacatgcagctaggatcgcttcaaaaagaactgtagccgggaacacatttgtcataatattgaggagttggtgataccaatgtcatcgcgttggagatcaagatcgnactcttgaaattggggactagcttacaat

SEQ ID NO: 87062 - DNA, 551 bp, Oryza sativa
  unsure (1)..(551): unsure at all n locations
  Clone ID: PAT_MRT4530_86044C.1
cgccgccgccaagacgagtcgcggctgaacaggggagggccgggcggcgatctccatcgcagcggaggggaggggatcctggtgaatagtctatccttggaggtgcaataaaagcaaaacatgtttgtgaatttgaagccaattagttactcatattcatttttctggcatctacaaccatgacgatgctatcaattcttgtgaggaattttgctggaaacactagttcaaagttcaataaagttgcactgctgaagctgagtaggtggctatcaggatccactcccaacacaaattcattatctagcaagaaacataattttgacaagtctgctctgttgttccaaggctgtgcagatgttaggtttctaaagaagatccacgctaatgttttcacacatggactttgctgggatgtgattcttggctctaagattctgagttgttatgctaatttaggtgcattgcatgagtcaaggcttgtttttcagaanattgtaaacgatgatatttccctgtggaattcagccatggttgattattttagagca

SEQ ID NO: 87063 - DNA, 455 bp, Oryza sativa
  Clone ID: PAT_MRT4530_86045C.1
catggacattgttgcttacacttcgatgatcactggttattcagaaactgtggattcaattgcatggaacgcatttgaaattgccactgatatgctgcagaacaacttggaagtaaaccgtgtgactctggtaagcttactgcaaatagctgggaatctgggagcacttcaggagggtaaatctctccattgctactccataaggagagcaattggtgtctcagatgatattctagagaccagcattgtgaacttttatactcgatgtggagcttatcagtcagcggctactgttctgcaaaattcatagggaactgttgcttcatggaatgctctgctttttggtcttaatagagctggaccagagtttaatgcaatccaagtatttgcctgtgatgctgcatgagcataatggcacttccgatttctgcactttttgcaaacttggctttcaa

SEQ ID NO: 87064 - DNA, 415 bp, Oryza sativa
  Clone ID: PAT_MRT4530_86046C.1
ttaaccccgcactaaagggaataagcttgctggcagctctaggaacgactctctcattgccagctgaatagcagcgatcatattgtcctactctgcgtgcgccaaaacccggaatgcccttcacagcgctctcgcatccatactacacccaacctatcaaatcgctacacctgggctgcctaaacaaggagcctacacgcatcagtacccatgtggggacagtccagcccctgcttgccaatcatgcagggcaagctggctcaaagctgctgtcaacacgcagggacagggtgccagcaacttaggcactggttcctctgcctggttgagtgactcgatggtgtgccgctgctgggtgcgccaaacgacatcatctaactcaaggatggtgatgccggtaagggcaaaggcgagc

SEQ ID NO: 87065 - DNA, 527 bp, Oryza sativa
  Clone ID: PAT_MRT4530_86047C.1
ggaaaaaaagggcccatctttttgtttctaaccttctttaaatggccggggttccaaaaaccttttctaagggcggccccggaaggccccccctgccctcagcaatgcccctcctcaaatttgtaaaaaaaagttccccgtttaaaaatttgttaaaccccttaaaaccgttggttagccaaaattttggagggattttcgggggggccccaaaaattttggaagagttttttaaagttcctatagcctcccccaaaatttgaaatcccgaatgttggaaattaatcataatttgccccgggaggacccccccccctgtccccccccggaggagctgcccccccccctgcataggtcttatcgggggttgccccccctcctggaaatgccccttttgggggggttgtcccggcccccgcaaaggccccccgggtcgccggttgcccccccccccccaaaggtctctttttcgcgggtttacccgcccccccccccaaaggttttttatcccccgggccttttcccct

SEQ ID NO: 87066 - DNA, 594 bp, Oryza sativa
  unsure (1)..(594): unsure at all n locations
  Clone ID: PAT_MRT4530_86048C.1
ccggccgggctgatggctatacttaattaagtacattgcacagtgaatttgtggtggatgaacggcgccccactttgtgcacgcggagcaatgtggacatataatggaataaaaggggtgatgctaatgagaaaatttctagtttagatgccacttaccgaatcagcttgtcgaccacatctttattattatctttacacaacacaaacatattatcactaggaatttggtgttgtccgtgttactaataatatagtgtactgtaatatactgcagtctaggacaagttggtttcttgataagcatcgtggattcgtttattaatggttcagaacttgatcaggcttgtcgttaagccaaactgtaatttacttgtgggttgtggctatgaagtctcatttgagctgaatgttggtacatcactgacatggcatgccttacctacctatggaaaaacaagaatatcagactccagaacaggcatgaaacttgtctgttgcggaatattcagaccttatggatgggaagggaatnccagaaaaggaagggtgtcatcacttaaggatattggcaactgcaaattctacaattgtc

SEQ ID NO: 87067 - DNA, 448 bp, Oryza sativa
  Clone ID: PAT_MRT4530_86049C.1
atgctggtagatggagccacgactgcatttgttgggggagttctcgatggcaggggcacagccgaacctggccatggaggaccagcacaggtcctcgcctccagcggccgtcacgcgatgatgagatgtgttggaagggatggagatgatggcctccgtcgaagtgagcatgtggcggccgagagagccgaggaggagaagccttcgccgctcaacgccctcagccgcctccgcctctcgagctccttcgccccaccgctattgtcctcttcacgcgccggtggaggtggaggggaagccacgcgcccgtcaaggaggcgcgcgccggatagatgccgaggaggagccacctccgccactcgccactcgagctcctttgccccgccgatcaccgcccctagccttgccggttgacagacgtggagggagaagaaagagagtggggtga

SEQ ID NO: 87068 - DNA, 5178 bp, Oryza sativa
  Clone ID: PAT_MRT4530_8604C.1
atggccgagcaagcaaaggcgcacgatctctctccgagtgtgagcggcgacgacggggaaccaaatccacgccgtcgagctcgtactcccccacctcctccgcgccaaagccctaagcagggggaggcgcttgagagggtcgacaaatccgtggcatcaccagtcgcaggtgatgcaggagaacggcgagatggggagcgtcgcctcctcgtctacggcgacggcagcacgcctcagggcgcgcttcaggttgctggcgcgctcctacgacacccgcctgtcgtccatgacccggagtctccagcccaacgatggctggaagacgtggccaacttggtcatgacggctcagcagcgcttgggtgctggtggacggtccgccaccaccaagacctccggcgccgctaccaccggctccgtgtcgtcaaggcggagggcgcggcgagcggcggcggctgcacgtcattcggctgctactccctcgtcgacaccttcgactcggaaggatcagcatggggagccggatgcccgcctcaacatcgagcgccggcgtaatagccggcgtaccccccgtgcaacggagggtgcctcctcgtccagagtgtcacctcgacatggacgtgaggaccagccctccgtgcccccggctggtggtgttggctgtagagcctttgtggcgagtcttcggaatgtccgttggcccccaaggttccggcccaccatcactgagaagtacgatgggagcgtcaaccccaccgagtttctccaggtctatatgaccgggatcgaggccgctgggggtgacgacagggtcatggcgaatttctttcccatggccctaaaaggacaggcgcggggttggctaatgaacctgccacccgcgtcggtccactcctgggaagatttgtgccaacagttcaccatgaacttccaaggcacatatccgcgcccaggcgaagaagcggacttgcatgcagtacagcgaggcgatgatgagtcgcttcgctcgtacattcagcggttttgccaagtccgcaatactataccatgcatccctgcacacgcggtgatctacgcgttcagggggggcgtgcggcacaaccgcatgctcgaaaagatcgcttccaaagagccccagactaccgcggagctttttcagcttgcggaccgagtggctcgtaaggaggaagcgtggacatggaactcctccggttccggagtggcagcttcggccgcccccggatccgccgctcagacagggcggcgtgacaggaggaggaagaagaggtcggaccgttccggcgacgagggtcatgtcctcgccgtcgagggcgctccgcgggccacccgaaaggggaggcctgcgagcgacaaaaagaaagaggctggtactcccagcagggagcgccccgccggcaggtggtgctccgtccacaacacctccctccacgatctcgcggactgtcgtgcagtcaaaaacctggctgagcgaacgaggaagtgggaggaggacaggaggcaggaacgccgtgagggcaagtccccggcggttccttctggcaaacggcgaagtgaggccaagcagaaggcccccgctgttgacatcgatgatggtgaagatgacctaggtttccaagaacctggggccaccattgccaccgtcgatggaggagcgcgtgctcacgtctctcgccggagcttcaaggctatgaagcgagagcttctggccatggcccctactcatgaggcgatgcgtcgggcgcggtggtcagaggttgctctcactttcgaccagaccgaccacccaccgtgcattgcccggggagggcaggttgcgatggtagtttcccccaccatctgcaacgtgaagttgggacgtgtcctcatagatggaggagcggctctcaacatcctttcccccgcggcctttgatgctatcaaggccccggggatggtgctccagccgtctcaaccaatcatcggtgtgacgccggggcacacatggccattaggtcacatcgacctaccggtcaccttcggtggacccgccaacttccgcacggagcgggtgagcttcgatgtggcggacctcagtctgccctacaacgcggtcctagggaggcccgcgttggtgaagttcatggcggcggtccactacgcctacctccagatgaagatgccgggccccggtggccccatctctgtccgtggcgaccttaaagtcgcgctcgcttgcatggagcagcgcgcggaccgcctcgctgctgcgtccaagcccgagggtggtgacgagaggcttggcccctctgcccccaccgccccgaggcagcggatggccacatgcgacgaggtcccggaagacgcgctcgtctccttcctgcgggcaaacgctgatgtcttcgcatggagaccagcggacatgcccggggtccccagggaggtgattgagcaccgtctcgccgtgcggccgggcgcaaggccggtccgacagaaagtgcggcggcaggccccggaacgtcaagccttcatccgcgaggaggtggcgagacttctggaggccggattcatccgtgaagtcatccatccggagtggctggcgaacccggtggtcgttcccaaggcgaacggcaagcttcggatgtgcatcgactacaccgaccttaacaaggcatgtcctaaggatccttaccccctgcctcgcatagatcagatcgtcgactccactgcggggtgcgaccttttgtgttttctagatgcatactctggtcctacttttcaacgtactactcgaatttctttgggtagccaaataggacgtaatgttgaggcttatgtcgatgacttggttgtaaaaacgcgcaaccaagaaactttactttcagatctagcggaaacttttgagaacctccgctccgcccgcataaagctgaaccccgataagtgtgtgtttggtgtacctgcgggcaagcttctcgggttcttggcctctgcccgaggcattgaggccaaccccgagaagattcgagctatcgagcggatgcgcccccccagcaaacttagggatgtgcaatgcgtcaccggttgcatggccgccctaagtcgtttcatatcaaggctgggagagaaggcgctacctttgtttaagctcctcaagcgctcggggccgttcacttggacggaggaagctgacaatgccctcgcccagttgaaggcgtatctcagctctcctccggttctagtcgccccggagccaaatgaacccctgctactttacttagcggcgaccccccaagtagttagtgcagcgttggttgtggagcgcgatgaggacaatcctcattctgcgcacccccactctgtgccgacttggcccgggagcaggcagggaggagaagcccccgagtcggacggtggcctacggcccctgacgaccggagtcggccctctgcccgcttgtcagacggtgctgggtgcccccgacccacaggaaggccccgaggccactgcgggaaggccgcacctatcgccctttggccccgaggctaaccctgtgctgactcgacccgggagaaagcagggagaagaggcccccgagccgaacggaggccagaggcccctgacgaccggagctggccctttgcccgcttgtccgatgacaccaggagcccccgacccccaggacggctccggggccactgtgggaaggccgctcctgtcgtcctccgaccccgaggtcatcggcacagaagacgagtgcgccccaaggggccacttggacgaagaacgccccggggatacggcccctagcaaagaagatcggccccaccgaagggtgcagcggcctatctactttgttagtgaggccctccgggacgccaagacccgatacccacaggcccagaagatgctttacgctattctgatggcctcgaggaaactgcgccattatttccaggcgcatcgggtcactgtggttacgtcttaccccctcggtcaaatcttgcataatcgagagggtacaggacgagtggtaaaatgggcaatcgagctttctgagttcgatctgcactttgaaccacgccacgctatcaagagccaggccctcgccgattttgtggcagagtggaccccggctccagagaccgtctcaatgcccgaggctagcacgaacccctcacagctgcctcatgccgcccactgggtgatgcaattcgacggttctctgtctcttcagggcgccggtgcaggggtcacgttgacctctccaaacggagacgtcctcagatacttggtccgtctcgactttcgagcgactaataatatggcagagtacgagggactccttgccgggctcagggtggcagccgggttggggatccgccgcctcctggtgttaggcgactctcagttggttgttaaccaagtctgtaaggagtaccggtgctctgatccgcagatggacgcctacgtgcgccaaggcatcacggcccgttttggagtgcctaaccgtattattacggataatggcacccaattcactagtgaactcttcggcgactactgcgaagacatgggcatcaagctctgcttcgcctcacctgcccaccccagaagcaatggccaagtggagcgcgccaatgcagaaatcctcaaaggccttaaaaccaagaccttcaatattctcaagaagcacggcgattcatggatcgaggagttgccagcggtgctctgggcgaaccgaaccacaccaagccgagcgaccggggaaacgcctttcttcctcgtctacggcgcagaagcggttctcccatctgagctcaccctgaggtctcctcgggccaccatgtactgcgaggctgatcaagatcagcttcgtagagatgacctcgactacttggaagagcgaaggcggcgcgcggccctccgagctgcgcgctaccagcagagcctgcggcgctaccatcagcgccacgtccgggcccgatcactctgcgtcgacgacctcgtcctacgccgcgtccaaacgcgtgctggattgagcaaactctcaccaatgtgggagggtccgtatcgagtggtcggtgtcccccggccgggctcggtacggctggccacgggcgacggcacggagctgccaaacccgtggaacattgaacaccttcgtcgcttctacccttga

SEQ ID NO: 87069 - DNA, 1200 bp, Oryza sativa
  Clone ID: PAT_MRT4530_86050C.1
atggaagcgggccgcgcgacaatcgtcgcctccgccgtggccaggttgaagccaccgcgggcgacgctgacgcatgacgctccggccgccgtcctcgcgccgcccgtcgccgacgccccgcacgccgagtggcgggggctacccgacgacgtcgtcgccagggtgctcgtccgcctccccgtcgtcgacctgttccgcctcggctacctcttctccccgcgctggctcgacatctggcgcgccgagccgctgtatctccatgaccgccagttcgcctctccccggatcgccgccgccgacgtcgccgacgccatcgccaacgttctcgagctccacgtaggcgacggcgtccagttcgtaggcgtacaaggagagaacgggagcgacgacgacgacgacggagatggaggtggaggcaacgaggtagttggcgtggatggccacgattctggacccggggttgccgtcgaactcgaacacgaggcagcagatcaaggcggtggagtcgtcaacaattctgacggtggaggtgtcgccggccgccgtcgcctccgattccctggaggcgtaggcgccgacgacggcgtcatcagcgacgacgacatctacggccacgacgacatcccagatggtggttacgagatcggccgcgtctacagcttccgagtggagaccacgcggtggcgcgccgaccaactccaccgctggtgcgccgcgctccagcgcggccgtgttcgtgaggtcaccctcgccaacctcaccatggaagggcaccccgagctcccccagggcatccgcgactgcgccacaagcctcaagggactccacgtcttcttcttcaccatggaagccgaccacatcgactccctcgtcaacctccgcgtcctcgggctgtatggctgccctggcatgatcctgcgagcactccgccccgaatcggaaatccgggtgctgacgatcgacttcagccgtctggtagacgtcctcgtccagaccacgcgcctccgctctctggagatgcacaacaacgtggtgcagggcacggtcgtcgtgcacgacgccatccaactccggaagctgcacctgttaccaccgacgagaccatccaagatcttcatcggtgaagcgcccagcctgcgaagcatcggctatctcgatctcttcaaccccgtcttcgtgatcaaaggcattgtgattcag

SEQ ID NO: 87070 - DNA, 233 bp, Oryza sativa
  Clone ID: PAT_MRT4530_86051C.1
gcacgaggaagtaacaacctttatttactttttatttctgcaactgtgtcttttaacatgaaagaatccagctccattcaaaagtttagtttttattttccattgtggtgcatggtcactcagcctgcagtactgaattatcaaaattttcttttgtcatttctctcatgttaagtgcatagtctattttacttcaacaggtagaaaaactttggtgggtttgtttctagctc

SEQ ID NO: 87071 - DNA, 2091 bp, Oryza sativa
  Clone ID: PAT_MRT4530_86052C.1
atggagacacctgtcgatggcttttctgctgacgccaacttgccaagtccacggcgaagtgactgtgaggtggcgctcgagaaaaactctctgtatgaatatccaaccccagcaatatcgaaatttgaaaccgcagagagagagagagaggaggacgaggaggcaccgaggcagcttgctccacacgcctccgccgtgactcgccggagaggaatggaagaggcccgcgcgagagtcgtcgcctccgccgtggcgagaatgaagccaccgcgggcgacggtgacgcatgccactccggccgccgtcctcgcgccgcccgtcggcgacgtcccgcacgccgggtggcgggggctacccgacgacgtcgtcgccagggtgctcgtccacctccccgtcgtcgacctgttccgcctcggctacctcttctccccgcgctggctcgacatctggcgcgccgagccgctgtatctccacgaccgccagttcgtgtctcctcggatcgccgcagccgacgtcgccgacgccatagccaacgttctcgagctccacagcgggagcgacgacgacgacgacgacgatgacgacgacgacgacgacgacgacgatgaagacgacgacgacgacgacgacgacgacgacgacgacgacggagatggaggtggaggcaacgaggtagttggcgcggatggccacgacctgggcgtcgtcgtccacccatggagagaggatgacgacgatgatagcgatgatcatgacgggggccccgacgacgccgaagacgaggcagcagttcaagacgccggagtcgtcgacgattctggacccggggtcgccgtcgaactagaacacgaggcagcagatcaaggcggtggagtccgagtcgtcgacgattctgacggcgaaggcgccgccggccgctgccgcctccgattccctggaggcataggcgccgacgacggcgtcatcagcgacgacgacctctacggccacgacgacatcccagatggtggttacgagatcggccgcgtctacagcttccgagtggagaccacgcggtggcgcgccgaccagctccaccgctggtgcgccgcgctccagcgcggccgtgttcgtgaggtcaccctcaccaacctcaccatggaagggttccccgacctcccccagggcatcctcgattgcggcacaagcctcaagggactccacgtcttcttcttcaccgtggaggccgaccacatcgaccccctcgtcaacctccgcgtcctcggggtgtacggctgcagcggcatgatcacgcgagcactccgccccgaatcggaaatccgggtgctgacgatcgacttcaaccatctgggagacgtcgtcgtccagaccacgcgcctccggtctctgtggatgttcaacaacgtggtgcagggcacggtcatcgtgaacgacgccctccaattccgggacctgcacctgttaccaccgacgaggccatccaggatcttcatcggtgacgcgcccagcctgcgaagcatcggctctctcgatctcttcaacaccgtcttcgtgatcaagggcattgtgattcaggctgggatggtgcagcgtcctccaaagatgcgttctgtcaggattctcggcttacgggtgaactacacagatatgggtcacagagtgccccgtgagatagagcagattctgaagtgtttcccatgcttagagaaactggagatcatgagagacgatgaggttacaccagaagaagggctcctcaaagctgatggtgaacacatctatcaagggaacaatttcttccgtgaccttggttgtttcagccatcacctgaggtggatatatcttacaactttccgagggggcaagtatgaacttgctctgggcaaagccatcctcgacgaagctcgagccgggacaattttcagaatgctacccccaccaggcagcaataccgacaacatatttaaccagctaaggcgggctatgcaacatttcagaatgaccactccaaatcatgctgtcagagatcgacatgtgtccgttcttctaagtttggatggaacttgaaaggccgggggtcttcctggatag

SEQ ID NO: 87072 - DNA, 378 bp, Oryza sativa
  Clone ID: PAT_MRT4530_86053C.1
atgttagcaagatgctccagcctccaggagctgctggcgcggcagcaaggcgacgcggtgagcagcctggtgtatgaggcgaacgaccggatgcgggacccagtctacggctgcgtcggggccatctccttcatgcagaaccaggtgtcacagctacagatgcagctcgccgtcgcacagggcgagatcctctgcatccaaatgcagcaccgcgatggcaatgagaacaagaagaatttgagggaccttgggtgtacttttttcgcgagttgtgggccctctcgtagcgttgcaggccaagctgaacgttttggtgggctccagtttataatgggccgtaatcacttttgggcctccatctggcctattggcatttga

SEQ ID NO: 87073 - DNA, 2190 bp, Oryza sativa
  Clone ID: PAT_MRT4530_86054C.1
atcatgaccacccacccggggtgctcgcttttgcccgtatccaccgtggttcgatccaccggttcgccgccgccggccgcggtctattcgaggatgggtcgtcgtctacctcccgccagcccacgtggccgccacgtaggcgccacgtcggcgccagctcagccgaggtcgggacgggccgaccccggtcgaacttctctaaaattgctaagccaacaacccaactattgaaaaaggaagaaaagtttatctggtctgttgaatgcaacaggagttttgaagaacttaaatgacggttggtatctacaccagttctaattttgccagatcagatgtaagacttccaggtctattgtaatgcaacccgccaaggattggggtgtgtgttgatgcaagatggcagagtggttgcttatgtttcacgacagttgcgtcctcatgaaggcaactacccgacccacgatctggaattggccacagttgttcatgctctaaagatttggcggcactatctcatcggtaaccgttgtgaggtatatacagatcacaaaagcctaaagtacatcttcgcccaacctgatttgaatctccgacaacgaagatggttggagctaatcaaagattatgatatgggaatacaataccatcccggtaaggctaatgtggttgcagatgccttgagcaggaagagttactggaacgtcgcatgggtagagcaactatgtggtgaggttcaacatgatttggaacacttaaaccttggtatagttgagcacggattcgtggctgcccagaggcacaacccacactggtggagcaggttcgcatagctcaagcaagcaatcttgagatagcgaaactcaaaaagaacatgagggttggaaaagcccgaggtttcactgaagatgaacacgaagcaatctggatgggagaaagattgtgcatacctagaaacaaggaacacttgatactcacagaagctcatcaaactcaatattcaattcatcccggcaataccaagatgtaccaagacctcaaagagaaattctggtgggtcagcatgagaagggaaatagctgaatttgtctcactctatgacgtctgctagcgagtaaaggcagagcaccaaaggccagcaggtttgctacaactacttcaaattccagaatggatgtgggaagaaattggaatggacttcatcaccggtttgcccaggacgtcatcggggcacgattctatttgggtagttgttgatcgactcatcaaagtggctcacttcattttggtgcatactacctatttagggaagaagctggcagagctttacttggcaagaataatgtgtctacatggggtacctaagaagatcgtatctgattgagggagccagttcacttcaaagttctggcagaaattgcaagaggaattgggaacccgtctaaacttcagtacagcctattatccacagactgatggccaaaccgagcaagtcaatcaaatattggaggacatgttgagagcctgtgcgcttgattttggtggagcatgggacaaaagcttgccgtatgctgagttctcatacaacaacagttaccaggccagtctgcaaatggcaccgtttgaagcactgtattgatggaggtgtcgcactccgctcttctgggatcagacaggggaacaccagttgtttggtacagaagtcttaaatgaggcagaggagaaagtcagaactgttagggaaagattgagaatcgcccagtctcggcagaaaagctacgcagacaaccgtcgaagggagctcacttttgaagcaggggacagtgtgtaccttcatttcactcagctcaggggagtacaccgctttcaaactaaagcaaagttggaaccacgctttgtgggaccataccggatcttggaacgtagaggtgaggttgttccatggggacgttcacggtttactatccccgacgtcaaaccgttggttgtaaagccaggcaaaacctaaacccaaggtcgaagtgctgctcctggcacctcacgcctcgatgctgaccctagctcctccgccgccactcacggttgtcggagtaacactttcaccccactaaacctacacccacctcctattcttctagccgataggctgtctatcgacatcggctagaaatgataaccaaacctagtcgtcat

SEQ ID NO: 87074 - DNA, 580 bp, Oryza sativa
  Clone ID: PAT_MRT4530_86055C.1
ggactttttaatatcccaaagtttaaaaaaaactctaattaactactttattatgtagaaaaaaatatcaaagttaaagctgattgcaatagttcaactggaacatatacctagctattgtgataaaaaaattctagagtagattatattacaacatgttgtatataaatttgcgaattaattaggaaaacaaagcacctgatggattacctgaacaattctttttagccaggggtgtgaccatttctttaagaaaattaaataatgtgagctctgtcaaccaatgaaagggtttaataaggcaaaccttgtctggcatgactaatcaaaccagttaaacagggagatgcgtccaaatggccccttgctatatatgtgaaccatggtccagccggcggctcccactgtgcacgccggtgagccgcggcgatcgatgatggtccaaacggaaacccatacattatcatggtcccgtacgtgttgctggagagacgatctgaaattagacatctttttcccttgtcctcttcaagcttggatgcataggagagataactaattaagcagatccatcgatcct

SEQ ID NO: 87075 - DNA, 1329 bp, Oryza sativa
  Clone ID: PAT_MRT4530_86056C.1
atgaggatgtccggaggcggcggcggcgggggtgagatgatggcgccgctcatggaggggcccgatccggagtccggcgacggggaaggcgggggtggtggtgggggtggcggcggtggaggtggtgggggtggccggggcgcgcgcgggcggagaggggaagggtgggggcagtgggtgagggggcagctgtcgcggacgccgtcctccgtggccgccgcggcggccggcgccggcgccgcgcggaacgacctcaggctgctcctcggcgtcatgggcgcaccgctcgcgcccgtgcatgtctccgccgccgagccgctcccgcaccttagcatcaaggacacccccatcgagacctcgtcggcacagtacatactgcagcaatacctggcggcctctggtgggcagaagcttcttgcatccgtgcggaatgcgtacactatggggaaggtgcgcatggtggccaccgagtttgagactgctggccgccttgtcaagaaccgcaatgctgctcgctgcgccgagccaggccgctttgtcctgtggcagatggctcctgagatgtggtacattgagctggctgtcggtgggagcaaggtgcatgcgggctgcaatggcaagctcgtgtggcgccacaccccgtggctcggtgcccatgctgccaagggccctgttcgccctctccgtcgtgcacttcagggtttggatccattgaccactgcaagcatgtttgctggtgcgcgctgcattggggagaggaaggtgaatggggaggattgcttcattctgaagctgtgcacagaacctgagacccttaaggcacgcagtgagggtctcgcagagatcattaggcatgttatgtttggatatttcagccagaggactggccttcttgtccatattgaagattcacacctgactcggatccagtcgacaaccggaggagatgctgtttactgggagactaccatcaattcattcatcgaggattatcgtccagtggaaggtataatgattgcacattctgggcgctctgctgtgaccctattccgttttggtgaggtggccatgagccacaccaagactcgtatggaggaggcatggagcattgaggaggttgcgtttaatgtccctggtctgtccatggattgtttcataccacccactgatatcaagtctggatctattagtgaaactgttgagctttctcatggtgagaagagcaaggttggccctccccctggccatcgtgccaaagttgctgccttggagaaggcggttgatgggaaagtagcatggagtggaaccatacttgaagatcacaattga

SEQ ID NO: 87076 - DNA, 207 bp, Oryza sativa
  Clone ID: PAT_MRT4530_86057C.1
cccacgcgttcgcgaactcatgggctccgttcttttcactcatgtcctgcatggggggcgtcggcgtcatggagcttatcaccgtctcctccactccttttccggtgaaccgtttatgcaggcgttaggatggccacctgagtctatcaggaactcgtcgatccggcgatggtcacttgatggtcctgtatccgacgtatcagggtt

SEQ ID NO: 87077 - DNA, 488 bp, Oryza sativa
  Clone ID: PAT_MRT4530_86058C.1
gggtttgcttgtatttggctgaccttctgtttcgtgtagttgtacttcggtaattaacatgtttgtaaattcagtttgtttgtagaaaaaaacccttccttttataatttgttcttttctgttaccttgcttcctaaacgcacgattttttttttgcctggtaccccataaatgagttgaaatcgaaaccctatgcctgtgaatgagggaagaggaagaagcagaggttcagtatcaaaaaaaaaaaaaaaaaaaaaaaaaaaaaaaaaattaaaaaaaaaagggaaaacacaaaaaaaaaaggaaaaaaaaaaaaaaaaaatttaggaaaattcaaaaacaaaaaaattaaaaggttgggaaagataaaaaaaaaaaaaaaaaaaaagggaaaaaacccaaaaaaaaaaaaagggggcgcccggttttaggggaccaaggttaacaaacccgggcatgcgaggtattaccttttttttggggccccc

SEQ ID NO: 87078 - DNA, 579 bp, Oryza sativa
  Clone ID: PAT_MRT4530_86059C.1
gcacgaggcccacactgagtccgaccgcatcgccgtacacccctgtctgctccagggtctcgcgctcgcccgtgcgagggccggcgaccgcgcccgccggtgttcgtcaccaggggttcccaacccagtggcccacgccatctgaatcttcacctcgttcgcatagttcgggcggcggccgtggcggagcaggcgcaggcggcggccatggcggagcaggagcaggggcaggcggcgcccgtggcggcgcaggcgcaggcggcggccatggcggagcaggcgcaggggcaggcggcggccgtggcggagcaggcgcaggcgcagggggcggcgcacaagaaccaggcggcggcggcgcacgccgtgtcgtgtatccgtggaacgcccctgtgccacaggcattcccactggcgaggtgctctatctgcggcgctgtagcgctccggtattcgttttgttgtagccgcattctttgcgggacatgcggctgcccatgtgacccacccgccgtcgtcgtcctaccgccgcctgagttctttggatcagtttatctcctagtgattcaccagccagtgagtg

SEQ ID NO: 87079 - DNA, 909 bp, Oryza sativa
  Clone ID: PAT_MRT4530_8605C.1
atgtctaagcataacctaggattatctatccatgttatctatatcatgtttgctgctcaccaaatcctgggtggaggatttcatctgaccaaccaagatgtgaatatgacaaggtttggaaaatctttgcaatcaaaagttggtgatgccacaaagtcatatatggccatgcatcagacatatgaggggacctactttgggtttgttgctacattggatgtgtatggatttgagattaattatagccaaagaatcatatcatcagtatggattgtcaacagaggtcccaatgacaacctagaagagaatgcaattaggattggatggcaggtttttcctgaattgtacggtgactcacacacccacttcttcacttattggacgagggactcataccgaactacagggtgctacaacatgaggtgtccaggttttcaactcacacttggatcaaaaataactcctggtgatgtcataagcccagtatccgatgttgatggagcgcgacaaaatattacaattaaagtgtctagggaaaagtctactggggattggtggatatactatggcttcaacagtgctccaacagttgtgggttatttcccagctaatctatttaccaacttatctgaaaaggcaactagcattttatttggtgggagtgttttagcagtagaaggtgcttcaacccctccaatgggcagtggattattgccatcgatcctgtctgacaaggctgcatcaattgaggatattttattagtcgatgaagatggcaaaatcgcaccatttgatgtgaagacgatcaaagacgagacctcagacctttgttatgccatgacacctatttttggtgaaagcacttcaaggtgcttatatggaggccctggaggttgcgtcgtcggttag

SEQ ID NO: 87080 - DNA, 180 bp, Oryza sativa
  Clone ID: PAT_MRT4530_86060C.1
atggtgtgcagcataggtttcgacaggaacatcggccaaaagggggcgcctcgtggtacacctttcaatttgcacagtctcggccgaggctccctactcacccttgcccgtgaggggcttgttggaggtataccacggaaggcctttggccggacctgccgaaaccaaggacctgggtaa

SEQ ID NO: 87081 - DNA, 1916 bp, Oryza sativa
  Clone ID: PAT_MRT4530_86061C.1
gcgcgtgcggctcgtgggtgtgcgtgtgtgtgtttttttttttttgttttttagcataacagtatcttcttgtggcaaattagcataacagtaacttcattgcaaaaactgcaaaagtagcagattacaccatatagtcacgagcgcgtccagcgtgctcaatttcaagcagacactagaattcagaacttgcgaatatagttgcaaaaagcagacaatagacaaccagtacgaccttggcaacagcatgccttttaagttcgataacttcttgacacattactatcatgatgatgtgactcagtaatcctttcgccttaatcccttccagcataggatgaggctggcccacgcccatcaatttctggatagctgctttcgaagtgttcctgcgtaagtagagcgaatcagactcgttgcagctgcggcgtccttccctgggccagcacagtcatgtgattggctgattgctaatcagagtcttcatacaatccctcatcgtcagaaagctcatcaaatgaccggatatctagctggtaacgcaagataccaccaatgccaccgaatcctctacaaaactgagatccctcttgagatttattagtgacaaactcaagcgagcaaccaaacttcttgtattcattagcaaaccattccagaagagacattttttcctgaacttccaactcagcattactagccggatcacggaaattactctggtcagcttcctgctctttgttaaaatgtttgatcacagtttcaccagatgcactgttcttaagcacatatctgttggtttcaaggttctcccacactattagagtctcaacagcacccatctcaagagctttaagagtgtcatcaaccccaaagacatatttcccagtatcttgactgatctcttcaaaatacttgccaattagcttcttctcctgtatgaacttgacatttgctagaatctcagctgacaattcaatagcttggttgaaaccattctcgccaccataagaaacatcaaccacattaagtatcttggcttgaagtcgttgatcaaacatgtcagactgactcaattctgtcttaaaatcagcagaaccagcgaggattaggcctgaaacattaggctgacttgtagcaggattaatgaagaactgagtagcaagctcagctgttttccggacataattatggcgtttctccatccgaagacgagcaaaacgcaaagcagattgtcctcctctaccatgcttctttgggagatcaacagtgaatttgtgaagcacctcacgtgtgttgccacttagtgtgccaaaaagagtaccattaccatccataacaatgaacccaaacttgtcatcagattccaagagctcattcaaagcttcagtgtggaacttgttatcacaaagatacagtgatacattgataggcttgaagggttcaaaatcaatggtaaccttcttttccttcccatcttcagtaacaatggttccagtgtagagaaccaatccatttggaggaactttgttatagagcttcagcctctgctgagctgaggtaatggcagccaaaacagactgacgattgactctactcttgatgtttgaggcggtaccatattcatcacccaacatcttagccactcgcgcaatctggtcacgtggaggcataataagagagatcatgcttgtgccatttcctctagctgactccagagccttgattagcttcttaatcttccagatctcaatgttcctatcagtttcatggctgtcagacatcttgacagagcttggatgactggctcaccgaggaggagggaggaggaggaagaggggagcgccgacttctcgcgggtgggaaaccctcgcctctgaacttctggtgtggcccccgggggatccactagttct

SEQ ID NO: 87082 - DNA, 1876 bp, Oryza sativa
  Clone ID: PAT_MRT4530_86062C.1
ttaagtccagaggtgaaaatgggggccgcgaagccaaccaagcctctggacacctttcaccacccccaagcccttcgccacaataccaataaggtacggcgtcaagggctgggggcgaataggtttcgccacacccaggcccttcgccacaataccaatgaggtacggcgtcaagggctgggggctaattcgccaagggtaatcttcgctggaggcaaacgaagaaagccggcaacggttaaaaaggtcgaagtaccccttgagcatcttcttcattgccttgcccgtgaggggcttgttggaggcatgccatgaagcccttcggccggacctgccgaaaccatagtaccagcaaggattcaagccaaagccgtcaagaccacttgggcgaagccctatggcgaaagccataagcgaaggtggcgaagactgtaaagccgtcaagaccagttgggcgaagccctatggcgaaagccataagcgaagatggaaagccgcgtcggtaccccgcaagtaaaggcttctcgggcgaaggcatctcgggcgaagggcgtatgacgaaccacaaagactttgccatgacgagttcggcatcaaggaggcccaacaggcggcccccgacctttaaggccccttcgccaagaggcccatatatgcaaatgacagtccttcgacgtgacgcagttgtccattcgacaacagttggcgccgtccgtggggaacccagaccaaaagggtgaaatgggagccccttcgccacgccatgccctagtctctggacacctttcaccatccccaagcccttcgccaaaataccaatgaagtacggcgtcaagggctgggggtgaaaaggtttcgtcgcacccatgcccttcgccacagtaccaataagatacggcgtcaagggctttcgccacccccaagccttcgccaaaataccaatgaggtacggcgccaagggacctttcgccacacccacacccttcgccacagtaccaataaggtacggcgtcaagggctggaggcgaaaattagttaagtccaagctggggggcttcgaagccaacctagcctctagcctctggacacctttcgccacaacaccaatgaggtacggcgccaaggaacctttcgccacacccacacccttcaccacaacaccaatgaggtacggcgtcaagggacctttcgccacacccacacccttcgccacaataccagtgaggtacggcgccaagggagctttcgccacacccacaccctttgccacagtaccaataaggtacgtcatcaagggacctttcgccacacccatacccttcgccacaataccaatgaggtacggcgccaagggcaatgaggtacggcgccaagggctaggggctaattcgcccagggtaatcttcgctggaggcaaacgaagaaagtttagatccgattcatcagcaaaagctgtcctcaatggcgaaggactaccccccttgagcatcttcttcatcgccttgcccgtgaggggcttgttggaggcatgccatgaagcccttcggccggacctgccgaaatcatagtaccagcaaggattcaagccaaagccgtcaagaccacttgggcgaagccttatggcgaaagccataagcgaaggtggcgaaaactgtaaagccgtcaagaccagttgggcgaagccctatggcgaaagccataagcgaagatggcgaaggctggaaagccgcatcggtaccctgcaagtaaaggcttctcgggcgaaggcatctcgggcgaagggcgtatggcgaaccacaaagactacgccatgacgagttcggcatcaaggaggcccaacaggccgcccccaacctttaaggccccttcgccatag

SEQ ID NO: 87083 - DNA, 457 bp, Oryza sativa
  Clone ID: PAT_MRT4530_86063C.1
atggtggagacaagaaccggtgcgagggaaaccctaattttcagttctggcaatggtggtcctagacctagtggaaaaaaccctgactactctccacgatttctcgcaagagcaatcaccaagaaaaaaaaccacaacacagagatcgggcgccggccgtccgccgcctcaccgtcctcccgccggccgccttgtgctccgccgccgcctggggagcgccgccgcaccgggagcaccgccgcccgccgcctcgccgcccgcccagggagcgccgcctcgcgggcctcgccgcccgcctgcccggccgaggcggccctcgccggactcgcccgcccggccacgcgccgcctcgcggccctcgccggcctcgcccgcccggccgcccgccgcctcgccggcctcgcctgccgcctgctcggctgcccgcctccctgccgctgccgctcggcctcacgtg

SEQ ID NO: 87084 - DNA, 1020 bp, Oryza sativa
  Clone ID: PAT_MRT4530_86064C.1
atggggatctgtgcatcttcagagcagctggagcatgttcatgagacagatgagagcattgtgtatgtgaaggatgagcaaggaagggggggtaggggggtggagagtgggggggctaggaaggtggcctccctcttctcccagaggggcaagaaaggccccaaccaggactctgtcatcctctgccagggattcggcatggaggacggcgtgttctgcggcgtgttcgacggccatggccggtgcgggcaattcatcagcaagctgccgtcggcgtcggcgtcggcgcagatgctggaggagtggaggcaggcgtgcgccagcgcgttcgccgccatggacggcgagctcaagctccagccgaacctcgactgcgcgttcagcggcacgacggcggtgtgcgccatcaagcagggcagggacctcatcatcgccaacctcggcgactcgagggcggtgctcgccaccatgtcggacaccggctacctccaggcggtgcagctgacggtggaccacaagccgagcgtgccggaggaggcggcgaggatcaagcggagcggggggagggtgttcgggctgaaggacgagccgggggtgatgcgggtgtggctccccggcgagaactcgccggggctcgccatggcgaggtcgctgggcgacatgaggctgaagcggcacggcgtgatcccggcgccggaggtgacgtcgcggcgcgtgacgggcgccgacctgttcatggtgctcgccacggacggggtgtgggacgtgctgagcaacgaggaggtggtgtccatcgtgtgcgcgacgccgcggaagcagcacgcgtcgaaggcggtggtggaggccgccgtgcagcggtggcgggccaagttcccgacgtccagggtggacgactgctccgccgtctgcctcttcctccacgaccacaccctcggcacggccgccgccgcctccgccgcagccgccgcggccgccagaaaggcgcgcagggcctccaccgccacgccgccggcgagctga

SEQ ID NO: 87085 - DNA, 421 bp, Oryza sativa
  Clone ID: PAT_MRT4530_86065C.1
atcatctcaacttgtacatatatgacgtggccattgatttgttgttcacacagtttggcgagaagaatattgcagtttacaaacagcaacgaaacaaaactatcatcgcaacttatacatatgtgacatgtcataattgataacaagaagtgaggctcaatgtgcatagctgaaataattttgcacaccaagtattcaaggaaaaggagggaatcaaattaaaaaaaatccatcatttgcccccctggtgtgcaaaactttccaacatgtttgaagaatgcagtttgaagtacagcttccagtaccaacatgtgaagactgagccaaaactgtacaattcaccataaacccactctttcaagaatccaaaccatggcaaaaccagctgatcgatcaatcattcactccggttttgatcatg

SEQ ID NO: 87086 - DNA, 1870 bp, Oryza sativa
  Clone ID: PAT_MRT4530_86066C.1
ctgctgaccaagctctttttttctcctcctcctccttttcgtcctgacatcctcatcacccccctttgcaatttgcatcatcatcctcacctcctctttggtttaaataccctgtcttagcagcagccacagcacagcttccttcctgcactctctgctctccttggagcttttctttctcaagagacaagaaagatttcagaatctttggatggggatctgtgcatcttcagagcagctggagcatgttcatgagacagatgagagcattgtgtatgtgaaggatgagcaaggaagggggggtaggggggtggagagtgggggggctcggaaggtggcctccctcttctcccagaggtgcatgaaaggccgcaaccaggactctgtcatcctctgccagggattcggcatggaggacggcgtgttctgcggcgtgttcgacggccatggccggtgcgggcaattcatcagcaagctggtgcgggactacctcccgttcatgatcctgagccaccggaacgcgctgctcctggccgacgtcccctccgacgacgcagacgacgccgcgttcagcgacgacgcggcggcgtcgtcgtccgcggacagcagcggcaactcgtcgccgcagccgtcggcgtcggcgtcggcgcagatgctggaggagtggaggcaggcgtgcgccagcgcgttcgccgccatggacggcgagctcaagctccagccgaacctcgactgcgcgttcagcggcacgacggcggtgtgcgccatcaagcagggcagggacctcatcatcgccaacctcggcgactcgagggcgtgctcccaccatgtcggacaccggctacctccaggcggtgcagctgacggtggaccacaagccgagcgtgccggaggagcggcgaggatcaagcggagcggggggagggtgttcgggctgaaggacgagccgggggtgatgcgggtgtggctccccggggagaactcgccggggctcgccatggcgaggtcgctgggcgacatgaggctgaagcggcacggcgtgatcccggcgccggaggtgacgtcgcggcgcgtgacgggcgccgacctgttcatggtgctcgccacggacggggtgtgggacgtgctgagcaacgaggaggtggtgtccatcgtgtgcgcgacgccgcggaagcagcacgcgtcgaaggcggtggtggaggccgccgtgcagcggtggcgggccaagttcccgacgtccagggtggacgactgctccgccgtctgcctcttcctccacgaccacaccctcggcacggccgccgccgcctccgccgcagccgccgcggccgccagaaaggcgcgcagggcctccaccgccacgccgccggcgagctgaggacacaaagaagctctcgctccggcgagctcgatattgtccgtgtttttgcagtttttgttgatcttgatgtgctgcaaatacctacaacctccgtcccataaaaaaccaaatcctagcaatggacctggatatatgtgtgtccagattcatcgctggaatttgactcttttttttttttggacagagagagtatgaattagtagataaatatagtctattgtaacatagtttagagaagatgggtacaccatggccgcggctgccgtggcattggcttcggcgtacatggagcggttctgcgcgctggcgcggcggctgtccggtccacggatgcaaccgctcgtggtgaggctacccagcggtggtgctgaaccgtgcgcgtgtgcacgactggatcggcgacaacctgcgcgccacgtgtgacgccgcgacataccacacgtgcatcctgcctctgccttcctggcgcgtcggcaggggcctccttac

SEQ ID NO: 87087 - DNA, 400 bp, Oryza sativa
  Clone ID: PAT_MRT4530_86067C.1
cccacgcgagcgggaggctcgtccctgtcgcgcgtctgctgctctcatcctcttcctctctctctgcctgccgcgttctcgaatggacctgtacttatttcactctggactcctggagagccagaagcaccacacgttagacatagaagcttaaagcactgcaagtcgcacgcgagctagatggacgcctcgacgagcaggaaagcttcctactctgtacccctccagcttatcatagatggatggctcttcgcccttgatactccgctgcaggagcagtttcagatgtcacagcgcctgagcttcgggggctctgctcctggacaattcacctggactacaaacctatcagtggtcctccatgtgctcacatcatgacatatgcaacctgatgacctcg

SEQ ID NO: 87088 - DNA, 156 bp, Oryza sativa
  Clone ID: PAT_MRT4530_86068C.1
atggcggcgtcgtcgtccctcgcgtcctcccacctcaccgaactccgccgcgcaggcggcgcgtcgccgttgcctctgccctgcaatgcaagcaagcgatgccgtcctggaagcagcgtcggaagtcgggcttcttggacacagcgattgcggtga

SEQ ID NO: 87089 - DNA, 358 bp, Oryza sativa
  Clone ID: PAT_MRT4530_86069C.1
cgtttcttggctcctttgttcagcttgtctcttccttgcctcgggcgggtcttgctggtgactgagagaattgggcgaggaggccaattgcaacgtcgcgatggtgtccgctgcgcccttggagaacggccactccaccggtggcgccgcgttggatgcctttgccgtcgccgtctgggctgttatcgtcgtttcctacgtcgtggcgttgccttttccgtctttcttcttctgcggtcgttgccgtctacccccggtttccgggcttttcttttttttctcgtgttttcttctttttctctttcttggtttcttgttcttcgctttttcgccgctgctgctgcgccctttttttttt

SEQ ID NO: 87090 - DNA, 5319 bp, Oryza sativa
  Clone ID: PAT_MRT4530_8606C.1
tcatttacctatcaaatacacaaactacaaatgttttggaataccaacaccaaagtatcttacattctcgagctttgttgggtgccaacttttacaaaattctcgggctgccagattgctaatactagctttcaactggcagttgccaataaactttacagcgtcccaggaagaacatcttaatacacgaattgggattacagtgttctatgtatacaagttcttgaaaaactaccaactagaccccttcgtgaacctattttcggcagttagccctacaaaatgcaaaatggcaccaccattgattattgatcatcgattgattcgcacattatggtatctgcacttcattgccccctgaaccagcaatatgattttaactgctgggacaccagagaactacagtcagtgtgaagaatccttgcctccaaagcggctggtgtatcatagctcatcatgttttgcgcctttatcatctgactttggtgtatcagatggcggggaagtagttcctggtgactccggattatctcccaagattcgtgctgtgaactgccttgcttcactgtcaagatcaacccactctggaacaattcttttggcaccctgaagctttggctcctttgtcattgggttgttgcaaagatcaatggtttttgctcttgcctttgtggcatttccacaccaagattcacaccatagccattcttgagggagagagaatatgggcacagtatgctgagcataatttgggagatcctgatcaagatttgagagactattggggtctttgctgagtgtttcatagaagacccgtagagtatctccagaagcagtttgccgaaatttggccaaatcaacaacataaagagcacttatgtggtatgctcttccacgtgatttagtatggtcttcctcgcagatcatctttccagaaaccttcacatcgttgtcgagcaaaagggatttagcaaacaattgcttccaaaatcgatagccatccatctccttgttgttatcgcagaatggagtatacgcaaggggacgacccttcagattcatgtcatacagttctcccatgtctgctctcacaatttgatctgcgtcaacaaaaataaccttcctcagtgaaagtggaaatatgacatctagaaacaagatcttgtatgcccatataattcgctgcttctctttctgtttgtgcaaccatgttggccatttatatgtgacaagctcgtactcaaatccatattcctgggccatatggggtatgacatccttgaactgtggagatagatagttctttatgaaccagaatttcacaggtctttgtgtttgctttaatacactcaaaatcattatcttgaggaaacgttcatacagatgcccagaagcaacagagaaaatgttgattgtctccccttgtaaagtagttttaaggtccatccgttcatacagatgcccagaagcgccatagaaaatgttgattgtctccccttgtcttgcagctttaaggtcagagattttctcatccttcttttttgatgatgagtcgccactaatgaaactagaagcccacttcaaaaggttgttattccagcctttgttatccatcttttcctggaagtggttgtcatcatcagcatttagcaagtcctcgtgctcttttcctcctctcttttgaacttcaatgtgcataagtttgcccctcaagctatcaatggcaatgagttttgaaggtagctcatacaaatctgcactacgaccaggcgctaattgtaggtaccatacaccaggggaaactttcatctgccagtaacccaagttggccatgacaagcgtatctaccaagtgtggtcttcgtttggtaccaaggataaactgaagacccctgggagggtctctatccttttccttgcaatggcctgtcaagaggagtgcttcaagttcaaacactgcctgcaatgttctaacatcaccgagattctccaataaaatgttgtccagatcatggatggcaatgacaggttcaacaagccatggttcagggacatcaatgttcatcgtaagtgttttcgatagtggcatatttgcgaagaaagctttaggtccatgcacagaataatcggtactgctaaaatcgtccattgatggaagaacaaatctataatagttctttaaaggtagatccgcaagagaactaataggattcagaacaattctcatgctcggctgaatctgtctccagagaatgcgtaagagtggagcaagtttttgcccagcaggacttagtgggtcaatgacagcatcgatatgaacacctgaactcataccgttcagtttaatagcactgtgctctgcatgcaaaatttcaaaatgggctctttcggatggcctttcacgaatagacattgatgatgaaatcaacatggcgacatcgctgtagaatttgcttgtcaggtcatcagggtcgacacctgtccattcgatctcttcaattatttcataaatgtgttttgttctcaattcgtactccatagactcaagcaggcctaaatcatcagttagaaatgaatctccttcatttacaacaaatacccgtccattcgtaatcacagcattgctgccaaattcaagccctagtttcccgaataagaagtcagacaacttattcattcctctgaggactgcatcatgagaataacttgtaaaccacgctttataattatcaacaggcaagccagtttcagcagctatgctatacaccttctccctcatagtgctaatcttatcaccaaccccggaagaaggcacatgttgtccttcataaaatttgcagagctcatgcaggaagtccagtaccttttccttatagctaaggacaaaaattggctcatccaaatcagagacaaacaggtaacgtatggcctcatgaagcaactttatcccaatcttcgaagaaatatcaacagcaactagatgagtgacaggcttggcatcatctgtagttccatgagagtgtaaataagtaatgtcatgaagtgtagaatctccctgatgatacggtacaactagtgagacaaatctcttattctcagtgctcttgccagttatcgatggattgtaacgcttgtagctactttctgacaaaaatttctctaaaacatctgtatgggactggatatgcccataatagacttgttcttgtatcctaggaagctcatcgttcatagcattcatggttgcgtcctcgcttgattcatgcacaagtccattcatcaataggcaacactggagtttatacaacccaagtttgtgaacaaaacgagaactttcttcagcctcttgtttgtgcatgttctctttttgcaactttagcagcacatcttgagggtgagatttagcacttgacaataaggaatcaacaaatgccccttcaacatgatgagcttccacagactcttcattatagtcatcaccactgttctgtgatttatgtatattgcttaggaactggtatgccaactgcgttgagtatgtttccttgatgtacaggaatagccttattatcaaaatagaaatatcctcctcagtcttagacccattatttactggaagattgccatcattttcttcaataacactaataagccttgaagaatacaatataatgccaaaccttatagggacactatcttggtatagagatagaaccatgtcaatggttgaagcaggatcaagcacataaacagcatggaatagatttttgcggatgtagcgcatctgaccagggaagactggcatcaatagctcattgatgttgcttctccaccttttatataacgcatcttcctccaagttattaagataatgaacatgggaagaccggaagtcaacacggaacgagttagattctgttggtggagcagctgacaggatcttgtggacagcacttccaggaatctttagtttgacaaactgatcagcaagagataattcctcatggaccatatccatcaacaggtaaagatcgagatcctcaatattaatcaaagcaccattcaaagccatcaatgacttgccaggtggaaccattcgctgatttgcaattatttcatccttgattgaatcatcaagcttcatccgtgacagtgatgaaactatactggggaaattttgattaatttcctgcattgactgtaaaggatccgatgcatggaggattctctgcgctgtctgatgacccaagtctttgagttcccatacttcaagtgtgtcagatactgtcgatgacaacagataatccctgaaggacattatctcagcatttaacgctggtttgcgttccaaaatcttggaaaatataaatcctctgacttcttgactgaggtcttcagtcttaggatcttccagagcaacacccttctttatagcagtgtcatccatggccttgtattccatgttcttgagagcaagttccacaccatatccactcaaagtgactgcatctatagcaccaacagaaccacagaagctagatgtagcctgacatccagatggcaggacatggcgcagggcatatcttacttttccctgctttgatgcttctgccaggtgaacatgcagctctttgaagcattttgtcccaaaagccccataaaatatagcaattggagcagtaatatttgattgaggatatatatggtcaaactcaaagagttcaggttgttgagtggagtccacagctagtttgcccaagccatcaagccatttgcgtagatcagctgagttgaataatagagcactccccgtgtctacccagcagcaagttcctttaacagcctcatgaaaattttccccagtactaggaccagaggtttgctccaaagtgccatctttaacaggaatagaggataatgactcctccgcaagctgcctgtagagcactaaccttggcgatgctgaccgaagggtaagtgagaactcaaaaattgaagccagtggctcactcagaaatgagcgggcatcctcaacaatcttgtgaacacaacacttggctgtcaaacattcagatgccttatcgagttccttccaatggtcaataaaatcccaaaatagatccttccattcttttgaaagcagttcactggcttcgagcagcagcggcgtgccggcccacttggcccggagcgccacctgcacgttcttctgccgccggatctcagccgcggagccgcccgcggcgagccctgccacgagcaccaccgctaccaccgccgccaccggaacccgggatcgggccccacgtgccgcctccat

SEQ ID NO: 87091 - DNA, 435 bp, Oryza sativa
  Clone ID: PAT_MRT4530_86070C.1
atgacgaacgggcaggacaacctgctgccgatcgccaacgtgggccggatcatgaaggacgggctgccgccgcaggcgaagatatcgaagcgggccaaggagacgatccaggagtgcgcgacggagttcatcagcttcgtcaccggcgaggcgtcggagcggtgccggcgggagcggcggaagacggtgaacggcgacgacgtctgccacgccatgaggagcctcggcctcgaccactacgccgacgccatgcacaggtacctgcagaggtaccgcgagggcgaggagctcgccgcgtcgctcaacagcagcagcagcgccgccgccgccgccgccgccgccggcagcaggggcggtggcgccatacagatcgacgtgagagctgagctctccatcttcagatcaggcaacaaccaaggtcgtccaaacaattaa

SEQ ID NO: 87092 - DNA, 141 bp, Oryza sativa
  Clone ID: PAT_MRT4530_86071C.1
atggccttgtgcttcaccctacagccctcgcccgtggtggatctccggttgatcgatgagcctggaggcaaacccttcggctttcatttcacggcttcgcccattcttgatggcgaaacacccttggtcttcgtcattttg

SEQ ID NO: 87093 - DNA, 1730 bp, Oryza sativa
  Clone ID: PAT_MRT4530_86072C.1
ctgcaggaatcggcacgaggcccccccccttttttttttttttttttttttttttttttgtcttgtttagtatcaacattatattctatagaacaaacgatgcggatgactctaatttgctaactacaagttcccttcaaacacaacagtctgtagtgtcagacaggctcttcacaagtgtttacagacattaaggggaatatcatcaaaactcatcccccgtattcgtaggattacataagtagcctcaacaagtccaacaacccgacatgcatgcatagctcaacaaacaagcacagctaatctttttactgcctttttcttcagtccttttttgcttttttttttcacttttcatctcaacttccctcaggaggatcaccgactattaagcataaaaacacagccgatcaaaccctcccctattaccgccatttacaaagcagaacactgcttgcatcctactatgggagctcacaccgtctctccgcatgcatgtgtgaaagctatcagccattcacctcccccttcggtgtatttacagctgaaaccttccagacattctgctgcaaattctgccaaggcgtagactccgtgccactacctgttgtatgcaccacgggaagcaaaaaactggtagtctggatggctggtacgactatcccgcagccagtcagaagcagcttgctgcaagaagcttgccagctgccgatctccatcagtcgaagaccatattgaattgctgaacttgtaagaagccataccaaaaacagatagtggtatagtcggtttgctaccaggaccccagtattttacagcaccaccgttatcttcttctggcccagttgatagccgatggaaggtgagaaagcatgcatccaaatcttttaatgttgggccagtagggatacggtaaattggataccaagcaacagatatccaacttcgcggtgataaatcacagcttctaagggtcctcagtcctggaaatcttgctgaaagactggaaatcttcgagtctatacaatcactagggccagaagacagtcgcaggactgcggggtctccatagagctggatggcggacaagtacggcacgtaatactgcacgaccccgtcgcagccatcgaggacaagcggcacaccggcaccgtacgcactccactccctgtacgcctcccacacgtctctgaggaagaagtgcggggcctcctcccgctcggcatccacgccgcagccccgccaccccctcgcggctctctgcatcttggaggggaactgagcaggcacgaacggcgtcacggcggccacgaaccgctcaaggttgcccgcgacgccggggggcgggaccggcgccctcgccggcgacggggacggctcctcggccgccttctcctggtggacggcgggggcccacctcgccttggggagcccgtggtggtggtaccctcgccggaccctggatgcgtcgtagaagcggtggtcgccgccgtgcctccggccgagctccacggcggtgcccatcatcccacgcgcggcacggcacggcacgacgcgacgcgaccaagcacaccccgctcaccctccctggacgcgctaatccggcgaggaaggcaacgaatagacgaaaccctaaccctaagatttggggaaacctgctcgattggaggaggcgccaagccaagccccaagccaaaggggggaagaggagaggaggaaatgcctcgtgc

SEQ ID NO: 87094 - DNA, 1075 bp, Oryza sativa
  Clone ID: PAT_MRT4530_86073C.1
gtactaaatctagaaattgggccgggtgcctatgaacccccctaggcccattgggctccgcccctgattacatgtgttccctctccctcctaaaatctgtgattgaaagtattgatagagcaagaaggcattgcctatggagggggtctgacataaattctagtaggaaatccttagtgctttgggagagagtctgtcaaccaaagaatagaggtggcttgggtgttattgatctcaatcttcagaatgctgctctcttaatgaaaaatttgcataaattttacaacaggcatcctattccttgggttaatttgatctggacctcttattactctcataaattaccacatgttgttcgcccaagagcactctttcacaaggactcagtaagcataacttctactaaaagcatatcacagctttttgctctgcctttatctgaacaagctttccaggaatatgaatccatgagtgaagctgaccccctcaacttattatctgatgataaagatgtttgggcttatgtctaggggaatggactgttctcttctcataaaatttatacaataaattgcatgcatgttcaagcccctgggtacttaagttggatttggaaaagcaaatgttctatgaaagttaaggtgtttgcttggcttctcctaattgacagattaaacacttatgatatgctgcagagaaggcactgccctcctgaaaattctgatctagcatgtgtcctttgtccagcttaagcaagggaaacatctttccaccttttctttcaatgccaattcagctcagattgttgggtgcagctgggaattgtctggaacctttctctcaattttgatgatatgctgctgcaggcaaagaactcatagatctactcattttgttgaaaaaattctctatgttgcatggaacatttggaagcaacgaaatgctttcattttgcagaatgtaccaccttcggttgtttcctgaaaagctctctttaaaattgatctttcccttttagtctttagattaaaaagtttctgagagacaagctttatctcagtgaataaaccttttg

SEQ ID NO: 87095 - DNA, 624 bp, Oryza sativa
  Clone ID: PAT_MRT4530_86074C.1
ctcttcaatctcccatctagattcactaatgttcatataaatttcgacatatatatgaaacacatatattgatccatttataaatttatttaaaacccaaaacatcttatactatgaaacataaatttattcaaaacctcaaacatttaatacacatacattgatccaagtgttctatgaaagttaaggtgtttgcttggcttctcctaattgatagactaaacacctatgatatgctgcagagaaggcactaccctcctgaaaattcagatctaacatgtgtcctttgtccagctcaagcaagggaaacttctttccatcttttctttcaatgccaattcagttcatattgttgggcgcagctgggaattgtctggaacctctctctcaattttgatgatatgctgctgcaggcaaagagctcatatagatccacacatattgttgaaaaaaattctctatgctgcatggaacatttggaagcaacgaaacgctttaatttttcagaatgaaccaccttcggttgtttcctggaaagctctctttaagattgatctttcccttttagtctttagattaaaagattcggagagacaagctttatctcagtgcataaaccttttg

SEQ ID NO: 87096 - DNA, 2586 bp, Oryza sativa
  Clone ID: PAT_MRT4530_86075C.1
gttcctttcttcagacaaaggctttgcctttccttcctcttccaccatcctgccacaagaagcaagaacctctcttaatttgagcaagaaaccattcgtcacatcaacggaggaagcagctatagtttgattgattggttgatcgatcgatgctgggcggcggcaagatgaagggtggggagacgatgggcggcggcggcggcagcggcagcagcagcattagcccgctggtgtcgttcgtgctgggcgccgccatggccaccgtctgcatcctcttcgtcatgtccgccagcccgggacgccgcctcgctgacatctccgcctggagcaacgccgacgacgcgccgccgctgccgctcccgttgcaggacgccgccgtcgactccaacgactcgctggccgccgccgccgccgccaacgtcaccgtcgttgctgctccggctcccgcccccgtccaggctccggcgccggcgtccccttacggcgacctggaggaggtgctccggcgagcggcgaccaaggacaggacggtgatcatgacgcagatcaacctggcgtggacgaagccggggtcgctgctggacctcttcttcgagagcttcaggctcggggagggcggcgtgtcgcggctgctggaccacctggtgatcgtcaccatggaccccgcggcgtacgaggggtgccaggcggtgcaccgccattgctacttcctccgcaccaccggcgtcgactaccgctccgagaagatgttcatgagcaaggactacctcgagatgatgtggggtcgcaacaagtttcagcagaccatccttgagctcggctacaacttcctcttcacggatgtggacgtgatgtggttcagggacccgttcaggcacatatcaatgggagcagacatcgccatctccagcgacgtgttcatcggcgacccctacagcctcggcaacttccccaatggcggcttcctgttcgtgcgatccaacgacaagaccctcgatttctaccggagttggcagcaagggaggtggcgattcttcgggaagcacgagcaggacgtgttcaacctgatcaagcacgagcagcaggcgaagctgggcatcgccatccagttcctcgacaccacctacatcagtggcttctgtcagctcagcaaggatctgaacaagatctgcacgctccatgccaactgctgtgttggcctcggcgccaagatgcacgacctccgaggcgtcctcgacgtctggaggaactattacagcagggagtacgtagtaacagcagctagtgctcgatcgaattcgtcgacttgtagtggagtagcagctatttcagggaaggaaacggcaaggcagctatcttcgtacgcctcgttaactgcaacccatcgattgccacatctacacctacgtatacaaatacacaaataaatactgcatacatacatgatacatacatacacggccgctgctgatagctcctactccctccagcccaaaataagtgcagcctttccgtgtggcggtggcgcgggcggcgacggatgaccggacggtgatcatcacgtgcgtgaaccacgcgttcgcggcgcccgactcgctcctggacatcttcctccagggcttccgcgtcggcgacggcacgccggagctcctccgccacgtcctcgtcgtcgccatggatcccaccgcgctcacccggtgccgcgccgtccacccccactgctacctctacaccatgcccggcctcgacgtcgacttcacctccgagaagttcttcgcctccaaggactacctcgagctcgtctggagcaagctcaagctccagcgccgaattctccagctcggctacaacttcctcttcacggacgttgacattgtgtggctgaggaatccgttcaagcacgtggcggtgtacgcggacatggcgatctcgagcgacgtgttcttcggtgacccggacaacatcgacaacttcccaaacacgggcttcttctacgtgaagccgagcgcgaggacgatcgccatgaccaaggagtggcacgaggcgaggagctcgcacccggggctcaacgagcagccggtgttcaaccacatcaagaagaagctggtgaagaagctgaagctcaaggttcagtacctggacacggcctacatcggcggattctgcagctacggcaaggatctgagcaagatctgcaccatgcacgccaactgctgcatcggcctccaatccaagatcagtgatctcaagggtgttcttgctgactggaagaactacaccaggttgccaccctgggcaaagcccaatgccaggtggactgtgcctggtaaatgcatccattgattttgattgtcgatcgggcagtatctggtgttgtaggctacgtacagtcaggaagatagctttatttgcacatgaaagggcgaattttgttttttttggtttgttgtagattgatgggtcgatttcaagttatattactgtatacctgacggcagacaagtatacgcatgatgggcaaactatatgatatgataaaaaataataaaaatttagatgtaagatgtcatcatgtcttcagctatg

SEQ ID NO: 87097 - DNA, 150 bp, Oryza sativa
  Clone ID: PAT_MRT4530_86076C.1
atggatataaagctgaaaggcgcaacaaaactatatagcctgcgactgaggatgatcaaatggctgctcttcatgaaggtggactggaagctgttgccgtagcactgacggtgcgcctccttcgattgggccataatcagagtcgatcct

SEQ ID NO: 87098 - DNA, 1404 bp, Oryza sativa
  Clone ID: PAT_MRT4530_86077C.1
gtactggcagataggtcgcaatcagtattcacagaacttattcatcacaatcagtatggctttattagaggcagaactatacaggattgtcttgcttggtcctttgaatacctgcatcagtgtcaacaatcaaagagggaaatagtgctcttaaagctagattttgaaaaggcttttgacacaattgaacactctgttatcttgaatattatgaagcaaatgggttttgactctaaatgtttgagttggattaacttgatcttttcatcagcttcctcttcagtgctgcttaatggtgtcccagggaaatctttttattgcacaaggggggtgaggcaaggggatcccttgtcccctcttttatttgtgcttggtgcttatcttttgcaggctgtaatcaataagacctattctcaagggtcctttctattcccattccaacacctgacaatgattttccagttgtacaatatgtagatgattctttactcttcttgacagcttcctcaaaataacttttttgtctaaaggctatcctcaacacctttgctgattctacaggtttaaaggttaattatagtaaatcttgctccccgcaaaaaaaattatagtaaatcttgcatgattcctttgaatgtggatccagaaaaagttcagcatctttcagggttgtttggttgtgctattggaccactaccttttacatatttgggcctccctttgggaaccactagaccaaaggtgattgactttgcacctcttgttgatagaattgaaaggaggctgtcagctacctctgctctattgtcttatggtgacagaatcacaatggtaaattcagttctttcctcccttcctacttattatatatgttccctctccctcccaaaatctgtgattgaaagtattgatagagcaaggagacattgccaatggaggggatctgacataaattctagtaggaaatccttagtgctttgggagagagtttgtcaaccaaaaaatacaggtggtttgggtgttattgatctcaatcttcagaatgccgctctcttgatgaaaaatttgcataagttctacaacaggcatcctattacatgcgtaaatttgatctagacctcttataactctgataaattaccacatgttgttcatccaaggggttccttttggtggaaggatgtgttgcaatttgtggacattttcagaagtccgtcaaattgtaaagtgggtgatggaaaaacttttttgttctgggatgatttttggaatggtaaagttaggtcagctgtgttccctagaattcactcttttgcactctctcgcaaggactcggtaagcataacttctactaaaagcatatcacagctttttgctctgcctttatctgaacaagctttccag

SEQ ID NO: 87099 - DNA, 852 bp, Oryza sativa
  Clone ID: PAT_MRT4530_86078C.1
atgaatctcggggatgggtttgctttaaacttcgcgctcggacgagattgccctccccttcccggttggccgactgtcgtgggtcgcgtgcggtgggccggcgcggcggccgtccgatcggcatctgacgtctattgggcggaggctggcaagcctctcctctctccggtccggcgtggcgccgcaccacgcccaccgccgcccctacgcctcctcctccggtgccgctgttccaccgggggcgccaccgcgaggggcccgtccggcgacactacgccttctccgccaacgccgccgccgcgagggccctgtctgccgccactacacttcctcctccgccggcgccgctgctacacctcctcggtcgtcgcctccactgccatctccaccactgtgaggagcacctctgccgctgctcggcctccatctctgccactccagcccaacgatgcggtcaccttcactgtcgccaagcacgatggcgccggcatcgacgagctggccacggatgacccgagggaggttgccaagattgcatcgctcgtgctggcgctcccgcagggcggcgcagtgctcaccgtgcaggccaccgtgttgctgcggctggcggcgccgcgcagcctcgccctcggcgtcacagtgcaccacgccgcatgcgacagcgtgagcacgacacactccacacctgcgctgcctctactccgccgccggttggatcctcaccgtctgggtggctgggacacccggaggtggagaagaaggagaggagaggggctgacgggtggggtccacggagctgacagttgtaagattgctagcctaaatttggtgcaatttgagggtagtatttaa

SEQ ID NO: 87100 - DNA, 523 bp, Oryza sativa
  Clone ID: PAT_MRT4530_86079C.1
ctacgccctcctctccaccgctgcctcgaactctccaccgccgccctcgccgccgccatatccgccgccctctccgccctctccgttgccctctacgccctcctctccaccaccgctcgccctctccgccgaccccgaccccgaccttcccgacgccgggatccacgacaccggcctgcaccgccgaccatcaaggccgtcgtcctcgccgcgtccccgacctcccaagacgacgtcgggatccacgacgccggcaactgcaccgccgaccaccgcctaccccgacctccccgacgccgggatccacgacccggacgtcggccgccaagacgccgcctccccgacctcttctcctcgaccgccgaccaggtgcgacgcccccctcctcctggtgagatgatgaattgatgaattgcagtttggatggatgacttgcagtcccaggaaacagtgctggtatcacagggagacagagtatcacagcaacagaggtctctttattatagagtagaagtacagtcat

SEQ ID NO: 87101 - DNA, 5791 bp, Oryza sativa
  Clone ID: PAT_MRT4530_8607C.1
atggccgagcaagcaaaggcgcacgacctctctccgagtgtgagcggcgacgacggggagccaaacccacgccgtcgagctcgtactcccccgcctccacaccaaagtcctaagcagggggaggcgctcgagagggttggtaaatccgcagcgtcaccggttgcgggtgatgcaggagaacggcgagatggggagcgttgcctcctcgtctacggcgacggcagcacgcctcagggcgcgcttcaggctgctagcgcgctcctacgtcacccacccgtcgtccatgaccctgagtctccagctcagcgatggctggacgacgtggccaacttggtcgtgacggcccagcagcgcctgggtgctggtggacgagcctttgtggcgagtcttcggaatgtccgttggcccccaaggttccggcccaccatcaccgagaagtacgatgggagcgtcaaccccaccgagtttctccaggtctatacgaccgggatcgaggccgctgggggtgacgacagggtcatggcgaacttctttcccatggccctaaaaggacaggcgcggggttggctgatgaacttgtcacccgcgtcggtccactcctgggaagatttgtgccaacagttcaccatgaacttccaaggcacatatccgcgcccaggcgaagaagcggacttgcatgcagtacagcgaggcgatgatgagtcgcttcgctcgtacattcagcggttttgccaagtccgcaatactataccatgcatccctgcacacgcggtgatctacgcgttcagggggggcgtgcggcacaaccgcatgctcgaaaagatcgcttccaaagagccccagactaccgcggagctttttcagctcgcggaccgagtggctcgtaaggaggaagcgtggacatggaactcctccggttccggagtggcagcttcggccgcccccggatccgccgctcagacagggcggcgtgacaggaggaggaagaagaggtcggaccgttccggcgacgagggtcatgtcctcgccgtcgagggcgctccgcgggccacccgaaaggggaggcctgcgagcgacaaaaagaaagaggctggtactcccagcagggagcgccccgccggcaggtggtgctccgtccacaacacctccctccacgatctcgcggactgtcgtgcagtcaaaaacctggctgagcgaacgaggaagtgggaggaggacaggaggcaggaacgccgtgagggcaagttcccggcggttccttccggcaaacggcgaagtgaggccaagcagaaggcccccgctgttgacatcgatgatggtgatgatgacctaggtttccaagaacctggggccaccattgccaccgtcgatggaggagcgtgtgctcacgtctctcgccggagcttcaaggctatgaagcgagagcttctggccatggcccctactcatgaggcgatgcgtcgggcgcggtggtcggaggttgctctcactttcgaccagaccgaccacccaccgtgcattgcccggggagggcaggttgcgatggtggtttcccccaccatctgcaacgtgaagttgggacgtgtcctcatagatggaggagcggccctcaacatcctttcccccgtggcttttgatgccatcaaggccccggggatggtgctccgaccgtcccaaccgattatcggtgtgacgccggggcacacgtggccattaggtcacatcgacctaccggtcaccttcggtggacccgccaacttccgcacggagcgggtgagcttcgatgtggcggacctcagtctgccctacaacgcggtcctagggaggccagcgttggtgaagttcatggcggcggtccactacgcctacctccagatgaagatgccgggccccggtggccccatctctgtccatggcgatcttaaagtcgcgctcgcttgcatggagcagcgcaccgaccgcctcgctgctgcgtccaagcccgagggtggtgacgagaggcttggcccctctgcccccaccgccccgaggcagcggattgccacatacgacgaggtcccggaagacgcgctcgtctccttcctgcgggcaaacgctgacgtcttcgcatggagaccagcggacatgcccggggtccccagggaggtgattgagcaccgtctcgccgtgcggccgggcgcaaggccggtccggcagaaagtgcggcggcaggccccggaacgtcaagccttcatccgcgaggaggtggcgagacttctggaggccggattcatccgtgaagtcatccatccggagtggctggcgaacccggtggtcgttcccaaggcgaacggcaagcttcggatgtgcatcgactacaccgaccttaacaaggcatgtcctaaggatccttaccccctgcctcgcatagatcagatagtcgactccactgcggggtgcgaccttttgtgttttctagatgcatactctggttaccatcagatccgcatggctagggaggatgaggaaaaaactgcgttcattacccctgtaggaacctattgttatacatcaatgcccttcgggttaaagaatgcaggtcctacttttcaacgaactactcgaatttctttgggtagccaaataggacgtaatgttgaggcttatgtcgatgacttggttgtaaaaacgcgcaaccaagaaactttacttttagatctagcggaaacttttgagaacctccgctccgcccgcataaagctgaaccccgataagtgtgtgtttggtgtacctgcgggcaagcttctcgggttcttggtctctgcccgaggcattgaggccaaccccgagaagattcgagctatcgagcggatccgcccccccagcaaacttagggatgtgcagtgcgtcactggttgcatggccgccctaagtcgtttcatatcgaggctgggagagaaggcgcttcccttatttaagctcctcaagcgttcggggccgttcacttggacggaggaagctgaacatgcccttactcagttaaaggcatatctcagctctcccccggttctagtcgccccggagccaaatgagcccctgctactttacttagcggcgaccccccaagtagttagtgcagcgttggttgtggagcgcgatgaggacaatcctcattctgcgcacccccactctgtgccgacttggcccgggagcaggcagggaggagaggcccccgagtcgaacggtggcctaaggcccctgacgaccggagtcggccctctgcccgcttgtcaaacggtgctgagtgcccccgaccctcaggaaggccccgaggccactgagggaaggccgcacttatcgccctttggccccgaggctaaccctgtgctgattcgacccgggagagagcagggagaagaggcccccgagtcgaacggaggcctgaggcccctgacgaccggagctggccctttgctcgcttgtctgacgacgccaggagcccccgacccccaggacggccccgaggccactgtgggaaggccgctcctgtcgtcctccgaccccgaggtcatcggcacagaagacgagtgtgccccgaggggccacttggacgaagagcaccccggggatacggcccctagcgaagaggatcggccccgccgaaaggtgcagcggcctgtttactttgttagtgaggccctccgggacgccaagacccgatacccacaggcccagaagatgctttacgctattctgatggcctcgaggaaactgcgccattatttccaggcgcatcgggtcactgtggttacgtcttaccccctcggtcaaatcttgcataatcgagagggtacaggacgagtggtaaaatgggcaatcgagctttctgagttcgatctgcactttgaaccacgccacgctatcaagagccaggccctcgccgattttgtggcagagtggaccccggctccagagaccgtctcaatccccgaggccagcgcggacccctcacagctgcctcacgccgcccactgggtgatgcaattcgacggttctttgtctcttcagggcgccggtgcaggggttacgttgacctctccaaacggagacgtcctcagatacttggtccgtctcgactttcgagcgactaataatatggcagagtacgagggactccttgccggactcagggtggcagccgggctggggatccgccgcctcctggtgttaggcgactctcagctggttgttaaccaagtctgtaaggagtaccggtgctctgacccgcagatggacgcctacgtgcgccaagtacggcgtatggagcgccattttgacgggatagagcttcggcatgtgcccagacgggataacatgatagccgacgaactctcacggctcgcatcctcgcgaacccagaccccaccgggcgcctttgaagaaaggcttacccagccgtcggcgcgacccgaccccttaggggagacggatgcgcctgaccggcccccgaggcccgtcggagtccaggcctcgggacctgaagggagcgctccaagctcccttagattgattgcttggatctctgagatccaaacatacctcacagataagactctacctgaggaccgcgaagggagtgaacgcgtacaacgcatttccaaacgctacgtgttggtagaagggaccctctatcggcgcgcggctaacggaatcctcctgaagtgcattcctcaggaacaaggcgttgagcttcttgctgacatccatgagggcgagtgcggagcccattccgcctcgcgtaccctggttggcaaggcctttcgtcaaggattttattggccgacagctctcaatgatgcagtcgatctggtccggcgatgcagagcgtgtcagttccacgccaggcaaatccatcagccggcccaggccctgcaggtcataccactgtcatggccatttgctgtctgggggcttgatatcctgggaccgttcaaacgggccccgggcgggtttgagtatctgtatgttgcgatcgacaagttcactaagtggcccgaggcttatccggttgtcaagatcgataagcactctgctcttaaattcattaagggcatcacggcccgttttggggtgcctaaccgtattattacggataatggcacccaattcactagtgaactcttcggcgactactgcgaagacatgggcatcaagctctgcttcgcctcacctgcccaccccaggagcaatggccaagtggagcgcgccaatgcagaaatccttaaaggcctcaaaaccaagaccttcaacattctcaagaagcacggcgattcatgcgatcgaggagttgccagcggtgctctgggcgaaccgaaccacaccaagccgagcgaccggggaaacgcctttcttcctcgtctacggcgcagaagcggttctcccatctgagctcaccctgaggtctcctcgggccaccatgtactgcgaggctgatcaagatcagcttcgtagagatgacctcgactacttggaagaacgaaggcggcgcgcggccctccgagctgcgcgctaccagcagagcctgcggcgctaccatcagcgccacgtccgggcccgatcactctgcgtcgacgacctcgtcctacgccgcgtccaaacgcgtgctggactgagcaagctctcaccaatgtgggagggtccgtatcgagtgatcggtgtcccccggccgggctcggtacggctggccacgggcgacggcacggagctgccaaacccgtggaacatcgaacaccttcgtcgcttctacccctga

SEQ ID NO: 87102 - DNA, 314 bp, Oryza sativa
  Clone ID: PAT_MRT4530_86080C.1
tctacctctcgcctcccgctccaccaccatcgggcgatctccacctcgccggagttgagagagacgacgctgcagggatcgagatcgagatcagagaggttggcaatggcggcgcgcgtggcggctgacctcctgctactgttcggcctcgccggcgcggcggtgacggcggctaggatcatgccctgacgacgactgtggcgactcgtcgaacgaccgcagggccgacggcgttggggatgccaaggcatgaaatggctgcagaggacggccctataggcttcttccgctgcggcgccaatcagctcagggtt

SEQ ID NO: 87103 - DNA, 822 bp, Oryza sativa
  Clone ID: PAT_MRT4530_86081C.1
ccggccgggagtcgagcccgatcaaccactcgccatccgtttgtttggcgccgaatcgacgaaaaatatccgcacgcctgccaatcccgccacgttcttgcggcccagccatccatccaatcctccctccccccccccccccccttcctgcacgattcgcgcggatttccgcagcggcaaacattcgttcgatcgattgaccgatcggccatggcggccatggtggcgtccacggcgacctccttctcctaccacaagccgcgattcgcggtggagtgcaggaagaaggaccgggaccgggacagggacagggagcggccggagcgggagaaggagcacaagtacccgttcaaggtcgtcgagatcacgccgccgccgcggtgcctcggcgtccgctgcttccccaccaacatccactgcggggagagcgtgacgatcgaagggcaggcgtacacggtgtctgcggtgacgcaccggtaccagctgcgcaaggggcgctacgagcccagcgagaagcgcctcgacgtcctctccaccggcagatacctcctcaacctctacctcgacggcctcctcgacaagtcctgatctgattagattatgcatctaatctactactactccagtatttacatgagcataccagtacaattaattaaacatcgatcaacttcttttttttgtcatgagagatgggtatatatggatctggaaggaagcactggcactggaatcgccaacacctgtgtgatggaccaaggatggcgtgctctggatggtttcgaaggggggcaacagaaagaggctaaattagttgggttc

SEQ ID NO: 87104 - DNA, 538 bp, Oryza sativa
  unsure (1)..(538): unsure at all n locations
  Clone ID: PAT_MRT4530_86082C.1
ccaggttgaaaaggganactggtgatgtggtgcaattgtggcttcacctccttgttggtggtgtttgcttgctgtgctggatggcttgaggagaccccaaaacccagcggtggtcaccaacgatgggaaaggaggagtgaaacctggtgaattgagtggatgcacaggattggccccgctgcatgcttgttggcccccaacccctggccacaggaggaggattggatgtgtacatgatgagtggaatggaatgcaatgtgctgacacgtgcttgaagatttgagctgctaggttttctttgagatgggaatggtgcctgcagatgttagattggatgtacntgtttgaagttgccaaaatgaaaaaactgaaatgaatgctttgacgcaaccacgccaaggattgcacctagatggcttcagtgcaacatgactatgacaaccagaacaacgtttattcttatcttttttatatagtaatatccccttgctatataaaaataaaacagaactacaatatctttaaaaaaaaaaaaaaa

SEQ ID NO: 87105 - DNA, 185 bp, Oryza sativa
  Clone ID: PAT_MRT4530_86083C.1
atcacctctacgtccacctcgtccaccatcggtgcgggtcgactagcaagtctgctctacacgtcctccgaaacagtgccgaacgaccatgggtgaccatagggaaatccatcactgctcttgctggagtggaaccggtatggctaaggctgacaccgccggagatgatgcgcccaggagctgct

SEQ ID NO: 87106 - DNA, 339 bp, Oryza sativa
  Clone ID: PAT_MRT4530_86084C.1
gttaacataaacacacacacatacatctggctgggcgctccattacactgcgttagattcaattacatatcattacatggatgtaaaacagatcatagagtggaatacgacagcaaggggcgctatgcatcgaggcacaaaaatgtaaaaaggaatggccgcctataaacatatatgctaacttaggataacactcaagcctatctgtgacaggcatgttacatgctagatgatgctgactctattacattacaactaggtagccattgatcaactctatctggtcggaactgcttgtgacgcagctggattgcaactactacgaccatagaggcagcg

SEQ ID NO: 87107 - DNA, 268 bp, Oryza sativa
  Clone ID: PAT_MRT4530_86085C.1
cttatataggggttggtcttgccctctacaggccctcctccacgtccaactcggggtagaaaccaaaggaaacccgaaacatgccttccggaacaaggaaacctcgaaacccgacgaaacagggtcggactcggacctgctggtcagaccggccacataccgccggtctgaccggccctcaaccggcggtctgaccgcccaacacatggcggtcagaccggccgttatggaatgggttttgtcagtaatgtacgtttaatacttctaa

SEQ ID NO: 87108 - DNA, 1081 bp, Oryza sativa
  Clone ID: PAT_MRT4530_86086C.1
atggaggggtcgcctggcaagatcaggctcagcaccctccccgacgacatcgtcttccgcatcatgtccttcctgaccatgcgccaggctgtgcggatgtgcgtgctgtcgcggcggtggcgcaacctctggcgcaccgtgccctgcatcaacgctgacatcagcgagttcaagcggagagataccgagcactatgatcaagagacggaattggcgttcaagatgttcatggaaaggctgaatgagctccgcgaccccgcccccttgatacacacgtttcggttcagaagcagccactttctggatattgtcctgctgtgtgacaaattggagctcaatcactctgcattcaattgccgctacctcagaagaattgacttcaccaatgttattttgatgcaaggattcttcaagcaactcgagatgggctgtccagcaatgagaggtctcttcttagatgaatgcagcgttgaggatgttgagatctcctcccagacactgaaggttttgaccatcaagaatactcatgtctcctatggcaacaagactactatttcgacccccagtgttacttatctgaagttgtggagccctttgaatggcacatatgtgcttaatgacatgccattactagtgacttcattactggtactttatcatgtgcaagactctggtgattttttccaaaatctcaggagcctttctgctgctaaaagtttggagttcgattatgttgggagaagaaaacagcctgactctcggtcaatggtgtctggatgcaaacttctatggattgacggtcttccttcagacctcaccaaaaataagctaactctaaagcttgaaaaggaaaaaccacaaagaatcattggcaaacttgaagatagatcatttacatgtgagcaccttacgcgtgttgaagtcgtatgctcggaggatgatcccctggtcgaagacgtggtgaacttctttgtaaatagtggactgacctctgctcaggttcatatcatacgccgggtgtagatcaagtacatgtgagcaccttacgtgtgttgaagtcttatgctcggaggatgatccc

SEQ ID NO: 87109 - DNA, 568 bp, Oryza sativa
  Clone ID: PAT_MRT4530_86087C.1
ccacgcgtccgggcgcaggtcttgctcgtgctcgctcgctcgggcagtcggtctccctccgcgaggagagaggagacccttggcaagcgtggaggacgactcggtgccggccgagtgcggctgctgctgctgcggctgtctcctgccgtggccgcgaaatcatcgggttggccggtggtcggcgcacgcaggtgctaagagctacaatacctgagttttttttagtggatcatcagttcgaggaaagctgcgagaaatggagatggacttggcagccgagcagtacggatgcgtgcattacaggaggaaatgcaagataagggcgccctgctgcggcgagatcttcgattgcaggcactgccacaacgaagcgaaggactcgttggaggtcagcatcagcgaccggcacgagatccctcgccatgaaatcaagctggtcggtgtccctgtccagttattttggctgccctttccagcgtatcactatcgctgttactttatcggatattttgctgcatttgatgctaactgtcgtgtcggacatgatattagtaatttgcgctgcccc

SEQ ID NO: 87110 - DNA, 675 bp, Oryza sativa
  Clone ID: PAT_MRT4530_86088C.1
ctccccccccccccccccccccccccccccccccccccccccccctttttttttttttttccgccagaaaattctcccatattaaaaaattaattttttttactccaacatttttctttaagggatcatatggggttacaggtctaaccccctgaaagttgaaagttgctgaggctggaaatacatttcataagtttactaaccccaaaggttttttcacatttagccaacctaacaggtaaacataacagccagttaaaccgttagcccaaacataattttatttttagttacaacccatatttgccccccaagcataaattttatctccggttttaatcctttttttcctccaccttttctttttaatacttgggaataaaaaccgtttaggtctgaaaagggattctcgctatgggaataataatcctaatttttggacaactccgaaggataatcatataagggattatcctccgcatttgaatcatttgtataatagaggatcgtcatcataataacacacataatcgcctttgtccacttgtaacagggggtatggagctgaaaaatgggccctcctttggtggaataataacccacctttttgacagtatatatgtaataaacatctgaatcttccgatggggccagcgaataatatcggattcaatt

SEQ ID NO: 87111 - DNA, 614 bp, Oryza sativa
  Clone ID: PAT_MRT4530_86089C.1
ggatcccccgggctgcaggctcggtaatgcacttgttgtgatgtactcaagatgtggcaatgtccaaactgcctttgatctcttcgaccggttgccagagaaggacattgttacttggaataccatggtgactgcttttatacagaacgattttgacttggaaggcttgctgctcgtctatgagatgcagaaatcaggttttgctgctgattctgtgacattgactgcagttctgtcagcatcatcaaatactggagaccttcagatcggtaaacaagcacatggttatcttatcaggcatggtatcgagggtgagggcttggagagctacctaatagacatgtatgcaaaatctggccgtgtagaaatggctcagagagtgtttgatagctttaaaaatgccaagagggatgaagtcacttggaatgccatgatagcgggatacacacagagtggacagcctgaaaaggcaatcttagtattccgggcaatgcttgaggcaggtcttgaacctacttcggtgacacttgcttcggtgctacctgcatgtgatcctgttggagggggcgtttattctgggaagcaaatccactgttttgctgtgcgccgttgtt

SEQ ID NO: 87112 - DNA, 6084 bp, Oryza sativa
  Clone ID: PAT_MRT4530_8608C.1
atggccgagcaagcaaaggcgcacgatctctctccgagtgtgagcggcgacgacggggaaccaaatccacgccgtcgagctcgtactcccccacctcctccgcgccaaagccctaagcagggggaggcgcttgagagggtcgacaaatccgtggcatcaccagtcgcaggtgatgcaggagaacggcgagatggggagcgtcgcctcctcgtctacggcgacggcagcacgcctcagggcgcgcttcaggttgctggcgcgctcctacgacacccgcctgtcgtccatgacccggagtctccagcccaacgatggctggaagacgtggccaacttggtcatgacggctcagcagcgcttgggtgctggtggacggtccgccaccaccaagacctccggcgccgctaccaccggctccgtgtcgtcaaggcggagggcgcggcgagcggcggcggctgcacgtcattcggctgctactccctcgtcgacaccttcgactcggaaggatcagcatggggagccggatgcccgcctcaacatcgagcgccggcgtaatagccggcgtaccccccgtgcaacggagggtgcctcctcgtccagagtgtcacctcgacatggacgtgaggaccagccctccgtgcccccggctggtggtgttggctgtagagcctttgtggcgagtcttcggaatgtccgttggcccccaaggttccggcccaccatcactgagaagtacgatgggagcgtcaaccccaccgagtttctccaggtctatatgaccgggatcgaggccgctgggggtgacgacagggtcatggcgaatttctttcccatggccctaaaaggacaggcgcggggttggctaatgaacctgccacccgcgtcggtccactcctgggaagatttgtgccaacagttcaccatgaacttccaaggcacatatccgcgcccaggcgaagaagcggacttgcatgcagtacagcgaggcgatgatgagtcgcttcgctcgtacattcagcggttttgccaagtccgcaatactataccatgcatccctgcacacgcggtgatctacgcgttcagggggggcgtgcggcacaaccgcatgctcgaaaagatcgcttccaaagagccccagactaccgcggagctttttcagcttgcggaccgagtggctcgtaaggaggaagcgtggacatggaactcctccggttccggagtggcagcttcggccgcccccggatccgccgctcagacagggcggcgtgacaggaggaggaagaagaggtcggaccgttccggcgacgagggtcatgtcctcgccgtcgagggcgctccgcgggccacccgaaaggggaggcctgcgagcgacaaaaagaaagaggctggtactcccagcagggagcgccccgccggcaggtggtgctccgtccacaacacctccctccacgatctcgcggactgtcgtgcagtcaaaaacctggctgagcgaacgaggaagtgggaggaggacaggaggcaggaacgccgtgagggcaagtccccggcggttccttctggcaaacggcgaagtgaggccaagcagaaggcccccgctgttgacatcgatgatggtgaagatgacctaggtttccaagaacctggggccaccattgccaccgtcgatggaggagcgcgtgctcacgtctctcgccggagcttcaaggctatgaagcgagagcttctggccatggcccctactcatgaggcgatgcgtcgggcgcggtggtcagaggttgctctcactttcgaccagaccgaccacccaccgtgcattgcccggggagggcaggttgcgatggtagtttcccccaccatctgcaacgtgaagttgggacgtgtcctcatagatggaggagcggctctcaacatcctttcccccgcggcctttgatgctatcaaggccccggggatggtgctccagccgtctcaaccaatcatcggtgtgacgccggggcacacatggccattaggtcacatcgacctaccggtcaccttcggtggacccgccaacttccgcacggagcgggtgagcttcgatgtggcggacctcagtctgccctacaacgcggtcctagggaggcccgcgttggtgaagttcatggcggcggtccactacgcctacctccagatgaagatgccgggccccggtggccccatctctgtccgtggcgaccttaaagtcgcgctcgcttgcatggagcagcgcgcggaccgcctcgctgctgcgtccaagcccgagggtggtgacgagaggcttggcccctctgcccccaccgccccgaggcagcggatggccacatgcgacgaggtcccggaagacgcgctcgtctccttcctgcgggcaaacgctgatgtcttcgcatggagaccagcggacatgcccggggtccccagggaggtgattgagcaccgtctcgccgtgcggccgggcgcaaggccggtccgacagaaagtgcggcggcaggccccggaacgtcaagccttcatccgcgaggaggtggcgagacttctggaggccggattcatccgtgaagtcatccatccggagtggctggcgaacccggtggtcgttcccaaggcgaacggcaagcttcggatgtgcatcgactacaccgaccttaacaaggcatgtcctaaggatccttaccccctgcctcgcatagatcagatcgtcgactccactgcggggtgcgaccttttgtgttttctagatgcatactctggttaccatcagattcgcatggctagggaggatgaggagaaaactgcgttcattacccccgtaggaacctattgttatacatcaatgcccttcggcttaaaaaatgcaggtcctacttttcaacgtactactcgaatttctttgggtagccaaataggacgtaatgttgaggcttatgtcgatgacttggttgtaaaaacgcgcaaccaagaaactttactttcagatctagcggaaacttttgagaacctccgctccgcccgcataaagctgaaccccgataagtgtgtgtttggtgtacctgcgggcaagcttctcgggttcttggcctctgcccgaggcattgaggccaaccccgagaagattcgagctatcgagcggatgcgcccccccagcaaacttagggatgtgcaatgcgtcaccggttgcatggccgccctaagtcgtttcatatcaaggctgggagagaaggcgctacctttgtttaagctcctcaagcgctcggggccgttcacttggacggaggaagctgacaatgccctcgcccagttgaaggcgtatctcagctctcctccggttctagtcgccccggagccaaatgaacccctgctactttacttagcggcgaccccccaagtagttagtgcagcgttggttgtggagcgcgatgaggacaatcctcattctgcgcacccccactctgtgccgacttggcccgggagcaggcagggaggagaagcccccgagtcggacggtggcctacggcccctgacgaccggagtcggccctctgcccgcttgtcagacggtgctgggtgcccccgacccacaggaaggccccgaggccactgcgggaaggccgcacctatcgccctttggccccgaggctaaccctgtgctgactcgacccgggagaaagcagggagaagaggcccccgagccgaacggaggccagaggcccctgacgaccggagctggccctttgcccgcttgtccgatgacaccaggagcccccgacccccaggacggctccggggccactgtgggaaggccgctcctgtcgtcctccgaccccgaggtcatcggcacagaagacgagtgcgccccaaggggccacttggacgaagaacgccccggggatacggcccctagcaaagaagatcggccccaccgaagggtgcagcggcctatctactttgttagtgaggccctccgggacgccaagacccgatacccacaggcccagaagatgctttacgctattctgatggcctcgaggaaactgcgccattatttccaggcgcatcgggtcactgtggttacgtcttaccccctcggtcaaatcttgcataatcgagagggtacaggacgagtggtaaaatgggcaatcgagctttctgagttcgatctgcactttgaaccacgccacgctatcaagagccaggccctcgccgattttgtggcagagtggaccccggctccagagaccgtctcaatgcccgaggctagcacgaacccctcacagctgcctcatgccgcccactgggtgatgcaattcgacggttctctgtctcttcagggcgccggtgcaggggtcacgttgacctctccaaacggagacgtcctcagatacttggtccgtctcgactttcgagcgactaataatatggcagagtacgagggactccttgccgggctcagggtggcagccgggttggggatccgccgcctcctggtgttaggcgactctcagttggttgttaaccaagtctgtaaggagtaccggtgctctgatccgcagatggacgcctacgtgcgccaagtacggcgtatggagcgccattttgacgggatagagcttcggcatgtgcccagacgggataacatgatagccgacgaactctcacggctcgcgtcctcgcgagcccagaccccaccgggcgcctttgaagaaaggcttacccagccgtcggcgcgacccgatcccttaggggagacggatgcgcctgaccggcccccgaggcccgtcggagtccaggcctcgggacccgaagggagcgctccaagctcccttagattgattgcttggatctctgagatccaaacatacctcacagataagactctacctgaggaccgcgaagggagtgaacgcgtacaacgcatttccaaacgctatgtgttggtagaagggaccctctatcggcgcgcggctaacggaatcctcctgaagtgcattcctcaggaacaaggcgttgagcttcttgcagacatccatgagggcgagtgcggagcccattccgcctcgcgtaccctggttggcaaggcctttcgtcaaggattttactggccgacagctctcaatgacgcagtcgatctggtccggcgatgcagagcgtgtcagttccacgccaagcaaattcatcagccggcccaggccctgcagatcataccactgtcatggccatttgctgtctgggggcttgatatcctgggaccgttcaaacgggccccgggcgggtttgagtatctgtatgttgcgatcgacaagttcactaagtggcccgaggcttatccggttgtcaagattgataagcactctgctcttaaatttattaagggcatcacggcccgttttggagtgcctaaccgtattattacggataatggcacccaattcactagtgaactcttcggcgactactgcgaagacatgggcatcaagctctgcttcgcctcacctgcccaccccagaagcaatggccaagtggagcgcgccaatgcagaaatcctcaaaggccttaaaaccaagaccttcaatattctcaagaagcacggcgattcatggatcgaggagttgccagcggtgctctgggcgaaccgaaccacaccaagccgagcgaccggggaaacgcctttcttcctcgtctacggcgcagaagcggttctcccatctgagctcaccctgaggtctcctcgggccaccatgtactgcgaggctgatcaagatcagcttcgtagagatgacctcgactacttggaagagcgaaggcggcgcgcggccctccgagctgcgcgctaccagcagagcctgcggcgctaccatcagcgccacgtccgggcccgatcactctgcgtcgacgacctcgtcctacgccgcgtccaaacgcgtgctggattgagcaaactctcaccaatgtgggagggtccgtatcgagtggtcggtgtcccccggccgggctcggtacggctggccacgggcgacggcacggagctgccaaacccgtggaacattgaacaccttcgtcgcttctacccttga

SEQ ID NO: 87113 - DNA, 549 bp, Oryza sativa
  unsure (1)..(549): unsure at all n locations
  Clone ID: PAT_MRT4530_86090C.1
gnaattgtaatacgactcactatagggcgaattgggtaccgggccccccctcgagttttttttttttttttttaggttacaatatctatagtaaaattttattcgacatcacaagagcattacatagtatccaatacaatcatgtctccttatcctatcatgttttcgaattcttaatcttatcaagaaaacaatctcatgctttcgaatctggtttcccgagaacccttcgcaaggnatgatccccgccaatttattattgacttgtttattaaccaggtccccatttgtgttctgggacacttacattgaacganctgaccacccaagtgtcaactctcccctaaaacatactttccaaaccctacaatggatgaaagatgagaaaaatcaccagggtcattcggactgaatacntcccaccttaaattgtttctgtacgaaagcttttatgtcaaaagcatcaccagctgctgtctttgtatganacctctctgttatgatccnnatattaaattacagtgtacatcnaagccgatccaaaaattt

SEQ ID NO: 87114 - DNA, 466 bp, Oryza sativa
  Clone ID: PAT_MRT4530_86091C.1
cccagctcgcgcgcgcgcgctcggactgacccccacccccaccgaggcaaagcctcgtactacttccctacaccaccaccgcgcgccgtacgcgcggctgcggctgcggctgagggcgaagccctccacctgctggcataactagtcggagagataactaaccaccaaactaataaacccgtcctccctctccacccgatgggctcaatccggagtatgctacgcctgaaatgagaccgtccaattctggacgagccgaggtgacgcatgaaggacatcgacatgaggatcacaagcatgggctgatggaagacgatggacatataaggcatcccacaggccatcctcaaggccctcgtcggctactaccagaagtacgtcgtaagttttttggattaaagggggcatggccatttttggccgataggagcgtactttacttatggccgaccccaggcgctgcgag

SEQ ID NO: 87115 - DNA, 121 bp, Oryza sativa
  Clone ID: PAT_MRT4530_86092C.1
tttggtcttcgtctccgtctccgtccttggggtgatgttcaaattcagtcgggttggcttgccagcaatggcgaggctagccggcgatgctgctctctcgttggtgctcgtcttgctcggc

SEQ ID NO: 87116 - DNA, 117 bp, Oryza sativa
  Clone ID: PAT_MRT4530_86093C.1
gggggagaaagaccatgaaaggcacactaagcctgcgggggtagtaacttaactttggcaaaagataaccggctgcaaggagacctgctccatggtcagggggtaacagcacctttg

SEQ ID NO: 87117 - DNA, 807 bp, Oryza sativa
  unsure (1)..(807): unsure at all n locations
  Clone ID: PAT_MRT4530_86094C.1
ggtccggattcccgggtcgacccacgcgtccggtgattggtcgctcaatcgttattttttttggtttgtcagttggtcgatcccactttcctcaagtttgatttctcgttaggaagatctttccgctcgagagattctgattccttttcgattccatcccgtccttgtatggacgggccgcagtatcggattagcaaatccatgtgaataacataagctagattaacttgtatggtatttccgtatttatatcccgatcctaccattcaccgaaagattttttttaaaaaaaaacttgtgtggtaaaaatatttgcctgtgttgtgctaattatgcgttagtttgatgaatgaatttttaccttgtatcttcatgcttactacatgtgtgcagtcatggtatcgagggaacctttttaaggctaacacactaggatttcatgatttgtctatctctttccaccaccaaggcaccaagctgatatcctggttgcagcagcaccatgggtggagaagatgaggttcacggagtgtaaaggtcatctagtgatgggggttctgatggcagggggatgacttggggcattttgggggtgaaggaaggctaggcacaaaccctcttgacaggacagcggtgggttatagatcatgtttaggtttgttctggtaggattcgatggtgccaatgcaggatggtatttatcgcacctggacaataaggttttggcaaacctttatagntagattttttggttctagaaagggaataagtttaaacgttctgaggagcattgatgatttcgaccac

SEQ ID NO: 87118 - DNA, 555 bp, Oryza sativa
  Clone ID: PAT_MRT4530_86095C.1
atggcttctgcaagcagctcaagccactcgagtcgcaagaggaggaggccctcaatcccgctgattaagtgcccttcatgcggggtgaagcagatcttggagctaaccgcgaccacggaagctaatcgaggtcgcattttcttcacatgtccagaccacaaggatggaagtggttgtaatttctggtattgggaggaagcctacatcaaattcctgaagaggagtggcttcatttatgaagctgcctgtgcagagttgctgaaagaggccaaaatgaaggatggagatgagctgaagaagagcagtgctcaggaattcaagaaggaacccgatgttggacatttcaaggagctggaagatatgattttcattttgaccaagatgatggtgttgttgaagctgttcctagctggtgcaactgctgggactgagattcaacatgagactgagtttgcacctgagattgagattgcacctacagagaagacatgtacttgcaatgcatctccatacctgtcacaccccaatctgataccgccgtacaacggcacctga

SEQ ID NO: 87119 - DNA, 468 bp, Oryza sativa
  Clone ID: PAT_MRT4530_86096C.1
atgcctaagtccctaaaagaacgtgacaggccacacctaaaaatatgggctgcagacatattaggcctagacctaaattggcatgaagatgaaatgaccactatgaagatgatatcacccatcaaagctgatgaagatgtttgtagtggcgagcacaccagtcggcggcggcgaaggcaaaccagtgttgaagacgtagacgcccaacaacagcgggacaataggccagccgtgcaggcggagacactagtcggcgacggcgaaggcaagctggtcggtgaagacgtaaacacccaacaacagcggcataataggccagccgtgcaggcggagacaccagtcggcggcgacgaaggcaagccggtcggtgaagatgtagatgcccaacaacagcggcataataggccagccgtgcaggcggagacaccagtcggcgacgacgaaggcaagccagcgatgaagacgtag

SEQ ID NO: 87120 - DNA, 141 bp, Oryza sativa
  Clone ID: PAT_MRT4530_86097C.1
atggtgaaggctgctttgatcaacggggaagaggaaatggaggagtctgtcgcgtgtgggatactgggatgggaggatgagggccttcacatgaagctcggcatcgcaaatgaagttggccttgttcatgtctacgaataa

SEQ ID NO: 87121 - DNA, 2018 bp, Oryza sativa
  Clone ID: PAT_MRT4530_86098C.1
acaccaccgttattgggcgtctatgtctccactgccggcctgccttcgccgccgccgactggtgtttctgcttacacggttggttggtcacaccatcgttgttgggcgtctacgtcttcaccaaccggccgccttatctgctgccgactggtgtcctcgcctacacggtcggttggcacctacgtcttcaccgaccagccgcctcatcagccgccgactggtgtactcgcctacacggttggatggtcacaccaccgttgttgggcacctatgttttcaccgaccggccgcctcgtctgccgctgactggtgtcctcgctttcatggctggcttgttatgctgctgctgatgggcatcatcatatttcaccatcgaccgccttcgtcgccactgactggtattttcgcctatacggttggcctcttacgctccaagaatggatcagtcagaacatcaccatcagcttgccgtcgtcgccgccgactggtgtcctcgcctatatggttgggtggtcacaactcacaccgctgttgttggacatcgttgtcttcaccgactggccgcttcgtccgccgccgactgatgtcttcgactatacggttggttggtcacaccaccgttgttgggcgtctacgtctttaccgtcggcttgccttcgccaccaccgactggagttttcgcttatacggttggttggtcacaccaccgttgttgggcgtctacgtcttcatcgctggcttgccttcgtcgtcgccgactggtgtctccgcctgcacggctggcctattatgccgctgttgttgggcatctacatcttcaccgaccggcttgccttcgtcgccgccgactggtgtctccgcctgcacggctggcctattatgccgctgttgttgggtgtttacgtcttcaccgaccagcttgccttcgccgtcgccgactagtgtctccgcctgcacggctggcctattgtcccgctgttgttgggcgtctacgtcttcaacactggtttgccttcgccgccgccgactggtgtgctcgccttcacggttggttggtcataccaccgttgttgggcatatatcacttcaccattggcttgccttcgtcgccaccgactggtgtctctgcctgcatgcctggcctattatgccgccgttgttcaacgtctacatcttcactgaccggccgcctcgtataatgccaactggtgctatcgtgttaacggctggctacgtcgccgccatcgctaataggcatcatcatcttcatgcccttgcctctacagctggtttataccactaccactactgatggacgtcatcttcttccgtcgccgactggttatgccgccgctgactggtgtttttatcttcacaactacgcgtctacgctaccggtttgcttctgttgccgccgactcgtgtttacttcatcacggctatgcaattttgtcaccatggtggagcgacttcatctttattatctttggcaccggcaaactataatgcctctacttcacgagcttcgttatttcaccaaccacgacgtctacaagagcctcgacatctcggcttgcactaccaaatttgacgtcgtgttaatctactactacaagtggttctccaattttcaagaattctactcgacgacaagaagctacagttctcgactctatgttcagttgtttcttgactgaccaaagagtcgggggctatacaaatataagactcctcagtttcaatgaattgtacaacagcctctactttcctccaattatttcgtcttcacggttggcctactacgcaaatgcctatgggagacctcatcgttatcattgattgctacactactggatcaacgatatcatcatctttatcaatatcctgtcaagcctcttcaacatagcctactctgctgccgttgatgggcaacttcgtcatcatatccatctctgttgccgctaattatcattaccgtcggatgcgtttgccgtcgccgtcttttttgttcatcttta

SEQ ID NO: 87122 - DNA, 2916 bp, Oryza sativa
  Clone ID: PAT_MRT4530_86099C.1
tcacatctcttttttttttttttttttttttagaacaaaaggcaaaaccaatatattgatgaaaacaattgaaggtcactcctgtgatgtacatatatcctgaagctatcgtaatacacaattgtgaaataatacattgggcataatcatgtccatataaatgattgggctagtttacaaaatgggaatattctcgacagaaagcgaaagaaaaaaaaagaaaagaaaaattcatccttgtacaacacttgtatgacgatggcgcttcacatcccagttgaagacgtcctgcctattctttgtgcgccaagctttggctgagctggctttgttcctcgacccctacctgatgaagctagaggtctagctttggttgatggtgggggtgcagcgatggcaccccataaatcgtcactgtttgctgctggtggtggcttcaagggcttcccagctgatttcggtggaggtgcagctatcgaaccccagaggtcatcgtcatcattgtgcgacgttgaaggtttgatgtctgaagacttcgatgcatttttgggtgctggagcagctatagaaccccatagaggatcctcttctggtttgggcacctttggttgatttaatcttgacgaatttgatactggttgttttggttgcgccacaggacgtttctgagcagcctgtatgttagagagaagagatggtggaggcttctcgtcatacggatctacatcatcccatcctgtcatgatcactaccattctcttcctgagtattatcgttttcaatttcaccccacccatccaccgaggaccttgctgatgctggtgcagtttgatcaagagagctacaagtggatggtgcatatgctacggtggaagatctattatctgcatgtgacactggaggttgctgaaatttgagagttgctagcatttgcactagaaaccggaccatggtcagaaccttttccctactgacagtaaatgctcatagccaaccccagtaaaccagcctttccaggctttaactggataccagtagcttcggctgcgctgttgtctcccatagtaagcttttcatgatgttgttttgctatttgcaagaattgatcagtagcctggaaagccttggtcctcacatcactatctggatcaaatgtgaggacaacaacgttaggcagaatacgagttgcaatctctgtcatttcatagtatgaactagtgacacttagcgccatgatgccagctgctcgagcaggggggaaggtatcacgtaatgcacggacagtaaatgcgttgatcaatacccttttcctagtcccataattcatgtagtttgcaatatttccaagaagaattgtagtgtttgtcctgatcgcaggttcttcatcagactgaatcttagatagatacttcaagagagatcctgaaatcgtacgctgatagtttacggaaaaagctatctttctcaacactgtcctttaagttaagaacttccatgaactgtatggtctctactaacttgttctggaaaaactcactgttgtcaataagtttagaagggttcattctacgagaaggggcagaactcaagagcctctggtaatctggaagtaaagactttgggattgaagcagtgttccgaaggtcctctgtcctggttagctttgcaccagaaaagagctcataaattaaacaccccagtccccaggaatcaattgcccatggaggtgatttcctaattgacacccaatctgactttgttagctccattggcttatattgtgttccaactaaccattcaaattgcaacatggggctattagaggcttcgttgttagcatcaaattcagaaagaacagcacaagcatgaagcttccggtctcgactatgagtaacaactacgctcgtcacgcatacattcccgtgaacaagcttgcagtcgttgttgagaaagctcacagcttttgatatctggtgaagaccccaagcaaagtactcatctctctgtgtgcctcccaggttcagttccttaagcttttctgaaagtggcgtaacaggctctgttacaatataaattgtatgcttcatggcaggtccatcaggaacttctgcttcagtactgtgaagaaaggataaaatgtttggatgacgcactgttcgtaatctcttaacaccattccgaccagcaacttagaggcttcgttgttagcatcaaattcagaaagaacatcaaaagcatgaagcttcaactctagagtttgagtaacaactacgctcgtcacgcatacattcccgtgaacaagcttgcagtcgttgttgagaaagctcacagcttttgatatctggtgaagaccccaagcaaagtactcatctctctgtgtgcctcccaggttcagttccttaagcttttctgaaagtggcgtaacaggctctgttacaatataaattgtatgcttcatggcaggtccatcaggaacttctgcttcagtactgtgaagaaaggataaaatgtttggatgacgcactgttcgtaatctcttaacaccattccgaccagcaaccaagtgcctgtcctgaggattgctccctgacagagaaaagattgacacgggcgacccatcatccttggaggtgccgcggtggtgcgtccacgagccccacgcggaggcgtagggctcgccgatggtgtaggggaagtccttgaggcccgatccggatcccgcgaccacctccttgaggaacttgaacattctgccctaggattatcccggcgcgattcccccctcgggttttttcgatcgcctcctccccgcgcggccgccggtgggttccgcccgccgacgcggcgccgaggtagatccgggcgggcaggaggaggcgtcgggtgaagcggagcctgcagcccggggatccacta

SEQ ID NO: 87123 - DNA, 886 bp, Oryza sativa
  Clone ID: PAT_MRT4530_8609C.1
tctgccctacaacgcggtcctagggaggcccgcgttggtgaagttcatggcggcggtccactacgcctaccttcagatgaagatgccgggccccggtggccccatctctgtccatggcgacctcaaagtcacgctcgcttgtatggagcagcgcgcggaccacctcgccgacgcgtccaagcccgaaggtggcgacaagaggcttggcaccttccgtccccgccgccccgaggcagcggatgatcacatgcgacgaggtcccggtcaaggaggttgccctggggcgacggcccgtccaagaccacacgaatcggtgaaagtgcggcggcaggccccggaacgtcaagccttcatccgcgaggaggtggcgcgacttctggaggccggattcatccgcgaggtcatccatccggagtggctggcgaacccggtggtcgttcccaaggcgaacggcaagcttcggatgtgcatcgactacaccgaccttaacaaggcatgtcctaaggacccttaccccctgcctcgcatagatcagattgtcgactccactgcggggtgcgaccttttgtgttttctagatgcatactctggtcctacttttcaacgtactactcgaatttctttgggtagccaattaggacgtaatgttgaggcttatgtcgatgacttggttgtaaagacgcgcaaccaggaaatgttactctcagatctagcggaaacttttgagagtctccgctccgcccgcataaaactaaaccccgataagtgtgtgttcggtgtacatgcgggcaagcttctcgggttcttggtctctgcccgaggcattgaggccaaccccgagaagatacgggctatagagcggatgcgccccccccagcaaacttag

SEQ ID NO: 87124 - DNA, 376 bp, Oryza sativa
  unsure (1)..(376): unsure at all n locations
  Clone ID: PAT_MRT4530_860C.1
ttcggcacgagggcaagatcaaggcgctcgggtagatggtgctgtcggtgaaggtcgacgagcgtccgtcggcggttacctctacttcggacgcgtgggcaacaaggaagagttccacaaggagacctgccgcaaggtgaaagcacttcatcagtatgactgtctgcgtgctaacaaggcgacgtctgcctggggactggaggtccgtgtgccgttcctcgacaaggagttcatcaacgtcgccatgagcatggaccctgagtggaagatgtacaatgctgatcttggtcgcatcgagaagtgagttatgaggaaggcgttcgacgacgaggagcatncttacctgccgaagcacatactgtacaggcagaaagag

SEQ ID NO: 87125 - DNA, 513 bp, Oryza sativa
  Clone ID: PAT_MRT4530_86100C.1
atggggaacaacctgagatgctgcctggcgtgcgtgctgccgtgcggcgcgctggacctggtccggatcgtgcacctcagcggccgcgtcgacgagtacggccgcgccgtgtccgccggcgaggtgctggcggcgcaccccaaccacgttctgagccggccgtgctcgtcgcagcagggggcggcggggcggatactcatcgtgtcgccggagtcggagctggagcgcggcgagatctacttcctcatccccgccgcctccgtccccgacgccaagaggaggacgagcaccggcggcggcggcgccggccgcgggcaccacgtccgcagcaagtcggagggcagcgccgtcgccgccgatcggttgggcagcccggccggcagcgcgtcgccggagacgacgaggatgatgagggcgcagaagcagcagcaccaacaccggcggcgcatgagcaccggcagccatgcctcgccgtggcagccgcacctctcgtgcatcaccgaggatccctga

SEQ ID NO: 87126 - DNA, 447 bp, Oryza sativa
  Clone ID: PAT_MRT4530_86101C.1
aaaggcaattaaacattttccaaatggaaatgggggcaaataaaaatgaaccccgtactcaaccccctttactggcataagggggcctcaaaccttacccaatcaagtaaaagccccccaaaaaagctgggccactaattgattacccaaccccttgatgtttcaaggggttccaaatacaacacctagcagaagaatcctaaaattaaagctccaacggggaggctttttggcttcaaaaataagctttgcccctgggcctcaacctccgttgccggggcctcctttttttccgggggtggtggcataagttggtaaaatttgcccgccttgcccaacactatttcaaatttggctttttggataagggaactcctaaaaaatttttgacggcaacaggagaatgcaaaatttttttctcgacaggagggccattatttttcaaaa

SEQ ID NO: 87127 - DNA, 633 bp, Oryza sativa
  Clone ID: PAT_MRT4530_86102C.1
atctgtaagggggatgcccttccaagagtactcatattgtgttgctagaacgactttccgagcgcatgcattgggagttgctgctgcttgggttgtgcaatccatagttgaggtttacagatgtttttccggtaagccttccaatgatcaggcaatgtttgatgagatggacaaagtcaaactgttcgggaaaaagatatacggcataaccgtcaaatgcgggttctctttggtttttgcctcaataggagctggcattggggtccttgtgcatccagtacatggacagtggcttggttgtacattgggagatttcgcgggaccaattgtcgccatacttgttttcgagaagttccagttgccgctctaaggtgaaaaatgaaaccccgcggcttctacgcaactagccttggtggagatctccatgactccatgagacctgacttgaagttcgatgaataatttagctgtcagcctctatgcgcaaaagtccatagcttgttttattttttttcaagacacgcctttgggcatcatgagatgttgatattatgttctttagattttgaaactcaggctaacagttttgactaattggttttctgaactttcacaataaaaaaaaaaaaaaaa

SEQ ID NO: 87128 - DNA, 462 bp, Oryza sativa
  unsure (1)..(462): unsure at all n locations
  Clone ID: PAT_MRT4530_86103C.1
gactttgctccttcattttcttcttccctcctaccccactccggcgcgtcacctactctcctcgcgccgctgccccctattctcctcacagtcacagcaccgccgatgcctcttctcgcacccaatcgcatcgccttacctccatgttgctaccgcggggccagatccgccggtgggaaggtcatgcccgccggatccgtcagccatgacctccctgccggcgtattcggtcgctcggaggcgagggctatcacgggaggcacatcggcaacatcgacgacggtcgtctctccatggcagcgcactccacagggaaaggctctgctctcccaccctcttctttattctcactctccctctcaacgtgatccagatncatagctgggtggggaagttgaatatgatctagagctggtggggaatcgtgcaaccccttcantgccggtcatccatncaatgtgc

SEQ ID NO: 87129 - DNA, 1085 bp, Oryza sativa
  Clone ID: PAT_MRT4530_86104C.1
gaacaaaaaagatgatttgtcgatctatatacatgtgcaattaagctgcaaaaccatgcaccgggggtcataattaattaataaactgatgatcgatcgagctctctgatcatgatcatttcatagaaagagtagtagtgtaattctttgtgaatgaattaactactaagtacatagcagtgatttaatgaggtaagagtacgtaatcagaagttgaggacgctggcgtagtagggcgaccaggtctccatccatgggctccgcagctgcgtcaggaatggctcctgcatccactccagcccgctctgcggcctcgccacctccagctgcggcaggctcagcgtcgccgggcggaccagctcatgcgccgccgccgacgcctcatccacccccaccacctctttcttcatggcgtccgaggaggaggagatggagatggaggaggagtcctgctgcaggggcgagccggtgttgtgggtgccggaggacgtggtggagcgtgcaagctcctccatggcgaccctctgctccagctccttgagggagaccgccttccggtagaccttgcagagcaccatgtcgtcgtgttgcatttgcaattgcatggtgtcgggaatggcggcggcgtcggggaggcggtactcgttcatgacccagtcggtcttggtgccgcgaggggcgcggccctcgtagtagacgagcgtcttcttgaggccgatgaggcgcttggggtcggcggcgcagcggatggcgcggtcggagccggtggccttccagaagccgcgctccgtggtgcggctgggcctaccgccgccgccgccgccggtggcctgcttgcggtcgcgggggacgaagaagtaccactcgcgctcgccgatgcgggcgagtccggggagctcgcgcgggtcgtggcggtagaggtggacggtggggatgatgtcgaacttgagcttcttcccctgcaccacctgcttcaggtagaactccagcagctcctcctccgtcggatggaacctgaatcccggcagctgctccacctccacctctcctcctgccgccgtcgacctgctccccggctgctccat

SEQ ID NO: 87130 - DNA, 550 bp, Oryza sativa
  unsure (1)..(550): unsure at all n locations
  Clone ID: PAT_MRT4530_86105C.1
aagctttttttttttaggtacaatggctgcatgcgttttcagatcgcccagaaactggcctctgaaatctgaatttcgcaggacaaaacacggtcagaattttaaagcctgacgatcccgtcgcaggatcacacttgtgctagcttacacattttttttttttttttttttcccatcacaacaaagattgtactaccattccagactgaagatgagggtacattttgttcctaggtgttgccacttttacaggcactgtcctctccaatcctctaaacagtaaatcaccttcaccaccaccacacccccagacatataactgcagcagctgaatgtcacactgcaacacaagatagtttctaggaccaacatgaagagggcaaaataaaaaggagagaaaaggctacaaaattacgagtctccgatgagaaaatactccatctatgcggtaaatgcctttcgccatggattcttctgcaagagctgtctctaccacccaacagttaggaacaaagcagtatgtnnnnactannctcctcttgnncttttt

SEQ ID NO: 87131 - DNA, 3180 bp, Oryza sativa
  Clone ID: PAT_MRT4530_86106C.1
atggttgatgtggatcacgatctgctgcaagacatgttacgtgatgttgaggacctagcccagaatgagagagatggaatgaaattcagcaggttggctatgcatcctgttgagaacacattgcccgagacgacatacgaagcaaagcaggttctgtgtccactggggttagaggagaacttcaagctaagagttctattgttctgcaccattaatgactaccctgcactcggtaatctttccggacaaactataaaaggaaagaaggcatgctccgattgcaaggaacatccacgaaaccggtggctgaagaaatcacgaaagatgcctgctcccaaagatttgtccggagatgaggtccacaatatggtcaaggacataagcaatgagtttgggaagaaaagaaaacgtagcaagacaaaggagaaggaaaagaatgtgtgtgagagtttggttggcctgatgttgaatattcccgggaagacaaaggacgggttgaacgcgcgccttgatctacaggacatgaatattcgcagcgaactccagcccaaacgagatgcagagataggtaaagtgtacctccctccagcctgccacacactgtcggaggatgagaagatcgcaatgttatcatgcttgaaggatattaaagttccatcgggctattcagcgaggataagtaagtatgttaaattggacgatctaaaacttgttggaatgaagtctcacgattgccacgtgctaatcacacaaatcttgccagttgctatcagaggcattctaccaccgaaagtgcgtcacacgatccaacgtctgtgcgccttcttcaatgcaattggacagaaggttatagatcctgaagatctagatgggctgcagaccgatattgtgaataccctctgtcacctggagatgtttttcccactgtctttctttgatataatggttcatctctctgttcatctggtgaagcaaacaaaactatgtggtccggcttttctaagggaaatgtggccgtttgaaaggtacatgggagttctaaagtcgtacattcgtagcagagctaaacccgaggggagcatcattaaaggttacacgaccgaggaggctattgagttctgtgtcaattacatgtccgatgccgatcctatcggagttccagcgtctcgtcacgagggaaggttgtcaggtgttggcacaattggaaggaaaagaattaggcccgatcaagcgtcgtacgtgcaggctcattatgctgtgctccaacatatggcagaagttgtcccatactttgaggagcacttagcgaaaatccgagatgagaacttggggcgatctgatgcatggattaacagagaacataattctcggttcaacgaatggttcaagaatcgtgtgacaatgtccacggatgtcccaaatgagacagtacaattgttggggatgggaccgtcttggaccatagacacatggcaaggatacgatataaatggatacacattttacaccgtcaaacaagatgacaaaagcacagtgcaaaacagcggcgtccgtatagatgcattccaggatcaagttgggtcaaacacatactacggccgcattgaggagatctgggagctaaactacgtcaagttcaaggttcctttgttccactgccgttgggtgaatctacgcactagtgtcaaagccgacaaggaaggtttcactttagtagatctatctaaggtgggatacgccgatgaaccatttgtacttgcgaaacaggtcgagcagatattctacacaaaagacccttcaaacaagaagatgcacatcgtgagggatggaaagcgccaaattgtaggagttgacaacgtcgtcgatgaagaagaatacaaccataatcttcatgtaagacctcacattgaccttgacgatgatccccaagaaaccctagcgccgccgtcatcctccctcgccaagcccgccgccgtcgccaccgagcccgccgccgtcgccaccgagcccgccgccaccgcagtcgtcctccctcgccaagcctgccgtcgtcaccaccgagcctcctcggccctccattcagacctccgccgccgagcctcctcaccgacgaccctccccccgagcaggaagccgccgccgccaccgagcctttacaccgatcggaccagtgttggccttcctcgtcgtcgccgcccgcgtcctcaccgacccacgtcgccgacccccatagagcacgacgccgcccgcccggtgccgacctgcccgatcggcgtctccaccgaccggcgccgccctccaccgagcccgggcgccgccgagccccaccggccatcctcagacgacttcaagctcatgccggccgcagagaaggacattgcttggctaatgttcaaggagagctttgattatcctgcggagcatgaggaccgtctcaggcgggctgctttcaaggttatgggcactgcttggaagaacttcaaaactaagctagtcggcgagttcgtctacaacccggcaaatccagatccaagagagaaatttccttggatcacagaacaggtctgggaggaattccatgcgaagaagtcgacccccgagtccagagctagaagcgaggcatatcgcttgctccagaccaggaaccagcatccgcaccggcttggtaccactggatatgccggtaaggaagaggaatggcagcgtgaggatgaagaagcggaggaatcgtgcacaccgctcgtgtttggcgatatcccacaccctcgggctaggaactgggccagggctaggtaccagaaacatgatgatggcacaatcttcatgccaaatgcagaagatcaacgagtatacgaagctataaaggagttggttgccgagcaacaagcctcgcaagaggcctgctctcaaagacgcgaggacgacctcctcacgaaagcgttgggcaacaaggaacaccgtggacggacacggggcattgggtcttctgttccttggaagtatggatttccagactacgcgtggcagtacaagaagcggacttccaacaaggcggagaaagatgcacaccttgaagccaagatccaggagtcgatacgagctgagctgacatctgaattcgacgaaaagctcgagtcgatgagggccaagattaggcaagagatccgagaagagcaatag

SEQ ID NO: 87132 - DNA, 2953 bp, Oryza sativa
  Clone ID: PAT_MRT4530_86107C.1
tgtctatgtgcagattgcaagaatgagaatatgtttgatagcagagaggatgtacacggtcatctgatacaacaaggattcattaagggctatacatgttgggtgaagcatggagagcaagaatcaggaagtggagcagcagcagacagaagtggtgcgcataattaggaagatgaagatgagcatgacatgtttataccttctccattgggcggtgaaatggttgatgtggatcacgatctgctgcaagacatgttacgtgacgttgaggacccagcccagaatgagagagattctatgaagttcagcaggttggtcagtgattccgagacgcctctgtacgctggatgcaaagcaaaacacactaagttgtcagttaccttggacctaatgaagctgaaggcaagtagtggatggacagacaagagttttatagatcttttaggaattttgaaggctatgcttcctactgaggacacattgctcgggacgacatacgaagcaaagcaggttctgtgttcattggggttggaggtccgtagaattcacgcttgtccaaacgactgcatattgtaccacaagcaatatgcggacttggatgcttgtcctgtctacaaggcttctcgatacaagcgaaagaaaagtgctgacaaaggaaagaagtcaaagaggggtggtccgggaaaggttgtgtggtatctacctatcattgatcttttcaagagaatctttgccaatccgaacgaagcgaagttagtacgttggcatgccacggagagaaggaatgatggtatgcttagacacccagcggattcgattgaatggaggaatatcgatcgaaaacacaaagactttgctgccgaccctagaaacatgaggatatgtctgtgtacggatggcatgaatcctttcggtgacatgagtagtactcacagcacttggccagttcttattgcgaattataacgtcccgccatggttatgctttaaacggaaatatattatgttgtgcttgttaatccaaggtccgaggcaacccggcaatgatatcgatgtattcctggagcctgttatcgacgatcttgagattctttagaaagaaggtgtggaaacttgggatgcatatggtcaagagaacttcaagctaagagttctattgttctgcaccattaatgactaccgtgcactcggtaatctttccggacaaactataaaaggaaagaaggcatgctccgattgcaaggaacatacacgaagccggtggctgaagaaatcacaaaagatggtatacatgggtcatcggaggtgactcccgctacatcacgcatttagaagaaagaagaaaatttttaacggtaagagagaacttcagcctactcccaaagatttgtctggagatgaggttcacaatatggttaaggacataagcaatgactttgggaagaaaagaaaacgtagcaagacaaaggagaaggaaaagaatgtgtgtgagagtttggttgacctgatgttgaatattcccgggaagacaaaggacgggttgaacgcgcagtgaactccagcccatacgagatgcaaagacaggtagagtgtacctccctccagcctgccacacattgtcgaaggatgaaaaaatcgcaatgttatcatgcttgaaggatattaaagttccatcgggctattcagcgaggataagtaagtatgttaaattggatgatctaaaacttgttggaatgaagtctcacgattgccgcgtgctaatcacacaaatcttgccagttgctatcagaggcattctaccaccgaaagtgcatcacacgatccaacgtctgtgcgccttcttctatacaatcgtacagaaggttatagatccagaagatctagatgtgttgcagatcgatattgtgaataccctctatcacctggagatgtttttctcactgtctttctttgatataatgattcatctccctgttcatctggtgaagcaaacaaaactatgtggtccggcttttcaaagggaaatgtggccgtttgaaaggtacatgggagttctgaagtcgtacgttcgtaacagagctaaacccgaggggagcatcattgaaggttacacgaccgaggaggctattgagttttgcgtcaattacatgtccgatgccaatcgtatcggagttcctgcgtctcgtcacgaaggaaggttgtcaggtgttggcacaatcagaaggaaaagaattaggcccgatcaagcgtcttacacgcaggctcattacgctatgctccaacatatggcataagttggcccagacttgaggagcacttagcgaaaatccgagatgagaacttggggcgatctgatgcatggattaacagagaacataattctcggttcaacgaatggttcaagaatcgtgtgacaatgcccacggatgtcccaaatgagacaaccgtagacatatggcaaggatacgatataaatggatacacattttacaccgtcaaacaagatgacaaaagcacagtgcaaaacagcggcgtctgtatagatgcattcaaggatcaacttgggtcaaacacatactacggccgcattgaggagacctaggagctaaactacgtcaagttcaaggttcctttattccgctgccgttgggtgaatctacgcactggtatcaaagccgacaagaaaggtttcactttagtagatctatcaagggtgggatacgccgatgaatcatttgtacttgcgaaacaggtcgagcagatattctacataaaagacactgaaagagcatttatgcccctagtgggttttggtttattgatgacaaatggaacatgaaatgtcaaagatcaagaatatgagatcttcccgatgatcaaataaccttgacgttggtaaccctccaagtgaagaaacaatatggtgtgaaggtactcctattggtataactttg

SEQ ID NO: 87133 - DNA, 192 bp, Oryza sativa
  Clone ID: PAT_MRT4530_86108C.1
atgaaccctggtcaattcagagtggttggaccagttctgaccgggataagaggctgtgaagcccctcattattatgatgggacgggacggagcacgccgcctgacacactgacagggcgggggtacacagtcgccgtcccatcggtcattcgatcggtcacagaccggtcagatgcgcagcacgccgtgtaa

SEQ ID NO: 87134 - DNA, 4467 bp, Oryza sativa
  Clone ID: PAT_MRT4530_86109C.1
atggatcaatcaacaattgatcgaagttggatgtatgccaaaaatttgaaacgtcattctacggagtaccgaaagggcgtaataaattttatgaacgccgcggaggaggatcggataagaagaaacagtgattacatgtgttgtccatgtgcagattgcaagaacaagaatatgtttgatagcagagaggacatacacggtcatctgatacaacgaggattcatggagggctatacatgttgggtgaagcatggagagcaagaatcaggaagtggagtagcagcagacaaaagtggtgcgcataatcagaaagatgaaaatgagcatgacatgtttataccttctccattgggcggtgaaatggttgatgtggatcacgatctgctgttggtaagtgattccgagacgcctttgtatgctggatgcaaagcaaaacacactaagttgtcagttaccttagacctaatgaagctgaaggcaagtagtggatggacagacaagagtttcacagatcttttaggaattttgaaggctatgcttcctgttgagaacacattgcccgagacgacatacgaagcaaagcaggttatgtgtccactggggttagagaagcgaaagaaaagtgctgacgaaggaaataagtcaaagaggggtggtccggcaaaggttgtgtggtatatacctatcattgatcgtttcaagagaatctttgccaacctgaacgaagcgaagttagtacgttggcacgccacggaaagaaggaatgatggtccaaggcaacccggcaatgatatcgatgtattcctggagcctgttatcgacgatctggagattctttggaaagaaggtgtggaaacttgggatgcatatggtcaggagaacttcaagctaagagttctattgttctgcaccattaatgactaccctgcactcggtaatctttccggacaaactataaaaggaaagaaggcatgctccgattgcaaggaacatacacgaagccggtggctgaagaaatcacgaaagatggtatacatgggtcaccggaggtggctcccgctacgtcacacatttagaagaaagaagaaaatttttaatgcgaactctagcccatacgagatgcagagacaggatattaaagttccatcgggctattcagcgaggataagtaagtatgttaaattggacgatctaaaacttgttggaatgaagcctcacgattgccacgtgctaatcacacaaatcttgccagttgctatcagaggcattctaccacccaaagtgcgtcacacgatccaacgtctgtgcgccttcttcaatgcaatcggacagaaggttatagatccagaagatctagatgggctgcagaccgatattgtgaataccctctatcacatggagatgtttttcccactgtctttctttgatataatggttcatctccctgttcatctggtgaagcaaacaaaactatgtggcacagcttttctaagggaaatgtggccgtttgaaaggtacatgggagttctgaagtcgtacgttcgtaacagagctaaactcgaggggagcatcattgaaggttacatgaccgaggaggctattgagttctgtgtcaattacatgtccgatgccgatcctatcggagttccagcgtctcgtcatgagggaaggttgtcaggtgttggcacaattggaaggaaaagaattaggcccgatcaagcatcgtacgcgcaggctcattacgctgtgctccaacatatggcagaagttggcccatactttgaggagcacttagcaaaaatccgagatgagaacttagggcgatctgatgcatggattaacagagaacataattcttggttcaacgaatggttcaagaatcatgtgacaatgtccacggatgtcccaaatgagacagtacagttgttggggatgggaccgggactgtcttggaccatagacacatggcaaggatacgatataaatggatacacattttacaccgtcaaacaagatgacaaaagcacagtgcaaaacagcggtgtccgtatagatgcattccaggatcaagttgggtcaaacacatactacggccgcattgaggagatctgggagctaaactacgtcaagttcaaggttcctttgttccgctgccgttgggtgaatctacgcactggtgtcaaagccgacaaggaaggtttcactttagtatatctatcgaaggtcgagcagatattctacataaaagacccttcaaacaagaagatgcacatcgtgagggatggaaagcgccgaattgtaggagttgacaacgtcgtcgatgaagaagaatacaaccataatcttcatctcgtgccgaccgcagagaagggcattgcttggctaacgttcaaggagagctttgattatcctgcggagcatgaagaccgtctcaggcgggttgctttcaaggttatgggcactgcttggaagaacttcaagactaagctagtcggcgagttcgtctacagcccggcaaatccagatccaagagagaaatttccttggatcacggaacaggtctgggaggaattccatgcgaagaagtcgacccccgagtctagagctagaagcgaggcatatcgcttgctccagaccaggaaccagcatccgcaccagcttggtgccaccggatatgccgaagatcaacgagtatacgaagctataaaggagttggttgccgagcaacaagcctcgcaagaggcctgctctcaaagacgcgaggacgacctcctcataaaagcgttgggcaacaaggaacaccgtggacggacacggggcgttgggtcttctgttccctggaagtatggatttccagactacgcgtggcagtacaagaagcggacttccaacaaggcggagaaagatgcacgccttgaagccaagatccgggagtcgatacgagctgagctgacatctgaattcgacgaaaagctcgagtcgatgagggccaagattaggcaagagatccgagaagagcaacagatcccccaggccaccgctgctgctgcgcacaaagagttaggaagtcccaccgaaaaacgcagcagttgcgcatcaactgagttggcggaaaatccaacatcagtcgatagcgccgtcgaccacataacggaaccaacgagctgcaccctcacagttagggtgatgccgaccttcactgttccagcagccgagggacttgcgtacaagccgaccccagagacaagagtgcatggagcgcaactcagggccgactgtgcaaaagttcaagtcgactcggtgaagcccgaatacgagctgttccctctgaagtatccaccgaacgacgaggtcctctcactaggaaatgcccgtggtatcttcatccaatggcccaaggacctcattgagatcaggttgcagtacgacacggattttggggaggaccgaacggaggccgacagcaaggcgattcatgaacccccaccgatgaagaagagcagaaaggcacactcttcccctcagagaattactctcaataaacccgaagcaaaggggagaggaaggggaggaaaggtgcaggcctcgcttctagctccaagaaagctagatctgggcaagggccaggaagagactaagggcaaagaggtcaagaagaaatacgtcgctccacaggagttccaactaggcatgccattggttggagatgacgtgcttgccgcaatgggcaccgcttgcaaggaccttcacttatactacatggagaaatctaacgtcaggaagccaagtaaagctaccgatatccttggacagcacgatggaaagccattccttggtccaacaaattatatcgtggtcgacttcaaggatcttttcgacctctacaggctccgagcggtggacacaagcctccttaagtgctactccttgttaagttggcaatggtgtcagaagcatgcaccggaagttgccttcctttatccacaagtggtcactgtcacaaatctccagaatgaccgtcaaggaatggtcaactacatctacgacaccttgtggtcccgccgagacaaggagtacattatgtgtgcctataatcaatatgcccattggatccttctggtcataacacctaaatggagtacatgtcattacctgaactccagaattgataagaacgcatatgattggaccccaattcaactagcgatagatgaagcgtgggcccaatacgtgcaaagaggaggcctcaggaagacaggacatgacaccctcatccacaaaaaagacttcccggtgaagcaacaaataggtgaccagtgcggattccatgtgtgccacaatatgcgacttctgtatagagaaaaggtgaagactttggctgagtttgagggcacaataatcaagtctctgactaccagctttgaggaggcaatgatgaacacttattatgcaactgtgatgatgtaa

SEQ ID NO: 87135 - DNA, 433 bp, Oryza sativa
  unsure (1)..(433): unsure at all n locations
  Clone ID: PAT_MRT4530_8610C.1
ctgcagtaccggtacggaatccnnntttnggttgacccacgcgtacgaccacgcgtccgcccacgcgtccgattgctccgatacacacggtcgtcgtcaacatggtcgtcttgtcatcggcggtcgtcggtacggacgtcactattgctgtgtggggcctggtctatattcccacagccattactattatgaatgccatcagaaatccagggtcagtccatctcatgccattctggattctatttgagaatgtcatggccatgcaccgtatgcgtgcagctctaagcggtttacttgtaactgcacgtgcaaattattgggtagttactgaaaatgtaggtgatcaggtgaaggttgagcttgatgtcccatcttttagaccactgaagcccacttaatttgctgtatggatttacatttctgtgctcttttt

SEQ ID NO: 87136 - DNA, 270 bp, Oryza sativa
  Clone ID: PAT_MRT4530_86110C.1
atgacattctcggtgacattgagtcacctagaatgttaccgaatcccaatcccgcaactccacatgaacaatgttgtcgttacaactcaccggacagtgtccgtgaagacaacccctgaaatgggtgaagaagaggctgcagctatgccaactgctattttactcatgcaatgcaaggagttgaagacttcagtcctcacacctgccatggtctctgtactgtggacccatgataaatatgcatgcatgcttgtcatgagagggtcctga

SEQ ID NO: 87137 - DNA, 1143 bp, Oryza sativa
  Clone ID: PAT_MRT4530_86111C.1
atggagcaatcaacaattgatcgaagttggatgtatgcgaaaaaattgaaacgtcattctacggagtacagaaagggcgtaataaattttatgaacgccgcggaggaggataggaaaagaagaaacagtgattacatgtgttgtccatgtgcagattgcaagaatgagaagatgtttgatagcggagaggatgtacacggcggtgaaatggtttatgtggatcacgatctgctgcaagacatgttacgtgacgttgaggacccagcccagaatgagagagattccatgaagttcagcaggttggtcagtgattccgagatgcctctgtacgctggatgcaaagcaaaacacactaagttgtcagttaccttggacctaatgaagttgaaggcaagtagtggatggacagacaagagtttcacaaatcttttaggaattttgaaagctatgcttcctgctgagaacacattgcctgagacgacatacgaagcaaagcaggttctgtgtccactggggttagagagaatctttgccaacccgaacgaagcgaagttagtacattggcatgctacagagagaaggaatgacggtccgaggcaacccggcaatgatatcgatgtattcctggagcctgttatcgacgatcttgagattctttggaaagaaggtgtggaaacttgggatgcatatggtcaggagaacttcaagctaagagttctattgttctgcaccattaatgactaccctgcactcggtggctcgaagaagaaaatttttaacgataagagagaacttcagcctactcccaaagatttgtccggagatgaggtccacgatatggccaaggacataagcaatgagtttgggaagaaaagaaaacgtagcaagacaaatgagaaggaaaagaatgtgtgtgagagtttggttggcctgatgttgaatattcccgggaagacaaaggacgggttgaacgcgcgccttgatctacaggacatgaatattcgcagtgaactccagcccatacgagatgcagagacaggcacttcaggcctgacaatcaaaaataaacagcagcggactagcgggcctacggctccatcttcacaggcgctcaactggggtataagccaggactccacctaa

SEQ ID NO: 87138 - DNA, 1220 bp, Oryza sativa
  Clone ID: PAT_MRT4530_86112C.1
atggtgcataacatacaccgcagcgacaccggcggttgggacatgaagacagctgcgtataggcgtcagggagaagaagaggagtgcctcgatcgcatccccaccctattagctagaatcgatggagtggcaggcgcagctgacaaggagaaggacaacagccggcaatcgacagggagcagcgcgactggcggtaggcaggagctatgtgacggctgtgacgtccgagctcaaccgccgctgggaggtctaggagcctctgctcccacatcgccgctgcgggcctcctccgtttttggacttggacttggaagagctcgtcggcctctcagccctcctcgctgcctcctcgtcccccttgccggcctcccaacctcctccctctctgtgcgtgcttgccggcttccctgccgcctcctctcagcgcgctctcactggcatcctcatcccccagccagtctgcgccattgctccctctctgcgagtgctgagaagatagagaggtgccacgtgggtgccacgtcagccaaaaccgatgacaatataatactgttaagggaccttgttcgcactggttttgatgaaaatcgaattcggtataaagttaaggggcctcaattgaacttattgcaccccataataattgccgttagggatcgcaacacaggttcgggccagcagagggtgaaccatcgcgtgggccgcagcccaatatatatacaggtcgtgtactcactgggggtggttttcatgggtttgtatttctgtacattagaagagttgttacgagtggcatgggcaaattccattcacctccacgtggcgcggccagattcacggattcgctcccacgcacagccgtccgattgcatttcaacgcgtcaccgccgcctgattcagcacatccgccgcgtcaccgccgctgaccttcgccctgacctcctccccgctgcaccgaagcctctctatcccctgcgcctccacatgtcgcggctacgcgggcatctcgttggatctatcatcggcggcgaggaggcgtggcgatggtgccgaggttcatcggccggtggaggaacatcgtcgacttcaggagcgttcccaggttccgcatggtccccaactactgccactccgtgggagccgccgaggggggccagaactgtggctttcagatgatagtttgactatgcacacaatgcgttcgacgaaatgtccatggg

SEQ ID NO: 87139 - DNA, 3696 bp, Oryza sativa
  Clone ID: PAT_MRT4530_86113C.1
atgtcgtgcacgtacgcataccgcttcaagtttgtcaccatcggcgacgcaggcgtggggaaatcgtgcctgctgctgcagttcacggacaagaggttccgggaggtggaagatctcaccaccggcgtcgagtacggcgcgtgcgtcgtcgccgtcgacggcaaaaacactaagctccagatctgggacacgttcgccaaggagcatggtctcctctttatggaggcatcagcaaaaacagctcacaatgttgagaaggcattcatcctagctgctagaactgtacacaagaaaatcgaagatggagttattaatttattagacgagcctgctcccaaagatttgtccggagatgagatccacaatatggtcaaggacataagcaatgagtttgggaagaaaagaaaacgtagcaagacaaaggagaaggaaaagaatgtgtgtgagagtttggttggcctgatgttgaatattcccgggaagacaaaggacgggttgaacgcgcgccttgatctacaggacatgaatattcgcagcgaactccagcccatacgagatgcagagacaagtaaagtgtacgtccctccagcctgccacacactgtcgaaggatgagaagatcgcaatgttatcatgcttgaaggatattaaagttccatcgggctattcagcgaggataagtaagtatgttaaattggacgatctaaaacttgttggaatgaagtctcacgattgccacgtgctaatcacacaaatcttgccagttgctatcagaggcattctaccaccgaaagtgcgtcacacgatccaacgtctgtgcgccttcttcaatgcaattggacagaaggttatagatccagaagatctagatgggctgcagaccgatattgtgaataccctctgtcacctggagatgtttttcccactgtctttctttgatataatggttcatctccctgttcatctggtgaagcaaacaaaactatgtggcccggcttttctaagggaaatgtggccgtttgaaaggtacatgggagttctgaagttagaacataattctcggttcaacgaatggttcaagaatcgtgtgacaatgtccatggatgtcccaaatgagacagtacagttgttggggatgggaccgtcttggaccatagacacatggcaaggatacgatataaatggatacacattttacaccgtcaaacaagatgacaaaagcacagtgcaaaacagcgacgtccgtatagatgcattccaggatcaagttgggtcaaacacatactacggccgcattgaggagatatgggagctaaactacgtcaagttcaaggttcctttgttccgctgccgttgggtgaatctacgcactggtgtcaaagccgacaaggaaggtttcactttagtagatctatataaggtgggatacgccgatgaaccatttgtacttgcgaaacaggtcgagcagatattctacataaaagacccttcaaacaagaagatgcacatcgtgagggatggaaagcgccgaattgtaggagttgacaacgtcgtcgatgaagaagaatacaaccataatcttcattcgtcctccctcgccaagcctgctgccgtcaccaccgagcctcctcggccctccattcggacctccgccgccgagcctcctcaccgacgaccccccttcccgagcaggaagccgctgccgccaccgagcctttacaccgaccggaccggtgttggccttcctcgtcgtcgccgcccgcgtcctcaccgacccacgtcgccgacccccaccgagcacgacgccgcccgcccggtgccgacctgcccgatcggcgtctccaccgaccggcgccgccctccaccgagcccgggcgccgccgccaccgagccccaccggccatcctcaggcgagtcctccatcgcgccgccctctgctaactggaggcagaaattcagtattctgcaagacgacttcaagctcgtgccggccgcagagaaggacattgtttggctaacgttcaaggagagctttgattatcctgcagagcatgaggaccatctcaggcgggctgctttcaaggttatgggcactgcttggaagaacttcaagactaagctagtaggcgagttcgtctacaacccggcaaatccagatccaagagagaaatttccttggatcacggaacaggtctgggaggaattccatgcgaagaagtcgacccccgagtctagagctagaagcgaggcatatcgcttgctccagaccaggaaccagcatccgcaccggcttggtaccgccggatatgccgggctaggtaccagaaacatgatgatggcacaatcttcatgccaaatgcagaagatcaacgagtatacgaagctatacgccgtcgactacataacggaaccaacgagctgcaccctcacagttagggtgatgccgaccttcactgttccagcagccgagggacttgcgtacaagccgaccccagagacaagagtgcatggagcacaactcagggccgactgtgcaaaagttcaagtcgactcggtgaagcctgaatacgagctgttccctctgaagtatccaccgaacgacgaggtcctctcactaggaaatgcccgtggtaccttcatccaatggcccaaggacctcattgagatcagggttacagcgaggccaaccactgcaccaggcagtcgtccaccaaagagacccgcctctgctccttcagcccctcctgctcaagatcgtcatgcacaattttacgatgtgcagttgcagtacgacacggattttggggaggaccgaacggaggccgacagcaaggcgattcatgaacccccaccgatgaagaagagcaggaaggcacactcttcccctcagagaattactctcgataaacccgaagcaaaggggagaggaaggggaggaaaggtgcaggcctcgcttctagctccaagaaagctagatctgggcaagggccaggaagagactaagggcaaagaggtcaagaagaaatacgtcgctccacaggagttccaactaggcatgccattggttggagatgacgtgcttgccacaatgggcaccgcttgcaaggaccttcacttatactacatggagaaatctaacgccaggaagccaagtaaagctaccgatatccttggacagcacgatggaaagccattccttggtccaacaaattatatcgtggtcgacttcaaggatcttttcgacctctacaggcttcgagcggtggacacaagcctccctaagtgctactccttgaagacaggacatgacaccctcatccacaaaaaagacttctcggtgaagcaacaaataggtgaccagtgcggattctatgtgtgccacaacatgcgacttctgtatagagaaaaggtgaagactttggctgagtttgaggattatttctgcgccattactagaatttatattcctagtaatatcattaagaaatacttcgacaacatgaaagaagttgccaccatgggagcaaggaaaactttagcgatgttcaagtcactatatccccgaatggatataaatgttgctggagatggttttcttgatggcaccatcgatgagcaagccctggagctgattaatgaagctcaagagtccgctggaaaaatagcctttgatgtattagataacttctgtgaatga

SEQ ID NO: 87140 - DNA, 2640 bp, Oryza sativa
  Clone ID: PAT_MRT4530_86114C.1
atggagggctatacatgttgggtgaagcatggagagcaagaatcaggaagtggagcagcagtagacagaagtggtgcgcataatcaggaaaatgaagatgagcatgacatgtttataccttctccattgggcggtgaaatggttgatgtggatcacgatctgctgcaagacatgttacgtgacattgaggacccagcccagaatgagagagatggaatgaagttcagcaggttggctatgcttcctgttgagaacacattgcccgagacgacatacgaagcaaagcaggttctgtgtccactggggttagagcctgctcccaaagatttgtccggagatgaggtgcacaatatggtaaaggacataagtaatgagtttgggaagaaaagaaaatgtagaaagacaaaggagaaggacacatggcaaggatacgatataaatggatacacattttacaccgtcaaacaagatgacaaaagcacagtgcgaaacagcggcgtccgtatagatgcattccaggatcaagttgggtcaaacacatactacggccgcattgaggagatatgggagctaaactacgtcaagttcaaggtcgagcagatattctacataaaagacccttcaaacaagaagatgcacatcgtgagggatggaaagcgccgaattgtaggagttgacaacgtcgtcgatgaagaagaatacaaccataatcttcataaccctagcgccgccgccaactcctacttcgccgtcgtcgccaccgagcccgccaccgccgccaccgagcccgccgcctccaccgagcccagtgccgcctcccccgaccggcgatgccctccaccgagccaggcgccgccgtcaccgagcccgccgccaccgccgtcgtcctccctcgagcctccacaccgaccggaccggtgtcggccttcctcgttgttgacgcccgtatcctcaccgacgcacgtcgccgacccccaccgagcccgacaccgcccgcccggcgccgacctaccaaaccggcatctccaccgactggcgccgccctctaccgagcccggcgctgccgccgcaaactcctccgttgccgagcccgccaccgccgccaccgagaccgctgcctccaccgagcccaacgccacctccaccgaccagcgacgccctccaccgagcccagcgccgccgccaccgagccctaccgaccgtcctcagcaaggcgaaccaatgtcgacgacaactaatgggtcctcaagggcacgtactcctaggacagggaacaaaatccctaaggaacggttccgcataacagcggtggacgccgtagggttgccgacatctccaaggaaaatattgagccgatttaggtctatctgcggggtcatagggaggcagaaattcagtattctgcaagatgacatcaagctcgtgccggccgcagagaaggacattgcttggctaacgttcaaggagagctttgattatcctgtggagcatgagtaccgtctcaggcgggctgctttcaaggtctgggaggaattccatgcgaaaaagtcgacccccgagtccagagctagaagcgaggcatatcgcttgctccagaccaggaaccagcatcggcaccggcttggcaccgccggatatgccgataaggaagaggaatggcagcgtgaggatgaagaagcggaggaatcgtgcacaccgctcgtgttcggcgatatcccacaccctcgggctagcaactgggctagggctaggtaccagaagaattatgatggcacaatcttcatgccaaatgcagaagatcaacgagtatacgaagctattaaggagttggttgccgagcaacaagcctcgcaagaggcctgctctcaaagacgcgaggacgacctcctcacgaaagcgttgggcaacaaggaacatcgtggacggacacagggcgttgggtcttctgttccctggaagtatggatttccagactacgcgtggcagtacaagaagcggacttccaacaaggcggagaaagatgcacgccttgaagccaagatccgggcgtcgataagagctgagctgacatctgaattcgacaaaaagctcgagtcgatgagggccaagattaggcaagagatccgagaagagcaacagaacccccaggccgccgctgctgctgcgcacaaagagttaggaagtcctacccaaaaacgaagcagttgcgcatcaactgagttggcggaaaatccaacatcggtcgacagcgccgtcgaccacataacggaaccgacgagctgcaccctcatagttagggtgatgccgaccttcacggttctagcagccgagggacttgcgtacaagccgaccccagagacaagagtgcatggagcgcaactcagggccgattgtgcaaaagttcaagtcgattcggtgaagcccgaatacgagctgttccctctgaagtatccaccgaacgacgaggtcctctcactaggaaatgatcatggtaccttcatccaatggcccaaggacctcattgagatcagggttacatacgacacggatcttggggaggaccgaacggaggccgacagcaaggcgattcatgaacccccaccgatgaagaagagcaggaaggcacactcttccccttag

SEQ ID NO: 87141 - DNA, 2182 bp, Oryza sativa
  Clone ID: PAT_MRT4530_86115C.1
atgtcgacaacatgctcgtcggcattggcggcagatccggcctcccctgtcatcgcggcggtggatccagccacccccgtcgtcgcggcagcggatccggtcttccccgtcaacgcggcggccggatctggcctcgagctcgcggcggagaggcgacggcagcctgtggcatatcttgtagcaccatatgttgagttccatttggttcgatgtttgatgtcgcaattccgcggaagactacggaacagcagcagccacaggcactcgacggcggagcgaactagagatcaaagccttcaccttcctcaggtctacccaaaacaggagaacccgctgtggtttccctgcccgccggtccccgacaagagaagagagagaggggtccatgggcgggtcccacttggcagccgctcggtacaccatgagggcggctcacggcgcacaagcacgcccgggaaggagaagcacccgagccaggcggcacgccggcgacggccaacggcgcggcgacggtgcgacggagtacgggaaggggaaaaacggaaaggggaggagacgacggttctcaccgagcagacacggcggcgagaggtcgacggtgttgccggcggtgaggaagaaacggcgagaagcttcgggtcgtcggcgtcggcgtcgttcccgcggtccttgtactcgacggaggggtggacggggaagaggaggaagcgacgaagcggatggtggcgacgccgggctccgatgaggtcccgaccaccggcgaggggcggccggagttgcgacggcggcggcacaagaagagagcggcgcggcggccgcggagagaggagggagagggcggcgggcgttacatcttattcaccataatcacaccagtacaatatttggggtagcctatctaattgttgtcgacatagcggtcatgaaacaagagcaaacaatgctatctcttgaagcacatggccatgcaaacgctgttcctgaactgagtaagatggtaggggctgttcaagcattagttgtgcagtgtgaagatcttaaactgaagtactatgaagagatggccaagagaaagaaacttcataatattgttgggagaccaaaggactgcagggagcttttgtaccgttcaactccacgaatatgggctgctcgcatggtcttcctgtgctggcgagggcatcggctggtactgcaggcttggccgctgcaaggggtgccggcgccgtcggcagggcccagctgtccctgctcccaagggacgaccatgactgttgcagccatagtggtgcccacgctttgcaaggcagtgaatgtgaattaacgacatggtcagccacaaagcaggtctgcttggggattgccagattagcaagatcagtttcattggtggaggtctgtcacctggtgcacttcgtcatcggatcttcctcctcaactccgtcatgtgcagatccagcgcacggtgcgtcaccgttgtgaatgtcaaaccggttcaccttgcgatcatccaccggcttcctcgacgtcgtccttgaaagcgaccctgtgcaggcaaacaactttcgctgaaaacttcagcaaaggagcagttgaagaataagtgattgccgtcttcgtcttgatgcaagcagattggacaaggggcagaagcagaggtattgatctgatcatatatcgaggcagagccttccatgtgagagcttgagtgcaaccagcaggcggactgtactgtcatctatcttcttcgtcatcgaggtgcactgcattggtgacatcaggtcatgggagtggcgagatgagactgtgtactagagatgcctactttgtagatatcttgagacagtgcaggtacctaatgacattgatcggcatggggcgggagtagcacccttggactacactttattattgcacactattgaaatttagttttagactatgtttatgcatagcacaagttttgcgttgaacttgtaaaggtcatttaaagttctggtccttattttcacgtggaatttgtggagctaggatggtttggattgtgtggattatatcggtattgacttttcttataactacctgttttcacatggaatttgtggagctagaatggtttgtattgtgtggattatatcggtactgatttttcttataaaaaaaaaaaaaaaaaaaaaaaaaa

SEQ ID NO: 87142 - DNA, 179 bp, Oryza sativa
  Clone ID: PAT_MRT4530_86116C.1
cttgatagataaggttattgcctttgaacgtggagatttggtttttgtttttaattgtcatcccaacaaaacttacaagggctacaaagtttgatgtgacttgcccggttagatcaaaatatcaactaacttccaactcctctattatccttcattatctactttcatttttttcccaa

SEQ ID NO: 87143 - DNA, 502 bp, Oryza sativa
  Clone ID: PAT_MRT4530_86117C.1
atgctgaccctcgccttctctctcggtctctccgacgacggggactacaaggggagcacgctggtgttggacggccgcgtcgatttcggcggcggcggcgcggcggagcgcgccgtggtgggcggcacggggaggttccggcgggcgagggggtacagcctgatgaccaagtttggcaaccccacgcccagcaccggcgtcttcgagatggacacgggggaaaatgaatgtctactagaggtgaacgcgcgcttcgcgcgttgcaccagtggtgccaggagagggaaatcattgattacatctgtttgttggttctggtaggtatgtgaaccaaataatgcacacagcagcatatttattcagcaaagaaagttggaatggacggtattgtaggattgtaaagggcagcgctcatcgtcctaaactgaagctttatcatcccaaaccaatagttatattatcaagagtcctgaaaaaccacttctatggcaagagcaaataa

SEQ ID NO: 87144 - DNA, 4161 bp, Oryza sativa
  Clone ID: PAT_MRT4530_86118C.1
atggagagcaagaatcaggaagtggagcagcagcagacagaagtggtgcgcataatcaggaagatgaagatgagcatgacatgtccgaggcaacccggcaatgatatggatgtattcctggagcctgttatcgacgatctggagattctttggaaagaaggtgtggaaacttgggatgcatatggtcaggagaacttcaagctaagagttctattgttgtgcaccattaatgactaccctgcactcggtaatctttccggacaaactataaaaggaaagaaggcatgctccaattgcaaggaacatacacgaagccggtggctgaagaaatcacgaaagatgcctgctcccaaagatttgtccggagatgaggtccacaatatggtcaaggacataagcaatgagtttgggaagaaaagaaaacgtagcaagacaaaggagaaggaaaagaatgtgtgtgagagtttggttggcctgatgttgaatattcccgggaagacaaaggacgggttgaacgtgcgccttgatctacaggacatgaatatttgcagtgaactccagcccatacgagatgcagagacaggtagagtgtaccttcctccagcctgccacacattgtcaaaggatgagaagatcgcaatgttatcatgcttgaaggatattaaagttccatcgggctattcagcgaggataagtaagtatgttaaattggacgatctaaaacttgttggaatgaagtctcacgattgccacgtgctaatcacacaaatcttgccagttgctatcagaggcattctaccaccgaaagtgcgtcacacgatccaacgtctgtgctccttcttcaatgcaattggacagaaggttatagatccagaagatctagatgggttgcagaccgatattgtgaataccctctgtcacctggagatgtttttcccactgtctttctttgatataatggttcatctccctgttcatatggtgaagcaaacaaaactatgtggcccggcttttctaagggaaatgtgtccgtttgaaaggtacatgggagttctgaagtcgtacgttcgtaacagagctaaacccgaggggagcatcattgaaggttacacgaccgaggaggctattgagttctgtgtcaattacatgtccgatgccgatcctatcggagttcctgcgtctcgtcacgagggaaggttgtcaggtgttggcacaatcggaaggaaaagaattaggccagatcaaacgtcgtacgcgcaggctcattacgttgtgctccaacatataacagaagttggcccatactttgaggagcacttagcgaaaatccgagatgagaacttggggcgatctgatgcattgattaacagagaacataattctcggttcaacgaatggttcaagaatcacacatggcaaggatatgatataaatggatacacattttacaccgtcaaacaagatgacaaaagcacagtgcaaaacagcggcgtccgtatagatgcattccaggatcaagttgggtcaaacacatactacggccgcattgaggagatctgggagctaaactacgtcaagttcacggttcctttgttccgctgccgttgggtgaatctacgcactggtgtcaaagccgacaaggaaggtttcactttagtagatctatcaaaggtgggatacgccgatgaaccatttgtacttgcgaaacaggtcgagcagatattctacataaaagacccttcaaacaagaagatgcacatcgtgagggatggaaagcgccgaattgtaggagttgacaacgtcgtcgatgaagaagaatacaaccataatcttcatgtaagacctcacattgacttttcccgcctccttagaaccctagcgccgccgccaactcctacttcgccgccgtcgtcctccctcgccgccaccgccactgagaccgccaccgccgccaccgagcccgccgccgccgccaccgagcctctacaccaactggcgtcggccttcctcatcgtcctcaccgacgcccgacgccgcccgcctgacgctgacctccaccgagcccggcgccgccgccgcgaactcctccttcgccgagcccgccgccgccgccaccgagcccgccgccgcctccaccgaccggcgacgccctccaccgagcccggtgctgccgccgcgaactcctccttcgccgagcccggcgccgccgccaccgagcccggcgccgccaccaccgagcccccccggccgacctcagcggtggatgccgtagggttgccggcatctccaaagaaaatattgagccgatttaggtctatctgcggagtcatagggaggcagaaattcaatattctgcaagatgacatcaagctcgtgccggccgcagagaaggacattgcttggctaacgttcaaggagagcttcgattatcctgcggagcatgaggaccgtctcaggtgggctgcattcaaggttatgggcaatgcttggaagaacttcaagactaagctagttggcgagttcgtctacaacccggcgaatctagatccaagagagaaatttccttggatcacagaacaggtctgggaggaattccatacgaagaagtcgacccccgagtccagatctagtagcgaggcatatcgtttgctccagaccaagaaccagcatccacatcggcttggcactgccggatatgccggtaaggaagaggaatggcagcgtgaggatgaagaagcggaggaatcaaacacgccgctcgtgtttggcgatatcccacaccctcgggctaggaactgggccagagccaggtaccagaagaaggatgatggcacaatcttcatgccaaatccagaagatcaacgagtgtacgaagctataaaggagttggttgctgagcaacaagcctcgcaagaggcctgctctcaaagatatgaggatgacctcctcacgaaagtgttgggcaacaaggaacaccgtggacggacacggggcgttgggtcttctattccctggaagtatggatttccagactacgcgtggcagtacaagaagtggacttccaacaaggcggagaaagatgcacgccttgaagccaagatccgggcgttgataagagctgagctgacatctgaattcgacgaaaagctcgagtcgatgagggccaagattaggcaagagatccgagaagagcaacagaacccccaggctgccgccgctggtgcgcacgaagagttaggaagtcccacccaaaaacgtagcagttgcacatcaactgaggtggcggaaaatccaacatcggtcgacagcgccatcgaccacataacggaaccaacgagctgcaccctcacagttagggtgatgccgaccttcacggttccagcagccgagggacttgcgtacaagccgaccccagagacaagagtgcatggagcgcaactcaggagcgactgtgcaaaagttcaagtcgactcggtgaagctggaatatgagctattcccactaaagtatccaccgaatgacgaggtcctctcactaggaaatgcccgtggtaccttcatccaatggcccaaggacctcattgagatcaggattacatacgacacggatttttgggaggaccgaacggaggccgacagcaaggcgattcatgaacccccaccgatgaagaagagcaggaaggcacactcttcccctcagagaattactctcgataaacccgaagcaaaggggagaggaaggggaggaaaggtgcagtcctcgcttctagctccaaggaagctagatctgggcaagggccaggaagaggctaagggcaaagaggtcaagaagaaatacgtcgctccacaggagttccaactaggcatgccattggttggagatgacgtgcttgccgcaatgggcaccgcttgcaaggaccttcacgcatactacatggagaaatctaacgccaggaagccgaataaagctaccaatatccttggagagcacgatggaaagccattccttggtccaacaaattatatcgttgtcgacttcaaggatctattcgacctctacaggctccgagcggtggacacaagcctccttaagtgctactccttgttaagttggcaatggtgtcagaagaatgcaccggaagttgccttccttgatccataa

SEQ ID NO: 87145 - DNA, 2413 bp, Oryza sativa
  Clone ID: PAT_MRT4530_86119C.1
caccacccgcacacgtgaacgactaccgacaccggtacaagggtaccggggtcgacaaccgcagaacgggtacggggcaacaccgaaaggacgaggacggggcagcgagaggagagatccttaccaccatgcgacgaggcatgggaacgacaacgacgaacgggcgcggcggaggcggccgggaacgacggagacgaacgacgaggggacgactttggcggcgatccttggacgaaggcgagacgcggctggcacaaggcttaacgacgcggaggcgaggacgaagacgacgacgggggccacgacgaccgggaacgacgagaggacgacgaccggaactggcgaggaggcgatgagggcagccagcagcagctgcacggagactaggacggcgcggaacacgccgctgcgatgacgacgagggtggcagcgcagcgagacgacgagccggcgaggacgaacgaccgactggaggagtcgtcgacgaggacgaacggagacgacgataacgaacaccggcggggttcggatggaggggaggcgaggccgagggcaaccttgatgctgcgatgccagaggaggagatggcgacgtcggccggcgcacgggcacggcggaaggggttgccgaaggaattccggcgaggcggagggcgagaccggcgcgggcgatggcgttccggcgaaaccgagggcaggccggggtggaggtcgacgcggcgacgccgagggaggagacggcgcggccggcccgcaccgggggagaggaggctgctacgaggccgagggtggcgacggcgcagccggacggcgcacaggcgaggcgggaggtgcggctcctcacaaaagcgttgggcaccaaggaacaccgtggacggacatggggcattaggtccaccgttctctggaagtatggatttctagacaagcggacttccaacaaggcggagaaagatgcacgccttgaagccaagatccgggcgtcgatcagagtggagctgacctctgaattcgacgagaagctcgagtcgatgagggccaagattaggcaagagatccgagaagagcaacataacccgcaggccgccgctgctgctgcgcaagaagagttaggaagtcccaaccaaaagcgcagcagttgcgcatcaactgagttggcggaaaatccaacatcggtcgacagcgccatcaaccacataacggaaccaacgagctgcaccctcacagttagggtgatgccgaccttcatggttccagcagccgagggacttgcgtacaagccgaccccagagacaagagtgcatggaccgcaacttagggccgactgtgcaaaagttcaagttgactcagtgaagcccgaatacgagctgttcctactgaagtatccgccgaacgacgaggtcctatcactaggaaatgcccgtggtaccttcatccaatggcccaaggacctcattgagataaggattacattgcagtatgacacggattttagggaggaccgtacagaggccgactgcaaggcgattcatgaacccctaccgatgaagaagagcaggaaggcacactcttccccttagagaattactctcgataaacccgatgcaaaggagagaggaagaggtggaaaggtgaaggcctcacttctggctccaaggaagctagatctgggcaaggggcatgaagagacttaggggaaagaggtcaagaagaaatatgtcgctccataggagttccaactaggcatgccattggttagagacgacgtgctagccacaatgggcaccacttgcaaggaccttcacgtatactacatggagaaatctaacgccaggaggtaaaatagagctaccgatatccttggagagcatgatggaaagccattccttggtccaacaaattatatcgtggtggactttaaggatctattcgacctctataggctccgagcggtggatacaagccttcttaagtgctactcctttgcccattggatccttctggtcataacacctaagtggagtacatgccactacttgaactccagaattgataagcaggcatttgattggacccctattcaactagcgatagatgaagcgtggggccaatacgtgcaaagaggaggccttaggaagacaggacatgacaccctcatccaaaaaaaagacttctcgatgaagcaacaaataggtgaccagtgcggattctatgtgtgccacaacatgcgccttctgtacagagaaaaggtgaagaatttggctgaatttgaggggcaaattgccaagtctctgcctaccagctttgaggaggttttaaacaatttttgttgaagctgggcctacaagtccaaagaaataatctcataaggcccaaaacaccacgtcactagattgagaaatcaacggagagga

SEQ ID NO: 87146 - DNA, 8220 bp, Oryza sativa
  Clone ID: PAT_MRT4530_8611C.1
atggcacggggctctgctctgctcgacggcagtgtactaccgccttcccgcatcgtgaatgagaggcacgccggactgccgcgccgcttcatgccggagtccgccaccggtcgggagatagtgatgctgggcgaggggcgcccggcaccagactacccggggcggtccatcttcttcctccccttcgcgatggctgggctggtcccgccatttcctcatttcttcatggatgtcctggagttctatgacctccagatggcgcacctcacccccaatgcggtgatgacattggccatcttcgcgcatctgtgcgagatgttcatcggggtgcgcccctctcttcagctgttccggtggttcttcaccgtgcagtcggtgtcaccgccgtcggtggttggcggctgctacttccagccgcgggggccggtgttgaaccgctacatcccctgcggccttcgcaagaagtgggacgactggaagagcgactggttctacacccccctcgccaacgaagcgcgcctccgacttccaagccagcccccggcgcaggtctccagctggcgggcaccggtagatctgggggaggactacgacgccgtcctcgaccgcctggcgggcctgcgatcccaggggctcaccggggccatggtgtacggcgattacctccgtcgccggattgcgccgctccaacggcgcgcccggaacgcctgggagtacactgggcctgaagactacatgcggacccaccagggagccagatgggattgggctcccgaggacttcaagatcgtggtccaaagggtgctgaatcttagctccgcggaggcatctcgcattcctcaggagatcctccccctctgcagcgatcccgaccgcgcctccattctaaccattatgatggaggtcggggcctcagaggagagagcccctaagggccacgacggcgcgggcgagcgccgccgaggggaacaatctgccccaggagggggtcgtgcttctgggccccgcgccgggggctcggggagcagccgccctgccgacgcccaggggaagaggaagctgggaggaacacctcccccatctcctccccgagggggcggggcggcgcgtgccaacagtcggcgcccggagggggccgcgccgacgtcgcagcccgagggggagcgcaagaagaaacggctccgcaagacgggggagacggaaccatgccgggggaacctgatttctcctccaaggtggtcattcaaccgaccccctcgcagcgatgtcccgtcgcattcctcccgccaccccaaatccggccagtccgaggccgaagatccagcggccgcagaggagcggaggcgagagtctgaccggcgtgaagccgcagcccgccttcgggaagctgaagaggccgcccgggaggccgcccgggttcgccaagcggaggaagctgctcgggaggaggccgcccgggctcgccaagccgaagaagctgctcgggaggaggccgcccggtctcgccaggctgaggcgacagctgctgctggcgcgtcacttgggcctactccctcgggcggccctcaggcgacatcctccgaggcggcttgcgacgaggccgcgggcgcatcgcctgggcctacctcaccgggcgacgcccaggaccaaacgggcccgggggacatccccgagcccagtgcatcctccggggggccaagccacgtcgccttttctccaaggcggctcttctcctcatcttctgtcgccccgctgagcgccgagccccttctgcaggccctggccgccgcaaacaccgcagtgctggatgggttcaacacccaagtggaggccctgcgtgcagaacgagcggagctcgaggccgcatgggcgcgtgttgaggaggggcggcgctcggtggacgccatggtggaggtgggccgtaaggctcaccgccgtcatgtctcggagcttgaagcccggaaagcggcgctggcggagatcgcccgtgaggtggaggaggagcgggcggccgccctcatctctaccaccgcgatgatcgaggcgcaagacactctccgccttcagcacgcaagctgggaggcggagctgaagaaaaagctcgacgccgcccaaggggtccttgactccgccgctgcccgagagcggcgggtaacggagactgaagcggcgtttcggcggcgcgaggaggcccttgaggcccgtgccatggcgctggaagaacacgccggcgccgtggagaggggcttgacggaccgcaaggccgccgctggtctccgagaggcgacgctggcggcgcatgaggccgcctgcgccgaggaggagtgcgcgctccgcctccgcgaggacgcactcgctgagcgggagcgagctctcgaggaggctgaggccaggaccaaacggctggcggacagcctgtcccttcgcgaggcggcgcaggaggagcaggcgcgccgcaatctcgaatgcgtccgcgccgagagagccgcactggagcagcgggctgctgacctcgaggcgcgggaaaaggagctggacgcaagggcgcctatcggcggggcggccgcgggcgaaagcgacttagccgcccgcctcgcagctgccgaacacaccgtcgcggaaatgcagcgagcgctggactcctccaccggggaggccgaggcccttcgcttggcgggcgagattgggcccgacatgctttgggatgcggtctcccgcatgaagcgcgccggtcggcaagcaggcctctggagaggccagacgacggtgccccccaccaatctggaaggcctcgctccgcacctcaacaggatggcctgggtcctcgaacgactccccgaggagctcgagaagaccatcaacggcccgaacctgccacccgcgtcggtccactcctgggaagatttgtgccaacagttcaccatgaacttccaaggcacatatccgcgcccaggcgaagaagcggacttgcatgcagtacagcgaggcgatgatgagtcgcttcgctcgtacattcagcggttttgccaagtccgcaatactataccatgcatccctgcacacgcggtgatctacgcgttcagggggggtgtgcggcacaaccgcatgctcgaaaagattgcctccaaagagccccagactaccgcagagctttttcagctcgcggaccgagtggctcgtaaggaggaggcctggacctggaactcctccggttccggagtggcagcttcggccgcccccggatccgccgctcagacagggcggcgtgacaggaggaggaagaagaggccggaccgttccggcgacgagggtcatgtcctcgccgtcgagggcgctccgcgggccactcgaaaggggaggcctgcgagcgacaaaaagaacgaggctggtacacccagcagggagcgcctcgccggcaggtggtgctctgtccacaacacctccctccacgatctcgcggactgtcgtgcggtcaaaaacctggccgagcgaacgaggaaatgggaggaggacaggaggcaggaacgccgtgagggcaagtccccggcggttccttccggcaaacggcgaagtgaggccaagcagaaggcccccgctgttgacatcgatgatggtgatgatgacctaggtttccaagaacctggggccaccattgccaccgtcgatggaggagcatgtgctcacgtctctcgccggagcttcaaggctatgaagcgagagcttctggccatggcccctacccatgaggcgatgcgtcgggcgcggtggtcggaggttgccctcactttcgaccagaccgaccacccaccgtgcattgcccggggagggcaggctgcgatggtggtttcccccaccatctgcaacgtgaagttgggacgtgtcctcatagatggaggagcggctctcaacatcctttcccccgcggcctttgatgctatcaaggccccggggatggtgctccagccgtctcaaccgatcatcggtgtgacgccggggcacacgtggccattaggtcacatcgacctaccggtcaccttcggtggacccgccaacttccgcacggagcgggtgagcttcgatgtggcggacctcagtctgccctacaacgcggtcctagggagacccgcgttggtgaagttcatggcggcggtccactacgcctacctccagatgaagatgccgggccccggtggccccatctctgtccgtggcgaccttaaagccgcgcttgcttgcatggagcagcgcgcggaccgcctcgctgctgcgtccaagcccgagggtggtgacgagaggcttggcccctctgcccccaccgccccgaggcagcggatggccacatgcgacgaggtcccggaagacgcgctcgtctccttcctgcgggcaaacgctgacgtcttcgcatggagaccagcggacatgcccggggtccccagggaggtgattgagcaccgtctcgccgtgcggccgggcgcaaggccggtccggcagaaagtgcggcggcaagccccggaacgtcaagccttcatccgcgaggaggtggctaaacttttggaggccgggttcatccgtgaggtcatccatccggagtggctggcgaacccggtggtcgttcccaaggcgaacggcaagcttcggatgtgcatcgactacaccgaccttaacaaggcatgtcctaaggatccttaccccctgcctcgcatagatcagatcgtcgactccactgcggggtgcgaccttttgtgttttctagatgcatactctggttaccatcagattcgcatggctagggaggatgaggaaaaaactgcgttcattacccccgtaggaacctattgttatacatcaatgcccttcggattaaagaatgcaggtcctacttttcagcgtactactcgaatttctttgggtagccaaataggacgtaatgttgaggcgtatgtcgatgacttggttgtaaaaacgcgcaaccaagagaccttactctcagatctagcggaaacttttgagaacctccgctccgcccgcataaaactgaaccccgataagtgcgtgtttggtgtacctgcgggcaagcttctcgggtttttggtctctgcccgaggcattgaggccaaccccgagaagatacgagctatagagcggatccgcccccccagcaaacttagggatgtgcagtgcgtcactggttgcatggccgccctaagtcgtttcatatcaaggctgggagagaaggcgcttcccttgtttaagctcctcaagcgctcggggccgttcacttggacggaggaagctgaacatgcccttactcagttaaaggcatatctcagctctcccccggttctagtcgccccggagccaaatgagcccctgctactttacttagcggcgaccccccaagtagttagtgcagcgttggctgtggagcgcgatgaagacaatcctcattccgcgcacccccaccctgtgctgacttggcccgggagcaagcagggaggagaggcccccgagccgaacggtggcctaaggcccctgacgaccggagtcggccctctccccgctcgtcagacggtgctgggcgcccccgaccctcaggaaggccccgaggccactgcggggaggccgcacctatcgccctctgaccccgaggctaaccctgtaccgattcgacccgggagagagcagggagaagaggcccccaagccgaacggtggcctaaggcccctgacgaccggagttggccctttgcccgcttgtccgatgacgccaggagcccccgacccccaggacggccccgaggccactgtgggaaggccgctcctgtcgtcctccgaccccgaggtcatcggcacagaagacgagtgcgccccgaggggccactcggacgaagaacgccccgggggtacggtccctagcgaagaggatcggccccgccgaaaggtgcagcggcctgtctactttgttagtgaggccctccgggacgccaagacccgatacccacaggcccagaagatgctttacgctattctgatggcctcgaggaaactgcgccattatttccaggcgcatcggatcactgtggttacgtcttaccccctcggtcaaatcttgcataatcgagagggtacaggacgagtggtaaagtgggcaatcgagctttctgagttcgatctgcactttgaaccacgccacgctatcaagagccaggccctcgccgattttgtggcagagtggaccccggctccagagactgtctcaatacccgaggccagcacgaacccctctcagctgcctcacaccgcccactgggtgatgcagttcgacggttctttgtctctccagggcgccggtgcaggggtcacgttgacctctccgaacggagacgtcctcagatacttggtccgcctcgactttcgagcgaccaataatatggcagagtacgagggactccttgccggactcagagtggcggccgggctggggatccgccgcctcctggtgttaggtgactctcagctggttgttaaccaagtctgtaaggagtaccggtgctctgatccgcagatggacgcctacgtgcgccaagtacggcgtatggagcgccattttgacgggatagagcttcggcatgtgcccagacgggataatatgattgccgatgaactctcaaggctcgcgtcctcgcgagcccagaccccaccgggcgcctttgaagaaaggcttactcagccgtcggcgcgacccgaccccttaggggagacggatgcgcctgaccggcccccgaggcccgtcggagtccaggcctcgggacccgaagggagcgctccaagctcctttagattgattgcttggatctctgagatccaaacatacctcgcagataagactctacctgaggaccgcgaagggagtgaacgcgtacaacgcatttccaaacgctacgtgttggtagaagggaccctctatcggcgcgcggcaaacggaatcctcctgaagtgccttcctcaggaacaaggcgttgagcttcttgctgacatccatgagggcgagtgcggagcccattccgcctcgcgtaccctggttggcaaggcctttcgtcaaggattttattggccgacagctctcaatgacgcagtcgatctggtccggcgatgcagagcgtgtcagtttcacgccaagcaaatccatcagccggcccaggccctgcagatcataccactgtcatggccatttgctgtctgggggcttgatatcctgggaccgttcaaacgagccccgggcgggtttgagtatctgtatgttgcgatcgacaagttcactaagtggcccgaggcttatccggttgtcaagatcgataagcactctgctcttaaattcattaagggcatcacggcccgttttggagtgcctaaccgtattattacggataatggcacccaattcactagtgaactcttcggcgactactgcgaagacatgggcatcaagctctgcttcgcctcacctgcccaccccagaagcaatggccaagtggagcgcgccaatgcagaaatccttaaaggcctcaaaaccaagaccttcaacattctcaagaagcacggcgattcatggatcgaggagttgccagcggtgctctgggcgaaccgaaccacaccaagccgagcgaccggggaaacgcctttcttcctcgtctacggcgcagaagcggttctcccatctgagctcaccctgaggtctcctcgggccaccatgtactgcgaggctgatcaagatcagcttcgtagagatgacctcgactacttggaagaacgaaggcggcgcgcggccctccgagctgcgcgctaccagcagagcctgcggcgctaccatcagcgccacgtccgggcccgatcactctgcgtcgacgacctcatcctacgccgcgtccaaacgcgtgctggattgagcaagctctcaccaatgtgggagggtccgtatcgagtgatcggtgtcccccggccgggctcggtacggctggccatgggcgacggcacggagctgccaaacccgtggaacatcgaacaccttcgtcgcttctactctacccctgaaaggggggggggtcgggtatcaggttttggctcgggccaaccccgcacccccctcgggtgtgcaggattggccgggggctaccacacatgcacatatatccctttttcctttatttcagcatttcaataa

SEQ ID NO: 87147 - DNA, 1476 bp, Oryza sativa
  Clone ID: PAT_MRT4530_86120C.1
atggatcaatcaacaattgatcgaagttggatgtatgagaaaattttgaaacgtcattctatggagtacagaaagggcgtaataaattttatgaacgctgtggaggaggatcggaaaagaagaaacagtgattatatgtgttgtccatgtgcagattgcaagaatgagaatatgtttgatagcggagaggacgtacacggtcatctgatacaacgaggattcatggtctatacatgttgggtgaagcatgcagagcaagaatcaggaattggagcagcagcagacagaagtggtgcgcataatcaggaagatgaagatgagcatgacatgtttataccttctccattgggtggtgaaatggttgatgtgaatcacgatctgctgcaagacatgttacgcgacgttgaggacccagcccagaatgagagatatggaatgaagttcagcaggttggtaagtgattccgagacgcctctgtacgctggatgcaaagcaaaacacactaagttgtcagttaccttggacctaatgaaactgaaggcaagtagtggatggacagacaagagtttcacagatcttttaggaattttgaaggctatgcttcctgttgagaacacattgcccgagacgacatacgaagcaaagcaggttctgtgtccactggggttagaggtccgtagaattcacgtttgtcccaacgactgcatattgtaccacaaccaatatgcggacttggatgcttgtcctgtctacaaggcttctcgatacaagcgaaagaaaagtgctgacgaaggaaataagtcaaagaggggtggtccggcaaaggttgtgtggtatctacctatcattgatcgtttcaagagaatctttgccaacccgaacgaagcgaagttagtacgttggcatgccacggagagaaggaatgacggaaagaaggcatgctccgattgcaaggaacatacacgaagccggtggctgaagaaattggggataggaccctcttggaccgtagacgcatggcatggatacgatataaatggatacacattttacaccgtcaaacaagatgacaaaagcacagtgcaaaacagcggcgttcgtatagatgcattccaggatcaagttgggtcaaacacatattacgcccgcattgaggatatctgggagctaaactacatcaagttcaaggttcttttgttccgctgccattgggtgaatatatgcactggtgtcaaagccgacaaggaaggtttcactttagttgatctatctaaggtgggatacgccgatgaactatttgtacttgtgaaacaggtcgagcagatattctacataaaagacccttcaaacaagaagatgcacatcgtgagggatggaaagcgccgaattgtaggagttgaaaacgtcgtcgatgaagaagaatacaaccataatcttcatgtaagacctcacattgatcttgacgatgatccataa

SEQ ID NO: 87148 - DNA, 507 bp, Oryza sativa
  unsure (1)..(507): unsure at all n locations
  Clone ID: PAT_MRT4530_86121C.1
cccactcctggtctgaggactccggcccggtggcggccgctctacaactagtggatcccccgggctgcacgaattcggcacgacgaaacaacgaccgcaccgtggaacttggactggaaaaaacaatgacatgattattacaaaatgattgttgatgcctatgacgtacacaaccaacacttgatcaacaaaatgctgatttgcgacactattgcgttcgatgcaactggatctgcgcattcctcaatgctccaatggagtccacagncactgttgtgggcaatggacacacgagcacgatctctcatctcacttggtggccaaacgattcttgaattgcccttcctgctaaaacacatcaaattgccctaaatgttcctaaggccaatacactccaatcccaaggtccaattactcaacccacggacttactaaatcactttaactaacttccacggtctcttccaccttcaatctatacccgagttnttgctgatctacttaggn

SEQ ID NO: 87149 - DNA, 2846 bp, Oryza sativa
  Clone ID: PAT_MRT4530_86122C.1
gtccgaggcaacctggcaatgatatcgatgtattcctggagcctgttatcgatgatctggagattctttggaaagaagttcatctccctgttcatctggtgaagcaaacaaaactatgtggcccggcttttctaagggaaatgtggtcgtttgaaaggtacatgggagttctaaagtcgtacgttcgtaacagagctaaacccgaggggagcatcattgaaggttacacgaccgaggaggctattgagttctatgtcaattacatgtccgatgctgatcctatcagagttcctgcgtctcgtcacgagggaaggttgtcagacacatggcaaggatacgatataaatggatacacattttacaccgtcaaacaagatgacaaaagcacagtgcaaaacagcggcgtccgtatagatgcattccaggatcaagttgggtcaaacacatactatggccgcattgaggagatatgggagctaaactacgtcaagttcaaggttcctttgttccgctaccgttgggtgaatctacgcactggtgtcaaagccaacaaggaagtttcccgcctccttagaaccctagcgccgccatcgtcctccctcgccaagcccgccaccgtcgccaccgagcccgccgccgccgccatgtcctccctcgccgagcctgccgccgttgccaccgacgccgaggccgaggccgccgcctccctcgctgagcccacggccgccaccaccgagcctcctcggccctccattcggacctccgctgcctcctcaccgacgaccccccccgagaccgccgcccgcccggcgccgacctgcccgaccggcgtctccaccgaccggcgccgccctccaccgagcccgccgccgccgccgcgaactcctccttcgccgagcccgccgccgccgccaccgagaccgctgcctccaccgagcccggtgccgcctccaccgaccggcgacgccctccaccgagcccggtgccgccaccaccgagcccaaccggccatcctcaggtctatctgcggggtcatagggaggcagaaattcagtattctgcaagatgacatcaagctcgtgccggccgcagagaaggacattgcttggctaatgttcaaggagagcttcgattatcctgcggagcatgaggaccgtctcaggtgggttgctttaaaggttatgggcaatgcttggaagaacttcaagactaagctagtcggcgagttcgtctacaacccggcaaatccagattcaagagagaaatttccttggatcacggaacaggtctgggaggaattccatgcgaaaaagtcaacccccgagtccagagctagaagcgaggcatatcgcttgctccagaccaggaaccaacatccgcactggcttggcaccgccggatatgccgactacgtgtggcagtacaagaagtggacttccaacaaggcggagaaagatgcacgccttgaagccaagatccgggcgtcgataagagctgagctgacatctgaattcgacgaaaagctcgagtcgatgagggccaagattaggcaagagatccgagaagagcaacagaacccccaggccgccgctactgttgcgcacgaagagttaggaagtcccacccaaaaacgcagcagttgcgcatcaactgagttggcggaaaatccaacatcggtcgacagcaccgtcgaccacataacggaaccaacgagctgcaccctcacaattatggtgatgccgaccttcacggttctagcagccgagggacttgcgtacaagccaaccccagagacaagagtgcatggagcgcaacactgggccgattgtgcaaaagttcaagtcgactcggtgaagcccgaatacgagctgttcccactgaagtatccaccgaacgacgaggtcctctcactaggaaatgcccatggtaccttcatccaatggcccaaggacctcattgagatcagggttacagcgaggctaaccactgcaccaggcagtcgtccaccaaacagacctgcctctgctccttcaacccctcctgctcaagatcgtcatgcacaatcttacgatgtgcagttgcagtacgacacggattttggggaggaccgaacggaggctgacagcaaggcgatttatgaacccccaccgatgaagaagagcaggaaggcacactcttcccctcagagaattactctcgataaacccgaagcaaaggggagaggaaggggaggaaaggtgcaggcctcgcttctagctccaaggaagctagatctgggcaaggtccaggaagagactaagggcaaagaggtcaagaagaaatacgtcgctccacaggagttccaactaggcatgccattggttggagatgatgtgcttgccgcaatgggcaccgcttgcaaggaccttcacttatactacatggagaaatctaacgccaggaagccgaataaagctaccgatatccttggagagcacgatggaaagccattccttggtccaacaaattatatcgtggtcgacttcaagaatcttttcgacctctacaggctccgagcggtggacacaagcctccttaagtgctactccttgaagacaggacatgacaccctcatccacaaaaaagacttcccggtgaagcaacaaatagttgaccagtgcggattccatgtgtgccacaacatgcgccttctgtatagagaaaaggtgaagactttggctgagtttgagggcacaataaccaagtctctgtctactagctttgaggaggttcgcgaggagatagccagcttcatcctccgcgaaataattaaccccaagggaatgtttaggcttaaactaaaatga

SEQ ID NO: 87150 - DNA, 2162 bp, Oryza sativa
  Clone ID: PAT_MRT4530_86123C.1
tgagaaatgcattgaagcttttagctgtggcataccttaatataacacatgggtctaagttctggcatgtcccattctggttattttggagtcttctggcactaaagtgtttctacaggattctggcacgtcatgtagcatctgtaggaataagtcttggctggttggtcttggtcttgtggtgcctttttcctgcttttcagctttctaggacagcatctctactttcagtttggatgctctaggacagttaggacagcagtttgttgagatgctctaggacagtttgttgggatgctctgctctaggacagtttgttgggatgctgacagcaccctcttagactagcatggctgcatggctgctacaagcagctataaatatgtatccaatcctctttgggaggacatggcttttgtgtttagtgaatgaagaaaaccagaaaattgccccatctcgagtgccatcctcttctcaatgagagtaaccattgaaattctaacatctgctatgcagaaaaagcaaagattagcaacaagacttgcacctgctgtcatggatagcttcagcagagacatgcatttgcatatgtaagaatgaacgtgcatatgcaagttcacatgaagaagggtataggttctcacaggatgtactttcccctctcccatcttgttggcataaatgtttttcttctcctttccttctttttccacaacctgaccatttacattcccgttgacattttctgcagcatctgtctgactcatttccttttctgtcaccccttccatggccagcttatgctcttcctttttatttctagcaagctctctttttgatgctgcaatagcttgttgctggtcaatcttttcatctatattctgtcttacagcagaagttgttatggcttcatctaccagttcccgcagaattttaagcttcacggcagtgtgaacaagtccataatgcccccttcttacagttgataaactactggagaattcttctttacttgtcatttccaagaaatcacatagatactcagcccaggtgaccaatgttacctttaatttccttctcttgttctggagaaacataaaatacccgcctccatctttaatgagcaaatggaagagtgcagcatgtaattccacaagaagaacaaggttgctttctttgtggcagattgcattctccaggtccgagagggaaaatggagacaagcataaaatcctcccgtaagtcatgcagaagtcccaaaccataagtagatccccaacagaatctacaggcactctgaaatctgtagacagtggacgtctttttgacagactgggatcatctgctgtaggccttaataaaagatcatcaattggctcacctgcatagtcatgcaaaaagtgaacaataagaagcaataagtcttttgggggctcagtgggtattccatatttctttgcaagatttgcatgtataatccatggggaattctgtgatgttgactccctaatatatattttcagcatgctacgactagcacgtgccttcttgcgaattactagatcatcggcttgaagaactgaagtgttagtctctgcattgtcctgaccaatccaacccacctcatacatcttggtgttaccagagccaataataacctttaagatcttgcaagcagacacagaaccatcttttctaccatttagttctaatccttcaaaaaagtcttcttggagaatactgtatattttgttgacaaggtcagtcaagctaagagtgctgtattgaatcatatgtagaacaggcgctattaactctcttggcaactgttgagccttctctgcagcatgatgctctgagaccagcgcttcctcatatgttaaatttgattttccagacaccttacatgtccaaactctttcacgataaaggtttaccctattcaggtattcccgaacttggaacaccttgtcctctggattcaagtcctttggcggatccagtaagaagaacggtctcctttttaagagaggcattgcatccctgacacctccgtagtccgtaccaccctcgggcacgaacaaaaccgcacaactcaaacccgcgatcctctcatcgggaaagtgtgaaacatgtctaaacctttgtctcctttcatccat

SEQ ID NO: 87151 - DNA, 1231 bp, Oryza sativa
  Clone ID: PAT_MRT4530_86124C.1
gcacgaggctcgtgccgaattcggcacgagggggggaacccccgggctgcagggccattgctgtgtgtcagtgtgtgtatatatatccagctgccagctgcagagtgaagcataaacatcagtagacgacggcgatggcgcccaagcgacttgtctgcttcttggccgtggccgccgcgctagccaccacctgccacgggtggggcgccggcgccggcgatgtcgtgtcgtcgtcggcggcggcgctctcgttcgtggacaggctgaggcagatgatgatcccggcggccgtgggcgacggcgactactgcgacagctggcgcgtcggcgtggaggcgaacaacgtgcgggggtggacggcggcgccgcgcaagtgcgacaactacgtcgagaactacatgcgcggccaccactaccgccgcgacagcaaggtcgtcgtcgacgaggccgccgcctacgccgaggccgccgtcctctccggcgaccccgccgccgacgccaacgccacctgggtgttcgacgtcgacgagaccgccctctcccacgtcaagttctacaagaagcacggcttcgggtaccacagaaccgacgagccggcgttcatggagtggctgatcgccggcagagcgtcggcgttgccgaacacggtgacgctgtacaagaagctgctcctcctcggcgtcaagatcgtcttcctgtcggacaggccggacacgccggagctgaggaacgccaccgccaccaatctcatcaaggaaggcttcgactgctgggacgagctcatattaaggtcggagaactcgacggcgacgggatcggtggtggagtacaagtcgggggagaggaagaagctggaggaggagaaggggatggtgatcatcggcaacatcggcgaccagtggagcgacctgctgggctcgccggagggccgccggaccttcaagctgcccaaccctgcctactacatcgacaactacaagcgcgccggcgccgccgtccgcgccgccgtagccattacagcctcctcctcgtcgtcgtcgtcgtgaagcaaacgatgcctagctagctatagtactcaactttgaattgcatttttttttcagacacataagttcagttaataatcggtcgtgtacgtacctgccgtgctgtgcactgttgtatctttttggtgagacgattgaaatatctttgggtttatcttttataaaaaaaaaaaaaaaacctgcag

SEQ ID NO: 87152 - DNA, 176 bp, Oryza sativa
  Clone ID: PAT_MRT4530_86125C.1
atcaaaacgctgggtattgaaaaaagataagccacaggaacaaggcaaaactgtgtttgccaaaaaacaaccttcccaactggacccaaaaacgccattttttatgggcaaaaggaaacgggtttcccaatccctcccctttaccagggttaaaaaccataaacccgcacaaacaa

SEQ ID NO: 87153 - DNA, 241 bp, Oryza sativa
  unsure (1)..(241): unsure at all n locations
  Clone ID: PAT_MRT4530_86126C.1
cttcgtccactccccctatcctctcctcccaccgcgccgccgcctccgcgccgccgccgcgctccccctcctccccacagccaagatgaatgttgacaagctcaagaagatggaggtgctgtgcgaccgggggaagggtagcgtgcgagaagaagaggagtccataagctaaaccacagtgcaaagcttagagactctnaaagagagggtaacacatcctggattnagagntacatttaag

SEQ ID NO: 87154 - DNA, 388 bp, Oryza sativa
  Clone ID: PAT_MRT4530_86127C.1
gttatgcatttaaatcaacttgttatttctcatcttgcctgtgagcgaggtgaaaaccgtttatttgaaggttgccatttttctgtctctagtggggagtgggttcaaattgaggggcataatggtattggtaaaacgagtttattacgtattttagctggattggcgttgccggtagccggtgaggtgctttggaataatttatcaattcataagcaacgtgatgaatattatgctgaactcttttatttagggcattatgcggggataaaaccggaattatctgcttgggaaaacttgcgtttttaccagaaaatgcaaggtctgtcgttagatgatgaagcattatggtttgctttagataaggtttctttagttgaaagggctg

SEQ ID NO: 87155 - DNA, 1332 bp, Oryza sativa
  Clone ID: PAT_MRT4530_86128C.1
atgccggtcgccgtctacatccctagtgatctcggtagccggggcagaggccaacggttgcagcgcgggggtcgcggaccgtgcatcgctggtttgacacggacggagccgtttttggtttacaccacatcaaccaaaacagctctatattcaggcacaagatcaaacaagaaatcaaataccacgcattccccatttccccagttcgccgaggtgatcaagcagtgcgtcgtcgagcggggcgaggttttagaggaggacgacggcatcgtcgacgcggggacgctgatgccgattcaagaagggctcagcatggtggacgaggtgggcggtggcgggggcgtcgccgacgaacacctgccgccccacgacgtggacaggcttgtcctcgtcgccgacgagggcggccacggcgcttaccggtggctccaagaattgggggcagaggaggagcaggtcggcgcctccgccgtcgccgatggcaagggtgcgttcaacggcgacgccaagaacgatcgggaagcgccgctccagggtgcgggggcctccgccgtcgccgatgacaagagcggcctccccgacgctaagaacggtgacaagaagcgtggcctccccgacgcctccaacaacaatgccgggaggcagctccagggtgcgggagcggcggtggaggacaagggcggcgctgccctcctcgtcgccggtgagcagccacccccgcaagaagtcgccgcccaggccggcgaggccgcccccgacgcccattggctgcagccacctctgcaagaagccgtcgcccacgtcggcgacggcgaggccgcccctgacgcccattggctgcagccaccactgcaagaagccgtcgcccacgccggcgaggccgcccctgacgcccacttgctgcagccaccaatgcacgacgacgatgacgccgacgacgccgattggcctgattgggacgccttcgatcaagattgggagggcttcgatcaagattgggacgccgacaccgacaagactgcggcattgcaggaggaagacgaggagccgcccgtctccatcgtcgccggcgagacacctccgcagcacggccctctcctctcgttcttcgtcgagtgcgatcaggcagggagaggggagaagccgtgcaccagctgcttcgagggctcgaaaccacggagtttgtcgtcaggctccatgaggccccactactgtacttgccatcgcaagctgatgcgcagcaaggacagggtggaatgctcctactgccacaacttcttccaaaatcttgccgactactaccgtcataagaagaacatccatgggaagtga

SEQ ID NO: 87156 - DNA, 101 bp, Oryza sativa
  Clone ID: PAT_MRT4530_86129C.1
aagaaacatggaggatatacagtttaaggattagcagccgacaagctttcctctcggaacatctaaagatgcatgtattcagggaatatgaccatattttc

SEQ ID NO: 87157 - DNA, 266 bp, Oryza sativa
  Clone ID: PAT_MRT4530_8612C.1
agggataaaacaactatgaacgacgactgattgtttattaatttcacccaaagggaggcatgtgatacatgatgatatctgagctgatctgtaagtatcgaccccctatactgccgaaactgattacgtgacaccgccacggatggaaatgtcactgggtgctccatattccctcgggttgactccatatgtaggtggctggttcaatgccaacggagcttgtgcttgggccaaagttcaatcaaatgacagattaccacactgct

SEQ ID NO: 87158 - DNA, 1205 bp, Oryza sativa
  Clone ID: PAT_MRT4530_86130C.1
ccggacatgtttgatccattccttgatttctctagtgagcttcgccgcatttcatccatgagaacgtgatctactacctctgcctgatacatccgtgtctttgaaatctcatttcgcacaggtcgaacaccctgcgtcgagctcgtcgtcgctcccgacgtccagagcgccgccttgcgtcgcatcgccgttcccgtccatccggtggatctctggccgagccactgcgccaacgacgtcgcttctaaggtcgccatcgcctcgcgagatctagcaccaatcgccgccggcgacggcgacaagttcgccgggttgccgcgccagccgctgctctgcctctccttgccactgtcccactctagaccgcactcaacgtgtagagtgtcgtggtgcgtcgtgagcacaaaacaaactagagtgttcatatcatgtgggtaaagctgtacaaactcttccagaccagtgtgtgtttttcgcatcaacaccagtgggaagtcgcgcaggagcagccacgccgtgccgggaaatggctcgctgaagagctcgtccatctcattgctcgtgtcgacgaggaggacacgggcggtgagcacagcgtagaggaaggccgacgcggcagcaaggatgcggttcccgaggccgccgtcgccgatccaatgcatgtctctcctggcctccatgtagccggtgacgagcagcggctgaacatgagaggcaccggctacatggaggccgtctgacacgtggctacacggccggtgcctctcctggcctccatacaccgcggcggtgggcgcagaggcggatgcgcacatcgaggtggtggatgtagagacggaggcgggtgtcacagcgatggactcagagacggggactagcgccgcggcaatgggcgtgcccacacaaagggggaggcgagcttcccggcagtaggcatgcccgcacagagttggaggtagacgcacgcaaaccctagaattagaaacagctagcaggtcaactagtcccaagaaggtgaggaacattccataccatatttcgatccacttggaggcataggggccgcgcatggattcgacgtcgccatagccgccgctcccaccggccttcgtcgcccgcgcctctcctgccggcgtcgcctccatccccgcgccgcccccgtcgtcctccgccacccgtgctgctcccgccggcgccgcctccat

SEQ ID NO: 87159 - DNA, 504 bp, Oryza sativa
  unsure (1)..(504): unsure at all n locations
  Clone ID: PAT_MRT4530_86131C.1
ccgtttgagatcggccgattcngnccggaanttgggaaggtcaacagctctaactaancctcacnaaatctatcaaaaaccataaatgaaaccccacaaatctatttgcagaaaccattgttaagtgaggacttaaccctagttgtccaatcaggtcaatccgcgccactcnatcccaacggtcaagaggcttaacttgtcatgtgggcatggtccatagggactatattggatgtngcaatcatcaccatcctaaccccaacccctactccacttcccccagccagataaacaaggacatgggcagaaaaatctcagaccanaataccagatggatcttatggtaccccacaaggtcatacatatataattcttgttctatcagtgtgatgcttgtctatgcactccccnatcaatcangattcangaccaaggaaacatcnganaccagatggccccntaaggtcntntatatataatcaagttctaagataccactgatgt

SEQ ID NO: 87160 - DNA, 4959 bp, Oryza sativa
  Clone ID: PAT_MRT4530_86132C.1
atgtctttcgtgattagtcccacacttctcaccatagtaaatgatgctatatttggtaataatttgattagctcctggtttggaatgatgccgcgctacaagcctgagtacctgtttggtgttgagggttttgtccaggagttgcgtacaatgtcctttgccataggatttgggactgcccctttttatgcccagattcctcatgatcgtcacgaagagaagtgccgagtcaaagtcactttgaacagtaatagtgaagatatcccctcagtgatgttcgaagctggaggaagaaactacatccatgcatgtcaggaggtggcaaggatcgccataggagagctccgtgatcgctacagtgatcagttggccgacacggagtatcgctatcatcctcgccaaccccagggaagtgaccgtggcagttatcttgagactgaaggaattgagaatgatgctaccacaaggcatttggttgagatgctgtgggctatggatgaaagtcgtgcagagactgtgttagcggctcaagatcgtgaagaccggaatcgtggtaagatttgcaagctagaagacaaggtggatcgtttggagaaggagctagctacgttgaagggagaagcaccaccgcagaaggctaggattcgtctcaccgcaaggaagagagctctatttgtccctcgctatcaattggcgccaaagatggtgaacactcgcagcaatgggaatggccccaacaaccccaataacaacaacaatggagagaatcccacacttgcccaagttcttgctcaacagacacagctaatgaacatgatgatgcagcaactccagaaccagcaaaaccaaggaaataaccatgcacctccccagaacaagttagcagaatttcttcgtgtaaggccgcctactttctctagcaccactaatcctgttgaagctggtgattggttgcatgccatagagaagaagttggatttgcttcagtgcactgatcaggagaaggtctcatttgcatcacctcagttgcatggccctgcctctgaatggtgggatcatttccgcctgaataggactactgcggaacctatcacttggcttgaattcaccgctgctttccggaagacgcatataccatcgggagtggtgtctctcaagaagaaggaattcaggtcgctcacccagggatctcgctctgttacggagtatttgcacgagttcaatcgtctggctcgttatgctccggaagatgtgcgcaatgatgaagagcgccaggagaagttcttggaaggacttaatgatgagctttcttacccactcatgactggagattatcatgatttccagaagttagtggataaggctattcgtcaggaagacaagtacaatcgcatggagcagaagaaacgccggattgctcaattcaagacacaacaggggaataatcagaagccgcgtcttactttaggaccccagtccatgccacagggaggttcttcgtctgttgttcgtccgcagcgtcagttcttcaacaacaatgctggcaacaacatccgcaatcaagctccacgtcctgttgcagctccagcacagcaacaacctgccaagagggagcaaggcagcaagcccgtggtgtgtttcaactgtggagacccaggacattatgctgacaagtgtccgaagccccgacgcgtgaaggttgtccctgcccagagcaactctaccgcacctgcgccaaaggcccgtgtcaatcatgttgctgctgcagaagctcaagatgctccagatgtgattttggaagatcttagacgtcctttgatggttagtaccccaagtaatcaagcactctctttgcaacgtagcccctctgtcagaatagaaattaaaggagtaccatttctggccaatcttatcttgttagaatccaaagaccttgatgtcatcctagggatggactggttagccagacataaaggtgtgatagactgtgctaacagaaaagtaactctcacccgcaatgatggtcgagttgtgactgttcatgcattgtcttctgagtttttaaggtcaagactgaaccaaataattctggaaaagattcctatagtccgggagtatcccgatgtgttccccgatgatttgcctagtatgccgcctaaaagggatatagagttcagaatagatttggtaccaggaacaactccgatccataagagaccttatagaatggcagccaatgagttggcagaagtcaagaggcaagtagataatttgcttcagaaaggatacatcagaccaagttcatctccatggggagctccggttatttttgtggaaaagaaagatcatacccagaggatgtgtgtggactatcgtgccctaaacgatgtgactatcaagaataagtatccgctacccagaattgatgatttgtttgatcagcttaaaggtgctactgttttctccaagatagatcttcgatcagggtatcaccagttgagaatcaaagaggaagatatacctaagacagcttttaccactaggtatggattgttcgaatgtactgttatgtcttttggacttaccaatgcccccgctttcttcatgaacttgatgaataaggtgtttatggaatacctagacaagttcgtggtggtctttattgatgatattcttatctactctcgaaccaaagaagagcatgaagaacatcttcgccttgcactagagaagctacgagaacatcaactgtatgctaagtttagcaagtgtgaattttggttgtctgaagtgaagttccttggtcacgtcatctcagctggaggagttgccgttgatcctagtaatgtggaatccgtaaccaactggaaacaaccaaagacagtttcagagattcgcagtttcttaggcctcgcaggatattaccggaggtttatagagaatttttccaagattgctaagcccatgacacgactgcttcagaaagatgtgaagtacaagtggtcggaagaatgtgagcagagttttcaagagttgaagaatcgcttgatatcagctcctattttgattttacctgatccaaagaagggtttccaagtgtattgcgatgcatctaaacttgggttaggttgtgttctgatgcaagatgggaaggtggttgcctatgcatctcgtcagttacgtccgcatgaaaagaactaccctactcatgatcttgagttagctgcagtagttcatgcgttgaaaatttggcgtcattatcttttcggtactcgtacagaggtatataccgatcacaagagtttaaagtatatctttactcagccggatctgaacatgagacaaaggagatggttgaaattaattaaggattatgacatgggaattcattatcacccgggaaaggctaatgttgtagcagacgctcttagcaggaaaggctattgcaatgctacggaaggacgacagttgccattggaattatgcaaggaatttgaaagattaaatttgggaattgtcagtagaggttttgttgcagccttagaagcgaagcccactctaattgatcaagttagagaagcccaaattaatgatcctgatattcaagagatcaagaagaatatgagaagaggaaaagctatcggtttcttggaggatgagcacggaactgtatggttgggtgagagaatctgcgtccccgacaacaaagatttaaaagatgcaattctgaaagaagctcacaatactttatactctattcaccctggtagtactaagatgtaccaggatctcaaggaaagattttggtgggcaagtatgaagcgtgaaatcgcagaatacgtagcacctttgaagattcctgaatggaagtgggaagaaatcggtatggattttatcactggtttacccagaacgtcatcaggccatgactctatttgggtaatagtcgacagacttaccaaagtggcatatttcattccggtaaagacaacttattccggaagtcgcttagcggaattgtatatggcaaggattgtgtgtttgcatggcgtccctaagaagatagtgtctgatcgaggcagtcagtttacttcaaatttttggaagaaacttcaggaagagatgggttctaagctgaactttagtactgcttatcatccgcaaacagacggacaaaccgaaagggtgaatcaaattttggaagacatgttgagagcttgtgctttagacttcggtggaagttgggataagaatctaccttatgcagaattttcgtacaacaacagttatcaagctagtcttcagatggctccttacgaagcactgtatggtcggaagtgccgcactccgcttttgtgggatcaaacgggagaacgtcaggttttcgggacggatatcctaagggaagcagaagaaaaggtaaaggtcattcaagaaagattgcgagtggctcagtctcgacataagagttatgccgataatcgccgcagagatttgagttttgaagaaggagattatgtgtatcttcgtgtcacgcctcttcgaggagttcgtcgttttcacaccaaaggaaaattggcaccgcgttttgtgggaccttataagatcgtcagtagaagaggagaggttgcttatcagttggagttacctcaatctttggcaggagtccataatgtgttccatgtttcgcaattgaaaaagtgtttaagggtacctaccgaagaagctaatcttgaacagatagaagtccaagaagatctgacctatgttgagagaccaatccgtatcctggaaatagatgagagaagaaccaggaatcgggttatccgtttttgcaaagtccaatggagtaatcactcggaagaagagtcaacttgggaacgagaagatgaattgaagtcagctcatccgcatctattcgccagttcttccgaatctcgtggacgagattccgtttaa

SEQ ID NO: 87161 - DNA, 4119 bp, Oryza sativa
  Clone ID: PAT_MRT4530_86133C.1
atggtgggttgtgagcacatggttttgaaggtcgtgctcataacaattaaggacccgttcgcgagctactgttgtgaaacattaaccgtgccaaccacaagccagcgtgtgcaacggctttaccttttgtatagcatggttcattacggggtgccagattgagaagcggcgagaagtccgtgggggtcgctggggagtccatgcctctggttattgagggggtgattatgatccaggaatggtgcactgtggtgagttgtgttgtgcgaaaggtattgtcacgatttccccctttgcagctcctggtttggaatggtatattcctggtttggagatagaactgtacagccggatgtcgcgctacaagcctgagtacttgtttggtgttgagggatttgttcagaagttgcgtacgatgtcctttgtcataggatttgggactgcccctttttatgcccagattcctcatgatcgtcacgaagagaagtgccgagtcaaagtcaccttgaacagtaatagtgaagatatcccctcagtgatgttcgaggctggaggaagaaactacatccatgcatgtcaggaggtggcaaggatcgccataggagagctccgcgatcgctacagtgatcagttggccgacagtgagtatcgctaccatcctcgccaaccacagggaagtgaccgtggcagctacctagagaccgagggaattgagaatgatgctaccacaaagcatttggttgagatgctgtgggctatggatgaaacccgtgcggagactgtgttagcggctcaagatcgtgaagaccggaatcgtggtaagatttgcaagctagaggacaaagtggatcgtttggagaaggaactagccgcattaaagggagaagcaccgccgcagaaggccaggattcgtcttaccgcaaggaagagagctctatttgtccctcgctaccaattggcgccaaaggtccgtgtggtggagaaagaagttaccccagccctagcggatcctccggtcatcaacatggtgctcactcgcagcaacgggaatggccccaacaacaccaataataacaacaacaatggagagaatcccacacttgcccaagtcctggctcaacagacacagcttatgaacatgatgatgcagcaactccagaaccagcagaaccagggaaataaccatgcacctccccagaacaagttagcagaatttcttcgtgtgaggccgcctattttctctagtaccactaatcctgttgaagctggtgattggctgcatgccatagagaagaagttggatatgcttcaatgcacggatcaggagaaggtctcatttgcatcacaccagttgcatggccctgcctctgaatggtgggatcacttccgcctgaataggactactgctgaacctatcacttggcttgaattcaccgctgctttccggaagacgcatataccatcgggagtggtgtctctcaagaagaaggaattcaggtcgctcactcaggggtctcgctctgttacggagtatctgcacgagttcaatcgtctggctcgttatgctccagaagatgtgcacactgatgaagagcgccaagagaagttcttggaaggacttaatgatgagctttcttacccactcatgactggggattatcctgatttccagaagttggtggataaggctattcgtcaggaggacaagtacaatcgcatggagcagaagaaacgccggattgctcaattcaagacacaacaggggaataatcagaagccgcgtcttactttaggaccccagtctatgccacagggaggtttttcgtctgttgttcgtccgcagcgtcagttcttcaacaataacgcgggcaacaacatccgtaatcaagctccacgccctgttgcagctccaacacaacaacaacctgccaagaaggagcaaggcagcaagctcgtagtgtgtttcaactgtggagacccaggacattatgctgacaagtgtccgaagccccgacgcgtgaaggttgtccctgcccagagcaactctaccgcaccagcatcaaaggctcgtgtcaatcatgtcgctgctgcagaagctcaagatgctccagatgtgattttgggtacatttcttgttaacttagttcctgcaacagtgcttttcgattctggtgctacacattcattcttatctatgagttttgcgggaaatgatgggatggaagtagaagatcttagacgtcatttgatggttagtaccccaagtaatcaagcactctctttgcagcatagtccctctgtcagaatagaaattcaaggagtaccctttctggccaatcttatcctattagaatccaaagaccttgatgtcatcctagggatggactggttagccagacataaaggtgtgatagactgtgctaacagaaaagtaactctcaccagcaatgatggacgagttgtaactattcatgcattgtcatctgagtctttaaggccaagtctgaaccaaataactttggaagagattcctacagtccgggagtatcccgatgtgttcccagacgatttacctggtatgccgactaaaagggatatagagttcagaatagatttggtaccaggaacaactccgatccataagagaccttatagaatggcagccaatgaattagcagaagtcaagaggcaagtagacgatttgcttcagaaagggtacatcagaccgagttcatttccatggggagctccggttatttttgtggaaaagaaagatcatacccagaggatgtgtgtggattatcgtgcactaaatgatgtgactatcaagaataagtatccgctacccagaattgatgatttgtttgatcagcttaaaggtgccaccgttttctccaagatagatcttcgatcaaggtatcaccagttgagaattaaagaggaagatatacctaagacagcttttaccactaggtatggattgttcgaatgtactgttatgtcttttggacttaccattgcccccgctttcttcatgaacttgatgaataaggtgtttatggaatacctagacaagtttgtgttggtctttattgatgacattcttatctactctcgaacaaaagaagagcatgaagaacatcttcgccttgtactagagaagctacgagaacatcaactgtatgctaagtttagcaagtgtgaattttggttgtctgaagtgaagttccttggtcacgtcatctcagccggaggagttgccgttgatcctagtaatgtggaatccgtaaccaactggaaacaaccaaagacagtttcagagattcgtagtttcctaggcctcgcaggttattatcggaggtttatagagaatttttccaagattgctaagcccaggacacgattgcttcagaaagatgtgaagtacaagtggtcagaagaatgtgagcagagttttcaagagttgaagaatcgcttaatatcagctcctattttgattttgcctgatccaaagaagggtttccaagtgtattgcgatgcatccaaacatgggttaggttgtgttctgatgcaagatgggaaggtggttgcctatgcatctcgtcagttacgtccgcatgagaagaactaccctactcatgatcttgaattagctgcagtagttcatgcgttgaaaatttggcgtcattatcttttcggtactcgtacagaggtatataccgatcacaagagtttaaagtatatctttactcagccggatctgaacatgagacaacggagatggttggaattaattaaggattatgacatgggaattcattatcacccgggaaaggctaatgttgtagcagacgctcttagcaggaaaggctattgcaatgctacggaaggacgacagttgccattggaattatgcaaggaatttgaaagattaaatttgggaattgtccgaagaggtttcgttgcagccttagaagcgaagcccactctaattgatcaagttagagaagcccaaattaatgatcttgatattcaagaaatcaagaagaatatgagaagaggaaaagctatcggtttcatggaggatgagcaaggaactgtatggttgggtgagagaat

SEQ ID NO: 87162 - DNA, 1214 bp, Oryza sativa
  Clone ID: PAT_MRT4530_86134C.1
tttttttttttttttcacagcagcactatatcaaccatggcactccattcagcatcatcagagagagattcagagcaaccatgcttcacaggacaactgatcataacaagacataaccctcccacctagcatgaactaaaaatttacaggccgcccctttttttttttttttttggcagcacagcaacatgcaacccgttagggtctcagcactcccaaattcttcaccagaatggaatacaatcattgtcatcaaagggttcgttttctgcttgccaccaccaccactaccactagaaagaaaagtgcaagaaacaagacccctgaacagtaaggggggaggagagggggtgtcttgtctcctcatcgcacgccctaaactctaactaaagttcagaaccatgattgagcaagcgaggatcagtatccacatcgccgttccgacctccgggaggaggctggcgccactgttgtcgttgaagcttgaaggacctagccccattccaggagggccgtccacgccagtgctgcccccggtgccgcttgtcggtgtgcccgtcccagcagcgctagcagaggcagggtacatgcagccgttggagcttgggtcggtggtgacgagggtggcggtgccagagaagacgcaggcctgggagttctggttgttgcgctggtagaagctgttgacggcgtaggaacagtgggccttgacggtgtccgggctgaagcaggcgccgctctgctggatgggcttgcagtcggcgccgtcgccgcacgcgtagtccagcgtcttctgcagcgtgctgtccggcatgtcctgcctgcaaatgcaccacgccccctctgaccggccggcgagggtggcggccatgagagccatcaggaggagacgaggcgcggtcgccgccatggatgatgatgcgagcaaggaggctgcgcctgtggcttctctctctctctctcgcttcacctgctgtgttgtgttcttccccctcgcctcttgctggaagagtgggggtttaaatgcagtaggctggctggcagtgagccagtgactcggtttctctctcctctctctctctctctctctctcgcgtggctgttttgcacgatggatggaggcggcgaggaggatttttcacagcagatttcacgagagaaacgcaagcaaaagcagcaggcagagcgagctgggccgttttgtgaagtggcgt

SEQ ID NO: 87163 - DNA, 5157 bp, Oryza sativa
  Clone ID: PAT_MRT4530_86135C.1
atggcccaaggtgctggcgacgctgtgcttccggcatcacacatcacggcggataggcaccttagcctcccccgcaagattatgccggagggggccgccctgagggcgggggagtcgcgaccgcgaccgcggtactcggatcgattcgtgcacctcctgtccttcgccatggtggggttggtccctccattctccaggttcttccacgaggttttggatttctatgagatccacgccttgcatctcgcacccaacgccgtgatgacgctggccatcttcgcgcatctgtgtgagatgttcgttagggtccggcagacgatgcgattgttccagttcttcttcgtcccgcagctgctgcaagcatggttggcggcttcggagctgggcgagcagtacgacgccgtgcgggaccgcctcaggggcctgcgaagccagggccttacgggggcgatggtctttggtgattacttccattgccgcatcgcacctctccaagagcggtcccgcgaagcgtggaagtatattggacccaacgatctcatgcgcactcatgtgggtgagcgttgggactggggcgaggaggatgcgaaaacgattccgacgtttccggagagtccgtttttgcaggagaagaatttaaagagttccaaggccagcaaggcaactcctggtttggaatggtatattcctggtttggagatagaactgtgcagccgggatggttgttcagaatggttgggcctatgcaacaggatgccgcgctacaagcctgagtatttgtttggtgttgagggatttgtccaggagttgcgtacgatgtcctttgccataggatttgggactgcccctttgtatgcccagattcctcatgatcgtgatgaagagaagtgccaagtcaaagtcaccttgaacagtaatagtgaagatatcctatcagtgatgttcgaagctggaggaggaaactacattcatgcatgtcaggaggtggcaaggatcgccataggagagctccgcgatcgctacagtgatcagttggccgacactgagtatcgctaccatcctcgccaaccccagggaagtgaccgtggcagctaccttgagactgaggggattgagaatgatgctaccacaaggcatttggttgagatgctgtgggctatggatgagacccgcgcggagactgtgttagcagctcaagatcgtgaagaccggaatcgtggtaagatttgcaagctagaggacaagatggtgctcactcgcagcaacgggaatggtcccaacatcaagaataacaacaacaatagagagaatcccacacttgcccaagtcctggctcaacaggcacagcttatgaacatgatgatgcagcaacttcagaaccagcagaaccagggaaataaccatgcacctccccagaacaagttggcagaatttctttgtgtgaggccgcccactttctctagcactactaatcctgttaaagctggtgattggctgcatgccatagagaagaagttagatttgcttcagtgcactgatcaggaaaaggtctcatttgcatcacaccaactgcatggccctgcctctgagtggtgggatcacttccgccttaacaggactactgctgaacctatcacttggcttgaattcaccgctgctttccggaagacgcatataccatcgggagtggtgtctctcaagaagaaggaattcaggtcgctcacccagggatctcgcacggtcaccgagtatctgcacgagttcaatcgtctggctcgttatgctccggaagatgtgcgcactgatgaagagcgccaggagaggttcttggaaggacttaataatgagctttcttacccactcatgactggggattatcatgatttccagaggttagtggataaggctattcgccaggaggacaagtacaaccgcatggagcagaagaaacgccggattgctcacttcaaggcacaacaggggaatagtcagaggccgcgtcttactttaggaccccagtccatgccacagggaggttcttcgtctgttgttcgttcgcagcgtgagttcttcaacaacaacgcgggcaacaacatccgcaatcaagctccacgccctgttgcagcttcgacacagcaacagcctgccaagagggagcaaggcagcaagcctggggtgtgcttcaactgtggagacccaggacattacgctgacaagtatccgaagccccgacgcgtgaaggttgtccctgcccagagcaactctaccgcaccagcatcaaaggctcgtgtcaatcatgttgctgctgcagaagctcaaggtgctccagatgtgattttgggtacgttccttgttaactcagttcctgcaacagtgcttttcgattccggtgcttcccattcatttttatctatgagttttgcgggaaatcatgggatggaagtagaggatcttagacgtcctttgatggttagtaccccgagtaatcaagcactctctttgcaacgtaacccctctgtcagaatagaaattcaaggagtaccatttcttgccaatcttattctgttagaagccaaagaccttgatgtcatcctagggatggactggttagccagatataaaggtgtgatagactgtgccaacagaaaagtaactctcaccaacaatgatggtcgagttgtaactgttcatgcattgtcttctgaatctttaaggtcaagtctgaaccaaatagctttggaagagattcccatagtacaggaatacccggacgtgttcccggacgatttacctggtatgccgcctaaaagagatattgaattcagaatagatctggtaccaagaacaactccgatccataagagaccttatagaatggcggccaatgaattagcagaagtcaagaggcaagtagatgatttgcttcagaaaggatacatcagaccaagttcatctccatggggagctccagttatttttgtggaaaaaaaagaccatacccagaggatgtgtgtggactatcgtgcactaaatgatgtgactatcaagaataagtacccgctgccaagaattgatgatttgtttgatcagcttaaaggtgccaccgttttttccaagatagatcttcgatcagggtatcaccagttgaggattaaagaagaagatatacctaagacggcttttaccactaggtatgggttgtttaaatgtactgttatgtcttttggacttaccaatgcccccgctttcttcatgaacttgatgaataaggtgtttatggaatacctagacaagttcgtggtggtctttattgatgacattcttatctactcccgaacaaaagaagagcatgaagaacatcttcgccttgcactagagaagctacgagaacatcaactgtatgccaagtttagcaagtgtgaattttggttgtctgaagtgaagtttcttggtcacgtcatctcagccggaggagttgccattgatcctagtaatgtggaatccgtaaccaactggaaacaaccaaagacagtttcagagattcgcagtttcctgggtcttgcaggttattaccggaggtttatagagaaattctccaagattgctaagcccatgacacggctgcttcagaaagatgtgaagtacaagtggtcagaagaatgtgagcagagttttcaagagttgaaaagtcgcttaatatcagctcctattttgattttacctgatccaaagaagggtttccaagtgtattgtgatgcatccaaacttgggttaggttgtgttctgatgcaagatgggaaggtggttgcctatgcatctcgtcagttacgcccgcatgagaagaactaccctactcatgatcttgagttagctgtagtggttcatgcgttgaagatttggcgtcattatcttttcggtactcgtacagaggtgaacactgatcacaagagtttaaagtatatttttactcagccagatctgaacatgagacaacagagatggttggaattaattaaggattatgacatgggaattcattatcacccgggaaaggctaatgttgtagcagatgctcttagcaggaaaggctattgcaatgctacggaaggacgacagttgccattggagttatgcaaggaatttgaaagattaaatttgggaattgtcagtagaggtttcgttgcagccctagaagcaaagcccactctaattgatcaagttagagaagctcaaattaacgaccctgatattcaagaaattaagaagaatatgagaagaggaaaagctatcggtttcttggaagatgagcaaggaactgtatggttgggtgagagaatttgcgtcccagacaacaaagatttaaaagatgcaattctaaaggaagcccatgatactttatactccattcaccctggtagtactaagatgtaccaggatctcaaggaaagattttggtgggcaagtatgaagcgtgagatagcggaatacgtagcacctttgaagattcctgaatggaagtgggaggaaatcggtatggatttcatcactggtctacctagaacgtcatcaggccatgactctatttgggtgatagtcgacagacttaccaaagtggctcatttcgtcccagtaaagacaacatattccgaaagtcgtttggcggaattgtatatggcaaggattgtgtgtttgcatggtgttcctaagaagatcgtatccgatcggggaagtcagtttacttcaaagttttggaagaaacttcaagaagagatgggttctaagctgaactttagtactgcttatcatccgcagacagacggacaaaccgaaagggtaaatcagattttggaagacatgttgagagcttgtgctttagacttcggtggaagttgggataagaatctaccttatgcggaattctcatacaacaacagttatcaagctagtcttcagatggctccttacgaagcactgtatggtcggaagtgccgcagtccgcttttgtgggatcaaacgggagaacgtcaggttttcgggactgatatcctaagggaagcagaagagaaggtaaagatcattcaagaaagattgcgtgaggctcagtctcgccataagagttatgccgacaatcgtcgcagagatttgagttttgaataa

SEQ ID NO: 87164 - DNA, 2525 bp, Oryza sativa
  Clone ID: PAT_MRT4530_86136C.1
taggatcgtgagtctccatggcgttcccaagaaaattgtatctgataggggaagccaattcacctctcatttttggaagaaactccaagaagagttgggaacccgattaaatttcagcaccgcgtatcacccgcagacagatggacagaccgagcatctaaatcagatcctagaagatatgctccgcgcatgtgtactagatttcgggaagacctgggataagagtctcccctatgccgaattctcctacaataacagttatcaagccagcatacaaatggcaccttatgaagcgttgtacgggcgcaaatgccggacaccgctcttgtgggaccaagttggagaaagccaagtgttcgggactgatatcctgagagaagctgaagctaaagtcagaatcattcgggataatctaaaggtggcacagtctcggcagaaaagttatgcagataaccgtcgccgtgacctggaattcgcagtgggtgattttgtataccttcgggtcacgccattgcgaggtgtgcacaggtttcagacaaaagggaagctcgcacctcggtatgtggagtggagccaggaactatctacctctgtaatgacactttatacgcttattaattagagtaataattgtactctattatcaatttgttattgtgtgcctcggctgattcctggacgagggttcacacacatgtaagcgtttggaattttggatagaaattccgggcgtgacaagttggtatcagagcccccttgaccctaggttatgccaaatggttacccatagaagccttctaaaaatattggaaaagtagaactgttctcctcccatgccgcgctacaagcctgagtacttgtttggtgttgagggttttgtccaggagttgcgtacgatgtcctttgtcattggatttgggactgcccctttttatgcccagattcctcatgatcgtcatgaagagaagtgccgagtcaaagtcaccttgaacagtaatagtgaagatattccctcagtgatgttcgaagctggaggaagaaactacatccatgcgtgtcaggaggtggcaaggatcgccataggagagcttcgcgatcgctacagtgatcagttggccgatacggagtatcgctaccatcctcgtcaaccacagggaagtgaccgtggcaattaccttgagactgaaggaattgagaatgatgctaccacaaggcatttggttgagatgctgtgggctatggatgaaagtcgtgcggagactgtattagcggctcaagatcgtgaagaccggaatcgtggtaagatttgcaagctagaagacaaggtggatcgtttggagaaggaattagccgcattgaagggagaagcaccgccgcagaaggccaggattcgtctcactgcaatgaagagagctctatttgtccctcgctatcaattggcgccaaaggttcgtgtggtggagaatgaagttgccccaaccctagcagatcctccggtcatcatcatggtgaacactcgcagcaatgggaatggccccaacaacaaccccaataacaacaataaagtggagagaatcccacacttgcccaagttcttgctcaacagacacaactcatgaacatgatgatgcagcaactccagaatcagcagaaccaaggaaataaccatgcacctcctcagaataagttagcagaatttcttcgtgtgaggccgcctgttttctctagtaccactaatcctgttgaagctggtgattggctgcatgccatagagaagaagttggatttgcttcagtgcactgatcaggagaaggtctcatttgcatcacatcagttgcatggccctgcctctgaatggtgggatcacttccgcctgaataggactactgctgaacctattacttggcttgaattcaccgctgctttccggaagacgcatataccatcgggagtggtgtctctcaagaagaaggagttcaggtcgctcacccagggatctcgctctgttacggagtatctgcacgagttcaatcgtcttgctcgttatgctccggaagatgtgcgcaatgatgaagagcgccaggagaagttcttggaaggacttaatgatgagctttcttacccactcatgactggagattattctgatttccagaaattaatggataaggctattcgtcaggaagacaatgctggcaacaacatccgcaatcaagctccacgtcctgttgcagctccaacacagcaacaacctgccaagagggagccaggcagcaagcccgtggtgtgtttcaactgtggagacccaggacattatgctgcaagtgtccgaagccccgacggtgaaggttgtccctgcccagagcaactctaccgcaccagcatcaaaggcccgtgtcaatcatgttgctgctgcagaagcccaagatgctccagatgtgattttgggtacgttttctgttaactcagttcctgcaacagtgcttttcgattctggtgctacacattcattcgggctgcaggaa

SEQ ID NO: 87165 - DNA, 5082 bp, Oryza sativa
  Clone ID: PAT_MRT4530_86137C.1
atgccgcgcttcaagcctgagtacctgtttggtgttgaaggatttgtccaggagttgcgtactatgtcctttgtcattggatttgggactgctcctttttatgcacagattcgtcatgatcgtcatgaagagaagtgccgagtcaaagtcaccttgaacagtaatagtgaagatatcccatcggtgatgttcgaagctggaggaagaaactacatccatgcgtgtcaggaggtggcaaggatcgccataggagagctccgtgatcgttacagtgatcagttggccgacactgagtatcgttaccatcctcgccaaccacagggaagtgaccgtggcagctaccttgagactgaaggaattgagaatgatgctactacaaggcatttggttgagatgctatgggctatggatgaaagttgtgcggagactgtgttagcggctcaagatcgggaagattggaatcgtggtaagatatgcaagctagaagacaaggtggatcgtttggagaaggagctagccgcgttgaagggagaagcaccgccgcagaaggccaggattcgtcttaccgcaaggaagagagctttatttgttcctcgttatcaattggcgccaaagatccgcgtggtggagaaagaagttgccccagctcaagcagatcctccggtcatcatcataagtagtgatgaagaagaagaatccaagcgcaacaattccaagattgagtgggcagctatcaaagatgaggaagatgagccgaacgagccttcaatcgacctcctatgctcggaagaactagagtttgcttgtgtgtgtgttggtcttgcatgtgatttacatcagtggtgggatatggtgaatactcgcagcaacgggaatggtcccaacctcaacaacctcaataacaacaacaatggagagaatccaacccttgctcaagttcttactcaacagactcagctaatgaacatgatgatgcaacaacttcagaatcagcagaaccaaggaaataaccatgcacctcctcagaacaagttagcagagtttcttcgtgtgaggccgcctattttctctagtaccactaatcctgtagaagctggtgattggctgcatgccatagagaagaagttggatttgcttcagtgcactgatcaggagaaggtctcttttgcatcacaccagttgcatggtcctgcttctgaatggtgggatcacttccgcttgaataggactactgctgaacctatcacttggcttgaattcaccgctgctttccggaagacgcatataccatcaggagtagtgtctctcaagaagaaggagttcaggtcgcttacgcagggatctcgctctgttacagagtatttgcacgagttcaatcgtctagcccgttatgctccggaagatgtgcgcaatgatgaagagcgtcaggagaagtttttggaaggacttaatgatgagctttcttacccactcatgactggagattattctgatttccagaaattagtggataaggctattcgtcaggaggacaagtacaatcgcatggagcagaagaaacaccggattgctcactttaaggcacaacaggggaataatcaaaggccacgtcttactttaggaccccagtctatgccacatggaggttcttcgtctgttgttcgtccgcagcgtcagatcttcaacaacaatgttggcaacaacatccgcaatcaagttccacgccctgttgcagctccaacacaacaacagcctgctaagagggagcaaggcagcaagcctgtggtatgtttcaactgtggagatccaggacattatgctgacaagtgtccgaagccccgtcgcgtgaaggttgttcctgctcagagcaactctactgtaccagcatcgaaggcccgtgtcaatcatgttgcagctgcagaagctcaagatgctccagatgtgattttgggtacgttccctgttaactcagttcctgcaacagtacttttcgattctggtgctacacattcattcttatctatgagttttgcgggaaatcatgggatggaagtagaagatcttagacgtcctttgatggttagtaccccaagtaatcaagcactttctttgcatcgtagcccctctgtcagaatagaaattcaaggagtaccatttctggccaatcttatcttgttagaatccaaagaccttgatgtcatcctagggatggactggttagccagacataatggtgtgatagactgtgccaacagaaaagtaactctcaccagccatgatggtcaagttgtaaccgttcatgcattgtctactgagtctttaaggtcaagactgaaccagataactttgggagagattcctatagtccgggagtatcctgatgtgttcccagatgatttacctggtatgccgcctaaaagggatatagagttcagaatagatttggtacctggaacaactccgatccataagagaccatatagaatggcagcaaatgagttggcagaagttaagaggcaagtcgacgatttacttcagaaaggatacatcagaccgagttcgtcaccatggggagctccagttatttttgtggaaaagaaagatcatacccaaaggatgtgtgtggactatcgtgctctaaacgatgtgactatcaagaataagtatccgctacccagaattgatgatttgtttgatcagcttaaaggtgccactgttttctccaagatagatcttcgatcagggtatcatcagttgagaatcaaagaagaagatatacctaagacagcttttaccactaggtatgggttgttcgaatgtactgttatgtcttttggacttacgaatgcccccgctttcttcatgaacttgatgaataaggtgtttatggaatacctagacaagttcgtggtggtctttattgatgacattcttatctactctcgaaccaaagaagagcatgaagaacatcttcgccttgcattagagaagctacgagaacatcaactgtatgctaagtttagcaagtgtgaattttggttgtctgaagtgaagttccttggtcacgtcatctcagcaggaggagttgccgtcgatcctagcaatgtggaatccgtaaccaactggaaacaaccaaagacagtttcagagattcgcagtttcttaggcctcgcaggatattatcggagttttatagagaatttttccaagattgttaagcccatgacacgactgcttcagaaagatgtgaagtacaagtggtcagaagattgtgagcagagttttcaagagttgaagaatcgcttagtatcagctcctattttgattctacctgatccaaagaagggtttccaagtgtattgcgatgcatccaaacttgggttaggttgtgttctgatgcaagatgggaaggtggttgcctatgcatctcgtcagttacgtccgcatgagaagaactaccctactcatgatcttgagttagctgcagtagttcatgcgttgaagatttggcgtcattatcttttcggaactcgtacagagatgtataccgatcacaagagtttaaagtatatctttactcagccggatctgaacatgagacaaaggagatggttggaattaattaaggattatgacatgggaattcattaccacccaggaaaggctaatgttgtagcagacgctcttagcaggaaaggctattgcaatgttacggaaggacgacagttgccattggaattatgcaaggaatttgaaagattaaatttgggaattgtcagtagaggtttcgttgcagccctagaagtgaagcccactctaattgatcaagttagaaaagcccaaattaatgattctgatattcaagaaatcaagaagaatatgagaagaggaaaagctatcggtttcttggaggatgagcaaggaactcgagtcaaggcagaacatcagaaacccgccggtttgttgcagcctttgaagattcctgaatggaaatgggaagaaatcgatatggactttatcactggtttacccagaacatcatcaagtcatgactctatttgggtgatagtcgatagacttaccaaagtggctcatttcattccggtaaagacaacttattccggaagtcgcttggcggaattgtatatggcaaggatcgtgtgtttgcatggcgttcctaagaagatagtgtctgatcgaggcagtcagtttacttcaaatttttggaagaaacttcaggaagagatgggttctaagctgaactttagtactgcttatcatccgcagacagacggacaaactgaaagggtgaatcagattttggaagacatgttgagagcttgtgctttagatttcggtggaagttgggataagaatctaccttatgcagaattttcgtacaacaacagttatcaagctagtcttcagatggctccgtacgaagcactgtatggtcggaagtgccgcactccgcttttgtgggatcaaacgggagaacgtcaggttttcgggacggatatcctaagggaagcagaagaaaaggtgaaaatcattcaagaaagattgcgagtggctcagtctcgtcataagagttatgccgacaatcgccgcagagatttgagttttgaagaaggagattatgtgtatcttcgtgtcacgcctctacgaggagttcatcgttttcagaccaaaggcaaattggcaccgcgttttgtgggaccttataagattgtcagtagaagaggagaagttgcttatcagttggagttacctcaatctttggcaggagtccataatgtgttccatgtgtcgcaattgaagaaatgtttaagggtacctactgaagaagctaatcttgaacagatagaagtccaagaggatctgacctatgtggagaaaccaatccgtatcttggaaacaagtgagagaaggaccaggaatcgagttatccgcttttgcaaagtccagtggagtaatcactcggaagaagagtcaacttgggaacgagaagatgaattgaagtcagctcatccgtatctgtttgccagttcttccgaatctcgaggacgagattctgtttaa

SEQ ID NO: 87166 - DNA, 306 bp, Oryza sativa
  Clone ID: PAT_MRT4530_86138C.1
ggggagaaagccaggggggattattttaaaaaccccggcccccctggggggggggggcccggggctcctggcgggggaccccctggtggttgggggccccccccagctggctgggggtccctccaactttggccggccccccccccccctggcaacgacgaccacggttttatttaggggtcaaagcaaaaggggggggccgcccacaaaaaagcgggggactaatgcaagcaaaataaggcccccaccaaaggtttgatcggccgtagcagcatccctaccaaaaaaccttatgccgccgggcga

SEQ ID NO: 87167 - DNA, 2026 bp, Oryza sativa
  Clone ID: PAT_MRT4530_86139C.1
atggtgaacactcgcgccagtggaagtggaaacaacaacaatggagagaatcccacacttgcccaagttcttgctcaacagactcagttaatgaacatgatgatgcagcaactccagaaccagcagaaccagggaaataaccatgcacctccccagaataagttagcagaatttcttcgtgtgaggccgcctattttctctagtaccactaatcctgttgaagctggtgattggttgcatgccatagagaagaagttggatttgcttcagtgcactgatcaggagaaggtctcatttgcatcacatcagttgcatggccctgcctctgaatggtgggatcacttccgcctgaataggactactgctgaacctatcacttggcttgaattcaccgctgctttccggaagacgcatataccatcgggagtggtgtctctcaagaagaaggaattcaggtcgctcactcaggggtctcgctctgtcactgagtatctgcacgagttcaatcgtctggctcgttatgctccggaagatgtgcgcaatgatgaagagcgccaggagaagttcttggaaggacttaatgatgagctttcttacccactcatgactggggattatcctgatttccagaagttggtgattaaggctattcgtcaggaagacaagtacaacagcatggagcaaaagaaacgccggattgctcaattcaaaacacaacagggaaataatcagaagccgcgtcttactttaggaccgcagtctatgccacagggaggttcttcgtctgttgttcgtccgcagcgtcagttcttcaacaacaatgctggcaacaacatccgcaatcaagctccacgtcctgttgcagcttcgacacagcaacaacctgccaagagggagcaaggcagcaagcccgtggtgtgtttcaactgtggagacccaggacattacgcggacaagtgcccgaagcctcgacgcgtgaaggttgtccctgcccagagcaactctaccgtaccagcatcaaaggctcgtgtcaatcatgtcgctgctgcagaagctcaagatgctccagatgatccccggtgtcgccgctacccgtcgccactctcgccttcgcttctcgtcgccgggagcgctctagcgccgtgccgcttcgcgccgccgtcgtcgccgccacttcagccgtgcgccgccgtcgctccagtcatcgtcgtcgctcgggaaggtcgccatcgtggtcgccgtcacgtcgccgtcctcgtccgctccttcgccgttgctgtagaccgccggagcaccgtcgccgccgtcgacccgatcttctccgccgcttcgatctcgccgccggtgccgtccgttgatcttccgccgcttctttggtcaccggtgagttcgccgcgtcacgctctacgtcctggtgccctccgttctcgtcgtcgcgccgtcgttcgccggcgagcttgcgccgcccgagccgccgccggtggtgacgtcaccgctgacgtcatcgtggccgtttgccgtgagccgcatggttcattgcggagcaccagactgagaagtggcggagataagcccacaggggtcgctccagtcatcgtcgtcgctcaggaaggtcgccatcatggtcgccgtcatgtcgccgtcctcgtccgctcctccgccgttgctgtagaccgccggagcaccgtcgccgccgtcgacccgatcttctccgccgcttcgatctcgccgccggtgccgtccgttgatcttccgccgcttctttggtcaccggtgagttcgccgcgtcacgctctacgtcctggtgccctccgttctcgtcgtcgcgccgtcgttcgccggcgagcttgcgccgcccgagccgccgccggtggtgacgtcaccgctgacgtcatcgtggcggtttgccattccgacgtttccggagagtccgttttcgcaggagaagattttgaagagttccaaggccagcaaggcaagtcacacagatcccaaacaaccctttgagcatgttgatcctatttaa

SEQ ID NO: 87168 - DNA, 2891 bp, Oryza sativa
  Clone ID: PAT_MRT4530_8613C.1
atggcggcggcggcggttggggtcgtggtggtggtggtggtgttcttggccgccgccgtcgatggcgtcgcggggaaggactgcacgaacgggttcccggggctgacggcgtcgcacacggagcgcgcggccgcggcggcggagcagcggccggacggcgaggtcgaggcggcgcgggtgctcgatctcctcctcccccacggccacggccacggcgacgaccacgacggcgaccgccacctcacccccaccgacgagtccacctggatgtctctcatgccgcggaggctcctcgcgagccccgtctcttccccgcggcgcgacgcgttcgactggctcatgctctaccgcaacctccggggctccggctccggcgccggcgccatcgccgcgagcggcggcgcgctcctggcggaggcgtcgctgcacgacgtgcggctgcagccgggcaccgtgtactggcaggcccagcagaccaacctggagtacctgctcctcctcgacgtcgaccgcctcgtgtggagcttccgcacgcaggccggccttccggcgtccggggcgccctacggcgggtgggagggccccggcgtcgagctccggggacacttcgtcggacactacctgagtgctactgccaagatgtgggcgagcacacacaatgacactctcctggcgaagatgtcatcggtcgtcgacgcgctccatgattgccagaagaagatgggatcggggtacttgtcggccttcccctcggagttcttcgacagggttgagtccatcaaggctgtttgggctccttactatacagttcacaagattatgcaaggtcttcttgatcagtatacggtggccgggaattctaaggcccttgatttggtggtcgggatggccaattacttcagtgaccgtgtgaagaatgtcatacagaaatacagtattgagaggcattgggcttcactcaatgaggagagtggtgggatgaatgatgtgctctatcagctctacacgataacgaatgatcagaagcatctgactctggcccatctttttgataagccatgttttcttgggttgcttgcagttcaggccgacagtatttcaggcttccattccaatacacacattccagttgttattggtgcacagatgagatatgaagttactggtgatcttctttacaagcaaattgcaacgtttttcatggataccatcaattcttctcatagctatgctactgggggcacatctgctggtgaattttggaccaatccaaagcgtttagctgatactctgagtactgagaatgaggaatcttgcacaacctacaacatgctcaaggtttctcgcaacctattcagatggacaaaggaattatcatatgcagactattatgaaagggcactgataaatggtgttttaagcatccaaagagggactgatcccggggtgatgatttacatgctacctcaggcccctggacggtctaaagcggtttcctatcatggttggggaacaaagtatgactccttctggtgttgttatgggacagggatagaatccttttcgaaacttggcgattccatttacttcgaggagaaaggagatagaccggtgctaaacatcattcagtacataccaagtgcttataactggaaagcagctgggcttactgttaatcaacaactaaagccaatcagctctttggacatgtttcttcaagtttcactctccacttctgcaaagacaaatggtcagtctgccacattgaatgtgagaataccatcatggacatctgccaatggcgcaaaagcaactctaaatgacaacgatttaggattaatgtctccagggtctttcctttcaatctccaaacagtggaactcagatgatcatttatcactacagttccctattacactaaggactgaagcaataaaagatgatcggccagaatatgcatctcttcaagcaatcctattcgggccatttgttctagctggcctgtcaactggtgattggaatgcagaagccggcaacaccagcgcaatttcagactggatatctccagtcccttcatcctacaactcacagctggtgaccttcacacaagaatccagtgggaagaccttcgtcctctcgagcgcgaatggctctctcacaatgcaagaacggccgacggtcgatggcactgataccgccatccacgcaacattcagagtacaccctcaggactcagcagggcagcttgacacccagggtgcaaccttgaaggggacctctgtgcagatagaaccatttgacctcccaggaacggtgatcaccaacaaccttacccaatccgcgcaaaagagttcagattccctcttcaacattgtacctgggctagatggaaacccaaactcggtctccctcgagctcgggaccaaaccgggatgcttcctggtgataggcgtggattactccgtgggtacaaagattcaggtcagttgcaagagttctcttccaagcatcaacgggattttcgagcaggccgcgagctttgtgcaggctgctccattgaggcagtaccatcctatcagcttcattgcaaagggggtgaagaggaacttcctgcttgaaccattgtacagcctgagagacgaattctacacggtttacttcaaccttggggcttgaaccttgaaagaggttactcattagtagaaagaatcaagaattcagaataatggttgtccttactatactgtaatttagaatatgcagccaaagaggaaacgttttgtttcttctgaaattgtaggataatttttactgagttcagtgcaatgttgtgcaataaagaaatttttttctgtggcattttcgcgtcttggtaattgaaaatgctgctg

SEQ ID NO: 87169 - DNA, 4605 bp, Oryza sativa
  Clone ID: PAT_MRT4530_86140C.1
atgtcctttgtcataggatttgggactgcccctttttatgcccagattcctcatgatcgtcatgaagagaagtgccgagtcaaagtcaccttgaacagtaatagtgaagatatcccctcagtgatgttcgaagctggaggaagaaactacatccatgcatgtcaggagggaagtgaccgtggcagctaccttgagactgagggaattgagaatgatgctaccacaaggcatttggttgagatgctgtgggctatggatgaaacccgtgcagagactgtgttagcggctcaagatcgtgaagatcggaatcgtggtaagatttgcaagctagaagacaaggtggatcgtttggagaaggaattagccgcattaaagggagaagcaccgccgcagaaggccaggattcgtctcaccgcaaggaagagagctctatttgtccctcgctaccaattggcgccaaaggtccgtgtggtggagaaagaagttaccccagccctagcggatcctccggtcgtcaatatggtgaatactcgcagcaacgggaatggccccaacaacaacaatggagagaatcctacacttgcccaagttctggctcaacagactcagttaatgaacatgatgatgcagcaacttcagaaccagcagaaccaaggaaataactatgcacctcctcagaataagttagcagaatttcttcgtgtaaggccgcctactttctctagcaccactaatcctgttgaagctggtgattggctgcatgccatagagaagaagttggatttgcttcaatgcactgatcaggagaaggtctcatttgcatcccatcagttgcatggccctgccactgaatggtgggatcacttccgtctgaacaggactactgctgaacctatcacttggcttgagttcaccgctgctttccggaagacgcatataccatcgggagtggtgtctctcaagaagaaggaattcaggtcgctcactcaggggtctcgctctattacggagtatctgcacgagttcaatcgtctgactcgttatgctccggaagatgtgcgcaatgatgaagagcgtcaggagaagttcttggaaggacttaatgatgagctttcttacccactcatgactggggattatcctgattttcagaagttagtggataaggctattcgtcaggaagacaaatacaatcgcatggagcagaagaaacgtcggatcgctcaattcaagacacaacaggggaataatcaaaggccacgtcttactttaggaccccagtccatgccacagggaggttcttcgtctattgttcgtccgcagcgtcagttcttcaacaacaatgctggcaacaacatccgcaatcaagctccacgtcctgttgcagcttcgacacagcaacagcctgccaagagggagcaaggcagcaagcccgtggtgtgtttcaactgtggagacccaggacattatgctgacaagtgtccgaagccccgacgcatgaaggttgtccctacccggagcaactctaccgtaccagcatcaaaggcccgtgtcaatcatgttgctgctgcagaagctcaagatgctccagatgtgattttgggtacgttccttgttaacttagttcctgcaacaatgcttttcgattctggtgctacacattcattcttatctatgagttttgcaggaaatcatgggatggaagtaaaagatcttagacgtcctttgatggttagtaccccaagtaatcaagcactctctttgcaacgtagcccctctgtcagaatagaaattcaaggagtaccatttctggccaatcttatcctgttagaatccaaagaccttgatgtcatcccagggatggattggttagccagacataaaggtgtgatagactgtgctaacagaaaagtaactctcaccagcaatgatggtcgagttgtaactgttcatgcattgtctcctgagtctttaaggtcaagactgaaccaaatcactttggaagagattcctgtagtccgggagtattccgatgtgttcccagatgatttacctggtatgccgcctaaaagggatatagagttcagaatagatttggtacgaggaacaactccgatccataagagaccttatagaatggcagccaatgagttggcagaagtcaaaaggcaagtagatgatttgcttcagagaggatacatcagaccgagttcatcaccatggggagctccagttattttcgtggaaaagaaagatcatacccagaggatgtgtgtggactatcgtgcactaaatgatgtgactatcaagaataagtatccgctgcccaggattgatgatttgtttgatcagcttaaaggtgccactgttttctccaagatagatcttcgatcagggtatcaccagttgagaatcaaagaggaagatatacctaagacagcttttaccactaggtatgggttgttcgaatgtactgttatgtcttttggacttaccaatgcccccgctttcttcatgaacttgatgaataaggtgtttatggaatacctagacaagttcgtggtggtctttattgatgatattcttatctattcccgaaccaaagaagagcatgaagaacatcttcgccttgcattggagaagctacgagaacatcagttgtatgctaagtttagcaagtgtgaattttggttgtctgaagtgaagtttcttggtcacgtcatctcagccggaggagttgccatcgatcctagtaatgtggaatccgtaaccaactggaaacaaccaaagacagtttcagagattcacagtttcttaggcctcgcaggatattatcggaggtttatagagaatttttccaagattgctaagcccatgacacgattgcttcagaaagatgtgaagtacaagtggtcagaagaatgtgagcagagttttcaagagttgaagaatcacttgatatcagctcctattttgattttgcctgatccaaagaagggtttccaagtatattgcgatgcatccaaacttgggttaggttgtgttctgatgcaagatgggaaggtggttgcctatgcatctcgtcagttacgtccgcatgagaagaactaccctactcatgatcttgagttagctgcagtagttcatgcgttgaaaatttggcgtcattatcttttcggtactcgtacagaggtatataccgatcacaagagtttaaagtatatctttactcagccggatctgaacatgagacaaaggagatggttggaattaattaaggattatgacatgggaattcattatcacccgggaaaggctaatgttgtagcagacgctcttagcaggaaaggctattgcaatgctacggaaggacgacagttgccattggaattatgcaaggaatttgaaagattaaatttgggaattgtcagtagaggtttcgtggcagccttagaagtgaagtccactctaattgatcatgttagagaagcccaaattaatgatcctgatattcaagaaatcaagaagaatatgagaagaggaaaagctattggtttcttggaagatgagcaaggaactcgagtcaaggcagaacaccagaaacccgccggtttgttgcagcctttgaagattcctgaatggaaatgggaagaaatcggtatggattttatcactggtttacccagaacgtcatcaggtcatgactctatttgggtgatagtcgacagacttaccaaagtggctcatttcatcccagtaaagacaacctattctggaagtcggttagcggaattgtatatggccaggattacagacggacaaaccgaaagggtaaatcagattttggaagacatgttgagagcttgtgctttagatttcggtggaagttgggataagaatctaccttatgcagaattttcgtataacaacagttatcaagctagtcttcagatggctccttacgaagcactgtatggtcggaagtgccgcactccgcttttgtgggatcaaacgggagaacgtcaggttttcgggacggatatcctaagggaagcagaagaaaaggtgaaaatcattcaagaaagattgcgagtggctcagtatcgacataagagttatgccgacaatcgccgcagagatttgagttttgaagaaggagattatgtgtatcttcgtgtcacgccttttcgaggggttcatcgttttcataccaaaggaaaattggcaccacgttttgtgggaccttataagattgtcagtagaagaggagaggttgcttatcagttggaattacctcaatctttggcaggagtccataatgtgttccatgtgtcgcaactgaaaaagtgtttaagggtacctaccgaagaagctaatcttgaacagatagaagtccaagaggatctgacctatgttgagaaaccaatccgtattttggaaatagatgagagaagaaccagaaatcgagttatccgtttttgcaaagtccaatggagtaatcactcggaagaagaatcaacttgggaacgagaagatgaattgaagtcagctcatccgcatctgttcgccagttcttccgaatctcgaggacgagattctgtttaa

SEQ ID NO: 87170 - DNA, 225 bp, Oryza sativa
  Clone ID: PAT_MRT4530_86141C.1
tgtgtttttttttttttgggggtttatttgtttgtctttttgatgtttcatcccagtaagctccctcaaataatgaagaacggtctaccgtccgcatctaagaacagacaacaggggggaggccccaactgtggggcagtacctgatggcacgcaaaaggagcccaagaccccctaaatccccacaggatcccccccaaaaagaaccggggctgtaaggacaaaa

SEQ ID NO: 87171 - DNA, 623 bp, Oryza sativa
  Clone ID: PAT_MRT4530_86142C.1
ggcggcggcggcggtggtcgcggtggcggcgctggaggcgatcaacgtgacgacggtggcgttcgaggaggggtacacgccgctgttcggcttcgacaacatcctccgttccgccgacgaccgcaccgtcagcctcctcctcgaccgctccaccggctctgggttcatgtcgtcgtccatgtaccagcacggcttcttcagcgcctccatcaagctcccctccgactacaccgccggcgtagtcgtcgccttctacacatcgaacggcaacgtgatcgagaagcggcacgacgagctggacttcgagttcctgggcaacatccgcgggaagccatggcgggtgcagacgaacgtgtacggcaatggcagcgtgagccgggggagggaggagcgctacctgctccccttcgacccgaccacggagttccaccgctactccatcctctggacgcgcgccgccatcgtcttcttcgtcgacgacgtccccatccgcgaggtccgccgccgcacccgccccggatcccggccggcgaggcccaccagggccgccgacatgtagcgcagcacataatcatatttgtttcatcatttcatcgtcgcgccttcgagtcatgggatgatcg

SEQ ID NO: 87172 - DNA, 681 bp, Oryza sativa
  Clone ID: PAT_MRT4530_86143C.1
atgtctggagttgtcgccgccactgctggcggaggtggtacgccgccgacaggagctgatctgaaatattgtgggtggatcagccagggaggtcggtctttgctgtgccagacctcgatttcgtcggccctagcgacgcctgattgtggaaaattcagctacagtgccggtggccgaaagtcttcaagctttgaggtcgctggccatagtttgcggtggatctggatggcttcaaccgatttccgcgacctctttgtccatctaatccttggcgctgtgcccttcctcagcgatgcactcagccgcgtcgtgtccggtgagggtgggctcacacatgcccagatcgtcgtcatatttggtgggcttggaggtgcagagttagctgagctgttggagcagttcgtgcttgctgattcctctcatgcgagcatcccgaacattgtctcgacagacaacacctccatcaatttgctgctgtgcctaaatcaattatgcctaaatcaattatccaagcagcagcacaagtcatgggccagcaaggagcacgccatgaatcccctgcatcatacaggcaaccaacaagctacacaacaaggcaaagctgcagtatccatgttgaggttatcgttcgggttgagcaccgactatctgttagactttggtcggcagggatattgttag

SEQ ID NO: 87173 - DNA, 3246 bp, Oryza sativa
  Clone ID: PAT_MRT4530_86144C.1
atggatcaatcaacaattgatcgaagttggatgtatgcgaaaaatttgaaacgtcattctacggagtacagaaagggcgtaataaattttatgaacaccgcggaggaggatcgaataagaaaaaacagtgattacatgtgttgtccatgtgcagattgcaagaatgagaatatgtttgatagcggagaggacgtacacggtcatctgatacaacgaggatttatggagggctatacatgttgggtgaagcatggagagcaagaatcaggaagtggagcagcagcagacagaagtggtgcacataatcaagaagatgaagatgagcatgacatgtttataccttctccattgggcggtgaaatggttgatgtggatcacgatctgctgcaagacatgttacgtgacattgaggacctagcccagaatgagagagatggaatgaagttcagcaggttggtaagtgatttcgagacgcctctgtatactggatggaaagcaaaacacactaagttgtcagttaccttggacctaatgaagctgaaggcaagtagtggatggacagacaagagtttcacagatctttttggaattttgaaggttatgcttcctattgagaacacattgcccgagacgacatacgaagcaaagcaggttctgtgtccactggagttagaggtccgtagaattcacgcttgtcctaacgactgcatattgtaccacaagcaatatgcggacttggatgcttgtcctgtctgcaaggcttctcgatacaagcgaaagaaaagtgctgacgaaggaaataagtcaaagaggggtggtccggcaaaggttgtgtggtatctacctatcattgatcgtttcaagagaatctttgccaacccgaacgaagcgaagttagagaacttcaagctaagagttctattgttctgcaccattaataactaccctgcactcggtaatatttctggacaaactataaaaggaaagaaggcatactccgattgcaaggaacatacacgaagccggtggctgaagaaatcacgaaagatggtatacatgggtcaccggaggtggctcctgctacgtcacgcatttagaagaaagaagaaaaattttaacggtaagagagaacttcagcctgctcctaaagatttgttcggagatgaggtccacaatatggtcaagaacataagcaatgagcttgggaagaaaagaaaacgtagcaagacaaaggagaaggaaaataatgtgtgtgagagtttggttggcctgatgctgaatattcccgggaagacaaaggacgggttgaacacgcgcctttgtctacaggacatgaatattcgcagtgaactccagcctatacgagatgcagagacagttgctatcagaggcatcctaccaccgaaagtgcgtcacacgatccaacgtctgtgcgccttcttcaatgcaattggacataaggttatagatccagaagatatagatgggctgcagacggatattgtgaataccctctgtcacctggagatgtttttcccactgtctttctttgatatactggttcatctccctgttcatctggtgaagcaaacaaaactatgtggcccggcttttcgaagggaaatgtggctgtttgaaagaaaaaaaaagtatacgatgtttcagcaaggcgaaccaatatcgatgacaactagtgggtcctcaagggcacgtactcctaggacagggaacaaaatccctaaggaacggttccgcataacagcggtggacaccgtagggttgccgacatctccaaggaaaatattgagccgatttaggtctatctgcggggtcatagggaggcagaaattcagtattctgcaagatgacatcaagctcgtgccggccgcagagaaggacattgcttggctaacgttcaaggagagctttgattatcctgcggtgcatgagtaccgtctcaggcaggctgctttcaaggttatgggcaatgcttggaagaacttcaagactaagctagtcggcgagttcgtatacaactcggcgaatccagatccaagagagaaatttccttggatcacggaacaggtctgggaggaattccatgcgaagaagtcgacccccgagtccagagctagaagcgaggcatatcgcttgctccaaaccaggaaccagcatccgcaccggcttggcaccaccggatatgccggtaaggaaaaggaatggcagcgtgaggatgaagaagcggaggaatcgtgcacaccgctcgtgtttggcgatatcccacaccctcgggctaggaactgggccagggccagaagaagttggttgccgagcaacaagcctcgcaagaggcctgctctcaaagacacgaggacgacctcctcacgaaagcgttgggcaacaaggaataccgtggacggacacggggcgttgggtcttctgttccctggaagtatggatttccagacttcgcgtggcagtacaagaagcggacttccaacaaggcggagaaagatgcacgccttgaaagccaagatccgggcgtcgataagagctgagctgacatctgaattcgacaaaaagctcgagtcgatgagggccaagattaggcaagagattcgagaagagcaacagaacccccaggccgccgttgctgctgcgcacgaagagttaggaagtcccacccgaaaacaaagcagttgcgcatcaactgagttggtggaaaatccaacatcggtcgacagtgccgtcgaccacataacggaaccaacgagctgcaccctcacagttagggtgataccgaccttcacggtttcagcagccgagggacttgtgtacaagccgaccccagagacaagagtgcatggagcgcaactcagggccgactgtgcaaaagttcaagtcgattcggtgaagcccgaatacgagctgttccctctgaagtatccaccgaacgacgaggtcctctcactaggaaatgcccgtggtaccttcatccaatggcccaaggacctcattgagatcagggttacagcgaggccaaccactgcaccaggcggtcgtccaccaaagagactcgcctctgctccttcagcccctcctgctcaagatcgtcatgcacaatcttacgatgtgcagttgcagtacgacacggattttggggaggaccgaacggaggccgacagcaaggcgattcatgaacccccaccgatgaagaagagcaggaaggcacactcttccccttag

SEQ ID NO: 87174 - DNA, 1431 bp, Oryza sativa
  Clone ID: PAT_MRT4530_86145C.1
aaacaacaacaacaaaaaaaaaacaacgtggggtgtgagctctctgaacctcctagcttgcccgagacagagagaaaaagaaagcctcatctccggcccctcttcctccttgattccggtggctcgccgccggtgacgggagggagaggggtcaggctcaattgcgtctccttcgtatagtagtttagtcgggttagtctcgtagtcaagttagtctcgttctatgtccttcctgttctttgtctttggtcctctatgaagagtccagtattcccttcttcagatctgaaatattgtgggtggatcagccagggaggtcggtctttgctgtgccagacctcgatttcgtcggccctagcgacgcctgattgtggaaaattcagctacagtgccggtggccgaaagtcttcaagctttgaggtcgctggccatagtttgcggtggatctggatggcttcaaccgatttccgcgacctctttgtccatctaatccttggcgctgtgcccttcctcagcgatgcactcagccgcgtcgtgtccggtgagggtgggctcacacatgcccagatcgtcgtcatatttggtgggcttggaggtgcagagttagctgagctgttggagcagttcgtgcttgctgattcctctcatgcgagcatcccgaacattgtctcgacagacaacacctccatcaatttgctgctgtgcctaaatcaattatgcctaaatcaattatccaagcagcagcacaagtcatgggccagcaaggagcacgccatgaatcccctgcatcatacaggcaaccaacaagctacacaacaaggcaaagctggtccagcaattctgtgcatgccggcaacgaagtctccttctcaatcctcacccatgggatacatcttaagttccagtatccatgttgaggttatcgttcgggttgagcaccgactatctgttagactttggtcggcagggatattgttagtgttcctcagatttaacgatgacttccatggcaatcattggttgagtccggtgaagccaccaacatatctacgactcaactccaaagctcaattagtgccaaatccgtggaggcagccggagggatcgctggcaggtcaaatgggaagcacgtttgaagaggcccttgggtgcaatcgtcgcggcaatgccgcggatctccgacgattgtattcactactactgctgtatcagatgatctggaagtttgcttccatcattcaatcattacctttcaggaagatggtccttaacgtttgttgttatcaatttcttgcaaggtgatgtttcagggaatgttgttcccttccaatgtactatgtttaatatgcaataaaactttatgagtttcaaaaaaaaaaaaaaaaaaaaaaaaaaaaaaaaaaaaaaaaaaaaaaaaaaaaaaaaaaaaaa

SEQ ID NO: 87175 - DNA, 936 bp, Oryza sativa
  Clone ID: PAT_MRT4530_86146C.1
atggatcaatcaaattgcaagaataagaatatgtttgataacggagaggacgtacacggttatctgatacaacgaggattcatgaagggctatacatattgggagaagcatggagagcaagaatcaggaagtggagaagcagcagacagaagtggaattttgaaggctatgcttcctgctgagaacacatttcccaagacgacatacgaagcaaagcaggttctgtgtccactggggttagaggtccgtagaattcacgcttatccaaacgactgcatattgtaccacaagcaatatgcggacttggatgcttgtcctgtctgcaaggcttctcgatacaagcgaaagaaaagtgctgacgaaggaaataagtcaaagaggggtggtccggcaaaggttgtgtggtatctacctatcattgatcatttcaagagaatctttgccaacccgaacgaagcgaagttagtacgttggcacgccacagagagaaggaatgacggtccgaggcaacccgacaatgatatcgatgtattggacgaggataaatgcattctaccaccgaaagtgcgtcacacgatccaacgtctgtgcgccttcttcaatgcgattggacagaagcaaacaaaactatgtgtcccggcttttctaagggaaatgtggccgtttgaaaggtacatgggagatctaaagtcgtacgttcgtaacagagctaaacccgaggggagcatcattgaaggttacacgaccgaggaggctattgtgttatgtgtcaattgcatgtccgatgccaatcctatcggagttcctgcgtctcgtcacgagggaaggttgtcaggtgttggcacaatcggaaggaaaagaattaggcccgatcaagcgtcctacgcgcaggctcattacgctgtgctccaacatatggcagaagtagacggatag

SEQ ID NO: 87176 - DNA, 525 bp, Oryza sativa
  Clone ID: PAT_MRT4530_86147C.1
atgaatcccctgcatcatacaggcaaccaacaagctacacaacaaggcaaagctggtcccggcaattctgtgcatgctggcaacgaggtctccttctcaatcctcacccatgggatacatcttaagttcgtaagactttatcatcgccaccatctagcttctctaaagcttaaggtcagctgggttttgggtgcatcttccatttcattcctttgcagcagtatccatgtcgagattatcgttcgggttgagcaccgactatctgttagactttggtcggcagggatgttgttagtgttcctcagatttgacgatgactttcatggcaatcattggttgagtccggtgaagccaccaacatatctacgactcaactccaaacctcaattagtgccaaatccgtggaggcagccggagggatcgctggcaggtcaagcgggaagcacgtttgaagaggcccttgggtgcaatcgtcgcggcaatgccgcggatctccaacgattgtattcactactgatgtattag

SEQ ID NO: 87177 - DNA, 289 bp, Oryza sativa
  Clone ID: PAT_MRT4530_86148C.1
agaatgcatgcctcccgaagcatatattcttgctatgccgggaatcgtgtttgctggaggcttgccacggagggccttcggctgaacctgacgaaaccaaaaagtttaagcaacaagctcactccgaagggggtcggcgattgacaagagtgaaatcatactggcgaaagccgagactggggtaacaccaccttcaccgagtggggatctcgccagaaggcggcacggccataaatgatgtggtgaaagactatgaacaaaggcgctggcttttgcataacacccaacc

SEQ ID NO: 87178 - DNA, 2109 bp, Oryza sativa
  Clone ID: PAT_MRT4530_86149C.1
atggttgatgtggatcacgatctgctgcaagacatgttacgtgacgttgaggacccagcccagaatgagagagatggaatgaagttcagcaggttggtcagtgattccgagacgcctctgtacgctagatgcaaagcaaaacacactaagttgtcagttaccttggacctaatgaagctgaaggcaagtagtggatggacagacaagagtttcacagatcttttaggaattttgaaggctatgcttccagttgagaacacattgcccgagacgacatacgaagcaaagcaggttctgtgtccactggggttagagatccgtagaattcacgcttgtcccaacgactgcatattgtaccacaagcaatatgcggacttggatgcttgtcctgtctgcaaggcttctcgatacaagcgaaagaaaagtgctgacgaaggaaataagtcaaagaggggtggtccggcaaaggttgtgtggtatctacctatcattgatcgtttcaagagaatctttgccaacccgaacgaagcgaagttagtacgttggcacgccacggagagaaggaatgacggtccgaggcaacccggcaatgatatcgatgtattcctggagcctgttatcgacgatctagagattctttggaaagaaggtgtggaaacttgggatgcatatggtcaggagaacttcaagctaagagttctattgttctgcaccattaatgactaccctgcactcggtaatctttccggacaaactataaaaggaaagaaggcatgctccgattgcaaggaacatacacgaagccggtggctgaagaaatcacgaaagatggtatacatgggtcaccggaggtggctcccgctacgtcacgcatttagaagaaagaagaaaatttttaacggtaagagagaacttcagcctgctcccaaagatttgtccggtgatgaggtccccaatatggtcaaggacaaaagcaatgagtttggaagaaaagaaaacgtagcaagacaaaggagaatggacatgaatattcgcagtgaactccagcccatacgagatgcagagacaggtaaagtgtacctccctccagcctgccacacactgtggaaggatgagaagatcgcaatgttatcatgcttgaaggatattaaagttccattgggctattcagcgaggataacttttctaagggaaatgtggctgtttgaaaggtacatgggagttctgaagtcatacgttcgtaacagagctaaacccgaggagagcatcattgaaggttacacgaccgaggaggctattgagttctgtgtcaatacatgtccgatgccgatcctatcggagttcctgtgtttcgtcacgagggaaggttgtcaggttcattacgctgtgctccaacatatggcagaagttggcccatactttgaggagcacttagcgaaaatccgagatgagaacttggggcgatctgatgcatggattaacaaagaacataattctcggttcaacgaatggttcatgaatcgtgtgacaatgtccacggatgtcccaaatgagacattacagttgttgggaatgggaccgtcttggaccgtagacacatggcaaggatacgatataaatggatacacattttacaccgtcaaacaagatgacaaaagcacagtgcaaaacagcggcatccgtataaatgcattccaggatcaagttgggtcaaacacatactacggccgcattgaggagatctgggagctaaactacgtcaagttcaaggttcctttgttccgctgccgttgggtgaatctacgcactggtgtcaaagccgacaaggaaggtttcactttagtagatctatctaaggtgggatacgccgatgaaccgtttgtacttgcgaaacaggtcgagcagatattctacataaaagacccttcaaacaagaagatgcacatcgtgagggatggaaagcgccgaattgtaggagttgacaacgtcgtcgatgaagaagaatacaaccataatcttcatgtaagacctcacattgaccttgacgatgatccccaagagcctgtggcatatgctcgttcacatcatacggaaggcataaccttgtga

SEQ ID NO: 87179 - DNA, 252 bp, Oryza sativa
  unsure (1)..(252): unsure at all n locations
  Clone ID: PAT_MRT4530_8614C.1
acgattttgccattcccgncgtgccatgcccgcgagacccctccgcggcgacggccatggcgaacagcaagagcctgctcctctgctggtgctcgctcctcctcctcctcctcgccgncgcagcgccgcacgccctcgccctcccgttctggaccgactacagggcgccggtgccgctgaacgggacgacgctgggcttctgcngccggggggggagccggaagcataactgctgcggcgccgcggatgatg

SEQ ID NO: 87180 - DNA, 1653 bp, Oryza sativa
  Clone ID: PAT_MRT4530_86150C.1
atgtcgatgacaactagtgagtcctcaagggcacgtactcctaggacaaggaacaaaatccctaaggaacggttccgcataacagcggtggaccaagtagggttgccgacatctccaaggaaaatattgagccgatttaggtctatctgcagggtcatagggaggcagaaatttagtattctgcaagatgacatcaagcatgtgccggccgcagagaaggacattgcttggctaacgttcaaggagagcttcgattatcctacggagcatgaggaccgtatcagagctagaagggaggcatatcgcttgctccagaccaagaaccagcatccgcaccggcttggcaccgccggatatgtcggtaaggaagaggaatggcagcaggaggatgaacaagcggaggaatcgaacacgccgctcatgtttggcgatatcccacaccctcgagcaaggaacttggccagggccaggtaccagaagaatgctcatggcacaatcttcatgccaaatccagaagatcaacgagtaaggagttggttgccgagcaacaagcctcgcaagaggcctgctctcaaagacgcgaggacgacctcctcacgaaaacgttgggcaacaaggaacaccgtggacgaacacggggcgttgggtcttccgttccctggaaccgagggacttgcgtacaagccaaccccagagacaagagtgcatggagcgcaacttaggggcgactatgcaaaagttcaagtcgactcggtgaagcctgaatacgagctgttcccactgaagtatccaccgaacgacgaggtcctctcacttggaaatgcccgtggtaccttcatccaatggcccaaggacctcattgagataaggtatgacatggattttggggaggaccgaacggaggccggcagcaaggcgattcatgaacccccaccgatgaagaagagcaggaaggcacactcttcccctcagagaattactatcgataaacccgaagcaaaggggagaggaaggggaggaaaggtgcaggcctcgcttctagctccaaggaagctagatctgggcaagggccaggaagagactaagggcaaagaggtcaagaagaaatacgtcgctccacaggagttccaactaggcataccattggttggagatgacgtgcttgccgcaatgggcaccacttgcaaggaccttcacgtatactacatggagaaatctaacgccaggaggccgaataaagctatcgacatccttggagagcacgatggaaagccattccttggtccaacaaattatatcgtggtcgacttcaaggatctattcgacctctacaggctccaagcggtggacacaagcctccttaagtgctactccttgaagacaggacatgacaccctcatccacaaaaaagacttcctggtgaagcaacaaataggtgaccagtgccgattccatgtgtgccacaacatgcgccttctgtacacagaaaaggtgaagactttggctgattttgagaccggtcaagagcaggtcacctggcgcacgtctatcggcggacggcgcgcgacctgccacgtcgcattaaatgcgatgggggcggttggggcgctgcccataaatgcctctggcggacagcgcccccgcccgttctag

SEQ ID NO: 87181 - DNA, 2265 bp, Oryza sativa
  Clone ID: PAT_MRT4530_86151C.1
atgcaattgatcgaagttggatattgcaagaatgagaatatgtttgatagcggagaggacgtacatggtcatatgatacaacgaggattcatggagggctatacatgttgggtgaagcatggagagcaagaattaggaagtggagcagcagcagacagaagtgttgcgcataatcaggaagatgaagatgagcatggcatgtttataccttctccattgggcggtgaaatggttgatgtggatcacgatctgctgcaagacatgttacgtgacgttgaggacccagcccagaatgagagagatggaatgaagttcagcaggttggtcagtgattccgagacgcctctgtacgctggatgcaaagcaaaacacactaagttgtcagttaccttggacctaatgaagctgaagtcaagtagtggatggacagacaagagtttcacagatcttttaggaattttgaaggctatgcttcctgttgagaacacattgcccgagacgacatacgaagcaaagcaggttctgtgtccactggggttagaggtccgtagaattcacgcttgtccaaacgactgcatattgtaccacaagcaatatgcggacttggatgcttgtcctgtctgcaaggcttctcgatacaagcgaaaaaaaagtgctgacgaaggaaagaaatcaaagaggggtggttcggcaaaggttgtgtggtatctacctatcattgatcgtttcaagagaatctttgccaaccccaacgaagcaaagttagtacgttggaacgccacagagagaaggaatgacggtccgaggcaactcggcaatgatatcgatgtattcctggaacctgttatcgacgatctggagattctttggaaagaaggtgtggaaacttgggatgcatatggtcaggagaacttcaagctaagagttctattgttctgcaccattaatgactaccctgcactcgatttgtccggagatgaggtccacaatatggtcaaggacataagcaatgagtttgggaagaaaagaaaacgtagcaagacaaaggagaaggaaaagaatgtgtgtgagagtttggttggtctgatgttgaatattcccgagaagacaaaggatgggttgaacgcgcgccttgatctacaggacatgaatattcgtagtgaactccagcccatacgagatgcagagacaggtagagtgtacctccctccagcctgccacacattgtcgaaggatgagaagatcgcaatgttatcatgcttgaaggatattaaagttccattgggctattcagcgaggataagtaagtatgttaaattggacgatctaaaacttgttggaatgaagtctcacaattgccatgtgctaatcacacaaatcttgccagttgctatcagaggcattctaccaccgaaagtgcgtcacacgatccaatgtctgtgctccttcttcaatgcaattggacagaaggttatagatccagaagatctagatgggttgcagaccgatattgtgaataccctctatcacctggagatatttttcccattgtctttctttgatataatggttcatctccctgttcatctggtgaagcaaataaaactatgtggcccggcttttctaagggaaatgtggccgtttgaaaggtacatgggagttctgaagtcgtatgttcgtaacagagctaaacctgaggggagcatcattgaaggttacacgaccgaggaggctattgagttctatgtcaattacatgtccgatgccgatcctatcgaagttcctgcgtctcgtcatgagggaaggttgtcaggtgttggcacaatcggaaggaaaagaattaggccagatcaagcgtcgtacgcgcaggctcattacgctgtgctccagcatatggcagaagttggcccatactttgaggagcacttagcgaaaatccgagatgagaacttggggcgatctgatgcatggattaacagagaacataattctcggttcaacaaatggttcaagaatcgtgtgacaatgtccacggatgtcccaaatgagacagtcgagcagatattctacataaaagacccttcaaacaagaagatgcacatcgtgagggatggaaagcgccgaattgtaggagttgacaacgccgtcgatgaagaagaatacaaccataatcttcatgtaagacctcacattgaccttgacgatgatccccaagagcctgtggcatatgctcgttcagatcatacggaaggcataaccttgtaa

SEQ ID NO: 87182 - DNA, 168 bp, Oryza sativa
  Clone ID: PAT_MRT4530_86152C.1
atggcttctttcctactcatcaacttcgactctgactcgggaagtgggggcagaggcacttgtcacatggactggtgtaggcaaccaaacgacccaaagctgcatgagggatgcgagccaggcttgatacaggcaaccaaacatgacattcatgaaaagtatcactag

SEQ ID NO: 87183 - DNA, 2346 bp, Oryza sativa
  Clone ID: PAT_MRT4530_86153C.1
atgtctcagcaaggcgaactaatgtcgatgacaactagtgggtcctcaagggcacgtactcctaggacagggaacaaaatccttaaggaacggttccgcataacgacagtgaaccaagtagggttgccgataggtccaaggaaaatattgagccgatttaggtttatctgcggggtcatagggaggcagaaattcagtattccgcaagatgacatcaagcaagtgccggccgcagagaaggatagtgcttggctagcgttcaaggagagcttcgattatcctgtagagcacgagaaccttatcaggcaggctgcttttaaggtcatgggcaacgcttggaagaacttcaagaatcaacgagtgtacgaagctataaaggaattggttgccgagcaacaaacctcgcaagaggccagctctcaaagacgcgaggacgacctcctcacgaaagtgttgggcaacaaggtacactgtggacggacacggggcgttgggtcctccgttccctggaagtatggatttccagactacgcgtggcagtacaagaagcggacttccaacaaggcggagaaagatgcacgccttgaagccaagatccgggcgtcgatcagagcggagctgacatctgaattcgacgaaaagctcgagtcgatgagggccaagattaggcaaaagatccaagaagagcaacagaacccgcaggccgccgctgccgttgcgcatgaagagttaggaagtcccacccaaaaacgcagcagttgcgcatcaactgagttggcagaaaatccaacatcggttaacagcgccatcgaccacataatggaaccaacgagctgcaccctcacagttagggtgatgccgaccttcacagttccagcagccgagggacttgcgtacaagccgaccccagagacaagagtgcatggattgcaacttaggggcgactgtgcaaaagttcaagtcgactcggttaagcccgaatacgagctgttcccactgaggtacccaccgaacgacgaggtcctctcactaggaaatgcccgtggtaccttcatccaatggcccaaggaccacattgagataagggttacagcgaggccaaccactgcaccaggcggtcatccgccaaagagacccgcctctgctccttctgcccctcctgctcaagatcgtcctgcacaatcttacgatgtgcagttgcagtacgacacagattttagggaggaccgaacggaggccgacagcaaggcgattcatgaacccccacctatgaagaagagcaggaaggcacactcttcccctcatagaattactcttgataaacccgaagcaaaggggagaggaaggggaggaaaggtgcaggcctcgcttctagctctaaggaagctagatctgggcaagggccaggaagacactaagggcaaagaggaccttcacgtatactacatggagaaatctaacactaggaggccaaataaaactaccgatatccttggagagcacgatggaaagccattccttggtccaacaaattatatcatggtcgacttcaaggatctattcgacctctacaggctccgagcggtggacacaagcctccttaagtgctactccttgttaagttggcaatggtgtcagaagaatgcaccggaagttgccttccttgatccacaagtggtcactgtcacaaatatccagaatgaccgtcaaggaatgaccccaattcaactagcgatagatgaagcgtgggcccaatacgtgcaaagaggatgcctcaggaagacaggacatgacaccctcatccacaaaaaagacttcccggtgaagcaacaaataggtgaccagtgcggattccatgtgtgccacaacatgcgccttctgtacagagaaaaggtgaagactttggctgagtttgagtggtccctggtgccgttgccggaggagaagggtgagtacaccatgctcctctacaagtggacccacgactcctatgaggacgaggccaagttcgccaagttgcaggcctgggtttgtggcgagtacgctcgcaaaggattcgtggaggtggactatgactatttcgccaacagggaggacgcgattaggctgaataaggaagcacaggtggaggttttgggacactggtcggatcatcattatccttcccacaccgatcttgacgatgaagattggaagcttgaaattaatcaatcaaatgaagtttatccaggagagaccgagttaaagaaggatgcgacaagcagattatctattaattcggaagagtatccgattgtctatgtatcattatttactcaagtatcagatcccacattggacgtatag

SEQ ID NO: 87184 - DNA, 2427 bp, Oryza sativa
  Clone ID: PAT_MRT4530_86154C.1
atggtatacatgggtcaccggaggtggctcccgctacgtcacgcatttagaagaaagaagaaaatttttaacggtaagagagaacttcagcctgctcccaaagatttgtccggagatgaggtccacaatatggtcaaggacataagcaatgagtttgggaagaaaagaaaacatagcaagacaaaggagaaggttgctattagaggcattctactaccgaaagtgcgtcacacgatccaacgtctgtgcaccttcttcaatgcaattggacagaagcaaacaaaactatgtggcccggcttttctaagggaaatgcggccgtttgaaaggtacatgggagttctaaagtcgtacgttcgtaacagagctaaacccgaggggagcatcattgaaggttacacgaccgaggaggctattgagttctgtgtcaattacatgtccgatgccgatcctatcggagttcctgcgtctcgtcacgagggaaggttgtcaggtgttggcacaatcggaaggaaaagaattaggcccgatcaagcatcgtacgcgcaggctcattacgctgtgctccaacatatggcagaagttggcccatactttaaggagcacttagcaaaaatccgagatgagaacttgaggcgatctgatgcatggattaacagagaacataattctcggttcaatgaatggttcaagaatcgtgtgacaatgtccacggatgtccaaaatgagacagtacagttgttggggatgggaccgtcttggaccgtagacacatggcaaggatacgatataaatggatacacattttacaccgtcaaacaagatgacaaaagcacagtgcaaaacagcggcgtccgtatagatgcattccaggatcaagttgggtcaaacacatactacggccgcattgaggatatctgggagctaaactacgtcaagttcaaggttcctttgttctgcttccgttgggtgaatctacgcactagtgtcaaagccgacaaggaaggtttcactttagtagatctatctaaggtgggatacgccgatgaaccatttgtacttgcgaaacaggtcgagcaggtattcgacataaaagacccttcaaacaagaagatgcacatcgtgacggatggaaagcgccaaattgtagaagttgacaacgtcattgatgaagaagaatacaaccataatcttcatgttatgggcaatgcttggaagaacttcaagactaagctagtcggcgagttcgtctacaacccgacgaatccagatccaagagagaaatttccttggatcacggaacaggtctgggaggaattccatgcgaagaagttgacccccgagtccagagctagaagcgaggcatatcgcttgctccagaccaggaaccagcatccgcactggcttggcaccgccggatatgccggtaaggaagaggaatggcagcgtgaggatgaagaagcggaggaatcgaacacgccgcttgtgtttggtgatatcccacacccacgagctaggaactgggccagggccaggtaccagaagaatgatgatggcacaatcttcatgccaaatgcagaagatcaacgagtgtacgaagctatattggttgctgagcaacaagcctcgcaagaggcccgctctcaaagacgcgaggacgacgtcctcacgaaagcgttgggcaacaaggaacaccgtggatggacatggggcgttgggtcttctgttccctggaagtatggatttccagactacgcgtggcagtacaagaagtggacttccaacaaggcggagaaagatgcacgccttgaagccaagatccgagcgtcgataagagctgagctgacatctgaattcgacgaaaatctagagtcgatgagggccaagattaggcaagagatccgagaagagcaaaagaacccccaggccgccgctgctgttgcgcacgaagagttaggaagtcccacccaaaaacgtagcagttgcgcatcaactgagttggcagaaaatccaacatcggtcgacagcgccgtcgaccacataatggaactaacgagctgcaccctcacagttaggatgatgccgaccttcacgattccagcagccgagggacttgcgtacaagccgaccccagagacaagagtgcatggagtgcaacttagggccgactatgcaaaagttcaagtcgactcggtgaagcccgaatacgagctgttccctctgaagtatccaccaaacgacgaggtcctctcactaggaaatgcccatggtaccttcatccaatggcgcaaggacctcattgagatcaaggttacagcgaggccaaccattgcaccaggcggtcgtccaccaaagagacccgcctctgctccttcagcccctcctgctcaagatcgtcatgcacaatcttacgatgtgcagttgtag

SEQ ID NO: 87185 - DNA, 2319 bp, Oryza sativa
  Clone ID: PAT_MRT4530_86155C.1
atggatcaatcaacaattgatcgaagttggatgtatgccaaaaatttgaaacgtcattctacggagtaccgaaagggcgtaataaattttatgaacgctgcggaggaggatcggataagaagaaacagtgattacatgtgttgtccatgtgcaaattgcaagaacgagaatatgtttgatagcggagaggacgtacacggtcatctgatacaacgaggattcatggagggctatacatgttgggtgaagcatggagagcaagaatcaggaagtggagcagcagcagacagaagtggtgcgcataatcaggaagatgaaaatgagtatgacatgtttataccttctccattgggcggtgaaatggttgatgtggatcacgatatgctgcaagacatgttatgtgacgttgaggacccagcccagaatgagagagatggaatgaaattcagcaggttggtaagtgattccgagacgcctttgtacgctggatgcaaagcaaaacacactaagttgtcagttaccttggacctaatgaagctgaaggcaagtagtggatggacagacaagagtttcacagatcttttaggaattttgaaggctatgcttcctgttgagaacacattgcccgagacgacatacgaagcaaagcaggttctgtgtccactggggttagaggtccgtagaattcacgcttgtcccaacgactgcatattgtaccacaagcaatatgcggacttggatgcttgtcttgtctgcaaggcttctcgatacaagcgaaagaaaagtgctgacgaaggaaataagtcaaagaggggtggtccggcaaaggttgtgtggtatctacctatcattgatcgtttcaagagaatctttgccaacccgaacgaagcgaagttagtacgttggcacgccacggaaagaaggaatgatggtccaaggcaacccggcaatgatatcgatgtattcctggagcctgttatcgacgatctggagattctttggaaagaaggtgtggaaacttgggatgcatatggtcaggagaacttcaagctaagagttctattgttctgcaccattaatgacttccctgtactcgatttgtccggagatgaggtccacaatatggtcaaggacataagcaatgagtttgggaagaaaagaaaacgtagcaagacaaaggagaaggaaaagaatgtgtgtgagagtttggttgacctgatgttgaatattcccgggaagacaaaggacgggttgaacacgcgccttgatctacaggacatgaatattcgcagcgaactccagcccatacgagatgcagagacaggtaaagtgtacctccctccagcctgccacacactgtcgaaggatgagaggatcgcaatgttatcatgcttgaaggatattaaagttccatcgggctattcagcgaggataagtcagtatgttaaattggacgatctaaaacttgttggaatgaagtctcacgattgccacgtgctaatcacacaaatcttgccagttgctatcagaggcattctaccaccgaaagtgcgtcacacgatccaacgtctgtgcgccttcttcaatgcaattggacagaaggttatagatccagaagatctagatgggctgcagaccgatattgtgaataccctctgtcacctggagatgtttttcccactgtctttctttgatataatggttcatctccctgttcatctgttcaagaatcgtgtgacaatgtccacggatgtcccaaatgagacaatacagttgttggggatgggaccgtcttggaccatagacacatggcaaggatacgatataaatggatacacattttacaccgtcgaacaagatgacaaaagcagagtgcaaaacagcggcgtccgtatagatgcattccaggatcaagttgggtcaaacacatactacggccgcattgaggagatctgggagctaaactacgtcaagttcaaggttcctttgttccggtgccgttgggtgaatctacgcactggtgtcaaagccgacaaggaaggtttcactttagtagatctatctaaggtgggatacgccgatgaaccatttgtacttgcgaaacaggtcgagcagatattctacataaaagacccttcaaacaagaagatgcacatcgtgagggatggaaagcgccgaattgtaggagttgacaacgtcgtcgatgaagaagaatacaaccataatcttcatgtaagacctcacattgaccttgacgatgatccccaagagcctgtggcatatgctcgttcagatcataccgaaggcataaccttgtga

SEQ ID NO: 87186 - DNA, 485 bp, Oryza sativa
  Clone ID: PAT_MRT4530_86156C.1
ggcagaatacattcatatttataaggaattcatggtttaactacaatagttaaccccctcatctacttttcatggggttaaatcagcaacataaagagtacaaaaattacaacacttgctcagtacacatagacacattgtaaattagactttggtatacgtgctaaactgtaaaatggaaaaggagaaaaaaatgatatacctgtattgtttagcattgaagctcattttctgatgatcttgaaccatggtaccagcttgcaagttaatggtcagactaaaaaaagtttgacctaagtgatgaaagcagtggccaattgaagctatctgcacttccgcagtatgagttcatactttccctgcagattcattcaactccaagacgatgggctgtatctgagttggacgggcagagctagagaaatcctcaagtcaattatgttttgtttcttcgtcatctgcattacctgattcctctggaagga

SEQ ID NO: 87187 - DNA, 4125 bp, Oryza sativa
  Clone ID: PAT_MRT4530_86157C.1
atgaagctgaaggaaagtagtggatggacagacaagagtttcacagatcttttaggaattttgaaggctatgcttcctgttgagaacacattgcccaagacgacatacgaagcaaagcaggttctgtgcccactagggttagaggtccgtagaattcacgcttgtcccaacgactgcatattgtaccacaagcaatatgcggacttggatgcttgtcctgtctgcaaggcttctcgatacaagcgaaagaaaagtgctgacgaaggaaataagtcaaagaggggtggtccggcaaaggttgcgtggtatctacctatcattgatcgtttcaagagaatctttgccaacccgaacgaagcgaagttagtacgttggcacgccacgaagagaaggaatgacggtccaaagcaacccggcaatgatattgatgtattcctggagcctgttatcgacgatctggagattctttggaaagaaggtgtggaaacttgggatgcatatggtcaggagaacttcaagctaagagttctattgttctgcaccattaatgactaccctgcactcggtaatctttccggacaaactataaaaggaaagaaggcatgctccgattgcaaggaacatacacgaagccggtggctgaagaaatcacgaaagatggtatacatgggtcaccggaggtggctcccgctacgtcatgcatttagaagaaagaagaaaatttttaacggtaagagagaacttcagcctgctcccaaagatttgtccggagatgaggtccacaatatggtcaacgacataagcaatgagtttgggaagaaaagaaaacgtagcaagacaaaggagaagggtatgtggaagaaaaaatccatattttggcggctaccttactggaaagatcttgatgtccgtcattgcattgatctcatgcatgtagaaaagaatgtgtgtgagagtttggttggcctgatgctgaatattcccgggaagacaaaggacgggttgaacgcgcgccttgatctacaggacatgaatattcgcagtgaactccagcccatacgagatgcagagacaggtaaagtgtacctccctccagcctaccacacactgtcgaaggatgagaagatcgcaatgttatcatgcttgaaggatattaaagttccatcgggctattcagcgaggataagtaagtatgttgaattggacgatctaaaacttgttggaatgaagtctcacgattgccacgtgctaatcacacaaatcttgccagttgctatcagaggcattctaccaccgaaagtgcgtcacacgatccaacgtatgtgcgccttcttcaatgcaattggacagaaggttatagatccagaagatctagatgggctgcagaccgatattgtgaataccctctgtcacctggagatgtttttcccactgtctttctttgatataatggttcatctccctgttcatctggtgaagcaaacaaaactatgtggcccggcttttctaagggaaatgtggccatttgaaaggtacatgggagttctgaagtcgtatgttcgtaacagagctaaacccgaggggagcatcattgaaggttacacgaccgaggaggttattgagttctgtgtcaattacatgtccgatgccgatcctatcggagttcccgcgtcttgtcacgagggaaggttgtcaggtgttggcacaatcggaaggaaaagaattaggcctgatcaagcgtcagaacataattctcggttcaacgaatggttcaagaatcgtgtgacaatgtcctcggatgtcccaaatgagacagtacagttgttggggatgggaccgtcttggaccgtagacacatggcaaggatacgatataaatggatacacattttacaccgtcaaacaagatgacaaaagcacagtgcaaaacagcggcgtccgtatagatgcattccaggatcaagttgggtcaaacacatactacggccgcattgaggagatatgggagctaaactacgtcaagttcaaggttcctttgttccgctgccgttgggtgaatctacgcactggtgtcaaagccgacaaggaaggtttcactttagtagatctatctaaggtgggatacgccgatgaaccatttgtacttgcgaaacaggtcgagcagatattctacataaaagacccttcaaacaagaagatgcacatcgtgagggatggaaagcgccgaattgtaggagttgacaacgtcgtcgatgaagaagaatacaaccataatcttcataaaaaaaaggtcatagagaggcagaaattcagtattctgcaagatgacatcaagctcgtgccggacgctgagaaggacattgcttggctaacgttcaaggagagctttgattatcctgcggagcttgaggaccgtctcaggcgggctgctttcaaggttatgggcaatgcttggaagaacttcaagactaagctagtcggcgagttcgtctacaactcggtgaatccagatccaagagagaaatttccttggatcacggaacaggtctgggaggaattccatgcgaagaagtcgacccccgagtccagagctagaagcgaggcatatcgcttgctccagaccaggaaccagcatccgcaccggcttggcaccgccggatatgccggtaaggaagaggaatggcagcgtgaggatgaagaagcatctcaatcgtgcacaccgctcgtgtttggcgatatcccacaccctcgggctaggaactgggccagggccaggtaccagaagaatgatgatggcacaatcttcatgccaaatgcagaagatcaacgagtatacgaagctattaagaagttgattgccgagcaacaagcctcgcaagaggcctgctctcaaagacgcgaggacgacctcctcacgaaagcgttgggcaacaaggaacaccgtggacggacacggggcgttgggtcttctgttccctggaagtatggatttccagactacgcgtggcagtacaagaagcggacttccaacaaggcggagaaagatgcacgccttaaagccaagatccgggagtcgataagagctgagctgacatctgaattcgacgaaaagctcgagtcgatgagggccaagattaggcaagagatccgagaagagcaacaaaacccccaggccgccgctgctgctgcgcacgaagagttaggaagccccacccaaaaacacagcagttgcgcatcaactgagttggcggaaaatccaacatcggtcgacagcaccgtcgaccacataacggaaccaacgagctgcaccctcacagttagggtgatgccgacgttcacggttccagcagccgagggacttgcgtacaagccgaccccagagacaagagtgcatggagcacaactcagggccgactgtgcaaaagttcaagtcgattcggtgaagcccgaatacgagctgttccctctgaagtatccaccgaacgacgaggtcctctcactaggaaatgcccgtggtaccttcatccaatggcccaaggacctcattgagatcagggttacagcgaggccaaccactgcaccaggcggtcgtccaccaaagagacccgcctctgctccttcagcccctcctgctcaagatcgtcatgcacaatcttacgatgtgcagttgcagtacgacacggattttggggaggaccgaacggaggccgacagcaaggcgattcatgaacccccatcgatgaagaagagtaggaaggcacactcttcccctcagagaattactctcgataaacccgaagcaaaagggagaggaaggggaggaaaggtgcatgcctcgcttctagctccaaggaagctagatctgggcaagggccaggaagagagtaagggcaaagaggtcaagaagaaacacgtcgctaaacaggagttccaactaggcatgccattggttggagatgacgtgcttgccgcaatgggcaccgcttgcaaggaccttcacttatactacatggagaaatctaacgccaagaagccaagtaaagctaccgatatccttggagagcacgatggaaagtgtcacgtccggaatttctatccaaaattccaaacgcttacatgtgtgtga

SEQ ID NO: 87188 - DNA, 339 bp, Oryza sativa
  Clone ID: PAT_MRT4530_86158C.1
gaacgtcatgggggggcacaaccggctgggggccgtcaccaggctggccgtggaggcgtgggggctcaagaactgcacgcagaatgaggagtggattaactacaccgtcaccggcgttgatatgccgccttgcatcgacagcgcctagatcgtgaagctcgcctggaagaggtacaacttcagcctcggcctttgcctggacaatgttggcgagcaggcgttaaggagcggacacctggggcacttgaacgaggtacaattgatggatgccctgagtggagtggtgatggcgttcatagtgatacggtaatccatttagctggtgtgcggccacatatg

SEQ ID NO: 87189 - DNA, 2052 bp, Oryza sativa
  Clone ID: PAT_MRT4530_86159C.1
atggagcaatcaacaattgatcgaagttggatgtatgcgacaaatgtgaaacgccattttccggagtacagaaatggcataataaattttatgaatgccgcggaggaggataggaaaagaagaaacagcgattacatgtgttgtccatgtgcagattgcaagaatgaaaatatgtttgatagcggaggggttgtacacggtcatctgatacaacgaggattcatgaagggctatgcatgttgggtgaagcatggagagcaagaatcaggaagtggagcagcagcagacagaagtggtgtgcataatcaggaagatgaagatgagcatgacatgtttataccttctccattgggcggtgaaatggttgatgtggatcacgatctactgcaagacatgttacatgacgttgaggacccaggccagaatgagagagattccatgaagttcagcaggttggtcagtgattccgagacgcctctgtacgctggatgcaaagcaaaacacactaagttgtcagttaccttggacctaatgaagctaaaggcaagtagtagatggacagacaagagtttcacagatcttttaggaattttgaaggctatgcttcttgctgagaacacattgcccgggacggcatacgaagcaaagcaggcttctcgatacaagcgaaagaaaagtgcttatgaaggaaagaagtcaaagaggggtggtccggcaaaggttgtgtggtatctacctattattgatcgtttcaagagaatctttgccaacccgaacgaagcgaagttagtacgttggcacgccacgttgagaaggaatgacggttcgaggcaacccggcaatgatatcgatgtattcctagagcctgttatcgatgatcttgagattctttggaaagaaggtgtggaaacttgggatgcatatggtcaggagaacttcaagctaagagttctattgttttgcaccattaatgactaccctgcactcggtaatctttctggacaaactataaaaggaaagaaggcatgctccgattgcaaggaacatacacgaagtcggtggctgaagaaatcacgacagatggtatacatgggtcatcggaggtggctcccgctacgtcacacatttagaagaaagaagaaaatttttaacggtaagagagaacttcagcctgcttacaaggatttgtccggagatgaggtccacagtatggtcaaggacataagtaatgagtttgggaagaaaagaaaacgtagcaagacaaaggagaaggaaaagaatgtgtgtgagagtttggttggtctgatgttgaatattcccgggaagacaaaggacgggttgaacgcacaccttgatctacatgacatgaatattcacagtgaactccagcccatacgagatgcagagacagagcatgaggaccttatcaggcaggctgcttttaaggttatgggcaatgcttggaagaacttcaagactaagctagtcggcgagttcgtctacaacccaacgaatccagatccaaaagagaaatttccttggatcacggaacaggtctgggaggaattccacgcgaagaagtcaacccccgagtccagagctagaagcgaggcatatcgcttgctccagaccttgaaccaacatcccaaccggcttggcaccgccggatatgccggtaaggaagaggaatggcagcaggaggatgaagaagcggaggaatcaaacacgtcatgggtgtttggcaatatcccacaccctcgggctaggaactggtaccagaagaataaggagttggttgccgagcaacaagcctcgcaagaggcctgctctcaaagacgcgaggacgacctcctcacgaaagtgttgggcaacaaggaacaccgtggacggacacagggcgttgagtcctccattccctggaagtatggatttccagactacatatggcagtacaagaagcggacttccaacaaggcggagaaagatgcatgccttgaagccaagatccaggcgtcgatcagacagaattcgacgaaaagctcgagtcaatga

SEQ ID NO: 87190 - DNA, 233 bp, Oryza sativa
  Clone ID: PAT_MRT4530_8615C.1
ttcgcgagcggcggcgcggatggggctctgggagtggccgtgggatcgccggcggcgaggcccgtcgggcttaggccccacctccaccgccgaagaggtcaccgccggcgtagacgccacccacctcaccgccatcgtcacaggagcgacgaacgggatcgggagggagacggcccgagttctggcgaggaggggggcggaggtgatcatcccggcgaggaccatggtcagcg

SEQ ID NO: 87191 - DNA, 307 bp, Oryza sativa
  Clone ID: PAT_MRT4530_86160C.1
atcaccattccgtcatcctgaccataccacatgaacatgcatcgagacttctatgatgttttcttattcagatgaatcagaacttcatatgtaacatagaattgtatattattatagcatatacactaatacccaggaagatataacttgttattttgatccaatatgaaacgtccctagacattgatataatttagcatatctatttactttaagaagtttgttacttgaaaattgaaataatcaaaaagttgaaggaccagcatatatcatacttctcccctttcaaaaaaaaaaaaaaaaaaaa

SEQ ID NO: 87192 - DNA, 1727 bp, Oryza sativa
  Clone ID: PAT_MRT4530_86161C.1
atggccatgggtttgctggcgtggatggtggcggcggccgcggcggcggtgctggcgtcgtgggcgttcggcgcggtggtgcacctggtgtggaggccccgcgccatcaccaggcgcctccgggcgcagggcgtcggcgggccgggctaccggttcttctccggcaacctcggcgagatcaggcggctccgcggcgagggcgccggcgtcgtgctcgacgtctcctcccatgacttcctccccatcgtgcagccgcacttccgcaagtggatccccctctatgggaggacattcctgtattggttcggagcgcggcctaccatttgcttggctgacgtgagcatggtgtggcaggtgttgtcggaccggacggggatgtaccccaagaacctgtcgaaccctcacttcgcgcgtctactcggcaaggggcttgtgctcaccgacggcgatgagtggaagcgccaccgcaaggtggtccacccggcctttaacatggacaagctcaagatgatgacggtgaccatgtccgactgcgcccggtccatgatgtccgagtgggaatccgagttggcggcgaagggcggtcttgtggagatcgagctgagccggcggttcgaggagctcaccgccgatgtgatctcgcacacggcgttcgggagcagctacaaggaggggaagcaggtcttcctggcacagagggagctccaatttcttgccttctccaccttcctcaccgtccaaatcccggggtccagctacctcccgaccatgaagaacctcaagacatggtcgctcgacaagaaggtgaggggcatgctcacggacatcatcaagacccggctcgccaacaaggatgtcgctgggtacgggaacgacctgctcgggttgatgctggaggcatgtgcgccggagcacggggagagccgcccacaactgagcatggacgagatcatcgccgagtgcaagaccttcttctttgcagggcacgacaccacctcacacctgctcacctggaccatgttcctgctgagcacgcacccggagtggcaggagaagctcagggaggaggtggcaacggagtgtggcggcaaggtgcccaccggtgacatgctcaacaagctgaagctggtcaacatgttcctcctcgagaccctgaggctgtacggccctgtcgcactcatacggaggagggtcgacgccgagcttgagctcggcggcatcacggtccctgagggcactgccctattgacgatcccgatcgcgacaatccaccgcgacaaggaggtgtggggcgaggacgccgacgtgtttaagccggagaggttccagaatggggtgtccaaggcagcgaagcaccccaacgcgttgctctccttctccagcgggccgaggtcatgcattgggcagaacttcgccatgatcgaggccaaggctgtcattgccatgatcctacagaggttctcctttactctatcccccaagtacgtccacgcaccaaccgatgtgatcacgctgcggcccaagtatgggctccctatgatcctcaagagcctcaaggtgtagatgtgtaggatggaatcacaagaacaccaagccgactcccggtccatgaatgttttacttacactgcttttttagcaccgctttgttgtacacgagttgcttcctgataatgttatcgtgtaatgtattgatatatatatttcagttatacaaaattgggatgt

SEQ ID NO: 87193 - DNA, 387 bp, Oryza sativa
  unsure (1)..(387): unsure at all n locations
  Clone ID: PAT_MRT4530_86162C.1
aacactggtacctacctactcctactccctactagtctagtatttgctctactccttttctattacctattaatatatttttgctttatttaatttccacgattaatctgcatgcatgtatatatcatacatatatccatgatacgtatatatacagctttgctagctagctactgtacatgtacctgtactcctgtaggtttaggttgttgctcctgcagatggcttgcttggcaagacgctgatcgaaaccgatcgatcaaacaaaatcaattaagatgattaagatgttaattaattgcaaataaagcaacatgtaactagctatatgtatgtgcggggaaaatatatatatatcttgtacanataaaaaaaaaaaaaaaaaaa

SEQ ID NO: 87194 - DNA, 284 bp, Oryza sativa
  Clone ID: PAT_MRT4530_86163C.1
gccagctcctgctggctcataggccaatatatttgctccgatggcgagttctggttatctctcaaagaccgttacaacaacttgtccccaagatagcatagatatgcatgaggctatgcagagctggcactctcgtagtttttcgctgtgttttatttcgttattgcagagttgtatattgttgcttaatcatatagtgcgtgattagttataaacaaggtgacaccatacaggtgaatcaagaagactattgcccaatttcaccctttaaaaaaaaaaaaaaa

SEQ ID NO: 87195 - DNA, 255 bp, Oryza sativa
  Clone ID: PAT_MRT4530_86164C.1
atggggactagagttcatggaacagctcccggaggtgaggaggtggtggccgagggtctcttcatccttgcggagccgaaggaggcgacggtgcaccgcgaggaggtcgggaacggcggggatcagcgaccggaggtggcaaacggcggcggtctcgggttgatggcgaaagtggtgcttcggaggtggactgggcaaactaagtggcagccggccttgcgcttgcgactgcgaagccaatggcgcaagcgatga

SEQ ID NO: 87196 - DNA, 460 bp, Oryza sativa
  Clone ID: PAT_MRT4530_86165C.1
gagacacgtgggatcgccatcaagctagctaactaactacttagctatggccctcaccgcgagggcactcctcaccaccaccttggctccataacaaggactaaaaccacacactcactcttacacgtcaggacgcagaatccaccaactcgggtcttagcaacaccagcaatggccgaaggatcaagtgcatgccatcgtgcccactagaaggcatcaagaaattgcagaccctatcgtacctgcgaccactcaccgtggaggaacctttgaagcacatcgcgtgcctgcttcgatccaagtgggtgcctagcctacaattaacaaaggttggactcgtataccgggagaacaacagaactccctgatactactatggcaggtattgcaccatgtggaaactctccatgttcaggtgcacccgatccacccaggtgctcaaggagctcaaggaggccaa

SEQ ID NO: 87197 - DNA, 386 bp, Oryza sativa
  Clone ID: PAT_MRT4530_86166C.1
cttcaaattgggcagatagcataggtactgcctatagataaccttgcatcccccatgctggggaaacttgaggtcatgaagaaatcgccatgtggatgaacagcgacttccacgctcgcctgagagctctctggcgtggaattattagcgcatatacctgtatatacgtaaactggacaatcttaagacttacagactaccagattcgggctgatctacttaacttgtgagcacatagggcgaacctatgattgcatttagcacactggaggctgacaccttgaagctatctacaaggaatactctgcacgccgacgactaggagcatagagtgagcagcctgaccaagctgagcagcctgtcttgctgggactcactctctgaca

SEQ ID NO: 87198 - DNA, 852 bp, Oryza sativa
  Clone ID: PAT_MRT4530_86167C.1
atgaccaccatgagctcattgcagctgcggcttctccgcttcttggtgaaaagattgggggaaattcgtcttcatggtgaagaaaactcccacttgagagttggtggcatagtagagtttgcactattaataaacttctggactttgtccgcaagagcgtctcttctattgaagttgctggcaagggtggcaaaaagatcgcaggctcaccgtcgccaagctggaattgctccttcaccttgggcgccttgggcgtggccttttggggtgaaggacgattattgcagggtgcgagctatggctacgattgcgagggtttggcttgggattcggcttcggccggctatccctcctgaggcttcggcttcaacggtgaggtgcccctgctgcttcttgttgagcatgagggacaggagggaggaggaggtgccggatccagatgaagcgtcagcattgctgcctcctccgttgcccaaggaggagaagatgctgtgccaagaccaccatgagctcatcaccgctgcggcatctcagcttcttggggaaaagattgggggaaattcgtctttaggctcccacatgagagttggtggcacagtagagtttgcactatcaataaaaagctccaccgccacccccggtggcgacgctgcctccaggctcatgtgcaaccacttttgtgccgatcaggcgtgcagtgtcatatcatctcttgaacttgtggactttgtcagtgagcttggcctggtcggcatctcttttgtcgaggctgttggcaaaggcggcaaagagatcgctggtatccggcagagcgccgcgatgggtgttggcatggttggccatgtcctctag

SEQ ID NO: 87199 - DNA, 446 bp, Oryza sativa
  Clone ID: PAT_MRT4530_86168C.1
gcacgaggtgcttttgtgcaatggagacactgccagccaacaatatccgtgcctgctctgcattggttaactagaatcagtcaacgcttctttcaccgatcaactatattaaatatgtcagactgattatgaaaagacatgtttggcagaacatatacatcaaaatcagaaccgataattccttgaatagattgaatagaacattcgagttcaaagaagtacctacgacactaccaaaacttgactgcagagaaagcgtgcggttgtgctgtagattctgtcacgtgagatgtgcctaaccatgagtacaccttgtgttcggcacatcatgtaaacgtgcaagcatcagatgatggcgtagtgagaattcagatgtgtcgtccctaatcaacgttggggaagtagatcgatcggtgatttcctgttttacctgatgatgcacatcc

SEQ ID NO: 87200 - DNA, 678 bp, Oryza sativa
  Clone ID: PAT_MRT4530_86169C.1
ttatgcctccccaccaccaccgtcgggggtgatgcttcctccaggctcaggtgtagcatgcggtgataccaccatcgtgttgatcaggtccaccaggtgctgctccgcgatccaacaatcgacgcacaccatcgtcgttagtagggcagtgctgttgtaggcgtgcattgtcatacctctcttgagcttctggactttgtccgcaagagcgtctcttctattgaagttgctggcaagggtggcaaaaagatcgcaggtatccggcagagtgctgcgatgcgtgttggtgtggctggccatggcccttagaatcctgagctcgccggccctagaccacaagcgctcgaatgctgtcacccgctttctcttgttgttgcgcttctgagatggggttgaggttggcttcttcttaggctcaccgtcgccaagctggaattgctccttcaccttgggcgccttgggcgtggcgattgcgagggtttggcttgggattcggcttcggccggctatccctcctgaggcttcggcttcaacggtgaggtgcccctgctgcttcttgttgagcatgagggacaggagggaggaggaggtgccggatccagatgaagcgtcagcattgctgcctcctccgttgcccaaggaggagaagatgctgtgccaagaccaccatgagctcat

SEQ ID NO: 87201 - DNA, 270 bp, Oryza sativa
  Clone ID: PAT_MRT4530_8616C.1
tctcccatctccacctccgcctccacgcgtggccgacgtcgacgccgccgccggcgtcgtcgtccgggcagtcgaccgctgcggcgccgtcagagctacccgggccccgtggatgagagcggcgtggataaagtagatgagttcccgctttgcctggacacgactggacgacgggagctcacagggatggatctatgttataagaatgagtggatataaatgctaaatgacaagaaaaaagaatggaaactgaatggtatcctgcgaaac

SEQ ID NO: 87202 - DNA, 279 bp, Oryza sativa
  Clone ID: PAT_MRT4530_86170C.1
atgaacttagattgggacagtacgtaaaatttggttgatttccgggtggctagtattgtctcagtcgatataagtttaccaaatacttatgtcaaacgaacgagtacgaccgcagcttctagaatagggacagacctagatattatgttaattaacaatgtgatacctctgtacagtggttccttttgtatgtcctcgcgtaggaggcaatcttatgccgagcagggcatcttatgatatttaccgaggcgcaggacccccacctcaaccagtcaacag

SEQ ID NO: 87203 - DNA, 351 bp, Oryza sativa
  Clone ID: PAT_MRT4530_86171C.1
atggccatatgtcttgagcacacagctcatcaagatgctaatgtagctaatgttgctgttgacgtcatcaaaggacccagcgccgacaggcgggcccacacgtcagtgacacaagacggggaggcggcggagctcaccaagggcacggcgtcgagggaggcggcggagctccagcagctctcgacgaaggccgaggcgcgaccgaggactggcgggtccattggaaagtgcggagctccggcgcgtttccggcgacaacaagtggcggtcgaggagcggcttggtgatgcggagccagagaaggaggcgggtgacactgcgaggtcccaaccgctggtgacgagcggctag

SEQ ID NO: 87204 - DNA, 401 bp, Oryza sativa
  Clone ID: PAT_MRT4530_86172C.1
agcatcttttcttctctctagcataaggggctgtacccgtttatgcgaaagggagatgccttgttctactagctcaccctgcccctcactgatgccctatggcgctttcaggtgggtaccactctctagtacctcaagcatctccttcttaagtccatacccgtcctggtcggcaagcctcattcattcaagggtgggaacaacaagggcatgccttatggccaacggccattcatgagagggctgctgtacatccgcttctcacagtggtaatccccgactatttgaaccctgacactgtgcttggcatctggagacccacctaccagcttggccatcgtcgcgaggcacccacatacttctcgacaagcgcgagcagaccatgccttacgacgcgaaca

SEQ ID NO: 87205 - DNA, 870 bp, Oryza sativa
  Clone ID: PAT_MRT4530_86173C.1
atggacgccgagggatcatcagacgcggaggaggccagaggaggcagcaagatgctgctgcgctccctggactacccctgcgccacgcgcctccgccaccgccgactcctcgccttcctcatcaacaacgactacatggatgcctacgatgagataaacaagaggagacgtttggtgttccatgtgagcgacctggaggatctcatgaaggcaggccgtttggtggaggcgaggaactacgtgtggcgtttcgccccgcccggcggcggcggcggcgagccgagctcgagcgccgaggccgtcaccctgtggaagttcatccaccagctcatggtcctcgacagcttcgcccacggcggcatccgggaccacacggcgatccgaggctggttcacgcgcatcctcgccgagcccccgggcttctccgtgctcaatcccctcgtgcctcgccctcgccgcccacttcgtcgccggccgcgtcgaggcggccagggacatggcggactggaaggtggtccgctccaaggcggccagcttggccgggaagatggcgcgcgaggcgccggagatcaggtgcaccatgctcttgccgcttgcccgggccaagcccaaggacttgttccccctgattgcttcttcgagttttcgtcggaggcgttatgtgaaggcagcacgacgggcatcatcatctcatcttgctcagttctacctgaacaagaagaagagtctttggttacaactaatcaatgtaatgttccttctttaattcatgcaggctgccttctccaagtcatccagaggtatgtttgtatactggtaggcgtccgcggccttgtactgaagatctttccaagcaaggtgagggattaa

SEQ ID NO: 87206 - DNA, 250 bp, Oryza sativa
  Clone ID: PAT_MRT4530_86174C.1
atgattattgcgccgcgcgcgcgcgcgctttccctggctgcacgagcgccgcgcgccgggcggggcggtcacgagatgtctgggcgagggcgagggcgagacgcgctggcttttcgattgtacctgccgccgatggcctcgatcgcacgcggagcggcggctgagggacaggggccggcggcggcgggagggcacgcgggcaacggtggctgcggctcgcggcagtgggaggactaggggaacgacggcg

SEQ ID NO: 87207 - DNA, 522 bp, Oryza sativa
  Clone ID: PAT_MRT4530_86175C.1
atggtggcggctcgacgtggggaggacgtggtggcggctcggtgggaagaggaggcaacaacggtggcggcggtttatgagaggaggcgacgacgacagcttggcacagtctctaaccaaagtatgtatcattacttctttaatcctcaatatccggtgtcggtccgcactgtccgcggcttgagaattcagacaacagagaaaagctacgtagtagcacacatacgtaccagccaaatccttcggcggtggaaccagcgaaatttgcgtggacgagcgtgtcgttttggggacattaatattgttgtcgtgcgcgcggccccgcactgccccggcatggcgaaactgcagttctctgctctgctgccatccgcggcaaaagttggagcacatcgcaatgcgtatgtgctcccctacacggaatttatccgatggttcaaattcggtcgcgtgttaaagaatgaaagcacacaggatatatcaacagatttgggtgtcaatgtatcatcgcccatcaaggcc

SEQ ID NO: 87208 - DNA, 450 bp, Oryza sativa
  Clone ID: PAT_MRT4530_86176C.1
caaatgatataaatgatctaaaagtcgtgcattatgatcagagagctagccaccacaatttgctcagagaacaaagactgatgtaacagctttaatctatccttgcacgcctgactaccaaacctactcaaaacagtattgccatgctcttcaatttcttatgtacacttagctgcctccaatttgttcacttgtcggatagatcacgcaacataaattctattgatgttcctgatgatcatagatttgttcacctcctccgccaccttgagcctggcgccgcctccgtctgcgggtttcaaacgtgaacactcgcatcacctacatgaaaaatcaaatggtcaatggtgtgcaacactgccaactttaacgtgaatctccgtcaacaaaatttcactcaccctgcacaaaatattcaaagtccctgatataaatttagataacaaacaa

SEQ ID NO: 87209 - DNA, 359 bp, Oryza sativa
  Clone ID: PAT_MRT4530_86177C.1
aaaacaaaaaagcgaagtatcaacaaagttctgacattttgggagtaacaaagttcaccattggacaacattacagctggaaaaagggctacaaggaaacaaaaaacgggaaaacaaagcaattcttttcatcttttcaaccgggggcttccaggggggatcctatcatgatcgggaaagccccaaactatacaggggggaaccaggcccccacaaaagggggggaattattcgctttaaaaggcggtttcatctccaaaaaaaaaaaccgaagcggcggcaaaaattgccttgaaccccctcatgccggagtcaacaacccctggggggggggggggggctggggggaaaccgctttt

SEQ ID NO: 87210 - DNA, 364 bp, Oryza sativa
  Clone ID: PAT_MRT4530_86178C.1
catgctactactcctactagccatctcccacccacttatcacgaggctaacccgcatgggcgcgcgccaaggaggcgggaggagtagcacaccgccaccatcaccagcagcagcatggtgcagctgagccgccgccggcaccgcgagcacgctccatagccctctgccatggcggcagcttccgtactcctcctcctcccttcccccttgctccgtgcgtcgggcccggcgcaccgcgcgcgctgtggcattgccaccacgacaacaaccagcacgagcgggaggagggggctgtctctgttgggacatggctgtcgtatcagctgacagaagcgcacgcacatgcttattctgccaccacatc

SEQ ID NO: 87211 - DNA, 744 bp, Oryza sativa
  Clone ID: PAT_MRT4530_86179C.1
agtctcattgtgccttctttcttcttcttcttcttgagctgagcctcctcctaaggcctctcttgtatatacacattttgtatagatttttagagttatatcacagtctcatcagctcttgcaacttcccattgcaagagtttgattgattgattggttgatcagctggtgttccaaatggatccaatcagcatagagaagatcagggccatgagcaagtacagcaactgcaagaggcagcatccgatgatcctccctgccctggcaatctccatggttgccacctttgttcttctcctgctggtgaccagccctgtctgggtcccaaggctgtgctcactcatggccttcttcttcctcaccaccctccctgaccttgccatggccttcctcctcagccccaagtgcctcttcgtcgtcggcaacctcatcgtcgccttcctcgtcggcgagtctaggctcgccccgaggggggagccggcgtcgtcgtcggtgaatgagatacatgacgaacatgttaagaggaacgccgcgataagcgcaaaggcggtgaccgcggttgtggccattgatcagaatgctcatgttggagaattgggggaagaagaggaagaagaagaggaggaagaggaagaagaagagggggaggaagaagagctgcaccagagagtagaggacttcattgcaagggtcaagaagcagaggagaatggaggacaagagcatgtttgacactgatcgatga

SEQ ID NO: 87212 - DNA, 484 bp, Oryza sativa
  Clone ID: PAT_MRT4530_8617C.1
tcgccacgcagtcgccacgcgtccgctttaatagagattatagtggcatgttcttgagacatactaagattaaggttatgtttggggattaagattaactgtctgtttagggagaatttgaggaacaggattaactgtttgtttggagtgaaattctctgttcaagaataattggttcaagatattggaaattgagcggagaagttgtgcttgattgattgcaaattagttaagtcttccgtgcctgttgctggtttatggttttccattatggaatgcatatgcctctggtaggcaaaagttcagctatatttgggtgaaactgtcgttgattatcgttgattgcagaagatgattttgtttttcctccttaggtgaaaacatcttgtaatacaagataaatgtcctttttggtaaaatgtgacaacaagatgtagtcactcacatatggcaataagagtgaaatttgttgctgtttgcttct

SEQ ID NO: 87213 - DNA, 2157 bp, Oryza sativa
  Clone ID: PAT_MRT4530_86180C.1
atggcggcggcggaggtgtactcgccgacggcggcgcagcaacaacagcaggggaaggccagaagggggcgattttttgtcctttttccaaggaaaacagaaattaaattcccaaaagtgatcaaaatggatcaatcaacaattgatcgaagttggatgtatgccaaaaatttgaaacgtcattctacggagtaccgaaagggcgtgataaaatttatgaacagtgattacatgtgttgtccatgtgcagattgcaagaacgagaatatgtttgatagcggagaggacgtacacggtcatctgatacaacgaggattcatggagggctatacatgttgggtgaagcatggagagcaagaatcaggaagtggagcagcagcagacagaagtggtgcgcataatcaggaggatgaaaatgagcatgaaatgtttataccttctccattggacggtgaaatggttgatgtggatcacgatctgctgcaagacatgttacgtgacgttgaggacccagcccagaatgagagagatggaatgaaattcagcaggttggctatgcttcctgttgagaacacattgcccgagacgacatacgaagcaaagcagcctgctcccaaagatttgtccggagatgaggtccacaatatggtcaaggacataagcaatgagtttgggaagaaaagaaaacgtagcaagacaaaggagaaggaaaagaatgtgtgtgagagtttggttggcctgatgttgaatattcccgggaagacaaaggacgggttgaacgcgcgccttgatctacaggacatgaatattcgcagcgaactccagcccatacgagatgcagagacagcgaggataagtaagtatgttaaattggacgatctaaaacttgttggaatgaagtctcacgattgccacgtgctaatcacacaaatcttgccagttgctatcagaggcattctaccaccgaaagtgcgtcacacgatccaacgtctgtgcgccttcttcaatgcaattggacagaaggttatagatccagaagatctagatgggctgcagaccgatattgtgaataccctctgtcacctggagatgtttttcccactatctttctttgatataatggttcatctccctgttcatctggtgaagcaaacaaaactatgtggcccggcttttctaagggaaatgtggccgtttgaaaggtacatgggagttctgaagtcgtacgttcgtaacagagctaaacccgaggggagcatcattgaaggttacacgaccgaggaggctattgagttctgtgtcaattacatgtccgatgccgatcctatcggagttccagcgtctcgtcacgagggaaggttgtcaggtgttggcataattggaaggaaaagaattaggcccgatcaagcgtcgtacgcgcaggctcattacgctgtgctccaacatatggcaaaagttggcccatactttgaggagcacttagcgaaaatccgagatgagaacttggggcgatctgatgcatggattaacagagaacataattctcggttcaacgaatggttcaagaattgtgtggcaatgtccacggttgtcccaaatgagacagtacagttgttggggatgggaccgtcttggaccatagacacatggcaaggatacgatataaatggatacacattttacaccgtcaaacaagatgacaaaagcacagtgcaaaacagcggcgtccttatagatgcattccaggatcaagttgggtcaaacacatactacggccgcattgaggagatcttggagctaaactacgtcaagttcaaggttcctttgttccgctgccgttgggtgaatctacgcactggtgtcaaagccgacaaggaagatttcactttagtagatctatctaaggtgggatacgccgatgaaccatttgtacttgtgaaacaggtcgagcagatattctacttaaaagacccttcaaacaagaagatgcacatcgtgagggatggaaagcgccgaattgtaggagttgacaacgtcgtcgatgaagaagaatacaaccataatcttcatgtaagacctcacattgaccttgacgatgatccccaagagcctctggcatatgctcgttcagatcataacgaaggcataaccttgtga

SEQ ID NO: 87214 - DNA, 471 bp, Oryza sativa
  Clone ID: PAT_MRT4530_86181C.1
atgtggccgtttgaaaggtacatgggagttctaaagtcgtacgttcgtaacagagctaaacccgaggggagcatcattgaaggttacacgaccaaggaggctattgagttctgtgtcaattacatgttcgatgccgatcctatcggagttccagcgtctcgtcacgagggaaggttgtcagccgacaaggaaggtttcactttagtagatctatctaaggtgggatacgccgatgaaccatttgtacttgcgaaacaggtcgagcagatattctacataaaagacccttcaaacaagaagatgcacatcgtgagggatggaaagcgccgaattgtaggagttgacaacgccgtcgatgaagaagaatacaaccataatcttcatgtaagacctcacattgaccttgacgatgatccccaagagcctgtggcatatgctcgttcagatcataccgaaggcataaccttgtga

SEQ ID NO: 87215 - DNA, 300 bp, Oryza sativa
  Clone ID: PAT_MRT4530_86182C.1
atggctaaggtagctctcagctccctcctcgccgtcggtggcgccgccgccttcgccgttcagccgtcgaagaaaaccggctccggtggagatggggaggtgaagcctgcaggtaacaagaagaagttcatcaccagagaagaggagccagagcagtattggcaggcggcaggggagaggaagggcgagaacccgatgaagacgccgctgccctacatcatcatctttggcatgtcgacgcccttcgtcatcctcgccatcgccttcgctaatggctggatcaaggtccccgtccggtga

SEQ ID NO: 87216 - DNA, 213 bp, Oryza sativa
  Clone ID: PAT_MRT4530_86183C.1
ggtaggtttctacttgctgctggtagcgggcgggtcctggctcatgtcgctcccaccgacgttgatcctggtgctggtattcagtggctacccaaaatccatcgtagatcatctgaagttaaacgaactggtgctttgcttgagagggtatttatgccatgccaaatgtacttccgctacacaaggcacaaaggaggaaaccctgaactaaag

SEQ ID NO: 87217 - DNA, 4455 bp, Oryza sativa
  Clone ID: PAT_MRT4530_86184C.1
atggagggctatacatgttgggtgaagcatggagagcaagaatcaggaagtggagcagcagcagacagaagtggtgcgcataatcaggaagatgaaaatgagcatgacatgtttataccttctccattaggcggtgaaatggttgatgtggatcacgatctgctgcaagacatgttacgtgacgttgaggacccagcccagaatgagagagatggaatgaaattcagcaggttggctatgcttcctgttgagaacacattgcccgagatgacatacgaagcaaagcaggttctgtgtccactggggttagagcctgctcccaaagatttgtccggagatgaggtccacaatatggtcaaggacataagcaatgagtttgggaagaaaagaaaacgtaacaagacaaaggagaaggaaaagaatgtgtgtgagagtttggttggcctgatgttgaacattcccgggaagacaaaggacgggttgaacgcgcgccttgatctacaggacatgaatattcgcagcgaactccagcccatacgagatgcagagacaggtaaagtgtacctccctccagcctgccacacactgtcgaaggatgagaagatcgcaatgttatcatgcttgaaggatattaaagttccatcgggctattcagcgaggataagtaagtatgttaaattggacgatctaaaacttgttggaatgaagtctcacgattgccacgtgctaatcacacaaatcttgccagttgctatcagaggcattctaccaccgaaagtgcgtcacacgatccaacgtctgtgcgccttcttcaatgcaattggacagaaggttatagatccagaagatctagatgggctgcagaccgatattgtgaataccctctgtcacctggagatgtttttcccactgtctttctttgatataatggttcatctccctgttcatctggtgaagcaaacaaaactatgtggcccagcatttctaagggaaatgtggccgtttgaaaggtacatgggagttctgaagtcttatgttcgtaacagagctaaacccgaggggagcatcattgaaggttacacgaccgaggaggctattgagttctgtgccaattacatgtccgatgccgatcctatcagagttccagcgtctcgtcacgagggaaggttgtcagaagttggcccatactttgaggagcacttagtgaaaatccgagatgagaacttggggcgatctgatgcatggattaacagagaacataattcttggttcaacgaatggttcaagaatcgtgtgacaatgtccacggatgtcccaaatgagacagtacagttgttggggatgggaccgtcttggaccatagacacatggcaaggatacgatataaatggatacacattttacaccgtcaaacaagatgacaaaagcacagtgcaaaacagcggcgtccgtatagatgcattccaggatcaagttgggtcaaacacatactacagccgcattgaggagatctgggagctaaactacgtcaagttcaaggttcctttgttccgctgccgttgggtgaatctacgcactggtgtcaaagccggcaaggaaggtttcactttagtagatctatctaaggtgggatacgccgatgaaccatttgtacttgcgaaacaggtcgagcagatattctacataaaagacccttcaaacaagaagatgcacatcgtgagggatggaaagcgccgaattgtaggagttgacaacgtcgtcgatgaagaagaatacaaccataatcttcatgtaagacctcacattgaccttgacgatgatccccaagagcctgtttacattgacctcacaaatgctgtttacatttgtcatattgtcaaaatcaatttcaagctgttagaaacaaaaaccctagcaccgccgccaactcctcctttgccgccgtcgtcctccctcgccgccaccgccaccgagaccgccaccaccggcaccgagcccgccgccaccgccgccgagcccgccgcctctaccgagcccgccgccaccgccaccgagcccgccgccactgccaccgagcccgccgcctccaccgagcccgctgccgccgccaccgagcctatacaccgaccggcgtcggccttcctcgtcgtcgccgcctgcctcttcaccgacacgaacagcagccaccaccgaggccggcgacatccttcctgcaccgagcccgccgccgcctccaccgaccggggacgcccctcaccgatcccgccgccgccaccaccgagcccccccggccgacatcataaattcagtattctgcaagacgacttcaagctcgtgccggccgcagagaaggacattgcttggctaacgttcaaggagagctttgattatcctgcggagcatgaggaccgtctcaggtgggctgctttcaaggttatgggcactgcttggaagaacttcaagactaagctagtcggcgagttcgtctacaacccggcaaatccagatccaagagagaaatttccttggatcacggaacagaccaggaaccagcatccgcaccggcttggtaccgccggatatgccggtaaggaagaggaatggcagcgtgaggatgaagaagcggaggaatcgtgcacaccgctcatgtttggcgatatcccacaccctcgggctaggaactgggccagggctaggtaccagaaacatgatgatggcacaatcttcatgccaaatgcagaagatcaacaaaaggagttggttgccgagcaacaagccttgcaagaggcctgctctcaaagacgcgaggacgacctcctcacgaaagcgttgggcaacaaggaacaccgtggacggacacggggcgttgggtcttctgttccctggaagtatggatttccagactacgcgtggcagtacaagaagcggacttccaacaaggcggagaaagatgcacgccttgtagccaagatccgggagtcgatacgagctgagctgacatctggattcgacgaaaagctcgagtcgatgagggccaagattaggcaagagatccgaaaagagcaacagatcccccaggctgccgctgctgctgcgcacaaagagttaggaagtcccaccgaaaaacgcagcagttgcgcatcaactgagttggcggaaaatccaacatcggtcgacagcgccgtcgaccacataacggaaccaacgagctgcaccctcacagttagggtgatgccgaccttcactgttccagcagccgagggacttgcgtacaagccgaccctagagacaagagtgcatggagcgcaactcagggccggctgtgcaaaagttcaagtcgactcggtgaagcccgaatacgagctgttccctctgaagtatccaccgaacgacgaggtcctctcactaggaaatgcccgtggtaccttcatccaatggcccaaggacctcattgagatcagggttacagcgaggccaaccactgcaccaggcagtcgtccaccaaagagacccgcctctgctccttcagcccctcctgctcaagatcgtcatgcacaatcttacgatgtgcagttgcagtacgacacggattttggggaggaccgaacggaggccgacagcaaggcgattcatgaacccccaccgatgaagaagagcaggaaggcacactcttcccctcagagaattactctcgataaacccgaagcaaaggggagaggaaggggaggaaaggtgcagacctcgcttctagctccaagaaagctagatctgggcaagggccaggaagagactaagggcaaagaggtcaagaagaaatacgtcgctccacaggagttccaactaggcatgccattggttggagatgacgtgcttgccgcaatgggcaccgcttgcaaggaccttcacttatactacatggagaaatctaacgccaggaagccaagtaaagctaccgatatccttggacagcacgatggaaagccattccttggtccaacaaattatatcgtggtcgacttcaaggatcttttcgacctctacaagctccgagcggtggacacaagcctccttaagtgctactccttaagcatgcaccggaagttgccttccttcatccacaagtggtcactgtcacaaatctccagaatgaccgtcaaggaatggtcaactacatctacgacaccttgtggtcccgccgagacaaggagacatgacaccctcatccacaaaaaagacttctcggtgaagcaacaaataggtgaccagtgcggattccatgtgtgccacaacatgcgacttctgtatagagaaaaggtgaagactttggctgagtttgagggcacaataaccaagtctctgactaccagctttgaggaggttcgtgaggagatagccagcttcatcctccgcgaaataattaaccccaaaggaatgtttaggcttaaactaaaatga

SEQ ID NO: 87218 - DNA, 685 bp, Oryza sativa
  Clone ID: PAT_MRT4530_86185C.1
caactgacaaagctgatgccataaaaacctcctcttgtacatgacaaaacctccttggatcagaagcaggaaggatgttaatatgaactgtaattacttacagatttacagtactgggaaaaaaggtacttgtttatcacatacattacgtactggtatgctcaagatctctatgaaattttactcttcagggctcccggtaggagtgcagtggtcgcagtgaggagtttcttggcagcaagtagcaaccttccaagatttgctgatgtgatgaactgatgatgatgcgacatggacgggaggaggttcaccggacggggaccttgatccagccattagcgaaggcgatggcgaggatgacgaagggcgtcgacatgccaaagatgatgatgtagggcagcggcgtcttcatcgggttctcgcccttcctctcccctgccgcctgccaatactgctctggctcctcttctctggtgatgaacttcttcttgttacctgcaggcttcacctccccatctccaccgagattggctgaaatcctgggccgcctgacggtgatgacgcgattgcgaaacaaaccggagccggttttcttcgacggctgaacggcgaaggcggcggcgccaccgacggcgaggagggagctgagagctaccttagccatggccggcttgcgaacgcgtgg

SEQ ID NO: 87219 - DNA, 2346 bp, Oryza sativa
  Clone ID: PAT_MRT4530_86186C.1
atggtgggttgtgagcacatggttttgaaggtcgtgctcatggcaattaaggaccggttcgcgagctactattattgcaagaacgagaatatgtttgatagcggagaggacgtacacggtcatctgatacaacgaggattcatagagggccatacatgttgggtgaagcatggagagcaagaattaggaagtggagcagcagcagacagaagtggtgcgcataatcaggaagatgaaaatgagcatgaaatgtttataccttctccattgggcggtgaaatggttgatgtggatcacgatctgctgcaagacatgttacgtgacgttgaggacccagcccagaatgagagagatggaatgaaattcagcaggttggctatgcttcctgttgagaacacattgcccaagacgatatacgatgcaaagcaggttctgtgtccactggggttagaggcttctcgatacaagcgaaagaaaagtgctgacgaaggaaataagtcaaagaggggtggtccggcaaaggttgtgtggtatctacctatcattgatcgtttcaagagaatctttgccaacccgaacgaagcgaagttagtacgttggcacgccacggaaagaaggaatgatggtccaaggcaacccggcaatgatatcgatgtattcctggagcctgttatcgacgatctggagattctttggaaagaaggtgtggaaacttgggatgcacatggtcaggagaacttcaagctaagagttctattgttttgcaccattaatgactaccctgcactcggtaatctttccggacaaactataaaaggaaagaaggcatgctccgattgcaaggaacatacacgaagccggtggctgaagaaatcacgaaagatggtatacatgggtcacctgagcgaggataagtatgttaaattggacgatctaaaacttgttggaatgaagtctcacgattgccacgtgctaatcacacaaatcttgccagttgctattagaggcattttaccaccgaaagtgcgttacacgattcaacgtctgtgcgccttcttcaatgcaattggacagaaggttatagatccagaagatctagatgggctgcagaccgatattatgaataccctctgtcacctggagatgtttttcccactgtctttctttgatataatggttcatctccctgttcatctggtgaagcaaacaaaactatgtggcccggcttttctaagggaaatgtggccgtttgaaaggtacataggagttgtgaagtcgtacgttcgtaacagagctaaacccgaggggagcatcattgaaggttacacgaccgaggacgctattgagttctgtgtcaattacatgtccgatgccgatcctatcggagttccagcgtctcgtcacgagggaaggttgtcaggtgttggcacaatcggaaggaaaagaattaggcccgatcaagcgtcgtacgcgcaggctcattacgctatgctccaacatatggcagaagttggcccatactttgaggaacacttagcgaaaatccgagatgagaacttggggcgatctgatgcatggattaacagagaacataattctcggttcaacgaatggttcaagaatcgtgtgacaatgtccatggttgtcccaaatgagacagtacagttgttggggatgggaccgtcttggaccatagacacatggcaaggatacgatataaatggatacacattttacaccgtcaaacaagatgacaaaagcacagtgcaaaacagcggcatccgtatagatgcattccaggatcaagttgggtcaaacacatactacggccacattgaggagatctgggagctaaactacgtcaagttcaaggttcctttgttccgctgccgttgggtgaatctacgcactggtgtcaaagccgacaaggaaggtttcactttagtagatctatctaaggtgggatacgcctatgaaccatttgtacttgcgaaacaggtcgagcagatattctacataaaagacccttcaaacaagaagatgcacatcgtgagggatggaaagcgccgaattgtaggagttgacaacgtcgtcgatgaagaagaaaacaaccataatcttcatataagacctcacattgaccttgacgatgatccccaagagcctgtggcatatgctcgttcagatcataccgaaggcataaccttgtggctgatgcatttgcccgtcacggatgactcatctgtgacgggccctaagataatgcccgatagagatagattaatctcgatcgggcttgaactaaggcccgtcaccgatgactattttgtccatttgcccagataa

SEQ ID NO: 87220 - DNA, 2331 bp, Oryza sativa
  Clone ID: PAT_MRT4530_86187C.1
atgtcgacgacaactagtgggtcctcaagggcacgtactcctaggacagggaacaaaattcctaaggaacggttccgcataacagcggtggacgccgtagggtttctgacagctccaaggaaaatattgagccgatttaggtctatctgcggggtcatagagaggcagaaattcagtattctgcaagacgacttcaagctcgtgccggccgcagagaaggacattgcttggctaacgttcaaggagagctttgattatcctgcggagcatgaggaccgtctcaggcgggctgctttcaaggttatgggcactgcttggaagaactttaagactaagctagtcggcgagttcgtctacaacccggcaaatccagatccaagagacaaatttccttggatcacggaacaggtctggtcggaattccatgcgaagaagtcgacccccgagtccagagctagaagcgaggcatatcgcttgctccagaccaggaaccagcatccgcaccggcttggtaccgctggatatgccgaagatcaacgagtatacgaagctataaaggagttggttgccgagcaacaagcctcgcaagaggcctgctctcaaagacgcgaggacgacctcctcacgaaagcgttgggtaacaaggaacaccgtggacggacacggggcgatgggtcttatgttccctggaagtatggatttccagactacgcgtggcagtacaagaagcggacttccaacaaggcggagaaagatgcacgccttgaagccaagatccgggagtcgatacgagctgagctgacatctgaattcgacgaaaagctcgagtcgatgagggccaagattaggcaagagatccgagaagagcaacagatcccccaggccgccgctgctgctgcgcacaaagagttaggaagtcccaccgaaaaacgcagcagttgcgcatcaactgagttggcggaaaatccaacatcggtcgacagcgccgtcgaccacataacggaaccaacgagctgcaccctcacagttagggtgatgccgaccttcactgttccagcagccgagggacttgcgtacaagccgatcccagagacaagagtgcatggagctcaactcagggccgactgtgcaaaagttcaagtcgactcggtgaagcccgaatacgagttgttccctctgaagtatccaccgaacgacgaggtcctctcactaggaaatgcccgtgataccttcatccaatggcccaaggacctcattgagatcagggttacagcgaggccaaccactgcaccaggcggtcgtccaccaaagagacccgcctctgctccttcagcccctcctgctcaaaatcgtcatgcacaatcttacgatgtgcagttgcagtacgacacggattttggggaggaccgaacggaggccgacagcaaggcaattcatgaacccccaccgatgaagaagagcaggaaggcacactcttcccctcagagaattactctcgataaacccgaagcaaaggggagaggaaggggaggaaaggtgcaggcctcgcttctagctccaagaaagctagatctaggcaagggccaggaagagactaagggcaaagaggtcaagaagaaatacgtcgctccacaggagttccaactaggcatgccattggttggagatgacatgcttgccgcaatgggcaccacttgcaaggaccttcacttatactacatggagaaatctaacgccaggaagccaagtaaagctaccgatatccttggacagcacgatggaaagccattccttggtccaacaaattatatcgtggtcgacttcaaggatcttttcgacctctacaggctccgagcggtggacacaagcctccttaagtgctactccttgttaagttggcaatggtgtcagaagcatgcaccggaagttgccttccttgatccacaagtggtcactgtcacaaatctccagaatgaccgtcaaggaatggtcaactacatctacgacaccttgtggtcccgccgagacaaggagtacattatgtgtgcctataatcaatatgcccattggatccttctggtcataacacctaaatggagtacatgtcattacctgaactccagaattgataagaacgcatataattggaccccaattcaactagcgatagatgaagcgtgggcccaatacgtgcaaagaggaggcctcaggaagacaggacatgacaccctcatccacaaaaaagacttcccgggcacaataaccaagtctctgactaccagctttgagaaggcaatgatgaacacttattatgcaactgtggtgatgtaa

SEQ ID NO: 87221 - DNA, 447 bp, Oryza sativa
  Clone ID: PAT_MRT4530_86188C.1
atgcatacattcatccgcgccaccttgtgcagcctacagcaagcagatctttctatggcttcaaggtccggacagccaatgagcagccatggcgagcgtatgctgcctctgaacccagcacagtatctgcagcgcctgggccattcgatcgagctttccgctgctatgccgcggcttaccggcgaggccccccggagaaggacggagatttcccggagacttgggccggccaccggcgtggcaatccctcgaacaccttggcttgcattcccgtttatgggcttcctcggcccacataatgtgaggcccatgttcaatgaggtcgtcatgttgtggacctcatctcggcccatctcaaccacttactacccaagctactcgttagagacgaactggattggaaaaggtgtcttcgaagaatattggaaggaaccatgccagatttga

SEQ ID NO: 87222 - DNA, 2091 bp, Oryza sativa
  Clone ID: PAT_MRT4530_86189C.1
atgggcggaggaggagtcgttggcagtgatctggagcgaaggaggcaggccacaaaaagtgtggcaagccacacttgcctaatattgcctaaagaaaacagaaaattcccaaaaatgatccgaatggatcaatcaacaattgatcgaagttggatgtatgcgaaaaatttgaaacgtcattctacggagtacagaaagggcataataaattttatgaacgccacggaggaggatcggaaaagaagacacagtgattacatgtgttgtccatgtgcagattgcaagaatgagaatatgtttgatagcgtagaggacgcacacggtcatctaatacaacgaggattcatggagggctatacttgttgggtgaagcatggacagcaagaatcaggaagtggagcagcagcagacagaagtggtgcgcataatcaggaagatgaagatgagcatgacatgtttataccttctccattgggcggtgaaatggttgatgtggattacgatctgctgcaagacatgttacgtgacgttgaggacccagcccagaatgagagagatggaatgaagttcagcaggttggtcagtgattccgagacgcctctgtacgatggatgcaaagcaaaacacactaagttgttagttaccttggacctaatgaagctgaaggcaagtagtggatggacagacaagagtttcacagatcttttaggaattttgaaggctatgcttcctgttgagaacacattgctcgagacgacatacaaagcaaagcaggttctgtgtccactggggttagaggtccgtagaattcacgcttgtccaaacgactgcatattgtaccacaagcaatatgcggacttggatgcttgtcctgtctgcaaggcttctcgatacaagcgaaagaaaagtgctgacgaaggaaagaagtcaaagaggggtggtccggcaaaggttgtgtggtatctacctatcattgatcgtttcaagagaatctttgccaaccccaacgaagtgaagttagtacgttggcacgccacagagagaaggaatgacgatatgcttagacacccagcggattcgattgaatggaggaatatcgatcgaaaacacaaagactttgttgccgaccctagaaacatgaggatatgtctgtgtccgaggcaacccagcaatgatatcaatgtattcctggagcctgttatcgacgatctagagattctttggaaagaaggtgtggaaacttggaatgcatatggtcaggagaacttcaagctaagagttctattgttctgcaccattaatgactaccctgcactcggtaatctttccggacaaactataaaaggaaagaaggcatgctccgattgcaaggaacatacacgaagccggtggctgaagaaatcacgaaagatggtatacatgggtcatcggaagtggctcccgctacgtcatgcatttagaagaaagaagaaaatttttaacggtaagagagaacttcagcctgctcccaaagatttgtccgaagatgaggtccacaatatggtcaaggacataagcaatgagtttgggaagaaaagaaaacgtagcaagacaaaggagaaggaaaagaatgtgtgtgagagtttggttggcctgatgttgaatattaccgggaagacaaaggacgggttgaacgcgcgcctcgatgtacaggacatgaatattaagtgcgcctataatcaatatgcccattggatccttttggtcataacacctaagtggagtacatgtcactacctgaactccagaattgataagaacgcaaatgattggaccccaattcaactagcgatagatgaagcgtgggcccaatacgtgcaaagaggaggcctcaggaagacaggacatgacaccctcatccacaaaacggacttcccggtgaagcaacaaataggtgaccagtgcggattccatgtgtgccacaacatgcgtcttctgtacagagataaggtgaagactttggctgagtttgagggcacaataaacaagtctctgcctaccagctttgaggaggcaatgatgaacacttattatacaactgtgatgatgtaa

SEQ ID NO: 87223 - DNA, 2665 bp, Oryza sativa
  Clone ID: PAT_MRT4530_8618C.1
tctctctctctctctccatccgcgagaactcgtcgggatatttatgagcgctggtggagtggcgtggcgaggtgaggaggtggctgatctctctcatcaatctcctccgtcgcggtcgcagctgcgggagtgaagccgccccgcggagctagctaaaccctagccactgcccgggcggagagttggggtttgggttggtggcggtgggccggtggcggctcggtggcggagctccggtgtggggtggtgtggaatggaatggaagttattcgatgatttcccaggattttgactaggccacagatggttacaagttgcattcatggtcaaaattgtgtctgaacatagagattctttggagttcatagacgaagtgatttgttttgttcaatacttccacacttataatgggtgctgtctgctcaaggaagagaagccaattagtgcacgaggatgactctttccagacatcttccaggttctcaaagaccagcagcttgaaatggctgctgcttacactgccacgcagcaattccgatgtctcccgcaagggccagggaaagggccctggtcgttgcccatctctaatggagctttgtgtggccaaagcctgcgaggatattaacaagtattctagtttttctgtattgccgagggatctcagccagcagatttttaatgaattggtagcgtcgaaccgtctcacggagacattgcttgaaacttttcgggattgtgcactacaggacattgatttgggggagtatcctggagtgaatgatgcttggatggaagtagtggcttctcaaaggcattcattgttatcagttgacatttcttgctctgaaataactgatagtgggttatatcttcttagagattgtccaaacatgcaaagcttggcatgtaattactgtgatatgatctcagagcatggcctaggaatcttgtcaggtctttcaaacctgacatctctcagtttcaagagcagcgatggtattactgctgaagcaatggaagcatttgctaatttagttaatttggtaaatcttgatctcgaacgatgcctaaagattcatggtggccttgttcacttaaaaggcctcaggaatctggagtcactcaatatgagatattgtaacaacattgcagattcagatatcaaatacttatcagatctcacaaatttgaaagaattgcaattggcttgttgtagaatcactgatctgggtgtttcttatcttagaggcttgtccaagctaacacagttgaatttggagggctgtccagtgactgctgcctgtttggaagctatatcaggattggcttctctggtggtgttgaatttgagtcggtgtggcatatacggtgaaggctgtgaaaactttcaaggtcttaaaaaattgaaggttttaaacttggggttcaataatatcacagatgattgtttagcacatctgaaagagttgatcaatttggaatctctaaacttggactcatgcaaggttggagatgaaggcttattacatctgagaggccttatgcttttgaaaagtttggagctatctgacaccgaagttggaagcagtggactccagcatctatctggccttcggaatttggaaagcatcaatctctcgtttacgttagttactgataccggtatgaagaagatatctgcactgaattcactgaagtcagttaatcttgacaatcggcagattactgatgttggcttagcagcacttacaagtctcactgggttgactcatctggacctttttggtgctaggataacggactatggcacaagctgcttcagattttttaagaatcttgaatctcttgaagtctgcggtgggttaattactgatgctggagtgaagaatatcaaggatctcaaagctctgaagcaactcaatctttctcagaacgttaacctgacagacaaaaccctggagctgatttctggcttaactgctttagtctcgctgaacgtctccaacactcgtgtatccaatgccggcctccgccacctgaaggatctgcagaacctgcgctcgctgtcgcttgattcctgcagggtcacgacaagtgaggtgaagaagctgcaggcgacggtgctccccaacctgataagcgttcgacccgagtagctggacactacatgatcacctgtaaataatcatctggatggcttcatgtagatagctttgcaagggcctggattgaagccagattaataagtaaagtctatggtagcatttgttggcctaaaaccgggagacgttggcccaaccgggagaaagcctttctacaccccaaaagctagctcatgaggtgagggacccctccccttttaagttggtgccactccccctaaactttcaatgtgggactattctcaacagcatttactaggtccttcctgctccgtttatcgggatcttttcgttttcaagtactgaaaaaattacttgtatttccttcactccgtgtaccctccaaggcgtgacgggaaggaacaaaattgtaaatattgcgcttcctcgccattgtgggatgcttatgtgtagtgtggtgtacagtgccgcattttctgtggcagtttgtgatgtcattgtgcttgggtttcttctttcttcaaaaaaaaaaaaaaaaaaaa

SEQ ID NO: 87224 - DNA, 3059 bp, Oryza sativa
  Clone ID: PAT_MRT4530_86190C.1
gtccgaggcaaccaggcaatgatatcgatgtattcctggagcttgttatcgacgatctggagattctttggaaagaaggtgtggaaacttgggatgcatatggtcaggataacttcaagctaagagttctattgttctgcaccattaatgactaccctgcactcgagctaaacccgaggggagcatcattgaaggttacacgaccgaggaggctattgagttctgtgtcaattacatgtccgatgccgatcctatcggagttcctgcgtctcgtcacgagggaaggttgtcaggatcaagttgggtcaaacacatactacggccgcattgaggagatctgggagctaaactacgtcaagttcaaggttcctttgttccgttgccgttgggtgaatctacgcactggtgtcaaagccgacaagaaaggtttcactttagtagatctatcaaaggtgggatacactgatgaaccatttgtacttccgaaacaagttgagcagatattctacataaaagacccttcaaacaagaagatgcacatcgtgagggatggaaagcgccgaattgtaggagttgacaacgtcgtcgatgaagaagaatacaaccataatcttcataaccctagcgccgccgtcatcctccatcgccgagcccgccgccgtcgccaccgagcccgcagccgtcgccctccattcggaccgacgccgcctcctcaccgacgacccccaccaccgccgccactgagcccaccgccgccgccaccgagcctctacaccgaccggcgtcggccttcctcgtcgtcacctcccgcgtcctcaccgacgcacgtcgctgacccccaccgagcccgacgctgcccgcccggcgccgccctgcccgaccggcgtctccaccgaccggcgccaccctccaccgagcccggcgccgccgccgccaactcctccttcgctgccatcgtcatccttcgccggcgacaccctccaccgaccccgccgcctccaccgagcccggcgcctccaccgaccccgccgcatgcaccgagcctagcgccgcctccaccgaccggcgacgccctccaccgagccaggcgccgcctccaccgagcccgctaccaagccacaccggccattctcaccgtgctcaggtctatctgcggggtcatagggaggcagaaattcagtattctgcaagatgacatcaagctcgtgccggccgtagagaaggacattgtttggctaacgttcaaggagagctttgattatcctgcggagcatgaggactgtctcaggcgcgctgctttcaaggttatgggcaatgcttggaagaacttcaagactaagctagtcggcgagttcgtctacaacccggcgaatccagatccaagagagaaatttccttggatcacggaacaggtctgggaggaattccatgcgaagaagtcgacccccgagtccagagctagaagcgaggcatatcgcttgctccagaccagaaaccagcatccgcaccggcttggcaccgccggatatgccgggccaggtactagaagaatgatgatggcacaatcttcatgccaaatgcagaagatcaacgagtatacgaagctatacagttgcgcatcaactgaggtggcggaaaatccaacatcggtcgacagcgccgtcgaccacataacggaaccaacgagctgcaccctcacagttagggtgatgccgaccttcacggttccagcagccgagggacttgcgtacaagccgaccccagagacaagagtgcatggagcgcaactcaggggtgactgtgcaaaagttcaagtcgactcgatgaagccggaatatgagctattcccactaaagtatccaccgaatgacgaggtcctctcactaggaaatgcccgtggtaccttcatccaatggcccaaagacctcattgagatcaagattacagcgaggccaaccactgcaccaggcggtcgtccaccaaagagacccgcctctgctccttcagcccctcctgctcaagatcgtcatgcacaatcttacgatgtgcaattgcagtacgacacggattttggggaggaccgaacggaggccgacagcaaggcgattcatgaacccacaccgatgaagaagagcaggaaggcacactcttcccctcagagaattactctcgataaacccgaagcaaaggggagaggaaggggaggaaaggtgcagtcctcgcttctagctccaaggaagctagatctgggaaagggccaggaagagactaagggcaaagaggtcaagaaaaaatacgtcactccacaggagttccaactaggcatgccattggttggagatgacgtgcttgccgcaatgggcaccgcttgcaaggaccttcacgcatactacatggagaaatctaacgccaggaagccgaataaagctaccaatatccttggagagcacgatggaaagccattccttggtccaacaaattatatcgtcgtcgacttcaaggatctattcgacctctacaggctccgagcggttgacacaagcctccttaagtgctactccttgttaagttggcaatggtatcagaagaatgcaccagaacttgccttccttgatccacaagtggtcactgtcacaaatctccagaatgaccgtcaaggaatggtcaactacatctacgacaccttgtggtcccgccgagacaaggagtacattataattgataagaacgcatatgattggaccccaattcaactagcgatagatgaagcatgggcccaatacgtgcaaagaggaggcctcaggaagacaggacatgacaccctcatccacaaaaaagacttcccggtgaagcaacaaataggtgaccagtgcggattccatgtgtgccacaacatgcgccttctgtacagagaaaaggtgaagactttggctgagtttgagggcacaataaccaagtctctgcctaccagctttgagaaggttcgtgaggagatagccagcttcatcctccacaaaataattaaccccaaaggaatgtttaggcttaaaataaaatga

SEQ ID NO: 87225 - DNA, 419 bp, Oryza sativa
  Clone ID: PAT_MRT4530_86191C.1
atggccatgtccaccccggcgacggagaagctctacatcatgctcggaatgtacggggcgctcatcgacgtcaacgtcgggacgggggcttcgtcggggctcccgtgtcaccgccgtcgtcgtgtcgccacgccatcagaggctgttgctagtgctcctccccgtcgcctgcgcccgtcactcgcgcccagatactcccccgccgcctgcgcccgccagccgcacctagctgctcccctgccggccaccagccgcacccagctgctcccccgctgccgcccgcgcccgccggcgcaccgaactgctccgcagtcccgcccgaggagagggaaggagagagcaagagaggtggagaggggagagaaagatgaggatgacgtgtggggcccatgtgggacccacaccgagtcagatgccaa

SEQ ID NO: 87226 - DNA, 1482 bp, Oryza sativa
  Clone ID: PAT_MRT4530_86192C.1
atgaatcaatcaaattgcaagaatgagaatatgtttgatagcggagaggacatacacagtcatctgatacaacgaggattcatggagggctatacatgttgggtgaagcatggagagcaagaatcaggaagtggggcagcagcagacagaagtggtgcgcataatcaggaagatgaagatgaacatgacatatttataccttctccattgggcggtgaaatggttgatgtggatcatgatctgctgcaagacatgttacgtgacgttgaggacccagcccagaatgagagagatggaatgaagttcagcagggtggtaagtgattccgagacgcctctgtacgttggatgcaaagcaaaacacactaagttgtcagttaccttggacctaatgaagctgaaggcaagtagtggatggacagacaagagtttcacatatcttttaggaattttgaaggctatgcttcctgttgagaacacattgcccgagacgacatacgaagcaaagcaggttctgtgtccactggggttagaggtccgtagaattcacgcttgtcccaatgactgcatattataccacaagcaatatgcggacttggatgcttgtcctgtctgcaaggcttctcgatataagcgaaagaaaagtgctgacgaaggaaataagtcaaagaggggtggtccggcaaaggttgtgtggtatctacctatcattgatcgtttcaagagaatctttgccaacccgaacaaagcgaagttagtccaaggcaacccgacaatgatatcgatgtattcctggagcctgttatcgacgatctggagattctttggaaagaagaaagaaggcatgctccgattgcaaggaacatacacgaagcggacttccaacaaggcggagaaagatgcacgccttgaagccaaaatccgggcgtcgataagagctgagctgacatctaaattcgacgaaaagctcgagtcaatgagggctaagattaggcaagagatccgagtagagcaacagaacccccaggccgccgctgctgctgcgcacaaagagttaggaagtcccacccaaaaacgcagcagttgcgcatcaactgagttggtggaaaatccaacatcggtcgacagcgccgtcgaccacataacggaaccaacgagctgcaccctcacagttagggtgatgacgaccttcacggttccagcagccgagggacttgcgtacaagccaaccccagagacaagagtgcatggagcgcaactcagggccgactatgcaaaagttcaagtcgactcgttgcagtacgacacggattttggggaggaccaaacggaggccgacagcaaggcgattcatgaacccccaccgatgaagaagaacaggaaggcccgattgagatctagcaagctgccatggagcttgtgccttcgacatttagctgatcagatcgcctcatcaaaccaccctctacctaatgtaacctga

SEQ ID NO: 87227 - DNA, 545 bp, Oryza sativa
  Clone ID: PAT_MRT4530_86193C.1
cacgcgtccggcaagcatggacggctatttctctgttgcagtcgcctcgactgactacacgataccactcctcctccttttcctcctggtaggcgttgcgataggcagctactagcccgaggcgttctgttcctaaacgaccgacgtatcatcgggccttaaggagatcctgacacttccagacatggtctccaaagcgcatcgacaaccaagaggtgtgcaaacggctggaccgctactgatgattaaagacctacgaggccacatggatcgtggaatccatgattgccaccaccaacgccatcaacacccagaatatcgccaccttctttgagcagaggacaaggggacgaggggatgacgacaaaaacacctcacggccccctattatccaccagaaccttaccggcttgttgcatggtggctcacccggcgtcactctgattgagtggatgccttgaccgctagtcgtactagggtgaggtccttctcgacaccaaattcaactatatatggaggtggctggatctcatggaagctgtcct

SEQ ID NO: 87228 - DNA, 1488 bp, Oryza sativa
  Clone ID: PAT_MRT4530_86194C.1
atggagcaatcaacaattgatcgaagttgggtgtatgcgaaaaatttgaaacgtcattctacggagtacagaaagggcgtaataaattttatgaacgccgtggaggaggatcggaaaagaagaaacagtgattacatgtgttgtccatgtgtagattgcaagaatgagaatatgtttgatagcggagaggatgtacatggtcatctgatacaacgaggattcatggacggctatacatgttgggtgaagcatggagagctagaattaggaagtggagcagcaacagacagaagtggtgcgcataatcaggaagatgaagatgagcatgacatgtttataccttctccattgggcggtgaaacggttgatgtggattacgatctactgcaagacatattacgtgaccttgaggacccagcccagaacgagagagattccatgaagttcagtaggttggtcagtgattccgagacgcctctgtatgctggatgcaaagcaaatcacactaagttgtcagttaccttggacctaatgaagctgaaggcaagtagtggattgacagacaaaagtttcacagatcttttaggaattttgaaggctatgcttcctgctgagaacacattgcccgagacgacatacgaagcaaagcaggttttgtgtccactggggttagagaaaagtgctgacgaaggaaagaagtcaaagaggggtggtccggcaaaggttgtgtggtatctacctatcattgatcgtttcaagagaatctttgccaacccgaacgaagcgaagttagtacattggcacgccacggagagaaggaatgacggtccgaggcaacccggcaatgatatcgatgtattcctagaacctgttatcaatgatcttgagattctttggaaagaagatgtggaaacttgggatgcatatggtcaggagaacttcaagctaagagttctattgttctgcaccattaatgactaccctgcactcggtaatctttccggacaaactataaaaggaaagaaggcatgctccgattgcaaggaacatacacgaagccggtggctgaagaaatcacgaaagatggtatacatgggtcatcggaggtggctcctgctacgtcacacatttagaagaaagaagaaaatttttaatggtaagagagaacttcagcctgctcccaaagatttgtccggagatgaggtcaacaatatggttaaggacataagcaatgagtttgggaagaaaagaaaacgtggcaagacaaaggagaagggtatgtggaagaaaaaatccttattttggtggctaccttactggaaagatcttgatgtccgtcattgcattgatctcatgcacgtagaaaagaatgtgtgtgagagtttggttggcctgatgttgaatattcctgggaagataaaggacgggttgaacacgcaccttgatctacaggacatgaatattcgtagtgaactccaacccatatga

SEQ ID NO: 87229 - DNA, 297 bp, Oryza sativa
  Clone ID: PAT_MRT4530_86195C.1
atggatacaactgttgctcacatcatggatcaacaagaagacatcaagatcaagtcctccaagtgctggaatccaattcggctacctgttacattatcgacttcaaacggccgccaaatatgcaaaacaaactccgttttcagcccgaatagggttgatttgcatcagcaagatcaacaacccacggacagttatctcaactcactgaaaaatcgggccaacaacagccttgagtttcgagtggaactcaaggttcatcagtcgacatacacgttccctgtggaaatcgataactga

SEQ ID NO: 87230 - DNA, 1962 bp, Oryza sativa
  unsure (1)..(1962): unsure at all n locations
  Clone ID: PAT_MRT4530_86196C.1
atgggaaaacgggagcttcttatccttgtctacggtgatggcagcacgccccagggcgcgctccaggtggggggaggctccttgggtcacccacccgtcgtccctgatccagagactccaactcgacgttggttagatgacgtggccaacttggtcatgacggcgcaacagcgcctaggcgccggcgggcggtcctccgccaccaaggccactggcgctgctactgccggctccgtgtcgtngaggcggagggcgtggcgagcggcagccgttacccgccgttcgtntgccattccctcgtcaacgcctcccacccaagaaaataaggagttggttgccgagcaacaagcctcgcaagaggcctactctcaaagacgcgaggacgacctcctcacgaaagcgttgggcaacaaggaacaccgtggacagacacggggcgttgggtcttctgttccctggaagtatggatttccagactacgcgtggcagtacaagaagcggacttccaacaaggcggagaaagatgcacgccttgaagccaagatccgagcgtcgataagagctgagctgacatctgaattcgacgaaaagctcgagtcgatgagggccaagattaggcaagagatccgagaagagcaacagaacccccaggccgccgctgctgctgcgcacgaagagttaggaagtcccaccaaaaaatgcagcagttgcgcatcaactgagttggcagaaaatccaacatcggtcgacagcgccgtcgaccacagaacggaaccaacgagctgcaccctcatagttagggtgatgccgaccttcacggttccagaagccgagggacttgcgtacaggccgaccccagggacaagagtgtatggagtgcaactcagggccgattgtgcaaaagttcaagttaactcggtgaagcccgaatacgagctgttccctctgaattgcagtacgacacggattttgggggaggaccgaacggaggccgacagcaaggcgattcatgaacccccaccgattaagaagagcaggaaagcacactcttcccctcagagaattactctcgataaacccgaagcaaagggaagaggaaggggaggaaaggtgcaggcctcgcttctagctccaaggaagctagatctgggcaagggccaggaagagactaagggcaaagaggtcaagaagaaatacgttgctccacaggagttccaactaggcatgccattggttggagatgacgtgcttgccgcaatggacaccgcttgcaaggaccttcacttatactacatggagaaatgtaacgccaggaagccaagtaaagctaccgatatccttggagagcatgatggaaagccattccttggtctaacaaattatatcgtggtcgacttcaaggatctttttgacctctacaggctccgagcggtggacacaagcctccttaagtgctactccttgttaagttggcaatggtgtcagaagcatgcaccggaagttgccttccttgatccacaagtggtcactgtcacaaatctccagaatgaccgtcaaggaatggtcaactacatctacgacaccttgtggtcctgccgagacaaggagtacattatgtgtgcctataatcaatatgcccattggatccttctggtcataacacctaagctgagtacatgtcactacctgaactccagaattgataagaacgcatatgattggaccccaattcaactagcgatagatgaagcgtgggcccaatacgtgcaaagaggaggcctcaggaagacaggacatgacaccctcatccacaaaaaggatttcccggtgaagcaacaaataggtgaccagtgcggattccatgtgtgccacaacatgcgccttctgtacagagaaaaggtgaagactttggctaagtttgaggcaatgatgaacacttattatgcaactgtgatgatgtaa

SEQ ID NO: 87231 - DNA, 500 bp, Oryza sativa
  Clone ID: PAT_MRT4530_86197C.1
tcactaatgaaggctaaccctctggggtcccggcccgaatttcccgtttcgccccacccttccaatatgaaaacaacttaaacccaccgcccctgtgcattacttagaggaagaggaggagctagacggcatcctgcatacagctaaagcagccacggggacctccacccaccgcgcgtccttgacgacggagttgaacaagccaccgcccatcgccgtcagacatcgcaatctccaattgctttccccagctacaccaagctccatcaagtgtttggaggccaaccaagacaagagcaagtgccaatagcagtttgacgactataacaattcgcaaaatgagagagaggaccgtcttggttgaacacacccaagggtgcatcatttactcccatgggtaaagaacttccaccgaaggagaagccaaatcatagcttttaaaccaccatctaaatgccctccatgattatatatgctcatccttatgcgtgtaatccatt

SEQ ID NO: 87232 - DNA, 159 bp, Oryza sativa
  Clone ID: PAT_MRT4530_86198C.1
atggatgacaacgtgagttcatttaagttgaagtcgggggctgctgtcatggttacagataaggcatcaactatccagtccgagatgctgctcgccaggactctctgcacattgctggccatcctatgtggctccgtgcctatcttctcccagtgctaa

SEQ ID NO: 87233 - DNA, 1190 bp, Oryza sativa
  Clone ID: PAT_MRT4530_86199C.1
atggcccgggcatacatggctgtcgccgtggccctcttcttggtggtcgtgtgcgccgccgtctccgaggccgcgaagccgccggcgtcgcatcccaggctgccgcccaactaccacatgatcaacccggggagctcgggcttgggcaagagggaccaggagctgtcgtgcgccgacaccaagggcaagaagaaaggatgcatggccaagtgcgacaagcgctgccccaaccaatgcatcgtcatgtgccccagctgcaagaccttctgcatgtgcgacttctaccccggcgtgtcgtgcggcgacccgcggttcaccggcggcgacggcaacaacttctacttccacggcaagaaggaccacgacttctgcatcgtctccgacgccgacctccacatcaacgcccacttcatcggcaagcgcaaccccaccatgagccgcgacttcacctggatccaggccctcggcatccgcttcgccgaccaccgcctctacatgggcgccctcaagaccgccaagtggagcagcgacgtcgaccgcctcgagctcgccttcgacggcgcgcccgtcgacgttccagctcagctcgacgcgcgatgggagtccgccgccgttccaggcctcaccgtcaccaggaccgccgccaccaacgccgtcagggtgcagctcgccggcgtgttcgacatcatggccaacgtggtgcccatcaccgagcatgactcgcgcatccacaactatggcgtcaccgaggaggacagcctcgctcacctcgacctcggcttcaagttctacgacctctccgacgacgtccatggcgtgctcggccagacctaccgctccgactacgtcaacaagctcagcgtcagcgccagcatgccggtcatgggcggcgcaccaagctacgtcgcctccgacatcttctccgccgactgcgccgtcgccaggttcggccaccgcgccggcatcaccatggtcactgccagggccagttaaatttgcttgtatgcttcaagcttgatcgttgacagctcttatcgtgtacccaatcaagcattaatagagctagacactggaataagtttattttcaggttgagggaaacataccagtcatcaatcaatataggactcaaatcatttgatattcgcaccgtctcgtgccggtttgttaatgttaaaaaataatttgat

SEQ ID NO: 87234 - DNA, 1795 bp, Oryza sativa
  Clone ID: PAT_MRT4530_8619C.1
ggaaacaaaacaagcgcagtacgcatttacacatgttttgaatttcagaagagaagcaaaaacagaaacacctcgaacaagacagtagcgtttacctcatgaagaagtaacccatggcacaagtcttttctaggagcttattatactttgtccaactatgtaatgcaaaagataatagaatcatcatatgagctaattcactacaatgttcatgaactcgagtcatgacttatagcctaatacagctttgctccagcaaaaaaataagttctttgcttaactacaattgactgaaggggaacaaaattatccccagcaggggtgcacaatcttaattcatggcttcttgtaatgttgccaataatatcatggagccctatcaaatgggcgtgtatcattgtagcatatactccatacagactcaactgcatcttttgcagctgtccctgagcagtacgggttgttcttgacagacatgagagcccgccttttaacacattcccccagcccgctaccgtaggaaccattgtgattggtagacatgcagttcatcgccctgatcatccgcggtagcactgggcaaccggccttctccatttgctccctcaggaaccgcaccgtcggatctggttcacaacgcaaataaggaaattttgacacgctcatacgttggagagccgagttgatgccggcgacacagtcctcagacggcatgtgtcggttgtccccgcgggcatctgagctggaggctgcctccactccggcggtttctggcacaccgccattggtggcggcggtggctgggggccggagtggcgacgacggcgtgtgggcgagggctggagcagcgacggcggcgagaaggcgatggccgccaccgcctgccccgtcatcggagggctcgaggaggacgccggcgtggaggagccccgggcagcagacggagagcttgtggagcgcggcccacgccctgggcgcgttgtcaggtagccgtcccctgcacgcaccgacttgtggttgacggagaggggggcggctggacggggacgccggcgcggcagaggacgacactggagtcgccggagttggcgacgacgacgcggtcgtgaatcgtgacaggggcaggagcagctcggcggggagcgcgcgcgtcaagcgcgggcgcgcggcgggaggcacgccgccctgagcagcgtggcgagccgcagcgacgcgcatgacgccctcgcctagtcccgcgggtcccctgcagcctccccaagatttgccggcgtcctcctcgagccctccgatgacgggacaggcggtggcgcagccttcgccaccatcgtcaccaccacgaagcacgtcgcggagcagcagtggcggtggtggcagcaaatcgatcaatttccatcgcaccatcgccgtctccataaaatgcatgtcagaacgtacataaatttatgtagggttagtaagtgatgacactaaaacttatgctcacatagtttttggattcgttccgagctcgtatgaggaactcttgtcaggacaaaaagaagaagatcaaaaattggaagacatcgacggcaagcatacacacatacggcggcgcgctcgtacttttgagagacgacttgatgccggcgacgcagtcctcgaacggcatgcatcggctggattcggagcgctctggggcggagactgcctccactccggtggcttccggctcgccggttcttccgcccgtcccggccatcgctcactggctcgctccggcggcggcgcgcccacgcgtccgcccacgcgtccg

SEQ ID NO: 87235 - DNA, 397 bp, Oryza sativa
  unsure (1)..(397): unsure at all n locations
  Clone ID: PAT_MRT4530_861C.1
caaggtgatcatcccgaacccgaaccggagcgcgcggtccatggacttcgacgccatgggctgcggccacgacggcgccgcgccggtgagctcctacgacgacgccaccaaggtcggcggcggcggcgagaggacggccgagcagaggctcgggtggccgctgctccgccgnccgctacccgcggcggacggcgccgtgcagccgccgcccaaggacgacgggccgcgnaagagtcggtggtgcagtgggtgatgagcctgccgggcggtcgtcccgtcgacttcgccggagccacaggccgggcttgtcgccgagttgaagcggatcttgaagccgttccgtnggggtgccgttggttccgtangagaagtttangattcaacaaacaatttttct

SEQ ID NO: 87236 - DNA, 909 bp, Oryza sativa
  Clone ID: PAT_MRT4530_86200C.1
atggcttccccgtcgcggcggcggcggcgccggcgccggcgccagaggaggaggacccggacggtcccgctcggcgtgttcctctaccacacgaccctgccggcggcgagggactgggcggagctgccggtggacgcgatcctccaggtgttccgctggctcgaccacgtcgacatcctgatgggcgccgggctggcgtgccagtcgtggcgcgccgccgcacgcgacgagccggcgctgtggcgccgcatcgacatgcgggggttcgcctgcctcccctactggcagcgccaccggcgcgacaccgtccgcgccatggcgcgcgaggcggtgcgccgcagcgacgggcggtgcgaggagttctggagcaaggtcggcggcgacgacgaagtgctccagttcctcgccgaccacgcaccatacctgaggagcattcgcctcgtcaaatgcgaccatgtaagcaaggaaggaatctcggcgatcatccagagctgccctctcctggaggccttgtacatagacagcgactgcatcctcaggcgcgacattgatgccctgcgagacacgaacaagttaagggaaaccaatagggctctaagtattcagatacggtcgcatggcgaggaagaagaagccgatagggcgcagaatggcaaggacgaagaagccgacactgactatggcgatgacgagttcactggcgatctttctccgtggtccagcatctgcttcgaacaggaccgcgacgacggcctggatgagttcttgaagtcggagtatttcctggagcctcatcgctacctccatgacgttcatgtgaatgaattcgatgaggagcaggattgcaggatgctcgacaagggtgatcgcaggtacctgaaagccgaaggatggacatatgtagagtga

SEQ ID NO: 87237 - DNA, 585 bp, Oryza sativa
  Clone ID: PAT_MRT4530_86201C.1
atggctgccttcctccacctcgccatcctcgtctccctcctggccgccggcgccaccgccaacaacggctacaccacaccatcgccaccgccaccaccgcagcacacgccgccgccatcgccaccgccaccggcgccagcggcgcaccaaagcagcgacaaggtgctagtgagggtggaggggaaggtgtactgccagagctgcgagcaccgcaactcgtggagcctcgacggcgcgaggccgctgcgcggggcggaggtgtcggtcacctgccgcgacgccaagaaccgggcggcgtggtggaggctggccgtcgccgacgagagcggctacttcctcgcggagttcggcgtcaccagggcgtccgacttcctcggcgccgacccgcggggggcgtgctacgcgcggctgctgtcgtcgccggaccgcaagtgcgacggcctcaccaacatcaacgccggcatggtgggcgcgccgctccgcgacgagggcaagcggtggccggggcagggctacgacaacgtcgtctacgccgccggcccgctcgccttccggccggcgaactgcccgcccaagcactactag

SEQ ID NO: 87238 - DNA, 981 bp, Oryza sativa
  Clone ID: PAT_MRT4530_86202C.1
atgccgacgcccgcgcgggccgcctcctgcccgtcgtcgtcgtccgcggcggccgcggacgacgccgcgtcctgctgctcctccgacacggggtccaccttcaccgacctctccgaggtcgacgggatcgcgctaccggccgcgccatgcgagagcccgccgctgctcggcccagcgtcctgccgtgggggccgtctctcgtcggagctccgctcgtcggtgcctgagtccggtggatcagtgagggcgttgaacccgctgtgctaccgctcgctcaattcggccctgtccggttgcccggcgccggcggggaaggcggcggtgaacgccgcgagaccaccgcagccgcatggggtgaaggcagccgaatcgaagaaggtggccatgattggagggaggaaagtccccgggaagcaggaggacgtgcaccagctcaggatgctggagaactcctacctccagtacaggttcatgaacgcccgggcagaggccgtggcaagggccaaggcttcagtggcagagaaatccctctttgggcttgaggagaggatcactgcgctgcgggtatctgtcgccgagaagaagatggaggtggagaggatgaggagggagcagacattgcgctctgttgttgatgctcaggtaccgcacttggatcaatggtgtgatcttgagggggatcattcaagctctcttatcgggttaacatcagccctgtataattcttcacttagactaccagtcattgggaatgttcgggcaaatagcgaggaaattacagaagttctcaactcttctgtacaactgctggaaccagtgtcttcttgtgttaaaaattttctaccaaaggttcaagaagttgacgatgtggctgctaagcttgcccaagttatagctagtgaaagagttgcgattgaggagtgcgggaatctcctctatcaagctcacaatttgcagaaaatccagagacgacttgtgtga

SEQ ID NO: 87239 - DNA, 306 bp, Oryza sativa
  Clone ID: PAT_MRT4530_86203C.1
aaaggatatttgcaaaatttatattaaacctttctcgatagacctaccactgggccaattttgactacatacgaacaggtttacgaaggactttcaaactactaaacaccaagcataaactccacaactgaatcctgacgcctctggagattttacaagttccacacaggaattgcaaagcaacgggcttaaacaaaccaaccgattcatgtaaaacacgataagaagtcacgatactgattacctaggttcacaagcgatcattaggaggaggcactcttgaagttgcggcgaccaagtataagg

SEQ ID NO: 87240 - DNA, 929 bp, Oryza sativa
  unsure (1)..(929): unsure at all n locations
  Clone ID: PAT_MRT4530_86204C.1
ctccacctaacactggagcggagctcgcgcagtcgcgcggtgggccagggtgaggcagagctggtgcggtgaggcggagctcccgcggcggggcggaggtggcgcggcggggcgggagcgccgtcggggagcaccgtcggggagcgtcgtcggagcgcgccgtcggggaggaggcgtagtgggcccgtagtggcgttagtgcgtagtgcggccgacggggagagtccgcggcggagcgcggtcgtcgcagttcccgctgctccgttctgagcatcgccgccacgaggacgagccgtgccgcgagccgccggtgggtgtgctccgcctgccaccaccgctccgccccgaccacagccgtcgcgaggagtcgtgccgcgagctgccagccgtcgcgaggagtcgtgccgcgagctgccagcgtaggctgttggagagaagaagattgggagcactgggtaggctgttggagaagggaatttttgagtgtccgacctttttactgtgcatcactcaatccatgatgagtctctagaatgggtctccgctgttggagacagtcttagaagttctcttctatccttggaagacaatacatacatggtacaacctcgccaatggagtgtagaaaagaatgtatgcccgtagcgactgttaaaactgttccatgctagctacgaacataaacatttgttctttctttttattcagctgagtgcctgagtccgatcaaatatgatgggattaaaatattgtacagccggtaaatattgccttgctttgtacacagaattcaagattggaacatagactcgctgaatggctacttctgaatgctgagtggctgttaacattcggaagtctttcgtgttagttgaacatacattttaaccttgcaattcaggtgaaaaaanaaaaaaaaaaaagaaaag

SEQ ID NO: 87241 - DNA, 260 bp, Oryza sativa
  unsure (1)..(260): unsure at all n locations
  Clone ID: PAT_MRT4530_86205C.1
atggcgtacaagaaggccacgccggtgctggacgagccggcaagggcaccgttgcgtggcccgttcgccagcggtgccgcgtccctccggcgtgatcaagacgacgacgacgacgacctcctggtggatctggtgcacgagttctacgacgacggcgagcccggcgcggacgccacggcgaggggcggcgtgtcgtcttcgccggagcccgagcctaccgagtggaaagacnctcttcgcgaagcgctaagcgacgcaac

SEQ ID NO: 87242 - DNA, 324 bp, Oryza sativa
  Clone ID: PAT_MRT4530_86206C.1
tatcgacctcaactcggacgacgagcagtcaccgatgtcgtcggacttatcccccacggcgacggcgacggcggcggagttgtcggcggaggcggcgggtcacgatcagggcggggagcagcagatgatgaacagcagcaagaaaggaggagggtgggcgcgagggggccgagggaagctgcaggtggcggcgccgcacagcccgcagtcggcccccgccggcagtgtggggcacttcgagccggcgagccctcgtcacaagcttgcggtgagcccccgccaaaagtgccctttcagcccacgccagtcgcctccttacgccca

SEQ ID NO: 87243 - DNA, 334 bp, Oryza sativa
  Clone ID: PAT_MRT4530_86207C.1
atggcggcggagtccaccaaccgtataggcgaggacaccagtcggcggcgacggaggcaggccggcagtgaagtcgaagacgcccaacaacgacggcataataggccaaccgtgcggagacatcagtcggcagcggcgaaggcaagtcggtcggtgaagccatggacgcccatgaacggtgatgcggagacaccagtcggcggtggcgaaggcgagccggcggtgaagacgtggacgcccatgaacggtgtcaagacaatgtcgccatcagcaacggcggcggagttcatcaaccgtggaggtgaaggcaccaatcaatggcggcggatgccac

SEQ ID NO: 87244 - DNA, 168 bp, Oryza sativa
  Clone ID: PAT_MRT4530_86208C.1
atggatcttccattccagaggacgccactgccggatccaactgttgcgaggctgccggcgctcgatcaggccgtcgctctggccggcgaaatgcccctggcagtgccggatttgcccatccagctgctcccgtcatggcgccggcattgttggctgctctcgacgtaa

SEQ ID NO: 87245 - DNA, 2382 bp, Oryza sativa
  Clone ID: PAT_MRT4530_86209C.1
atggatcagtcaacaattgatcgaagttggatgtatgcgaaaaatttgaaacgtcattctacggagtacagaaagggcgtaataaattttatgaacgccgcggaggaggatcggaaaagaagaaacagtgattacatgtgttgtccatgtgcagattgcaagaatgagaatatgtttgatagtggagaagacgtacacggtcatcagatacaacgaggattcatgaagggctatacatgttgggtgaagcatggagagcaagaattagaaagtggagcatcagcagacagaagtggtgcatataatcaggaagatgaagatgagcttgacatgcttataccttctccattgggcgatgaaatggttgatgcggatcacgatctgctgcaagacatgttatgtgacgttgaggacccagcccagaatgagagagatggaatgaagttcagcaggttagtcagtgattccgggacgcctctgtacgttggatgcaaagcaaaacacactaagttgtcagttaccttggacctaatgaagctgaaggcaagtaatggatggacagacaagagtttcacagatcttttaggaattttgaaggctatgcttcctgttgagaacacattgcccgagacgacatacgaagcaaagcaggttctgtgtccactggggttagaggtccgtagaattcacgcttgtccaaacgactgcatattgtatcacaagcaatatgcagacttggatgcttatccggtctgcaaggcttctcgatacaagcgaaagaaaagtgctgacgaaggaaataagtcaaagaggggtggtccgaggcaacccggcaatgatatcgatgtattcctggagcctgttatcgacgatctggagattctctggaaagaaggtatggaaacttgggatgcatatggtcaggagaacttcaagctaagagttctattgttctgcaccattaatgactaccctgcactcggtaatctttccggacaaactataaaaggaaagaaggcatgctccgattgcaaggaacatacacgaagccggtggctgaagaaatcacgaaagatggtatacatgggtcatcggagttggctcccgctacgtcacgcatttagaagaaagaagaaaatttttaacggtaagagagaacttcagcttgctcccaaagatttatccggagatgaggtccacaatatggtcaaggacataagcaatgagtttgggaagaaaagaaaacgtagcaagacaaaggagaaggcctgccacacattgtcgaaggatgagaagatcgcaatgttatcatgcttgaaggatattaaagttccatcgggctattcagcgaggataattgctatcagaggcattctaccaccgaaagtgtgtcacacgatccaacgtctgtgcgccttcttcaatgcaattggacagaaggttatagatccagaagttctagatgggttgcagaccgatattgtgaataccctctgtcacctggagatgtttttcccagttcatctggtacatgggagcatcattgaaggttacacgaccgagaaggctattgagttctgtgtcaattacatgtccgatgccgatcctatcggagttcctgcgtctcgtcacgagggaaggttgtcaggtgttggcacaatcggaaggaaaagaattagccccgatcaagcgtcgtacgcacaggctcattacgctgtgctccaacatatggcagaaggtggctcatactttgaggagcacttagcgaaaatccgagatgagaacttggggcgatctgatgcatggattagcagagaacataattctcggttcaacgaatggttcaagaatcgtgtgacaatgtccacggatgtcccaaatgagatagtacagttgtcagggatgggaccgtcttggaccgtagacacatggcaaggatacgatataaatggatacacattttacaccgtcaaacaagatgacaaaggcatagtgcaaaatagcggcgttcgtatagatgcattccaggatcaagttgggtcaaacacatactacgaccgcattgaggagatctgggagctaaactactcaaccgacaaggaaggtttcactttagtagatctatcaaaggtgggatacgccgatgaaccatttctacttgcgaaacaggtcaagcagatattctacataaaagacccttcaaacaagaagatgcacatcgtgagggatggaaagtgccgaattgtaggagttgacaacgtcgtcgatgaagaagaatacaaccataatcttcatgtaagacctcacattgaccttgatgatgatccccaagagcctgtggcatatgctcgttcagatcatacggaaggcataaccttgtga

SEQ ID NO: 87246 - DNA, 640 bp, Oryza sativa
  unsure (1)..(640): unsure at all n locations
  Clone ID: PAT_MRT4530_8620C.1
tttttttttttttttttttgacttaatctttgattcaaaagtacaaacatcaatcactgggtactggcacccagttcaattaaaactaagtacatgcatgtactcatatcattcacaaaaatcgatttgaacaacccaaatatccggttcattagattgagatcaaacaaaatgcagccttccaagatcaaagtgggcatcatttggcattccctagcttgcactgttcgttgaatcacctaggtccagattctgtgctcacgagggagagaaacccagctggacgaaggtgggatgtggcgggtgtcctccgaaacctcgccgttgctggcggtggagtgtcctccgtagcacctcgccggtggggcaccaagcaggtagcggcacccggcggtggctccatccggcggcgaaagaaggnacggatagaagagggaccaaagaatcaagaaccaaagaaaagaaagagaaaatcagaaccaagaaaagaaagagaaaaatccagaaacaaagaatccgnggtagttggtacgatgggaaccacagtgacgtctggggaagtcgggcgacgggcagggaggcctggaaaagcacggccagccggcgccgctcaaaaacacgggggagcgacacccgggaa

SEQ ID NO: 87247 - DNA, 2765 bp, Oryza sativa
  Clone ID: PAT_MRT4530_86210C.1
gtttctcagatcggatcgaaaatttttctaagtcccgctacagtttcccgcctccttagaaccctagcgccgccgtcatcctccctcgccaagcccgccgccgtcgccaccgagcccgccgccccgacctgcccgatcggcgtctccaccgaccggcgccgccctccaccgagcccgggcgccgccgagccccaccggccatcctcagataatgtctcagcaaggcgaaccaatgtcgacgacaactagtgggtcctcaagggcacgtactcctaggacagggaacaaaattcctaaggaacggttccgcataacagcggtggacgccgtagggttgccgacatctccaaggaaaatattgagccgatttaggtctatctgcggggtcatagggaggcagaaattcagtattctgtaagacgacttcaagctcatgccggccgcagagaaggacattgcttggctaatgttcaaggagagctttgattatcctgcggagcatgaggaccgtctcaggcgggctgctttcaaggttatgggcactgcttggaagaacttcaaaactaagctagtcggcgagttcgtctacaacccggcaaatccagatccaagagagaaatttccttggatcacagaacaggtctgggaggaattccatgcgaagaagtcgacccccgagtccagagctagaagcgaggcatatcgcttgctccagaccaggaaccagcatccgcaccggcttggtaccactggatatgccggtaaggaagaggaatggcagcgtgaggatgaagaagcggaggaatcgtgcacaccgctcgtgtttggcgatatcccacaccctcgggctaggaactgggccagggctaggtaccagaaacatgatgatggcacaatcttcatgccaaatgcagaagatcaacgagtatacgaagctatagagttggttgccgagcaacaagcctcgcaagaggcctgctctcaaagacgcgaggacgacctcctcacgaaagcgttgggcaacaaggaacaccgtggacggacacggggcattgggtcttctgttccttggaagtatggatttccagactacgcgtggcagtacaagaagcggacttccaacaaggcggagaaagatgcacaccttgaagccaagatccaggagtcgatacgagctgagctgacatctgaattcgacgaaaagctcgagtcgatgagggccaagattaggcaagagatccgagaagagcaatagatcccccaggccgtcgttgctgctgcgcacaaagagttaggaagtcccaccgaaaaacgcagcagttgcgcatcaactgagttggcggaaaatccaacatcggtcgacagcgccgtcgaccacataacggaaccaacgagctgcaccctcacagttagggtgatgccgaccttcactagacaagagtgcatggagcgcaactcagggccgactgtgcaaaagttcaagtcgactcggcgaagcccgaatacgagctgttccctctgaagtatctaccaaacgacgaggtcctctcactaggaaatgcccgtggtaccttcatccaatggcccaaggacctcattgagatcaggttacagcgaggccaaccactgcaccaggcggtcgtccaccaaagagacccgcttctactccttcagcccctcctgctcaagatcgtcatgcacaatcttacaatgtgtagttgcagtacgatacggattttggggaggaccgaacggaggccgacagcaaggcgattaatgaacccccaccgatgaagaagagcaggaaggcacactcttccccttagagaattactctcgataaacccgaagcaaaggggtgaggaaggggaggaaaggtgcaggcctcgcttctagctccaagaaagctagatctgggcaagagccaggaagagactaagggcaaagaggtcaagaagaaatacgtcgctccacaggagttccaactaggcatgccattggttggagatgacgtgcttcccgcaatgggcaccgcttgcaaggaccttcacttatactacatggagaaatctaacgccaggaagccaaataaagctaccgatatccttggacagcacgatggaaagccattccttggtccaacaaattatatcgtggtcgacttcaaggatcttttcgacctctacaggctccgagcggtggacacaagcctccttaagtgctactccttgttaagttggcaatggtgtcagaagcatgcaccagaagttgccttccttgatccacaagtggtcactgtcacaaatctccataatgaccgtcaatgaatggtcaactacatctacgacaccttgtggtcccgccgagacaaggagtacattatgtgtgcctataatcaatatgcccattggatccttctggtcataacacctaaatggagtacatgtcattacctgaactccagaattgataagaacgcatatgattggaccccaattcaactagcgatagatgaagcgtgggcccaatacgtgcaaagaggaggcctcaggaagacaggacatgacaccctcatccacaaaaaagacttcccggtgaagcaacaaataggtaaccagtgcggattccatgtgtgccacaacatgcgacttctgtatagagaaaaggtgaagactttggctgagtttgagggcacaataaccaagtctctgactaccagctttgaggaggcaatgatgaacacttattatgcaactgtgatgatg

SEQ ID NO: 87248 - DNA, 435 bp, Oryza sativa
  Clone ID: PAT_MRT4530_86211C.1
atgtctcagcaaggcgaaccaatgtcgacgacaactagtgggtcctcaagggcacgtactcctaggacagggaacaaaatccctaaggaacggttccgcataacagcggtggaccaagtagggttgccaacaactccaaggaaaatattgagccgatttaggtctatctgcggggtcataggtcggcagaaattcagtattctgcaagatgacatcaagcacatgctggccgcagagaaggacattgttgggctaatgttcaaggagagcttcgattatcctatcgagcaagaggactgtatcaggcagactgctttcaaggttatgggcaatgcttggaagaacttcaagactaagctagtcggcgagttcgtctacaacccggcgaatccagatctaagagagaaatttccttggatcacggaacaagtctag

SEQ ID NO: 87249 - DNA, 1274 bp, Oryza sativa
  Clone ID: PAT_MRT4530_86212C.1
atttccatttccccctcgatcccacacaattcgatcccaatttccggttttcgtgtgtgaatcttttggagagatcgatgaagttcggcaagagcctgagcagccagatcgtggagatgcagccggagtggcgcgacaacttcctctcctacaaggacctcaagaagcgcctcaacctcatctccggcggcgccgccggggagagggcgagcaagcggcgtcgcgtcggtggcgcgacggcggtgacggtgacggcggcggcggcgggcgggatgacgctggagcaggccgggttcgtcggcctcctcgacgccgagctcgacaagttcaacttcttcttcctcgagaaggaggaggagtacgtcatcaagcagaaggagctccgggagaggaagatggcatcggcggaggaggtgatgcgcgtgaggaaggagatcgtcgatctccacggcgagatggtgctgctcgagaattacagcgcgctcaactacaccggattggttaaaatcctcaagaagtacgacaagagaaccggctccatgatccgtctccccttcgtccagaaggtgctgcagcaacccttcttcaccaccgacctcctctacaagctcgtgaaggaatgcgaggagatgctggaccagctcatgccgacgaacgaacactcggtagcgagcgaagatgggaaagatgacagcgaaggggaggagaagggttcaaagcccagctcctcctcctcggccaacggtggagccgtcccgggagaggccgaggccgaggatgagaggagcacggacatgaagagcaccgtcacggcggcgctcagggcgctgagagagatccggagcgggagctcgacggtgagcgtcttctccctgccgcctctgcacggcagcaatgggcaggatgaaccggggaggtgaaaacgagaatgggaaagaaaaggaaatgatcttgacgctgcgttcggtatcgttgtttcgcctgcacttctgctcaaatgctcagtgatcttggcacttggtaggagtttgtaactggctatcagttcatgtttcgttttaacttgggtatttttcgtgtaatctgtttgtttcccacctgctgtaaaaatgagagggaaaaatagattagtataaagttcagggtaaacatagatctcaatgtgcagcctgactactttgtcacttgatgggatgatttttttttgtttatgtgcttctgtgtttgttagatggtttgtatggctgtatatatatatatatttttagtaaatt

SEQ ID NO: 87250 - DNA, 2283 bp, Oryza sativa
  Clone ID: PAT_MRT4530_86213C.1
atgtcgacgacaactagtgggtcctcaaggacacgtactcctaggactgggaacaaaatccctaaggaacggttccgcataacagcgatggacgccgtagggttgccgacatctccaaagaaaatattgagccgatttaggtctatctgcggggtcataggtaggcagaaattcagtattctgcaagatgacatcaagctcgtgccggccgcagagaaggacattgcttggctaacgttcaaggagagcttcgattattctgcggagcatgaggaccgtcttaggcgggctgctttcaaggttatgggcaatgcttggaagaatttcaagactaagctagtcggcgagttcgtctacaacccgacgaatccagatccaagagagaaatttccttggatcacggaacagaccaagaaccagcatccgcatcggtttggcaccgctgaatatgccggtaagaaagaggaatggcagcgtgaggatgaagaagcggaggaatcgaacacaccacttgtgtttggcgatatcccacaccctcgggctaggaactgggccaggaccaggtaccagaagaaggatgatggcacaatcatcatgccaaatccagaagatcaacgagtatacgaagctataaaggagttggttgccgatcaacaagcctcgcaagaggcctgctctcaaagacgcgaggacgacctcctcatgaaagcgttgggcaacaaggaacaccgtggatggacatggggcgttgggtcttctgttccctggaagtatggatttccagactatgcgtggcagtacaagaagcggacttccaacaaggcgaagaaagatgcacgccttgaagccaagatccaggaaccaacgagctacaccctcacagttatggtgatgccaaccttcacggttccagcagccaagggacttgcgtacaagccgaccccaaagacaagagtgcatggagcgcaactcaggggcgactgtgcaaaagttcaagtcgactcggtgaagccggaatacgagttattcccactaaagtatccaccaaacgacgaggtcctctcactaggaaatgcctgtggtaccttcatccaatggcccaaggacctcattgagatcagggttacagcgaggccaaccactgcaccaggcggtcgtccaccaaagagacccgcctctgctccttcagcccctcctgctcaagatcgtcatgcacaatcttacgatgtgcagttgcagtacgacacggattttggggaggaccgaacggaggctgacagcaaggcaattcatgaacccctaccaatgaaaaagagcaggaaggcacactcttcccctcagagaattactctcgataaacccgaagcaaaggggagaggaaggggaggaaaggtgcagtcctcgcttctagctccaaggaagctagatctgggcatgggccaggaagagactaagggcaaagaggtcaagaagaaatacgctgctccacaggagttccatctaggcatgccattggttagagatgacgtgcttgccgcaatgggcaccgcttgcaaggaccttcacgcatactacatggagaaatctaacgccaggaagccgaataaagctaccgatatccttggagagcatgatggaaagccattccttggtccaacaaatgatatcgtcgtcgacttcaaggatctattcgacctctacatgctccgagcggtggacacaagcctccttaagtgctactccttgttaagttggcaatggtgtcagaagaatgcaccggaagttgccttccttgatccacaagtggtcactgtcacaaatcttcagaatgaccgtcaaggaatggtcaactacatctacgacaccttgtggtcccgccaagacaaggagtacattatgtgcgcctataatcaatatgcccattggatccttctgatcatagcacctaagtggagtacatgtcactacctgaactccagaattgataagaacacatatgattggaccccaattcaactagtgatagatgaagcgtgggcccaatacgtgcaaagaggaggcctcaggaagataggacatgacaccctcatccacaaaaaggacttcccggtgaagcaacaaataggtgaccagtgcagattctatgtgtgccacaacatgcgccttctgtatagagataaggtgaagactttggctgagtttgagggcacaataatcaagtctctgcctaccagctttgaggaggcaatgatgaacacttattatgcaactgtgatgatgtaa

SEQ ID NO: 87251 - DNA, 822 bp, Oryza sativa
  Clone ID: PAT_MRT4530_86214C.1
atgctgactgtggcgtcctcgctgccggcgtgcgccgccaccgtcgccgccgccgccgcctgccgtccttccatggcacaggtgatcttcgtctacgtttcgctctacctcgtcgccttcgctcagggattcgacaagccatgcgggttggcgttcggcgccgagcaattcgacccgggccaccccagggagagcgccgcccgcagctccctcttcaactggtggttcttctccatggccgtcggcgtcgccgtcgccatcgccgccgtcagctacgtccaggagaacgtcggctggggcgtccccttcgccgtcgtgtcctgcgcctccgccgtctttctcctcggcacccccacctaccgcctctacgcgccgccccgtcccgacaccgtcatggatggcaagcgatcgtcgtcgtcggaggaggatgcgcgtggcgcgctgcggcgcctgcttccgatatgggcggcgtgcgtggcgtacggcgtggcggacgcgcagatcatgacgctgttcaacaagcaggggcggatgctggaccgccgcatcggcggcgtggagctgccgcccgccgcgctccagacgatcgggccggcgaccatcgtgctgttcgtgcccatctacgaccgcgcggtggagttcttccacggcgagatgccggaggggcggcgcagcgtcgggctggcgctctactgcggcgccgtgggcatcggcggcttcgtcagcgccgcgctcatcgcggcgctggatggcgtcaccaggagggacggcggcgaggggtggacgatagaccagatcaatgcaccacaagttaaattttaa

SEQ ID NO: 87252 - DNA, 916 bp, Oryza sativa
  Clone ID: PAT_MRT4530_86215C.1
ttttttttttttttgggtggtcaaggagcaaaactatatttctgccaacaaattcggaaaccacatgccccaccgaccagcatccaagaaaaacatcaggccaagaataaaatccaagagatcgaaaacaaggcagccatatgggagtacattttctttctcaaaccgcaatacttattagatcagtaattcccggtgccatgcattcaaaactgcattcttccaccaacgcaggttgaggaagagccatacagcagtgacaggattggcaaccagttttcctcaactatcatcttcaacctcaagattgtaatggttatctaaatcttcagtagcagtaatgtagaaatgatgcacactttttttttctttggttcttcaatgcagaatgcaaatcgtcagtgactttttggcagcgagaagaatacacaaaccattactgtccagtgacagctcaaagagtgaatgatatagaaacatagaaaaaacgaaagaaaaagaagagaaggctcaggctgaaaccaaactgcattggtggtgggtgaaggcaaggcacttgagtcgacgacgtgttccaggagcttcggtgaggaccacgcgcagcccgaaaaaaaatggtgacgaccaccgcgcagacccaaacaacgggggcagtgaccccgagagcgtccatccaggacgaggattgagcaacgtgagaccggggccgatggtgtggacagcgaggcagtgcgcagcatgtcagacgaacgcatcgtctcgcccgcaacgcccaaccaacgcgccggccggctcagaaggacggcgaggccggcaccaacaaccaaactcgacagtggaggaggagggccgcggacggaggaagagcgccgggagtaacgacgccgacaggtggagcgaggctggggggaggggt

SEQ ID NO: 87253 - DNA, 4323 bp, Oryza sativa
  Clone ID: PAT_MRT4530_86216C.1
atggatcaatcaacaattgatcgaagttggatgtatgcgaaaaatttgaaacgtcattctacggagtacagaaagggcgtaataaattttatgaacgccgcggaggaggatcggataagaagaaacagtgattacatgtgttgtccatgtgcagattgcaagaatgagaatatatttgatagcggagaggacgtacacggtcatctgatacaacgaggattcatggagggctatacatgttgggtgaagcatggagagcaagaatcaggaagtggagcagcagcagacagaagtggtgcgcataatcaggaagatgaagatgagcatgacatgtttataccttctccattgggtggtgaaatggttaatgtggatcacgatctgctgcaagacatgttacgtaacattgaggacctagcccagaatgagagagatggaatgaagttcagcaggttggcaagtagtggatggacagacaagagtttcacagatcttttaggaattttgaaggctatgcttcctgttgagaacacattgcccgagacgacatacgaagcaaagcaggttctgtgtccactggggttagaggtccgtagaattcacgcttgtcccaacgactgcatattgtaccacaagcaatatgcggacttggatgcttgtcctgtctgcaaggcttctcgatacaagcgaaagaaaagtgctgacgaaggaaataagtcaaagaggggtggtccggcaaaggttgtgtggtatctacctatcattgatcatttcaagagaatctttgccaacccgaacgaagcgaagttagtacgttggcacgccacgaagagaaggaatgacggtccaaagcaacccggcaatgatatggatgtattcctggagcctgttatcgatgatctggagattctttggaaagaaggtgtggaaacttgggatgcatatggtcaggagaacttcaagctaagagttctattgttctgcaccattaatgactaccctgcactcggtaatctttccggacaaactataaaaggaaagaaggcatgctccgattgcaaggaacatacacgaagccggtggctaaagaaatcacgaaagatggtgtacatgggtcaccggaggtggctcctgctacgtcatgcatttagaagaaagaagaaaatttttaacggtaagagagaatttcagcctgctcccaaagatttgtccggagatgagatccacaatatggtcaatgacataagcaatgagtttgggaagaaaagaaaacgtagcaagacaaaggagaagggtatgtggaagaaaaaatccatattttggcggctaccttactggaaagatcttgatgtccgtcattgcattgatctcatgcatgtagaaaagaatgacatgaatattcgcagtgaactccagcccatacgagatgcagagacaggtaaagtgtacctccctccagcctgccacacactgtcgaaagatgagaagatcgcaatgttatcatgcttgaaggatattaaagtttcatcgggctattcagcgaggataagtaagtatgttaaattggacgatctaaaacttgttggaatgaagtctcacgattgccacgtgctaatcacacaaatcttgccagttgctatcagaggcattctaccaccgaaagtgtgtcacacgatccaacgtctgtgcgccttcttcaatgcaattggacagaaggttatagatccagaagatctagatgggctgcagaccgatattgtgaataccctctgtcacctggagatgtttttcccactatctttctttgatataatggttcatctccctgttcatctggtgaagcaaacaaaactatgtggcccggcttttctaagggaaatgtggccgtttgaaaggtacataggagttctgaagtcgtacgttcgtaacagagctaaacccgagaggagcatcattgaaggttacacgaccgaggaggctattgagttctgtgtcaattacatgtccgatgccgatcctatcggagttcccgcgtctcgtcacgagggaaggttgtcaggtgttggcacaatcagaaggaaaagaattaggcccgatcaagcgtcgtacgcgcaggctcattacgctgtcctccaacatatggcagaagttggcccatactttcaggagcacttagcgaaaatccgagatgagaactcggggcgatctgatgcatggattaacagagaacataattctcggttcaacgaatggttcaagaatcgtgtgacaatgtcctcggatgtcccaaatgagacagtacagttgttggggatgggatcgtcttggaccgtagacacatggcaaggatacgatataaatggatacacattttacaccgtcaaacaagatgacaaaagcacagtgcaaaatagcggcgtccgtatagatgcattccaggatcaagttgggtcaaacacatactacggccgcattgaggagatatgggagctaaactacgtcaagttcaaggttcctttgttccgctgccgttgggtgaatctacgcactagtgtcaaagccgacaaggaaggtttcactttagtagatctatctaaggtgggatacgccgatgaaccatttgtacttgcgaaacaggtcgagcagatattctacataaaagacccttcaaacaagaagatgcacatcgtgagggatggaaagcgccgaattgtaggagttgacaacgtcgtcgatgaagaagaatacaaccataatcttcatgtctgggaggaattccatgcgaagaagtcgaccctcgagtccagagctagaagcgaggcatatcgtttgctccagaccaggaaccagcatccgcaccggcttggcaccgccggatatgccggtaaggaagaggaatggcagcgtgaggatgaagaagcggaggaatcgtgcacaccgctcatgtttggtgatatcccacaccctcaggctaggaactgggccagggccagaagattaacgagtatacgaagctatttgcagaaggagttggttgccgagcaacaagcctcgcaagaggcctgctctcaaagacgcgaggacgaccgcctcacgaaagcgttgggcaacaaggaacaccgtggacggacacggggcgttgggtcttctgttccctggaagtatggatttccagactacgcgtggcagtacaagaagcggacttccaataaggcggagaaagatgcacgccttgaagccaagatccgggcgtcgataagagctaagctgacatctgaattcgacgaaaagctcgagtcgatgagggccaagattaggcaagagatccgagaagagcaacagaacccccaggccgccgctgctgctgcgcacgaagagttaggaagtcccacccaaaaacgaagcagttgcgcatcaactgagttggcggaaaatccaacatcggtcgatagcgccgtcgaccacataacggaaccaacgagctgcaccctcacaattagggtgatgctgaccttcacggttccagcagctgagggacttgcgtacaagccgaccccagagacaagagtgcatagagcgcaactcagggccgactgtgcaaaagttcaagtcaattcggtgaagcccgaatacgagctgttccctctgaagtatccaccgaacgacgaggtcctctcactaggaaatgcccgtggtaccttcatccaatggcccaaggacctcattgagatcagggttacagcgaggccaaccactgcaccaggcggtcgtccaccaaagagacctgcctctgctccttcagcccctcctgctcaagatcgtcatgcacaatcttacgatgtgcagttgcagtacgacacggattttggggaggaccgaacggaggccgacagcaaggtgattcatgaacccccaccgatgaagaagagcaggaaggcacactcttcccctcagagaattactctcgataaacccgaagcaaaggggagaggaaggggaggaaaggtgcaggcctcgcttctagctccaaggaagctagatctaggcaagggccaggaagagactaagggcaaagaggtcaagaagaaatacgtcgctccacaggagttccaactaggcatgccattggttggagatgacgtgcttgccgcaatgggcaccgcttgcaaggaccttcacttatactacatggagaaatctaacgccaggaagccaagtaaagctaccgatatccttggagagcacgatggaaagccattccttgatccaacaaattatatcgtggtcgacttcaaggatcttttcgacctctacaggctctga

SEQ ID NO: 87254 - DNA, 3147 bp, Oryza sativa
  Clone ID: PAT_MRT4530_86217C.1
aagaacaactgaaagaaacaaaactcttcttgattttgatccaacgtgagtacgaacaaatcaaaaattggatatttggacatccaaagaatccttttgattgctattctgattagcagcttgtggatatagattccagacatctcagccttccatcctctcgtagaaaagaaggtaagcctcgcacttgagaacttcttctaaagagacttctctgatgtcggtatcacttgcacaaaaccataaggaagagccattggtctgctgccggcgacttggtctcacataagcaacaaaatgccctgaatccatgcaacggcccaggtgctcaacaacaccaactagacggtagctggaattatctttgtcttcagaactggggtgcatgaacaatttcacatcaagggtctccttaaagctcacatgtccactcactttaagtttaagaggccataaatttctcttgagatggagggctaacacaggtggcaacttgctaaaaagacatgttttaattgcacctttgttcctatctggccgatcatattggttttcttccacttgatgtgcactatgacccatatttacttgcttcccccttccctgatcttgttcatcctggtctccatcaactgtcccattcacattggtacatgccactggctgttcaccatgtttaccacttatagggcttgccttctgatcagcattggaacagttttcacacctcttttctatcatctctgcttttaaatgcaattccaatatttcctcgattgaagcaagagagttgatatcatctgccttatcataaactgcatcacgatttcgatctttccccttgtcttctgtagcaacttctgctgacaaagtgtccatcttggcttctatactatcttctggcttgatgctatcaagaacagcactgacagttctctctacaccatggcctgatgctatcaacgtgttctcttcccttgttggagcctcctctgaatctgacttaaacgagcaacatttgcaagacaaggtaacagacagctgaccagcaaatatggaatcaataaccgtaggagccacagcactaggagaaccgtcttgcatgttaccagccctccatttcctttcatcctcatccaaaccatcgcgcaaacagcaaagcaattcatgacagtcctgcatagcaatgcctcggaactgcgggtaacgaaagcgcacacaacgcaagagcatcgccgggtccagcaggcgtcgagcgtagctcggaccatttgtaccaacaaagagatcatgcagcaagtcaccaaggacacccgacggagcgcccggccccaagatcctcgcccgcagcttcccgagcacaaggaggcactgcagcagcgcgttcaggtagcaggtgttcccaagattcggcatccctgtgacaacacatccatacccttcctcgccgcctccggcgccatcatcggccaccatctggctctcaattgccaatgaatcctcacactcgaagcagtaaccctcacacggatcctcgcagcgcagcgcgacccaatgcgccctccggtaggcatgctccctgatgtgccccagcggcttggccctgtgggctagccctccgacgcagaagcaccagccgcattcggggcacaccatcatgaggttgctcccggtggccaggcacgtctcgtgctcgcacatcgggtcgccgcgggcggccatgcccatctcgatgtcagcgatctcgtccatgtcgcagctgaagtggccgcagtcctcgccgtcggtgtccctgatggccaccgcctcgcaatcccccggatccttcaagggattccgtgacggaacgcagccgccgcgtgaaggaccggcctccgccgccgccgccgccgccatcgcgcgtggcggtgtcggcggcggctccaggcatggggccttccccttccgccgtctctcggcagcatcccgatctccatccccatccctcgcccttgccttcttcttctccgaatacatcgccgtaagcagcgtcttgttcctgtaggcgtacgagcgggcgaagcagaggaacatcgcgagtgcgacggcgctgacgccggcgagcagccagtagaagtagtcgaggtggccgcggtcgaggtcgtcggcgaaccacccctcgccgccgtccctcctggtgacgccatccagcgccgcgatgagcgcggcgctgacgaagccgccgatgcccacggcgccgcagtagagcgccagcccgacgctgcgccgcccctccggcatctcgccgtggaagaactcctgcatccccaccgccgccagcacgtcggccacccccatcgacgcgtactgcggcaccagccacgcccagctcatcgccggccgccgccccgcccgcgccgcccccagccggcgcccctccaccgccgccagcgacgtcgccagccccgcccccgtccgctgcagcgtcgtcagcccgctcgggttgcccgtcgcgcgccgcagcgccggcaccaccgcgcggtcgtagatgggcacgaacagcacgatggtcgccggcccgatcgtctggagcgcggcgggcggcagctccacgccgccgatgcggcggtccagcatccgcccctgcttgttgaacagcgtcatgatctgcgcgtccgccacgccgtacgccacgcacgccgcccatatcggaagcaggcgccgcagcgcgccacgcgcatcctcctccgacgacgacgatcgcttgccatccatggcggtgtcgggacggggcggcgcgtagaggcggtaggtgggggtgccgaggaggaagacggcggaggcgcaggacacgacggcgaaggggacgccccagccgacgttctcctggacgtagctgacggcggcgatggcgacggcgacgccgacggccatggagaagaaccaccagttgaagagggagctgcgggcggcgctctccctggggtggcccgggtcgaattgctcggcgccgaacgccaacccgcatggcttgtcgaatccctgagcgaaggcgacgaggtagagcgaaacgtagacgaagatcacctgtgccatggaaggacggcaggcggcggcggcggcggcggtggcggcgcacgccggcagcgaggacgccacagtcagcat

SEQ ID NO: 87255 - DNA, 2721 bp, Oryza sativa
  Clone ID: PAT_MRT4530_86218C.1
atggatcaatcaaaaattgatcgaagttggatgtatgccaaaaatttgaaacgtcattctacggagtaccgaaagggcgtaataaattttatgaacgccgcggaggaggatcggataagaagaaacagtgattacatgtgttgtccatgtgcagattgcaagaacgagaatatgtttgatagcggagaggacgtacacggtcatctgatacaacaaggattcatggaggactatacatgttgggtgaagcatggagagcaagaatcaggaagtggagcagcagcagacagaagtgatgcgcataatcaggaagatgaaaatgagcatgacatgtttataccttctccattgggcggtgaaatggttgatgtggatcacgatctgctgcaagacatgttacgtgacgttgaggacccagcccagaatgagagagatggaatgaaattcagcaggttggtaagtgattccgagacgcctttgtatgctggatgcaaagcaaaacacactaagttgtcagttaccttggacctaatgaagctgaaggcaagtagtggatggacagacaagaatttcacagatcttttaggaattttgaaggctatgcttcctgttgagaacacattgcccgagatgacatacgaagcaaagcaggttctgtgtccactggggttagaggtccgtagaattcacgcttgtcccaacgactgcatattgtaccacaagcaatatgcggacttggatgcttgtcctgtctgcaaggcttctcgatacaagcgaaagaaaagtgctgacgaaggaaataagtcaaagaggggtggtccggcaaaggttgtgtggtatctacctatcattgatcgtttcaagagaatctttgccaacctgaacgaagcgaagttagtacgttggcatgccacggaaagaaggaatgatggtccaaggcaacccggcaatgatatcgatgtattcctggagcctgttatcgacgatctggagattctttggaaagaaggtgtggaaacttgggatgcatatggtcaggagaacttcaagctaagagttctattgttctgcaccattaatgactaccctgcactcggtaatttttccggacaaactataaaaggaaagaagacatgctccgattgcaaggaacatacacgaagccggtggctgaagaaatcacgaaagatggtatacatgggtcaccggaggtggctcccgctacgtcacacatttagaagaaagaagaaaatttttaatggtaagagagaacttcagcctactcccaaagatttgtccggagatgaggtccacaatatggtcaaggacataagcaatgagtttgggaagaaaagaaaacgtaacaagacaaaggagaaggcctgccacacactgtcgaaggatgagaagatcgcaatgttatcatgcttgaaggatattaaagttccatcgggctattcagcgaggataagtaagtatgttaaattggacgatctaaaacttgttggaatgaagtctcacgattgccacgtgctaatcacacaaatcttgccagttgctatcagaagcattctaccaccgaaagtgcgtcacacaatccaacgtctgtgcgccttcttcaatgcaattggacagaaggttatagatccagaagatctagataggctgcagaccgatattgtgaataccctctgtcacctggagatgtttttcccactgtctttctttgatataatagttcatctccctgttcatctggtgaagcaaacaaaactatgtggcccggcttttctaagggaaatgtggccgtttgaaaggtacatgggagttctgaagtcgtacgttcgtaacagagctaaacccgaggggagcatcattgaaggttacacgaccgaggaggctattgagttctatgtcaattacatgtccgatgccgatcctatcggagttccagcgtctcgtcatgagggaaggttgtcaggtgttggcacaatcggaaggaaaagaattaggcccgatcaagcgtcgtacgcgcaggctcattacgctgtgctccaacatatggtagaagttggcccatactttgaggagcacttagcgaaaatccgagatgagaacttggggcgatctgatgcatggattaacagagaacataattctcggttcaacgaatggttcaagaatcgtgtgacaatgtccacggatgtcccaaatgagacagtacagttgttggggatgggaccgtcttggaccatagacatatggcaaggatacgatataaatggatatacattttacaccgtcaaacaagatgacaaaagcacagtgcaaaacagcggcgtccgtatagatgcattccaggatcaagttgggtcaaacacatactacggccgcattgaggagatctgggagctaaactacgtcaagttcaaggttcctttgttccgctgtcgttgggtgaatctatgcactggtgtcaaagccgacaaagaaggtttcactttagtagatctatctaaggtgggatacgccgatgaaccatttgtacttgcgaaacaggtcgagcagatattctacataaaagaccattcaaacaagaagatgcacatcgtgagggatggaaagcgccgaattgtaggagttgacaacgtcgtcgatgaagaagaatacaaccataatcttcatataagacctcacattgaccttgacgatgatccctaa

SEQ ID NO: 87256 - DNA, 297 bp, Oryza sativa
  Clone ID: PAT_MRT4530_86219C.1
cttcgtttttttatcatcctccgggccgcatgaatccggggggggtatacagggaacagaccctctctgtacctgtccttaaaaccaaaaacgggtgacaggtgttctcaatctccttctccccaaaaaccaaggccatcaagcccttccgtttattttaaagccgaggggggctacacacctccacctattaacccctacgggtgtatcaaccggcggcgtaccagaaagagaaaggccccacgcaaatgcctgtggtccacaaggcggcataggtgaaaaccaaaggcgcaccgt

SEQ ID NO: 87257 - DNA, 615 bp, Oryza sativa
  Clone ID: PAT_MRT4530_8621C.1
atgtctgggatggacggcagcggtgtgccagaaaccgccggagtggaggcagcctccagctcagatgcccgcggggacaaccgacacatgccgtctgaggactgtgtcgccggcatcaactcggctctccaacatccgacggtgcggttcctgagggagcaaatggagaaggccggttgcccagtgctaccgcggatgatcagggcgatgaactgcatgtctaccaatcacaatggttcctacggtagcgggctggggataactgtgtgctgtgatcacatgcggtctcaagatgagataaatcagctattaattcatgaattaatacatgcctatgatgactgtgttgtcaagaacatggattggaagaactgtgctcaccatgcttgctctgagattcgagctaatcaccttagtggtgactgccattataaacgtgaattgttgcgtggcttcatgaagataagggggcacgagcaagaatgtgttaaaaggcgggctctcatgtctgtcaagaacaacccgtactgctcagggacagctgcaaaagatgcagttgagtctgtgtgggatatatgctacaatgatacacgcccatttgatagggttccatga

SEQ ID NO: 87258 - DNA, 4767 bp, Oryza sativa
  Clone ID: PAT_MRT4530_86220C.1
atggagggctatacatgttgggtgaagcatggagagcaagaagcaggaagtggagcagcagcagacagaagtggtgcgcataatcaggaagatgaagatgagcatgacatgtttataccttctccattgggcggtgaaatggttgatgtggatcacgatttgctacaagacatgttacgtgacattgaggacccagcccaaaatgagagagatggaatgaagttcagcaggttggctatgcttcctgttgagaacacattgcccgagacgacatacgaagcaaagcaggttctgtgtccactggggttagaggtccgaagaattcacgcttgtcccaacgactgcatattgtaccacaagcaatatgaggacttggatgcttgttctgtctgcaaggcttctcgatacaagcgaaagaaaagtgttgacgaaggaaataagtcaaagaggggtggtccggcaaaggttgtgtggtatctacctatcattgatcgtttcaagagaatctttgccaacccgaacgaagcgaagttagtacgttggcatgctatggagagaaggaacgacggtccaaagcaacccggcaatgatatcgatgtattcctggagcctgttatcgacaatctggagattctttggaaagaaggtgtggaaacttgggatgcatatggtcaggagaacttcaagctaagagttctattgttctgcaccattaatgactaccctgcactcggtaatctttccggacaaactataaaaggaaagaaggcatgctccgattgcaaggaacatacacgaagccggtggctgaagaaatcacgaaagatggtgtacatgggtcaccagaggtggctcccgctacgtcatgcatttagaagaaagaagaaaatttttaacggtaagagagaacttcagcctgctcccaaagatttgtccggagatgaggtccacaatatggtcaaggacataagcaatgagtttgggaagaaaagaaaacgtagcaagacaaaggagaaggaaaagaatgtgtgtgagagtttggttggcctgatgctgaatattcccgggaagacaaaggacgggttgaacgcgcgccttgatctacaggacatgaatattcgcagtgaactccagcccatacgagatgcagagacaggtaaagtgtacctccctccagcctgccacacgctgtcgaaggatgagaagatcgcaatgttatcatgcttgaaggatattaaagttccatcgggctattcagtgaggataagtaaaggcattctaccaccgaaagtgcgtcacacgatccaacgtctgttcgccttcttcaatgcaattggacagaaggttatagatccagaagatctagatgggctgcagaccgatattgatcatgttgggtcaaacacatactacggccgcattgaggagatatgggagctaaactacgtcaagttcaaggttcctttgttccgctgccgttgggtgaatctacgcactagtgtcaaagccgacaaggaaggtttcactttagtagatctatctaaggtgggatacaccgatgaaccatttgtacttgcgaaacaggtcgagcagatattctacataaaagacccttcaaacaagaagatgcacatcgtgagggatggaaagcgccgaattgtaggagttgacaacgtcgtcgatgaagaagaatacaaccataatcttcatgtaagacctcacattgaccttgacgatgatccccaagagcctgtggcatatgctcgttcagatcatacggaaggcataaccttaaccctagcgccgccgccaactcctacttcgccgccgtcgtcctccctcaccgccactgccaccaagcctgccgccgccgccaccgagtccggcgccgcctccaccgaccggcgacgccctccaccgagcctagcgccgccgccaccgagcccgccgccaccgccgtcgtcctccctcgccaagcctgccgccgtcgccaccgacgctgagcccgcggccgccgccaccgagcctcctcggccctccattcggaccaccgccgcctcctcaccgacgacccccacgagcccgccgccgccgccaccgagcctctacaccgaccggaccggtgtcggccttcctcgtcgtcgccgcccgcatcctcaccaacacacgtcgccgacccccaccgagcccgacgccgcccgcccggcgccgacctacccgaccggcatctccaccgaccggcgccgccctccaccgagcccggcgccgacccccaggacagggaacaaaatccctaaggaacagttccgcataacagcggtggacgccgtagggttgccgacatctccaaggaaaacattgagccgatttaggtctatctgcggggtcatagggaggcagaaattcagtattctgcaagatgacatcaagctcgtgccggccgcagagaaggacattgcttggctaacgttcaaggagagctttgattatcctgcggagcttgaggaccgtctcaggcgggctgctttccaggttatgggcaatgcttggaagaacttcaagactaagctagtcggcgagtttgtctacaacccggtgaatccagatccaagagagaaattttcttggatcacggaacaggtctgggaggaattccatgtgaagaagtcgacccccgagtccagagctagaagcaaggcatatcgcttgctccagaccaggaaccagcatccgcaccagcttggcaccgccggatatgccggtaaggatgaggaatggcagcgtgaggatgaagaagcatctcaatcgtgcacaccgcttgtctttggcgatatcccacactctcgggctaggaactgggccagggctaggtaccagaagaatgatgatggcacaatcttcatgtcaaatgtagaagatcaacgagtatacgaagctattaaggagttggttgccgagcaacaagcctcgcaagaggcctactctcaaagacgcgaggacgacctcctcacgaaagcgttgggcaacaaggaacaccgtggacggacacggggcgttgggtcttctgttccctggaagtatggatttccagaaaacgcgtggcagtacaagaagtggacttccaacaaggcggagaaagatgcacgccttgaagccaagatccgggcgtcgataaaagctgagctgacatctgaattcgacgaaaagctcgagtcgatgagggccaagattaggcaagagatccgagaagagcaacagaacccccaggccgccgctgctgcgcacgaagagttaggaagtcccacccaaaaacgcagcagttgtgcatcaactgagttggcggaaaatccaacatcagtcgacagcgccgtcgaccatataatggaactaacgagctgcaccctcacagttagggtgatgccgaccttcacagttccagcagccgagggacttgcgtacaagccgaccccagagacaagagtgcatggagcacaactcagggccgactgtgcaaaagttcaagtcgattcggtgaagcccgaatacgagctgttccctctgaagtatccatcgaacgacgaggttctctcactaggaaatgcccgtggtaccttcatccaatggcccaaggacctcattgagatcaaggttacagcgaggccaaccactgcaccaggcggtcgtccaccaaagagacccgcctctgctccttcagcccctcctgctcaagatcatcatgcacaatcttacgatgtgcagttgcagtacgacacagattttggggaggaccgaacggaggccgacagcaaggcgattcatgaacccccaccgatgaagaagagcaggaaggtacactcttcccctcagagaattactctcgataaacctgaagcaaaggggagaggaaggggaggaaaggtgcaggcctcgcttctagctctaaggaagctagatctgggcaagggccaggaagagactaagggcaaagaggtcaagaagaaatacgtcgctccacaggagttccaactaggcatgccattggttggagatgacgtgcttgccgcaatgggaaccgcttgcaaggaccttcactactacatggagaaatttaacgccaggaagccaagtaaagctaccgatatccttggagagcacgatggaaagccattccttggttcaacaaattatatcgtggtcgactttaaggatcttttcgacctctacaggctccgagcggtggacacaagcctccttaagtgctactccttgttaagttggcaatggtgtcagaagcatgcaccggaagttgccttccttgatccacaagtggtcactgtcacaaatctccagaatgaccatcaaggaatggtcaactacatctacgacaccttgtggtcccgccgagacaaggagtacattatgtgcgcctataatcaatatgcccattggatccttctggtcataacacctaagtggagtacatgtcactacctgaactccagaattgataagaacacatatgattggaccccaattcaactagcgatagatgaagcgtgggcccaatacatgcaaagaggaggcctcaggaagacaagacatgacaccctcatccacaaaaaagacttcccggtgaagcaacaaataggtgaccagtgcggattccatgtgtgccacaacatgcgccttctatatagagaaaaggtgaagactttggctgagtttgaggtcggtggtctcaattgtgatagactaactacattttag

SEQ ID NO: 87259 - DNA, 264 bp, Oryza sativa
  Clone ID: PAT_MRT4530_86221C.1
atgacggagcgtggagctcctcactgggagaccgcgcaggcccccctttgccggttcgggccgctgagaagcgtaataccctactcctgtgttttgggtgatctgcgtatgaaggagctacaaagtatgagccagcctctcccttgttctgggttcccaatctggaaaagtccagtccccatctcagtgggcaagttgccgtccgagtcaccttctgatgagacgggccacaactacctccactttcgccgggagcaggactaa

SEQ ID NO: 87260 - DNA, 2784 bp, Oryza sativa
  Clone ID: PAT_MRT4530_86222C.1
acgtccttcctcatcgtcgtcgcctactcctcaccgacgcacgacgccgcccgcccgacgccgacttgcccgaccggcgtctacaccgaccgccgccgccgccgtgaactcctccttcgccgagcccgccgccgccgccaccaagcccgccgcctccaccgacccacgaatccctccaccgagccctcccggccgatctcatgtgagtcctccatcgcgcctccagacgatgtctcggcaaggcgaaccaatgtcgacgacaactagtgggtcctcaagagcacgtactcctaggacagggaacaaaatctctaaggaacggttccgcataacatcggtggacgccgtagggttgccaacatctccaaggaaaatagtgagccgatttaggtctatctgcagggtcatagggagacagaaattcagtattctgcaagatgacatcaacttcgtgccggccgcagagaaggacattgcttggctaacgttcaagaagagctttgattatcctgtggagcatgataaccgtctcaggcgggctgctttcaaggttatgggcaatgcttggaagaacttcaagactaagctaatcggcgagttcgtctacaaccaggcgaatccagatccaagagagaaatttccttggatcacggcacaagtctgggaggaattccatgcgaagaagtcgacccccgagtatagagctagaagcgaggcatatcgcttgctctagatcaagaaccagcatccgcaccggcttggcaccgccggatatgccggtaaggaagaggaatggcagcgtgaggatgaagaagcggaggaatcgtgcacaccgctcgtgtttggcgatatcccacaccctcgggctaggaactaggccagggccaggtaccagaggaatgatgatggcacaatcttcatgccaaatgcagaagatcaacgagtatacgaagctatagagttggttgccgagcaacaagcctcacaagaggcctgctctcaaagacgcgaggacgacctcctcacgaaagcgttgggcaacaaggaacactatggacagacacggggcgttgggtcttctgttccctagaagtatggatttccagactacgcttggcagtacaagaagcggacttccaaaaaggcgaagaaagatgcacgccttgaagccaagatccgggcgtcgataagagctgagctgacatctgaattcgacgaaaagctcgagtcgatgagggccaagattaggcaagagatccgagaagagaaacagaacccccaggccgccgctgctgctgcgcacgaagagttaggaagtcccacccaaaaacacagcagttgcgcatcaactgagttggcggaaaatccaacatcggtcgacagcgccgtcgaccacataatggaaccaacgagctgcaccctcacagttagggtgatgccgaccttcacgagacaagagtgcatggagcgcaactcaggacggactgtgcaaaagttcaagtcgactcggtgaagcccgaatacgagctgttccctctgaagtatccaccgaacgatgaggtcctctcactaggaaatgcccatggtaccttcatccaatggcccaaggacctcattgagatcagggttacagcgaggccaaccactgcaccaggcggtcatccaccaaagagacccgcctctgctccttcagcccctgctgctcaagattgtcatgcacaatcttacgatgtgcagttgcagtacgacacggattttggggaggaccgaacggaggccgacagcaaggcgattcatgaacccccaccgatgaagaagagcaggaaggcacactcttcccctcagagaattactctcgataaacccgaagcaaaggggagaggaaggggaggaaaggtgcagaccttagttctggctccaaggaagctagatctgggcaagggccaggaagagactaagggcaaagaggtcaagaagaaatacgtcgctccacaggagttccaactaggcatgcaattggttggagatgacgtgcttgccgcaatgggcaccgcttgcaagcaccttcacttatagtacatggagaaatctaacgccaggaagccaagtaacgctaccgatatccttggagagcacgatggaaagccattccttggtccaacaaattatatcgtggtcaacttcaaggatcttttcgacctctacaggctccgagcggtggacacaagcctccttaagtgctactgcttgttaagttggcagtggtgtcagaagcatgcaccagaagttgccttccttgatccacaagtggtcactgtcacaaatctccagaatgaccgtctaggaatggtcaactacatctacgacaccttgtggtcccgccgagacaaggagtacattatgtgcgcctataatcaatatgcccattggatccttctggtcataacacctaagtggagtacatgtcactacctgaactccagaattgataagaacgcatatgattggaccccaattcaactagcgatagatgaagcgtgggcccaatacgtgcaaagaggaggcctcaggaagataggacatgacaccctcatccacaaaaaagacttcctggtgaagcaacaaataggtgaccagtgcggattccatatgtgccacaacatgcgccttctgtatagagaaaaggtgaagactttggctgagtttgagggcacaataaccaagtctctgcctaccagctttgaagaggcaatgatgaacacttattatgcaactgtgatgatg

SEQ ID NO: 87261 - DNA, 2780 bp, Oryza sativa
  Clone ID: PAT_MRT4530_86223C.1
acgtccttcctcgttgtcgtcgcatcctcctctccgacgcccgacaccgccttcaccgagcctgccgccaccttcaccgagctcggcgcagccgccaccgaccccggtgacaccctctacggagcccagcgccgccgccatcgaggccgccgccaactcctccttcgccgccgtcgtcctccctcgccgagcccgaggccaccgcctccaccgagcccggtgcagacaatatctcagtaaggagaaccaatgtcgacaacaactagtgggtccttaagggcacgtactcctaggacagggaacaaaatccctaaggaacggtaccgcataactgcagtgaaccaaataggcttgccgacaagtcctaggaaaatgttgagccgatttaggtctatctgcggggtcatagggaggcagaaattcaatattctataggatgacatcaagcaagtgccggccgcagagaaggacagtgcttggctaacattcaaggagagttttgattatcctgaggagcacgagtaccttatcaggcaggctgcttttaaggttatgggcaatgcttggaagaactttaagagtaagctagtcggcgagttcgtcttcaacccggcgaatcccgatccaacagagaaatttccttgtatcacgaaatgggtctgggacgaattccacgcaaagaagtcgaccaccgagtccagagcaagaagcgaggcatttcgatgctccagaccttgaaccagtatccacactagcttggcaccgccggatatgccggtaaggaagaggaatggcagcaggaggatgaagaagaggaggaatcgaacacgccgcgggtgtttgccgatatcccacaccctcgggctaggaactgggccagggctagataccagaagaatgctaatggcacaattttcatgccaaatccagaagatcaacgagtgtacgaagctatagagatggttgccgagcaacaagcctcgcaagaggcctgctctcaaagacgcgaggacgacctcctcacgaaagcgttgggcaacaaggaacaccgtggaaggacacggggcattgggtcctccattccctagaagtttggatttccagactacgcgtggcagtccaagaagcggacttccaacaaggcggagaaagatgcacgccttaaagccaagatcccggcgtcgatcagagcggagctggcatctgaattcaatgaaaagctcgagtcgatgagggccaagattaggcaagagatccgagaagagcaacataacccacaggccgctgttgctgctgcgacgaagagttaggaagtcccacccaaaagcgcagcaattgcgcatcaactgaggtggcggaaaatccaacattggtcgacagcgccgtcgaccacataacggaaccaacgagctgcacactcacagttagggtgatgccgaccttcacgagacaagagtgcatggagcgcaacttaggggcgactgtgcaaaagttcaagtcaactcggtgaagcccgaatacgagctgttcccactaaagtatccaccgaacgacgaggtcctatcactaggaaatgcccgtggtaccttcatccaatggcccaaggacctcattgagataagggttacagcgaggccaaccattgaaccaggcggtcgtccgccaaagagaccctcctcttctccttcagcccctcctgctcaagatcgtcatgcacaatcttatgatgtgcaattgaagtacgacacggatttttgggaggaccgaacggaggccgacagcaaggcgattcatgaacccccaccgatgaagaagagcaggaaggcacactcttcccctcagagaattactctcgataaacccatgcaaaggggagaggaggaggaggaaaggtgcaggcctcgcttctagctccaaggaagctagatctgggcaaggggcaggaaaagactaagggcaaagaggtcaagaagaaatacgtcgctccacaggagttctaactaggcatgccattggttggagatgacgtgcttgctgcaatgggcaccgcttgcaaggaccttcacgtatactacatggagaaatctaacgccaggagaccaaacaaagctactgatatccttggagagcacgatggaaatccatttcttggtccaacaaattatatcgtggtcgactttaaggatctattcgacctctactggctccgagcggtggatacaagcctccttaagtgctactccttgttaaattggcaatagtgtcaggagaatgcaccggaagctgccttccttgatccacaagtggtcactgtcacaaatctcgagaatgaccgtcaaggaatggtcaactacatctacgacaccttgtagtcccactgagacaaggagtgcattatgtgcacctataatcaatgtgaccattggatccttctggtcataacacctaagtggagtacatgtcactacctgaactccagaattgataagaacgcatatgattggaccccaattcaactagcgatagatgaagtgtgggcccaatacgtgcaaagaggaggcctcaggaagacaagacatcacatcctcatccacaaaaaagacttcccggtgaagcaacaaataggtgaccagtgcggattccatgtgtgccacaacatgcgccttctgtacaaagaaaaggtgaagactttgacagggtttgagggcaaaattaccaagtctctgcctaccagctttgaggaggcaatgatgaacattgattatgtaactgtgattttt

SEQ ID NO: 87262 - DNA, 182 bp, Oryza sativa
  Clone ID: PAT_MRT4530_86224C.1
atgcaggagcatggcggcagggccgtggggtgcgcggcgcggtgtagacgtaggcgctggggaggcaaatccccgctggcccggcggtgcacggccaccgggcacgaggcgtcgccgcgtggccctcagcggccgtgggggagctcgcctgctcagggttgttggtcggcagggaggtgtag

SEQ ID NO: 87263 - DNA, 2244 bp, Oryza sativa
  Clone ID: PAT_MRT4530_86225C.1
atgtcgacgacaactagtgggtcctcaagggcacgtactcctaggacagggaacaaaattcctaaggaacggttccacataacagcggtggacgccatagggttgccgacatctacaaggaaaatattgagccgatttaggtctatctgcggggtcatagggaggcagaaattcagtattctgcaagacgacttcaagctcgtgccggccgcagagaaggacattgcttggctaacgttcaaggagagctttgattatcctgcggagcatgaggaccgtctcaggcgggctgctttcaaggttatgggcactgcttggaagaacttcaagactaagctagtcggcgagttcgtctacaacccgggaaatccagatccaagagagaaatttccttggatcacggaacaggtctgggaggaattccatgcaaagaagtcgacccccgagtccagagctagaaacgaggcatatcgcttgctccagaccaggaaccagcatccgcaccggcttggtaccgccggatatgctaaagatcaacgagtatacgaagctataaaggagttggttgccgagcaacaagcctcgcaagaggcctgctctcaaagacgcgaggacgacctcctcacgaaagcgttgggcaacaaggaacaccgtggacggacacggggcgttgggtcttctgttccctggaagtatggatttccagactacgcgtggcagtacaagaagcggacttccaacaaggcggagaaagatgcacgccttgaagccaagatccaggagtcgatacgagctgagctgacatctgaattcgacgaaaagctcgagtcgatgagggccaagattaggcaagagatccgagaagagcaacagatcccccaggccgccgctgctgctgcgcacaaagagttaggaagtcccaccgaaaaacgcagcagttgcgcatcaactgagttggcggaaaatccaacatcggtcgacagcgccgtcgaccacataacggaaccaacgagctgcaccctcacagttagggtgatgccaaccttcactgttccagcagccgagggacttgcgtacaagccgaccccagagacaagagtgcatggagcgcaactcagggccgactgtgcaaaagttcaagtcgactcgatgaagcccgaatacgagctgttccctctgaagtatccaccgaacaacgaggtcctctcactaggaaatgcccatggtaccttcatccaatggcccaaggacctcattgagatcagggttacagcgaggccaaccactgcaccaggcggtcgtccaccaaagagacccgcctctgctccttcagccccttctgctcaagatcgtcatgcacaatcttacgatgaccgaacggaggccgacagcaaggcgattcatgaacccccaccgatgaagaagagcaggaaggcacactcttcccctcagagaattactctcgataaacccgaagcaaaggggagaggaaggggaggaaaggtgcaggcctcgcttctagttccaacaaagctagatctgggcaagggccaggaagagactaagggcaaagaggtcaagaagaaatacgtcgctccacaggagttccaactagacatgccattggttggagatgacgtgcttgccgcaatgggcaccacttgcaaggaccttcacttatactacatggagaaatctaacgccaggaagccaagtaaagctaccgatatccttggacagcacgatggaaagccattccttggtccaacaaattatgtcgtagtcgacttcaaggatcttttcgacctctacaggctccgagcggtggacacaagcctccttaagtgctactccttgttaagttggcaatggtgtcagaagcatgcaccggaagttgccttccttgatccacaagtggtcactgtcacaaatctccagaatgactgtcaaggaatggtcaactacatctacgacaccttgtggtcccgccgagacaaggagtacattatgtgtgcctataatcaatatgcccattggatccttctggtcataacacctaaatggagtacatgtcattacctgaactccagaattgataagaacgcatatgattggaccccaattcaactagcgatagatgaagcgtgggcccaatacgtgcaaagaggaggcctcaggaagacaggacatgataacctcatccacaaaaaagacttcccggtgaagcaacaaataggtgactag

SEQ ID NO: 87264 - DNA, 260 bp, Oryza sativa
  unsure (1)..(260): unsure at all n locations
  Clone ID: PAT_MRT4530_86226C.1
aaaaccctaaaccccccatggcgccgcccgtccccactncngccgctcgcttcgtcctccncngcctcctctccacggcggtcgccgaggcggaggcggcggccgtggctcccncngccnagaaggccgcggcgaagggcgccaagacggcggcggcggcggggaaggagaaggacgcgcggtcgctgtaccggcggctctnggcgctcgggaggcgcggggaaaggnagcttgtngcgggtaatgaacaagtgggtgcn

SEQ ID NO: 87265 - DNA, 1188 bp, Oryza sativa
  unsure (1)..(1188): unsure at all n locations
  Clone ID: PAT_MRT4530_86227C.1
tccccgaaaatttccgcgccaccgaaagccacccaaaggccaanccggggggggggaaagggggtttgggcttcccgccgngccgnggttgccncgggggttgtgccgggttgccttccnggccccaccaaanccgggccgnccgccggggggggttgggccgttccnttgggttggggaanggaaaagaaaaggaattgaacccnccnggggccgggccggggattccccgggttggaaccnggggggaaaggcattnaaaaggggccgggccggggattcccccggccgnaattgggggggaanggccccccaaaaggccaanccgggattccccgggaannggaaaaaacatttcccgggggccgggccggggattcccaancccnaaccagggggaaattntccncccaanggttgggccgggaattcccaanccccaacccgggattnnttttgccggggcgggcaaacttccccattcccccggccggggcgggggattcccaccccnccaanccccaaaanttccccccggcttcccttcccccttccctccccccctttcccccccttggccccgttccacccaaccccccccctccttccccctttttccttccaanaattnnttgggccanccnccccggggggaaattntgtttntgnaaagcctttncccngcccnggggggcctccttttccaaacccnggccaanttttggcccnaaaaggcccggaaaaggcccggttntggaaaaggcccccggttttggggggcttccccggccnaanccaaacccngggncntttcccaaaaggcccngnaaaaggcccggtttgggaaaagggccccnaaaaaangggggcttcccnggctttnccccancccngggcnnttttttaaaaggcccnaaaatttnccccggcccgggttggggtttnggttttccctcccantcccngggcccaaccttttcccnaanggggaattnnaacnnaaanangggnnnnaacccctccccnaaaatttcccaaaatttttccnaaanaaaaaccccccccccgggnnnaaaaanggggttttcccnccctttttngggggccccnaanccngggccngggncccngggncngggnaaaatttttntnggntttnaaannnaaaaaanaaaaaanttttccttt

SEQ ID NO: 87266 - DNA, 468 bp, Oryza sativa
  unsure (1)..(468): unsure at all n locations
  Clone ID: PAT_MRT4530_86228C.1
cccacgcgtccgcgagctcatcagcgaggagcaggtgatgacatcgccgattggctcggccactcgtgcaaccctgtttccaaattttcacgcttctccccggttgttcctgtgtgggttgttggcttgttgcttgctcttggtatggttttcgcgagttgcgagtcattgattacttttgagattcctttgaaaattcgcagcgatttagacgtatttctgtggaattacactgtcggtgacgtatgaactttcgttctagagtggtactactaccggaaagaggggcaacagcctcagctccgcgtgtgatctgatgaagattttctggctcgaccaatgccatataaggtcaattcaattgctactttatagaaaatggattgctagtagtatcgtactagattttgattttccatctncaaaatgaatttctaaatttctgttgtatcacgtagtactcccgaa

SEQ ID NO: 87267 - DNA, 670 bp, Oryza sativa
  unsure (1)..(670): unsure at all n locations
  Clone ID: PAT_MRT4530_86229C.1
ctgtccgtcccattctcccccnccncgggggatccctccctttccgcccncttcgtttcncgcacgtccggtggaaagatagtatcaaagtatctcttatcaagcccctacgggattggaggttgcccatgtcagtcgatattgatgccatctggccacgtgtaatgagctcaccggggaagggtgtgtaccaaattcgtttgaccaagtacggcggcaaaactagttcagacggcctaactagccccaaatgctgaactcgcccggtagggatatggtgctccctatctcgggtgaacaactcttatcgtttgntgggataccacccgggcttgtcgtggatattgggcgcccgtggacacctgcggccagggctgcctcggcggcggcgccctgctctcgtgctgacaacaccagcgccctgcgccggctgaaatgtgtgcacccaaatgccagtgctgatggtgatgggaacacccaagctgggtgtgcngcatgatgtgcatgctgtgaatgctgaagatgagccttgcctgctggaatggcgatgtgatggatggcccactggcttaatcaaactgcattgtgattaatctatgtgaacactgtacttgcatggatggatgatatactcacaccnntganacttgaaaaaaaaaaaaaaaaaaaa

SEQ ID NO: 87268 - DNA, 391 bp, Oryza sativa
  Clone ID: PAT_MRT4530_8622C.1
cccccccccccgcgggcgggagggggaggcccagccattgatgcccggaccccgccgggaggcccaccctccctaaaggaaaaggggtccaaactagggggaagcaaggcccaacataggccccggccgaaaaaaaataccacccccaaaccccccccacaaacaaaccggacgcaaaaattgttaacgccgggggggccaacaaaggaggcaacccacctaaattgagggggggccagctaccgccctccaacaaagaaaaaaatcgggcccggcgaattaataaaaagacccacccacgcggaaaaaaaagcgaccttttaagcgacccagaaagttttctttaccacggccaaagaggacaacaccaagggagcgtccccacccggcc

SEQ ID NO: 87269 - DNA, 266 bp, Oryza sativa
  Clone ID: PAT_MRT4530_86230C.1
acaacaccatatttcattcatcaggttcaaaaccttcacaaaaatacacactacccgtacaaatcttaccctttttccaatactcgtacatccatttaccccttccacaccaatacatacatctatactgtacacgtacctacatttactacaccgggtacacacacacacactctccttcaaagaccctcatcatcttcaacctaactagcttaacttaaagccattcttcgccatttcaacacatcagcgacgtccctcacttt

SEQ ID NO: 87270 - DNA, 1532 bp, Oryza sativa
  Clone ID: PAT_MRT4530_86231C.1
actcttcggggcttcctagttggcgtgtgcgtgccggcaacgcgcacgcagccctagtttagcgatggcacagaggggagaggcggcccgcaagcccggccaaggtcactacaagaaaacggagtgcctccgccaccaccgccgtctcgagcgcctcccaactggaggagggaaagtgtcacgaccgagaaaatttgcattttcccgaacgctagtgtattaatccctgtcccaagaaaagccgggagatgtccatcgagccccgacttcgtccatctccatccgtgtactcttgctaggactagactgagcactgagttaagccttacccattagacatgtggttagtacggtagtgttttgcaacagaggcccgaagaccggtccttatagtggccgaggtgctactagcagaaccatgcacctcgagcctagcctaaaaccattttgggagttttgaataaagggggggggaaggtgaacggccttccgaaccttcggcgatgacagcgaagcacgcttcagaaacctccagaacaatagaagctacgcgaagtacacaagcaaagctacaagcctaaaaagaagcaataacaatacataaaaagaaaaccgagtacacagagacggtccacgggtcgacggaagcggatcccgtgtgtcaaccgaggcaagtggctgacaaacggactccactagacaccacgcgggatgcacacgtggaaaccacacggctaccgagcgggcacactaacaggtcaccacacgcacacatgaacgactgcccacaccgatacacgggcgagacgcggccggcgcaacgcttgacgatgcggagctgaggacgaagacgacgacggggctgcagcaaccttgacgaaaggcgggcgacgaacagcacggcttgacggagggacgaataccacgactaccaggaacaacgggaggacgacgacgaagaccggcggggttcggatggaggggaggcgaggccgaggacgaccttgccactgcgatgccgaaggtggagacggcgacgtcggctggcgcattggcacggtggaaggggctgccggagtgggtgccgacgtgaccgaaggaggggcggcgcggacgacggtgttccgacgaatctgagggcaggccggggcggagggcgacgctacgacgtcgacgaaggagacaacggcgttgatcggcgtaccggcgatgaacagcagccggccggagatggtgcagtggcggcaacgccactggacgccggcaggaacgcgcctccggtgctctcgggtggcgacggcacggccggcacacgggcgaggcggtagaggcggctggaggtggccggcggcacgggagagagaggtggaaggcagggagaggcggggtggccacgggggagctcgggaagaggcaaaaacgagagaacgcacagaggggagaatgatttttatttcgggatgaatttatcaggacgtgacagaaagtaggagacaggaggcgcccggcgggagatgggggaggggagaggc

SEQ ID NO: 87271 - DNA, 1833 bp, Oryza sativa
  Clone ID: PAT_MRT4530_86232C.1
atgagagatggcagcaacactaccaagaagagcaagctgtcatggtccaagagcttagtgaggaagtggttcaacatcaggagcaaagcccatgatttccatgctgatgatgtagctgcaattgggaggagaggaggtgatgatgaatggaggggaagcagcttcacccggagggaaccaagcacagtcaagaagagcaaaacagagaggtcgtcgaggaggagccatgagcggtcgaggcgcggcaagatcgacctcgacgccgctgaggccaccgtaacattagactataagatctttgttgccacatggaatgtaggtggccgatcacccccaaacaccatgagcctcgaggactggctccatgctgcacctcctgctgacatctacgtccttgggtacttgttcttgtttcatctcgcatatctgaattcgtgtcagatatcacaactctgttggttcgatttcagtgataattttgatgttgtcattttgttcacgtttcaagagatcgtcccattgaatgctgggaacgttcttgggacagaggacaatggcccggcaaggaggtgggtgtcactggtcagaagaactctgaacaacttgccgggtactagtggcaatggtagctttcggacgccatctccggcgcctgatcctgtggtggagatggatgatgactttgagggattgtcatcgaggcagaacaatgcgtccttcttccaccgccggtcattccaggccggacttagccggagcttgaggatggagggtgacattcttgcaccccagcctaggctggaacggcggtacagcgtctgcgatcgagctatctatggccgtcggcctagcgactacgaggccacctgccggtggggtggctcatcggacgatgagaacaacactggtgaatcgccaagtacagtttattcaccaatgtcgtatggatacggtaatccgtcatctctggaagaaagccatagaccggctggtcatactagatattgcctagttgcaagcaagcaaatggtaggattgtttctgatgatttgggcccggaaagacataagggatgacattagaaatctgaaggtttcttgtgttgggagaggattgatgggctaccttggaaataagggttcgatttcgattagcatgtcattgcaccaaacaagcttctgcttcgtctgcagccacctgacatcaggacagaaggatggtgatgagatgaggaggaattcagatgtattggaaatccttagaaagaccaggtttccaatggtttatggacagtatgagcgttcaccagaaactatcttagagcatgaacgaatcatctggcttggggacctaaattacagaatcgcgctttcctaccgatcggtgaaggccctcgtggagatgcgcaattggaaagcattgctggagaaagatcagttaaggattgagcaaagaggtgggcgagtattcgttgggtggaacgaggggaaaatatacttcccgccaacatacaaatactcgaataattccgacaagtacgctggggatgacatgaaccagaaggaaaagaagagaacgcctgcatggtgtgatcgtattttatggtatggaaggggccttagtcaactgtcatatgttcgaggtgaatctcgcttttcagatcatagaccggtctacagtgtcttcagtgcagaagtagaatcaatcaatcatagtagaatccagaagatgagttgttcaagttcacaactggacattgaggaattgctgccctactcatatggatatactgatattaatccatatggatacactgacctgaatttctactga

SEQ ID NO: 87272 - DNA, 930 bp, Oryza sativa
  Clone ID: PAT_MRT4530_86233C.1
ttaatcgatcttggtgtagaaccatagagacatgaagtcttcgacaatgtcgaatagaattttcctctggtcgaggaccaggtggtagtcgtaactcgaccacttgaagtacaaatagtaggagaatcgcttttctcgagtagtccagccatggccggtgctatgagataggtcgtcggtcttcgttggtgggttgggcgcgacgactctgcatttgtcgagatcgttctcgataatgcggtgtacttgaccacaacagtcaacgtcgtcgagtagtttgttgtcagagagcccatctcttaaacccatctcgtcgaaatcctgaagcaccaaaacccccgtcacgtcttttccgctgccgttcccacctctcccgtgcccggctccctcccccatccggaggcgcgttcccgccggcgtccagtggcgttgccgccactgcaccatctccggccggctgctgttcatcgccggtacgacgatcgacgtcgctgtctccttcgtcgacgtcgcagcgtcgccctccgccccggcctgccctcggattcgccggaacgccgtcgtccacgccgcccctccttcggtcacgtcggtacccactccggcagccccttccgccgtgccagggcgccagccgacgtcgccgtctccaccttcggcatcgcagcggcaaggtcgtccttggcctcgcctcccctccacccgaaccctgccggtgttcgtcgtcgtcgtctccgtccgacgccgccatcccctcctccggtcggccgtttctccttgccggctcatcgtctcgctgtgccgccaccgtcgtcggcatcgcagtggcgtgttccacgccgtcctcgcatccgggcagctgctgccggctgccctcgtagcctcctcgctggccccggccgtcatcgtcctcccgtcgttcccggtcat

SEQ ID NO: 87273 - DNA, 268 bp, Oryza sativa
  Clone ID: PAT_MRT4530_86234C.1
ttgttttttttttttttttttttttttttttttttttttttttttttttttttttttttttttttttttggaaagctggaaaggcccaaagccatttttttttttgcagctcaatttctcataaaattcccctggacagaccccatttaaatggggcataaatggcctaaacataaactctccaaatccaatggcatacattggctaaacatgaaccctccagatccaaaaccattgttgctaaaaagaccccaggcaagcccggccc

SEQ ID NO: 87274 - DNA, 580 bp, Oryza sativa
  Clone ID: PAT_MRT4530_86235C.1
cggcacgaggctctcctctctctctcgtttcgctctctgtaccgccgttcaagccgctgctccgcgcgtcctagcgccgccgtcgccggagtccacctcccccttccctggccgtcggacgccgagctgcgcctcgccgccgcggcgcatcgccgcatcgttgccccggctgaagcagagcgagaggaggaagaagacttcccctccagccactgacagccgggcctcaagcccccctttgcctttgaaaattcatagaaaatcaaccgtaacttcgatcgactccattcaagttcctaaatttttttaaaattgagatctccacagtggctccattttttctctgatttaagcttgttttattgccatttcttatttagttttgtttttcgcgtttagagcccgagtacgaggaagctccgaatgccgctttcgagggagaagaccccaatcctgtgtaaggcaagcctctttgaccacattgcccctagattttcaatgatatgttgtttgaaaagatgcattgtttagttcacacgattaacatgtttaggcctcggattgtttatacaatcgacgg

SEQ ID NO: 87275 - DNA, 561 bp, Oryza sativa
  Clone ID: PAT_MRT4530_86236C.1
atggcagcagcatgctcctccgccgccttcctcgcctacccgggcagcctaggagcagggccccgccccctccgcctcttccgcgcattcgcggcggcctcctcctccgggtcggggagcaagaagaaggcgaggaagtccaagggcgctgggaacaagggggaagccagcggcggtggaggcggcaaggggaaggagaaggcgctggagccgccgcccgcggtgatacgccgcgcgccggctgggagcgcgtcggtgttccagcagccggagccggggttcacccccggcggcggcggcggcgggaaggggccgacggaggaggagcggcggcagcggcaggccaacgagaacgccttcctcctcgcatggctggggctcggcttgatcatcctcgccgagggcctcgcgctcgccgcctccggtttcctgccagaagaatgggacagctttttcgtgaagttcctttatccatcgtttactcctacggtgagtaaaagaatgaggcgggttgaaacacgattagagagtaaatggttcatatttgccatggtcatctaa

SEQ ID NO: 87276 - DNA, 464 bp, Oryza sativa
  Clone ID: PAT_MRT4530_86237C.1
ctcaagaagtactcgagcaaagaaggagagagcttggcgagctgtaaagatggcccgctgcgtgatggcgtcgtaggacaccaccgtggctactttgcaggggctgaagtccaccgccgtgatgcccgtggcccggcggtccggcaactccagcttgggcaacgtcagcaatggcggcaggatcaggtgcatgcaagtgtggccgattgagggcatgaagaaagtcgagaccttctgctacctgtcaccgatgaccgtggaggacctgctgaagcatatcgagtacctgctacgatacaagtgggtgccctgcctcgagttcaggcaagtgtcggatctcgctaccgtgagaaccacagaacgcgcggtactacgatggcaggtactggaccatgtggaagctgcccatgtttcgaggcactgacgccacccaggtgctcaaggagctcgaggaggccaagaag

SEQ ID NO: 87277 - DNA, 229 bp, Oryza sativa
  Clone ID: PAT_MRT4530_86238C.1
cgccctcactgccggtgctctccttgctacgccgccgctgacgcagactcgaaggggaggctgtgggtgttggatgcggcagccgcgatttctttgccagcggatccgggggctcatcaatggcgtccacaccagcggagcccaaagcattgatgttttctgctcttccccaccacggtttgccgctgccatggatgctgttgactcctcacatgtcaaccacgactag

SEQ ID NO: 87278 - DNA, 211 bp, Oryza sativa
  Clone ID: PAT_MRT4530_86239C.1
gatggcatatgggccacccggcacggcacggcccaagcccggccgtgcctgtgcctggggcgaggcttgtcgggccggcacggcccgactgacgcaccgggccgtgtcgtgccagcccacgggcggcatacacggcccaggcatggcccaatactactcggaccgtgccgggtcgacccgaaggcacgaaggcccatcatgcttgcccggc

SEQ ID NO: 87279 - DNA, 447 bp, Oryza sativa
  Clone ID: PAT_MRT4530_8623C.1
atgtcatcctttctccttcccttcatccttctccctctctctctctcccttctctctcttttctctccccccttcggacccattggtggcggcggtggctgggggccggagtggcgacgacggcgtgtgggcgagggctggagcggcgacggcggcgtgcaggcgatggccgccaccgcctgccccgtcatcggagggctcgaggaggacgccggcgtggaggagccccgggcagcagacggagagcttgtggagcgcggcccacgccctgggcgcgttgtcagaggggggcggctggacggggacgccggcgcggcagaggacgacactggagtcgccggagttggcgacgacgacgcggtcgtgaatcgtgacaggggcaggagcagctcggcggggagcgcgcgcgtcaagcgcgggcgcgcggcgggaggcacgccgccctga

SEQ ID NO: 87280 - DNA, 1321 bp, Oryza sativa
  Clone ID: PAT_MRT4530_86240C.1
atgtacgataatatcatagccacactacgtggagctggtgcagctgaaggcacacatgccactgtctccgacgtcaccaaggaggctgcaacgctcactgctgccacttaccgcatggacaccgaaagacaggcgacaccactaaggcggtcccccaggacagctacagcatcaccacctacaacaaagtcacttgttaccagccccaagagcactgatgaacacaaggataggagtacgtcgccaccaaaagctatgagaaggtcaccaaggtcctcgccggctagcaatgtgcacccatcatccccacagcaggcggacacgcaacaatcgggccccgagcggtcgagccatgatccatcggcggcagccaatcctgccctgtcagcatctgcacaagaatacactgaagagggagcgcaaccgctcacaggcacagtaggccaaggcaatgatgaccagcaaaccattgatcctgctggagtgctggagaacacaaccccacagcctacccaggtagtggtgtttcaagatacaggtgacattgggcagcacatcccctcgtcagaacctatacgctgtcctcgcaggtcggccaggtttgtttcaccgctcaagattggacacacacgccccctcccggatagcgcgaaagttgttgctcttcgcgaacgcattttgagtgacccggccaggtttgggagcgccaacatcattgaagttggcatatctgctgctaccgccagcgatattgcgtccttgttcactgatggttcaatgacaaaaggcctcttcatcgatgctttcataaatttgattctgcatgatgagcaggagtttagcccgatgtcagctggggaccgaatcttcctgccaaccagtgtatctgttatagtacctgttatacaccacagccactggactctgtactgcgtctaccggtaaccatgggcgcatagatgtctttgactccaacaattaccctgctttgaatacggagtacaaggatcaccatggtgacctagggagtcgtgttgtgaaacggctcagcgataggctctatgcagcagccaggactgccttcaagaggtttgggaaccagaagctggtcaggaacaaatgcccagtcatgctaaagcccaatgattgcgcattttttgtcatgaggtacatggagctatatgaaggcgatgactcccccctgatacaagtcgctgaatcggaggagtacaacgacttgcgttcgcagatgctgtacaacatggtcttccactccaacaatgttgctgcgcctctgccaccggaactagaagagctatga

SEQ ID NO: 87281 - DNA, 2856 bp, Oryza sativa
  Clone ID: PAT_MRT4530_86241C.1
atggatcaatcaacaattgatcgaagttggatgtatgccaaaaatttgaaacgtcattctacggagtaccgaaagggcgtaataaattttatgaacgccgcggaggaggatcggataagaagaaacagtgattacatgtgttgtccatgtgcagattgcaagaacgagaatatgtttgatagcggagaggacgtacacggtcatctgatacaacgaggattcatggagggctatacatgttgggtgaagcatggagagcaagaatcaggaagtggagcagcagcagacagaagtggtgcgcataatcaggaagatgaaaatgagcatgacatgtttataccttctccattgggcggtgaaatggttgatgtggatcacgatctgctgcaagacatgttacgtgacgttgaggacccagtccagaatgagagagatggaatgaaattcagcaggttggtaagtgattccgagacgcctttgtacgctggatgcaaagcaaaacacactaagttgtcagttaccttggacctaatgaagctgaaggcaagcagtggatggacagacaagagtttcacagatgttttaggaattttgaaggctatgcttcctgttgagaacacattgcccgagacgacatacgaagcaaagcaggttatgtgtccactggggttagaggtccgtagaattcacgcttgtcccaatgattgcatattgtaccacaagcaatatgcggacttggatgcttgtcctgtctgcaaggcttacaagcgaaagaaaagtgctgacgaaggaaataagtcaaagaggggtggtccggcaaaggttgtgtggtatctacctatcattgatcgtttcaagagaatcattgccaacccgaacgaagcgaagttagtacgttggcacgccacagaaagaaagaatgatggtccaaggcaacccggcaatgatatcgatgtattcctggagcctgttatcgacgatctggagattctttggaaagaaggtgtggaaacatgggatgcatatggtcaggagaacttcaagctaagagttctattgttctgcaccattaatgactaccctgcactcggtaatctttccggacaaactataaaaggaaagaaggcatgctccgattgcaaggaacatacacgaagccggtggctaaagaaatcacgaaagatggtatacatgggtcaccggaggtggctcccgctacgtcacacatttagaagaaagcagaaaatttttaatgatttgtccggagatgaggtccacaatatggtcaaggacataagcaatgagtttgggaagaaaagaaaacgtagcaagacaaaggagaaggaaaagaatgtgtgtgagagtttggttggcctgatgttgaatattcccgggaagacaaaggacgggttgaacgcgcgccttgatctacaggacatgaatattcgcagcgaactccaacccatacgagatgcagagacaggtaaagtgtacctccctccagcctgccacacactgtcgaaggatgagaagatcgcaatgttctcatgcttgaaggatattaaagttctatcgggctattcagcgaggataagtaagtatgttaaattggatgatctaaaacttgttggaatgaagtctcacaattgccacgtgctaatcacacaaatcttgccagttgctatcagaggcattctaccaccgaaagtgcgtcacacgatccaacgtctgtgcgccttcttcaatgcaattggacagaaggttatagatccagaagatctagatgggctgcagaccgatattgtgaataccctctgtcacctggagatgtttttcccactgtctttctttgatataatggttcatctccctgttcatctggtgaagcaaacaaaactatgtggcccggcttttctaagggaaatgtggccgtttgaaaggtacatgggagttctaaagtcgtacgttcgtaacagagctaaacccgaggggagcatcattgaaggttacacgaccgaggaggctattgagttctgtgtcaattacatgtccgatgccgatcctatcggagttccagcgtctcgtcacgagggaaggttgttaggtgttggcacaatcagaaggaaaagaattaggcccgatcaagcgtcgtacgcgcaggctcattacgctgtgctccaacatatggcagaagttggcccatactttgaggagcacttagcgaaaatccgagatgagaacttggggcgatctgatgcatggattaacagagaacataattctcggttcaacgaatggttcaagaatcgtgtgacaatgtctacggatgtcccaaatgagacagtacagttgttggggatgggaccgtcttggaccatagacacatggcaaggatacaatataaatggatacacattttacaccgtcaaacaagatgacgaaagcacagtgcaaaacagcggcgtccgtatagatgcattccaggatcaagttgggtcaaacacatactacgaccgcattgaggagatctgggagctaaactacgtcaagttcaaggttcctttgttctgctgctgttgggtgaatctacgcactggtgtcaaagccgacaaggaaggtttcacttcagtagatctatctaaggtcgagcagatattctacataaaagacccttcaaacaagaagatgcacatcgtgagggatggaaagcgccgaattgtaggagttgacaacgtcgtcgatgaagaagaatgcaaccataatcttcatgtaagacctcacattgaccttgacgatgatccccaagagcttgtggcatatgctcgttcagatcataccgaaggcataaccttgtga

SEQ ID NO: 87282 - DNA, 3039 bp, Oryza sativa
  Clone ID: PAT_MRT4530_86242C.1
atggttgaggtggatcacgatctgctgcaagacatgttacgtgacgttgaggacccagcccagaatgagagagatggaatgaaattcagcaggttggctatgcttcctgttgagaacacattgcccgagacgacatacgaagcaaagcaggttctatgtccactggggttagagcttgctcccaaagatttgtccggagatgaggtccacaatatggtcaaggacataagcaatgagtttgggaagaaaagaaaacatagcaagacaaaggagaaggaaaagaatatgtgtgagagtttggttggcctgatgttgaatattcccgggaagacaaaggacgggttgaacgcgcgccttgatctacaggatatgaatattcgcagcgaactccagcccatacgagatgcagagacaggtaaagtgtacctccctccagcctgccacacactgtcgaaggatgagaagatcgcaatgttatcatgcttaaaggatattaaagttccatcgggctattcagcgaggataagtaagtatgttaaattgaacgatctaaaacttgttggaatgaagtctcacgattgccacgtgctaatcacacaaatcttgccagttgctatcagaggcattctaccaccgaaagtgtgtcacacgatccaacgtctgtgcgccttcttcaatgcaattggacagaaggttatagatccagaagatctagatgggttgcagaccgatattgtgaataccctctgtcacctggagatgtttttcccactgtctttctttgatataatggttcatctccctgttcatctggtaaagcaaacaaaactatgtggcccggcttttctaagggaaatgtggccgtttgaaaggtacatgggagttctgaagtcgtacattcgtaacagagctaaacccgaggggagcatcattgaaggttacacgaccgaggaggctattgagttctgtgtcaattacatgtccgatgccgatcctatcggagttccagcgtctcgtcacgagggaaggttgtcagaagttggcccatactttgaggagcacttagcgaaaatccgagatgagaacttggggcgatctgatgcatggattaacagagaacataattctcggttcaacgaatggttcaagaatcgtgtgacaatgtccacggttgtcccaaatgagacagtacagttgttagggatgggaccgtcttggaccatagatacatggcaaggatacgatataaatggatacacattttacaccgtcaaacaagatgacaaaagcacagtgcaaaacagcggcgtccgtatagatgcattccaggatcaagttgggtcaaacacatactacggccgcattaaggagatctgggagctaaactacatcaagttcaaggttcctttgttccgctgccgttgggtgaatctacgcactggtgtcaaagccgacaaggaaggtttcactttagtagatctatctaaggtgggatacgccgatgaaccatttgtacttgtgaaacaggtcgagcagatattctacataaaagacccttcaaacaagaagatgcacatcgtgagggatggaaagcgccgaattgtaggagttgacaacgtcgtcgatgaagaagaatacaatcataatcttcataaccctagcgccgccgtcatcctccctcgccaagctcgccgtcgtcgccaccgagcccgccgccgccgcagtcgtcctccctcgccaagcccgccgccgtcgccaccgagcccgccgccgctgccgcagtcgtcctccctcggcaagcctgccgccgtcaccaccgagcctcctcggccctccattcggacctccgccgccgagcctcctcaccgacgacccccccccccgagcccgccaccgccgccaccgagcctttacaccgaccggaccggtgttggccttcctcgtcgtcgccgcccgcgtcctcaccgacccacgtcgccgacccccaccgagcacgacgccacccgcccggtgctgacctgcccgatcggcgtctccaccgaccggcgccgccctccaccgagcccgggcgccgccgccaccgagccccaccggccatcctcagggaggcagaaattcagtattctacaagacgacttcaagctcgtgccggccgcagagaaggacattgcttggctaacgttcaaggagagctttgattatcctacggagcatgaggaccgtctcaggcgggctgctttcaaggttatgggcactgcttggaagaacttcaagactaagctagtcggcgagttcgtctacaacccggcaaatctagatccaagagagaaatttccttggatcacggaacaggtctgggaggaattccatgcgaagaagtcgacccccgagtccagagctagaagcgaggcatatcgcttgctccagaccaggaaccagcatccgcaccggcttggtaccgccggatatgccgactacgcatggcagtacaagaagcggacttccaacaaggcggagaaagatgcacgccttgaagccaagatccgggagtcgatacgagctgagctgacatctgaattcgacgaaaagctcgagtcgatgagggccaagattaggcaagagatccgagaagagcaacagatcccccaggctgccgctgctgctgcgcacaaagagttaggaagtcccaccgaaaaacgcagcagttgcgcatcaactgagttggcagaaaatccaacatcggtcgacagcgccgtcgaccacataacggaaccaacgagctgcaccctcacagttagggtgatgccgaccttcaccttcactgttccagcagccgagggacttgcgtacaagccgaccccagagacaagagtgcatggagcgcaactcagggccgactgtgcaaaagctcaagtcgactcggtgaagcccgaatacgagctgttccctctgaagtatccaccgaacgacgaggggggacccgtggaccccacctgtcatccctttcctccagctccaactgccgccatggccgcctga

SEQ ID NO: 87283 - DNA, 3124 bp, Oryza sativa
  Clone ID: PAT_MRT4530_86243C.1
caattgatcgaagttggatgtatgccaaaaaattgaaacgtcattgtacggagtaccgaaagggcgtaataaattttatgaacgccgcggaggaggatcggataagaagtaaacagtgattacatttgttgtccatgtgcagattgcaagaatgagaatatgtttgatagaggagaggacgtacacggtcatctgatacaacgaggattcatggagggctatacatgttgggtgaagcatggagagcaagaatcaggaagtggagcagcagcagacagaagtggtgcgcataatcaggaagatgaagatgagcatgacatgtttataccttctccattggacggtgaaatggttgatgtggatcacgatctgctgcaagacatgttacgtgacgttgaggacccagcccagaatgagagagatggaatgaagttcagcaggttggtaagtgattccgagacgcctctgtacgctggatgcaaagcaaaacacacaaagttgtcagttaccttggacctaatgaagctgaagtcaagtagtggatggacagacaagagtttcacagatcatttaggaattttgaaggctatgcttcctgttgagaacacattgcccgagacgacatacgaagcaaagcaggttctgtgtccactggggttagaggtccatagaattcacgcttgtcccaacgactgcatattgtaccacaagcaatatgcggacttggatgcttgtcctgtctgcaaggcttctcgatacaagcgaaagaaaagtgctgacgaaggaaataagtcaaagaggggtggtccggcaaaggttgtgtggtatctacctatcattgatcgtttcaagagaatctttgccaacccgaacgaagcgaagttagtacgttggcacgccacggagagaaggaaagacggtatgcttagacacccagcggattccaattgaatgaaggaatatcaatcgaaaaccaaagactttggttgcccggactccttaagaaacatgaggatatgtctatgcacggatggcatgaatcctttcggtgacatgagtagtactcacagcacttggccagttcttattgcgaactataacctcccaccatggttatgctttaaacaaaaatatattatgttgtgcttgttaatccaaggtccaaggcaacccggcaatgatatcgatgtattcctggagcctgttatcgatgatctggagattctttggaaagaaggtgtggaaacttaggatgcatatggtcaggagaacttcaagctaagagttctattgttctgcaccattaatgactactgcactcggtaatctttccagacaaactataaaaggaaagaaggcatgctccgattgcaaggaacatacacgaagccggtggctgaaaaaatcacgaaagatggtatacatgggtcaccggaggtggctcccgctacgtcacgcatttagaagaaagaagaaaatttttaacggtaagagagaacttcagcctgctcccaaagatttgtccggagatgaggtccacaatatggtcaaggacataagcaatgagtttgggaagaaaagaaaacgtagcaagacaaaggagaaggaaaagaatgtgtgtgagaatttggttggcctgatgttgaatatttccgggaagacaaaggacgggttgaacgcacgccttgatctacaggacatgaatattcatagtgaacttcagtccatacgagatgcagagacaggtaaagtgtacctccctccagcctgccacacactgtcgaaggatgagaagatcgcaatgttatcatgcttgaaggatattaaagttccatcgggctattcagcgaggataagtaagtatgttaaattggacgatctaaaacttgttggaatgaagtctcacgattgccacgtgctaatcacacaaatcttgccaattgctatcaaaggcattctataaccgaaagtgcgtcacacgatccaacgtctgtgcgccttcttcaatgcaattggacagaaggttatagatccagaagatctagatgggctgcagaccgatattgtgaataccctctgtcacctggagatgtttttcccactgtctttctttgatataatggttcatctccctattcatctggtgaagcaaacaaaactatgtggcccggcttttctaagggaaatgtggccgtttgaaaggtacatgggagttctgaagtcgtacgttcgtaacagagctaaacccgaggggagcatcattgaaggttacacgaccgaggaggctattgagttctgtgtcaattacatgtccgatgccaatcctatcggtgttcccacatctcgtcacgagggaaggttgtcaggtgttggcacaatcggaaggaaaagaattaggcctgatcaagcgtcgtacacgcaggctcattacgctgtgctccaacatatggcagaagttggcccatactttgaggagtacttagcgaaaatccgagatgagaatttggggcgatctgatgcatggattaacagagaacataattctcggttcaacgaatggttcaagaatcgtgtgacaatgtccacggatgtcccaaatgagataatcgtagacacatggcatggatacgatataaatggatacacattttacaccgtcaaacaggatgacaaaagcacagtgcaaaacaacggcgtccgtatagatgcattccaggatcaagttgggtcaaacacatactacggccgcattgaggagatctgggagctaaactacgtcaagttcaaggttcctttgtttcgctgccgttgggtgaatctacgcactggtgtcaaagccgacaaggaaggtttcactttagtagatctatctaaggtgggatacgccgatgaaccatttgtacttgcgaaacaggtcgagcagatattctacataaaagacccttcaaacaagaagatgcacatcgtgagggatggaaagcgccgaattgtaggagttgacaacatcgtcgatgaagaagaatacaaccataatcttcatgtaagacctcacattgaccttgacgatgatccccaagagcctgtggcatatgctcgttcagatcatacggaaggcataaccttg

SEQ ID NO: 87284 - DNA, 6808 bp, Oryza sativa
  unsure (1)..(6808): unsure at all n locations
  Clone ID: PAT_MRT4530_86244C.1
atgactcatcactctaccataactagggtttctcagatcggatcgaaactttttctaagtcccgctacagtttcctgcctccttagaaccctagcgcagtcgtcgttctccatcgccgagcctgccgccgtcgccaccgagcccgcggctgccgccaccgagcctcctccgccctccattcggaccgccgctgcctcctcaccgacaacccccaccgagcccacggccgcctccaccgagcacgccaccgccagcccggcgcagccaccactaaccccggtgacgccctccaccgagcccggcgccgccgccatcgaggccgccgccgccgccaactcctccttcgctgactcctccctcgccgagcccgaggccgccgccaccgagcctaccgcctccaccgagcctcggacgcccgacgccgcctccaccgagcacgcagccgcctccaccgagcctccgacgcccaacgccgcctccaccgagcctggcgcagccaccaccgaccccggcggcgccgccactgagcctgccgcctccaccgagccctgtgtcgacccacagacaatatctcagcaaggcgaatcaatgtcgacgacaactagtgggtcctcaagggcacgtactcctaggacagggaacataatccctaaggaacggttccacataacagcggtggaccaagtagggttgccgacatctccaagaaaaatattgagccgatttaggtctatctacggggtcatagggaggcagaaattcagtattctgcaagatgacatcaagcacgtgccggccacagagaaggacattgcttggctaatgttcaagttgagcttcgattatcctgcggagcatgaggaccatatcaggcgggctgctttcaaggttttgggcaatgcttggatgaacttcaagactaagctagtcggcgagttcatctacaacccggcgaatccagatccaaaagagaaatttccttggatcatggaacagaccaagaaccagcatccgcaccgccttgacaccgccggatatgccggtaaggaagaggaatggcagcaggaggatgaacaagaggaggaatcgagcacgccgctcgtgtttggcgatatcccatacccttgggctaggaactgggctagggcaaggtaccagaagaatgctgatggcacaatcttcatgccaaattcagaagatcaacgagtgtacgatgctatatacaagaagcgaacttccaacaaggcggagaaagatgcacgccttgaagccaagatccgggcgtcgataagagcgaagctgacatttgaattcgacgaaaagctcgagtcgatgagggccaagattaggcaagagatccaagaagagcaacagaaaccccaggccgccgctgctgctacgcacgaagagttaggaagtcccacccaaaaacacagcagttgcgcatcaactgagttggcggaaaatccaacatcggtcaacagcgccgtcgaccacataacggaaccaacgagctacaccctcacagttagggtgatgccgaccttcaccgttccagcagccgagggacttgcgtacaagccgaccccagagacaagagtgcatggagcgcaactcaggggcgactgtgcgaaagttcaagtcgactctgtgaagcccgaatacgagctgttcccactgaagtatccaccgaacgacgaggtcctctcactaggaaatgcccgtggtaccttcatccaatggcccaaggacctcagaggcattctaccaccgaaagtgcgtcgcacgatccaacggctgtgcaccttcttcaattcaattagacagaagattatagatccagaagatctagatgcgttgcaggccgatattgtgaataccctctgtcacctggagatgtttttcccactatctttctttgatataatggttcatctccctgttcatctggtgaagtacatgggagttctgaagtcctacgttcgtaacagagctaaacccgaggggagcatcattgaaggttacacgaccgaggaggctattgagttctgtgtcaattacatgtccgatgccgatcctatcggagttcctgcatctcgtcacgagggaaggttgtcaggtgttggcacaatcggaaggaaaagaattaggcccgatcaagcgttgtacgcgcaggctcattacgctgtgctccaacatatggcaaaagttggcccatactttgaggagcacttagcgaaaatccgagatgagaacttgggatactacggccgcattgaggagatctgggagctaaactacgtcaagttcaaggttcctatgttccgctgccgttgggtgaatctacgcactggtgtcaaagccgacaaggaaggtttcactttagtagatctatcaaagatgggatacgccgatgaaccatttgtacttgcgaaacaggtcgagcagatattctacataaaagacccttcaaacaagaagatgcacatcgtgagggatggaaagcgccgaattgtaggagttgacaacgtcgtcgatgaagaagaatacaactctaatcttcatagccgatttaggtctatctgcggggtcatagggaggcagaaattcagtattctacaagatgacatcaagcacgtgccgaccgcagagaaggacattgcttggctaacattcaaggagaggttcgattatcctgcggagcatgagaaccatatcaggcgggctgcttttaaggttatgggcaatgtttggaagaacttcaagactaagctagtcggtgagttcgtctacaagccggcgaatccagatccaagagagaaatttccttggatcgcagaacaaaacctgcatccgcaccggcttggcaccgccggatatgccggtaaggaagaggaatggcagcatgaggatgaagaagtggaggaattgaatacgccgctcgtgtttggcgatatcccacaccctcgggctaggaactgggccagggctaggtaccagaagaatgttgatggcacaatcttcatgccaaatccagatgatcaacgagtgtacgaagctatagagttggttgccaagcaacaagcctcgcaagaggcctgctctcaaagacgcgaggatgacgtcatcacgaaagcgttgggcaacaaggaacaccgtggacggacacggggtgttggatcttccgttccttggaagtatggatttccagactacgcatggcagtacaagaagcggacttccaacaaggcagataaagatgcacgccttgaagccaagatccgggcgtcgataagagctgagttgacatctgaattcgacaaaaagctcgagtcgatgagggccaagattaggcaagagatccgagaagagcaacagaaccccttggccgccgctgctgctgcgcacgaagagttagaaagtcccacccaaaaacgcagcagttgcgcatcaactgagttggcagaaaatccaacatcggtcgacagcgccgtcgaccacataacggaaccaacgagctgcaccctcacagttagggtgatgccgaccttcacggttccagcaaccgagggacttgcgtacaagccgaccccagagacaagagtgcatggagcgcaactcaggggcaactgtgcaaaagttcaagttgactcggtgaagcccgaatacgagctgttcccactgaagtatccaccgaacgacgagttgcagtacgacacggattttggggaggaccgaacggaggccgacagcaaggcgattcatgaacccccaccgatgaagaagagcaggaaggcacactcttcccctcagagaattactctcgataaactcgaagcaaaggggagaggaaggggaggaaaggagttccaactaggcatgccattggttggagatgacgtgcttgccgcaatgggcaccgcttgcaaggaccttcacgcatactacatggagaaatctaatgccaggaagccaaataaagctacggatatccttggagagcacgatggaaagccattccttggtccaacaaattatatcgtggtcgacttcaaggatctattcgacctctacaggctccgagcggtggacacaagcctccttaagtgctactccttgttaagttggcaatggtgtcagaagaatgcaccggaagttgccttccttgatccacaagtggtcattgtcacaaatctccagaatgaccgtacgacaccttgtggtcccgccgagacaaggagtacattatgtgcgcctataatcaatagtaatgcccattggatccttctggtcataacacctaagtggagttcatgtcactacctgaactccagaattgataagaacgcatatgattcgaccccaattcaactagcgatagatgaagcgtgggcccaatacgtgcaaagaggaggcctcaggaagacaggacatgacaccctcatccacaaaaaagtcttcccggtgaagcaacaaataggtgaccagtgcggattccatgtgtgccacaacatgcgccttctgtacagagaaaaggtgaagactttggctgagtttgagggcataataaccaagtctctgcctaccagctttgaggagcaggcatggctagcaaagatgcagggtttggttggtgtgttcttcctgggagaagccaatgatacagaagctggtgtttttgtgtccggcggcggccggcgacgcggcggcgggagcatgagggtgtccggagctcgtgaatccggagccggcgccggcgagtgtggtggcgggggaggagtctgggatggaggagaagaggacggcgcggctgaagacgggcagggggtggcggccgccggccgcggcggctacaaccggccgtaccaggccgtcgaccggacggcgaagatcctcgccgtcgctgcgttcttcctcaccctatgcatcgtgtggaaggtgcggcgcttgagggtgcgcctgctgctggcccgctcaccgggcgaggcggcgcacgtgccgagcaacgacaaggtgttcgtctactgctccagcgcgcacctggccctgttcgtggtcgtcctcacgctgaacagcagctgcgacgccaccgtcgagcaacacatcgggctgatgcaggacatgttactcctcccgcaggtgatcggcaacgccgcgtggcgcgtcaactgcaagcccctgcggggagcttctacgtcggcatcaccgtcgcgcgcctgctcccgcgcgtgtatgacctcgtgcgaccacgtgcggtggcgcgtcccaatcgtcctcgctctcccccccaacactctcgctgctgacgccctcctcttctcccacggcagcgacttggtgcgccaccgctcccgtcctcctaggctgccgccaccgtcgagccgtcttgcgaggcatggagtggatgtcgtattggggagcggatgtgggggtgcagggctggcagacggacggcgccccgcctcgacctcgctggccacaccgtccttggctgaagccatggcagcgacgccgggcagcaaggacgtcgaggccagcaccggcaccgccgcatccacggttgtcgtcatcgccatggcaagcgacgctggcaagctgtcgctgtgggcgctagtgaaagtgtgtgagaagaaaaaaatgtggggcccacctgtcagccccatcatcttagaggtggggggcagcggggccaatcggcatcgtattccccctttcccgtgggacgatctagactggcagcgtcgagtggaggagcttgttggcgatggcctcgtcgtgccagccctcagtgtcgcccatgataccagggctgagccgcaccatcagcacgtagaactccaccttgctcaacgcgttgtcgctgtcctggtcgccttcttgcaccatggctgtcgtctcctccaccgtaatctcgccaccgacagcgccgccccccaaccccagcacactcgccgcgcttcgccgcaggctcttcgtggtgatggcgccactcgtcaggtggagggcgtcggcggccgtggtggggtgggtgccagcgcagaggagggactaggcgcggcggtggagggatccggcgaggacgatgatggtggtggtgccgtgccggcgcctaagagggaaagggggcgagagggggtctgccccgccagcgagagatggaagagagggggctgcctctctggtgggagagaccctctccacgcgtcacgctggcaagagaaggggggtggaggaaggaggagtggcggccggcgtccggctaatgctattggcgcctcatcgcgacccaacttcggcaacaccaacccagctcgctggccggaaatagcgctccccctcctcctccgccgtcgctctacccactgcctcccgcttctccccccatttcccgccggtgcggcatgtggagagggtgggagagggagaggcgggcggcgggagatgggggacggtagcggtggccggctggtgctgctaacggcgagctattgctgtttccgcgcttgcctgccgccactggcctccctagcccgcttccccgatgccgaggacgacatcattgacctcctcctcgttgcgcttggtctgcgtgccgtggaagaaaagagaagaaagaaaggctgacacgtgagctcctcatttttaaanattttattttgttgactaggatgacacgtcagcgaaaccagatatcgataccgtcatgaaatntaaattgcncggttttgtataatttaggactgaanatttatggtattgggtttagggatgtcaaaaaaaaaaaaaaaaaaaaaaaaaaaaaaaaaaa

SEQ ID NO: 87285 - DNA, 174 bp, Oryza sativa
  Clone ID: PAT_MRT4530_86245C.1
atggcggtgcgcaatcttgaactcggcgcgaaggacaaggtgtacaatgggacgagattaaaggatctcgaagtgatgagtgttgatgaaaaacacgaggcctgggaaatctgcttaactccagtgcatgtccaaagctcgccttcgggtatgctagcgtgccagtggatttga

SEQ ID NO: 87286 - DNA, 2472 bp, Oryza sativa
  Clone ID: PAT_MRT4530_86246C.1
atgccctccaccgagccaggcgccgccgtcaccgagcccgccgccaccgccgtcgtcctccctcgagcctccacaccgaccggaccggtgtcggccttcctcgttgttgacgcccgtatcctcaccgacgcacgtcgccgacccccaccgagcccgacaccgcccgcccggcgccgacctaccaaaccggcatctccaccgactggcgccgccctctaccgagcccggcgctgccgccgcaaactcctccgttgccgagcccgccaccgccgccaccgagaccgctgcctccaccgagcccaacgccacctccaccgaccagcgacgccctccaccgagcccagcgccgccgccaccgagccctaccgaccgtcctcagaaaaaaagtatacaatgtctcagcaaggcgaaccaatgtcgacgacaactaatgggtcctcaagggcacgtactcctaggacagggaacaaaatccctaaggaacggttccgcataacagcggtggacgccgtagggttgccgacatctccaaggaaaatattgagccgatttaggtctatctgcggggtcatagggaggcagaaattcagtattctgcaagatgacatcaagctcgtgccggccgcagagaaggacattgcttggctaacgttcaaggagagctttgattatcctgtggagcatgagtaccgtctcaggcgggctgctttcaaggtctgggaggaattccatgcgaaaaagtcgacccccgagtccagagctagaagcgaggcatatcgcttgctccagaccaggaaccagcatcggcaccggcttggcaccgccggatatgccgataaggaagaggaatggcagcgtgaggatgaagaagcggaggaatcgtgcacaccgctcgtgttcggcgatatcccacaccctcgggctagcaactgggctagggctaggtaccagaagaattatgatggcacaatcttcatgccaaatgcagaagatcaacgagtatacgaagctattaaggagttggttgccgagcaacaagcctcgcaagaggcctgctctcaaagacgcgaggacgacctcctcacgaaagcgttgggcaacaaggaacatcgtggacggacacagggcgttgggtcttctgttccctggaagtatggatttccagactacgcgtggcagtacaagaagcggacttccaacaaggcggagaaagatgcacgccttgaagccaagatccgggcgtcgataagagctgagctgacatctgaattcgacaaaaagctcgagtcgatgagggccaagattaggcaagagatccgagaagagcaacagaacccccaggccgccgctgctgctgcgcacaaagagttaggaagtcctacccaaaaacgaagcagttgcgcatcaactgagttggcggaaaatccaacatcggtcgacagcgccgtcgaccacataacggaaccgacgagctgcaccctcatagttagggtgatgccgaccttcacggttctagcagccgagggacttgcgtacaagccgaccccagagacaagagtgcatggagcgcaactcagggccgattgtgcaaaagttcaagtcgattcggtgaagcccgaatacgagctgttccctctgaagtatccaccgaacgacgaggtcctctcactaggaaatgatcatggtaccttcatccaatggcccaaggacctcattgagatcagggttacagggagaggaaggggaggaaaggtgcaggcctcgcttctagctccaaggaagctagatctgggcaagggccaggaagagactaagagcaaagaggtcaagaagaaatacgtcactccacaggagttccaactaggcatgccattggttggagatgacatgcttgccgcaatgggcaccgcttgcaaggaccttcacttatactacatggagaaatctaacgccaggaagccaagtaaagctaccgatatccttggagagcacgatggaaagtcattccttggtccaacaaattatatcgtggtcgacttcaaggatcttttcgacctctacaggcttcgagcggtggacacaagcctccttaagtgctactcctttgcccattggatccttctggtcataacacctaagtggagtacatgtcactacctgaactccagaattgataagaacgcatatgattggaccccaattcaactagcgatagatgaagggtgggcccaatacgtgcaaagaggaggcctcaggaagacaggacatgacaccctcatccacaaaaaagacttcccggtgaagcaacaaataggtgaccagtgcggattccatgtgtgccacaacatgcgccttctgtatagagaaaaggtgaagactttggctgagtttgagggcacaataaccaagtctctgcctaccagctttgaggaggcaatgatgaacacttattatgcaactgtgatgatgtaa

SEQ ID NO: 87287 - DNA, 2550 bp, Oryza sativa
  Clone ID: PAT_MRT4530_86247C.1
atggatcaatcaaattgcaagaataagaatatgtttgatagcggagaggacgtacacggtcatctgatacaacgaggattcatggagggctatacatgttgggtgaagcatggagagcaagaatcaggaagtggagcagcagcagacagaagtggtgcgcataatcaggaagatgaaaatgagcatgacatgtttataccttctccattaggcggtgaaatggttgatgtggatcacgatctgctgcaagacatgttacgtgacgttgaggacccagcccagaatgagagagatggaatgaaattcagcaggttggtaagtgatttcgagacgcctttgtacgctggatgcaaagcaaaacacactaagttgtcagttaccttggacctaatgaagctgaaggcaagtagtggatggacagacaagagtttcacagatcttttagtaattttgaaggctatgcttcctgttgagaacacattgcccgagatgacatacgaagcaaagcaggttctgtgtccactggggttagaggtctgtagaattcatgcttgtcccaacgactgcatattgtaccacaagcaatatgcggacttggatgcttgtcctgtctgcaaggcttctcgatacaagcgaaagaaaagtgctgacgaaggaaataagtcaaagaggggtggtccggcaaaggttgtgtggtatctacctatcatttatcgtttcaagagaatctttgccaacccgaacaaagcgaagttagtacgttggcacgccacggaaagaaggaatgatggtccaaggcaacccggcaatgatatcgatgtattcctggagcctgttatcgacgatctggagattctttggaaagaaggtgtggaaacttgggatgcatatggtcaggagaacttcaagctaagagttctattgttctgcaccattaatgactaccctgcactcgatttgtccggagatgaggtccacaatatggtcaaggacataagcaatgagtttgggaagaaaagaaaacgtaacaagacaaaggagaaggaaaagaatgtgtgtgagagtttggttggcctgatgttgaacattcccgggaagacaaaggacgggttgaacgcgcgccttgatctacaggacatgaatattcgcagcgaactccagcccatacgagatgcagagacaggtaaagtgtacctccctccagcctgccacacactgtcgaaggatgagaagatcgcaatgttatcatgcttgaaggatattaaagttccatcgggctattcagcgaggataagtaagtatgttaaattggacgatctaaaacttgttggaatgaagtctcacgattgccacgtgctaatcacacaaatcttgccagttgctatcagaggcattctaccaccgaaagtgcgtcacacgatccaacgtctgtgcgccttcttcaatgcaattggacagaaggttatagatccagaagatctagatgggctgcagaccgatattgtgaataccctctgtcacctggagatgtttttcccactgtctttctttgatataatggttcatctccctgttcatctggtgaagcaaacaaaactatgtggcccagcatttctaagggaaatgtggccgtttgaaaggtacatgggagttctgaagtcttatgttcgtaacagagctaaacccgaggggagcatcattgaaggttacacgaccgaggaggctattgagttctgtgccaattacatgtccgatgccgatcctatcagagttccagcgtctcgtcacgagggaaggttgtcagaagttggcccatactttgaggagcacttagtgaaaatccgagatgagaacttggggcgatctgatgcatggattaacagagaacataattcttggttcaacgaatggttcaagaatcgtgtgacaatgtccacggatgtcccaaatgagacagtacagttgttggggatgggaccgtcttggaccatagacacatggcaaggatacgatataaatggatacacattttacaccgtcaaacaagatgacaaaagcacagtgcaaaacagcggcgtccgtatagatgcattccaggatcaagttgggtcaaacacatactacagccgcattgaggagatctgggagctaaactacgtcaagttcaaggttcctttgttccgctgccgttgggtgaatctacgcactggtgtcaaagccggcaaggaaggtttcactttagtagatctatctaaggtgggatacgccgatgaaccatttgtacttgcgaaacaggtcgagcagatattctacataaaagacccttcaaacaagaagatgcacatcgtgagggatggaaagcgccgaattgtaggagttgacaacgtcgtcgatgaagaagaatacaaccataatcttcatgtaagacctcacattgaccttgacgatgatccccaagagcctgtttacattgacctcacaaatgctgtttacatttgtcatattgtcaaaatcaatttcaagctgttagaaacaaagttatatagataa

SEQ ID NO: 87288 - DNA, 300 bp, Oryza sativa
  Clone ID: PAT_MRT4530_86248C.1
atgcccagagctgagctggatctggaagggcgagcgaacgacggactccatggccgacgagtcaagaaggagcaccacatagcagcgccggccagacctcgtcggagcagtggactccacgacgaccaacaaatcgagcaggaggagggccacatggctatggcgcggcggtgctggctggacctcgtcggagcgacgagaaatgtggttaggtgtgtgctgtggatagtgttgagtgctcgacgagctcctgcttctacgggcggccagctggcctatgaagacgatggccaccggtga

SEQ ID NO: 87289 - DNA, 2265 bp, Oryza sativa
  Clone ID: PAT_MRT4530_86249C.1
atgtcgacgacaactagtgggtcctcaagggcacgtactcctaggacagggaacaaaattcctaaggaacggttccgcataacagcggtggacgccgtagggttgcggacatctccaaggaaaatattgagccgatttaggtctatctgtggggtcatagggaggcagaaattcagtattctgcaagacgacttcaagctcgtgccggccgcagagaaggacattgcttggctaacgttcaaggagagctttgattatcctgcggagcatgaggaccgtctcaggtgggctgctttcaaggttatgggcactgcttggaagaacttcaagactaagctagtcggcgagttcgtctacaacccggcaaatccagatccaagagagaaatttccttggatcacggaacagaccaggaaccagcatccgcaccggcttggtaccgccggatatgccggtaaggaagaggaatggcagcgtgaggatgaagaagcggaggaatcgtgcacaccgctcatgtttggcgatatcccacaccctcgggctaggaactgggccagggctaggtaccagaaacatgatgatggcacaatcttcatgccaaatgcagaagatcaacaagtatacgaagctataaaggagttggttgccgagcaacaagccttgcaagaggcctgctctcaaagacgcgaggacgacctcctcacgaaagcgttgggcaacaaggaacaccgtggacggacacggggcgttgggtcttctgttccctggaagtatggatttccagactacgcgtggcagtacaagaagcggacttccaacaaggcggagaaagatgcacgccttgtagccaagatccgggagtcgatacgagctgagctgacatctggattcgacgaaaagctcgagtcgatgagggccaagattaggcaagagatccgaaaagagcaacagatcccccaggctgccgctgctgctgcgcacaaagagttaggaagtcccaccgaaaaacgcagcagttgcgcatcaactgagttggcggaaaatccaacatcggtcgacagcgccgtcgaccacataacggaaccaacgagctgcaccctcacagttagggtgatgccgaccttcactgttccagcagccgagggacttgcgtacaagccgaccctagagacaagagtgcatggagcgcaactcagggccggctgtgcaaaagttcaagtcgactcggtgaagcccgaatacgagctgttccctctgaagtatccaccgaacgacgaggtcctctcactaggaaatgcccgtggtaccttcatccaatggcccaaggacctcattgagatcagggttacagcgaggccaaccactgcaccaggcagtcgtccaccaaagagacccgcctctgctccttcagcccctcctgctcaagatcgtcatgcacaatcttacgatgtgcagttgcagtacgacacggattttggggaggaccgaacggaggccgacagcaaggcgattcatgaacccccaccgatgaagaagagcaggaaggcacactcttcccctcagagaattactctcgataaacccgaagcaaaggggagaggaaggggaggaaaggtgcagacctcgcttctagctccaagaaagctagatctgggcaagggccaggaagagactaagggcaaagaggtcaagaagaaatacgtcgctccacaggagttccaactaggcatgccattggttggagatgacgtgcttgccgcaatgggcaccgcttgcaaggaccttcacttatactacatggagaaatctaacgccaggaagccaagtaaagctaccgatatccttggacagcacgatggaaagccattccttggtccaacaaattatatcgtggtcgacttcaaggatcttttcgacctctacaagctccgagcggtggacacaagcctccttaagtgctactccttgttaagttggcaatggtgtcagaagcatgcaccggaagttgccttccttcatccacaagtggtcactgtcacaaatctccagaatgaccgtcaaggaatggtcaactacatctacgacaccttgtggtcccgccgagacaaggagtacattatgtgtgcctataataaatatgcccattggatccttctggtcataacacctaaatggagtacatgtcattacctgaactctagaattgataagaacgcatatgattggaccccaattcaactagcgatagatgaagcgtgggcctaa

SEQ ID NO: 87290 - DNA, 332 bp, Oryza sativa
  Clone ID: PAT_MRT4530_8624C.1
cattcttcgcttatgtgcacccagtcttctactaagatcagtagcatacaatgcgacaatggtcgagaggttgacaacatcactgcacagactttcttcctcactaatggcgtcgctatgcggatctcatgcccccacacgtctccaagaaacggtaaagccgagcgtatacttcgttctattaacaatattgtgcgctcccttctgtgtcaggccagccttacaggctccttgtgggccgagaccctccacacagctatccacctcatcaaccggcatcctacaaaaatcctacaccaccactcctcctactatgccctcatcaacggatt

SEQ ID NO: 87291 - DNA, 348 bp, Oryza sativa
  Clone ID: PAT_MRT4530_86250C.1
atgggggtggcggcggtggcggcggatgggggtggcggtggcggcggaggcggatgggggcgggggaggcggataggggcggcggcgctgactgggggaggacgagatgtggccgacgcggacgaccttaatgcgatgacgaagaggcggccacggcaactagctcagcgcggcggtgacttcggcgggccatgggctgatgatttcaaagtgaagaggccactagtgtccattgcctggcttcttgcgtggtttatgtctatggtcaaggtccattgccaggccatctctccttacaaggcagcggtagcgccgcggcacaccgcagctgccgcagtggggtgctga

SEQ ID NO: 87292 - DNA, 1536 bp, Oryza sativa
  Clone ID: PAT_MRT4530_86251C.1
atggttgaatattgcaagaatgagaatatgtttgatagcggagaggacgtacacggtcatctgatacaacgagaattcatggagggctatacatgttgggtgaagcatggagagcaagaatcaggaagtggagcagcagtagacagaagtggtgcacataatcaggaagatgaagatgagcatgacatgtttataccttctccattgggcggtgaaatggttgatgtggatcacgatctgctgcaagacatgttacgtgacgttgaggacccagcccagaatgagagagatggaatgaagttcagtaggttggtaagtgattctgagacgcctttgtacgctggatgcaaagcaaaacacactaagttgtcagttaccttggacctaatgaagctgaaggcaagtagtggatggacaggcaagagtttcacagatcttttaggaattttgaaggctatgcttcctgttgagaacacattgcccgagacgacatacgaagcaaagcaggttctgtgtccactggggttagaggtccgtagaattcatgcttgtcccaacgactgcatattgtaccacaagcaatatgcggacttggatgcttgtcctgtctgcaaggcttctcgatataagcgaaagaaaagtgctgacgaaggaaataagtcaaagaggggtggtcgggcaaaggttgtgtggtatctacctatcattgattgtttcaagagaatctttgccaacccgaacaaagcgaagttagtacgttggcacgccatggagagaaggaatgacggtccaaggcaacccggcaatgatatcgatgtattcctggagcctgttatcgacgatctggagattctttggaaagaaggtgtggaaacttgggatgcatatggtcaggagaacttcaagctaagagttctattgttctgcaccattaatgactaccctgcactcggtaatctttccggacaaactataaaaggaaagaaggcatgctccgattgcaaggaacatacacgaagccggtggctgaagaaatcacgaaagatggtatacatgggtcaccggaggtggctcccgctacgtcacgcatttagaagaaagaagaaaatttttaacgatttgtccggagatgaggtccataatatggtcaaggacataagcaatgagtttgggaagaaaagaaaacgtagcaagacaaaggagaaggtgaactccagcccatacgagatgcagagacaggatattaaagttccatcgggctattcagcgaggataagtaagtatgttaaattggacgatctaaaacttgttggaatgaagtctcacgattgccacgtgctaatcacacaaatcttgccagttgctatcagaggcattctaccaccaaaagtgtgtcacacgatccaacgtctgtgcgccttcttcaatgcaattggacagaaggttatagatccagaagatctagatgggctgcagaccgatattgtgaataccctctgtcacctggagatgtttttcccactgtctttcttatag

SEQ ID NO: 87293 - DNA, 2292 bp, Oryza sativa
  Clone ID: PAT_MRT4530_86252C.1
atgttacgtgacgttgaggacccagcccagaatgagagagatggaatgaaattcagcaggttggtaagtgattccgagacgcctttgtacactggatgcaaagcaaaacacactaagttgtcagttaccttggacctaatgaagctgaaggcaagtagtggatggacagacaagagtttcacagatcttttaggaattttgaaggctatgcttcctgttgagaacacattgcccgagacgacatacgaagcaaagcaggttctgtgtccactggggttagaggtccgtagaattcacgcttgtcccaacgactgcatattgtaccacaagcaatatgcggacttggatgcttgtcctgtctacaaggcttctcgatacaagcgaaagaaaagtgctgatgaaggaaataagtcaaagaggggtggtctggcaaaggttgtgtggtatctacctatcattgatcatttcaagagaatctttgccaacccgaacaaagcgatgttagtacgttggcacgccacggaaagaaggaatgatggtccaaggcaacccggcaatgatatcgatgtattcctggagcctgttatcgatgatctagagattctttggaaagaaggtgtggaaacttgggatgcatatggtcaagagaacttcaagctaagagttctattgttctgcaccattaatgactaccctgcactcggtaatctttccggacaaactataaaaggaaagaaggcatgctccgattgcaaggaacatacacgaagccggtggctgaagaaatcacgaaagatggtatacatgggtcaccggaggtggctcccgctacgtcacacatttagaagaaagaagaaaaattttaatggtaagagagaacttcagcctgctcccaaagatttgtccggagatgagatccacaatatggtcaaagacataagcaatgagtttgggaagaaaagaaaacgtagcaagacaaaggagaagggtaggtggaagaaaaaatccatattttggcggctaccttactggaaagatcttgatgtccgtcattgcattgatctcatgcatgtagaaaagaatgtgtgtgagagtttggttggcctgatgttgaatattcccgggaagacaaaggacgggttgaacgtgtgccttgatctacaggacatgaatattcgcagcgaactccagcccatacgagatgcagagacaggtaaagtgtacctccctccagcctgccacacactgtcgaaggatgagaagatcgcaatgttatcatgcttgaaggatattaaagttccatcaggctattcagcgaggataagtaagtatgttaaattggacgatctaaaacttgttggaatgaagtctcacgattgccacgtgctaatcacacaaatcttgccatttgctatcagaggcattctaccaccgaaacaaacaaaactatgtggcccggcttttctaagggaaatgtggccgtttgaaaggtacatgggagttctaaagtcgtacgttcgtaacagagctaaacccgaggggagcatcattgaaggttacacgaccgaggaagctattgagttctgtgtcaattacatgtccgatgccgatcctatcggagttccagcgtctcgtcacgagggaaggttgtcagaagttggcccatactttgaggagcacttagcgaaaatccgagatgagaacttggggcgatctgatgcatggattaacagagaacataattctcggttcaacgaatggttcaagaatcgtgtgacaatgtccacggatgtcccaaatgagacagtacagttgttggggatgggaccatcttggaccatagacacatggcaaggatacgatataaatggatacacattttacaccgtcaaacaagatgacaaaagcacagtgcaaaacagcggcgtccgtatagatgcattccaggatcaagttgggtcaaacacatactacggccgcattgaggagatctgggagctaaactacgtcaagttcaaggtcgagcagatattctacataaaagacccttcaaacaagaagatgcacatcgtgagggatggaaagtgccgaattataggagttgacaacgtcgtcgatgaagaagaatacaaccataatcttcatgtaagacctcacattgaccttgacgatgatccccaagagcctgtggcatatgctcgttcagatcatttagtatttacaaatgatgcttatatttgtcatattgtcaaaatcaatttcaagctgttagaaacaaagttatatagataa

SEQ ID NO: 87294 - DNA, 1536 bp, Oryza sativa
  Clone ID: PAT_MRT4530_86253C.1
atgccgcctccaccgagcctggcgcagccaccaacgacctcggcgacgccctccaccgagcccgccgccgccaccgagcctgccgcctccaccgagcccggcgccgatgcccagacgatgtctcagcaaggcgaaccaatgtcgacgacaactagtgggtcctcaagggcacgtactcctaggacagggaacaaaatccctaaggaacggttccgcataacgacagtgaaccaagtagggttgccgacaggtccaaggaaaatattgagccgatttaggtctatctgcggggtcatagggaggcagaaattaagtattctgcaagatgacattaagcaagtgccggccgcagagaaggatagtgcttggctagcgttcaaggagagcttcgattatcctgtagagcacgagaaccttatcaggcaggctgcttttaaggtcatgggcaacgcttggaagaacttcaagagtaagctagtcggcgagttcgtcttcaacccggcgaatcctgatccaacagagaaatttccttggatcacggaacaggtctgggaggaattccatgtgaagaagtcgacccccgagtccatagctagaagcgaggcatatcgcttgcttcagagcaagaaccagcatccgcaccggcttggcaccgccggatatgccggtaaggaagaggaatggcagcatgaggatgaagaagcggaggaatcgaacacaccgctcgtgtttggcgatatcccacaccctcgggctaggaactgggccagggccaggtaccagaagaatgctgatggcacaatcttcatgccaaatgcagaagatcaacgagtgtacgaagctataaaggaattggttgtcgagcaacaagcctcgcaagaggccagctctcaaagacgtgaggatgacctcctcacgaaagcgttgggcaacaaggaacaccgtggacggacacggggagttgggtcctccgttccctggaagtatagatttccagactacgcgtggcagtacaagaaacgaacttccatcaaggcagagaaagatgcacgccttgaagccaagatccgggcgtcgatcagagcgaagctgacatctgaattcgacgaaaagctcaagtcgatgagggcaaatattaggcaagagatccgagaagagcaacagaacccgcaggccgccgctgctgctgcgcatgaagagttaggaagtcccacccaaaaacgcagcagttgcgcatcaactgagttggcggaaaatccaacatcggtcgacagcgccgtcgaccacacaatggaaccaaccagctacacctgcacaggtagggtgattgcgaactttacggtttcaagaggccgaggaccttggttccagccgaccccagagacaagagtgcgtgactgtgcaaaagttcaagtagactcggttaagcccaaatacgagctgttcccactgaggtacccaccgaacgacgaggtcctctcactaggaaatgcccgtggtacctcatccaatggcccaaggacctcattgagataa

SEQ ID NO: 87295 - DNA, 152 bp, Oryza sativa
  unsure (1)..(152): unsure at all n locations
  Clone ID: PAT_MRT4530_86254C.1
gaagtatcaacaaccccaaaacatcatataattacccttctnttggagagactgtagcccccactgtgatacagttcacttccacttaaatggagatcataacaaaacctttgctgaccctttagctgactctttggccgacaccttgctct

SEQ ID NO: 87296 - DNA, 615 bp, Oryza sativa
  unsure (1)..(615): unsure at all n locations
  Clone ID: PAT_MRT4530_86255C.1
ccttgattcctccaatttccaggctcttttgaaacctattgtttctcagtttgttattgagccacctgaacattttgaatcagttccagaagctccatcagttgatgaagttgatgaaactcttgttttgtgcttggggcaaatggcagttactgcacggtcagatgttttgtggaagcctcttaaccacgaggtgctgatgaggacaaggagtgacaaagttcgccccaaaatgctcggtctgaaggttgtgaggcacatggtccaacagctaaaggaggaatacgtggttctcctcccggagaccattccattccttgctgaattactcgaggacgtggagctccctgttaagactctagcccaggagattgtgaaagagatggaaaccctcagcggcgagagcctccgtcagtacctgtgaggcatctgacgtctctgatctgcaacagtgaagtgaatatttatgcacttccgggtaaatcacttaagaaaaacatgggagttctatgcaaagttaacactaactggaacattctggaatatattcattntgctgtgtagtacaatggtggccatattcatggtgtatggccttttcttatgacagtaact

SEQ ID NO: 87297 - DNA, 613 bp, Oryza sativa
  Clone ID: PAT_MRT4530_86256C.1
aatttgtagtcatgtgccctcatgctttcatgttttgggactgtgttgattgctgttaggagccttcaaaagctgcatggtgttgtatttattttactaatttgccaatttgcatgtcttggtgagtattcaggtgctttctttatgactgatgatgccttccccatcttttcttttgctatttattggctagcttaatccagagtcttattctgctgtagcttttggggattaagttagtttttagtcgcatgtagtggaattgattgtcttgtttcagcaagcaagataaatttccactcttccaactgtattatttattgcaagcaagataaatttccactcctccaactgtattatttatctttatgtagagctcgccccctgattctcgagcgatgatcttctctcctgaaccactgaccatcacttagcccaacccacaacaaatctgctttgttctttcgcacttacgactggttacgttagttgtgcaggtgtgatgtctggtatatgaccagaagttgctctgtgtgtttgtagtagggatttgaaccgtgccttcttgtttaaatgtcattttattgctttcatggatgatcctaagtatcat

SEQ ID NO: 87298 - DNA, 1965 bp, Oryza sativa
  Clone ID: PAT_MRT4530_86257C.1
atggctttgacggccaaggagatacctcaaggcttccttattcacattccagaggtggaccacagtacttttgatgcttcattaccatcatctgccaaaggcacgcttcagaattcagaagggaagacttggcctgttgagctagagaaacttgatggccatgtatttctgaccactggatgggcgaagtttgtggaggacaattctttgagggaatatgagttccttctcttcagatatgatgataacatgcattcatggttttgccatttggtattgcaaaggacaactcaaggccatgagcttatttcaccacaaagtttccctgatcaacatgaagtatgcggctcgaaagatgggttagatgaacacttatcactgaacgggccaatggaggatgataaagctaatgcgatagctgaagtaatgagcatattggatgttgacaaagtgacagttgaattattctgtgcaatgcttgttttctataaatggaatgtggatgcggtggcagaagactttgacatatgtaggggcaaaccgcaaattcagaacctgtttctgaagcacaaacttcattttcaatttgatattgtaaagaggaaactacgaaagttcttccctccagatgattattattcttctccaatacttgagagtaggaagtgcagccttgaggaacctaagttgtctaaccaaccactgcaatgtgacttgacaacagagaagtgtaggctagttgatgagcatgatttatgtaatttttctcagaaaaagagaaggaagcgaggttcattttgtagtcctgaaactccacgaagatcaccaagactggcacgccagaataattctcatgacagtgcagagaatacattgaaagaaagatccgaagagcgacaaccatcaccagacagcatgatagatcaggcagagagcagatcagagcaagcatgtttatgccacgataaaacagacagtggttcattatttcaagactctaagaaagttaaaccagcacatggtgaggtggatttatgtgaagagcctcaacataatcaaggagaaaatgaagggaatttagatcaagtcaataataaagaaactgatgaagagcaaatagaaagaaatgcggtggagacctctgagtcattcacaaggagaggttgcatcaagtcatcgccagccagttgtgaggtgccagcatgtttgagaataaacgagttatctttgacatggaagcccgctgaacatgtcaaccctcttgagaaagttttacttgatatccaacgagacaatttcatgaagaccatctcacatgttcagggaatcatccgaaatcatccttcagacctactgactgctgatgtaattacagttgttgtgcagaaagaaatttttaaatggaattgttgtcttaaggatagggatgctcaaaggatagtgaatgcgttactggaacatgctagaaaaatcaaggagatgcacaattttaactcggagatgcggaaggaagagttttctgcaaagctgaaggttcatttgaagtggcagctcaaagaagtagaaactatatatacctcattggagttagattacaagaaagcaacgagtgatgataatattgctttctcaatgctgcatgataagaagaagaaattgcacaatcttcaggatgagataactggcttgcagcagtcgttggagatgaagaaggatgaaatgcagaaattggctcatcaagttgctgagcatgagagtgtatttcagaagtctttaatggaaagattaaggattaaggaagttatgaagggttatgagcaaactcttgctgaagttaaagttcagctaacttccactgaagttggatcaattgatatagaggcattggtgaaggtagagatggataacatgaccaaggaaattgaactgtctaaggaaagcctcctaaacatcactttccattaa

SEQ ID NO: 87299 - DNA, 6723 bp, Oryza sativa
  Clone ID: PAT_MRT4530_86258C.1
atgtcttcgatcgcgtcgcagctgcaagccatcaagtcggcggtcggcgccgcgcccgagcccgcacgacggcccatcacccggccgtccgtgctcttcgacgccaaggaggctgccgacatcgacctccgcgccatcctcccaatcgccctctctgggttggagcaccttgaaggcgtgaatgagagatttcggaggtacaggaacacactttttagcgagactagccttgaggtgaaccgtgagcagttaactaccaaagagaatgacaagctcaacaagtcaatctcctcctaccttcgccttctagctggctatttgcagctccaagctgccatgcagacacttgagtatcttatccgccgataccttgtgcatgtatacaacttggatgagttgctgctatgtgcattgccatatcatgacacacacacgtttgttcggattgtgcagttgattaacttggggaatagtaagtgggcatttcttgatgctgtgaagtcttctggtgcacccccacccaggattgtaatggtgcaacaatgcatccgtgataaggctgtactggagaccatctgcaactatgctgcaccaacaaaggaattccatcactcgaggacagttgtctgcttttgcactgcagtgaattgatcatgaaaaatatgttgcaagtatcacaccaagtatcattttgccctagtggaaaatatgctcacagttccactaaaactgatgctaaactttctaatcaagctatacccatattgttgtcggtattgacaactgtcgaggtgattgtcaaaaagcttggtgaatttgttaatccatatttggaagaaattctggatttggtggttttgcatccggagtgtgcttctcgaaatgatgaaaaattggatgcaaaagcagctgacgttcggaagctactgactgacaaagttccagttcgacttatgctttcacctttacttaatctgtacaatggtgctatcaaatgtggagaagcaagtctgtcgctgtgttttgaaatgctttctactctagttggtgctagggatcggctggctgtaggaacttaccatacaaaagtttatgagcattgcttggtagctcttgatctccgccgtcaacatttggactccttgaagaatatagctatagtcgagcaaagtattatccatgccattaccactctcacaatgaagcttacggaggctactcacaggtctatggtcaaagaaaaccttgaatgtaattggaaaaaaatatccaaaagagcttcgcaatgctatccataaatttcttgagaactccgaagttaactcaattggagaggattttgcttccaatttgttgggcttagtgtttgatgaaagcaagggcatgccaactgaaatttctgattctaacatttggttcagtctggaccaccctaaggctgaagtccgtaaatctgctctgtccaaaattgctacatccaatatctttaagaaccataatctaaatccacagaacttaatcaacatgcaagatgcaataatacacaatatgtatgatgatgatctaagtgttgttgaagctgccttatccatagaaggactagctgctgttgccagtcctgttagccttcttaaagtgtatgatgatctgctagccaattgcatcaacatcattcacaaaggtggtccaaaagcatcaaaagcttgcgacgtcgctgtttcatgcttggaaaagataattatagagtatcggttgcattatattgaacatgcaaaggacatcgctgcagtagtatttcgtctcctcattgttcaccctaagactgtcagggtaaacttgaaggccttagagctagctaagagtatacagtgggaattttatacaagtagttcacttgtatacaatgtgatcacaactgataaaatgaagggcatcagtccagagtctgtagcttccattaacatgaagaatatcaaagcattttctgaaactttccttgcgaacccaaataagcatgtggagtggttggctgacgctggaaaaggaagtgcattttcaagagctttgtttctactcataatattgcagtcactgcttgctcctgctgaagttttggacatgcaaatgagtctgtgccaagcttgtctgccagttctcaagaacaagtggtgtcaaataaagcccaaagatggtcgtgttggtgacgagatcaacattgataagctcgagaagtgcattacagaactggtgaagcatgttttcaataatgacacagaggcattgaatgccagaattcttattaatgatggtggaaatacattgcttgatgatttgtttctcttcttcatcacatcacctggaaaaatcatcttccagaagcatctacagtatctaatggttaactgcaccagggcaccttttcagtttatctccaaatactttgtagatgaaggtttttcagctggagttcgagtggagagtcttcttatgcttgcttctatttgttctcttctgcttggctttccttgtgttatgctcccacttgctcatgaaaataaggatgtaaggtcctctgctctcaaatgcattgaggggctatctttggtgtggcagcggttgagtgcatcactttcaagaaatggaaatggcagcaaattgcccaaatgcatgctgtccccgacgttcggtgttttccttgggtcactggttaaccaaaagaccatgatatcctcagatacaagatttctacctgcctatatttcatcactgttgagcccaagtcaagatttgatggtccctgaaaatcttcatgagagatttgaccagtcaacaaaagatgctatccttcacttcatcttgcgctctggtatgaagctctcttcttatggaaagttcatgattttgtcaatactgaaaggagtaggaagcatcttgtttgatgtagaagatgtgaagtctttattgtttgatcttctggatcggcgcaatcagtatcagagtggatgtgagtctaggcagatcatgtccacccatgaaatacaaatcttgtgcttgcttttggaggtaatgttctcggtttctaacagtgcaaatgttagctctgaaacatctgaagctttgctgaaagttttaaggattgatgtttcagctcaagatgatcctgttgttgtcatgccatgtgttactgcactgcaagctgttcaaccagtattctttgattttttgaagactgatactcaggaaaaagtatttgcaagccttatttctatgtttcgaactgaaaacactgaaattcgaaatgcggcacgagatgctatactgcgaattaatgttcatgcctccacagctgtgaaatttattgaattgattgcagcgcaaggtgacaaaaaaatgaattcaaaaagaataaagagaaaggaggatctgaatcatgacatattcaagaattttgatgatctatttggagtaaaacctaccgcttctgttcttgtatctcttctagatgttttatttcttaagaaggatgtgattcaaaggacatgtttactacaaccacttttccagttattatcgaaacttctttctgatcaatggattttagggatagtttgccaatataacaaaggccatgatgcctctcctgaaaatcctgatttatctaatttcatgatagaagcccagcagttggtactactgattctcaaagatattacggatacactgcaatccggtcaccaagatgaactgttcaactgtagagatataaacctccttattaattgtatacaatctgctaaagatctaggaactcgtaatcatgggttttcattgattgcttcattagctaaggctttcccacaagttgtttcagaaagtattgaggatttgttcgtcgctattggggatgcagtgaaacagttattcattaaagctttggttgatgttgtggaacacaggcgtcttactctcatggtttacctcttgaggacgttaggagagagaaaatgtctgagcaccgtgatcatgtgtctgttgcactcattggttggccgtatttctcattctcccgaacaccagggcgccctatccttgagagccatgccacaagagtgggagtatggtttggcagtcaatataaccaaccaatactcatataaattatggtttcattgtctttctaagctactacaagaaatcagggtgcatgagaaacaatatctgcttcctatgctccatttggcgatgcaatttatcctatttaagctgcaagatacagagttgatttttgaccttgattctgaggaagctgctaactctatccagggatctcttggagagcttatgaaggaggttgtcttgtgcgttgcggctgtcagagacaaaaaaactggcatttctggtgatgctctaaaagaacttagagactctgcaaatacaattctaaaagtaatcgcaggctggatgtgtgcttcaacgtatttcaaagggattagccggatgttagaacattcaagaagtgttgtgaaaagaaaggcgcttggaatattgtgcgaaactgcaaagggaaatagcttgatccagaagaagcaaaagaaagctagaaaattaaatcatagcactcctgctactgcacttcaagtggacaagagctctgccccttgtttcagtgagttgtgcgttaagattctagagttggttgacagagaggttgattcagacagttcagtgagaattgcagctatttcttcacttgaaacactggcaaaagaatatccctctgataatcctgcatataggaagtgccttgcaaaaatcactaatcacatcaactctggtgatgctgttacttcttctaggtcaatctacactgtaggctctcttataaacgtgctcgggtcaaaagcattacctcagcttccattgatcatgaaaaatatgttgcaagtatcacaccaagtatcattttgccctagtggaaaatatgctcacagttccactaaaactgatgctaaactttctaatcaagctatacccatattgttgtcggtattgacaactgtcgaggtgattgtcaaaaagcttggtgaatttgttaatccatatttggaagaaattctggatttggtggttttgcatccggagtgtgcttctcgaaatgatgaaaaattggatgcaaaagcagctgacgttcggaagctactgactgacaaagttccagttcgacttatgctttcacctttacttaatctgtacaatggtgctatcaaatgtggagaagcaagtctgtccttggcttttgaaatgctttctactctagttggtgctatggatcggctggctgtaggaacttaccatacaaaagtttatgagcattgcttggtagctcttgatctccgccgtcaacatttggactccttgaagaatatagctatagtcgagcaaagtattatccatgccattaccactctcacaatgaagcttacggaggctacttttaggcctctcttccttcgtactcttgaatgggcagagtctgaagttgatcggtccacatcaaagagaagtatggaccgtgcaattgttttctacaagttggtgaacagcctcgctgaaaaacacaggttagggcttgtgcttcccattagtgtcaggaactggcctgggatggggtccttgttcacaccttacttcaagtacctgcttgagggatctgtacaatatctatcagaagatgatgctttgatcagttccaagcaaaagaagaagaaggccaaacttgaagatgctccagtggaacagaaggataaattatctggaccaaaactgtggaatttaagggccctggtgttgaaatccttacacaaatgtttcctttacgacaatgaccagaagatccttgattcctccaatttccaggctcttttgaaacctattgtttctcagtttgttattgagccacctgaacattttgaatcagttccagaagctccatcagttgatgaagttgatgaaactcttgttttgtgcttggggcaaatggcagttactgcacggtcagatgttttgtggaagcctcttaaccacgaggtggggactaagcactatgctcgcagctcattctttttagataatggacaagtgctgatgaggacaaggagtgacaaagttcgccccaaaatgctcggtctgaaggttgtgaggcacatggtccaacagctaaaggaggaatacgtggttctcctcccggagaccattccattccttgctgaattactcgaggacgtggagctccctgttaagactctagcccaggagattgtgaaagagatggaaaccctcagcggcgagagcctccgtcagtacctgtgaggcatctgacgtctctgatctgcaacagtgaagtgaatatttatgcccttccgggtaaatcacttaagaaaaacatgggagttttatgcaaagttaacactaactggaacattttggaatatattcattttgctgtgtagtacaatggtggccatattcatggtgtatggccttttcttatgacagtaactgtattgtttgcggttttttgctctatggttttgaacgctgtatggcaatatcaccgacaggtatcacgtgtctgctaagcggatggccatgtatacgtacagtaaaatcaagttgtgaactccaattaggaattaaggatacgtcaaatttgtaggctgtact

SEQ ID NO: 87300 - DNA, 231 bp, Oryza sativa
  Clone ID: PAT_MRT4530_86259C.1
atgagttcatttaagtcgaagtcggaagctactgtcagggtcacggataagggtctgatgtccccgagttctacttggagatcaactgacctgcggtataaaagggaccccccagggggacctaaggcatcgaatcttatcgccaacacaaccaccacagcctacgaagtcggaacctacaggagccaagtcgtcgggaacctacaggagccaagtcgtcgagtgatctag

SEQ ID NO: 87301 - DNA, 535 bp, Oryza sativa
  Clone ID: PAT_MRT4530_8625C.1
ccagcgtccgcccagcgtccgccagcgttcgcacacgttcccacgagtcctcccacgagtcctgtgttgttcgccgcggcttcttcgcggtgaggacgaccagcccgccgacgacgccggacatcttgtacaacatgatgtagagcatcatcaaggcgaaggaggcgtcctccgcggacaccacgagcagcgagtgctccgcggcgtggtacgacgaggaggagctgatcaccgcggcgagccaccccccccacaagatgatggagacctcctaccagctcgtggactactgctgggacgacaaccagaccaccgagtgccgcacctactacaactgatgattaccaccatatgatggctgatatttctgctgttaataataataaactgctgtgaaaagatgattattcgtagaagacaacagagagtatgttggaatgatggtatttactgctggtagatggaggaaatgatgagaaaaaggatgtttacaccagttggtttggaggaataagtatggtactactctgctgat

SEQ ID NO: 87302 - DNA, 115 bp, Oryza sativa
  Clone ID: PAT_MRT4530_86260C.1
acggcacgaggcaagggctataggaataggccctgacgggaagtaccggtgtagaggatccctagtacacgcaaggcacggcccaagtactagagaggctacaacgagcacgctt

SEQ ID NO: 87303 - DNA, 1118 bp, Oryza sativa
  Clone ID: PAT_MRT4530_86261C.1
ctctaattcgagttggtgattttattacagtgtaaatcatggtgtacatgaaagatataagtatatgtctccagcctgacattgtatgaacatgggtacatgcatgctgatgtgagtgtttctggttatctgaatcgcaatcaaatggcatagatagattctgatcatggttacatagaaaaaatgatgcttacattgcctccagatagcttcattgagatcaagcagaaacgcttgcattctctgccacgatgctgtcaagtaatgactcgcatgcgtcttccagcagatccagcaccttttcaaatccttgagggcctccataatacggatctgggacttctgactcagtatgacgcttgcaataggaacacatcaacttaaccttcttgggtccactgtctgggaggggttccctgtgtctccatctctcaaatgaactgagtaggtcttctgcacattgcgaaacacagatgagaggagttgagagagtaccataattctgcctatccattgcaaggataagatcaaaatctcggaagtcggagggtttgacaggcctggatatggaggtcacctcaattcccctcttctttgaagctgatctcatccttgagtctgccttgttaccctcatggtaaccaattgtaccagcagagtctatgagaaacttggactcaagcccacgcttgctcacgaggttccggaacacagcctcagctgcagggctccgacagatgttgccgagacagacgaagaggacggagaagggcttcgcctgcgccccctctgccgccgcggcgctcgcctccgcagccatctccccctccgccgccgccgccgcagccgcaaatcgaaggcgagggtttagaaacggatcgcgaggacgagcctggccgagacccgagctggagatggagattgtagtgggaaaaggtgaagcggtgcagtgacgactggctgccacaagtggaggccgcggcacgcgcctcctaaccgggtatcgcgttgtcgggttcggagccggagatgagcaggcggcggagctcgccgcggctgctccggccatggccgccggcgccacgagctcctccctctcgcgtgcgcgggggaagctg

SEQ ID NO: 87304 - DNA, 1531 bp, Oryza sativa
  Clone ID: PAT_MRT4530_86262C.1
caatcagaactcttttgctccaaaattaactttcatacattaatattctcaggtacccgatttctacagtgagacgatgtagtactccacagaagtactcattggcaaacacagacaactacaaacctattatttacataatccgtcatgctgtgtacagatatgccttatcaagcaaacgatattcccactttttctcaagaaagaggaagaaaaggtcaaggtaaaacgtctccaaggttaaccaatactattccaagtgcctgggttcagtcacatcagttctacttatgctcctctgcgagctcgatcctttatcttgtttgaacgccttcttcaagaagaatgccattgcaagctgggccccaaggttagatcggcctcgggatagacaaacaatgcttccgataagcagaagtccacttgcaatcgttgcccgagatgacttcttccctggctgttggcgtgatgaagttcttgcaaaatgtgtaggaacaacatttgctcttgtatttccttgaggatgatgatttgcatctacatcagtctccaaggcctgaggaaacttcttggtaagtctttgcatggtcagaattgatattgatgaaatgttacgttgaggatagcgacgtagtgcactgttcattttacaaatgtaattccaaatgcccttggcaaatgccagttttgccatctctatgttcatgccgttgtcttcatgatgcagcactgtaattcggcatgcatcccttccagggattttcctaatgcaccatcctgatctcaaaagttgcactcgaacaaatttccgctgtcttggtgcaacaggatgctcacattccttcaccaaacagtagaaagacttgtcatttccttcccaaactcgccatgccaatatgtactcccttggtgttaagagcggaaacttcttgattgtacgccctatctctattccactattttcatcaaactgtagctgctcatgctttatcacagtgttatcccactccattctatactcattatccatgtaaaagtccctcaatagctctgttgagcatctctcatatgttgtcacactaagatatctaggagggccttccatgggcttgtcgcaccacaccctgtaggagacgtcatcgttccctttggcgaccacctgctgccacccctccctctccggctcacgcgcggccaccccgaggttgcccaccagctcccgcagatcgccctccgtcacaaggccatccatccctgcggcggagcctggggcggagtccgcggtgacgacggcggcggcggcggcggaggaggaggagacggcgtcagcaggtcggaggcggcggcggaggcggaggcggcggaggaggaggacggagaggtgggaggcgaggagcaggaggagcgccgcggcggtggcccacccgccgccgcgggcgacgggccgccagagctcggcgccgccgccgaggaggaggagccgcggggcggcggcctccggcggcggcggcacggcgcgccccgcggccat

SEQ ID NO: 87305 - DNA, 278 bp, Oryza sativa
  unsure (1)..(278): unsure at all n locations
  Clone ID: PAT_MRT4530_86263C.1
aaacctccttcttcttctccttcctcactgcaacactcttcgnggtgcaggcagccacagccatggcaaccatcctcgccgtgggcgccatggcacattccaggctccgacgaccctcccggggcccctggctcctacgctancggttcgccggaacgtcgtgtcgttcgncggccgacgcaggggcgcgcgctgggaaggcttgcggtggtggtcgcggngngctcgcgacgacgccgnagctggcgcagaaggtgtcgtagagcatcaagcagcag

SEQ ID NO: 87306 - DNA, 1455 bp, Oryza sativa
  Clone ID: PAT_MRT4530_86264C.1
atgggaggcgttcgccccaccttgtttgatgcacgcaaggtgtttgttagaatgcttagcagcggtgtaggcggcggtgacgccctggtggacaccgctgaccctgctaagcgcctgttcaagctgatcatctcctgccggaaggcctcagcggtcgagcacgagctcgaccacagcggcgtccgcgtcacgcccgacgtcgccgagcgcgtcctggagcgcctcgacaacgccgggatgctcgcgtaccggttcttcgagtgggcgcgcaggcagaaacgcggcggctgcgcgcacaccgtccggtcgtaccacacggtggtcgcgtccctcgccaagatccgccagtaccagctcatgtgggacgtcgtggctgtcatgcgccgggagggcgcggtcaatgtcgagacgttcggcatcatcatgaggaagtatgcccgggcgcagaaggttgatgaggcagtttacaccttcaacgtcatggagaagtatggcgtggtacctaaccttgccgcgttcaatagcctgcttggcgcgctgtgcaagtcaaagaacgtgcgcaaagcacaggagatctttgacaagatgaatagccggttcagccccgatgccaagacctatagcatcttgcttgagggatgggggagagcgcctaacctcccaaagatgcgagaggtctatagtgagatgcttgacgctggttgtgagccggacattgtcacctatggcatcatggtcgattcactctgcaagacaggccgcgttgaggaagctgtccgtgtggtgcaggacatgacctccaggggatgccaaccgacaacttacatatacagtgtcttagtgcatacttatggcgttgagatgaggatcgaggatgctgtggcaacatttttggatatggagaaggatgggattgtgccagatattgttgtctacaatgcacttgtctctgccttctgcaaagcgaaaaaatttgagaatgcctttagagtccttaatgatatggagggccatggaatcactacaaactcaaggacctggaacatcatccttaatcatctgattagccttggaagggatgacgaagcatacaaggtattccgccgcatgattaagtgttgccaaccggactgtgatacttacaccatgatgataaaaatgttctgtgagaatgacaaggtagagatggcactcaaggtatggaagtatatgaggttgaagcagtttctcccaagcatgcacacgttctctgtactgatcaatgggttgtgtgacaagcgtgaggttagtcaagcttgtgttttgcttgaagatatgatagagaagggcatcagacctcccggttcaacatttggcaagctaaggcagctgcttttgaaagaaggaaggaaagatgtgcttgactttcttgttgagaaaatgaacatcctgattcaggaacctttgtttgattga

SEQ ID NO: 87307 - DNA, 603 bp, Oryza sativa
  Clone ID: PAT_MRT4530_86265C.1
ttactttttctctcctattctactccttcctttcttcttcatgtcttcttccacaatggcctgtacctccccatgaccccacccatcgcggctctcgtggcgccaccgccggagtgcgacaacacgcaggacctgccccggatgttcgtgttgctcaccccgaccgaatgcaacacgtcgctcacctacacgcagtggaaggaggcggacgcctccatgcgccaccgactctcgctcaatgctcgtgccgtgctcggctacaccgcgcagaggatctttgcgcggttcacggcagtcaccaagctcacgctcagctgcgtcggggctccgggacagacagcctctccgacgacgcggcatgccaagtggccatcgcattgctgtccgagcggctcgccaggctcaagctccgtggcctccggcacctctcggacgacagcgttcacggcgtccggctgggagcaagagctagagagtggagaccacgacgagcggccaagcattggcggtggcgtgggagaggcccacgaggccatggatgcagccggggctggagacggcgaggagcagactgggggagccgatgaggaagggagttggtga

SEQ ID NO: 87308 - DNA, 424 bp, Oryza sativa
  Clone ID: PAT_MRT4530_86266C.1
cgaaaaaaaaaattgtccgtgcaaattaacaaatgagcaaatcccaaactggcttaagctagctagtaggctagtagccgtggcatttggacatgatgggcgggtcggcgaacgggccgtcgagcacgccgtgcgccatgatccggtacaccgcctccgtcatgtgcaggccgtcccacgagatgcgccgcgacgggtccgcgcactgcgtcgcgccggggtcggagcagtgcacggtgaagttgccgttgtacggcccgccgccggcgcattacgcggtcagggcgtcgtcgaacccgctcgccgcggggttcgacacgagctccatcacctcgccgtagtagtcggcgtaggcgatggtgacgcccgggtgcgcggcgcggagctcggcgaggcggcggcggaagagcgcgttgtggagggc

SEQ ID NO: 87309 - DNA, 485 bp, Oryza sativa
  unsure (1)..(485): unsure at all n locations
  Clone ID: PAT_MRT4530_86267C.1
cactaaggcaattaattaacagaatactaataaaaattgtttgtaaacttggccttcaatttcccacccactcgcgagctaaccgcattgaaaannccncccgccccaaaatctccaatccccaactcgccctccccttgccttggaaaatcttctactactccccccgcgggttcctgagccccgcgcgcgcgcgatcaggaaccctcggggtactcggattccgcccgcacgggggtcgacgaattccgcaacccgttgtttcttttttttttcttttcctcgattggtttttctgcgcgattccgattccggcggaattttttttctttttggtctccctgttccatctgaactgcgcactgttcggtagagaaattgtttttgggggcttttccaaccaattctgcagcgattcccgcagaaaccttttcattatcaaaaaaatctggtctcttcttcttttcttttctcatcggggggaa

SEQ ID NO: 87310 - DNA, 1842 bp, Oryza sativa
  Clone ID: PAT_MRT4530_86268C.1
atggaggctagcccgacacaagatccggtgggagatctggcctggaaggcgttggcgacagctcgaagggctcgaaggcagcagtggtggttgaagatcgacggtagcaaaatcttgccgcgtccggacgtgctggtccgagcccccggcgacggtgggagcgggtgcagatgcagccgggtgttgcttccggcggcattcactccctgtccgcgtccgactcccttcaggggtccgggccttgccatcccgacagcatccgcggcggcggcggatcacagggccgcttcggcttcagattccgcggacaaggtcccggtcgatggcacctactgcggcggagaggtcgagcaagggaccggcggccgcgttgggcatctaccactgggagttcgcctgtagcttgagcaggttgttgtcctgcgtcacgtggcaaagcgctcccacctccagcccgccgccgccacggctgttcgttttgagaacagtagcttacatgaaaagatactacacaagaaacttggcaagctagagacacgtacgccagtaacaaccaccatcctttcaaagagatggcgtgatcttcctcgatgtttgcccacatcctataaccttgctgtcgatgacatcctcccaccacggtatcaccgcctcaaacgccttaacatggaggctaaggcggcctatgaaacagagaagattgtacacaaactgaccgacatctatgccatcaaggctcggcatgagcgttggatgaccactatcagaccactcacggccatcctagaacgctacgagcgccgggccatgagacgctatgtcaagcaggtgaatgcatttcttctagctccaaagaatgtgcgtcaacgctggcctgtccagaagctgaggctccaaacgctagggcgttggcatgagaatattgatgaatggatcaccacagccattgccaagtggggtgtcgaggattttgagcttgttgtcgatggcttttgcctgggctatgacctcaagcagctggatacataccggagcttgcggctggagcggcttgcgttgtccaattgcgaggctgtttgtgcatggaactgcttgacagtaaagaggctcaccaaactctcattgagtgaaggttcatttatgggattgctcaatgatatccttgcaaactgcgtgcagctaacagatttcagggtcgcattttcaagttattaccgagccaaagtccgtatctatgccccatcatcgaaattaaagaatctgcaagtggacaggcatgtgaggttggactacattcaaactgaagataacgacatagatgatgaatctggtactaagaggacatatccaccgagcaaattcttcaaaaagatcccaaaactagattcccttgttcttcagttcaaagggacacagtcagctcaagaagctcttcatcgcaaatgtcccagtgaactgggatatactgtggattctcctactgctcgatgcaacgccagccttggaattgacaacaactcagaagacagaactgcaggtgatctctgcgccagcctcgacgtcggtgtgcagcaggatcgataccgtcacctgaaggagctcgtcgtggccggcttcgacggactgggctggcaagctggctttgtcaggctgataatgaagaggtcgccgttgctgagacgcgttcacctgcttgacggggaggtcagggatgacgagggggagctgggggatctgcagatcgtcccacgccaccgggagtggcacgagtgtgagcgagctgaggtgctcgatgacctcaccactgggtttcgctggcctcctcaaataattctggaataa

SEQ ID NO: 87311 - DNA, 1190 bp, Oryza sativa
  Clone ID: PAT_MRT4530_86269C.1
tccgcgggggaacaaacacgattggtgtatccactagaaatctcttgtatgagctttctgaaactttcttctccttgtgcacttttgtctgatatctttgatataaattgttgcaaactctcaaaatgtgatcttctcattttaatttcaagctttcttcttttctggggtcttagagtatttttgttcaagaaacagagcttttgagctactagatttatctggagtcatgtgtagacacaatgatactggttttgttctgctttgtctgattggtgactgaatagaagttcagatggccattgcaggcttttactgctaaaccagcaatatctccatggcactccattgtcatggccagcttttctgcaatagagtttggagaaatatctgctactactttattgtgattagcatccttctccttaggcaatgcacgtctgatttctgccactatttgaaagcttatattacatgtgtacaataaatcttgtactgcttctcctactttcttgtcttgtgatgctcctcctactttcttttttagttgtggtttaacagtctttacaacagctttagggagttgaacatcagaacctaatgtaccaacttggaaggacatacccactgcctcattaattttgctagacaggcaactgatgaactcatcttcttcaaataaatttggacatttggctgcttgaaaatcatttgttaatgtcttggatatttttgagaccggcatattcataggttcagcgagtgaatgttttgtagggctagttttattctgtggacttccaacctgtggatcaagctcaccatcaaggaacctttgcatctttttaagtacacgaccttgctccttcgaacaaatgaaatcatttgccttcaagcgtattgtatattgaggacagcaagtacgttccatctcaagtttgtaaagaaaacaaccagatctcctccacccacggtcaagaagagcttgatagtcatcagctctcaggctgttagcccatagaccgtgcgagatgctcgtctggccggtggatcggcagtagccgcaggccgccccgcgccggccgccggcggcccccaccgactccccgccgcaccccgccaccggggccggaggccgaggcggccccgctgctgctggcgccgtcggcacatcgcgcggcggggcgtcg

SEQ ID NO: 87312 - DNA, 634 bp, Oryza sativa
  Clone ID: PAT_MRT4530_8626C.1
gcacgagaaccggctcacagatggacaggagccaagaaccaccgcacgccgccgcggcgaggggcgccgtggaggtcagcctccgtcggttcgacctcgccgacgtcgacgccatgatggtctgggcgtcggacccccaggtcgccgccgtctgccgctgggagccgtacgagtcgacggagcccctgctcgcctacctccgcgacaccgtgctcccgcacccgtggttccgcgccatctgcgtcgccgccgccttcgacggcgacggcggcggcgacgaccgccccgtcggcgcggtgtccgtgtccccgacggcggacgcgtgccgcgcggagctcgggtacgtggtggcgcgcgcgcactggggcaagggcgtggccacggccgccgtgaagcgcgtcgtcgccgcggtgttcggcgaggtggaggggctggagcgcgtcgaggcgctcgtcgacgtgcggaacgcggcgtcgcagcgcgtgctggagaaggccgggttccggcgggaggccgtgctgcgcagctactgcgtgctcaaaggggaggtcagggacatggtcatctacagcttcatctccactgatccgctcgtcagctgatgctgatgcatcatccgtgtaattagttaacc

SEQ ID NO: 87313 - DNA, 3024 bp, Oryza sativa
  Clone ID: PAT_MRT4530_86270C.1
atgtcaacgacaactagtgggtcctcaagggaacgtactcctaggacaaggaacaaaattcctaaggaacggttccgcataacagcggtggacgccgtagggttgccgacatctccaaggaaaatattgagccaatttaggtctatctgcggggtcatagggaggcagaaattcagtattctgcaagacgacttcaagctcatgccggccacagagaaggacattgcttggctaacgttcaaggagagctttgattatcctgcagagcatgaggaccgtctcaggcgggctgctttcaaggttatgggcactgcttggaagaacttcaagactaagctagtcggcgagttcgtctacaacccggcaaatccagatccaagagaaaaatttccttggatcacggaacagaccaggaaccagcatccgcaccggcttggtaccgccggatatgccggtaaggaagaggaatggcagcgtgaggatgaagaagcggaggaatcgtgcacaccgctcgtgtttggcgatatcccacaccctcgggctaggaactgggccagggctaggtaccagaaacatgatgatggcacaatcttcatgccaaatgcagaagatcaacgagtatacgaagctataaaggagttggttgccgagcaacaagcctcgcaagaggcctgctctcaaagacgcgaggacgacctcctcacgaaagcgttgggcaacaaggaacaccgtggacggacacggggcgttgggtcttctgttccctggaattatggatttccagactacgcgtggcagtacaagaagcggacttccaacaaggcggagaaagatgcacgccttgaagccaagatccgggagtcgatacgagctgagctgacatctgaattcgacgaaaagctcgagtcgatgagggccaagattaggcaagagatccgagaagagcaacagatcccccaggccgccgctgctgctgcgcacaaagagttaggaagtcccaccgaaaaacgtagcagttgcgcatcaactgagttggcggaaaatccaacattggtcgacagcgccgtcgaccacataacggaaccaacgagctgcaccctcacagttagggtaatgccgaccttcactgttctagcagccgagggacttgcgtacaagccgaccccagagacaagagtgcatggagcgcaactcagggccgactgtgcaaaagttcaagtcgactcggtgaagcccggatacaagctgttccctctgaagtatccatcgaacgacgaggtcctctcactaggaaatgcccgtggtaccttcatccaatggcccaaggacctcattgagatcagggttacagcgaggccaaccactgcaccaggcggtcgtccaccaaagagacccgcctctgctccttcagcccctcctgctcaagatcgtcatgcacaatcttacgatttgcagttgcagtatgacacggattttggggaggaccgaacggaggccgacagcaaggcgattcatgaacccccaccgatgaagaagagcaggaaggcacactcctcccctcagagaattactctcgataaacccgaagcaaaggggagaggaaggggaggaaaggtgcaggcctcgcttctagctccaagaaagctagatctgggcaagggccaggaagagactaagggcaaagaggtcaagaagaaatacgtcgctccacaggagttccaactaggcatgccattggttggagatgacgtgcttgccgcaatgggcaccgcttgcaaggaccttcacttatactacatggagaaatctaacgccaggaagccaagtaaagctaccgatatccttggacagcacgatggaaagccattccttgatccaacaaattatatcgtggtcgacttcaacgatcttttcgacctctacaggctccgagtggtggacacaagcctccttaagtgctactccttgttaagttggcaatggtgtcagaagcatgcaccggaagttgccttccttgatccacaagtggtcactgtcacaaatctccagaatgaccgtcaaggaatggtcaactacatctacgacaccttgtggtcccgccgagacaaggagtacattatgtgtgcctataatcaatatgcccattggatccttctggtcataacacctaaatggagtacatgtcattacctgaactccagaattgataagaacgcatatgaatggaccccaattcaactagcgatagatgaagcgtgggcccaatacgtgcaaagaggaggcctcaggaagacaggacatgacaccctcatccacaaaaaagacttcccggtgaagcaacaaataggtgaccagtgcggattccatgtgtgccacaacatgcgacttctgtatagagaaaaggtgaagactttggctgagtttgagggcacaataaccaagtctctgactaccagctttgaggaggccatcccaaagtctgattatcctgaccttgactttggatgcttccttcgcattgtcaacagcttgaaccatgtcattggtaaaagaaaaggttgcaacatcggctggaatagtggcgtacggcgggagaaagggcagcgacggcggcggcaccggctcggcaggggtgggaggggcagcgacgccctcccctccgccagatctggcgggaggggaggcgcggtggccgtggacggcatggaggcagagacccctacttcccggatgcgacagcccctacttcccggtggtccgactgtgggaggggaggcggtggtagcccggcggcggagtatcctcggggcaatggtggcagcggtggcgggtctggtagatggcgatgatcccgatcgcgggaagcccaatggtaaggaggtgtcgcttttggccaagctgggtgtttactcagtgaaggttgagcagccttcagcgtcgttggtgctttctcaaggccgaccacaatcaggtgccctgtgttcacggtggtggtggtttttgttggttccacctcatgactga

SEQ ID NO: 87314 - DNA, 854 bp, Oryza sativa
  Clone ID: PAT_MRT4530_86271C.1
aaaatcttcttttggctttgggccgaaagtcggctcaaaaacctctcttttctctctcctcggcccagccgacccagtccgcagccgcgcgcgcgcgttcggtcgctgacaggtgggtcccacctgtcaggtcgtcgtcttcctggcgtcggcctccgcccgaaaccctagccgccgccgccgccgccgttcctttccaaatccggccgcccctttccgtttccggccgaatcaatagaggggaaatgatctccgggatctcctcgaccttttctcctttggaatcttcggctaaatcggtttggaaaccgatgggttcgaggtcgattcggatcggctttgagcccgatctttccttctcgtcgccggtcgccgtgggccttcgccgccgcctccgagcccctttaaaaggaccccccgagctctcctctacccgtcgcccccttcgccttcgcctctcgtcgtcggagaagccctagcgccgtgcgccctagctcagccgtcgccgccgtcgctccagccgtgcgccgccgccgttccagccgtcgccgtcgctcgggaaggccaccgttgggatcgccaagttgccgccgtcctcgtccgttgcttcgccgccgtcggagaccgccggagcaccatcgccgtcgtcgaaccgaagagctccgccgcttcttcttcgtcgccgccgccgtccgttgggtttccgccgtcgttttggtcgccggtgagttcgccgtgccgtccgctacccgttggtgccctccgtttgcgtcctcgtgccgccgttcgccggcgagtgtgcaccgcccgagccgtccgagccgccgagccgccgccgccgatgatgacgtcat

SEQ ID NO: 87315 - DNA, 2409 bp, Oryza sativa
  Clone ID: PAT_MRT4530_86272C.1
atgtcgacgacaactagtgggtcctcaagggcacgtactcctaggacagggaacaaaattcctaaggaacggttccgcataacaacggtggacgccgtagggttgccgacatctccaaggaaaatattgagccgatttatgtctatctgcggggtcatagggaggcagaaattcagtattctgcaagacgacttcaagctcgtgccggccgcagagaaggacattgcttggctaacgttcaaggagagctttgattatcctgcggagcatgaggaccgtctcaggcgggctgctttcaaggttatgggcactgcttggaagaacttcaagactaagctagtcagcgagttcgtctacaacccggcaaatccagatccaagagagaaatttccttggatcacggaacaggtctgggaggaattccatgcgaagaagtcgagccccgagtccagagctagaagcgaggcatatcgcttgctccagaccaggaaccagcatccgcaccggcttggtaccgccggatatgccggtaaggaagaggaatggcagcgtgaggatgaagaagcggaggaatcgtgcaccggcttggtaccgctcgtgtttggcgatatcccacaccctcgggctaggaactgggccagggctaggtaccagaaacatgatgatggcacgatcttcatgccaaatgcagaagatcaacgagtatacgaagctataaaggagttggttgccgagcaacaagcctcgcaagaggcctgctctcaaagacgcgaggacgacctcctcacgaaaacgttgggcaacaaggaacaccgtggacggacacggggcgttgggtcttctgttctctggaaatatggatttccagactacgcgtggcagtacaagaagcggacttccaacaaggtggagaaagatgcacgccttgaagccaagatccgggagtcgatacgagctgagctgacatctgaattcgacgaaaagctcgagtcgatgagggccaagattaggcaagagatccgagaagagcaacagatcccccaggccgccgctgctgctgcgcacaaagagttaggaagtcccaccgaaaaacacagcagttgcgcatcaactgagttggtggaaaatccaacatcggtcgacatcgccgtcgaccacataacggaaccaacgagctgcacctcacagttaggggccgactgtgcaaaagttcaagtcgacttggtgaagcccgaatacgagctgttccctctgaagtatccaccgaacgacgaggtcctctcactaggaaatgcccgtggtaccttcatccaatggcccaaggacctcattgagatcagggttacagcgaggccaaccactgcaccaggcggtcgtccaccaaagagacccgcctctgctccttcagcccctcctactcaagatcgtcatgcacaatcttacgatgtgcagttgcagtacgacacggattttggggaggaccgaacggaggccgacagcaaggcgattcatgaacccccaccgatgaagaagagcaggaaggcacactcttcccctcagagaattactctcgataaacccaaagcaaaggggagaggaaggggaggaaaggtgcaagcctcgcttctagctccaagaaagctagatctgggcaagggccaggaagagactaagggcaaagaggaccttcacttatactacatggagaaatctaatgccaggaagccaagtaaagctaccgatatccttggacagcacgatggaaagccattccttggtccaacaaattatatcgtggtcgacttcaaggatctttttgacctctacaggctccgagcggtggacacaagcctccttaagtgctactccttgttaagttggcaatggtgtcagaagcatgcactggaagttgccttccttgatccacaagtggtcactgtcacaaatctccagaatgaccatcaaggaatggtcaactacatctacgacaccttgtggtcccgccgagacaaggagtacattatgtgtgcctataatcaatatgcccattggatccttctggtcataacacctaaatggagtacatgtcattacctgaactccagaattgataagaacgcatatgattggaccccaattcaactagcgatagatgaagcgtgggcccaatacgtgcaaagaggaggcctcaggaagacaggacatgacaccctcatccacaaaaaagacttcccggtgaagcaacaaataggtgaccagtgcggattccatgtgtgccacaacatgcgacttctgtatagagaaaaggtgaagactttggctgagtttgagggcacaataaccaagtctctgactaccagctttgaggaggcaatgatgaacacttattatgcaactgtgatgatgtaa

SEQ ID NO: 87316 - DNA, 651 bp, Oryza sativa
  Clone ID: PAT_MRT4530_86273C.1
ctatagcgcgcccaggaacgcgtccgcgcgtgacttcgacggggacagcccggactccgggcttcgcctctccttgtcgccgcccgcgccggccgtggcgtcgtcgtcagacgccaggaggcagtgcagctggaggctgaagcagatggcgagggcctcgccggtcttcacgcggagggactccacatcgagggcatcgaggcgggacaccaccgggttgaactggaagggcacgtcgaggcgctctgcttctttcgtgagcgccatggccgtacgagataaattagcagcagctgcagcagcaggagctcgcggccgcgcaggaggagctccccgccagcctcctccccacccgccggtggcctgctgccgcatctcagcgccggcgacggcggcaccaggcgagcgcgtaggggcgacggcagcacctcgtgggtggagggccgccggcgacgggcggagcggctgccgcatcccggagcctcggcgcggctgacggcgggagcttccagatctggtacatccctctctctccagcctctccaccgcctttggggactcactttcgccggcggcaagtgacgatgacgatgggcggaggtcgttccggaactccggatgggggcgggagttcaacccaaacgtgatcat

SEQ ID NO: 87317 - DNA, 2295 bp, Oryza sativa
  Clone ID: PAT_MRT4530_86274C.1
atgaagttcagcaggttggtaagtgattacaagacgcctttgtacgctggatgcaaagcaaaacacactaagttgtcagttaccttggacctaatgaagctgaaggcaagtagtggatggacagacaagagtttcacagatcttttaggaattttgaaggctatgcttcctgttgagaacacattgcccgagacgacatacgaagcaaagcaggttctgtgtccactggggttagaggtccgtagaattcacgcttgtcccaacgactgcatattgtaccacaagcaatatgcggacttggatgcttgtcctgtctgcaaggcttctcgatacaagcgaaagaaaagtgctgacgaaggaaataagtcaaagaggggtggtccggcaaatgttgtgtggtatctacctatcattgatcgtttcaagagaatctttgccaacccgaacgaagcaaagttagtacgttggcacgccacggagagaaggaatgacggtccaaggcaacccggcaatgatatcgatgtatttctagagcctgttattgacgatctggagattcgttggaaagaaagtgtggaaacatgggatgcatatggtcgggagaacttcaagctaagagttctattgttctgcaccattaatgactaccctgcactcggtaatctttccggacaaactataaaaggaaagaaggcatgctccgattgcaaggaacatacacgaagccggtggctgaagaaatcacaaaagatggtatacatgggtcaccagaggtggctcccgctacgttacgcatttagaagaaagaagaaaatttttaacggtaagagagaacttcagcctgctaccaaagatttgtccagagatgaggtccacaatatggtcaaggacataagcaatgagtttgggaagaaaagaaaacgtagcaagacaaaggagaagggtatgtggaagaaaaaatccatattttggcggctaccttactggaaagatcttgatgtccgtcattgcattgatctcatgcatgtagaaaagaatgacatgaatattcgcagtgaactccagcccatacaagatgcagagacaggtaaagtgtacatccctccagcctgccacacactgtcgaaggatgagaagatcgcaatgttatcatgcttgaaggatattaaagttccatcgggctattcagcgaggataagtaagtatgttaaattggacgatctaaaacttgttggaatgaagtctcacgactgccacgtgctaatcacacaaatcttgccagttgctatcagaggcattctaccaccgaaagtgcgtcacacgatccaacgtctgtgtgccttcttcaatgcaattggacagaagcaaacaaaactatgtggcccggcttttctaagggaaatgtggccgtttgaaaggtacatgggagttctgaagtcgtacgttcgtaacagagctaaacctgaggggagcatcattgaaggttacacgaccgaggaggctattgagttctgtgtcaattacatgtccgatgccgatcctatcggagttcccgcgtctcgtcacgagggaaggttgtcaggtgttggcacaatcggaaggaaaagaattaggcccgatcaagcgtcgtacacgtatgcttattacgctgtgctccaacatatggcagaagttggcccatactttgaggagcacttagcgaaaatccgagatgagaacttggggcgatctgatgcatggattaacagagaacataattctcggttcaacgaatggttcaagaatcgtgtgacaatgtccacggatgtcccaaatgagacaaccgtcaaacaagatgacaaaagcacagtgcaaaacaggagtgtccgtatagatgcattccaggatcaagttgggtcaaacacatactacggccgcattgaggagatatgggagctaaactacgtcaagttcaaggttcctttgttccgctgccgttgggttaatctacgcactggtgtcaaagccgacaagaaaggtttcactttagtagatctatctaaggtgggatacgccgatgaaccatttgtacttgcgaaacaggtcgagcagatattctacataaaagacccttcaaacaagaagatgcacatagtgagggatggaaagcgccgaattgtaggagttgacaacgtcgttgatgaagaagaatacaaccataatcttcatgtaagacctcacattgaccttgacgatgatccccaagagcctgtggcatatgctcgttcagatgatacggaaggcataaccttgtga

SEQ ID NO: 87318 - DNA, 2694 bp, Oryza sativa
  Clone ID: PAT_MRT4530_86275C.1
atggcgaccacgatggcaaccttcccgagcgatggcgacgactggagcgacggcgaagcacggctggagcgacggcgacgactgcggtacgaggatgtgacagaccgccgccgcctcctcaacgacgacccctaccgagcccggcgacatccttcctcatcgtcgtcgcctcctcctctccgacgcctgacgccgcctccaccgagcacgccgcggcctccaccgaccccggcgacgccctccaccgagcccggcgccgccgccgccaactcctccttcgccgactcctccctcactgagcccgaggccgccgccaccgaggcagccgcctccaccaagcctccgacgcccgacgccgcctccatcgagcatgccgccgcctccaccgagcctgcgacgcccaacgcccgacgccgacccccagggaacaaaatccctaaggaacggttccgcataacagtggtggacgccgtagggttgccgacatctccaaggaaaatattgagtcgatttaggtctatctgcggggtcatagggaggcagaagttcaatattctgcaagatgacatcaagcacgtgccggccgcagagaaggacattgcttggctaacgttcaaggagagcttcgattatcctgcggagcatgaggaccgtctcaggcgggctgctttcaaggtctgggaggaattccatgcgaagaagtcgacccccgagtccagagctagtagcgaggcatatcgcttgctccagaccaagaaccagcatctgcatcggcttggcaccgccggatatgccggtaaggaagaggaatggcagcatgaggatgaagaagcggaggaatcgaacacgccgcttgtgtttggcgatatcccacacccttgggctaggaactgggccagggccaggtaccagaagaaggatgatggcacaatcttcatgccaaatccagaagatcaacgagtgtatgaagctataaaggagttggttgccgagcaacaagcctcgcaagaggtctgctctcgaagacgtgaggatgacctcctcacgaaagcgttgggcaacaatgaacaccgtggacggacacggggcattgggtcttctgttccctggaagtatggattaccagactacgcgtggcagtacaagaagcggtcttccaacaaggcggagaaagatgcacgccttgaagccaagatccgggcgtcgataagagctgagctgacatctgaattcgacgaaaagctcgagtcaatgagggccaagattaggcaagagatccgagaagagcaacagaacacccaggccgctgctgttgctgcgcacgaagagttaggaagtcccacccaaaaacacagcagctacgcatcaactgaggtggcggaaaatccaacatcggtcgacagcgccgtcgaccacataacggaaccaacgagctgcaccctcacagttagggtgatgccgaccttcacggttccagcagccgagggacttgcgtacaagtcgaccccagagacaagagtgcatggagcgcaactcaggggcgactgtgcaaaagttcaagtcgactcggtgaagccggaatatgagctattcccactaaagtatccaccgaacgacgaggtcctctcactaggaaatgcccgtggtaccttcatccaatggcccaaggacctcattgagatcaaatggcccaaggacctcattgagatcagggttacagcgaggccaaccactgcatcaggcagtcgtccaccaaagagacccgcctctgctccttcagcccctcctgctcaagatcgtcatgcacaatcttacgatgtgcagttgcagtacgacacggattttggggatgaccgaacggaggccgacagcaaggcgattcatgaacccccaccgatgaagaagagcgggaaggcacactcttcccctcagagaattactctcgataaacccaaagcaaaggggagaggaaggggaggaaaggggttccaactaggcatgccattggttggagatgacgtgcttgccgcaatgggcaccgcttgcaaggaccttcacgcatactacatggagaaatctaacgccaggaagccgaataaagctactgatatccttggagagcacgatggaaagtcattccttgatccaacaaattatatcgtcgtcgacttcaaggatctattcgacctctacagactccgagcggttgacacaagcctccttaagtgctactccttgttaagttggcaatggtgtcagaagaatgcaccagaagttgccttccatgatccacaagtggtcactgtcacaaatctccagaatgaccgtcaaggaatgatcaactacatctacgacaccttgtggtcctgccgagacaaggagtacattataattgataagaacgcatatgattggaccccaattcaactagcgatagatgaagcgtgggcccaatacgtgcaaagaggaggcctcaggaagacaggacatgacaccctcatccacaaaaaagacttcctggtgaagcaacaaataggtgaccagtgcggattccatgtgtgccacaacatgcgccttctgtacagagaaaaggtgaagactttggctgagtttgagggtacaataaccaagtctctgcctaccagctttgaggaggcaatgatgaacacttattatgcaactgtgatgatgtaa

SEQ ID NO: 87319 - DNA, 639 bp, Oryza sativa
  Clone ID: PAT_MRT4530_86276C.1
atgtccgaaacgccatcacagccggctggcaagaccaggctaggttttacacctgccacgcactccctatcgatccgcggatatcactccattgctccaccaccagccatcctccatcggcatgtggccaatactacaccgaccccccttccacccctggtcagcgtgcctcctagcgccgctgcgtcggcctaccaccgccaccagctgctcccaaccagcaccacgcttcctcctatccctaccattgtttccagtacctttctcccgccgacggcacttcacgagcgtgccctctgtcgacggcacgtcgtcgtgcccttactgcctcgccccgccacctccacgcagccgtaccccttcgccttgtcatcgttgctggctcaggagttagcttcccaaggcgaggaggcaaaatccggatgggatgggaccagatttggcagctgcacccctgcggcctccacgttcacgcctccgcatccacgtagccgtgccccgctgtcttgctaccgcatccggcttggggaccgacctactgcaccggggagcccggatccatccaggacggggctggatataggagtcgatgccagatccagtggcgccgccttgccgtcgtcaccccggtccacctag

SEQ ID NO: 87320 - DNA, 2610 bp, Oryza sativa
  Clone ID: PAT_MRT4530_86277C.1
atggatcaatcaaattgcaagaatgagaatatgtttgatagcgcagaggatgtacacggtcatttgatacaacgaggattcatgaagggctatacatgttgggtgaagcatggagtgcaagaatcaggaagtggagtagcagcagacagaagtggtgcacataatcaggaagatgaagatgagcatgacatgtttataccttctccattgggcggtgaaatggttgatgtggatcacgatctgctgcaagacatgttacgtgacgttgaggacccagcccagaatgagagagatggaatgaagttcagcaggttgcaatatgcggacttggatgcttgtcctgtctgcaaggcttctcgatacaagcgaaagaaaagtgctgacgaaggaaataagtcaaagaggggtggtccggcaaaggttgtgtggtatctacctatcattgatcatttcaagagaatctttgccaacctgaacgaagcgaagttagtacgttggcacgccacggagagaaggaataacggtccgagacaacccggcaatgatatcgatgtattcctggagcctgttatcgacgatctggagattctttggaaagaaggtgtgaaaacttgggatgcatatggtcaggagaacttcaagctaagagttctattgttctgcaccattaatgactaccctgcactcggtaatctttccggacaaactataaaaggaaagaaggcatgctccgattgcaaggaacatacacgaagccggtggctgaagaaatcacgaaagatggtatacatgggtcatcggaggtggctcccgctacgtcacgcatttagaagaaggaagaaaatttttaacggtaagagagaacttcagcctgctcccaaagatttgtccggagatgaggtccacaatatggtcaaggacataagcaatgagtttgggaagaaaagaaaacgtagcaagacaaaggagaagggtatgtggaagaaaaaatccatattttggcggctaccttactggaaagatcttgatgtccgtcattgcattgatctcatgcatgtagaaaagactgtgtgtgagagtttggttggcctgatgttgaatattcccgggaagacaaaggatgggttgaacgcgcgccttgatctacaggacatgaatattcgcagtgaactccagcccatacgaaatgcagagacaggtagagtgtacctccctccagcctgccacacattatcgaaggatgagaagatcgcaatgttatcatgcttgaaggatattaaagttccatcgggctattcagcgaggataagtaagtatgttaaattggacgatctaaaacttgttggaatgaagtctcacgattgccacgtgctaatcacacaaatcttgccagttgctatcagaggcattctaccaccgaaagtgcgtcacacgatcaaacgtctatgcgccttcttcaatgcaattggacagaaggttatagatccagaagatctagatgggttgccgaccgatattgtgaataccctctgtcacctggagatgtttttcccactatatttctttgatataatggttcatctccctgttcatctggtgaagcaaacaaaactatgtggcccggcttttctaagggaaatgtggccatttgaaaggtacatgggagttctgaagtcgtacgttcgtaacagagctaaacccgaggggagcatcattgaaggttacacgaccgaggaggctattgagttctgtgtcaattacatgtccgatgccgatcctatcggagttcctgcgtctcgtcacgagggaaggttgtcaggtgttggcacaatcggaaggaaaagaattaggcccgatcaagcgtcgtacgtgcaggctcattacgctgtactccaacatatggcagaagttggcccatactttgaggagcacttagagaaaatccgagatgagaacttaggacgatctaatgcatggattaacagagaacataattcttggttcaacgaatggttcaagaatcgtgtgacaatgtccacggatgtcccaaatgagacagtacagttgttggggatgggaccgtcttggaccgtagacacatggcaaggatacgatataaatggatacacattttacaccgtcaaacaagatgacaaaagcacagtgcaaaacagtggtgtccgtatagatgcattccaggatcaagttgggtcaaacacatactacggctgcattcaggagatctgggagctgaactacgtcaagttcaaggttcctttgttccgctgccgttgggtgaatctacggactggtgtcaaagctgacaaggaaggtttcactttagtagatctatcaaaggtgggatacaccgatgaacaatttgtacttgcgaaacaggttgagcagatattctacataaaagacccttcaaacaagaagatgcacatcgtgagggatggaaagcgccgaattgtaggagttgacaacgtcgtcgatgaagaagaatacagccataatcttcatgtaagacctcacattgaccttgacgatgatccccaagagcatgtggcatatgctcgttcagatcatacggaaggcatgaccttgtga

SEQ ID NO: 87321 - DNA, 314 bp, Oryza sativa
  Clone ID: PAT_MRT4530_86278C.1
gcacgaggctctgatgtaaagtgaaacaagatacattctacccccgtgtaaaatgcaatttattctaatcagagtatataaaataaaaatcacttcgcaagatcaacagagagcagcgagcagcgacgtgcgaagtgatttttattttatatactctgatgtaaagtgaaacaagatacattctacccccgtgtaaaatgcaatttattctaatcagaatttaaattttaagttaaaaaaaaaaaaaaaaaaaaacaaaaaaaaaaaaaaaaaaaaaaaaaaaaaaaaaaaaaaaaaacttcgagggggggccc

SEQ ID NO: 87322 - DNA, 2951 bp, Oryza sativa
  Clone ID: PAT_MRT4530_86279C.1
tgtccatgtgcaaattgcaagaatgagaatatgtttgatagcggagaggttgtacacggtcatctgatataacgaggattcatgaagggctatacatgttgggtgaagcatggagagcaagaatcaggaagtggagcagcagcagacagaagtgatgtgcataatcaggaagatgaagatgagtatgacatgtttataccttctcaattgggcggtgaaatggttgatgtggatcacgatctgctgcaagacatgttaagtgacgttgaggacccagcccagaatgagagagattccattaagttcagcaggttggtcagtgattccgagacgtctctatacgccggatgcaaagaaaaacacactaagttgtcagttaccttggacctaatgaagctgaagataagtagtggatggacagacaagaatttcacagatcttttaggaattttgaaggctatgcttcctgctgagaacatattgcccgagacgacatacgaagcaaagtaggttctgtgtccactggggttagaggtccgtagaattcatgcttgtccaaacgactgcatattgtaccacaagcaatatgcagacttatatgcttgtcctgtctgcaaggcttctcgatacaagcgaaagaaaagtgctgatgaaggaaagaagtcaaagaggagtggtccggctatggttgtgtggtatctatctatcattgatcgtttcaagagaatctttgccaaccccaacgaagcgaagttactacgttggcacgccacggagagaaagaatgatagtatgcttagacacccagcggattcgattgaatggagaaatatcgatcgaaaacacaaagactttgctgccgaccctagaaacatgaggatatgtctatgtacggatggcatgaatcctttcggtcacatgagtagtactcacagcacttggctagttcttattgcgaactataacctcccgccatggttatgctttaacatggaaatatattatgttgtgcttgttaatccaaggtccgaggcaacccggcaatgatatcgatgtattcctggagcttgttatcgatgatcttgagattctttgaaaagaaagtgtggaaacttgggatgcatatggtcaggaggacttcaagctaagaattctattgttctgcaccattaatgactaccctgcactcggtaatctttccggacaaactataaaaggaaagaaggcatgctccgattgcaagcaacatacacgaagccggtggctgaagaaatcatgaaagatggtatacatgggtcatcggaggtggctcccgctacgtcatgcatttagaagaaagaagaaaatttttaacggtaagagagaactttagcctgctcccaaggatttgtccagagatggggtccacaatatggtcaaggacataagtaatgagtttgggaagaaaagaaaacgtagcaagacaaagcagaacgaaaagaatgtgtgtgagagtttggttagcctgatgttgaatattctcgggaagacaaaggacgggttgaacgcgcgccttgatctacaggacatgaatattcgcagtgaactccagcccatacgagaggcagagacaggtagagtgtacctccctccagcctgccacacattgtcgaaggatgagaaaatcagaatgttatcatgctttaaagatattaaagttccatcgagctattcagcgaggataactaagtatgttaaattggatgatctaaaactggttggaacgaagtttcacgattgccacgtgctaatcacacaaatcatgccagttgctatcagaggcattctaccacccaaagtgcgtcacacgatctaacgtctgtgcgccttcttcaatgcaatcggacagaaggttatagatccagaagatctagatgggttgcagaccgatattttgaataccctctatcacctggagatgtttttcccactgtctttctttgatataatggttcatctccctgttcatctggtgaagcaaataaaactatgtggcccggcttttctaagagaaatgtggccgttcgaaaggtacataggagttctgaagtcctacgttcgtaacagagctaaacccgaggggagcatcattgaaggttacacggccgaggacgctattgagttctgcgtcaattacatgttcgataccgatcctatcagagttccagcgtctcgtcatgaaggaaggttgtcaggcttcctatgtgcaggctcattacgctgtgctccaacatatggcagaagttggcccatattttgaggagcacttagcgaaaatccgagataagaacttggggcgatctgatacatggattaacagagaacataattctcggttcaacgaatggttcatgaatcgtgtgacaatatccacggatgtcccaaatgagataaccgtagacacatggcacggatacgacatcaatggatacacattttacaccgtccaacaagatgacaaaagcatagtgcaaaacagcggtgtccgtatagatgcattccaggatcaagtcgggtcaaacacatactacggccgcattgaggagatctgggagctaaagtacgtcaagttcaaggttactttgttccgctgccattgggtgaatctacgcacaggtgtgaaagctgacaaggaaggtttcactttagtagatttatcaagggtgggatacgctgatgaaccattcgtacttgcgaaacaggtcgagcagatattctacataaaagacccctcaaacaagaagctgcacatcgtgagggatggcaagcgccgaattgtcggagttgaccacgtcgtcgatgaagcaaaatacaaccagaatcttcatgtaagacctcacatcgaccttgacgatgatccccaagaggctgtggcatatgctcgttcagatcatacggaaggcaaaacctca

SEQ ID NO: 87323 - DNA, 711 bp, Oryza sativa
  Clone ID: PAT_MRT4530_8627C.1
atggcgtccctgctgcagttccgcattcgccgccgcggctacgaaccgatcacgcggcgcggcggcgaggaggaggaggaggcggcgccggcgtacgagccggcgatgttcgaggaggaggggctagagccggacgagctcgaggcgcgcggcgaccgcctcatggcgaggggccaccggcgagcctcaagctggtggttcacgtcgttcaagcacgacacggccttcgccatcgccgaggacttcaggatggccagtctctcctacgtcctcgccaagaactggagaaaagcagcggcagcattcggcaacgaagccatccagaggctcaagagaagatcgccacctgcagaattggtcgcagctgtagcgctcctcgcttcagcgagatgctacaggaagatccaggacaatgcagacgagggggaggtggcggccatcaagcttgctctgcagaaggcggtctcgttgttcaccaagaacaatgatatgcaatcggctgccacatgttgcaaggagctagctgagttccacgaggaacagagagagttgcacgctgcagtgcattgcttcttacaagccaaggattattatgggagtggccccaaccccaacgagcaaggtgttcgctactgccgtgccataggaagccttgtcagctgccgcatccgtcttcttgagggcgcagcagctcgagcaaaccccgtgtga

SEQ ID NO: 87324 - DNA, 454 bp, Oryza sativa
  unsure (1)..(454): unsure at all n locations
  Clone ID: PAT_MRT4530_86280C.1
caactgcgaggaggccggcgtgccgttcgacgagcggacgccgatgaagttngacatgctctactaccaggacctgctcttcaagcgggggctcctcgccaccgaccaggcgctttacaccccgggcagctgggccggcgagcttgtgctgacctactcccgcaaccaggaggcgtttttngccgacttcgcgagggcgatggtgaagatggggaacatacgcccggacccttggactccgacggaggtcaggatcaagtgctccgtggccaatggtcattattnatggccggccgtcatatctccttttgtttaagctttgagtccncccnactctttttggnctcatctgnatttgtttnaatcaaaattttncgtttactgnattngnttgnatatgncnanttttgtttnttntaacgatgcntttgnatatnaaaaaaaaaaaaaaaaa

SEQ ID NO: 87325 - DNA, 3036 bp, Oryza sativa
  Clone ID: PAT_MRT4530_86281C.1
atgtatgcgaaaaatttgaaacgtcattctacggagtacagaaagggcgtaataaattttatgaacgccgcgaaggaggatcggatcagaagaaacagtgattacatgtgttgttcatgtgcagattgcaagaatgagaatatgtttgatagcggagaggacgtacatggtcatctgatacaacgaggattcatggagagctatacatgttgggtgaagcatggagagcaagaatcaggaagtggagtagcagcagacagaagtggtgcgcataatcaggaagatgaagatgagcatgacatgtttataccttctccattgggcggtgaaatggttgatgtggatcacgatctgctgcaagacatgttacgtgacgttgaggacccagcccagaatgagagagatggaatgaagttcagcaggttggtaagtgattccgagacgtctctgtatgctggatgcaaagcaaaacacactaagttgtcagttaccttggacctaatgaagctgaaggcaagtagcggatggacagacaagagtttcacagaacttttaggaattttgaaggctatgcttcctattgagaacacattgcccgagacgacatacgaagcaaagcaggttctgtgtccactagggttagaggtccgtagaattcacgcttgtcccaacaactgcatattgtaccacaaggaatatacggacttggatgcttgtcctgtctgcaaggcttctcgatacaagcgaaagaaaagtgctgacgaaagaaataagtcaaagaggggtggtccagcaaaggttgtgtggtatctacctatcattgatcgtttcaagagaatctttgccaacccgaacgaagcgaagttagtacgttggcacgccacggagagaaggaatgacggtatgcttagacacccagcggattcgattgaatggaggaatatcgatcgaaaacacaaagactttgatgccgaccctagaaacatgaggatatgtctatgtacggatggtatgaatccttttggtgacatgagtagtactcacagcacttggccagttcttattgcgaactataacctcccgccatggttatgctttaaacggaaatatattatgttgtgcttgttaatccaaggtccaaggcaactcggcaatggtatcgatgtattcctggagcctgttatcgacgatctggagattctttggaaagaaggtgtggaaacttgggatgcatatggtcaggagaacttcaagctaagagttctattgttctgcacaattaatgactaccctgcactcggtaatctttccggacaaactataaaaggaaagaaggcatgctccgattgcaaggaatatacacaaagccggtggctgaagaaatcacgaaagatggtatacatgggtcaccggaggtggctcccgctacgtcacgcatttagaagaaagaataaaatttttaatggtaagagagaacttcagcctgctcctaaagatttgtccggagatgaggtccacaatatggtcaaggacataagcaatgagtttggtaagaaaagaaaacgtagcaagacaaaggagaagggtatgtggaagaaaaaatccatattttggcggctaccttactggaaagatcttgatatccatcattgcattgatctcatgcatgtagaaaagaatgtgtgtgagagtttggttggcctgatgttgaatattcccgggaagacaaaggatgggttgaacgcgcgccttgatctacaggacatgaatattcgcagtgaactccagcccatacgagatgcagagacaggtaaagtgtacctccttccagcctgccacacactgttgaaggatgagaagatcgcaatgttatcatgcttgaaggatattaaagttccatcgggctattcagcgaggataagtaagtatgttaaattggacgatctaaaacttgttggaatgaagtctcacgattgccatgtgctaatcacacaaatcttgccagttgctatcagaggcattctagcaccgaaagtgcgtcacacgatccaacgtctgtgcgccttcttcaatgcaattggacagaaggttatagatccagaagatctagatgggctgcagaccgatattgtgaatacgctctgtcacctggagatgtttttcccactgtctttctttgatataatggttcatctccctgttgatatggtgaagcaaacaaaactatgtgacccggcttttctaagggaaatgtggccgtttgaaaggtacatgggagttctgaagtcgtacgtttgtaacagagctaaacccgaggggagcatcattgaaggttacataaccgaggaggctattgagttctgtgtcaattacatgtccgatgctgatcctatcggagttcctgcgtctcgtcacgagggaaggttgtcacgtgttggcacaattggaaggaaaagaatcaggcctgatcaagcatcacacatggcaaggatacgatataaatggatattttacaccgtcaaacaagatgacaaaagcacagtgcaaaacaacggcgtccgtatagatgcgttccaggatcaagttgggtcaaacacatactacggccgcattgaggagatctgcgagctaaactacgtcaagttcaaggttcgtttgttccgctgccattgggtgaatctaagcactggtgtcaaagccgacaaggaaggtttcactttagtagatctatctaaggtgggatacgtcgatgaaccatttgtacttgcgaaacaggtcgagcagatattctacataaaagacccttcaaacaggaagatgcacatcgtgagggatggaaagcgccgaattgtaggagttgacaacgtcgtcgatgaagaagaatacaaccataatcttcatgtaagacctcacattgaccttgacgatgatccccaagagcctgtggcatatgctcggcccgtcacagatgagtcatccgtgacgggcctaaatgtcatctcaatcgggcattattatggagcccgtcaccgatga

SEQ ID NO: 87326 - DNA, 2051 bp, Oryza sativa
  Clone ID: PAT_MRT4530_86282C.1
attgcaagaatgagaatatgttttatagcggagaggacgtacacggtcatctgatacaacgaggattcatgaagggctatacatgttgggtgaagcatggagagcaagaatcaagaagtggagtagcagcagatagaagtggtgcgtataatcaggaagatgaagatgagcatgacatgtttataccttctccattgggcggtgaaatagttgatgtagatcacgatctactgcaagacatgttacgtgatgttgaggacccagcccagaatgagagagatggaatgaagttcagcaggttggctatgcttcctgttgagaacacattacccgagacgacatacgaagcaaagcaggttctgtgtctactggggttagaggtccgtagaattcacgcttgtcccaacgactacatattgtaccacaagcaatatgcggacttggatgcttgtcctgtctgcaaggcttctcgatacaagcgaaagaaaagtgctgacaaaggaaataagtcaaagaggggtggtctcgcaaaggttgtgtggtatctacctatcattgatcgtttcaagagaatctttgccaacccgaacgaagcgaagttagagaacttcaagctaagagttctattgttctgcaccattagtgactaccctgcactcggtaatctttccggacaaactataaaaggaaagaaggcatgctccgattgcaaggaacatacacgaagccggtggctgaagaaatcacgaaagatggtatacatgggtcaccggaggtggctcccgctacgtcacgcatttataagaaagaagaaattttttaacggtaagagagaacttcagcctgctcccaaagatttgtccggagatgaggtccacaatatggtcaaggacataagcaatgagtttgggaagaaaagaaaacgtagcaagacaaaggagaaggttgctaccagaggcattctaccaccgaaagtgcgtcacacgatccaacgtctgtgcgccttcttcaatgcaattggacagaaggttatagatccagaagatctagatgggctgcagaccgatattgtgaataccctctgtcacctggagatgttttttccactgtctttctttgatataatggttcatctccctgttcatctggtgaagcaaacaaaactatgtggcccagcttttctaagcgaaatgtggccgtttgaaaggtacatgggagttctgaagtcgtacgttcgtaacagagctaaacccatggggagcatcattgaatgttacacgaccgaggaggctattgagttctgtgtgaattacatgtccgatgccgatcctattggagttctcgcgtctcgtcacgagggaaggttgtcaggtgttggcacaatcggaaggaaaagaattaggcccgatcaagcgtcgtacgcgcaggctcattacgctgtgctccaacatatggcagaagttggcccatactttgaggagcacttagcgaaaatccgagatgagaacttggggcgatctgatgcatggattaacagagaacataattctcggtttaacgaatggttcaagaatcgtgtgacaatgtacacggatgtcccaaatgagacaaaacagcggcgtccgtatagatgcattccaggatcaagttggtcaaacacatactacggccgcattgaggagatctgggagctaaactacgtcaagaacaaggttcctttgttccgctgccattgggtgaatctacgcactggtgccaaagccgacaatgaaggtttcactttagtagatctatctaaggtgggatacgccgatgaaccatttgtacttgcgaaacaggtcgagcagatattctacataatagacccttcaaacaagaagatgtacatcgtgagggatggaaagcgccgaattgtaggagttgacaacgtcgtcgatgaagaagaatacaaccataatcttcatgtaagacctcacattgaccttgacgatgatccccaagagcctgtggcatatgctcgttcaggtcatacggaaggcataaccttgtga

SEQ ID NO: 87327 - DNA, 330 bp, Oryza sativa
  Clone ID: PAT_MRT4530_86283C.1
caattcgatgcttttcaggatatttgccagcaacaagatgtatacaatatataatatctggccaagtccagataatgtagttattttagcatccccttttcttatagaccattatatgttccatctttggtgtcatttcaaatttgtatgtatgcactattcccacaattcctagctgagctatgggagtgttttacttgtatgttggattcactaatctattagtgaaattagtgaaaagtacaaaaaaaaaaaaaaaaaaaaaaaaaaaaaaaaaaaaaaaaaaaacaaaaaaaaaagggggggacgatctagaggacccaaacgaaa

SEQ ID NO: 87328 - DNA, 2379 bp, Oryza sativa
  Clone ID: PAT_MRT4530_86284C.1
atgtcgacgacaactagtgggtcctcaagggcacgtactcctaggacagggaacaaaattcctaaggaacggttccgcataacagcggtggacgccgtagggttaccgacatctccaaggaaaatattgagccgatttaggtctatctgcggggtcatagggaggcaaaaattcagtattctgcaagacgacttcaagctcgtgccggccgcagagaaggacattgcttggctaacgttcaaggagagctttgattatcctgcggagcatgaggaccatctcaggcgggctgctttcaaggttatgggcactgcttggaagaacttcaagactaagctagtcggcgagttcgtctacaacccggcaaatcaagatccaagagagaaatttccttggatcacggaacaggtctggtcggaattccatgcgaagaagtcgacccccgagtccagagctagaagcgaggcatattgcttgctccagaccgggaaccagcatccgcaccggcttggtaccaccggatatgccggtaaggaagaggaatggcagcgtgaggatgaagaagcggaggaatcgtgcacaccgttcgtgtttggcgatatcccacaccctcgggctaggaactgggccagggctaggtaccagaaacatgatgatggcacaatcttcatgccaaatgcaaaagatcaacgagtatatgaagctataaagtatggatttccagactacgcgtggcagtacaagaagcggacttccaacaaggcggagaaagatgcacgccttgaagccaagatccgggagtcgatacgagctgagctgacatctgaattcgacgaaaagctcgagtcgatgagggccaagattaggcaagagatccgagaagagcaacagatcccccaggccgccgctgctgctgcgcacaaagagttaggaagtcccaccgaaaaacgcagcagttgcgcatcaactgagttggcggaaaatccaacatcggaaccaacgagctgcaccctcacagttagggtgatgccgaccttcactgttccagcagccgagggacttgcgtacaagccgaccccagagacaagagtgcatggagcgcaactcagggccgactatgcaaaagttcaagtcgactcggtgaagcccgaatacgagctgttccctctgaagtatccaccgaacgacaaggtcctctcactaggaaatgcccgtggtaccttcatccaatggcccaaggacctcattgagatcagggttacagcgaggccaaccactgcaccaggcggtcgtccaccaaagagacccgcctctgctccttcagcccctcctgctcaagatcgtcatgcacaatcttacgatgtgcagttgcagtacgacacggattttggggaggaccgaacggaggccgacagcaaggcgattcatgaacccccaccgatgaagaagagcaggaaggcacactcttcccctcagagaattactctcgataaacccgaagcaaaggggagaggaaggggaggaaaggtgcaggcctcgcttctagctccaagaaagctagatctgggcaagggccaggaagagactaagggcaaagaggtcaagaagaaatatgtcgctccacaggagttccaactaggcatgccattggttggagatgacgtgcttgccgcaatgggcaccgcttgcaaggaccttcacttatactacatggagaaatctaacgccaggaagccaagtaaagctaccgatatccttggacagcacgatggaaagccattccttggtccaacaaattatattgtggtcgacttcaaggatcttttcgacctctacaggctccgagcggtggacacgagcctccttaagtgctactccttgttaagttggcaatggtgtcagaagcatgcaccggaagttgccttccttgatccacaagtggtcactgtcacaaatctccagaatgaccgtcaaggaatggtcaactacatctacgacaccttgtggtcccgccgagacaaggagtacattatgtgtgcctataatcaatatacatgtcattacctgaactccagaattgataagaacgcatatgattggaccccaattcaactagcgatagatgaagcgtgggcccaatacgtgcaaagaggaggcctcaggaagacaggacatgacaccctcatccacaaaaaagacttcccggtgaagcaacaaataggtgaccagtgcggattccatgtgtgccacaacatgcgacttctgtatagagaaaaggtgaagactttggctgagtttgagggcacaataaccaagtctctgactaccagctttgaggaggcaatgatgaacacttattatgcaactgtggtgatgtaa

SEQ ID NO: 87329 - DNA, 2797 bp, Oryza sativa
  Clone ID: PAT_MRT4530_86285C.1
ttggccttccttgtcgtcgccgcccgcgtcctcaccgacgcacgtcgccgacccccaccgagcccgatgccgcccgcccggcgccgacctacccgaccgcaaactcctcctttgccgagcccgccgccgccgccatcgagaccgctgcctccaccgagcccaacgccgcctccaccgaccggcgacgccctccaccgagcccggcgccgccgccaccgagccccaccgaccgtccttagacgatgtctcagcaaggcaaaccaatatcgacgacaactagtgggtcctcaagggcacgtactcctaggacagggaacaaaatccctaaggaacggttccgcataatagcggtggacgccgtagggttgccgacatctccaaggaaaatattgagccgatttaggtctatctgcggggtcatagggaggcagaaattcagtattctgcaagatgacatcaagctcgtgccggccgcagagaaggacattgcttggctaacgttcaaggagagctttgattatcctgcggagcatgaggactatctcaggcgggctgctttcaaggttatgggcaatgcttggaagaacttcaagactaagctagtcggcgagttcgtctacaacccggcgaatccagatccaagagagaaatttccttggatcacggaataggtctgggaggaattccatgcgaagaagttgacccccgagtctagagctagaagcgaggcatatcgcttgctccagaccaggaaccagcatccgcaccggcttggcaccgccggatatgctggtaaggaagaggaatggcagcgtgaggatgaagaagcggaggaatcgtgcacaccactcgtgtttggcgatatcccacaccctcgggctaggaactgggccagggccaggtaccagaagaatgatgatggcacaatcttcatgccaaatgcagaagatcaacgagtatacgaagctacagagttggttgtcgagcaacaagtctcgcaagaggcctgctctcaaagacgcgaggacgacctcctcacgaaagcgttgggcaacaaggaacactatggacggacacggggcgttgggtcttctgttccctggaagtatggatttccagactacgcgtggcagtacaagaagcggacttccaacaaggcggagaaagatgcacgccttgaagccaagatccgggcgtcaataagagctgagttgacatctgaattcgacgaaaagctcaagtcgatgagggccaagattaggcaagagatccgagaagagcaacagaacccctaggccgccgctgctgctgcgcacgaagagttaggaagtcccacctaaaaacgcagcagttgtgcatcaactgagttggcggaaaatccaacatcggtcgacagcgccgtcgaccacataacggaaccaacgagctgcaccctcacagttagggtgatgccgaccttcacgagacaagagtgcatggagcgcaactcagggccgactgtgcaaaagttcaagtcgattcggtgaagcccgaatacgagctgttccctctgaagtatccaccgaacgacgaggtcctctcactaggaaatgcccgtggtaccttcatccaatggcccaaggacctcattgagatcagggttacagcgaggccaaccactgcaccaggcggtcgtccaccaaagagacccgcctctgctccttcagcccctcctgctcaagatcgtcatgcacaatcttacgatgtgcagttgcagtacgacacggattttggggaggaccgaacggaggccgacagcaaggcgattcatgaacccccaccgatgaagaagagcaggaaggcacactcttccccttagagaattactctcgataaacccgaagcaaaggggagaggaaggggaggaaaggtgcaggcctcgcttctagctccaaggaagctagatctgggcaagggctaggaaaagactaagggcaaagaggtcaagaagaaatacatcgctccacaggagttccaactaggcatgccattggttggagatgacgtgcttgccgcaatgggcaccgcttgcaaggaccttcacttatactacatggagaaatctaacgccaggaagccaagtaaagttaccgatatccttggagagcacgatggaaagccattccttggtccaacaaattatatcgtggtcgacttcaaggatcttttcgacctctacaggctccgagcggtggacacaagcctccttaagtgctactccttgttaagttggcaatggtgtcagaagcatgcaccggaagttgccttccttgatccacaagtggtcactgtcacaaatctccagaatgaccgtcaaggaatggtcaactacatctacgacaccttgtggtcccgccgagacaaggagtacattatgtgcgcctataatcaatatgcccattggatccttctggtcataacacctaagtggagtacatgtcactacctgaactccagaattgataagaacgcatatgattggaccccaattaaactagcgatagatgaagcgtgggcccaatacgtgcaaagaggaggcctcaggaagacaggacatgacaccctcatccacaaaaaagacttcccggtgaagcaacaaataggtgaccagtgcggattctatgtgtgccacaacatgcgcctcctgtatagagaaaaggtgaagactttggctgagtttgagggcacaataaccaagtctctgcctaccagctttgaggacgcaatgatgaacacttgttatgcaactgtgatgatg

SEQ ID NO: 87330 - DNA, 1806 bp, Oryza sativa
  Clone ID: PAT_MRT4530_86286C.1
tcatggagacaaagattcagaaaacatagtgcaatcatccatgtcgtcgacctcgtcttccggaatgttccacttctccggctccttcaggcactcatcagttgacaggaaatgcagcacctcagccatggagggccgccacatcgccggtcgcataatgcagcgtgacgcgactgcgaccatcctcttcagctgatccttgtcataatcgccgccgagattcgggtctgcaagttcagtcacttgtccagcttcaagaagtggctttgcccactgaagaaggctcagcttggagcagtcaataggcctccttccagtgacaatctctagcagcaaaactccgaatgcgaaaatgtcggtcttctcatcgacaatgccatgcatgaagtactctggtgctaaatacccaaatgtgccctctataggtatgacagagtgatgagtccactgcttgggaagccactttgccagtccgaagtctgatatctgaggctcaaaatcatcaccaagtagcacattggaggctttgatgtcgcgatggatgatccggtgcctacagaacatgtgcagatactgcaagcccctcgcgacacctaccgcaatcttgtacctcaaaggccactcaaggattttggcactcttcccgtgcagtgccgatgcaagtgtcccgttttcgcagaactcgaatactaaatagagtccattctcaacacagcagccaagaaggtatgctgtgtttgggtggcagacatgtccctggattcccaattctgtcaggaactctttttccttctgttcagttggcttaccttgtgccaatctcttcacagctacacattgtccatcagataggatacccttgtatacttctgcatagcctcctctcccagccatgttatctggatggaagtcattggtagcaactgaaatctcctggtagctgaaacacctccaggcaggcttctgatcttcagtataattcgaagaattatcacctcctttcacgttttcatcgtcgatggaccgcaggaatggaagccagagcttcatgtcagatagcctcctccagatgccattttgaccacgccggctcacctcattgctagatgttgtgctgtagcattcttcagtgacatgttgctcccctgcctctggaccatcaagaactgcccttggtgagctcttgtcctctgtggcttcacccgttgattgtgccggttttcgcgctgagtttgatctgagtagcttctgaagtggtggaaatctcctgctccatgttgagcttgagaagatactactgtcatcaaatgatcgagacttgaatcgagcggcgctctgtggtagaccatcccttccaactgcaatcactgaacagtttcttggagcattcatgtagcagtagtttgcaacctcaaaatgattcctacgatatgcatttcctgatctcccaacaatgaggaagtttgcatcagtcaatgtagcttcctgggtaagtgctctccaaatgcttgggctgcaaaccaccttggcctccaaatttacctgtttagcctcacaagtctccacaaactccccgagcatgtagatcacaaacgcgttcgccttctgcagcctgttcttcctccccctccctccaagaacatggacggcgacaaccgaatcgttgggcctcgcgacgacgcggatcgcccacgagagcagctcggagcatccccgggagttgttgggcacgccgaccagtatcctcgaccccagcagcatcagccggcgtccatcgtccacactgcactcctcaatggtgtccat

SEQ ID NO: 87331 - DNA, 472 bp, Oryza sativa
  Clone ID: PAT_MRT4530_86287C.1
catccgatcctgccactcgctgcaacatctacatctctgcttctctgtctctccaagtttcgcaccacaaatcaggtgacagtgcgtggccttcgtcagaaacaccatcagtttcagaagcacaacaaggtcatggatacggcactagtcaccattgctctccgctggacctggagctgggcatgtccctgtccaccacgccatccatcggaacctagcaccatcagttgccgtggtcatccatcgactggattcccaagatgcttaacaaattttatcctcagggtcaagttccaaccatcttgctgctgaatctaattgacagccatggggacagtgttgtagacaaaagtttggaatcttgtaacattgtctcatgtagccacccattgtatggtcacaagcctgtgcatatctgcatgctaccatgcttagtacttctctgctgcatcaaaaaaaaaaaaaaaaaaaa

SEQ ID NO: 87332 - DNA, 151 bp, Oryza sativa
  Clone ID: PAT_MRT4530_86288C.1
atgcagtatataaatcactggctgcctcgctcccgcgttctcaaccacgcgaccgtcgcggtcccgcatattggagctgcgggaccgtcgatgtcccgcgttttgaagttgcgggactatcgtggttccgtgtttccatcccacggaacag

SEQ ID NO: 87333 - DNA, 799 bp, Oryza sativa
  Clone ID: PAT_MRT4530_86289C.1
gggctgcaggctgacttctccagagttgctggcgactgccgattgacttcatgctccactcaccaccacattttttttcccgggatccgaacggaaacaaccacctatctatctcataaacgcgccaaagcagataaaatacggtttgcgatgatttctagggaggaatttacttggccggccgggatccggtcatggttttcttgtcgacttgcgcctcgggggtgtagtggtgtggttttcttatcgatttgtgcattggacaccatccggtcggccggcgccattggaggaggaacatggcggcgatggcgtcgccgccgccgacgacgagagtgtgcgtcaccggcgccggcgggttcatcggctcgtggctcgtcaagctcctcctctcccgtggctacgccgtgcacgccaccctccgcgacccgtgtgatcccaagaacgctcatctgaagcagctggacggggcgtcggagatgctgagcctgttcaaggccgacgtgctcgacgccggcgagctgtccgccgccattgccggctgcgagggggttttccatgtcgcctctcccgtgcccggagacaagatcgtcgatcctgagttagaagtaatggcttcctgctgtaaagggaacactgaatgttcttgaagtttgttcgtcgtctaagaaggttcagaaagttgtggtggtgtcatctactgctgcagttcattacaaccccaattggcctccaggtaagcccaaagatgagagctgctggtcggacagaaagatatgcatggagaagaaggagtggt

SEQ ID NO: 87334 - DNA, 318 bp, Oryza sativa
  unsure (1)..(318): unsure at all n locations
  Clone ID: PAT_MRT4530_8628C.1
ggaacaaactcctctcgattctcaaagccaccgcgatggcgtcgngacgcccgctccgcgnatccaagatctccatctncggcgcgctctcgggcgtcctccagcnctgcggtatgncgacgcgactncacnnctcctctccnggcgcgctcancancctggctcnncctttccttgcgactacgacgtcacgtgcggccagtcngncgtgcatntnctatcatgtncggcattctncatntatgnnttcnncantgcnatcctttntggtnnanggttngatganggagngccgcnagatagatcnctntttatatg

SEQ ID NO: 87335 - DNA, 242 bp, Oryza sativa
  unsure (1)..(242): unsure at all n locations
  Clone ID: PAT_MRT4530_86290C.1
ggcacccatagccatggcaaccatcctcgccgtggccgccatggccaccttccaggctgggacgaccctcccgggggccgtggctcctacnctaccggttcgccggaacgtcgtgtcgttcgccggccgccggcaggggcgcgcgctgggaaggctggcggtggtggtcgcggcgtgctctccgtctcctccggagctggctcagaaggtgtcggagagcatcaagcatgctgaggatactt

SEQ ID NO: 87336 - DNA, 355 bp, Oryza sativa
  Clone ID: PAT_MRT4530_86291C.1
aatgaacaaattaatgaaatagctaggttgcatacagatcgctaaaatgacaagcgtgatgcgtgcatcagatggccggagctagctctccatggaactccctcaaaattaaaactcatgttctactctcagaaaccataattttaacactagagactacccttgtgtacaatatatcaaatgccaataagttttgcctccaaaataatagcaaatctatggtaacaagcatgtgttcccatctaataagctgggtgacaccacgagattcgaccgcctgtggtccagctccaagcgaacccaagtatatgaatggttactaggtactccctccggcccaaaaaaaagacaaacc

SEQ ID NO: 87337 - DNA, 871 bp, Oryza sativa
  Clone ID: PAT_MRT4530_86292C.1
atgcgctgctaccgccatggattcgatgccgcctcctccaccgcctcctcctccgccgcctccgccgccgccttcgccaccgcctccaccgccgttcccagtgatctcacagacctccgccagcactgccgcttccaatgcgcccttcaagggaccttcgtggtcatcgccggtcatggtggtgcattcatcgttgctcgtcgcacccactccgcccgttctgtcattttctgtgggtggtgctatactagcttctgcttcaatcccgtcgacatctacacagcggccgcggggcgggcacgccgcagccgcgccactgccagccttatgcacggcgacaacggcggctccggcgggaggcgcggcgacgacaatggctctggcggaaggcgcggcgacgacgacggcgtgcgtgcgggggcggcagtcgtggcgagggcgtgcaggcgacggcggcggcggcagtcgcgccgtggcgaaggcggtccgggcgacggcggcggcggcaaccgcggcgaaggcgtgcgggcgatggcggcggccgctgcgagggcgggcgctggcgacggcggcgggcgcctcactggctactgctgctgctcccgtggccgctggtttccacgctgaggcgttgtgtccgcctccgcctccccccaccgtcgtcgctgctactgctcccgtggccgacgacgatcccatcctgctcgacgtcgacgtcagcgccaacgtcgccctcctcctcgtcccttgctccaggggtagccggctgattcagattcaaaaagtgagggtaaaactgcaaaccctaaaaagtgagggtaaaacaacaattgggtttaaaagtggaggcacatatgcaattgccccatga

SEQ ID NO: 87338 - DNA, 603 bp, Oryza sativa
  unsure (1)..(603): unsure at all n locations
  Clone ID: PAT_MRT4530_86293C.1
ggggttgcaatgcagcggacagacngggcctttgttcccagcngaggcaaccaattgcaccncggcatggtttgccacagggccatggcatggtttgcacccagcncagtgtgcccaagcaaggtttcagtttgtacnagnataggggtttcagtgttcaggatgtgcnagtgagttcacagtggaagcaggcatggcagtcaaggtggttgggcagacgacacagagcacattgacacatatgttcacaggcagntgttacatggagcatgggaaccaaaggactgcaggcagtgcagttcgagaaccaagctgctgcagacagggaggccaagcagacccacaggagaaggccaagggaagctgctggggacactgcaagcagagaagcatgcagtgcaggcctgcagtgctggagtgtgtgatgtgatttgacaccattcgtgttgcaaactggttgaatgttgctgtgcagggtttaagggggtttcaagctgttgcagtgagagaggccatggtgcaaagtggatggtgacaaattgagtgaatgttgtttttacccgacaaatcatgcaataaaccacaggcttcacantaaaaaaa

SEQ ID NO: 87339 - DNA, 2661 bp, Oryza sativa
  Clone ID: PAT_MRT4530_86294C.1
atggatcaatcaacaattgatcgaagttggatgtatgcgaaaaatttgaaacgtcattctacggagtacagaaagggcgtaataaattttatgaacgccgcggaggaggatcggaaaagaggaaacagtgattacatgtgttgtccatgtgcagattgcaagaatgagaatatgtttgatagcggagaggacgtacatggtcatctgatacaacgaggattcatggagggctatacatgttgggtgaagcatggagagcaagaatcaggaagtggagcagtagcagacagaagtgacatgttacatgacgttgaggacctagcccagaatgagagagatggaatgaagttcagcaggttggtctgtgattccgagacgcctctgtacgctggatgcaaagcaaaacacactaagttgtcagttaccttggacctaatgaagctgaaggaaagtagtggatggacagacaagagtttcacaggtcttttaggaattttgaaggctatgcttcttgctgagaacacattgcccgagacgacatacgaagcaaagcaggttatgtgtccactggggttagaggtccgtagaatttacgcttgtccaaacgactgcatattgtaccacaagcaatatgcggacttggatacttgtcctgtctgcaaggcttctcgatacaagcgaaagaaaagtgctgacgaaggaaataagtcaaagaggggtggtccggcaaaggttgtgtggtatctacctatcattgatcgtttcaagagaatctttgccaacccgaacgaagccaagttagtacgttggcacgccacgaagagaaggaatgacggtccgaggcaacccgacaatgatatcgatgtattcctggagcctgttatcgatgatctggagattctttggaaagaaggtttggaaacgtgggatgcatatggtcaggagaacttcaagctaagagttctattgtactgcaccattaatgactaccctgcacttggtaatctttccagacaaactataaaaggaaagaaggcatgctccgattgcaaggaacatacacgaagtcggtggctgaagaaatcacgaaagatggtatacatgggtcatcggaggtggctcccgctacgtcacgcatttagaagaaagaagaaaatttttaacggtaagagagaacttcagcctgctcccaaagatttgtccgaagatgaggtccacaatatggtcaaggacataagcaatgagtttgggaagaaaagaaaacgtagcaagacaaaggagaaggaaaagaatgtgtgtgagagtttggttggcctgatgttgaatattcccgggaagacaaaggacgggttgaacgcgcgccttgatctacatgacatgaatattcgcagtgaactccagcccatacgagatgcagagacaggtagagtgtacctccctccagcctgccatacattgtcgaaggatgagaagatcgcaatgttaacatgcttgaaggatattaaagttccatcgggctattcagcgaggataaatccagaagatctagatgggttgcagacctatattgtgaataccctctgtcacctggagatgtttttcccactgtctttctttgatataatggttcatctccttgttcatctggtgaagcaaacaaaactatgtggcccggcttttctaagggaaatgtggtcgtttgaaaggtacatgggagttctgaagtcgtacgttcataacagagctaaacccgaggggagcatcattgaaggttacacgaccgaggaggctattgagttctgtgtcaattacatgtccgatgccgatcctatcggagttcctgcgtctcgtcacgagggaaggttgtcaggtgttggcacaatcggaaggaaaagaattaggcccgatcaagcgtcgtacgcgcaggctcattacgctgtgctccaacatatggcagaagttggcccatactttgaggagcacttagcgaaaatccgagatgagaacttggggcgatctgatgcatggattaacagagaacataattctcggttcaacgaatggttcaagaatcgtgtgacaatgtccacagatgtcccaaatgagacagtacagttgttggggatgggaccgtcttggaccgtagacacatggcaaggatacgatataaatggatacacattttacaccgtcaaacaagatgacaaaagcacagtgcaaaacagtagcgtccgtatagatgcattccagaatcaagttggatcaaacacatactacggccgcattgaggagatatgggagctaaactacgtcaagttcaaggttcctttgttccgctgccgttgggtgaatctacgcactggtgtcaaagccgacaaggaaggtttcactttagtatatctatcaaaggtgggatacgccgatgaaccatttgtacttgcgaaacaggtcgagcagatattctacataaaagacccttcaaacaagaagatgcacatcgtgagggatggaaagcgccgaattgtaggagttgacaacgtcgtcgatgaagaagaatacaaccataatattcatgtaagacctcacattgaccttgacgatgatccccaagagcctgtggcatatgctcattcagatcatacggaaggcataaccttgtga

SEQ ID NO: 87340 - DNA, 548 bp, Oryza sativa
  unsure (1)..(548): unsure at all n locations
  Clone ID: PAT_MRT4530_86295C.1
ggaaaatactccgtattgtgtgctggccaatcgccacggtcttcggatggacggcgacggcgtcggcggcagcatgcacgtggtgatgctgccatggctggccttcggcacatcctccccttcgccgagttcgccaagcgcgtggctcggcagggccaccgggttacgctcttctccacgccgaggaacacccgccgcctcatcgacgtgccgccgtcgctcgcggggcgcatccgcgtcgtggacatcccgctgccgcgcgtcgagcacctgccggagcacgccgaggcgaccatcgacctcccctccaacgacctccggccctacctccgccgggcctacgacgaagccttctcccgcgagctgtctcggctggctgcaggagacgggcccgtcgaggcccgactgggtcctncggccgacttacgccgcgttactggngcgccggccgccgcctcganggcacggcgtgcgtgcggcgttcctcagcctgttcggagccgcggcggtcttgctntcttctgttcncgcgggagacgctccagggg

SEQ ID NO: 87341 - DNA, 723 bp, Oryza sativa
  Clone ID: PAT_MRT4530_86296C.1
atgaagggctatacatgttgggtgaagcatggagagcaagaatcaggaagtggtgcagctacagacaaaagtggtgcgcataatcaggaagatgaagatgagcatgacatatttataccttctccattgggcggtgaaatggttgatgtggatcacgatctggtgcaagacatgttacgtgacgttgagtacccagcccacaatgagagagattgcatgaagttcagcgggttggtcagtaactccgagacgcctctgtatgccggatgcaaagcaaaacacaccaagttgtcagttacattggacctaatgaagctgaaggcaagtagtggatggacaaacaagagttttacagatcttttaggaattttgaaggctatgcttcctgatgagaacacattgcccgagacaacatacgaagcaaagcagattctgtgtccactgaggttagaggtccatataattcacgcttgtccaaacgactgcatattgtaccacaagcaatatgcggacttagatggttgtcctgtctgtaaggcttttcgatacaagcgaaagaaaagtgctgatgaatgcaagaagtcaaagaggtgtggtctggcaaaggttgtgtggtatctacttatcattgatcgtttcaagacaatcttttccaaccccaaggaagcgaagttagtacgttggcacgccacagatagaaggaatgacggtgataaaccctaa

SEQ ID NO: 87342 - DNA, 399 bp, Oryza sativa
  Clone ID: PAT_MRT4530_86297C.1
atgctgaagccgccaccggcgacggcgtacggcacggcgccacacccgctcgccggcgagaaggtccccctcactgccttcaaccgcgcggccttcgacatcttcgtccccatggtgttcccctaccgtgcgccggtgctgtccaatgaggcgatcatggagggcctccggatggccgtcgccgcgtaccctcacatggcgggtcgcctcgccctcgccgtcgacgaccgcgatagccgcactagtacaaaacatcaaataggtgtcgccactataggtgtcggtagtgctataacttcaggccggcgcttctgcaggtacagctcacccgcttcaggtgtggcgacctcatcgtcggcctcatcgtccaccaccacgtcggcgacggccactccatga

SEQ ID NO: 87343 - DNA, 2766 bp, Oryza sativa
  Clone ID: PAT_MRT4530_86298C.1
atggatcaatcaacaattgatcgaagttggatgtatgcgaaaaatttgaaacgtcattctacggagtacagaaagagcgtaataaattttatgaaagccgcggaggaggatcggaaaagaagaaacagtgattacatgtgttgtccatgtgcagattgcaagaatgagaatatgtttgatagcggagaggacgtacacggtcatctgatacaacgcggattcatgaagggctatacatgttgggtgaagcatggagagcaagaatcaggaagtggagcagcagcagacagaagtggtgcgcataataaggaagatgaagatgagcatgacatgtttataccttctccattgggcgatgaaatggttgatgtggataacgatttgctgcaagacatgttacgtgacgttgaggacccagcccagaatgagagagatggaatgaagttcagcaggttggtcagtgattccgagacgcctctatgcgctggatgcaaagcaaaacacactaagttgtcagttaccttggacctaatgaagctgaaggcaagtattggatggacagacaagagtttcacagatcttttaggaattttgaaggctatgcttcctgatgagaacacattgcccgagacgacatacgaagcaaagcaggttctatgtccactggggttagaggtccgtagaattcacgcttgtccaaacgactgcatattgtaccacaagcaatatgcggacttggatgcttgtcctgtctgcaaggcatctcgatacaagcgaaagaaaagtgctgacgaaggaaataagtcaaagaggggtggtccggcaaaggttgtgtggtatctacttatcattgatcgtttcaagagaatctttgccaacccgaacgaagcgaagttagcacattggcacgccacggagagaaggaatgacggtccgaggcaacccggcaatgatatcgatgtattcctggagcctgttatcgatgatctggagattctttggaaagaaggtgtggaaacttgggatgcatatggtcaggagaacttcaagctaagagttctattgttctgcactattaatgactaccctgcactcggtaatctttccggacaaactataaaaggaaagaatgcatgctccgattgcaaggaatatacacgaagccggtggctgaagaaatcacgaaagatggtatacatgggtcatcggaggtggctcccgctacatcacgcatttagaagaaagaagaaaatttttaacggtaagagagaacttcagcctgctcccaaagatttgtccggagatgagatccacaatatgatcaaggacataagcaatgagtttgcgaagaaaagaaaacgtagcaagataaaggagaagggtatgtggaagaaaaaatccatattttgtcggctaccttactggaaagatcttgatgtacgtcattgcattgatctcatgaatgtagaaaagaatgtgtgtgagattttggttggcctgatgttgaatattccagggaagacaaaggacggtttgaacgcgcgccttgatctacaggacatgaatattcgcagtgaactccagcccatacgagatgcagagacaggtagagtgtacctccctccagcctgccacacattgtcgaaggatgagaagattgcaatgttatcatgcttgaaggatattaaagttccatcgggctattcagcgaggataagtatgtatgttaaattggacgatctaaaacttgttggaatgaagtctcacgattgccacttgctaatcacacaaatcttgccagttgctatcagaggcattctaccaccgaaagtgcgtcacatgatccaacgtctgtgcgccttcttcaatgcaactggacagaagcaaacaaaactatgtggcccggcttttctaagggaaatgtggccgtttgaaaggtacatgggagttctgaagtcgtacgttcgtaacagagctaaacccgagggcagcatcattgaaggttacacgaccgaggaggctattgagttctgtgtcaattacatgtccgatgccgatcctatcggagttcctacgtctcgtcacgagggaaggatgttaggtgttggcacaatcggaaggaaaagaattaggcccgatcaagcgtcgtacgcgcaggctcattacactgtgctccaacatatggcagaagttggcccatactttgaggagcacttagcaaaaatccgagatgagaacttggggcgatctgatgcatggattaacagagaacataattctcggttcaacgaatggttcaagaatcatgtgacaatgtccacggatgtcccaaatgagacagtacagttgttagggatgggaccgtcttggaccgtagacacatggcaaggatacgatataaatggatacacattttacaccgtcaaacaagatgacaaaagcacagtgcaaaacagtggcgtccgtatagatgcgttccaggatcaagttgggtcaaacacatactacggccacattgaggagatctgggagctaaactacgtcaagttcaaggtcgagcagatattctacataaaagacccttcaaataagaagatgcacatcgtgagggatggaaagcgccgaattgtaggagttgacaacatcgtcgatgaagaagaatacaaccataatcttcatgtaagacctcacattgacctggacgatgatccccaagagcctgtggcatatgctcgttcagatcatacagaaggcataaccttgtga

SEQ ID NO: 87344 - DNA, 1605 bp, Oryza sativa
  Clone ID: PAT_MRT4530_86299C.1
atggtatacatgggtcaccggaggtggctcccgctacatcacacatttagaagaaagaagaaaatttttaacggtaagagagaacttcagcctgctcccaaagatttgtccggagatgaagtccacaatatggtcaaggacataagcaatgagtttgggaagaaaagaaaacgtagcaagacaaaggagaaggaaaagaatgtgtgtgagagtttggttggcctgatgctgaatattcccgggaagacaaaggacgggttgaacgcgcgccttgacctacaggacatgaatattcgcagtgaactccagcccatacgagatgcagagacagttgctatcagaggcattctaccaccgaaagtgcgtcacacgatccaacgtctgtacgcctccttcaatgcaattggacagaaggttatagatccagaagatctagatgggctgcagaccgatattgtgaataccctctgtcacctggagatgtttttcccactgtctttctttgatataatggttcatctccctgttcatctggtgaagcaaacaaaactatgtggcctggcttttctaagggaaatgtggccgtttgaaaggtacatgggagttctgaagtcgtacgttcgtaacagagctgaactcaaggggagcatcattgaaggttacacgaccgaggaggctattgagttatgtgtcaattacatgtccgatgctgatcctatcggagttcctgcgtctcgtcacaagggaaggttgtcaggtgttggcacaatcggaaggaaaagaattaggcccgatcaagcgtcgtacgcgcaggctcattacgctgtgctccaacatatggcagaagttggccaatactttgaggagcacttagcgaaaatccgagatgagaacttggggcgatctgatgcatggattaacagagaacataattctcggttcaacgaatggttcaagaatcgtgtgacaatgtccatggttgtcccaaatgagacagtacagttgttggggatgggaccgtcttggaccatagacacatggcaaggatacgatataaatggatacacattttacaccgtcaaacaagatgacaaaagcacagtgcaaaacagcggcatccgtatagatgcattccaggatcaagttgggtcaaacacatactacggccacattgaggagatctgggagctaaactacgtcaagttcaaggttcctttgttccgctgccgttgggtgaatctacgcactggtgtcaaagccgacaaggaaggtttcactttagtagatctatctaaggtgggatacgcctatgaaccatttgtacttgcgaaacaggtcgagcagatattctacataaaagacccttcaaacaagaagatgcacatcgtgagggatggaaagcgccgaattgtaggagttgacaacgtcgtcgatgaagaagaaaacaaccataatcttcatataagacctcacattgaccttgacgatgatccccaagagcctgtggcatatgctcgttcagatcataccgaaggcataaccttgtggctgatgcatttgtacttatctattgtaatgaataaagtattttgttttattgcatag

SEQ ID NO: 87345 - DNA, 363 bp, Oryza sativa
  unsure (1)..(363): unsure at all n locations
  Clone ID: PAT_MRT4530_8629C.1
gctagagagagaaacaaattaaccaagaaatcctcttaagaaggatactgacagtgcacgccagctagctaatcactccaccagtttcggggaaaaaatatcaaggatttcgagatcctagctcgctagcaggtgatcgatcgatcgatcaatggccctggtgcagtcggcgcggcgtgccgcggggccggcggcgagcctgcntcttctcgacggcgtcggtggcggcggccgggcgctcccccgtggctggcctgccgaaggcttgccgcggccggccatatcgtcgctgtggatggtcggcgccgcctccgccccgccgctttgncggcacggngcggttgggcggtgttcgacgtgacc

SEQ ID NO: 87346 - DNA, 177 bp, Oryza sativa
  Clone ID: PAT_MRT4530_862C.1
cctaggtgcactgtgaatggccttagggcacttgtgctcgaacacctgtcgttagtgaggactgaggaatcagtcgtcggtttgtatcagtatcagaatttacaatccttcgcgtgaaatttcgtgatttcaaggtgattcgaaatcagatttcgagaaaaaaaaaaaaaaaaaaaa

SEQ ID NO: 87347 - DNA, 289 bp, Oryza sativa
  Clone ID: PAT_MRT4530_86300C.1
ttttgtgccgccgccaacacacaggggagggcgcgccgatctccatctggctggcgatcgagcagagcaggggatcctgttaaaagcttccatccaggaatggcaatggtattgagaagagtactgaaacatggtgtaatcccaagagatgcagctcaagtagttggcataagaggatttgcatttgcaagcaaggcaaagaagggcggaaagggttgcggacgatgctgttaaaacccctgtgcttagtcaagttcttaagagtacaacagtgttttggggcaatata

SEQ ID NO: 87348 - DNA, 2388 bp, Oryza sativa
  Clone ID: PAT_MRT4530_86301C.1
atgtcgacgacaactagtgggtcctcaagggcacgtactcctaggacagggaacaaaattcctaaggaacggttccgtataacagcggtgaacgccgtagggttgccgacatctccaaggaaaatattgagccgatttaggtctatctgcggggtcatagggaggcagaaattcagtattctgcaagacgacttcaagctcgtgccggccgcagagaaggacattgcttggctaacgttcaaggagagctttgattatcctgcggagcatgaggaccgtctcaggcgggctgctttcaaggttatgggcactgcttggaagaacttcaagactaagctagtcggcgagttcgtctacaacccggcaattccagatccaagagagaaatttccttggatcacggaacaggtctggtcggaattccatgcgaagaagtcgacccccgagtccagagctagaagcgaggcatatcgcttgctccagaccaggaaccagcatccacaccggcttggtaccgccggatatgatggtaaggaagaggaatggcagcgtgaggatgaagaagcggaggaatcgtgcacaccgctcaaggagttggttgccgagcaacaagccccgcaagaggcctgcgctcaaagacgcgaggacgacctcctcacgaaagcgttgggcaacaaggaacaccgtggacggacacggggcgttgggtcttctgttccctggaagtatggatttccagactacgcgtggcagtacaagaagcggacttccaacaaggcggagaaagatgcacgccttgaagccaagattcgggagtcgatacgagctgagctgacatctgaattcgacaaaaagctcgagtcgatgagggccaagattaggcaagagatccgagaagagcaacagatcccccaggccgccgctgctgctgcgcacaaagagttagaaagtcccaccgaaaaacgcagcagttgcgcatcaactgagttggcggaaaatccaacatcggtcgacagcgccgtcgaccacataacggaaccaacgagctgcaccctcacagttagggtgatgccgaccttcactattccagcagccgagggacttgcgtacaagccgaccccagagacaagagtgcatggagcgcaactcagggccgactgtgcaaaagttcaagtcgactcggtgaagcccgaatacgagctgttccctctgaagtatccaccgaacgacgaggtcctctcactaggaaatgcccgtggtaccttcatccaatggcccaaggacctcattgagatcagggttacagcgaggccaaccactgcaccaggcggtcgtccaccaaagagacccgcctctgctccatcagcccctcctgctcaagatcgtcatgcacaatcttacgatgaccgaacggaggccgacagcaaggcgattcatgaacccccactgatgaagaagagcaggaaggcacactcttcccctcagagaattactctcgataaacccgaagcaaaggggagaggaaggggaggaaaggtgcaggcctcgcttctagctccaagaaagctagatctgggcaagggccaggaagagactaagggcaaagaggtcaagaagaaatacgtcgctccaaaggagttccaactaggcatgccattggttggagatgacgtgcttgccgcaatgggcaccgcttgcaaggaccttcacttatactacatggagaaatctaacgccaggaagccaagtaaagctaccgatatccttggacagcacgatggaaagccattccttagtccaacaaattatatcgtggtcgacttcaaggatcttttcgacctctacaggctccgagcggtggacacaagcctccttaagtgctactccttgttaagttggcaatggtgtcagaagcatgcaccggaagttgccttccttgatccacaagtggtcactgtcacaaatctccagaatgaccgtcaaggaatggtcaactacatctacgacaccttgtggtcccgccgagacaaggagtacattatgtgtgcctataatcaatatacatgtcattacctgaactccagaattgataagaacgcatatgattggaccccaattcaactagcgatagatgaagcgtgggcccaatacgtgcaaagaggaggcctcaggaagacaggacatgacaccctcatccacaaaaaagacttcctggtgaagcaacaaataggtgaccagtgcggattccatgtgtaccacaacatgcgacttctatatagagaaaaggtgaagactttggctgagtttgagggcacaataaccaagtctctgactaccagctttgaggaggcaatgatgaacacttattatgcaactgtggtgatgtaa

SEQ ID NO: 87349 - DNA, 363 bp, Oryza sativa
  Clone ID: PAT_MRT4530_86302C.1
ttacacctgacgtaggctgcatcggctttcaatctccagcaaaggggtaagtcctacgctctgtcgggccctggtgaatctgtcggctacgttggtgttgttcaaggctgcacaggagttaagcagatctcccaggccggtgtgtttgattttttcgtcaacagtcctcctcctccctccgccgccgcgcgcgggcgcgtcgcaggtgatcttcccttccgatcccttctcgtggacgaactggttggggaggattgcttgggaggacgatggcgcgcggccgatgagtacgcgcaccacctcctccaccatcagcgtcccgtagacgaacacgcggtgggaagccgaagccgctgccgccat

SEQ ID NO: 87350 - DNA, 2850 bp, Oryza sativa
  Clone ID: PAT_MRT4530_86303C.1
atggatcaatcaacaattgatcaaagttggatgtatgcgaaaaatttgaaacgtcattctacggagtacagaaagggcgtaataaattttatgaacgccgcagaggaggatcggataagaagaaacagtgattacatgtgttgtccatgtgcagattgcaagaatgagaatatgtttgatagcggagaggatgtacacggtcatctgatacaacgaggattcatggagggctatacatgttgggtgaagcatggagagcaagaattaggaagtggagcagcagcagacagaagtgacatgttacgtgacgttgaggacccagcccagaatgagagagatggaatgaagttcagcaggttggtcagtgattccgagacgcctctgtacgctggatgcaaagcaaaacacactaagttgtcagttaccttggacctaatgaagctgaaggagagtagtggatggacagacaagagtttcacagatcttttaggaattttgaaggctatgcttcctgttgagaacacattgcccgagacgacatatgaagcaaagcagcaatatgcggacttggatgcttgtcctgtctgcaaggcttctcgatacaagcgaaagaaaagtgctgacgaaggaaataagtcaaagaggggtgctccggaaaaggttgtgtggtatctacctatcattgatcgtttcaagataatctttgccaacccgaacgaagcgaagttagtacgttggcacgccatggagagaaggaatgacggtccgaggcaacccggcaatgatatcgatgtattcctggagcctgttatcgacgatctggagattctttggaaagaaggtgtggaaacttgggatgcatatggtcaggagaacttcaagctaagagttctattgttctgcaccattaatgactaccctgcactcggtaatctctccggacaaactataaaaggaaagaaggcatgctccgattgcaaggaacatacacgaagccggtggctgaagaaatcacgaaagatggtatacatgggtcaccggaggtggctcctgctacgtcacgcatttagaagaaagaagaaaatttttaacggtaagagagaacttcagcctgctcccaaagatttgtccggagatgaggtccacaatatggtcaaggacataagcaatgagtttgggaagaaaagaaaacgtagcaagacaaaggagaagtgtatgtggaagaaaaaatccatattttggcggctaccttactggaaagatcttgatgtccgtcattgcattgatcttatgcatgtagaaaagaatgtgtgtgagagtttggttggcctgaagttgaatattcccgggaagacaaaggacgggttgaacgcgcgccttgatctacaggacatgaatatttgcagtgaactccagccgatacgagatgtagagacaggtaaagtgtacctccctccagcctgccacacactgtcgaaggatgagaagatcgcaatgttatcatgcttgaaggatattaaagttccatcgggctattcagtgaggataagtaagtatgttaaattggacgatctaaaacttgttggaatgaattctcacgattgcctcgtgctaatcacacaaatcttgccagttgctatcagaggcattctaccaccgaaagtgcgtcacatgatccaacgtctgtgcgccttcttcaatgcaattggacagaaagttatagatccagaagatctagatgggctgcagaccgatattgtgaataccctctgtcacctggagatgtttttcccactgtctttctttgatataatggttcatctccctgttcatctggtgaagcaaacaaaactatgtggcccggcttttctaagggaaatgtggccgtttgaaaggtacatgggagttctgaagtcgtacgttcgtaacagagctaaacacgaggggagcatcattgaaggttacacgaccgaggaggctattgaggtctgtgtcaattacatgtccgatgccgatcctatcggagttcctgcgtctcgtcacgagggaaggttgtcaggtgttggcacaatcggaaggaaaagaattaggcccgatcaagcgtcgtatgcgcaggctcattacgctatgctccaacatatggcagaagttggcccatactttgaggagcacttagcaaaaatccgagatgagaacttggggcgatctgatgcatggattaacagagaacataattctcggttcaatgaatggttcaagaatcgtgtgacaatgtccacggatgtcccaaatgagatagtacagtcgttggggatgggaccgtcttggaccatagacacatggcaaggatacgatataaatggatacacattttacaccgtcaaacaagatgacaaaagcacagtgcaaaacagcggcgtccgtatagatgcattccaggatcaagttgggtcaaatacatactacggccgcattgaggagatctgggagctaaactacgtcaaattcaaggttcctttgttccgctgccgttgggtgaatctactcactggtgtcaaagccgacaaggaaggtttcactttagtagatctatctaagatgagatacaccgatgaaccatttgtacttgcgaaacaggttgagcatatattctacataaaagacccttcaaacaagaagatgcacatcgtgagggatggaaagcgccgaattgtaggggttgacaacgtcgtcgatgaagaagaatacaaccataatcttcatgtaagacctcacattgaccttgacgatgatccccaagagcccgtggcatatgctcattcagatcatacggaaggcataaccttgtga

SEQ ID NO: 87351 - DNA, 2109 bp, Oryza sativa
  Clone ID: PAT_MRT4530_86304C.1
cacgaggccccgtctcctcgccgattcccgccgccgaggaggagggggagtggagggagggagtggggggcggcggtgggtgccccgtcgtcctgctgctctccgcctccgctccggatctggagctgagattaatgaaataagatgctcctcaagagcaaattcaagttggccacagcgattggcatcgtgctgtcgatgctatcgctgctggtgcaccttttccttgcgaattattctgctgggggaatcacaagatatagtctgcatatggatgatgtccttccgtttggaccaaggcctcgaccccggagattgtggggttcgttgagtacacttgatcatttacacccttatgcgaaacctagaaaaatctaccctgctctggattatcataatggttttatttatgcaaagatctatggtggctttgagaagatacaatcttcaatctgtgatcttgtcgccgttgccaggctcttaaatgccaccctagttattcctgagattcaagcaacgacacgtgcaaaaggcatcagttcaaaattcaagagcttttcatatctatatgatgaagatcagttcatttccgcactttccagtgatgtagctattgtgcgtggtttgccaaaggatctcagggaggctagaaaaaagataaaatttcccacagtatcacctaaaaactcggctactccagaatattacgtgacagaagtcctgccaaaactttccaagtcaaaagttattgggataatcattaatggaggcaaatgtctccagtcaatccttccagcaaccttggaggaatttcagaggcttagatgcagggtagccttccatgctttgaagttccgtccagaaattcgtgctctcgggaaccaaatagttagcagattacgtgtatctggtcgtccttatctagcatatcacccaggactgctaagagatactctagcttttcatggttgtgctgaactgttccaggatattcatacagaacttattcaatatagaaggaatcagatgatcaaacgaggaactgtaaaggaacaattatcagttgattcagtgtccaggaagataaatggttcatgtccactcatgccagaagaggttggacttctgcttcaggcattaggttatccatcaactacaataatatacttggctggttctgaaacttttggtggacagagaatacttattccactacgagctatgtatgccaacttagttgatcgcacttctgtatgtagtcagagggagttatctgatttagttggcccagaggctcctcttgcatcagatatggcacaccctccacctcccaaaactgagaaagaactcgttgacgaatggaagagagcagggcctcgcccaagaccgctgccaccacctcctgcaaggccatactatgctcatgaaaaagtaggctggtatggctggattggtgagaatgacacagaaccagatccttctcccgttgaatttagaaggcaagcgcatcggttgctctgggacgcacttgattattttgtttcggttgaagctgatgcattctttcctgggtttcataatgatgggagtggctggccagactactcaagtttgatcatggggcatcggctataccaaaccccatctggtataacctataggcctgacagaaagactatttctgcgcttttcgaaaatgttagtgaccatcggtatcacccgccacggaattggacattggctgcacgccaacatctcaataacagtgcaagtgtagaaggcattgtaaaatcagcgatgctgtcaaaacctgtatcttttcttgcccacccattaccagagtgttcttgtagaacgccaaagtcacctggtgttcagtcgacgaaagatagccatggtaggctcctatttggaggtgaagaagagtgtcctgattggatggttcgcagcttggccatggtgtctaccaagaataatgagcctcaaaatgaggattacgacggcgacttgcctgaagatgattctagccaagacacacagcaggaatctgatagaagtgacatgaataaatcctcagaacaggatgaggagatggatccagatgattga

SEQ ID NO: 87352 - DNA, 1946 bp, Oryza sativa
  Clone ID: PAT_MRT4530_86305C.1
atgtcgacgacaactagtgggtcctcaagggcacgtactcctaggacagggaacaaaattcctaaggaacggttccgcataacagcggtggacgccgtagggttgccgacatctccaaggaaaatattgagccgatttaggtctatctgcggggtcatagggaggcagaaattcagtattctgcaagacgacttcaagctcgtgccggtcgcagagaaggacattgcttggctaacgttcaaggagagctttgattatcctgcggagcatgaggaccgtctcaggcgggctgctttcaaggttatgggcactgcttggaagaacttcaagactaagctagtcggtgagttcgtctacaacccggcaaatccagatccaagagagaaatttccttggatcacagaacaggtctgggaggaattccatgcgaagaagtcgacccccgagtccaaagctagaagcgaggcatatcgcttgctccagaccaagaaccagcatccgcaccggcttggtaccgccggatatgccggtaaggaagaggaatggcagcgtgaggatgaagaagcggaggaatcgtgcacaccgctcgtgtttggcgatatcccacaccctcgggctaggaactgggccagggctaggtaccagaaacatgatgatggcacaatcttcatgccaaatgcagaagatcaacgagtatacgaagctatactcgagtcgatgagggccaagattaggcaagagatccgagaagagcaacagatcccccaggccgccactgctgctgcgcacaaagagttaggaagtcccatcgaaaaacgcagcagttgcacatcaactgagttggcggaaaatccaacatcggtcgacagcaccgtcgaccacatatcgaaaccaacgagctgcaccctcatagttagggtgatgctgaccttcactgttccagcagccgagggacttgcgtacaagccaaccccagagacaagagtgcatggagcgcaactcagggccgactgtgcaaaagttcaagtcgactcggtgaagcccaaatacgagctgttccctctgaagtatccaccgaacgacgaggtcctctcactagaaaatgcccgtggtaccttcatccaatggcccaaggacctcattgagatcagggttacagcgaggccaaccattgcaccaggcggtcgtccaccaaagagacccgcctctgctccttcagcccctcctgctcaagatcgtcatgcacaatcttacgatgtgcagatgcagtacgacacggattttggggaggaccgaacggaggccgacagcaagacgattcatgaacccccaccgatgaagaagagcaggaaggcacactcttcccctcagagaattactctcgataaacccgaagcaaaggggagaggaagaggaggaaaggtgcaggcctcgcttctagctccaagaaagctagatctgggcaagggccaggaagagactaagggcaaagaggtcaagaagaaatacgtcgctccacaggagttccaactaggcatgccattggttggagatgacgtgcttgccgcaatgggcaccgcttgcaaggaccttcacttatactacatggagaaatctaacgccaggaagccaagtaaagctaccgatatccttggacagcacgatggaaagccattccttggtccaacaaattatgtcgtggtcgactttaaggatcttttcgacctctacaggctccgagcggtggacacaagcctccttaagtgctactccttgttaagttgtcaatggtgtcagaagcatgcactggaagttgccttccttgatccacaagtggtcactgtcacaaatctccagaatgaccgtcaaggaatggtcaactacatctacgacaccttgtggtcccgccgagacaaggagtacattatgtgtgcctataatcaata

SEQ ID NO: 87353 - DNA, 321 bp, Oryza sativa
  unsure (1)..(321): unsure at all n locations
  Clone ID: PAT_MRT4530_86306C.1
ttggttttgtgatagccaaatatggccaggcccgccgaattatgatgagtgctacgttaggtctttatgggacggggggtctatgataccagaacgaagataaaacacactgaatttcagcttcaggctttcaaacgcatatcaactctgaaactaactaattcaggggcctgaactgaatttcaggcaggttcataggaggcgatctgaagctccgcccaccacaggggcttctccctaggcgcctcctgctccggctactacccggggatgccccccaccagtctgtccannnnttnaccgggatgatcgaatttgcat

SEQ ID NO: 87354 - DNA, 2175 bp, Oryza sativa
  Clone ID: PAT_MRT4530_86307C.1
atggagcaatcaacaatggatcgaagttggatgtatgcgacaactgtgaaacgccattttccggagtacagaaatggcgtaataaattttatgaacgccgtggaggaggataggaacagaagaaacaacgattacatgtgttgtccatgtgcagattgcaagaataagaatatgtttgatagcggaggggttgtacatgatcatctgatacaacgaggattcatgaagcgctatacatgttgggtgaagcatggagagcaagaatcaggaagtggtgcaacagcagacagaagtggtgcgcataatcaggaagataaagatgagcatgacatgtgtataccttctccattgggtggtgaaatggttgatgtggatcacgatctgctgctagacatattacgtgacgttgaggacccagcccagaatgagagaggttccatgaagttcagcaggtggctcccgctacgtcacgcatttagaacaaagaagaaaatttttaacagtaagaaagaacttcagcctgctcccaaggatttgtccggagatgaggtccacaatatggtgaaggacataagtaatgagttaagcaagaaaagaaaacgtagcaagacaaaggagaaggaaaacaatgtgtgtgagagtttggttggcctgatgttgaatattcctggaaagacaaaggacgggttgaacgcgcgccttgatctacatgacatgaatattcgcagtgaactccaacccatacgagatgtagagacagggagagtgtacctccctccagcctaccacacattgtcgaaggatgagaaaatcgcaatgttttcatgcttgaaagatattaaagttccatcgggctattcagcgaggataagtaagtatgttaaattgaacgatctaaaactggttgggatgaagtctcacgattgccacgtgctaatcacacaaatcttgccagttgctatcagaggcattctaccacccaaagtgcgtcacacgatccaacgtctgtgcgccttcttcaatgcaatcggacaaaaggttatagatccagaagatctagatgggttgctgaccgatattgtgaataccctctgtcacctggagatgtttttcccactgtctttctttgatatcatggttcatctccctgttcatttggtgaagcaaacaaaactatgtggaacggcttttctaagagaaatgtggccgttcgaaaggtacatgggagttctgaaatcctacgtttgtaacagagctaaacccgaggggatcatcattgaaggttacacgaccgaggaggctatcgagttctgcgtcaattacatgtccgatgtcgatcctatcggagttccagcgtctcgtcacgaaggaaggttgtcaggtgttggcacaatcggaagaaaaagaattaggcccgatcaagcttcctacgcgcaggctcattacgttgtgctccaacatatggcagaagttgacccatactttgaggagcaacacttagcgaagatccgagatgagaacttggggcgatctgatacatggattaacagagaacataattctcggttcaacgaatggttcaagaatcatgtgataatgtccacggatgtcccaaatgagacagtacagttgttgggaatgagaccgtcttggaccgtagacacatggcaaggatacgatatcaatggatacacatcttacaccatcaaacaagatgacaaaagcacagtgcaaaacagcggagtccgtatagatgcattccaggatcaagttgggtcaaacacatactacagccacattgaggagatctgggagctaaactacgtcaagttcaaggttgctttgttctgctgccgttgggtgaatctacgcactggtgtcaaagccgacaaggaatgtttcactttagtagatctatcaagggtgggatacgccaatgaaccattcgtacttgcgaaacaggtcgagcaggtattctacataaaagacccttcaaacaagaagatgcacatcatgagggatggcaaacgccgaattgtcggagttgacaacatcatcgatgaagaagaatacaaccagaatcttcatgtaagacctcacatcgaccttgacgatgatccccaagagcatgtggcatatgctcgttcagatcatacggaagtcataaccttgtga

SEQ ID NO: 87355 - DNA, 930 bp, Oryza sativa
  Clone ID: PAT_MRT4530_86308C.1
tccccgggctgaggaattcgggacgtggccttttccaccttgtcgccggcaaagccacagccacggcgatctgctccccctcacggcggcgatggcgctctcgacctcccggcctcaccacctcctgcgccctctcctccgcggcttccacgccacttctcaggccatggcgaggcctgagccccacgagttctccaagccgagcgactacctcgggagctgggagcccgcgggcgacccacgggaggcgtgggcgcggctggagcggcttcgcaagggctacgcgcgcgacgtgcggcagctgcggaggcagtactcgtacgagatgcagctgctggaggccgagcggcagcgcaaggcggaggcccgcgccgaggccgcccgcctcgccaacgaggagcgcaaggccaccaaggccgccgccgcgcagacgcgcgccgccgagcgccgcgccttcgagaaggacttccgccaagcccttatgaaagaaagagctgagaagctggagagctggagggagaaggagaagcttaaagtacagaagaaggcggatcacagggagctcttgcgcaagaaaagctctatgtgggttgctgaggataaactggaaacaacaattcttgacgctatcaaaaataccacagctctctgaggatacaagatggtgtattctgaaagcatgacggaggatggactgaaggaagcttatttgtgattcccttctggaactaatcacaactgcctaagcaataacaaccatatttgaaaattctgctgcaacactgtatgttatattgttagacttgaacgccaagctgaaattgtattttggcattgccttttttctgagagagacctctctcctcaaatttctgttaaaaatttgttgcacgattaaaattatcatggccaaattttgattttcctgcc

SEQ ID NO: 87356 - DNA, 174 bp, Oryza sativa
  Clone ID: PAT_MRT4530_86309C.1
atgggccggcctaagggggccgcctcaaggtccatgaatacaaaagacacttttaccgcgtccttcgacgtgaagcagttgtcattcgacaacacctggcgccgtccgtggggaacccagagcaaaaccacagatgccaccaaaaaagaccgtgaaagagagagttgtgcctag

SEQ ID NO: 87357 - DNA, 2604 bp, Oryza sativa
  Clone ID: PAT_MRT4530_8630C.1
ggctctctcctcctctcctcgatcgcacgcaccgcatctccgatccgcagcagcagcagcagcagcagccgcgaggccccggagccacgcgcatctcgctcgccgccggcgagaaggccccggtaaccggtgggccgcagagggggaaaaggttttggagggagcgacgccgcgtgcgtccccgtctcggctgggaccgaaccggaggtgtgccatttttggaggctatcgatgggtctggacaacaatttcggggagctatctggcatgttctgtggcttgtcctatgatggctacacggatcacggcagccagagcgattacttcaggttcgccgacccgcagccggcgatcgtgccccagatggacgccggacccagctccgccgcttcctccacggcgtcgagggccgccgtcagctcggggaccgacaacccagaggactgggagttcatctcggacgagtcgctcaactatatcagccgcatgctcatggaggaggacattgatgagaaggtcagcatgtaccaggaggagtccgcggcgctccgcgctgctgcgaagccattctatgacattcttgggcacaagttcccgccctcccctgaccgccagctggtagcttggcccctcgacagcccgagtgagagtagcactagcagctatccacactccttggctagttctgttactagcagcaacattagtggtgcggtcgatagcagccaacgccgttatgttggacacagtgagtatcggagcttgtctggtcattcttctcaaccgccggttggcccatcaagtgatgttcgcaacgctatggagacactagaagatcctttgattagtaatggcaggatccctgagtatttgtttgagagctttccaacatgggatttcaggagaggtgttgacgaggcacagaagtttctcccgggtagcgataaggtagtgattgatttagaggctggtggtgttgcaaaacgtcaagaagcagggaaagctatttctctgaatgtcagcaaggcagaggttttgaaggtaaagaaaaacagacagagtgaagaccttgacgtgatggaaggacggaatagtaaacagtctgcattttgttctgatgaacctgattggattgagatgtttgatgttctgcttcgtcaaactgagaagaaggcaactgatcttcgaaaaatgatgcgttttgaggcttccaagaattcgcccgttgctcagccaaaaggaccaagtgggacccgatcacggggacggaagccaactaagaaggatgtggtggaccttaggacgctactcatccactgtgctcaggcagtggcagctgatgaccgccggactgctaatgagttgttaaagcaaataaggcagcatgccaagccaaatggagatggctcccagagattggcgtattgctttgcagatggtcttgaggctcgcttggctggaacagggagccaactttaccataaacttgtggcaaaacggacaacagcctctgacatgctcaaggcataccatctttaccttgcagcatgcccattcaagaggctctcacattttctttcaaatcaaacaattttgagtttgacaaaaaatgcatcaaaggtgcatatcattgactttggcatttacttcggcttccaatggccgtgcctgattagacgtctcttcaagagggaaggtgggccaccaaagctgcgtatcacagggattgatgtacctcagccaggtttccgcccaactgagcgcatcgaagagacagggcagaggcttgcagaatatgctgagaagattggtgtcccttttgagtaccaaggcattgcatcaaagtgggaaacaatctgtgttgaggatctcaatattaagaaagatgaagtagtgattgttaattgcttgtatcggttcagaaatcttattgatgaaacagttgccatagacagtcctaggaatagggtgctcaataccataaggcaagtgaacccagcaatttttatccatggcattgtgaatgggtcgtacagcgttcccttcttcatcacacggttccgtgaggcattatttcatttctctgcattatttgacatgctcgagacaactgtgccacgggatgatgcccagcgtgcactaattgagagagatctatttggccgggaagcactcaatgtgattgcatgtgaaggctcagacagggtcgagagaccggagacatacaaacagtggcaagtgaggaatctgagagctggatttgtccagtctccattaaaccaagacattgtgctgaaagccaaggacaaagtgaaagacatctatcacaaagactttgtcattgatgaagacagtgaatggctccttcaagggtggaaaggaaggataatctatgccatatctacatggaagcctaataacaattagggtatggtctgtgagctgtgcctggttgcccgttagcactagcaattaacgaagaaaagtaccttggcattgggctacatgcgtatgtacagggctgccttgggccttccactgcactgctgctcggttctctgtggttctactacagtgaaagattgaacagaagccgattgttgc

SEQ ID NO: 87358 - DNA, 2772 bp, Oryza sativa
  Clone ID: PAT_MRT4530_86310C.1
atttctcagatcggatcgaaaatttttctaagtcctgctacagtttcccgcctccttagaaccctagcaccgccgtcatcctccctcaccaagcccgccgccgtcgccaccgagcccgccgccgccgcagtcccgatcggcgtctccaccgaccggcgccgccctccactgagcccgggcgccgccgccaccgagccccaccggccatcctcagacaatgtctcagcaaggcgaaccaatgtcgacgacaactagtgggtcctcaagggcacgtactcctaggacagggaacaaaattcctaaggaacggttccgcataacagcggtggacgccgtagggttgctgacatctccaaggaaaatattgagccgatttaggtctatctgcggggtcatagggaggcagaaattcagtattctgcaagacgacttcaagctcgtgccggccgcagagaagaacattgcttggctaacgttcaaggagagctttgattatcctacggagcataaggaccgtctcaggcgggctgctttcaaggttatgggcactgcttggaagaacttcaagactaagctagtcgacgagttcgtctacaacccggcaaatccaaatccaagagagaaatttccttggatcacggaacaggtctgggaggaattccatgcaaagaagtcgacccccgagtccagagctagaagcgaggcatatcgcttgctccagaccaggaaccagcatccgcaccggcttggtaccgccggatatgccggtaaggaagaggaatggtagcgtgaggatgaagaagcggaggaattgtgcacaccgctcgtgtttggcgatatcccacaccctcgggctaggaactgggccagggctaggtaccagaaaaatgatgatggcacaatcttcatgccaaatgcagaagatcaacgagtatacgaagctatagagttggttgccgagcaacaagcctcacaagaggcctgctctcaaagacgcaaagacgacctcctcacgaaagcgttgggcaacaaggaacaccgtggacggacacggggcgttgggtcttctgttccctggaagtatggatttccagactacgtgtggcagtacaagaagcggacttccaacaaggcggagaaagatgcacgccttgaagccaagatccgggagtcgatacgagctgagctgacatctgaattcgatgaaaagctcgagtcgatgagggccaagattaggcaagagatccgagaagagcaacagatcccccaggccgccgctgctgctgcgcacaaagacttaggaagtcccaccgaaaaacgtagcagttgcgcatcaactgagttggcggaaaatccaacatcggtcgacagcgccgtggaccacataacggaaccaacgagctgcaccctcacagttagggtgatgccgaccttcactagacaagagtgcatggagcgcaactcagggccgactgtgcaaaagttcaagtcgactcagtgaagcccgaatacgagctgttccttctgaagtatccaccgaacgacgaggtcctctcactaggaaatgcccgtggtaccttcatccaatggcccaaagacctcattgagatcagggttacagcgaggtcaaccactgcaccaggcggtcatccaccaaagagacccgcctctgctccttcagcccctcctgctcaagatcgtcatgcacaatcttatgatgtgcagttgcagtacgacacggattttggggaggaccgaacggaggccgacagcaaggcgattcatgaacccccaccgatgaagaagagcaggaaggcacactcttcccctcagagaattactctcgataaacccgaaccaaaggggagaggaaggggaggaaaggtgcaggcctcgcttctagctccaagaaagctagatctaggcaagggcaaggaagagactaagggcaaagaggtcaagaagaaatacgtcgctccacaggagttccaactaggtatgccattggttggagatgacgtgcttgccacattgggcaccgcttgcaaggaccttcacctatactacatggagaaatctaatgccaggaagccaagtaaagctaccgatatccttggacagcacaatggaaagccattccttggtccaacaaattatatcgtggtcgacttcaaggatcttttcgacctctacaggctccgagcggtggacacaagcctccttaagtgctactccttgttaagttggcaatggtgtcagaagcatgcaccggaagttgccttccttgatccacaagtggtcactgtcacaaatctccagaatgactgtcaaggaatggtcaactacatctacgacaccttgtggtcccgccgagacaaggagtacattatgtgtgactataatcaatatgcccattggatccttctggtcataacacctaaatagagtacatgtcattacctgaactccagaattgataagaacccatctcgttggaccccaattcaactagcgatagataaagcgtgggcccaatacgtgcaaagaggaggcctcaggaagacaggacatgacaccctcatccacaaaaaagacttcccggtgaagcaacaaataggtgaccagcgcgaattccatgtgtgccacaacatgcgacttctgtatagagaaaaggtgaagactttggctgagtttgagggcacaataaccaagtctctgactaccagctttgaggaggcaatgatgaacacttattatgcaactgtgatgatg

SEQ ID NO: 87359 - DNA, 804 bp, Oryza sativa
  Clone ID: PAT_MRT4530_86311C.1
atgaagcttcacgtcgtggcagccatcctgctggccgtggccgcgtcgtcgtcgccgccgcccgccgccgccgtcacctacgaggtgagcaacgaggcggcgagcaccgccggcggccagcggttcgaccgggagtacggcgccgggtacgccaagcaggtgctcgccgccgcctcctccttcacctggagcatcttcagccagccgagcgccgccgaccggaggcccgtcgacgccgtcgtcctcgccgtccgcgacgtcgacggcatcgcctccaccagcggcaacaccatcacgctcggcgccggctacgtcgccggcgtcaccggcaacgacttcaagacgcaggtgaccggagtgttgtaccatgaggtggtgcacgtgtggcagtgggggctgcaggattacggggcgcattcgtgggtgtacgaggggatcgccgactttgtgcggctgcgcgccggctacccagcggctggttgggtgcagccggggcaagggaacagctgggaggacagctactccgtgacggcgaggttcttcgactactgcgacagcgtcaagccagggttcgttgccgacctgaacgctaagctgaagaatgggtacaacgtcgactacttcgtgcagatcaccgggaagaccgtgcagcagctgtggcaggattacaaggccaagtaccgtcaatcttgctcccacctgaagcaacacgacgcgctctctccagtggcagtgcgccagtgccccatcccccaggtcaacctcgatagccaccaagagcggttctccagtggccgtcactaa

SEQ ID NO: 87360 - DNA, 2457 bp, Oryza sativa
  Clone ID: PAT_MRT4530_86312C.1
atgtctcagcaaggcgaaccaatgtcgacgacaactagtgggtcctcaagggcacgtactcctaggacaggaaacaaaatccctaaggaacggttccgcataatagcggtggatgccgtagggttgtcgacatctccaaggaaaatatggagccgatttaggtctatctgcggggtcatagggaggcaaaaattcagtattctgcaagatgacatcaagctcgtgccggccgcagagaaggacattgcttggctaacgtttaaggagagcttcgattatcctgcggagcatgaggaccgtcttaggcgggctgctttcaaggttatgggcaatgcttggaagaacttcaagactaagctagtcggcgagttcgtctacaacccgacgaatccagatccaagagagaaattttcttggatcatggaacaggtctgggtggaattccatgcgaagaagtcgacccccgagtccagagctagaagcgaggcatatcacttgctccagaccaggaaccagcatccacaccggcttggcaccgccggatatgccggtaaggaaaaggaatggccgcgtgaggatgaagaagcggaggaatcgaacacgccactcgtgtttggtgatatcccacaccctcgggctaggaactgggccagggccaggtaccagaagaatgatgatggcacaatcttcatgccaaatgcagaagatcaacgagtgtacgaagctataaaggagttggttgccgagcaacaaccctcgcaagaggcctgctctcaaagacgcgaggacgacctcctcacgaaagtgttgggcaacaaggaacaccgtggacggacacgaggcgttgggtcttctgttccctggaagtatggatttccatactacgcgtggcagtacaagaagcggacttccaacaaggcggagaaagatgcatggcttgaagccaatatccgggcgtcgataagagctgagctgacatctgaattcgacgaaaagctcgagtcaatgaggaccaagattaggcaagagatccgagaagagcaacagaacccccaggccaccgctgctgcggcgcacgaagagttaggaagtcccacccaaaaacgcagcagttgcgcatcaactgagttggcggaaaatccaacatcggtcgacagcaccgtcgaccacataatggaaccaacgagctgcaccctcatagttagggtgatgccgaccttcacggttctagcagccgagggacttgcgtacaagccgaccccaaagacaagagtgcatggagcgcaactcagggccgactgtgcaaaagttcaagtcgactcggtgaagcccaaatacgagctgttccctctgaagtatccaccgaacgacgaggtcctctcactaggaaatgcccgtggtaccttcatccaatggcccaaggacctcattgagatcagggttacagcgaggccaaacactgcaccaggcggtcgtctaccaaagagacccacccctgctccttcagcccctcctgctcaagatcgtcatgcacaatcttacgatgtgcagttgcagtacgacacggattttggggaggaccgaacggaggccgacagcaaggcaattcatgaacccccaccgatgaagaagagcaggaaggcacactcttcccctcagagaattactctcgataaacccgaagcaaagaggagaggaaggggaggaaaggtgcaggcctcgcttctagctccaaggaagctagatctgggcaagggccaggaagagactaagggcaaagaggtcaagaagaaatatgtcgctccacaggagttccgactaggcatgccattggttggagatgacgtgcttgccgcaatgggcaccgcttgcaaggaccttcacttatactacatggagaaatctaacgccaggaagccgaataaagccaccgatatccttggagagcacgatggaaagccattccttggtccaacaaattatatcatggtcaacttcaaggatcttttcgacctctacaggctccgagcggtggacacaagcctcttaagtgctactcctttggtcattgtcacaaatctccagaatgaccgtcaaggaatggtcaactacatctatgacaccttatgtgcccattggatccttctggtcataacacctaagtggagtacatgtcactacctgaactccagaattgataagaacgcatatgatttgaccccaattcaactagcgatagatgaagcgtgggcccaatacgtgcaaagaggaggcctcaggaagataggacatgacaccctcatccacaaaaaagacttcccggtgaagcaacaaataggtgaccagtgcggattccatgtgtgccacaacatgcgccttctgtatagagaaaaggtgaagaccttggctgagtttgaggcaatgatgaacacttattatgcaattgtgatgatgtaa

SEQ ID NO: 87361 - DNA, 700 bp, Oryza sativa
  Clone ID: PAT_MRT4530_86313C.1
gtggctggtgtcgatgacagcggcgacggcggccgtgactgtggaggtggtggcgatgtcggcggcggggatggagacggtggcgaggtgaggatggcgacggtgaggtggctgggtgttcggcaacaacggctgtggtggtggcgatcgtgactgcaggttatcaaaggcatgactgtctcggacggctagccgagggcgtgggagacggcagcatctgaccggcacggcgtcgtttggtggaggggtcggaggccggcttggcgcagaaaggcgcagccaatggcagcggaggccgactcggcgcgagaggcgtgagcggcggagagggaggccggcttggcgcgagagacgcggccgatggagggaggccggattgacgcgagaggcgtgtccggcagtggaggaggcgacctaggtgtgaggaggagctgccggtggatgtggcgcgtctttggcgcacgatggctggccggcgggggacgccggtgcaggggtcccacatgtcgacagagcttgtgtggtggtggaacatcggtgtgttagtcgtggattcgcatgtgtggcggtcggtcaggcttagctgcggtcgatccggtgctagccttctcctgggattgtgtgttggcgatgtcggtgtatgggtggtggtatttttttttctttttcttagttacgaccctccaaggttgtaattttg

SEQ ID NO: 87362 - DNA, 565 bp, Oryza sativa
  Clone ID: PAT_MRT4530_86314C.1
agtggatcccgggctgaggaatcgacgaggctgttacagggagaataagctgatctaccggctttatatgatttgtaaatatggaatagctgtcttgtgaatttatcattcgagagctaacaaattataatgagtaaccataagttttgtagtcttttactccgcaaatattacaagtttgtttcaggaaaacatagttgagcctgaacacattatgcattttttcttaatggtcttttgtctgcaagtgttcttgtagccgatgtgacaactgaaggatttattgcacccaaaagtagggtcataatgctgatgcctatatactttataggttggtcatgtcagaaacagggttattgatgctatatttgaaagctggtttgattaaagatgatgaaattaggtggggggttgaaactttggtttggtggtcagggataacagctgatgtttatcttgctccacaaagcttcactaagtttttatatagggaatcaagaagtcaggactagtgatttttttttggggggaaattagtgtttttactccttgttaatgttatttc

SEQ ID NO: 87363 - DNA, 270 bp, Oryza sativa
  Clone ID: PAT_MRT4530_86315C.1
atgctgcttgaagcagctgatgctgcagcctgccgtcgatgccgacactcgctgcagccgcgtgccgcggccgcgcgctgcaacctgacgccgcccgacggagccgccgcaagcgaggtagccgcgccgcagcctgacgccgcccgctgcagggatgagaggatctggggtttagggttcgtcgtgcgggaggagaggaggagttctgatgcggtagagttggggaagaacacggataaggttgaatctggcaagggcaatatggagtga

SEQ ID NO: 87364 - DNA, 720 bp, Oryza sativa
  Clone ID: PAT_MRT4530_86316C.1
atggcgatccaattatttttatttggttgtagggatgaaggccaccgcctcgcctccttgttcgccggccatcgccaagtctccgggccaccgcctcacctcctcatttgccggccaccaccctatctcctgtttcactcgccggtcgacgacgatgacgacggaaccccctaccgcctcaccggatccgtcccatccagatccggcgccctctcccgctgccgcctcctcgcctctggcctgcgggctcgccgctatcgcctcttcccgctgtcgtcaccgcctccggcctttggacttgccgccatcgcctcttcccgccgccgccgtgcccccttctcacactggccgccacgctcgtcgctcgtcgctcatcaccgcacccgtgccaccgacgtgtgttggccaaggtccgctgcatgggcaagtgacgcggcgaggcgcggtgcggtggtgtgcgaggctgattcgtcagcgtcgtcggtcttgctcgacgacgtcctggcggcacgggtgcttgtcatgccgctcgacgaggaggccatcggctcctcgaccgcgtcggtggcgctgctcgccaacgttgccaagcacggcgacctacagagtaggctccgggcagcggtcaacgttagggagatcgttgtgttgtcgtcgtgctgctcacgcaacggcggcgccaccactgccattgatctcagcgaccaccaccgccattga

SEQ ID NO: 87365 - DNA, 195 bp, Oryza sativa
  Clone ID: PAT_MRT4530_86317C.1
cccccagtgcttctaatacgacccctcacctaatagggaaaacctggtatacaccccgccacggtaccggctccggagacttttcccgcggtctgatcccacacgccgctccgcgcacgactctccactttttcttgcgttgcctcggttcattgctggctgagcaggtgattgtttgacacgacttcttcgcat

SEQ ID NO: 87366 - DNA, 1017 bp, Oryza sativa
  Clone ID: PAT_MRT4530_86318C.1
ctactttattgtcattctggtcgaaactgatcgataacgactgtcaatagcgctgccgcggggtcctgcgctggccacatccccgccctcagtaccaccgccgtcgccgtagaatgccatctccttctcgagcctgacggcgatggagggcggtgccttcttggcgcacgcggtggcgatggcaccggagtggtcgtcctcgtcgtcggagcccgcggttgagcgttccgaccagccccaccaccccggcccctgccacggtgcccaccacctgggagttgtgctgtaccatttgtagttctcgatctcgttgggattggagaagtccttcttttttttttttttttttttttttttttttttgcgattgtccggcccgtctccagccaatcgtatgggaaaattaatattttcgcgggcggacgacccaaccgggcgggcaggcggtcggattaagtggaccacacggaataatcggtcaaattataccgcccgcacggaacccaaaaaaagcgaaaataaaaaaaacgaaaatcaggaccgggcgccgccgccctactcgcgcgccaacccgctcgctgccgccctgctgtggcaacgtatcgtcgtcatcgtcggagccggcaacgtcgtcgtcgtcaccgtcgagcgggggagggcgggagaggggcgccgccgccggatccgggcgccggccgcctcgctccgcaccgcccgcgactccgtgcgcgccggccatcgagccatgctgaggagcgcgcccgtgcgcctgccgccgcgcgtgccggtgctgctagggctcgccgcctccgtctccgccgcgtcggcgatgtcgtcgtcatcgtcgtccaggcggaggccggcgcgtccggagctagggctcggtgtaatggccgtgcaagctaggcagacatattgtgcaaggctggtgtttgcttgaggtaacgggaacaaagggcggttgcactgctcgccctgccccaggatcggccctaggttcagatgacttatagtcat

SEQ ID NO: 87367 - DNA, 381 bp, Oryza sativa
  Clone ID: PAT_MRT4530_86319C.1
atgccgcaccactgccagactcgtggtcgagtagtttctgtcgagctcacgacccctcaatcgtcaccgggtctgaagctcgagaccgctgatgaggaggggagctcgagatcgtcagcacgaaccgtgaggacgtcgacccctcattcttcttcttcacctcgtcgtcctctctacttcctcgtcatcatgagagggagagatggctttgatttgtgcatgtcggagctcgccggtcgcgccacccccaggtttgcgtgtgtggatggggaaaggcaattggctgttgaggaagagaaggagctgcaaagggaaggatgcacgacactggccacgaccatcgatgaggtagacgagtcgtgtttctcatcggttgggtga

SEQ ID NO: 87368 - DNA, 383 bp, Oryza sativa
  Clone ID: PAT_MRT4530_8631C.1
ataaaattggggctaaagtgctgcactgtcagtgtctattgctattccatatggcatcctgcaggtattgaacaaattgggcaatttctcaaacttgggaagcacacataagagagcagattaatatgctttttagtgcatgtacaattcatacatcagaagttaaacaccactatatttatcaatgtattcttgagaagttaaataccatttcttttgtatggaatcccaacttcgcctaagcatttgcagctagaaagtgctcatctcattccttttcttatgtggtctttttcaaaaaaaaaaggaggaagaaaacctcaccagagatggttgcagtagcgattaactctatgaactcatgtcatatcttaccagcaagc

SEQ ID NO: 87369 - DNA, 459 bp, Oryza sativa
  unsure (1)..(459): unsure at all n locations
  Clone ID: PAT_MRT4530_86320C.1
gccatctctctcagctctcacagctcactgcatcaatggccgcggccaccatggcgctctcctccccggtnatggcccgngcggcgccgtcnacctcctccgcgctcttcggcgaggcgcggatcaccatgcgcaanaccgccgcgaagccaagcnggcgggtncgtcgggnagcccgtggtacggcgccgaccgcntcctctacctcggcccgctctccggcgagccgcgagctacctcaccggcgagttcccgggcgactacgggtgggacacgcggggctctccgccgacccggagacgttcgcaaganccgggagctggaggtgattcattccggtgggngatgctgggcgcgttcggttgcgtctttccggagttctngccggaaggngttaagttcggngaggcgtttggttaaggnggcttgaaattttaaggagggngggttgattacttg

SEQ ID NO: 87370 - DNA, 282 bp, Oryza sativa
  Clone ID: PAT_MRT4530_86321C.1
atgagggagagggtggctgcgcggggaaggggccggcgcggcgcagggaaggaggtggtggcaacagcaccgggaagggattggcggtggctcacgacggtagaggtgcgggagagggtgcggcgaggaggggatccactgatgccgggcctcgggagcggtgctgggaaggggcagcagggactctcggggttaagagtagttgtacctttatattttgaaatcgagggaataataaattgcgtcggtgccgactggctggagtccactacgttgacataa

SEQ ID NO: 87371 - DNA, 531 bp, Oryza sativa
  unsure (1)..(531): unsure at all n locations
  Clone ID: PAT_MRT4530_86322C.1
ccggccgggaactcacactcgctcgctcatcgccatctctctcagctctcacagctcactgcatcaatggccgcggccaccatggcgctctcctccccggtgatgggccgcgcggcgccgtcgacctcctccgcgctcttcggggaggcgcggatcaccatgcgcaagaccgccgcggaagccaagccggcggggtcgtcgcggagcccgtggtacggcgccgaccgcgtcctctacctcggnccgctctccggcgaggcgccgagctacctcaccggcgagttcccgggcgactacgggtgggacaccgcggggctctccgccgacccggagacgttcgccaagaaccgggagctggaggtgatccactcccggtgggcgatgctgggcgcgctcggctgcgtcttcccggagctctcgcccgaacgggtcaagtccgggagggcgtgtgggtcaaggcgggctcgcagacttcagcgagggcgggntcgactacctcggcaacccgagcctgatccacgcgcagagcat

SEQ ID NO: 87372 - DNA, 395 bp, Oryza sativa
  Clone ID: PAT_MRT4530_86323C.1
tccggcttattggcattttttttaacttttacagctcactgcattaatggccgcggccaccatggcgctcttcttcccggtgatggcccgcgcggcgccgtcgaccttctccgcgctctttggggaggcgcggatcaccatgcgcaagaccgccgggaagcccaagccggcggcgttgtcggggagcccgtggtacggggccgaccgggtcctctacctcggcccgcttttcggcgaggcggcgagctaccttaacggcgagttcccgggcgactacgggtgggacaccgcggggctcttccgcgacccggggacgttcgccaagaacccggagcctggagggatccacttccggtgggcgatgctgggcgcgctcggctgcgttttcccggagc

SEQ ID NO: 87373 - DNA, 420 bp, Oryza sativa
  Clone ID: PAT_MRT4530_86324C.1
cgctcatttccatctctgtctcaggtctcacagctgactgcatcaatggccgcggccaccatggctctctcctccccggtgatggcccgcgcggcgccggcgacctcctccgcgctcttcggcgaggcgcggatcaccatgcgcaagaccgccgcgaagcccaagccggcggcgtcgtccgggagcccgtggtacggcgccgaccgcgtcctctacctcggcccgctctccggcgagccggcgagctacctcaccggcgagttcccgggcgactacgggtgggacaccgaggggctctgcagcgacccggagacgttcggcaagaaccgggagctggaggggatccactcccggtgggccatgctgggcgcgctcggcttgcgtctgccggagcttctcgaccggaacggcggtaagttc

SEQ ID NO: 87374 - DNA, 504 bp, Oryza sativa
  Clone ID: PAT_MRT4530_86325C.1
gtcggaccaaccgcggtccgccaacggcttccggccatctttctaagttttaacagttaactgaataaatggccggggcaccatggggctctcctccccggggatggcccgcgcggggccgtcgacctcctccgcgctcttcggggaggcgcggatcaccatgcgcaagaccgccgcgaagcccaagccggcggcgtcgtcggggagcccgtggtacggggccgaccgcgtcctctacctcggcccgctctccggcgagccgccgagctacctcaccggcgagttcccgggcgactacgggtgggacaccgcggggctctccgccgacccggagacgttcgccaagaaccgggagctggaggtgatccactcccggtgggcgatgctgggcgcgctcggctgcgtcttcccggagctcctcgcccggaacggcgtcaagttcggcgaggccgtgtggttcaaggcgggctcgcagatcttcagcgagggcgggctcgactacct

SEQ ID NO: 87375 - DNA, 130 bp, Oryza sativa
  Clone ID: PAT_MRT4530_86326C.1
accacgcgtacgattaatggaaaaatctaccgctcgcttaaccacttgcgggagtaggccctgtgaattgtatgctccattctatggcgttataaatggctttcaggagtactcaaaagggcggacgatc

SEQ ID NO: 87376 - DNA, 381 bp, Oryza sativa
  Clone ID: PAT_MRT4530_86327C.1
tatgacgcgtgggtcgccatctctctgaggtcttacagttaactgcatcagtggccgcggccaccatggcgctctcctccccggtgatggccacagcggtgccgcctacctcctcccagctcttgggagaggcgcggatcaccatgcgcaagaccgccgtgaagcccaagccggcggcgacgacggggagcccgtggtacggcgccgaccgcgtactctacctcggcccgctctccggcgagccgccgagctacctcaccggcgagttcccgggcgactacgggtgggacaccgcggggctctccgccgacccggagacgttcgccaagaaccgggagctggaggtgatccactcccggagggcgatgctgggcgcgctcg

SEQ ID NO: 87377 - DNA, 6044 bp, Oryza sativa
  Clone ID: PAT_MRT4530_86328C.1
ggctgctcgggccggcccgagggtgtgtgcctcgctaccactctcgtctgttccttgggtcttttttacaaaaataggatcatgcacacattgttaactgtagtatgtacaaccgtgcaagcctgttgtcccctagcattattcctacacagtgcaaaaattgcaatcaaaattcttcctacaacgaacatatctgcggttagtagagttacaaaatagctggacggcgaacagctcatccaagtttacatcacaagatcaaaggttaggccattaagtctgtactctgcattccaaattgttcaaacaacagaatacataagagttaaacaaatgtcatgtatccacaacttctgttcgtgttacgcgataggaccaaactgcaccttcaatcaaggtatttctaaaaattctggtgcagcatgtacctctgaatggcctgttaatacgatgaaatatgtgatgttgtacattgctgatcatgtgcttctttgtaaagctcaggagaattcatgacttgttttgcatctaacaaaattccaacaattatcctacttccggtgcttccttttagtttccgttcttgatcgcttttcctcttcccattctctctcatgtacttggtcagcctctctacgacttgtcttgctcgagtcctttccatgtattctaggaaggtcatcagcatgggatatccgatgctgtgaaattgccccctttcgttctcgctctcgtgtttcaaacacttgtgagctactggttccatgactgggaagctgtggagcagaaggtgcgtattccccagcttctaaaccagactgatctcgtgcgatctttcgccgtttggaagcactattaggatcactttcatccttcacaatactacttttgtccctatcccggtcatctaccttgcttgacgaaacatccctatcttcacgctttctgtcccgaatatcttcctctctccggtgctttccatcatcctgcaacgacgcagcattgtcctccaagtgccacttttctttatcatcacgcctaggagatgatcgttggttatgcctagtactaccaccccttcgatcggtatcttcatctctcctgttaccaactgattggggtacaaaacttgctggaaggggtggaggtggtggcaagctttgtcctcggaaccgttcatcagaaggatgtgcacgatctatggatggttcagcatgcttaactttatttctctcctccttattcctgtcttctcttcctttatcaggagctctatctgtccctctttcttgcattctttcaatagaacgctctctcctttccaatgatttgtctgttggtctctcgatgtcttcccctcgacgcctctcagttcgatctgctttttctctaggatcccggtcatatttgtcatcagccttttcttttgatttctctggcctacttaggatttgttcctcgctagcactcttgtcatgatccatgggacgaaatttatctaccaatcgcgagtccaaatttctgtccttgtcagtgtgttctgtgaagtcaccatcccggccttcactctctcctttcctccatttagttcctctatcttgttcttcagtaggaacaaacctcttttgctgtttcatattagagtcaatcaagtcagtagattcaccagaggaattagctgctccaccagtatgtgtagccaacagtgttgatttttgggaggatgctgataccttccgtggagccgtatgtaagttaccattgctagcagccaaagaattactggtggtatcttgcacaccatcagctgcctgagacaatacttctttatcaacaggaacagaggagccttgttgagtaacacctctgtttgtagatttcccagattttgtatcttcctttaccatatcatgcttagataccttgccagcattgtgtgccacacgcttttggggcacccttgtctcagattctgcagtaggctttgaaaccttaactccctcatcagatagaagtttgggaggttcatcagaacctcgtataatccctgaaacttttccttgtgcagaagaagatggcatttggttatcagatccatttgcagccaaggcatttttcttttgttgagcatcaggcttcatggcagcttctgaccgttcatgcctaccctcaatggattttgcacgaacactctgatcttttgctgtcaaaggatctgctgattgatttccaggcacaatttttgctggcccttgcttaagatcaaggagacccatgccgaactcttcttcagatagccatgagctcttgcgggctgccaaagcagcagctacaccagttgccagaactttcagatcttccctttcatcccccttcagcttagcaacacgtttctcaagattgactccacttttgcgtatcacaggaaaaatgctagatatctttgtgagcacaataagggcgtttctgatttccatgtattcttttgattccatgcactggttcagcaccttagttattcgtccactccacttccaatgaactcgaacaaactggctataagatacacgctggctatttggatatctgatgtacacagcgaaacctggcttatttccacattcacgctcatataaagattcatcgctcttccaacggtaggccatcttcagtgtctcatgaagaaaccttcccagcctgccagcctcatactctgtgcagcaacaaatcattggctgtagagttttgcagatgaaaacatcgatatgattcaccgtgttgaaaaatggagtctcgagtgagtgcagtgtttggacaaacatagcacaatacacagcatcttgcatgctaaaaacacagcgagggaatatgcagcgctggaaaaattccatgttgatcttcagagcatctggactggaatttaaccacttaaccttttcacgacctagcctttggagcactgatgcaatgtgttgttggtgcttatgtgattcattgttcaatttgtcaagcaaatcttggattctctccttgtccttcttgcgtcgtgagattgcaatactagagttatccgaattatcttccagttgtttaagattttcatgcagcttctttatttctgcatcataacgatctttggggaaatgaagatcatatagtgttaacccccagaaagtagcatataaatcaggtgataaaccattccaggtttttgctgggaaagtgttccggactgtgctaagaagatcagaccaccaaccttccagggaccccaaggtcatccattgtctcgctttaacctttttcattcttattatgtctacgcttatgattgacttatgagatgtgtcaggatgcaatatcagatcatcacatgatacagactccccttcttcattgtcatccaaaggccaataggtgtcacctccattagtgcttttgaaaagtctcatcacaggtcggtatataagaaaagcaacgtcaggctcgatatgatacttattaatcagatcttccagcggaggtattagttgaacataagttgttggagttactgcagttgaaagaaactcaacatactgaagtagtattccatggcaccgatcaaactgctcactgaccattttgatatatgtggcatcagcattaattataatcttggatcgatgctgagcaataagcagtaaaaggggaatggcaagtttaggttcttcttttggaagcaaagaatccctcaatttgtttgtagacttggtcagaaccttagaatttcttgttgatccaaatagtgatgaagcttgaagccgcaatgtttcactccctgccatagcatcaacctgctcctcagtcatgttctcagtgtattgcacatttgccatttgctgaatgagttcctcgagtacaacaagctcaatgcctgtgtctttcttcagctgattaacaaggtactgaaaaaggcttcttagctccaccgaatgatgcttcttgcacaggtgcccccagaatgatgcaagacactgaagccaatcagatagattaagaccatcatctttaagtttctcacggccaccttgagccaagcgttcaattacaatatattgcaagatgtcaaactccagctgagtcaagtatttaaaagcatcgacgactggagttatcatgtccctatatgcttcaacctgttggataattgtccgaagtactgtcattggatttgcatgggcaagtttagccaccatgcggccaagttgcttcagattttccttagcaagccgctttaagagccttctggtatccaactttgcagtttgccttgcagcaaggacaattgggttttgttcggtatccttctcccattcaccatataagcgataacgggtctcataaggaagaagagaaagaactccccatatctccatatcaacagcaggatttgcaggtataagctgcaatgatggtagcaagcacgatccaagtgcttcttcaattcgcgagtctggagacattacacctgctgtacggattgactcttttgctgacagatggtacgctttaagtactctgcaaaccttctgaaataattgtgtgttacgatgaaggtatggtccacaagcagaaagcatttggaaaaactctttcggcggatcaaccgaaaaactttgtgaagaggaaggtgatgtgtccatcatataaacagggttacgaggcatcttataatgtgtttggaaaattatatcatagactgaagaaatactcctttcaataagtctaaataaactatcacaaatttcaacatgctcaacaggatttaggcgtgcaagacgctcaaagaggagttgtgcatgatcccaatcatgaactgacaggaaaccaagaagaagtccaagtttctggttcttttcaatctcaggggctcgctcatcaattatatcattttccatctccaatgctgtgtacaaatcaatagttatttcttgcttctcgtcatccataaggtccttcccagtggcagcaagatttattttgcctatattactagcatacaactctctttcacaatgcctggatatagcaaatatttccaaaaacatgaacttcaggaggacaaaatgaatattaacctcatcgattttcctcgtgacgaaggagtcaaaatgctcaaatgcctcatcatcatttggaagtaaatgagcatagaggctatcaaggtcaataaaaccagatttgaccaacaaagctgctatccggaaaagcccaggtggaacagtgctattgacatccaatcgttggtaatattggaacttgaaccccaatatttgagcagcatgggacttagggaaaagaggtataagctgacaaaagatggtattatccggatagagctcaaaacattccagaacaatatcaaacacacgatttgggtccaggtcaaaatgcccaatcaatgactttataatgctcatagtaactgaagaagaattttgacaagccaaatctgaaccaatttgacaaaggagggttaccaatttggcgtagccctcactttcctctcttaaaaggttgaatttagtttgctgataaaggagacgtgtgttgaccctgacctccttagccttcaaatcctgcccctttgacttactcagttcaacctcccagaggaactcttcctcgcatcgctcttgaaggagcctaggcgcaatcaatgacgactccacaaatgatttggtcattttgacaagacggctgcgatattcaccagagattgtaacatcctgccctaggtgggcgatgatgtcggcgagtactgagccgacctcccctcgctgcgcctcctccacaaactccaccgagtccagagccacccggcacttctgcggcggcaggtccccccgcaccaccgcccagcagagctcgtagaggaagcgcgccatggggaccggatcggggacgcggaaggcggcggcggcggcgggctggcccttccactcgcggaggcactcctccgtgacgtgcttgtagtcgggcgcctggagagggggcgacat

SEQ ID NO: 87378 - DNA, 103 bp, Oryza sativa
  Clone ID: PAT_MRT4530_86329C.1
gaatctttgcaagtcagttctattgtcatacagaatcaagaagatccaggtgagcgagacattcacggccgtgcgaatattccttctagatacaggttattag

SEQ ID NO: 87379 - DNA, 3095 bp, Oryza sativa
  Clone ID: PAT_MRT4530_8632C.1
ttacaggatcaaatcaactggcacgctcatacattcgaaggcaagctttggacctgcactggagttaagcagatctcccaggcctcgtgttttatcgtcgttcacaaattcatcttcagagagaaggcacgttaggtgatttttctggacataaaaatctcccatgtccaccagtgtacagttttcagtcgaatattcaactgaaaattgagccagtacatcctcgttcgttaattcataatttgctcttttgtccaccctcattagtgtagtcaccacacaatcaaaatgtgtccatgctgagcgccacctagtcaagttgcgggtatgttgttggtcccatacacgaatgaaaattatctgcaacctactaaagaattgtgcattgccaaaaaaaaatatcatcatattcaattcatcaattagtataagccggatttgtagatcgccgtaaaaattctcatgcagatgccctttccagacgaccaatctaccatttccagtgtaagtgatccatttgtaccacatggaaccgaacaattccgcattcaaattaaggcatcgaacaagaacaagggactttcctagattagtttcaagcaacaaggaaccatctcctggcagtcctgatttcacgagatcaggatgatcttgtggtgtatggccaagctcaagctcgtgagtaatctcatcccacttggggttgctggtcattgtaaggaatacatctggcttcccgtacttatagtctagacgggagctctcaaccttgatgtacatgtcaacagcaaactgctggaacaagcgtccaccgtgaagtatagagttgaaaatcccgcaacgcatcttatagcagtagtagtcccttacagagactcgtatcctgctgttacaattaggatcatcgccattccgcgcattcgcatcctccatggttattttgtcctttggaagaccttgatgccaaccactctctcctctagggaagaacagagggtacgagaggggatcataacatccgtagaaaggttggatagatttccgtgtacggtcattcccgtatattgtcacgctaggctcgaacttccttctctcgtttccaccaagggtagtgaacgagaagtggccgttgaagtatctaatgttatcccggaaatgcttggcatctggatctgagcttgtccaaagcctcatcagttcaagaggtgtttcattttgtacaagcttgatcttgccatcccgaaaacagaagctcggcggttcgtattggaacctcttggcaccacaatgtttacagtctggctcaggcttcagaacatttgtgctttgtggaatgttgctatacacatagtcgaacggatcaagaacagaagagttaggtgattgcgtatcgtcatcggattgtaccatctcgtcatcctcaccgtcgcctagcccagcaaacatgtagtattcatcgtcgctgtcatcatccatgaaggaatccatatcatctttagtacaatgagaagttaatatatggaagggtacaaattgtgagtatgaatgaaaacatatatagatgataccatcactgaatgtgcatgatcgcgcatgatgatctgcagcaggctcagtttgtaggctcgatgtagatggcacatcaccgattgtttccaagcaaggcgttagacttagcaacgacgagctacaacccttagggcactccaatgcaatggattcagcgcatggtttgtcacgcctagttgcatatcgtgcattacgtcgtgtcaaatgagtactcctttctccaggagtaacattttgtcgtcttgatttggccctatccccagcacgccttgactccaacttttcttgtgaaaaattgtgtgatgcacgaactcgagtattcttgattgtcatgctagcattttgagtatcctcatgcgcacatttatccacagaaagaggccgtgacaggacccttcgcataaccccctctagccaagcacaccacacctcaggaaaaagcttaagcgctgacgtcatcaaagaggccggcgccgacaggcgggccccacacgtcagcgggtcaagggaatcggtccaccgtggaccgggaccacggggtggcgcggctgagcacgggcacggctcaggctggcccggccgagcgacggctcgcggcggcgcggcctcctgcggcgacggccggtgcacgcgagaaagcggcggtgaggcgcggcaaggggatccgggcggcccaggcgagcggggcggtggcaagccggccggccgacctaacggcagcggcgcacggcccggtgggcgccggcggcggccaccggcgcggcagcgcgcacgggagacagaggagggaggcaaggagggagaggaggagctcaccaaggacgcggcgacgaggggcggggaaaggcgggggggggggggggtggagcttggcgtcggtgctcctcgggatgaaggcggaacggcggcccggcggcgttccgcaagcgggaaccggcggacggcggccggaaggacctgggaggatgggggagaggttaggagggggagagagggctcccagcggcatgaatcgctggtcggaggggagaacgggcggcggatgctcaccggcgcgaggggaaccgtgttccggcgggatcccggccgtgaaaagcggcggccgagcggcgctgcgaagcgagcggcggctggagtcggcggcggcggtggatggaggcggtgcttcggaggcggggaggggaaatggagcggacgccggggtgcggcacgacgcggcgaagccgctggtggcggtcgtgcggaacgacggtggtgggagcggctgtggcgaccggctggagggtcgtcggccagcggcggggaggggaggcgggatcgagctcgagagaggtagaaaccggccggagacctgggaggagagagagatgctggaggcggcgacgtggccggattttgcgggagagcggggggaaaccgagcggacgtgggcgacaaccgcgtccacgcacgcgcgggagagggagtcccgcaagagaagccgcgacgtgggaggattggcggccatggcggcggttggggattga

SEQ ID NO: 87380 - DNA, 287 bp, Oryza sativa
  unsure (1)..(287): unsure at all n locations
  Clone ID: PAT_MRT4530_86330C.1
cccactcatccgcatgctgaagatcatgttcaaggagaagctcatcgctggcaccaccgtggagacggtggcgacgacgctggcgctggcggaccagcatgtgagcccgaggctcaaggcgaggtgcgtctaggtcntctacgccaaccttgacgccgtcgtgtacaccgatgttttcaagcattttatggcgagcacgaatgttgtgatgaatgatctgcttagagcggtgcgtgtaatgaagaactgatttaattaccgcggagattagtcttaatatctaacat

SEQ ID NO: 87381 - DNA, 1536 bp, Oryza sativa
  Clone ID: PAT_MRT4530_86331C.1
aacgaccttagatggaatatcagtagacctcagggtttcgaggctgttatgcgtgtcagatgcagaagggggtgaaccatctggtgatttcttccgctcatttttaagcgtgttcctagtcacctggtggcctttcctattgattctgacaaaactataatggtcacctttaagcacgatgacaagttacaggaaaattcagaatgtggtttccagtgcgctcttctctacactactgtatatggacaaagaaggattcgagttatgaacctctcactcccatgcacaaacatgctcagtaatctcttccgatatgctgatttggaaacacagtttacatgcttcctgaaacaagctgctaatggcattccaacatctacgctactccatcttcgggaggaagtaacaaatacatgtataaatattctccagtcctaccgtaaatattgtgcatctgtaagctcatctgggcagttgatccttccagaggcactcaaactcctgcccttgtacactttagcgcttatcaaaagcataggcttgcgaaatgaggggcggttggatgatcgttcatattggatatccctcgtctcctcagtttctgttctattagctgttccattggtgttccctagattgattccgattcatgatctcacatcaaggggagacgatgaatcacttattcctagtccccttatgctcaatagtgaaaatatacgtgaagatggagtctatttattggaaaatggtgaggatggtctaatttatgtaggaaatgtggtagagccgaccatcctcgaacaaatatttggtgtgtcttctttggctgcattaccaagtcaggctgtgttggagcaatttgacaatgaactgtcacggaaggtaaatgaagtaattaatgaaataagacgccagagatgttcttatttaaggttgcgtctatgcagaaggggtgaaccatctggtgatttcttccgctcatttttgacagaggacaaggcacctggtggcctttcctatgtggagttccttgtgcatgtgcacaggcaaatccagagcaagatgacgtgacatgccatatgcttgtcgcactgtttttggttagtggatggattacaaactaagaagagatcagtttcggcacaaggatactgcgaagaagcatagggcaactccagatcactggttgagttggggttagacatcattttcctggagaatagatttgcaggaattgaggcctgcaatgtttacagcatagtttttttgggggagagggtggtatatcttgtaaacagatgagttgttggatgtgatgcctcttttttttgtttctcaccgtgcatccttattgaaatctcttgtgaagggagaagggtgtattatgttcaaaggaatataagtggtttaggaataaaactatacctagctaatagttgagtgaagtatacagttctcaagtttatgtacgaaaaacgtcaagattgtctaatggttgtttgctctgcaacaaataaattgtacctttctccc

SEQ ID NO: 87382 - DNA, 438 bp, Oryza sativa
  unsure (1)..(438): unsure at all n locations
  Clone ID: PAT_MRT4530_86332C.1
ggttctgtgtggtggatgggaaggcgagctgcatgatgggtgcctacaccctcatcaatggcgtcccggcgtgtgctagttctgacctcctcaccaagaccgtcaggggagaatggaagttagatggttacacggcgtcggactgcgacgcggtcgccatccttcacaaatcggaacacttcacgaggacggcggaggaagccgtggccgtcgccctcaaggccgggttggacataaactgcggcgtgtacatgcagcagaacgcggcgtcggcgctgcagcaggggaagatgacggagaaggacgtggacaaggccctcaagaacctcttcgccatccggatgcggctgggccacttcgacggcgacccaaggggcaacaagctgtacggccgcctcagcgccgncgacgtctgcacgccggtgcacaaggccctcg

SEQ ID NO: 87383 - DNA, 449 bp, Oryza sativa
  Clone ID: PAT_MRT4530_86333C.1
taacttttttttgtttttttaattaaatttttttttttttttttttttttttttgtttttttttttttttttttttttttttttttttttaacattcaaaacttattttttaaaaaacttttacagtacataacaacaacccatttttttgcaatttatggggttatttatttaattattctttatttttttttacaacttaaaaggattcccccacattataaaaattttggtagctttttttttggaggggagtgaatgcacccaactcatttccttttttatgcttaaaccttttaaccttttttttttaaatccaatatgcattttctaaaaaataaattgggaaaacaccgaaaatggaacttttttcttcaatgtgggttaccataaagttaaggtttttttttaatgcaatgtaaacacatccttttttttttgcctttttt

SEQ ID NO: 87384 - DNA, 222 bp, Oryza sativa
  Clone ID: PAT_MRT4530_86334C.1
tgattaaaaagaaaatcacggcgcgcgagcttgcatagacagcaatggcgagagttgctgccgccgcggcggtgctcgagctggcggcggcggcggcggcggcggcggccatggccgcacgagccgcccaccgatgaccgcgcggtccgcccgagcgcagagctgacgaacagctccaaccggacggggtaacaaggagacctactgcttgctcggctacta

SEQ ID NO: 87385 - DNA, 2481 bp, Oryza sativa
  Clone ID: PAT_MRT4530_86335C.1
aaccctagcgccgccgccaactcctacttcgccgccaccgccaccgagacctccaccgccgccaccgagcccgctgccgccgccaccgagcccgccgcctccaccgaccggcgacgccctccaccgagcccggcgccgccgccaccgagcccgccgccaccgccgtcgtcctccctcgagcctctacaccgaccggaccggtgtcggcctttctcgtcgtcgccgcccgcgtcctcaccgacgcacgtcgccgacccccaccgagcccgacgccgcccgcccggcgccgacctacccgactggcatatccaccgaccggcgccgccctccaccgagcccggcgccgccgccgcaaactcctcctttgccgagccagccgccgctgccaccgagaccgctgcctccaccgagcccaacgccgcctccaccgaccggcgacaccctccacccagcccgacgccgccgccgccaccgagccccaccggccatcctcagaaattcagtattctgcaagatgacatcaagctcgtgccggccgcagagaaggacattgcttggctaacgttcaaggagagctttgattatcctgcggagcatgaggaccgtctcaggcgggctgctttcaaggttatgggcaatgcttggaagaacttcaagactaagctagtcggcgagtttgtctacaacccggcgaatccagatccaagagagaaatttccttcgatcacggaacaggtctgggaggaattccatgcgaagaagtcgacctccgagtccagagctagaagcgaggcatatcgcttgctccagaccaggaaccagcatccgcaccggcttggcaccttcggatatgccggtaaggaagaggaatggcagcgtgaggatgaagaagcggaggaatcgtgcacaccgctcgtctttggtgatatcccacaccctcgggctaggaactgggccagggccaggtaccagaagaatgatgatggcacaatcttcatgccaaatgcagaatatcaacgagtatacgaagctataaaggagttggttgccgagcaacaaacctcgcaagaggcctgctctcaaagacgcgaggacgacctcctcatgaaagcgttgggcaacaaggaacaccgtggacggacacggggcgttgggtcttctgttccctggaagtatggatttccagactacgcgtggcagtacaagaagcagacttccaacaaggcggagaaagatgcacaccttgaagccaagatccgggcgtcgataagagctgagctgacatctgaattcgacgaaaagctcgagtcgatgagggccaagattaggcaagagatccgagaagagcaacagaacccccaggccgccgctgctgctgcgcacgaagagttaggaagtcccacccaaaaacgcagcagttgcgcatcaactgagttggcggaaaatccaacatcggtcgacagcgccgtcgaccacataacggaaccaacgagctgcaccctcacagttagggtgatgccgaccttcacggttccagcaaccgagggacttgcgtacaagccgaccccagagacaagagtgcatggagcgcaactcagggccgactgtgcaaaagttcaagtcgactcggtgaagcccgaatacaagctgttccctctgaagtatccaccgaacgacgaggtcctctcactaggaaatgcccgtggtaccttcatccaatggcccaaggatctcattgagattagggttacagcgaggccaaccactgcaccaggcggttgtccaccaaagagacccgcctctgctccttcagcccctcctgctcaagatcgtcatgcacaatcttacgatgcctcgcttctagctccaaggaagctagatctgggcaagggccaggaagagactaagggcaaagaggtcaagaagaaatatgtcgctccacaggagttccaactaggcatgccattggttggagatgacgtgcttgccgcaatgggcaccgcttgcaaggaccttcacttatactacatggagaaatctaacgccaggaagctaagtaaagctaccgatatccttggagagcacgatgaaaagccattcctcggtccaacaaattatatcgtggtcgacttcaaggatcttttcgacctctacaggctccgagcggtggacacaagcctccttaagtgctactccttgtatgtattgtcgcccaactcaatctggaagacaggacatgacaccctcatccacaaaaaagacttcccagtgaagcaacaaataggtgaccagtgtggattccatgtgtgccacaacatgcgccttctgtatagagaaaaggtgaagactttggttgagtttgagggcacaataaccaagtctctgcctaccagctttgaggaggttcgcgaggagatagccagcttcatcctccgcgaaataattaaccccaaaggaatgtttaggcttaaactaaaatga

SEQ ID NO: 87386 - DNA, 2814 bp, Oryza sativa
  Clone ID: PAT_MRT4530_86336C.1
atgtcgacgacaactagtgggtcctcaagggcacgtactcctaggactgggaacaaaatccctaaggaacggttccgcataacagcggtggatgccgtagggttgccggcatctccaaagaaaatattgagccgatttaggtctatctgcggagtcatagggaggcagaaattcaatattctgcaagatgacatcaagctcgtgccggccgcagagaaggacattgcttggctaacgttcaaggagagcttcgattatcctgcggagcatgaggaccgtctcaggtgggctgcattcaaggttatgggcaatgcttggaagaacttcaagactaagctagttggcgagttcgtctacaacccggcgaatctagatccaagagagaaatttccttggatcacagaacaggtctgggaggaattccatacgaagaagtcgacccccgagtccagatctagtagcgaggcatatcgtttgctccagaccaagaaccagcatccacatcggcttggcactgccggatatgccggtaaggaagaggaatggcagcgtgaggatgaagaagcggaggaatcaaacacgccgctcgtgtttggcgatatcccacaccctcgggctaggaactgggccagagccaggtaccagaagaaggatgatggcacaatcttcatgccaaatccagaagatcaacgagtgtacgaagctataaaggagttggttgctgagcaacaagcctcgcaagaggcctgctctcaaagatatgaggatgacctcctcacgaaagtgttgggcaacaaggaacaccgtggacggacacggggcgttgggtcttctattccctggaagtatggatttccagactacgcgtggcagtacaagaagtggacttccaacaaggcggagaaagatgcacgccttgaagccaagatccgggcgttgataagagctgagctgacatctgaattcgacgaaaagctcgagtcgatgagggccaagattaggcaagagatccgagaagagcaacagaacccccaggctgccgccgctggtgcgcacgaagagttaggaagtcccacccaaaaacgtagcagttgcacatcaactgaggtggcggaaaatccaacatcggtcgacagcgccatcgaccacataacggaaccaacgagctgcaccctcacagttagggtgatgccgaccttcacggttccagcagccgagggacttgcgtacaagccgaccccagagacaagagtgcatggagcgcaactcaggagcgactgtgcaaaagttcaagtcgactcggtgaagctggaatatgagctattcccactaaagtatccaccgaatgacgaggtcctctcactaggaaatgcccgtggtaccttcatccaatggcccaaggacctcattgagatcaggattacattgcagtacgacacggatttttgggaggaccgaacggaggccgacagcaaggcgattcatgaacccccaccgatgaagaagagcaggaaggcacactcttcccctcagagaattactctcgataaacccgaagcaaaggggagaggaaggggaggaaaggtgcagtcctcgcttctagctccaaggaagctagatctgggcaagggccaggaagaggctaagggcaaagaggtcaagaagaaatacgtcgctccacaggagttccaactaggcatgccattggttggagatgacgtgcttgccgcaatgggcaccgcttgcaaggaccttcacgcatactacatggagaaatctaacgccaggaagccgaataaagctaccaatatccttggagagcacgatggaaagccattccttggtccaacaaattatatcgttgtcgacttcaaggatctattcgacctctacaggctccgagcggtggacacaagcctccttaagtgctactcctttacccattggatccttctggtcataacacctaagtggagtacatgtcactacctgaactctagaattgataagaacgcatatgattggaccccaattcaactagcgatagatgaagcgtgggtccaatacgtgcaaagaggaggcctcaggaagacaggacatgacacccttatccacaaaaaagacttcccggtgaaacaacaaataggtgaccagtgcggattccatgtgtgccacaatatgcgccttctgtacagagaaaaggtgaagactttggcagagtttgagggcacaataaccaagtctctgcctaccagctttgaggaggcaatgattaacacttattatgcaactgtgatgatgtttaggcgaactattcggcggggcggcggtcacagggcttcccgcacgcggtggcccctccctggcgacgcaagcggcggtcgcagagcttcccgcgtgcggtggccgtacctattcgaggcaagcggcggccaagtgcggcgaagggaggcgatggacgcgttgccgggggcgcagcatggcaggcggcggccgcagtccttgcatggccaaggcaggcggcgaccgcgtcgagggctagcgggagagagcacggtgctgcgggcacgctcctacggctgcatccgggtgttcctcatcctgtccctgctgctgctcgccgtcaaggtagccgcctacctccaggggtggcacctcgaggaggtggtgtcgctcttcgccatcgacggcctcttcgccgcctcctacgcctggtggatgcggctccgcctcgactacctcgcgtcgccgctgcagttcctcaccaacgcctgcgtcgtcctcttcatggtccagagcatcgaccatgaaggc

SEQ ID NO: 87387 - DNA, 1803 bp, Oryza sativa
  Clone ID: PAT_MRT4530_86337C.1
atgtcgacaacaactagtgggtcctcaagggcacgtactcctaggactgggaacaaaatccctaaagaacggttccgtataacagcggtggatgccgtagggttgccaacatctccaaagaaaatattgagccgatttaggtctatctgcggggtcatagggaggcagaaattcagtattctgcaagatgacatcaagctcatgccgaccgcaaagaaggacattgcttggctaacgttcaaggagagtttcgattatcctgtggagcatgaggaccgtctcaggcgggctgctttcaaggttatgggcaatgcttggaagaacttcaagactaagctagtcggcgagttcatctacaacccggcgaatccagatccaagagagaaatttccttggatcacggaacagcgtgaggatgaagaagcggaggaatcgaacacgccgctcgtgtttggtgatatcccacaccctcgggttaggaactgggccagggccaagtaccagaagaaggatgatggcacaatcttcatgccaaatccagaagatcaacgagtgtacgaagctataaaggagttggttgccgatcaacaagccttgcaagaggccttctctcaaagacgcgaggacgacctcctcacgaaagcgttgggcaacaaggaacaccgtggacggacacggggcattgggtcttctgttccctggaaatatggatttccagactacgcgtggcagtacaagaagcggacttccaacaaggcggagaaagatgcacgccttgaagccaagatctgggcgtcgataagagctgagctgacatctgaattcgacgaaaagctcgagtcgatgagggccaagattaggcaagagatccgagaagagcaacagaacccccaggccgccgctgctgctgcgcacgaagagttaggaagtcccacccaaaaacgcagcagttgcgcatcaactgaggtggcggaaaatccaacatcggtcgacaacgccatcgaccacataatggaaccaacgagctgcaccctcacagttagggtgatgccgaccttcacggttccagcagccgagggacttgcgtacaagccgaccccagagacaagagtcctctcactaggaaatgcccgtggtaccttcatccaatggcccaaggacctcattgagatcagggttacagcgaggccaaccactgcagcaggcggtcgtccaccaaagagacccgcctctgctcctttagcccctcctgctcaagatcgtcatgcacaatcttacgatgtgcagttgcagtacgacacggattttggggaggaccgaacggaggctgacagcaaggcgattcatgaacccccaccgatgaaaaagagcaggaaggcacactcttcccctcaaagaattactctcgataaacccgaagcaaaggggagaggaagggaaggaaaggtgcagtcctcgcttctagctccaaggaagctagatctgggcaagggccaggaagagactaagggcaaagaggtcaagaagaaatacatcgctccacaggagttccaactaggcatgccattggttggagatgacgtgcttgccgcaatgagcaccgcttgcaaggaccttcacgcatactacatggagaaatctaacgccatgaagccgaataaagctaccgatatccttggagagcatgatggaaagccattccttggtccaacaaattatatcgtcgtcgacttcaaggatctattcgacctctacaggctccgagcagtggacacaagcctccttaagtgctactccttgtaa

SEQ ID NO: 87388 - DNA, 351 bp, Oryza sativa
  Clone ID: PAT_MRT4530_86338C.1
agttggttctttttttgatttggattttttcttttttttttttttttttttttacttttttttttattttttttttttttttttttttttagaaacgcctaaaatcttccggcttgctacaaaagggatgggctagccaacttttttttttttcctcacctctcctatccaattgtattatgccctcccctaaaatacatgtggggccatgtcgcatccctgggcataaaacaacaaatttatgacggaaaatttcccaaaaaaactttttcaaataaatgagccgcccagagggaacaaacattaagcaaatacaattttagatcccttccggaactcaaagagatgaaa

SEQ ID NO: 87389 - DNA, 2028 bp, Oryza sativa
  Clone ID: PAT_MRT4530_86339C.1
atggaggcaaaggttgcaaccactgtgttagtcttgctcctcctcacccttggtggtgaggtggctgctgccaagatgtgccatgatcgtagccaaaccttcaaagggatgtgcttccggacctccaactgcaacaccagctgcaccaacgagggctacaccggcggccactgcacaaccttcagacgtcgatgcgtgtgcaccaaggagtgtggaggggacagcccgccggattgcaagaacgagaatatgtttgatagcggagaggacgtacacggtcatctgatacaacgaggattcatggaaggctatacatgttgggtgaagcatggaaagcaagaatcaggaagtggagcagcagcagacagaagtggtgcgcataatcaggaagatgaaaatgagcatgacatgtttataccttctccattgggcggtgaaatggttgatgtggatcacgatctgctgcaagacatgttacgtgacgttgaggacccagcccagaatgagagagatggaatgaaattcagcaggttggctatgcttcctattgagaacacattgcctgagacgacatacgaagcaaagcagcctgctcccaaagatttgtccggagatgaggtccacaatatggtcaaggacataagcaatgagtttgggaagaaaagaaaacgtaacaagacaaaggagaaggagacaggtaaagtgtacctcccttcagcctgccacacactgtcgaaggatgagaagatcgcaatgttatcatgcttgaaggatattaaagttccatcgggctattcagcgaggataagtaagtatgttaaattggacgatctaaaacttgttggaatgaagcctcacgattgccacgtgctaatcacacaaatcttgccagttgctatcagatgcattctaccaccgaaagtgcgtcacacgatccaacgtctgtgcgccttcttcaatgcaattggacagaaggttatagatccagaagatctagatgggctgcagaccgatattgtgaataccctctgtcacctggagatgtttttcccactgtctttctttgatataatggttcatctccctgttcatctggtgaagcaaacaaaactatgtggcccggcttttctaagggaaatgtggccgtttgaaaggtacatgggagttctgaagtcgtacgttcgtaacagagctaaacccgaggggagcatcattgaaggttacacgaccgaggaggctattgagttctgtgtcaattacatgtccgatgccgatcctatcggagttccagtgtctcgtcacgagggaaggttgtcaggtgttggcacaatcggaaggaaaagaattaggcccgatcaagcgtcgtacgcgcaggctcattacgctgtgctccaacatatggcagaagttggcccatactttgaggagcacttagcgaaaatccgagatgagaacttggggcgatctgatgcatggattaacagagaacataattctcggttcaacgaatggttcaagaatcgtgtgacaatgtccacggatggcccaaatgagacagtacagttgttggggatgggaccgtcttggaccatagacacatggcaaggatacgatataaatggatacacattttacaccgtcaaacaagatgacaaaagcatagtgcaaaacagcggtgtccgtatagatgcattccaggatcaagttgggtcaaacacatactacggccgcattgaggagatctgggagctaaactacgtcaagttcaaggttcctttgttccgctgccgttgggtgaatctacgcactggtgtcaaagccgacaaggaaggtttcactttagtagatctatctaaggtgggatacgccgatgaaccatttgtacttgcgaaacaggtcgagcagatattctacataaaagacccttcaaacaagaagatgcacatcgtgagggatggaaagcgccgaattgtaggagttgacaacgtcgtcgatgaagaagaatgcaaccataatcttcatacttga

SEQ ID NO: 87390 - DNA, 759 bp, Oryza sativa
  Clone ID: PAT_MRT4530_8633C.1
atggccaccaaatcctcccacgtcgctgcctctcccgcgcgactccctctcccgcgcccgctcccaccaccgtcgttccgcgcgaccgccaccagcggcttcgccgcgtcgtgccacaccccggcgtccgctccatttcccctccccacctccgaagtaccgtcgccacgtgcaccacctccttccaccgaagccgccgactccgccgctcctagccaccccaagtcgcgctgtcgccgccgctcgcttcacagtgccgaggagcaccttggccgccgcttttcacggccgggatcccgccggaacacggttcccctcgcgccggtccttccggccgccgtctgccggttctcgctcacggaacgccgccgggccgcctttccgccttcatcccgaggagcgccgacgccgagctcccccccgcctttcccctcccctcgtcgccgcgtccttggtgagctcctcctctcccttcttgcctccctcctctgtctcccgtgcacgctgtcgcgccggtggccgccaccggcgaccaccgggccgtgcgccgctgccgttaggaggccgcgccgccgcgagccgtcgctcggccgggccggcctgagccgtgcccgtgctcagccgcgccaccccgtggtcccggcaaggatgggcgtgatggagcggggcgggccctgcgacggcctctgtcgcttccggattcacctaggcacgagaggggactgcccgtcgcccgctagggacgggggtgaaacctga

SEQ ID NO: 87391 - DNA, 489 bp, Oryza sativa
  Clone ID: PAT_MRT4530_86340C.1
ccgcctccttagaaccctagcgccgccgccaactcctacttcgccgccgtcgtcctccctcgccgccaccgccactgagaccgccaccgccgccaccgagcccgccgccgccgccaccgagcctctacaccaactggcgtcggccttcctcatcgtcctcaccgacgcccgacgccgcccgcctgacgctgacctccaccgagcccggcgccgccgccgcgaactcctccttcgccgagcccgccgccgccgccaccgagcccgccgccgcctccaccgaccggcgacgccctccaccgagcccggtgctgccgccgcgaactcctccttcgccgagcccggcgccgccgccaccgagcccggcgccgccaccaccgagcccccccggccgacctcaggtgagtcctccatcgcgccaccctctgctacctgcatgtggtgactgatgaaatgtggatgttgggatgaatttagtgatagatgatttta

SEQ ID NO: 87392 - DNA, 876 bp, Oryza sativa
  Clone ID: PAT_MRT4530_86341C.1
atggcgaccaccgcctccttctcccctcccctcgcctccccctccaggtggtccccgccttcccggcgcctccgcctccgcgtacgggcgggctcctccctcaaggagtggggggacttcgaggacgccgtgaggagcagggacctcccccgcgcgctccgcttcctgcagtccgtcgacgtcgagactcccccggcggcggcggcggcgggcgcggccgtggcgcgggtggcgctccccgtgccccccgggagggactgggaggtgctcgacgcctgcatcgacgccgacgacatgcggctcgtggggcgggcctaccagttcctcgccgaccgcggggtcctcgccaacttcggcaagtgcaagaacatcgttctggaagggccaagagaagtcacaccaactgttttgaaggagatgacaggtttggaagcttatctaatgggttgccccatacgaggagtcattttagatccatttgtggcattacgaatgggcattcaaggccaggcagggacccagttctgggatgaaaaaatggaaaaagaacttgctgagggccatctgtcaagcacagcatttgacagatattgtatgattctatttgctggaattgccgcggaagcactcgtttatggcgaggcagaagggggagaaaatgacgagaatctgttcaggagtttgtgcattcttctggatcccccactctctgttgctcagatggcaaaccgagctcgttggtcagtcatgcaatcttacaacctcttgaaatggcacaagaaagcgcatagagctgccgtcaaagcactggaaagtggacatagtcttagcactgttatcaggagaatagaagaagccatctcctctgacagatag

SEQ ID NO: 87393 - DNA, 309 bp, Oryza sativa
  Clone ID: PAT_MRT4530_86342C.1
ttaggtggcaacaggcgatctgacacacgcctcgccccgtcccgtcaggatgagagtctctaggcactcgtccctagccggagccagcgtgctagctcctggagatggcacgttggtccggtctgtgactggtctgacactggttatgtcgccggaagacaaccgtgttcccacgttgcacctgcttccggcggagtggaggtaggtatgggccgtcccatcagaagggtcactcgggcagcagccgttgcaaatgcttctcagcggcccgaacctgtatacatcatccgtgtcttgtgctttttccat

SEQ ID NO: 87394 - DNA, 159 bp, Oryza sativa
  Clone ID: PAT_MRT4530_86343C.1
tcgaaaagaggaaaaaaaacatatacacttctagtgattgtctgattgatcatcaatggctagcaaggtcgtattcttcgacgaagcgctcatggcggccatatgggccatcttcggcgcgcagatgagcgagtctgagatgacgttcatggacaggca

SEQ ID NO: 87395 - DNA, 417 bp, Oryza sativa
  Clone ID: PAT_MRT4530_86344C.1
atggaggactcacataaggtcggccggggggggctcggtggtggtggcggcgggctcggtggagggcgttgccagtcggtggaggcggcggcgggctcggtgcaagcggcgggctcggcgaaggaggagttaacggcggcggcgccgaggcaggcggcgatgacgaggaaggccaacgccggtcggtgtagaggctcggtggctgcagcggcaggctcggtggcggtggcggcgggctcggtggaggcggcaggctcggcagcggtggcgacgggctcagtggcggtagtggcggtctcggtggcggtggcggcgagggaggacgacggcggcgaaggaggagttggcggcggcgctagggttctaaggaggtgggaaactgtagcgggacttagaaaaattttcgatccgatctga

SEQ ID NO: 87396 - DNA, 2778 bp, Oryza sativa
  Clone ID: PAT_MRT4530_86345C.1
atgtccttcctcatcttcgtcgcctactcctcaccgacacccgacgctgcccacccgacgccgacctgccccaccgcgaactcctccatcgccgagcccgccgccgccgccaccgagcccgccgcctccaccgagcccggcaccgcctccaccgaccggcgacgccctccgccgagcccggcgccgccaccactgagcccccctggccgacctcagacgatgtctcagcgaggcgaaccaatgtcgacgacaactagtgggtcctcaagggcacgtactcctaggacagggaacaaaatccctaaggaacggttccgcataacagcggtggacgccgtagtgttgccgacatctccaaggaaaatattgtgccgatttaggtctatctgtggggtcatagggaggcagaaattcagtattctgcaggatgacatcaagctcgtgccggccgcagagaaggacattgcttggctaatgttcaaggagagcttcgattatcctgcggagcatgaggaccgtctcaggtgggctgctttcaaggttatggggaatgcttggaagaacttcaagactaagctagtcggcgagttcgtctacaacccggcgaatccagatccaagagagaaatttccttggatcacggaacaggtctgggaggaatttcatgcgaagaagtcgacccccgagtccaaagctagtagcgaggcatatcgcttgctccagaccaagaaccaacatccgcatcggcttggcaccaccggatatgccggtaaggaggaggaatggcagcgtgaggatgaagaagcggaggaatcgaacacgccgctcgtgtttggcgatatcccacaccctcgggctaggaactgggccagggcgaggtaccagaagaatgatgatggcacaatcttcatgccaaatccagaagatcaacgagtgtacaaagctatagagttggttgccgagcaacaagcctcacaagaggcctgctctcaaagatgtgaggacgacctcctcacgaaagcgttgggcaacaaggaacaccgtggacggacacagggcgttgggtcttctgttccctggaagtatggatttccagactacgcgtggcagtacaagaagcggacttccaacaaggcggagaaagatgcacgccttgaagccaagatccgggagtcgataagagctgagctgacatctgaattcgacgaaaagctcgagtcgatgagggccaagattaggaaagagatccgagaagagcaacagaacccccaggccgccgctgctactacgcacgaagagttaggaagtcccacccaaaaacacagcagttgtgcatcaactgagttggcggaaaatccaacatcggtcgacagcgccgtcgaccacataacggaaccaacgagctgcaccctcacagttagggtgatgccgaccttcatgagacaagagtgcatggagcgcaactcagggggcgactgtgcaaaagttcaagtcgactcggtgaagccggaatacgagctattcccactaaagtatccaccgaacgacgaggtcctctcactaggaaatgcccgtggtaccttcatccaatggcccaaggacctcattgagatcagggttacagcgaggccaaccacaacaccaggcggtcgtccaccaaagagacccgcctctgctcctttagcccctcttgctcaagatcgtcatgcacaatcttacgatgtgcagttgcagtacgacatggattttggggaggaccgaacggaggccgacagcaaggcgattcatgaacccccacagatgaagaagagcaggaaggcacactcttcccctcagagaattactctcgataaacccgaagcaaaggggagaggaaggggaggaaaggtgcaggcctcgcttctagctccaaggaagctagatctggacaagggccaggaagagactaagggcaaagaggtcaagaagaaatatgtcgctctacaggagttccaactaggcatgccattggttggagatgacgtgcttgccgcaatgggcaccgcttgcaaggaccttcacgcatattacatggagaaatctaacgctaagaagacgaataaagctaccgatatccttggagagcacgatggaaagccattccttggtccaacaaattatatcgtcattgacttcaaggatctattcgacctctacaggctccgagcggtagacacatgcctccttaagtgctactccttgttaagttggcaatggtgtaagaagaatacaccggaagttgccttccttgatccacaagtggtcactgtcacaaatctccagaatgaccgtcaaggaatggtcaactacatctacgacaccttgtggacccgccgagacaaggagtatattatgtgcgcctataatcaatatgcccattggatccttctggtcataacacctaagtggagtacatgtcactacctgaactccagaattgataagaacgcatatgattggaccccaattcaactagcgatagatgaagcgtgggcccaatacgtgcaaagaggaggcctcaggaagtcaggacatgacaccctcatccacaaaaaagacttcccgatgaagcaacaaataggtgaccagtgcggattccatgtgtgccacaacatgcgccttctgtacagagaaaaggtgaagactttggctgagtttgagggcacaataaccaagtctctgcctaccagctttgaggaggcaatgatgaacacttattatgcaactgtgatgatgtaa

SEQ ID NO: 87397 - DNA, 1698 bp, Oryza sativa
  unsure (1)..(1698): unsure at all n locations
  Clone ID: PAT_MRT4530_86346C.1
gcacgaggccgtcgtcttcgtttcgcagctccaccacctccatggcggccgccgcctcctcctctctgctcgccgccgcctcgtcgtcctcccgcgcggcggccgtgtccgcccgccgcgcccccagcgcgagtccggccgcggcggcctccctcccctcgccgtctcgcgcctcctgcgctcctcccctccgcgcttccgcagcgaggaccctccgcagccgtgtcgtcgcgagcgcggcccccgctatgcagccgccgccggcgtcgagggtctccacggttgtcgacgtcgacctcggcgaccggagctacccgatctacatcggcgcaggccttctcgacgagcctgacctgctgcagaggcatgttcatgggaagagggttttggtggtgaccaacaccaccgtcgcgccgctctacctggagaaggtgacctgggcactcacgcacaacaacccgaatgtttctgtggagagcgtgatcctgcccgacggcgagaagtacaaggacatgggcacactgatgaaggttttcgacaaggcagtcgagtcccggctggaccggcggtgcacgtttgttgcgttgggaggtggcgttattggggacatgtgcggttttgcagctgctgcgttcctgcgtggtgtcaatttcatacagattcctactactctgatggcccaggtggattcatctgttggagggaagaccggcattaaccatccattggggaagaacttaattggggcgttctaccagccacagtgtgtactgatagacaccgagacactgaatacattgcctgacagggaactggcttcaggcatagctgaggtggtgaagtatggtctcataagagatgcaccgttctttgaatggcaagagaaaaacatgccagcattattagcaagagaaccaagtgctctggcctatgctattaagagatcgtgtgaaaacaaagctgaagtggttgctcaggacgagaaggaaagtggtctccgagcaacacttaatctcggccatacatttggccatgctatagaaacaggaactggttatggagcatggctccatggggaggctgttgcagctggaacagttatggcagctgacatgtctcaccgcctgggttggatagacgagtcaatcaagaaacgggcaattgacatactagagaaagcgaagcttccaattacacctccagaggccatgacaggggagaagttcaaaagtattatggccgttgataagaaggttgctgatggattgctgaggctcatcctcctgaaaggacctctgggaagctgtgttttcactggcgattacgacaggaatgccctcgacgaaaccctccgtgcattctgcgactgctgattcttcctacttggatcttcagactgtatactaaataggctacattatcatttcagagaggagactgcattgtatatgtatgagatctttccccctttttttttttgtcggagaaataatggagaatgtggataggggttggtttctggttgtagcgcgtaaagactgatcaatcgtgatacagttgtccccattgacaagaagggtttactgcattttccttgctgttgccaattcttgcaccagatttaataaagctgtttctgttttttagaaaaaaaaaaaaaaaaacaaaaagggggcgggnccgaccaacccgagggtt

SEQ ID NO: 87398 - DNA, 2989 bp, Oryza sativa
  Clone ID: PAT_MRT4530_86347C.1
tgtccatgtgcagattgcaagaatgagaatatgtttgatagcgaagggggttatacacggtcatctgatacaacaaggattcatgaagggctatacatgttgggtgaagcatggagagcaagaatcaggaagtggagcagcagcaaacagaagtggtgcgcataatcagaaagatgaagatgagcatgacatatttataccttctccattggacggtgaaatggttgatgtggatcacgatttgctgcaagacatgttacgtgacgttgaggacctagcccagaatgagagagattctatgaagttcagcaggttggttagtgattccgagacgcctctgtacgctggatgcaacgcaaaacacactaagttgtcagttaccttggacctaatgaagctgaaggcaagtagtggatggacagacaagagtatcacatatcttttaggaattttgaaggctatgcttcctgctgagaacacattgcccgagacgacatacaaagcaaagcaggttccatgtccactggggttagaggtctgtagaattcacgcttgtccaaacgactgcatattgtaccacaagcaatatgcggacttggatgcttgtcctgtctgcaaggcttctcgatacaagcgaaagaaaagtgctgacgaaggaaagaagtcaaagaggggttgtccggcaaaggttgtgtggtatttacctatcattgatcgtcttgaatctttgccaacccaaacgaagcgaagttagtacattggcacgccacgaagagaaggaatgatggtatgcttagacaactagcggattcgattgaatggaggaatatcgatcaaaaacacaaagactttgctgtcgaccctagaaacatgaggatatgtctatgtacggatggcatgaatcctttcggtgacatgagtagtactcacagcacttggccagttcttattgcgaactataacctcccgccatagttatgctttaaatggaaatatattatgttgttcttgttaatccaaggtccgaggcaacccggcaatgatatcgatgtattcttggagcctgttatcgataatcttgagattctttggaaagaaggtgtggaaacttgggatgcatatggtcaggagaacttcaagctaagagttctattgttctgcaccattaatgactaccctgcactcggtaatctttccggacaaactattaaaggaaaaaaggcatatgctccgattgcaaggaacatacacgaagccggtggctgaagaaatcacgaaagatggtatacatgggtcatcggaggtggctcccgctacgtcacgcatttagaagaaagaagaaaatttttaacggtaagagagaacttcagcctgctcccaaggatttgtccgggatgaggtccacaatatggtcaaggacataagtaatgagtttgggaagaaaagaaaacgtagcaagacaaaggagaaggaaaagaatgtgtgtgagagtttggttggcctgatgttgaatattcccaggaagacaaaggacgggttgaacgcgcgccttgatctacaggacatgaatattcgcagtgaactccagcccatacaagatgcagagacaggtagattgtaccttcctccagcttgccacacattgtcgaaggatgagaaaatcgcaatgttatcatgcttgaaagatattaaagttccatcgggctattcagcgaggataagtaagtatgttaaattggatgatctaaaactggttggaatgaagtgtcacgattgccacgtgctaatcacacaaatcttgccagttgctatcagagccattctaccaccgaaagtgtgtcacacgatccaacgtttgtgcgccttcttcaatgcaatcggacagaaggttatagatccagaagatctatatgggttgcagaccgatattgtgaataccctctgtcacctgtagatgtttttcccactgtctttctttgatatcatggttcatctccctgttcatcgggtgaagcaaacaaaactatgtggcccggcttttctaagggaaatgtggccgtttgaaaggtacatgggagttctgaagtcctacattcgtaacagagctaaacccgaggggagcatcattgaaggttatacaaccgaggaggctattgagttctgcatcaattacatgtccgatgccgatcctatcggagttccaatggctcgtcacgaaggaaggttgtcaggtgttggaacaatcggaaggaaaagaattaggcccgatcaagcgtcctacgcgcaggctcattacgttgtgctccaacatatggcagaagttggcccatactttgaggagcacttagcgaaaatccgagatgagaacttggggcgatttgatacatggattaacagagaacataattctcggttcaacgaatggttcaagaatcgtgtgacaatgtccacggatgtcccaaatgagacaaccgtagacacatggcaaggatacgatataaatggatacacattttacaccgtcaaacaagatgacaaaagcacagtgcaaaacaacggcgtctgtatagatgcattccaggatcaagttgggtcaaacacaaactacggccgcattgaggagatctgggagctaaactacgtcaagttcaaggttcctttgtttcgctgccgttgggtgaatctacgcactggtgtcaaagccgacaaggaaggtttcactttagtagatctatcaagagtgggatacgccgatgaaccatttgtacttgcgaaacaggtcgagcatatattctacataaaagacccttcaaacaagaagatgcacatcatgagggatggcaagcgccgaattgtaggagttgacaacgtcatcgatgaagaagaatacaaccagaatcttcatgtaagacctcacattgaccttgacgatgatccccaagagcctgtggcatatgctcgttcagatcatacggaaggcataaccttg

SEQ ID NO: 87399 - DNA, 2037 bp, Oryza sativa
  Clone ID: PAT_MRT4530_86348C.1
atgaagggctatacatgttgggtgaagtatggagagcaagaatcaggaagtggagcagcagcagacagaagtggtgcgcataatcagaaagatgaagatgagcatgacatgtttataccttctccattgggcggtgaaatggttgatgtggatcacgatctgctgcaagacatgttatgtgacattaaggacccagcccagaatgagagagatggaatgaagttcagcaggttggtcagtgattccgagacgcctctgtacgctggatgcaaagcaaaacacactaagttgtcagttaccttggacctaatgaagctgaaggcaagtagtggatggacagacaagagtttcacagatcttttaggaattttgaaggctatacttcctattgagaacacattgcccgagacgacatacgaagcaaagcaggttctcggtccactggggttagaggtccgtagaattcacgcttgtccaaacgactgcatattgtaccacaagcaatatgcggacttggatgcttgtcctgtctgcaaggcttctcgatacaagcgaaagaaaagtgctgacgaaggaaataagtcaaagaggggtggtccggcaaaggttgtgtggtatctacctatcattgatcgtttcaagagaatctttgccaacccgaacgaagcgaagttagtacattggcacaccacggagagaaggaatgacggtctgaggcaacccggcaatgatatcgatgtattcctggagcctgttatcgacgatctggagattctttggaaagaaggtgtggaaagttgggatgcatatggtcaggagaacttcaagctaagagttctattgttctgcaccattaataactaccctgcactcgatttgtccggagatgaggtccacaatatggtcaaggacataagcaatgagtttgggaagaaaagaaaacgtagcaagacaaaggagaaggcttgccacacattgtcgaaggatgagaagatcgcaatgttatcatgcttgaaggatattaaagttccatcgggctattcagcgaggataagtaagtatgttaaattggacgatctaaaacttgttggaatgaagtctcacgattgccacgtgctaatcacacaaatcttgccagttgctatcagaggctttctaccaccgaaagtgcatcacacgatccaacgtctatgcgctttcttcaatgcaattggacagaaggttatagatccagaagatctagatgggttgcagaccgatattgtgaataccctctgtcacctggagatgtttttcccactgtctttctttgatataatggttcatctccctgttcatctggtgaagcaaacaaaactatgtggcctggcttttctaagggaaatgtggccgtttgaaagggaaggttgtcaattacataattctcggttcaacgaatggttcaagaattgtgtgacaatgtccacggatatcccaaatgagacagtacagttgttggggatgggaccgacttggaccgtagacacatggcaaggatacgatataaatggatacacattttacaccgtcaaacaagatgacaaaagcagagtgcaaagcagcggcgtccgtatagatgcgttccaggatcaaattgggtcaaacacatactacggccgcattgaggagatctgggagctatactacgtcaagttcaaggttcctttgttccactgccgttgggtgaatatacgcactggtgtcaaagccgacaaggaaggtttgactttagtagacctatcaaaggtgggatacgccgatgaaccatttgttcttgctaaacagatcgagcagatattctacataaaagacccttcaaacaagaagatgcacatcgtgagggatggaaagcgccgaattgtaggagttgacaacatcgtcgatgaagaagaatacaaccgtaatcttcatgtaagacctcacatcgaccttgacgatgatccccaagagcctgtggcatatgctcgttcagatcatatggaaggcataaccttgtga

SEQ ID NO: 87400 - DNA, 412 bp, Oryza sativa
  Clone ID: PAT_MRT4530_86349C.1
ggtacgaccacgcgtacgcggacgcgttttcgtgtgcgtgggcatcctgagacatacactgcgcctgggccggcgtagaaaccgggaaagccatcgccggcggcgcctgcgccgtggccatggtagaaagatgctcttccgccgccttgctcgactacccgggcagcctatgaacagggccccgccccctccgcctgttccgagcattcgaggagggctcctcctccgggtcggggagcaagaataatgccaggaagtccaacggcgctgggaacaagggggaagccagctgcggtggaggcggcaaggggaaggagaaggcgctggagccgccgcccagggtgatacaccgcgcgccggctgggagcgcgtcggtgttccaggagacggagccggggttgaccctcggcgg

SEQ ID NO: 87401 - DNA, 567 bp, Oryza sativa
  Clone ID: PAT_MRT4530_8634C.1
atggggtgcgtgcttgtggtggcgatggtggtgtacctcatgttccggccaaacctcctgcacgcgacggcggcgggggcggagctgtccaccttctcgctggcgctcaaggagtggacgctgagctacaacctgtcggtgggggtggacctgacgaggcacaacgcccgcctcgccctccgctaccactccatcgccgccgacgcctactaccacgaccagcgcttcgcccacgccctcctccctgacttctcccagcccgcctccaccaacaccacccgcatcaccccctccttccaaggccgccaccagctcttgggcggcctcgccgccgccgccttccgccgcgaggacaccgagggcatctactccatccacgtcaccatggccgccaagaccgagatcaagctcacgccgtccgccattatcaggctgcccggccccaacatcaagctcgactgccccctcaggctccgcctccacccttctccttccaacgccaccaccaccactaataatcataatccccaccacttccaccccaccacctgccacatctcctactga

SEQ ID NO: 87402 - DNA, 334 bp, Oryza sativa
  Clone ID: PAT_MRT4530_86350C.1
cctctgccacgagcgcgtctagctattgcggaccctcggctacctcacccactcctaccgatccggctaggccgtcatctccaaccgcggccacgacatcatggaacttgacgcgactgcaaggggggaggggggttcgctagcttgcgttgcatcataggggggaagcattcatgcctatcgtgcctagtgccaactgactgtttggctgcacgtgaggctcaatgccgacgcccgcttcctggtgatcaacggcacggcgtactaccttaagcatatgcactggcatcttgtcacctagcacaccgttcacggacgctagtgataactaatg

SEQ ID NO: 87403 - DNA, 476 bp, Oryza sativa
  unsure (1)..(476): unsure at all n locations
  Clone ID: PAT_MRT4530_86351C.1
acttgcatctgtataacaatgctgggattagcactcctttaagatttgataaagatgacactgatggatctaaatcatggaaacacaccattaatgtcgatctgattgcagtagttgaaggcacacaacttgcgatcaaagctatgaaagcaaaacaaaagcctggagttatcattaacatgggatcagctgcgggtctttatccaatgcccgttgatcctatctatgctgcctctaaagccggtgtcgtattattcactagatcattagcatattacaggcgccaggggattcgcatcaatgtgctttgccctgaatttatcaagacagacttagctgaagctattgatgcttcaatactagagtcaataggcggttacatgtctatggacatgttgcttaaaggtgcttttgcgcttatcnccgctgcgtcttcggcgggggcntgtctctggtttgcccctcgctggggtttt

SEQ ID NO: 87404 - DNA, 1296 bp, Oryza sativa
  Clone ID: PAT_MRT4530_86352C.1
aattctttatgttaatctccattgctaattacttattagcattacattacttttggataataatgtaaaccattagtactaattaagaaacttaattattacaactcgcggatattaataacctggtgaagagaagaactcgaattattaggacacctagcttaactgctacatcatcttgttcttgtagtggccatctggttgttcacgcgctgcgtgcgcgggcgaggccggcgcgtcgacctgaacgcgcgcgtgcgcgacgtcgccggcggcgccggcgccgtgctcctcctcctcggccctctccaccttctccttggtcatggcgccgacgtcgaaggctgccctggcgacggcgcccacggcggcggacacccacgcggcgccgcgggacgcataggggctcgaagccaccacgctcgccgcgccctgctccgccgcggtgaccgcgacgcgggcgagctccgacacctggaaccgctcgtccacgccgcgcacggcgccgcgcgccgccgccgtcccggcgctgaacttgtcgctgagcccgaaccggcggtccagcgacgccacccgcgcgctcgccgtcgacagcagctggtgccggtcgtcgaacgaccgcgcccgcttcagcgcgtccttgctcagcacgaagcccttggccagcatcgtgctcaccacctcctccgccttcttcaccgccgcctccgtcggcgtcctcggcgagcccgtgtcctgtctgtagaagtaggcttctggaggtagcacatagtcttccactggtgtaatgttcactgaagcttcagatatgcttgctccagagagtagcagcgcagtgtctgctccatggaactccttgaaggtcacataggcaacttgtgatgtctctgattcccttcgcatttccacgtattcgacctcaccggagaaggagaagaactccttgatgttgtcagcagtcgccgacatggagatgtttgtgaccttgattgttcttgcatctgagacatcaatggtccaattgggggaggtgctgatgagttgatgaggaggagatggtggtggtgatggtgatgaagtgctgaattggggaggagtcacccctatcctcagatagcccgggtccagccggaccgccatgaacgactcctgcatccactgatccaagctacctaatgggcgtagagcttgtttgttcactcgaaaaaacctctcacttatctcagagagagagagagagagagagagagagatcggacagagaggggcgggcaaaatggtaaatagacacggcat

SEQ ID NO: 87405 - DNA, 1511 bp, Oryza sativa
  Clone ID: PAT_MRT4530_86353C.1
atggcgtccataaccagcgagctgctcttctttctccccttcatcctccttgccctgctcacgttctacaccaccaccgtggccaaatgccacggcgggcactggtggcgaggtgggacgacgccggcgaagaggaagcggatgaacctgccgcccggcgccgccgggtggccgctcgtcggcgagacgttcggctacctccgcgcccaccccgccacctccgtcggccgcttcatggagcagcacatcgcacggtacgggaagatataccggtcgagcctgttcggggagcggacggtggtgtcggcggacgcggggctcaaccggtacatcctgcagaacgaggggaggctgttcgagtgcagctacccgcgcagcatcggcggcatcctgggcaagtggtccatgctggtcctcgtcggggacccgcaccgcgagatgcgcgccatctccctcaacttcctctcctccgtccgcctccgcgccgtcctcctccccgaggtcgagcgccacaccctcctcgtcctccgcgcctggcccccttcctccaccttctccgctcagcaccaagccaagaagttcacgttcaacctgatggcgaagaacataatgagcatggacccgggggaggaagagacggagcggctgcggcgggagtacatcaccttcatgaagggcgtggtctccgcgccgctcaacctgcccgggacgccctactggaaggctctcaagtcgcgtgctgccattctcggagtaatagagaggaaaatggaagagcgggttgagaagctgagcaaggaggatgcaagcgtagagcaagacgatcttctcggatgggctctgaaacaatctaacctttcaaaagagcaaatcctggacctcttgctgagcttgctcttcgccgggcacgagacgtcgtccatggcgctcgccctcgccatcttcttccttgaaggctgccccaaggctgtccaagaactgagggaggagcatcttgggattgcaaggagacaaaggctaagaggggagtgcaaattgagctgggaagactacaaagagatggttttcacgcaatgtgtcataaacgagacgttgcggctaggaaacgtggtcaggttcctgcaccggaaggtcatcaaggacgtgcactacaagggttatgacattccaagcggatggaagatcctgccggtgttagccgcggtgcatctggactcgtccctgtacgaggacccccagcgcttcaatccctggagatggaagagtagcggatcatccggcggcttggctcagagcagcagcttcatgccgtacggcggcgggacgcggctgtgcgccgggtcggagctcgcgaagctggagatggccgtgttcttgcaccacctggtgctcaacttcaggtgggagctcgccgagccggaccaagccttcgtcttccccttcgtcgacttccccaagggccttcccattagggttcatagaattgcacaggatgatgagcaggagtaaac

SEQ ID NO: 87406 - DNA, 954 bp, Oryza sativa
  Clone ID: PAT_MRT4530_86354C.1
tcacaccaggtccttgtcgccggcaaggcaatgtttcccgtcaatgaattccttggtgtgcatgtcgttacctcttccgccgccgcacgctcctcctccgccttctgccgccgactgcccgcgcctccatcgtgcctcccattgccctcgccagaacagcgacgacccccttgctctcggcgccgcatcccgcccctccgccgtcgtcgtcacccgcgatccctcctcccttgctgccgccacgccgtccgtccgttctccacgtgcgccacccacgtgcgccacctcgccctcaagctgtcataggtatgccgccagacggtttcaggtcgcgcctcaacaggtcgtcgacgatcccccaccgtcacctgagatcccctcaccatcacccgagatccccttcccaggggcggatccaggaacaaaaatttgggggagggggactcaattacacagtttcttaaacctctagccatttagggacctttagtttatcattcatggtgaaaaaaataaaaagattgctccggaggtatccatgagtcttgtgggtgtaggggggagtccccccctacacgttggatccgcccctgcgggcccttcccaaccgctggtcctcccctccagtaaaggtaaagacgatttctcctgtggtctcggatactgtaacgaattgcagagtgtagattttgatgctatcaattttttttcatcagtttgattaatgaaccgttttcctgggtgaccaatgttgattgtgctattgacacttttctgctaatgtactgagacatatcttctaatcctccattaccagtttcaaatacaatgtattcagcaaagggtatgaggagatcagattatttatgtcactagttgaggagaaatatttcagattcaggacagttagccgcttgaaaccttcaaacttctgaggcaagctgacaatgcatc

SEQ ID NO: 87407 - DNA, 240 bp, Oryza sativa
  Clone ID: PAT_MRT4530_86355C.1
cctggaacttgcaatctgttataagtgatataccaaccagtactataatatatgtctgacaaatggtttagcgcaactcatgaaagtcttaacaaccatctactcatctagtaggctaacaagtataagtatccacaatcttaaaggagagatttgccatgcgttgttagaccctaaaaatattacttccaacttataccattagtcttgtaaccattttaattcttcaccacgattatg

SEQ ID NO: 87408 - DNA, 948 bp, Oryza sativa
  Clone ID: PAT_MRT4530_86356C.1
atggcggaggtaggagtcatccctgtactgccagaacccgggccgacgaccatctccgcacctcgtcacacggctgcggatgcacgaggagctccagagaccgagtcgtacaaccgcgccgtgcagcggctaaaagacgggagcggcaagggcagcgccaccgaggccgacgcacgatgtggctgctcccgtgcgacttcccgctggtgtcgtagctacgcgaactttagcgccgacagcgccgagagctatggcaacatgatgaagaacaaggtgctcgggacagacgggagcgacggtgacatgcccgcggcccagatgccggcgttcgcgtacctccacctgaaccacgactacggcgacgacgacaagatgttcttctgcgacgacgaccagcggctggtgatgaggacggacacctacatcgtgccatcgctgttcctggtcaccacgttccaggacgagctcgacgcgctcttcccggagcgtggcgccgtgttccactacctcggccgctacctgttcccccaggccaaccacaccgctgtactacagcgtgtacctcgcgccggcgtggcagcagctggtcggcgtccagactgcggaagccaggcactgttctgctcaagtgccgctgccgccgaggacgacacgctcacatgtgccaagccttggagagatattcttcaaattctcatgagctggctatcaatcaactatttcttagaatcttatgtttccctaaatagggccaaagccgccttgaaaggatcctacaacccgagaggtcaggaaggttggatttggcggtccatagaatccagcctaaaccaggtcgccaaggagccgaaaaggaggatggggaaagacacaggatgcgcaagaaggggcaacaggtcaaggagatgcatggagattcgtggtggcgaagggggagaaggagattga

SEQ ID NO: 87409 - DNA, 290 bp, Oryza sativa
  Clone ID: PAT_MRT4530_86357C.1
atgtgggcctcccggcacggcatggcccaggcccggccgtgcctgggccaaggcctgtcgggccggcacggcccaaccgacgcaccgagccgtgccgtgccagcccactccctatactttgtgtgccgggcctggcctatcggcccatcgtgccgggctggcccgaccgtgccgggccagcccagcgtgccgatagggagtcctaggtcgggccgggccgacccaaggccaaaaagccgtgccgtgggccgggccttcgggcctcgggccttatggccatctataggagc

SEQ ID NO: 87410 - DNA, 374 bp, Oryza sativa
  Clone ID: PAT_MRT4530_86358C.1
cggacgcgtgggtttcggaacaaggttttagccatgaggatccattgcagtctctgccaaactggcttcccgacggggatgaaaagaaataagagttcgagtaggccaattgtggtcatcttattatccgttggtgggttagcgcagacaattttttaattttaaatattacttttgagttaatttttgagaatttgtattgctgtttgtatttcaatcttgtcttttagactaccgaggatatcctcaatgtatatgtaacaataagcaatagtggtagggcctagtgcaggaagcactaactatggtaaacttcacaatggtaaaagattattagatgtgggtcccatgtcaaacataaaaaaaaaaagctt

SEQ ID NO: 87411 - DNA, 2406 bp, Oryza sativa
  Clone ID: PAT_MRT4530_86359C.1
atgcagtatttagagaaaaataagactgtttcgcaatttagttatatagaaaatgtcgcagcaaggcgaacccatgcagcgactactagtgggataacatcgagctggactcgtaggacccagaataagatccctaaggaagtgtacaccataacagaggtggacgatctgggatttttgatggctcctgcgaaagctgtcaaaaagttcgcaatgatatgcagagtcctcgggaggcggaacttcaccattttgaaggatcacatcgatctgaccacgttggtcaccgactacgtcctcaaccccgcccaaccagaaccattcaggaagtacccgttcatctcacgggtcgtgtgggaagagttccataccacaaaatcaacccctgagtctcgggcaaaaagcgaggcctataggaggttgcaggcaaaaaacgttcacccgcaccggcttggcaccggaggctacgccgggaagcagcatgaatgggtcaaggaggatgaagctactgcagaatctaacactccgccagttcttggtgatatcccgaccacccgagcaaggaacggggcaagggcgagggtgaagaagaatagtgatgaaacacttacgttcccaaatcccgaagatcaagcagtgtaccagaaaatcgtcaagatgactgctgagagacaggcctccgaagaggtctgctcacaaaaacgcgaggatgacagcctcacgaaagctttgggaagcgaagaacaccgtggacggacaaggggcattggcttcaatgttccatggaagtttgggtttccccaatacgcgtggcagtacaggaagcacaggctttctaaggcgcagaaagatgcacgccttaaggaacaacttcgggacgagattagaaacgagctccaagaagagttcaattcgaagttgttacaagtggaggctcgggtggaggcacgcctcagggaaagcgagcctgctgccgctaccataatagaaacgatccccacacaaaggtgtaaaagctgcgcatctactggggcggcggcacaagaaacaccagaccctaatgcggtggaccacatatcgggaaccatatcgtgcaccctagtcgttagggtgacaaaagactttgcaattcctgccgcagagggtcttgcgttcaagcccacgccggagacccgagtgcatggggggcagctgctagccggccatgccaaagttcaagtagacatggtgaagcccgattgggttggctacactctcccgctcccaccaaatgacgaggttctgacccttggagctgcacgtgggacatttatccaatggcccaagcagaacattcagataaatataactcctaggccagcaccaagtgctcgtccggcggcgccgccgcatccccctccagctcttgtatctgcccctcctgccgttgaaaaaggagatcaagaattccaattgcagtatgatacagattttggggatgacggacaagaggtcagcagcagagcgcacctccccccagtctccacgaaaagaaagagggcggcatcttctccacccaagcttggatcacgcaaaagagctactggaagggggggaggaagaggaaatgtggaagggccgcttctggctccaaagaagctagatcttggcaaggcgccgtcagctcctcctaaagaattcacattaggcatgccattggtcggagacgacgccttatcgaagatgggccctgcatacaaggagttgcatgggtactacatggagaggtccaacgcaaggaggaagcatagagagacctccatgacgggccagcacgatagacagccgttcctcggccctgaagcctttatcggcgtagactttcaagatctatgggacctccacagggtacgagcggtcgacacaaatctccttaagtgctactccttgttaacttggaagcatgtccatcgtaatgctccccatgttgccttgctcgatccaagtgtcatcaacgagacaactatgaactacgatcgagccaacatggtagaatatatcaaggactgcttatggtcccgtcaagacaaggacttcattatgtgtgcctactctcaacatcgtcattggattctcctggtcatagtgccgaagtggagtttggtatactactttaactccaatatcaaaaaagaaatatacgattggtcgacgatcgaaactgtcttgaacgatgcctgggaccaatacgtggcaaaaggcgggaggcataaggaagggcatcccacactcggtcacaaaaaagactttccaatacgtcaacaagttggcgaccagtgtgggttccacgtctgccataacatgaggagcctcgcagacaaggtgacattgctcgaccttgagcgggcatggctagcaaaggcctga

SEQ ID NO: 87412 - DNA, 1077 bp, Oryza sativa
  Clone ID: PAT_MRT4530_8635C.1
atggcgacgcgacgggcggcgcgtggggctcgaggtggcgacgggcgagcggcgcgcggcaacggcgacgagacgcaacagcgacggcgcgcggtgacgcgcgaggggcgcaaggcagcgacggcgacgcgacgggcggcgcgcggcgcggcaggcggtagcggcaacgcgacgggcgggcggcgcggcgcggggctcggcgcggtgggacccgaggccccacctgtcatcttcttccccaacctcccgtcgtaccaaccgccgccatggccgccaaatcctcccacgtcgccgcctctcccgcgcgactccctctcccgcgcgtgcgtggacgcggtcgtcgcccacccggtcgccacagccgctcccaccaccgtcgttccgcgcgaccgccaccagtggcttcgccgcgtcgtgccacctcccggcgtccgctccatttcccctccccgcctccgaagcaccatcgccacgcgcaccgcctccttgcaccgaagccaccgactccagccgccgcttggcgccgctcctagccaccccaagtcgcgctgtcgctgccgctcacttcgcagcgccgaggagcacctcggccgccgcttttcacggccgggatcccgccggaacacggttcccctcgcgccggtccttccggccgccgtctgccggttcctgctcacggaacgccgccgggccgccgttccgccttcatcccgaggagcgccgacgccgagctccctcccccgcctctccccgcccctcgtcgccgccctcggccgcgccgccgagccgtccccagccgtccgatcggccttggccgatctgggccgtccaacccgtggaccggcggtggaccgtccattgtggtcccggtccacggtggaccgccacctcgtctcgctgacgtgtggggcccgcctgtcggcgccggcgccccttgctgacctcgaccctttcctaggcaccggtggcgagggtgggcgtgatggagttgggtcggccggggtgtccggggagggttatgcgaagggtctcgtcacaattactcgacatggtgacgtgtgcatcatgggcacatga

SEQ ID NO: 87413 - DNA, 1356 bp, Oryza sativa
  Clone ID: PAT_MRT4530_86360C.1
ctaagcacatacttccacaggcgcgtgagatggcgggagcatgcactgcggcggtggagcttccagcgggcgccacgaaccgccgacgatcaccaggtagaagcggctctccggcacggtggcgccgaagaggcggaacccgcggcgcttgaaggcccagatctgcacggcgtcgtgctccctcaggccggttccggcgatgaagtccatgtagccggtccccttgatgatggtgccatggctgctgtcccagagcaccagccgcagctccttcatggcgccgctcaggtgcagcaccgtcaccggcaccccgccgtggtccttcccctgcgccttcttcctcggctccttctccctccccttctgctgctgctgctgctcaccgtcggcgacgtcgacgctgcctttctccgttcgtcgcttcttcttcttcggcaccggctttgggcgaggaggagcctgatcctctccctccacgttcgtctccggcgtcgttccctgcggcttctgcagctccccgtcggcggcggcggtggcggcgatgacgacgctgcctttctccgtgcgtcgcttcttcttgggcctcggcctcgggcgaggaacccccttctcctcgtcgttctccaccaggttggcctccttggcctcgtcgacggtgagcatcgggaggaggcggcgctccacgccgaagatcgggaggcggaaccggttctggtgcgggtcgaggtcggtcctggtcaccgtcttcctcgcgatgaacaccaccggctggtcgtacgtcatccccagccgctcgagcagtatcttgcggatccacgccggctccgcggacggcgccgccgccgcctggtcgtcggcctccttcctccgcgcggccgcggcggcggcgagcgggacggcgcgtatgggccgggcgtcgatgggcgccacgtacgggaccagagcgcccgtcgccgcagccgccgccgcgcgcgcccgcttggcctcccgtcgtcgttcccgccgtttcgcagcggcagcggcagcggcattgcgcccgtcgacgtcgcacgacggcgccaccgcggcgagaggccgcttcatgccggcggagtagcccgcagcagccggcggcatattgcggggcagagagatcacgctgtttcgtcaacaccgaatatcgtcgtaagcagtcagggcgcagcccgattggcatacggcataccgactgttggagatggccagatggtggggttccggtttccgtgggttgaaagaaggaaagggcccactcgtatcgttggagttggcccgtttggttcagattactcctgggcccaagcacaaatggccattctgtatagtatctggattccc

SEQ ID NO: 87414 - DNA, 332 bp, Oryza sativa
  Clone ID: PAT_MRT4530_86361C.1
cggaacgcccggcccggcccaacccacccgtttcgttgtaacccacactcccacacgggaagggagggctcattttggttgagagaggtggacgcccacacaagcgcctgcaggtggaggcgttgcccaccaaagaaagggttcgcggatgcgcgtaactgctacgcgtcgcacgtgcgccatcacctactctacattgtctacgaacgggggcgaacaaacagccccactcttcggtggattctgagattagtgcaacctactcaggtgaaaattcgttcactagcagtcgtcatggcagtatggccaaagaccgcggtaaccgtttgaca

SEQ ID NO: 87415 - DNA, 738 bp, Oryza sativa
  Clone ID: PAT_MRT4530_86362C.1
ttatctctctcttttcttccccttcggccatggtggcagtgggcgggacgacgtgtgcaactgtaggaggaggccaaggatggcgcgggggtgtgggaggatgaccgggcacagcgaggttgaggtggacgacggctggtccgcatcaccggtcgccaccatcgcctcatcccggatggtgttcaccacaattgaattgctggtgcacccggcatcagccgatgcaacaacggtgacaatcctatctcttcttcctatcttcccactctcttcccctcctctcctgctgccgagtggcgcacggatgtggaggcccatggcgaggcgtacatgaaggaaggcgaggtcgagcaacttgatgagcaccggcacaagctttgtgcgaatgagtttcacccattttgccgagggagagcagcgaggcgagcagtagtgccgcgcgtgatgtcctcgcaagggtagaccactggcagagcgagtagccgccggcactttgacttgcttggcggcaaagacattgtgggaggagaggagatttatggacaagcagcggcggcggtggaggcggcagctattgtcagttaccacagcgttgcaggctgttttcccaacgcacaacgttctagttgctctcgccgtgccgccggtcgacctcactttctgttgaacacacaacaaaaggtaacctttatgtaaaaaacattcatcgaggtacaagatcgacgagagtgccgacat

SEQ ID NO: 87416 - DNA, 288 bp, Oryza sativa
  Clone ID: PAT_MRT4530_86363C.1
ggactggaaaaatggggttttttttggccaaactggctttggttgaaaaaaatgtcggtcaaaacttggtggaaaaattaaattggaccaaaacaaattccacccaacaggggacaaaaagacacataacccggtttattttgggggaaaaaatttacaaaacttttggcacttaaaacaagggaaaggaacctgaccgccaaacaaaaacccaagctttgccccccggcgggagaatcgatcaggggtcccgggtgggaacccccacggggcaaaatgggagggaat

SEQ ID NO: 87417 - DNA, 561 bp, Oryza sativa
  Clone ID: PAT_MRT4530_86364C.1
cggcacgaggcggcacgaggagtaatatatcagggcagcaaactagtactgcacagggactatatagtggtcctaacacagctcgattctatccgccttttcacacgacgaatagtaaggagggtagcataagttatccaaatgatcataagcctcaacctgaagcaagaaatgtaacggaaaattctcgtctttctggcagagaaccaactgtgactgatactgcttcagactctttcttaaacccagagagctctacaaatcctcacgagcaagaattaatgggctgtgtgaaaggtcctacaaaggaagcctatacatctgatgctgaagcacataccaacaccactaatggtgaagaaacttcagtggttaacaactccagtgaaggatatggagtaataaaaaagagctctgtagaagaaactaacgttacaaacttttcgtctgcttcaacgacagtaaatgatgagacccttcagtcagattcgagtgaaatagttgatagaagtcagcttcttccatcttatgaatcatctgaatctaaagattcttgggaag

SEQ ID NO: 87418 - DNA, 723 bp, Oryza sativa
  unsure (1)..(723): unsure at all n locations
  Clone ID: PAT_MRT4530_86365C.1
caggggtctaattatggataaagacaaagggaatttggtcaaagctgatcgttttggttacattaaaagggccatgcatggcacccagatgctttctactagtgctgtgagtgaaatatatggaagagaattggtggatctacggaaagaaagtagatgggagttccttaatacccttttctctgtgtcagaagctgttatgttcatgcagatggtcgacaagttggatcaggggttggtgccagctgaacttgggccactggattacaaaggactgtacaatgctgtttccagggcactttttcgagcgcatgtagaaggtcaactcaagagtgagataatggctgagccggaacgatttgtagagcctgatcctgaactgcctttagctcttctggatcaaaaggaggctggaaaaaggttgcttcttattacaaactcagattaccactatacgaacaaaatgatgaatcatgcattcaatcgcttccttcctaatgatatggcatggagagatctgtttgaaatggttatagtctctgcaaggaagccagagttnttccaaatctctcatccgttatacgaggttgtaacaaatgatggattaatgcgtccctgttttaaagctaattcaggtggattgtactctggtggcagtgctcagatggttgagaagtcactagacatccatggagatgaaatattatatgtggggggatcata

SEQ ID NO: 87419 - DNA, 546 bp, Oryza sativa
  Clone ID: PAT_MRT4530_86366C.1
gcgggacccgcaggggttagtaacaacaaaagaaacaaacttgctccaaaaaggggggggggcgataaaaggggaagaggccccaagacctgccccccgccccctcccccgacgccgggacagaagaaccgcaacggggggccagccgggcccggggaaccggggagaaaaacacaaggaagggaaggcctttggggcagggcaggccccttttcctcattggaaaagagctttcaccgggggggagggcaagaccttttcagggcggggctagccggaacccccaggaagggctggaccccccccggagaggggcccaagaccagaaggggggaaagcgggggggaaaaagggcgcgggggggcaatccttgggggctcaaggaaggggggggaaatcgccggggccccctggctcccatcggggctaccccggggggggtttaaccggggccaaagaaacccccgggcggccccaaggggggggagtcccgggggccacagggagacccccccctcaaaatgggcagcactcggtttccccccc

SEQ ID NO: 87420 - DNA, 801 bp, Oryza sativa
  Clone ID: PAT_MRT4530_86367C.1
ccggcctccgggcttcagcacgaggagtgtccctcccctcaatcatttcggtctccattccgagaaaaacaatccactagctcactagcttcgccggcgtacggacgcgcgccgcggggactggaggagcgcgcaaaaatggcggcggcggcggcggtggctgacgaagtcaccgtgctccacggcggggtcgtcgtcagcatggacggcggcttccgcgtcttccaggacggcgccgtcgccgtcgccggggaccgcatcgccgccgtgggaccgtccgccgacgtcctctcgtccttccccggggccgcggcgacagtcgacctcgccggccgcatcctcctccccgggttcgtcaacacgcacgtgcacacgtcgcagcagctggcgcgggggatcgccgacgacgtcgacctgatggcgtggctgcacgggaggatctggccatacgagtcccacatgacggaggaggactcctacgcctccaccctcctctgcggcatcgagctcattcgatccggggtaacatgctttgcggaagcaggtgggcagtatgtttcagaaatggcacgtgcagtagagttgctgggattgcgtgcatgcttgacaaaatcaataatggattgtggtgatgggttacctccaaactggagctcttgttcaactgatgattgcattcagtcgcagaaagatctatacgaaaagcatcacaacacagctgatgggcgtatcaggatatggtttgggttgagacagatcatgaatgcaacggatcgtttactgcttgaaacaagagatgct

SEQ ID NO: 87421 - DNA, 3213 bp, Oryza sativa
  Clone ID: PAT_MRT4530_86368C.1
gaagtgtaaaacaattgccttctcatattttattttgatcaggtacatggcatttaggggacatcaagaaagatcaacaccaggattgaagtcgaagtctcagggggagtacaaaggtgagcaaagaatagacagtatcataaaacatctgggagcacatatcacggttttgtaagctaaaaacaatacaaggctacacaatgatgttcatgtaggataatctctactgcctgtcattccaactcaaacaaattgacaacaactgacaactcatgaaaattgggagtagcaaaaattgagttcggatgggcctttgtaataatttgatatacgtgtgacgtcttcgtcacagctcagttaactgctgcctcccttctgtttgagggtgatcttgtcgcctaagctgagggcgattccttgggtcttactccgtattctgatatagccactcagcttgccatcggcttgcttttcaacgctgatgttcaccaatgcatcctcaccaaaaacactcttggcatagagattagcagcgataaacccacattctccatcaagcgcagatggtggtgttagacacttcatgtttgtcgatttgatgatatgatccaaaaattccttctcattctgaatgacagtattcacagccaccttgttttcccactcaaattctgcccacatgttacggaaagtaacatcggcgcaagtagcaggtgagatataatccatgatgtcaatgtgaatatcatttagcacaaccactgatcgctccatcacatttgaagtttcataaacaatgttcccaaatattactccagtctctgttgatgaaaccttgatattagcacggatttgtttgcttgactcaggagccaaggtgtagttctgagggcggtcaacaagtttgagatcacccattgttgctaactccaagcacaagttctgaagtgtttcctttgttcggtttatgactgtaacatcaagcacaatatcatagtggtgaacagttacatatgcttcagcatacacaggatcactgaaccctgttagttgaagaatgcgattcagtctgtttgcgtcatctgcatcttttgtaaattcaccagtagcagccttcaaatcatcttggactgcatcttccaactcaagctgactcatgccccttctgctcttcaggtggtagaaatctataagatcatctggttgagcgtgagagatctgtgcctttgccttcatctcctctgtctcccggaactgcttctcagcaagcatctttgcaaagctctgcctacatgactgtaaccagaccttcctgacatcatcaccagtattgcaaagcaacctcacacaaagcactatcctgtcatatgaatcattatcaattgggtgtggaaggtaagatgattgtcccagctgcagaatggatgtcatgaccagcaaagccccagtacaagccttgttcacttcaaccattgagggctgaacctcctccagcctcaatacaagtttggtcaaggtacaggaaataacggcagccaagaagaaatcgcctgacagaatgagtgatctgagattcagggtcgatgataatgacccaggagcaactgatggagtagaaatggcctcagtggcagcactctgtgtggcataagtgccgtctgcaagaacaacaggccgcctagaagacacggtaacagagttcaccactggttgtgctggcttggctgagtcagttgcctccccttcctcagatactgtatagaacggtacatcgccaaggcattgcttaatggtggagatagcattctcaacctctgataaggagagagagtactccccaaggatccacaaagcacacgagcacacacgggatgcccggatctgatagaatgtatcaatcaatctctggatcatggacacacgcagcttgggattagtctcaatgatctcacgcacgaacaacacaacatcaactgcagcagcaacattagtgtcaccaaggaaatccatgagtaggtgcaccactgacccagccacctctggatactccacagcacaggcatggatcgcctgcaccagcatctggcggtattcaccactcttctcaagttcccctgcctgcgtcttgaccacctccttcttgaggtacagaacaacctcctccacattacgagcggtgagcagatcgagcaccaaatccagcaccttcctcttaacatccaagttgggactggcgagtgcacgcagcacgtccatcactacatccaccatcacatcacggtgcgaggtgcgcagctcattcaggcggtccaggacaatgagcttcacattgttgtcgctctgtgacgacagcagctcgcagtacgtgtttgcggcagcgcgcacggcagtgggcgccgaggagagcgacacgagcgcaccagcgcactcatagacaacagcggtgctgggggatgacaaaagggcgatgatgatcttgatataccttcccttgtcggcgcggttcggggagcggcagaccttgcggatgagatcgacggcggccatctgcaggaggtcgggccactcggcgacgcggtcggcgttggagagcaggtacgcgacggcgcgctcctgcgcgcaggtgcagagcatgaggaacgcgttccggcgcgcggaggcgtcctgctccgaggcgagcgcgcgctccacgagctcgggcgcgtcggggacgagctggtcgccgtgcgggaggcggtagatggaggagatcgcggagagcgcgtggcgcctgatgaagtggtggcggtggtcgaggttctcgaggatggagggcacgagcggctcgagcacctcgggctcggagaggcggcagaggaagcggagggtgacgccgcggatgtactcgttggggtggtggaggttgttgcggaggttctggcagatgaggatcatctccgggaggcccctgccggcggcgtcgcgcttgtcgatgatctcgaggtagaggaggagcagcttctggatggtgtggtcctcggaggggaggacgtagcggacgacggtgatgaagagggtggggagggtctcgccgttgaggaggagcatgacggcgcgcttcatggcgtccaccttggcggccacgtcgctgccctcgagatccgccttgatctcaccggccatggcggcggagcccttgtcgaagtggaccagcagcgtgctcggcttctccat

SEQ ID NO: 87422 - DNA, 345 bp, Oryza sativa
  Clone ID: PAT_MRT4530_86369C.1
atgtatacagtgtggccacgcgtcctcgttcgtctgacctcggggatcaccctgtcatctcttcataaatgggcggagatttgcaacggctgctgcccgagtgacccttctgatgggacggcccatacctacctccactccgccggaagcaggtgcaacgtgggaacacggttgtcttctggcgacataaccagtgttgggataaagcctggcatatatctgaccaggaccaacgtgccacccccaggagctaacacgccggctccggctagggacgagtgcttggaggctctcatcctgacgggatggggcgaggcgtgcgtcagaccgcccgtcgccacctaa

SEQ ID NO: 87423 - DNA, 333 bp, Oryza sativa
  Clone ID: PAT_MRT4530_8636C.1
atggagaggaaggtgcccgtcacggccgtgtgcttgggggagagcggctctagtggttctcgccttttgttgttggtcgggccactgttgcccaaccgggtcactccattctatgggagaggcaatgaggaggatgacggcttcgacgaccacccgtgcgaggagtgtgggctggtcgaggtcatgggggaccccgacgcaatgtcgctgtgcaacctcgggctgcagaagctacagcaccgtgggaaggagggtgtcgggattgtcgccatttggggtgacgggaagctcaagtcggtcacttggctcggtcttgtcgccgacgtcggctag

SEQ ID NO: 87424 - DNA, 581 bp, Oryza sativa
  Clone ID: PAT_MRT4530_86370C.1
tcttgctaaatatgaaacagtgttaagttggcaatggtgtcagaaaaatgcaccagaagtcgccttccttgatccataagtggtcactgtcacaaatctcgagaataaccgtcaaggaatgttcaactacatctacgacaccttgtggtcccgctgagacaaggagtacattattgcccattgaatccttctggtcataacacctaagtggagtacatgccactacctgaactccagaattgataagcaggcatatgattggacccctattcaactaacgatagatgaagtgtggggccaatacgtgtaaagaggaggcctcaggaagataggacatgacaccctcatccacaaaaaagacttcccggtgaagtaacaaataggtgaccagcacggattccatgtgtgccacaacatgcgccttctatatatacagagaaaaggtgaagactttggctgaatttgagggcaaaattaccaagtctctgcctaccaactttgaggagattcgtgaggagatagccggcttcatcctccgcgaaataattaaccccaaaggaatgtttaggcttaaactaaaa

SEQ ID NO: 87425 - DNA, 321 bp, Oryza sativa
  Clone ID: PAT_MRT4530_86371C.1
gcatgaattacctagaaaacttcagctgactgcatatatacgataaacatacaaagggagtagatgtaatactaattcttgtgtgtatatggtgtctggtgattcaattcatgggcggccttgtgggaaaaacacttaatttgtgaagtgagtattaaaaaacaaactcttggaggcagaggctatattgatggaaacgtaataagattacagagtagtagtagtgggtgatgatgccttagggattgcgccggagccgccgcaggtagtgcaggagcgagtggaggagcagcggttgcagtaggtccacttggtgggcag

SEQ ID NO: 87426 - DNA, 404 bp, Oryza sativa
  Clone ID: PAT_MRT4530_86372C.1
cggcgaaggatgacgatggcagcgaaggaggagttggcggcggcggcgccgggctcggtggagggtggcgccggtcggtggagacgccggtcgggcagggcggcgccgggcgggcagcgtcgggctcggtgggggtcagcgacgtgcgtcggtgaggacgcgggaggtgacgacgaggaaggccgacgccggtcggtgtagaggctcggtggcggcggcggtgggctcagtggcggcggtggtgggggtcgtcggtgaggaggcggcgtcggtccgaatggagggcgacggctgcgggctcggtggcgacggcggcgggctcggcgatggaggatgacggcggcgctagggttctaaggaggcaggaaattgtagcgggacttagaaaaattttcgatccgatc

SEQ ID NO: 87427 - DNA, 771 bp, Oryza sativa
  Clone ID: PAT_MRT4530_86373C.1
tatgcgcttttacgtaagctcggaattcggctcgagctttaaacacacttacaaaatcagctacaattatacactccttctagctattacactttttgagggtttttttttttattctactatatatgggggcaagctcgggtatagtactagaaatcacagttatatcatgcgaaaaccttcgtgtcacggaggatccatacgttgtcgttagggctgagtcgttaaattgttgcacctcgaatatagcgaaggattgtgggagcaacaaaacgagtttgttttcgtggaacgagaagttgatgctgaacatgcccatgcatgcaaggtccatcacgttcgaggtgcaatgcaacaggttcaagggctttcgacctgctggggtggccagaatcgccgtgtcggattttctcggcggcgctgtgtcggaaaactgcatgcacgtgttgagttaccggctgagggactgggaagggaaagaaaacggggtgattcatttcacgatgagggtggcggcagcgccggtgaaggggacggtggtgagtaagggttccggtgatgggttcgtgggaatcaacgttggtggcaacaagtgcaacgaagttgttgttggtgtaccgttttgatatggaactattatccactggtatcctcaattagagttaatcatgttcgaattcgaattgagtaagacagtaaaaatattttttcaagtatggaatatttgtgtgtgtacagaactcaaatttaaatttttagttcaactgaaac

SEQ ID NO: 87428 - DNA, 2145 bp, Oryza sativa
  Clone ID: PAT_MRT4530_86374C.1
aaccctagtgccgccgccaactcctactttgccgtcgtctccctcgccgccaccaccaccgagaccgccaccgagcccgccgccgccaccaccgagcctgccgcctccaccaagcccggcgccacctccaccgaccggcgacgccctccaccatgcccggcgccgccgccaccgagcccgccgccaacgccgtcatcctccctcgccaagcctgccgccgtcgcaaccgacgctgagcccacggccgccgccaccgaacctcctcggtcctccattcggaccaccgccgcctcctcaacgatgacccccaccaagcccgccgccgccaccaccgagcctctacaccgaccggaccagtgtcggccttcctcgtcgtcgccgcccgcgtcctcaccgacgcacgccgccgacccccaccgagcccgacgccgaccacccggcgccgacctgcccgaccggcatctccaccgaccggcaccgccgtccaccgagcccggcgccgcctccaccgagccccaccggccatcctcagggaacaaaatccctaaggaacggttccgcataacagtggtggacgccgtagggtatccgacaactccaaggaaaatattgagccgatttaggtctatctgcggggtcatagggaggcagaaattcagtattctacaagatgacatcaagttcgtgcccgccgcagagaaggacattgcttggctaacgttcaaggagagttttgattatcctgcggagcatgaggaccgtctcaggcgggctgctttcaagaaagagttggttgccgagcaacaagcctcgcaagaggcctgctctcaaagacgagaggacgacctccccacgaaagcgttgggcaacaaggaacaccgtggacgcacacagggcgttgggtcttctgtgccctggaagtatggatttccagactacgcgtggcagtacaagaagcggacttccaacaaggcggagaaagatacaagccttgaagccaagatccaggcgtcgataagagctgagctgacatctgaattcgacgaaaagcccgagttgatgagggccaagattaggcaagagatccgagaagagcaacagaacccccaggccgccgctactgttgcacacgaagagttaggaagtcccaccaaaaaacgcagcagttgcgcatcgactgagttggcggaaaatccaacatcggtcgacagtgcagtcgaccacataacggaaccaacgagctgcaccctcacagttagggtgatgccgaccttcatggttccagcagccgagggacttgcgtacaagtcgaccccagagacaagagtgcatggagcgcaactcagggccgactgttcaaaagttcaagtcgactcggtgaagcccgaatacgagctgttccctctgaagtatccaccgaacgacgaggtcctctcactaggaaatgcccgtgataccttcatccaatggcccaaggaccacattgagatcaggtacgacacggattttggggaggaccgaacagaggccgacagcaaggcgattcatgaacccccaccgatgaagaatagcaggaaggcacactcttcccctcaaagaattactctcgataaacccgaagcaaaggggagaggaaggggaggaaaggtgcaggcctcgcttctagctccaaggaagctagatctcggcaagggtcaggaagagactaagggcaaagagggcaagaaaaaatacgtcgctccacaggagttccaactaggcatgccattggttggagatggcgtgcttgccgcaatgggcaccacttgcaaggaccttcacttatactacatggagaaatctaacgccaggaagctgaataaagctaccgatatccttggagagcacgatggaaagccattccttggtccaaaaattatatcgtggtcgacttcaaggatcttttcgacctctacaggctccgagcggtggacacaagcctccttaagtgctactccttcctccagtaccatcctgtccagccgtacccttcccatccgcgccattggtgttgtccaccgacatgatcgtcaggagggcaaggttccgaaggccctgctcgtcctgatctcctatgcgcgcaggagaccagaaccagggaagtag

SEQ ID NO: 87429 - DNA, 2166 bp, Oryza sativa
  Clone ID: PAT_MRT4530_86375C.1
atgtcgacgacaactagtgggtcctcaagggcacgtactcctaggacagggaacaaaattcctaaggaacggttccgcataacagcggtagacgccgtagggttgccgacatctccaaggaaaatattgagccgatttaggtctatctgcggggtcatagggaggcagaaattcattattctgcaagacgacttcaagctcgtgccggccgtagagaaggacattgcttggctaacgttcaaggagagctttgattatcctgcggagcatgaggaccgtctcaggcgggctgctttcaaggttatgggcactgcttggaagaacttcaagactaagctagtcggcgagttcgtctacaacccggcaaatccagatccaagagagaaatttccttggatcacggaacaggtctggtcggaattccatgcgaagaagtcgacccccgagtccagagctagaagcgaggcatatcgcttgctccagactaggaaccagcatccgcaccggcttggtaccgccggatatgccgaagatcaacgagtatacgaagctataaaggagttggttgccgagcaacaagcctcgcaagaggcctgctctcaaagacgcgaggacgacctcctcacgaaagcgttgggcaacaaggaacaccgtggacggacacggggcgttgggtcttctgttccctggaagtatggatttccagactacgcgtggcagtacaagaagcggacttccaacaaggcgaagaaagatgcacgccttgaagccaagatccgggagtcgatacgagctgagctgacatctgaattcgacgaaaagctcgagtcgatgagggccaagattagctgcaccctcacagttagggtgatgccgatcttcactgttccagcagccgagggacttgcgtacaagccgaccccagagacaagagtgcatggagcgcaactcagggccgactgtgcaaaagttcaagtcgactcggtgaagcctgaatacgagctgttccctctgaagtatccaccgaacgacgaggtcctctcactaggaaatgcccgtggtaccttcatccaatggcctaaggacctcattgagatcagggttacagcgaggccaaccactgcaccaggcggtcgtccaccaaagagacccgcctctgctccttcagcccctcctgctcaagatcgtcatgcacaatcttacgatgtgcagttgcagtacgacacggatttcggggaggaccgaacggaggccgacagcaaggcgattcatgaacccccaccgatgaagaagagcaggaaggcacactcttcccctcagagaattactctcgataaacccgaagcaaaggggagaggaaggggaggaaaggtgcaggcctcgcttctagctccaagaaagctagatctgggcaagggccaggaagagactaagggcaaagaggtcaagaagaaatacgtcactccacaggagttccaactaggcatgccattggttggagatgacgtgcttgccgcaatgggcaccgcttgcaaggaccttcacttatactacatggagaaatctaacgccaggaagccaagtaaagctaccaatatccttggacagcacgatggaaagcctttccttggtccaacaaattatatcgtgaagcatgcaccggaagttgccttccttgatccacaagtggtcactatcacaaatctccagaataaccgtcaaggaatggtcaactacatctacgacaccttgtggtcccgccgagacaagaagtacattatgtgtgcctataatcaatatgcccattggatcattctggtcataacacctaaatggagtacatgtcattacctgaactccagaattgataagaacgcatatgattggaccccaattcaactagcgatagatgaagcgtgggcccaatacgtgcaaagaggaggcctcaggaagacaggacatgacaccctcatccacaaaaaagacttctcggtgaagcaacaaataggtgaccagtgcggattccatgtgtgccacaatatgcgacttctgtatagagaaaaggtgaagactttggctgagtttgagggcacaataaccaagtctctgactaccagctttgaggaggcaatgatgaacacttattatgcaactgtggtgatgtaa

SEQ ID NO: 87430 - DNA, 1905 bp, Oryza sativa
  Clone ID: PAT_MRT4530_86376C.1
atgtctcagcaaggagaactaatgtcgacgacaactagtgggtcctcaagggcacgtactcctaggacagggaacaaaatccctaaggaacggttccgcataacagcggtgggcgccgtagggttgctggcatctccaaggaaaatattgagccgattaaggtctatctgcggggtcatagggaggcagaaatttagaattctgcaagatgacatcaagctcgtgccggccacagagaaggacattgcttggctaacgttcaaggagagcttcgattatcctgcggagcatgaggaccgtctcaggcaggctgctttcaagaaggagttggttgccgagcaacaagcctcgcaagaggcctgctctcaaagacgcgaggatgacctcctcacgaaagcgttgggcaataaggaacaccgtggacggacacggggcgttgggtcttctgttccctggaagtatggatttccagactacgcgtggcagtacaagaagcggacttccaacaaggcggagaaagatgcacgccttgaagccaagatccgggcgtcgataagagctgagttgacatctgaattcgatgaaaagctcgagtcgatgagggccaagattaggcaagagatccgagaagagcaacagaacccccaggccgccgctgctgctgcgcacgaagagttaggaagtcccacccaaaaacgcagcagttgcgcatcaactgagttggcggaaaatccaacatcggtcgacggcgccgtcaaccacataacggaaccaatgagctgcaccctcacagttagggtgatgccgaccttcatggttccagcagccgagggacttgcgtacaagccgaccccagagacaaaagtgcatggagtgcaactcagggccgactgtgcaaaagttcaagtcgactcggtgaagcctgaatacgagctgttcccactgaagtatccaccgaacgacgaggtcctctcactaggaaatgcccgtggtaccttcatccaatggcccaaggacctcattgagatcaggttgcagtacgacacggattttggggaggaccgaacggaggccgacagcaaggcgattcatgaacccccaccgatgaagaagagtaggaaagcacactcttcccctcagagaattactctcgataaacccgaagcaaaggggagaggaaggggaggaaaggtgcatgcctcgcttctagctccaaggaagctagatctgggcaaggtccaggaagagactaagggcaaagaggtcaaaaagaaatacgtcgctccacaggagttccaactaggcatgccattggttggagatgacgtgcttgccgcaatgggcaccgcttgcaaggactttcacttatactacatggagaaatctaacgccaggaagccgaataaagctaccgatatccttggagagcatgatggaaagccattccttggtccaacaaattatatcgtggtcgacttcaaggatcttttcgatctctacaggctccgagcgatggacacaagcctccttaagtgctactccttgttaagttggcaatggtgtcagaagcatgcaccggaaattgccttccttgatccacaagtggtcactgtcacaaatctccagaatgaccatcaagaaatggtcaattacatctacaacaccttgtggtcccgccgagacaaggagtacattatgtgcgcctataatcaacaaggaggcctcaggaagacaggacatgacacccttatccacaaaaaagacttcccggttaagcaacaaataggtgaccagtgcggattctatgtgtgccacaacatgcgccttctgtatagagaaaaggtgaagactttggctgagtttgaggcaatgatgaacacttattatgcaactgtgatgatgtaa

SEQ ID NO: 87431 - DNA, 870 bp, Oryza sativa
  Clone ID: PAT_MRT4530_86377C.1
atgccattggcagccgggaaatccgccgccagctgctgctccgcgaccacgacgagaaacctcgcgacggcgggggctggagcagcagcagctccgccgcacgaacccctcgcgccgtcaggaccactgctaccctggtcctcgccggccggcgccggcggcggcgggacgccggaaacgcagccgccgatgtggagcacgaacatgcagctaggcggcgcagcggtagtgccgcgtgcgcacggtggagcagtctcggcggcagacggagcagacccgggccatctcggcgggtgtgcacgggccggacgggatgagcatgagctcggtgtgggtgagcgcgtgcttccggtggagcgggctgcggatctctcccggcagcatcgtgcacagcgggtgcgcggcgaacccgcacctccgcgcgccgcagcggtaggcgaggtggccgtgctggaagggcccccggcacagggtgcacggccacgatccatccgccgccgtgacctgtctgagcgcgaggttgtgcgaccacggatgcccgaagaagttgggaggtggagttatcattttctccgggaagaagtcggcgcaggcctcgtggatgtcgaagtcgcagtggtcgcagcggtagccggcgccggcgacgacgcgagtcccgcagatgcggcagacgtggcggctgctcggctgccgctcgccgccgccgtactgtgtcttgagaagcgggtgctgtggatgggcgaagtgcgtccggctctcgggttcctcgtgcacttaaaaagggttcatatgtcaactctgatttctgaacaatgtactattagtagcttacggtttttcgttctgatcgaaattggttttaacttttaa

SEQ ID NO: 87432 - DNA, 236 bp, Oryza sativa
  Clone ID: PAT_MRT4530_86378C.1
aaacggtaggaaacgatcgaaatcggtagcatctcttcagaaacgatgctcgattaatcggtaattgaccatatttattatttaaactacttagtatcgacattaatacgatgcagaaacaattgtgaaaaaacaaaatttaaaaatagcaaaaaacggtacggttggaaactgtaccccttatacggaaacggcgctcggtcgattgggaatttccttggagatcaccggagtag

SEQ ID NO: 87433 - DNA, 2289 bp, Oryza sativa
  Clone ID: PAT_MRT4530_86379C.1
atggatcaatcaacaattgatcgaagttggatgtatgccaaaaatttgaaacgtcattctacggagtaccgaaatggcgtaataaaatttatgaacgccgcggaggaggatcggataagaagaaacagtgattatatgtgttgtccatgtgcagattgcaagaacgagaatatgtttgatagcggagaggacgtacacggtcatctgatacaacgagaattcatggagggctatacatgttgggtgaagtatggagagcaagaatcaggaagtggagcagcagcagacagaagtggtgcgcataatcaggaagatgaaaatgagcatgaaatgtttataccttctccattgggcggtgaaatggttgatgtggatcacgatctgctgcaagacatgttacgtgacgttgaggacccagcccagaatgagagagatggaatgaaattcagcaggttggtaagtgattccgagacgcctttgtacgctggatgcaaagcaaaacacactaagttgtcagttaccttggacctaatgaagctgaaggtaagtagtggatggacagacaagagtttcacagatcttttaggaattttgaaggctatgcttcctgttgagaacacattgcccgagacgacatacgaagcaaagcaggtccgtagaattcacgcttgtcccaacgactgcatattgtaccacaagcaatatgcggacttggatgcttgtcctatctgcaaggcttctcgatacaagcgaaagaaaagtgctgacgaaggaaataagtcaaagaggggtggtccggcaaaggttgtgtggtatctacctatcattgatcgtttcaagagaatctttgccaacccgaacgaagcgaagttagtacgttggcacgccacggaaagaaggaatgatggtatgcttagacacccagcggattcgattgaatggaggaatatagatcgaaaacacaaagactttgctgctgaccctagaaacatgaggatatgtctttgtacggatggcatgaatcctttcggtgacatgagtagtactcacagcacttggccagttcttattgcgaactataacctcccaccatggttatgctttaaacggaaatatattatgttgtgcttgttaatccaaggtccaaggcaacccggcaatgatatcgacgatctggagattctttggaaagaaggtgtggaaacttgggatgcatatggtcaggagaacttcaagctaagagttctattgttttgcaccattaataactaccttgcactcggtaatctttccggacaaactataaaaggaaagaaggcatgctccgattgcaaggaacatacacgaagccggtggctgaagaaatcacgaaagatggtatacatgggtcaccggaggtggctcccgctacgtcacacatttagaagaaagaagaaaatttttaatggtaagagagaacttcagcctgctcccaaagatttgtccgcagatgaggtccacaatatggtcaaggacataagcaatgagtttgggaagaaaagaaaacgtagcaagacaaaggagaagggtaggtggaagaaaaaatccatattttggcggctaccttactggaaagatcttgatgtccgtcattgcattgatctcatgcatgtagaaaagaatgtgtgtgagagtttggttggcctgatgttgaatattcccgggaagacaaaggacgggttgaacgtgtgccttgatctacaggacatgaatattcgcagcgaactccagcccatacgagatgcagagacaggtaaagtgtacctccctccagcctgccacacactgtcgaaggatgagaagatcgcaatgttatcatgcttgaaggatattaaagttccatcaggctattcagcgaggataagtaagtatgttaaattggacgatctaaaacttgttggaatgaagtctcacgattgccacgtgctaatcacacaaatcttgccatttgctatcagaggcattctaccaccgaaacaaacaaaactatgtggcccggcttttctaaggaaaatgtggccgtttgaaaggtacatgggagttctaaagtcgtacgttcgtaacagagctaaacccgaggggagcatcattgaaggttacacgaccgaggaagctattgagttctgtgtcaattacatgtccgatgccgatcctatcggagttccagcgtctcgtcacgagggaaggttgtcaggtgttggcacaatcggaaggaaaagaattaggcccgatcaagcgtcgtacgcgtag

SEQ ID NO: 87434 - DNA, 1216 bp, Oryza sativa
  Clone ID: PAT_MRT4530_8637C.1
ggaaaaagcttaagcgctgacgtcatcaaagaggccggcgccgacaggccggccccacacgtcagcgggtcaagggaatcggtccaccgtggaccgggaccacggggtggcgcggctgagcacgggcacggctcaggccggcccggccgagcgacggctcgcggcggcgcggcctcctgcggcgacggccggtgcatgcgagaaagcggtggtgaggcgcgccaaggggatccgggctgcccaggcgagcggggcggcggcaagccggccggccgacctaacggcagcggcgcacggcccggtggtcgccggtggcggccaccggcgcgacagcgtgcacgggagacagaggagggaggcaagaagggagaggaggagctcaccaaggacgcggcgacgaggggaggggaaaggcgggggggagctcggcgtcggcgctcctcgggatgaaggcggaaaggcggcccggcggcgttccgtgagcgagaaccggcagacggcggccggaaggaccggcgcgaggggaaccgtgttccggcgggatcccggccgtgaaaagcggcggccaaggtgctcctcggcactgtgaagcgagcggcggcgacagcgcgacttggggtggctaggagcggcggagtcggcggcttcggtggaaggaggtggtgcacgtggcgacggtacttcggaggtggggaggggaaatggagcggacgccggggtgtggcacgacgcggcgaagccgctggtggcggtcgcgcggaacgacggtggtgggagcggctgtggcgaccggctggagggtcgtcggcgagcggcggcgggaggtgcgacggtggcggggtggttttcatgcacgggagggctcgggagagaggggaaaatggagagggaggtgcggggaatgtttttataggggaggggaggcgggatcgagcccgagagaggtagaaaccggctggcgacgtgggaggagagagagatgcgggaggcggcgacgtggccggattttgcggggagagtggggggaaacggcgcggacgtgggcgacgaccgcgtccacgcacgcgcgggagagggagtcgcgcgggagaggcagcgacgtgggaggatttggtggccatggcggcggttggggatggagctggaggtaggagatgacatgtggggcccacctgtcggagagagggggaggggaaaatgggctagggaggaaatg

SEQ ID NO: 87435 - DNA, 373 bp, Oryza sativa
  Clone ID: PAT_MRT4530_86380C.1
cggacgcgtgggcggacgcgtgggcggacgcgtgggcgagcagctaattacagagtaagggaagttggtactatacctgtcttggccgtttcctttgctggttgtgttttgtgcttgcattcatggcgaccttcaccgaacgtacccgtctcctcgcggcgctgcttgtcgtcgtctccgcggtgatcatcggctgctccgtccacgtctgccacggcgcccaagaggctgacctgcaggctgctggctactaccgacgcggcggcagcatggatgatcccgacttcgattttccctttcccggcccccgccatgttgtgtgcaacgacgggccttgccgcaccggcccaggccgattacgtccctacccctt

SEQ ID NO: 87436 - DNA, 444 bp, Oryza sativa
  Clone ID: PAT_MRT4530_86381C.1
cccacgcgtccggcaaaatagaaagatctagtgtcccgcagcaatgaagatcattttcgtctttgctctccttgctattgctgcatgcagcgcctctgcgcagtttgatgttttaggtcaaagttataggcaatatcagctgcagccgcctgtcctgctacagcaacaggcgcttagcccatataatgagttcgtaaggcactagtatggcataccgtgatgccccttcttgcatcagccgcgatatacccgagaaacagccaacacctgtcaactgctcgcgctgcaatctcaccattacgacattaacaacgttcacaccatagcgcgccaactacaactcctacaggtccaggatctatactatcatcagaatgtggctcatgctcaagctctgtaagctttgaacgcgccaactagatatggtatataccgtaggtacta

SEQ ID NO: 87437 - DNA, 2433 bp, Oryza sativa
  Clone ID: PAT_MRT4530_86382C.1
atgtctcagcaaggcgaaccaatgtcgacgacaactagtgtgtcctcaagggcacgtactcctaggactgggaacaaaatccctaaggaacggttccgcataacagcggtggacgccgtagggttgccgacatctccaaagaaaatattgagccgaattaggtctatctgcggggtcatagggaggcagaaattcagtattctgcaagatgacatcaagctcgtgccggccgcagagaaggacattgcttggctaacgttcaaggagagcttcgattatcctgcggagcatgaggaccgtctcaggcgggctgctttcaaggtctgggaggaattccatgcgaagaagtcgacccccgagtccagagctagtagcgaggcatatcgcttgctccagaccaagaaccagcatccgcatcggcttggcaccgccggatatgccggtaaggaagaggaatggcagcgtgaggatgaagaagtggaggaatcgaacacgccgctcgtgtttggcgatatcccacaccctcgggctaggaactgggccagggccaggtaccaaaagaaggatgatggcacaatcttcatgccaaatccagaagatcaacgagtgtacgaagctataaaggagttggttgccgatcaacaagcctcgcaagaggcctgctctcaaagatgcgaggacgacctactcacgaaagcgttgggcaacaaggaacaccgtggacggacacggggcgttgggtcttctgttccctggaagtatggatttccagactacgcgtggcagtacaagaagcggacttccaacaaggcggagaaagatgcgcgccttgaagccaagatccgggcgtcgataagagctgagctgacatctgaattcgacgaaaagctcgagtcgatgagggccaagattaggcaagagatccaagaagagcaacagaacccccaggccgccgctgctgctgcgcacgaagagttaggaagtcccacccaaaaacgcagcagttgcgcatcaactgaggtggcagaaaatccaacatcggtcgacagcgccgtcaaccacataacggaaccaacgagctgcaccctcacagttagggtgatgccgaccttcacggttccagcagccgagggacttgcgtacaagccgaccccagagacaagagtgcatggagcgcaactcaggggcgactgtgcaaaagttcaagtcgactcggtgaagccggaatacgagctattcccactaaagtatctatcgaacgacgaggtcctctcactaggaaatgcctgtggtaccttcatccaatggcccaaggacctcattgagatcagggttacagcgaggccaaccactgcaccaggcggtcgtccaccaaagagacccgcctctgctccttcagcccctcctgctcaagatcgtcatgcacaatcttacgatgtgcagttgcaatacgacttggattttggggaggaccgaacggaggctgacagcaaggcgattcatgaatccccaccgatgaaaaagagcaggaaggcacactcttcccctcagagaattactctcgataaacccgaagcaaaggggagaggaaggggaggaaaggtgcagtcctcacttctagctccaaggaagctagatctgggcaagggccaggaagagactaagggcaaagaggtcaagaagaaatatgtcactccacaggagttccaactaggcatgccattggttggagatgacgtgcttgccgcaatgggcaccgcttgcaaggaccttcatgcatactacatggagaaatctaacaccaggaagccgaatagagctaccgatatccttggagagcatgatggaaagccattccttgtccaacaaattatatcgtcgtcgacttcaaggatttattcgacctctacaggctccgagcggttaagttggcaatggtgtcagaagaatgcaccggaagttgccttccttgatccacaagtggtcactgtcataaatctccagaatgaccatcaaggaatggtcaactacatctacgacaccttgtggtcccgccgagacaaggagtacattatgtgcgcctataatcaatatgcccattggatccttctggtcataacacctaagtggagtacatgtcactacctgaactctagaattgataagaacgcatatgattggaccccaattcaactagcgatagatgaagcgtgggcccaatacgtgcaaagaggaggcctcaggaagacaggacatgacaccctcatccacaaaaaggacttcccggtgaagcaacaaataggtgaccagtgcggattccatgtgtgccacaacatgcgccttctgtacagagataaggtgaagactttgactgagtttgaggtgaaatatgataaatatttgaatgggtgtgaaatatgtgaatggatgtga

SEQ ID NO: 87438 - DNA, 2728 bp, Oryza sativa
  Clone ID: PAT_MRT4530_86383C.1
acatccttcctcatcgtcgtcgcctactcctctctgacgcctgacgccgcctccaccgagcacaccgcgcccttcgccgactcctccctcgctgagtctgaggccgccgccaccgaggcagccgcctccaccgaacctccgacgcccgacgccgcctccaccgagcctgcgacgcccgacgcccgacgccgacccccaggtgagtcctccatcgcgcatgaatacgatgtctcagcaaggtgaaccaatatcgacgacaactagtgggtcctcaagggcacgtactcctaggacagggaacaaaatccctaaggaacggttccgcataacagcggtggacgccgtagggttgccgacatctccaaggaaaatattgagccgatttaggtctatcggtcatagggaggcagaagttcagtattctgcaagatgacatcaagcacgtgtcggccgcagagaaggacattgcttggctaacgttcaaggagagcttcgattatcctgcggagcatgcggaccatctcaggcgggctgctttcaaggttatgggcaacgcttggaagaacttcaagactaagctagtcagcgagttcgtctacaacccggcgaatccagatccaagagagaaatttccttggatcccggaacaggtctgggaggaattccatgcaaagaagtcgacctccgagtccagagctagtagcgaggcatatcgcttgctccagaccaagaaccagcatctgcatcggcttggcaccgccggatatgccggtaaggaagaggaatggcagcgtgaggatgaagaagcggaggaatcgaacacgccgctcgtgtttggtgatatcccacaccctccggctaggaactgggccagggccaggtaccagaagaaggatgatggcacaatcttcatgccaaatccagaagatcaatgagtgtacgaagctatagagttggttgccgagcaacaagcctcacaagaggcctgctctcaaagacgcgaggacgacctcctcacgaaagcgttgggcaacaaggaataccatggacggacacggggcgttgggtcttctgttccctagaagtatggattaccagactacgcgtggcagtacaagaagcggtcttccaacaaggcggagaaagatgcacgccttgaagccaagatccgggcgtcgataagagctgagctgacatctgaattcgacaaaaagctcgagtcgatgagggccaagattaggcaagagatccgagaagagcaacagaacacccaggccgctgctgctgctgcgcatgaagagttaggaagtcccacccaaaaacgcagcagttgcgcatcaactgatgtggcggaaaatccaacatcggtcgacagcgccgtcgaccacataacaagacaagagtgcatggagcgcaactcaggggcgactgtgcaaaagtacaagtcgactcagtgaagccggaatatgagctattcctaccaaagtatccactgaacgacgaggtcctctcactaggaaatgcccatggtaccttcatccaatggcccaaggacctcattgagatcagggttacagcgaggccaaccactgcaccaggcggttgtccaccaaagagacccgcctctgctccttcagcccctcctgctcaagattgtcatgcacaatcttacgatgtgcagttgcagtacgacacggattttggggaggaccgaacgaaggccgacagcaaggcgattcatgaacccccaccgatgaagaagagcaggaaggcacactcttccccttagagaattactctcgataaacccgaagcaaaggggagaggaaggggaggaaaggtgcagtcctcgcttctagctccaagaaagctagatctgggcaagggccaggaagagactaagggcaaagagatcaagaagaaatatgtcgctccacaggagttccaactaggcatgccattggttggagatgacgtgcttgccgcaatgggcaccgcttgcagggaccttcacatatactacatggagaaatctaacgccaggaggccgaataaagctactgaaatccttggagagcacgatcgaaagccattccttggtccaacaaattatatcgtggtcgacttcaaggatctattcgacctctataggctccgagcggtggacacaagcctcattaagtgctactccttgttaagttggcaatggtgtcagaagaatgcaccggaagttgccttccttgattcacaagtggtaaatgtcacaaatctccagaatgaccgtcaaggaatggtcaactacatctacgacaccttgtggtcccgccgagacaaggagtacattatgtgcgcctataatcaatatgcccattggatccttttggtcataacatctaagtggagtacatgtcactacctgaactccagaattgataagaacgcatatgattggaccccgattcaactagcgatagatgaagcgtgggcccaatacgtgcaaagaggaggcctcaggaagacaggacatgacaccctcatccacaaaaaagacttcccggtgaagcaacaaataggtgaccagtgtggattccatgtgtgccacaacatgcgccttctgtacagagaaaaggtgaagactttggctgagtttgagggcacaataaccaagtctctgcctaccagctttgaggaggcaatgatgaacacttattatgcaactgtgatgatg

SEQ ID NO: 87439 - DNA, 352 bp, Oryza sativa
  Clone ID: PAT_MRT4530_86384C.1
cgcttgtgcgtccggaggccgacactttgtatataaagggagctcttgactggaacacagtggctgatgagcacctagggtaggcgtgtgattagctgactctggctggatgctgaccttatccatgtggccgcaaacatgctcaggtatctgcttatcgagatccctctcgaacaggaacgggtgtaccaagagatccgggcggtgtacctgctctgtcggtttggcgggagcgcgttgcatgggtgccgtactttaactacctacatctctagacgctgcccctgcagctttatgtggacttcatacatccaaggtttgtcgagcttagacaccaactgtggctgtttat

SEQ ID NO: 87440 - DNA, 8092 bp, Oryza sativa
  Clone ID: PAT_MRT4530_86385C.1
atgggggagagggatttgggcgacatcgtgctctcctggtcgctcggtgaggtcatggacgacgacctctacagaggaaaggttgaggaaattcctcgcagtttcatgtcccttgatcactatttcaaaacatatgctgcacctctgattgaggaaacaagatccgatctgtgctcatgtcttgagctcatatcagaagcacccatttctaagatactgtctatggaagaagcaggaaaatcaggattgtattttatggatgtggacttctgggataacggggctggtttttcttccgaggcttatactgctaggaatggagatatatttatattgtctagtatgaaacctgaatctgcagatgacttgaaccgctatggtgtgacatactgcctggctatggttactgaagtttctatggatgatgaattccagaagggtttccgagtgaaagttgcaaaggatgtaactctacaagaaggcttcaacagacttagacatgcgatatttcttaataatattatgacaaacttacggatatggaaagcaatttgctttgacatgggcatgaacaacaatttcacagtaatcaagtcactctttgcccccacatatatggatgagcactgtttggctttatgtactgagcaattactgtcaattaatcttaatcaatcgcaagtggatgctattgagtctgttatctcagcagtgcagtgtaggcatttgaatctcatgaaacttatatggggtccaccaggtactggaaagaccaagacagttagtgctttgctttgggctttggcatgtttgaaatgcagaactcttacatgtgcacccacaaatgttgctattgttggagtttgtactcggttccttcatattttgagggatttcaacaagaatgccaatgaaaactttctacccttttctcttggtgatgtcttgttatttggaaacaagtataatatggacatcactgaggaccttcaagatgttttcttagattgtcgtgctgatgaacttgttgaatgcttttcatcgttgtctgggtggagatacagaatagcttctatggcttccttttttgaggattgtggttctcagtatgatatgcttcttgaggatgatggaagaagcgatcctatttgtttcctggactttataaagacacaatttgatgtgacagccacagctttaaagaaatgcataatgaacttattgattcaccttcctaggaagtgcttttcacatgatagcatcagtaatatatcaatgctctttgattcactggaaaaagttgaagcccttttacatcatgaaaatttaactgatgatggtgcaaaaaggggctttggttttctgtctattcaagacatttcttgtgcaaagtctgcattcattattgagaaggaactgaatagagcaaagttatcatgccttcaattgcttgaagatcttgagagatcactggatctacctactggtagagacagaaattggattcagaactactgcatgcgtaatgcaacacttattttttgtacctcctctagctcgtatcgattgcatcacatggaaattgcaccgcttgatgtgttaattgtggatgaggcggctcaagtatgcaaagaagctggatttggaattagtctttttgagagattggttgtactggattttgaaaaacatttgctgaatatacaatatcgcatggatcctcgtatcagcttgtttcctaatgttcaattttatgggaggaagattttagatggtccaaatgtcatgtcctctgtctataacaaagattacacaaacctcccttttggtacctatgcttttataaacatcagtgatggaagggaagaaaaagagggcactggaaacagttggcgaaacctggttgaagttgctgttgttttgcacctgatccaaacaatttttaaaacttggaaaaggaaaggacaaatgctcagcattggtgtgatctctccgtacagttctcaagttgattcaatagaaagcagacttggcaaattgtatgacacgtgtgatggctttcatgtgcgcgtaaagtctgttgatggtttccaaggagaagaagatgatattatcatactatcaacagttaggtctaatgtgaaaggcattgttggatttcttgctgatgaacaaagaacaaatgttgctcttacaagagcaaggcactgcctttggattctaggtaatgctaatacactgtatagtagtgggacagtatggaaagaccttatagctgatgcacaaagacgtaaatgtatcattgatgctactaatgacgcagccatatgtaagttggttttgaaagtcaagaatgaacttgatgaacttgacgatctacttaatgcggattcagccgttttcagcaatactagatggaaagtcgttttcagtgacgaatttaagaagtcctttgcaaaattaaaatacccacagcttaggagggaagtacttcaaaagcttatcaaacttggtgttggctggaggacaacaatgaagaatttgaatttcaatgtaattgatcctttccagcttgcaaaagtatacaaagtcagggacctttatcttgtttggagtaccgatatagagaaaagcgaaaggtatgttcagattataagaatttgggacctgttgtctcaccagaatgttgcaagaactgttcaacgtcttgaaaatctgttttccatgtacacggatgagtacctcgataagtgcagaagagtaaagactgaggggaaactggaagtgcctgttatttgggatgccgagcatgatattattcgctatcggaaggttctggaagttgatgctcaggaagaccatgatcatgtggacatatcatatgctatggagaattcaaaagtcagtgaaagcttcttgctaatgaagttctactctctatcatctggtgtggcaaaacatttgctaacagctactgatggatcagaaattgatattccctttgaactgactgatgaagagcaggcgattattcgattcccactcactagttttatacttggaaggtcaggcactggtaaaacaactgtgctcacaatgaagctgattcaaatatggcaacagtctttgattgcatcacgtgggctaaatttggatgaaagaaatagtacagcacagaaggatttgagtgaagtagaaacttttgttaaacaagtctttatcactgtaagcccaaagctatgttcagctataaggaatcagatttgcaagcttacaagatatggttctggtgacgtctctgatcaggctagcattcttcaaatgcctgacatggttgatgatcttgaagacttcactgacatacccgatagttttattggtcttccttgtgagcactatcctcttactatcacgtttcggaagtttctgatgatgcttgatggaacatgcaaaacttcattctttggtaccttttgtggtgaactaaggtcttccacggagagagggtattcaaaatctcgagccctgcaagcttttattgaaatgaaggaagtaacatatgaaaaattttctgcttcctattggccgcattttaactctgaactgacaaagaaacttgatgcgtccactgtcttcactgaaataatttctcatataaagggtggatatcaagcgaacaaaccttttggtggcaaacttgaaaggcttgattatttaaagctttctgagaagagattttcgtctctgaacagtcagatgagagaaagggtatatgatatttttcttgattacgaaagtatgaaatgcacagccagggaatttgacttgtcagattttgttaacagtcttcacagaaaccttctttctgagggctacaatggtgatattgtggattgtatttacatagatgaggtgcaggatcttacaatgacacagatagcactgctcaagtatgtctgcaggaacttcgaggagggctttgtttttgctggtgacacagcacagacgatagcaagaggcattgattttaggtttgaagatattcgctcactcttctatacctatttccttccagaaatggagccatgtggtcaagggattaatcatggaaaacagcttcgtatcacggatatgttccagcttacccaaaattttcgcacacactgtggaatccttcgtttggctcacagtatcatgagtcttctgtactactttttcccgtcatgtgttgacaaacttaacccagagattgggcttgtatatggagaagcacctgtgctgcttgaatctggtaatgatgagaacgcaattatgactatctttggagaaagcaagagtgaccctggtaacttgcaagggtttggtgccgaacaagttatattagttcgtgatgatgcaaccaagaaacaggttgttgaccttgttggtaaacaagctcttgttttgacaattgttgaatgtaagggccttgagttccaggacgtgctgctgtacaatttctttagctcatcacctttaagaaataaatggagagttgtgtatgactacatgaaaggcaaaaatgttatagaatcatctgaagagatgtcccactcttttttcgacaaaaacaagcattatcttctctgttcagagttgaagcagctctatgttgcaattacacgaactaggcaaaggctgtggatatgtgagaatgcagatgataactgccgaccgatgtttgactactggaagaagttgtgccttgttgaagttagagtacttgattcttcactcattgaagcaatgcaggcaggaagcagcacagaagaagattggaggcaacggggtaccaagctattcgctgaggggcaatatgaaatggctacgatgtgctttgaaaaggcaggtgatgcttacagagaaaagttagcaagagctgctggacttctagcaactgctgaccgtgtcatctctacaaactttgagatgggccagtcttcattgcaaaaagcttcagaaatctttgagtctattggcaagcatgagaaagctgctacttgctatatgaaattaggtgactacaaaaaagcaggaatggtttatatggaaaaatgtggtaattccaggctaaaggatgctggggactgttttgaactgagtgcctgctggtcactggcagctgacgcatactttagagctaaatgttacgccaagtgtttgtccatgtgttctaaaggaaaactgttccaaaagggcctacttctcttgcaacagttggaggaacatttgcttgaaaattccagcctcgtcaaggtggctgctattagaaacacatttctagaagattgtgcgctacactattttgagtgtggagacataaagcacatgatgccatttgttaagtctttcagctctatggatcacattcgtgtattcttaaattctaagaatcttgtggatgaactgctgagtgtagagatggatatgggtaattttgttgaagctgctgggatagcaaagcatacaggaaacatcttattggaggccgatctgcttgaaaaggcaggttttcttgaaaatgctacacaacttatcctccttcaattatttgtgaattctctctgggcttcgcacagtacaggatggcctccaaaaaggtttgcggagaaggagcaattgcttgcaaaagccaaagaaatgtcaaggaatgtatcggagtcattctactgccttgtttgctcagaagcagatgccctttcagatgaacataagtctcttgccagcataacttataacttgattgagggcaataaatgtggaaacttgttagtcgaacttatagcttctcgcttgattcttgatgttcatcttcaggctgaagcctctggatactgttttgaatcagagccagggtctcatgatggacggcattgcaaagatatgctagttcttaatcagatatcacttgaaactctagtatacgattggaattactggagttcaattatagtcaaagtgctcaggcatcttgatcaccctaaggacgcagaatcaaatgatttggcagcaatctgtgaagatctttgtgctaaatactttggatggagaaaagatggtgattatgaccggtatgtggatttttggatcaatgaactttattctgttggtttgagtgtactcaagaagttggaatctattgtccaaattttgccaacatcatcatgctccctgggtagaactatactcgttatatacgaaattgcaaagtttctaaaggaatcagagtttggcatgccaaaaaataccataaagtactactctattctttgtgaacgtcgcttcttcgagttggttttccttgtctggagggatgaaacaccaaagagcctcttgtgtatacttgactcagcgactacatataacctgctctctgattccatctgttcatatcttggttcaagaaacaataaaatgactcatagtcaagttgggagaataactatgcttcttctccatgcagcaaggttggatgattcgttgatttcacagcttgtggaatatctagacagaggttctgagtgggcaactttttttctatcgttgaagaagtatcttgacaatggtgttagcagagacatcttactcttggacttcaaatttgctcttgattgcacttataaggcaaactggagggctgaacactacatatccccgatatgctatgtagatctcattgagtgccttggctttttggctacaacgcatcttgtactgaatgactatatgttttgcacaaaatctctgttggccaaaatgatgaagtgtcgcactaccaagggttactttgagacatgtatggctcctagcacagatatcgatctgggctatgcaggtcattcagcacggtgtttcatatacctgtcagttaaggatcttttgggaagcaagcgtatgattgtagagtgggttcagaacacctctactccaactagttcttatgttccaatccttctgagattagttatcacactttatcttgtgactgtaaaccaagacgatggagatttgtatgaggttacagctttcctcgagaaaaatcatgtttttacggatttacctcctgagttctctgaaaagattagaaatgctttgaggatgaagtctcgcacagtgaagaacttcatgagggtatttgctgatgcccttgcagcaataggaactcgcatggtagttatgggtgatattaagaaggcaatggcacataaatgccagccagacttgaatgctgatatgattagcagtgtggatttgagtgatgctaagaaggtaatggcacttctttcaacagagaagtcaagtagtttaaagcaggaacctcagctgccagagatcaaatctgtttgtaacaaaatttgcaacgctacttctggtcacttccctttgacaagtgtaggaggtagccagaagagtacaagtaattttaatttgagtgatgtggatcatcctttgttggagaagtttgaggcgtttcaagtcaatatgcctcaaaagaaaaatggaagcttaatttctcaaattcttagaagtcccctttcctggatagagcaaagagctcctcctgtgcaaatgttagagttgagacacatttgcaagcaagtcgaagaacagcatgttagggagaagagagctttgtccgtgaaggatctccattcaaaccgggaacatggtgatggtgaaaaaaatattgggaagatcgtcgacgtgcaaggaagccaatctaaccctgacagagctagcgaatggagtggatgctcagatgacgagcaagagacgggaggaagtaatgtggtgcagtcgaccaaagaagcaccagccgctgccagctccggccccagctccaaaaacaagccgcagaaaaagaagaaatctaagaagtccaagcgtagcggcaggaagtagtctctgttttgttttgctcttctgcctgaccaggcgtcggatggccttttttgcttacaccgttgtaagtccagcagcaaggccagctttgcttaactggatgtactccctccatactgaaatcgtttttgaaaaaaaaaaaaaaaaaaaa

SEQ ID NO: 87441 - DNA, 7443 bp, Oryza sativa
  unsure (1)..(7443): unsure at all n locations
  Clone ID: PAT_MRT4530_86386C.1
atgactggcttcgtcttggagctgcgaggcatgtgcgtggtcttggggtatccacatggagtggactaccaggccaggccgctcccagagcaggagggtgaggacgcggagccccgcgctgggtgggaggtcaccgcagtgatcctctctggctcccccgagcggacttcgctggcagtcaccgcgggtggggactccttccccgccgcttgccagaacgccgctctcctcgccatcggcactcttcaccagcgctacccggacgagttgcagcactcgccctaccactaccaccctcgtcgcggaggagcccgcgacttcgccaccttccgggatgctagcccggaggatgacgctaccatcgtgcacctggcacgcatggtggaggcgtacgacgcggctcgtatcgacttccatcagatggagaacctgcagctcaagaaggacctcgacgcggtggaggcgcagctgcaccagctcaagattgcccagggagagatctgccgccccaagcgtcgccgcgtctgccgcagccagaagatcaccgcccgcaagagcacctccaggcctgagcttgtccgtcagtccctggcgtggacttgcttcgtcgagacccctcgtgccgagcctgcgcccgtggttccccaggagggggaagcctccggcgttggtagctcggaggctctctctctgtttgctggttctgtgtggggttttcagatggtgacgaccaggagaaatgctgtcaccggtgatggcaaccaacccgaaggcagcaaccacaaccaccagggcaacccacctccacctcctcctccgcctccaccaccaccaccagacaccaacgccattctcacccaaatcctcgcccagcaagccaacatgatgaccgctttcctccaccacctccaaaacccgccacaacagaatgctccaccaccacctccccaacactctaaactcgccgagttcctccgcatccgcccacctaccttctccagctccaacaaccccgtggatgctttggattggttgcatgccgtggggaaaaagctagacacggtgcagtgcagcgatgaggagaaagtcgtcttcgccgcccatcagctgcagggacccgcatctctatggtgggaccatttccaggctacgcagccagaggggcaacctattacttgggctcgctttaccgccgccttccgaagaacccatgtgcccgccggagtcgtggcccttaagaaaaaggaattccgagagttgaagcaaggcaaccgctccgtgatggagtatttgcatgagttcaacaacctggcccgttacgccccagaggatgtgcgggaagatgaggagaagcaggagaagttcctggcaggaatggaccccgagctgtccgtccgtctagtctctggggactatccggattttcaacgactggtggacaagagcatccgcttggaagccaagcacaacaacaacagcagcagcaacctcgcccagcgccccgacctcaattcgtggtgcgcgtcccacagccgcagcagcagcagaatcagcaagggactcgtgcgccccgtcctcctacgccagctgtgcagcccgttcaaggccgcagggacgctcaaggtcagcagcgtctgtgcttcaactgcttcgagcccgggcactttgcggataaatgcccaaagccaaggcgtcagcaaggccaagcgcctccccgctccaacaacggcgggaaggatgtcattcggggtcatagaactgtcagaaatccccatcgtcagagagttcggagacgtgtttccggaagaactgcccggtatgccacccaagcgagagattgagttccgaatagatcttgctccaggaaccactcctctgcacaagcgaccctaccgtatggcagcaaatgaactagccgaagtaaagaaacagttggaagagttgaaagaaaaggggtacatacgtccgagtacttccccatggggtgctccggtgatttttgtagagaagaaagacaagacgaagaggatgtgcgttgactacagagctctcaatgaagtcaccatcaaaaacaagtaccctcttccccggatagatgatctgttcgatcagcttaaaggtgccactgtattctccaagattgatcttcgttccggatatcaccaattacgtattcgtgaagaagatattccgaagaccgcattcaccacgcgatacgggctgtatgaattcacggtgatgtcgttcggtttgaccaatgcacctgccttcttcatgaacttgatgaacaaagtgttcatggaatacttggataagtttgttgtggttttcattgatgacattctgatatactcacaatccgaggaagaccatcagcaccatctccgtctggtgttgggaaagttgcgggaacatcaattgtatgccaagcttagcaagtgtgagttctggttgtccgaagtcaaattcttggggcacgtgatatctgctaaaggagttgctgtggaccccgaaacagtgaccgccgtcaccgattggaagcaacccaagacagtcactcaaattcgcagcttcttaggtttggcaaggtactaccggagattcatcgagaacttctccaaaatcgctcgtcccatgacacagttgttgaagaaagaagagaaatttgtgtggagcccgcaatgcgagaaggcgtttcaaactctcaaggaaaagctggtttcctcgccagtgttaatcctgccggatactcgcaaggacttcatggtgtattgtgatgcttcgcgccaaggattggggtgcgtgctcatgcaggacggtcatgtggtagcctatgcctcacgccagctacgtcctcatgaaggcaactaccctacacatgatttggagttagccgcagtggttcatgctctaaaaatctggcggcactatctcattgggaatcgctgtgaaatctatatcgaccataagagtctgaaatacatcttcactcagtcggacctgaatcttcggcaaagaagatggttagaactcatcaaggactatgatgtgggaattcactatcatcctggtaaggccaacgtggttgccgacgctctaagtcgaaagggccattgcaacactcttaacgtccgtggcattccacccgaacttaatcaacagatggaagccctgaacctaagcatagttggtcgtggatttttggccgcgttagaagccaagcccaccttgctcgatcaaatccgcgaggctcagaagaatgatccggacatgcatggactcctcaagaatatgaaacagggtaaagccgctggtttcacagaggatgaacacggaaccctatggagcggaaagcgggagaaatactggtgggtttgcatgaagcgggaaattgcagagtatgtggccctatgtgatgtgtgccagcgtgtcaaggcagaacaccaacgaccggccggacttctccaacctctccaagtacctgaatggaaatgggatgaaattgggatggatttcatcaccggacttccaaagacccaaggtggatatgattctatatgggtagttgtggatcgattaaccaaggtagctcgatttattcctgtgaagaccacctatggagggaacaaactagcggagctctacttcgctaggatcgtgagtctccatggcgttcccaagaaaatcgtatctgataggggaagccaattcacctctcacttttggaagaagctccaagaagagctgggtactcgattgaatttcagcaccgcctatcacccacagacagatagacagaccgagcgtctaaatcaaatcctagaagatatgctccgcgcatgtgtactagatttcgggaagacctgggataagagtctcccctatgctgagttctcttacaataacagctatcaagccagcatacaaatggcaccttatgaagcgttgtacgggcgcaaatgccggacaccgctcctgtgggaccaagttggagaaagccaagtgttcaggaccgatatcctgagagaagccgaagctaaagtcagaatcattcgggataatctaaaggtggcacagtcccggcagaaaagttatgcagataaccgtcgccgtgatctggaattcgcagtggatgactttgtgtatcttcgggtcacgccattgcgaggtgtacacaggtttcagacgaaagggaaactcgcacctcggtatgtgggtcctttccgtatcgttgctcgacgcggagaagtcgcttaccaattggagctgcccgcctccttgggcaacgtgcatgatgtgttccatgtgtcgcaactcaagaagtgtctccgagtgccatccgagcaggccgactcagagcaaattgaagttcgcgaagatttgacctacgtggagaggccagtgaaaatcctggacaccatggagcgcaggaccaggaaccggcacatcccgatctcttcgccagttcttccgaatctcggggtcgagattccgtttaaggaggcgggcccgcccgccactctcgctgacgggtggggcccacctgtcatcgccttcctcccgccgcagccgccgctcgcccgtgccctaacgccgccgccgccgcggattccgccgcatcccgccgtccccgcgcgccataatgaggggggaatcattccccgcgattccctctcccaattcccccactttcccctctctctctccctcggattcgtccgatttccatcccgcaaacctcgccggcgcaatcaatggcggccgagatctccgcgcccgtttcctccctttccgggcacgctctccttctcccggtgctatttaaacgtctcccgtgctctcctcctccgtttccgccgctcgccgctcgctctccccgtgggaatcgagcccgcaccgttgcaccttntctccgccgtcgccgccgtgctccggttcgccgccgccgtcgctccggacttccttcccactcggcgtgaccttcatcggcttcgccgcggtcccgtcgacctcgtccgcgccctcggtttgctcgccgaccggcggagcaccgtcgtcctcgccgtcccgaaccgcgccgccgccttcttccgcttcggccgccgttcccgtcgtcgccgtcgaccgggccgtgcgccgccgtcgtttcagccgtcgccgtcgctcgggaagaccaccgtcgtgctcgccaagtcgtcgccgtcctcgtccgacccttcgccgtcgccggagatcaccggagcagcttcgccgtcgtcgacccgaaggttcccgccgcttcctcctcgtcgccgtcgccgtctgttggtcttccgccgccgtttaggtcaccggaaccagcatcctcaccggcttggcaccgccggatatgccggtaaggaagaggaatggcagcgtgaggatgaagaagcggaggaatcgtgcacaccgctcgtgtttggcgatatcccacacccttgggctaggaactgggccagggccaggtaccagaagaatgatgatggcacaatcttcatgccaaatgcagaagatcaacgagtatacgaagctataaaggagttggttgccgagcaacaagcctcgcaagaggcctgctctcaaagacgcgaggacgacctcctcacgaaagcgttgggcaacaaggaacaccgtggacggacacggggcgttgggtcttctgttccctggaagaatggatttccagactacaagtggcagtacaagaagcggacttccaacaaggcggagaaagatgcacgccttggagccaaaatccgggcgtcgataagagctgagctgacatctgaattcgacgaaaagctcgagtcgatgagggccaagattaggcaagagatccgagaagagcaacagaacccccaggccgccgctgctgctgcgcacgaagagttaggaagtcccacccaaaaacgcagcagttgcgcatcaactgagttggcggaaaattcaacatcggtcgacagcgccgtcgaccacataacagtaaccgaaccaacgatttgcaccctcacagttagggtgatgccgaccttcacggttccagcagccgagggacttgcgtacaagtcaaccctagagacaagagtgcatggagcgcaactcagggccgactgtgcaaatgttcaagtcgactcggtgaagcccgaatacgagctgttccctctgaagtatccaccgaacgacgaggtcctctcactaggaaatgcccgtggtaccttcatccaatggcccaaggacctcattgagatcagggttacaacgaggccaaccactgcagcaggcggtcgtccaccaaagagacccgcctctactccttcagcccctcctgctcaagatcgtcatgcacaatcttacgatgtgcagttgcagtacgacacggattttggggaggaccgaatggaggccgacagcaaggcgattcatgaacccccaccgatgaagaagagcaggaaggcacactcttcccctcagagaattactctcgataaacccgaagcaaatgggagaggaaggggaggaaaggtgcaggcctcgcttctagctccaaggaagctagatctgggcaagggccaggaagagactaagggcaaagaggtcaagaagaaatacgttgctccacaggagttcaaactaggcatgccattggttggagatgacgtgcttgccacaatgggcaccgcttggaaggaccttcacttatactacatggagaaatctaacgccaggaagccgagtaaagctaccgatatccttggagagcacgatggaaagccattccttggtccaacaaattatgtcgtggtcgacttcaaggatcttttcgacctctacaggctccgaacggtggacacaagcctccttaagtgctactccttgttaagttggcaatggtgtcagaagcatgcaccggaagttgccttccttgatccacaagtggtcactgtcacaaatctccagaatgaccgtcaaggaatggtcaactacatctacgacaccttgtggtcctgccgagacaaggagtacattattgcccattggatccttctggtcataacacctaagctgagtacatgtcactacctgaactccagaattgataagaacgcatatgattggaccccaattcaactagcgatagatgaagtgtgggcccaatacgtgcaaagaggaggcctcaggaagacaggacatgacaccgtcatcctcaaaaaagacttcccggtgaagcaacaaatagaccccctgagggtttggcgccacgtgtgtggcatagcgcaggcttatccggtccgcgacaggtcgcagcactcgtccctagtcggagccggcgtgaggactcctggagttggcacgtcagctccggccagatacattccaagcttcatcgcaatcattgcaaggaagccattgtatgaagaagggtag

SEQ ID NO: 87442 - DNA, 593 bp, Oryza sativa
  Clone ID: PAT_MRT4530_86387C.1
ctaggcctccctctggccggatctgggagggaggggggaggggagccgccgctgctgccccgcgcgcgccgtcgtcgccaccgccgcgtccgccccgtgcgccgccgccaccgccgagccgtccacgccggcctccccctccctcctccggccagatccctgcccccagcaggcagcgggcagtcctctctcgtgcctaggcgaatcagaaagccgcataggccgtcgcagggcccatccgaactccatcacgctcatccttgcctagatgcgtcagcaagcgaaaagctatacttcaagtcaggcagttacccattcccgcttgtggcaagcgctgtatgtcttccagggtttcccacgaaccggtccttaattgccatgggtgcgaccagcaaaaccatgcacccacagcccaccattcagtcgagttttagttggataattacgaccatgaaacatggccggatgtctcgagccgcagctcatcatgatactaacaggtctaatactgcaattatcccatcaactgagctagtgccgtgcgccgccgtcgctccagtcgtcgccgtcgctccgggaggtcgccttcgtgg

SEQ ID NO: 87443 - DNA, 301 bp, Oryza sativa
  Clone ID: PAT_MRT4530_86388C.1
gatcggcttcattgacatcaacatcccccatcaggagcttctttgtgacatttacatctccaacctttttgccgggtcggcggaaggacgccgaccaaatttcattaagatgaaagaagagttaccagtattacacgacattagactgtcgagccggggaagaaccccgaataaaagaagaaaaattaagaaaactgagaaagactatttacaagcaccaaagagcttaaggctactcctcgcaagagaaaaggccggctgctctccagatcaggacttcctccttaatgtctgcaactaa

SEQ ID NO: 87444 - DNA, 2380 bp, Oryza sativa
  Clone ID: PAT_MRT4530_86389C.1
atgatttgtggtgattctgactcccccctggagttcagacttggagttgaaaggcgtagcgacgactatagacaacgacaatgttgcccgtactgctactattactgcgtggagtactgcacagtctgcacccgcgcgctgttaatggctgtgctgctgtgcttgcttgtcatgaccgaccggccatatttcagagcaagtgaagaaacggtgtcgacgacactgtgcgtgcaacgtgcatttgacggtggcggtggcgagatcagaatgaatgctgcagcagcaggcggcagcagcagcttgcgattgcatgaagggacgagccgtcccatcacatgccacgcatcttggatggatggagccatagccgggcggagacaggtcaccggaacttgggcggagcggtggctcaagcgcaggtcgaagagggggtcaggtggcgtcggctcgtcggggcgcggcggcggcggcgccgtggccttccacggcggggcgggggcggggcgggccggcagggcggcggatcgagggatcgacctcgaacggcggcggtatgtcggcggcggacgcccgacttggagcaggggacaacgacgagcggacgagcggcgtccagcctccacgcctccgccttcctcctccggcccgagcggcgacggcatcgggcggctgcgtcggtcggcgccctcctccgtgaatccatctccatccctgccgacggacgatccggctcggcggctaatccgtcctcgtcttcctcgcgctctccactcccttggccggcgcgccgaagagatcggtggcgtagagcgtgactcggcgacacggcgaggtgtccacgttgatatacacgctccgcgcccaggccacagccttgccgaccgaccgattgatgcttccacgggcgtatacaggtttgctcgccgccgacgccgatccccatccatccggcgagtgaccagggcgccgttgtttgtcccgctgcttccaccgcatcctgccgccatcgctctcttccactggttcgctctctccgtcgccgttggtctgtccctctctttcgtcgactctctccgttgagctctctggttaccacactttattttgacatgatcaagtttttgataagaaaccgatacactctgcacttgctcttttggtaaagatcatactactattaagtgttgatgctcttgcaacctgatctctgcaactcagatcctgtactatttcaaagagcaccttcacttaactggggccgtattgccaattcaatgatgggatcggcacaagattgggcatttggatggcagccgtggacgggaccggcactggaggacctgctcccacaactctcccatgaggagcaactacgattgcacaaccacttgcgtgagcacgagcgtatcctcaagtggcacaacaagaattctcctccaatatcttctctgcactcagaaggggagcgtgacttcttcatcattatccatgtccgctacgctctccaccattacaatgccaaacacccagatgaggagtttgatgctgtgaagcctctgatggaatccagtgtacgtttcaggggccaggtgtggttccacatcaacttctgggctcgctcccgcaagagcaaaaagatcaagcgcttctttgctgaggtgcactacaagcctcccagcagcagcagctctgtctgctcttacctgccatttccagtcccaggagctgagaggccacccagcagcagctccgtctcctcggatctgctacttccactcccaattcctgtcgttgaagcatgcaccatcattgaagagcctcttgggcagtacaggaagagctgcgcgttttgtcgtggtcacttagacattttacaccccatgggtcgtaaatttgtttgtggaaacgacaaggaccggtttgagcaacaactcttgccgtgcgggtctatagggcttgagatgccattcacttgccgcctgggtccggcctctgtcaacagtagtcatggggaaaaagaagactagggggaataatgaagtggccccttggacgcccttttgctcgcatcgtttgtgccaatcaagtctggtgataacagaaattgaattgtcttgtactaccttcgtcctcaaaatataagaaaaactaaatgggacatatcctactattatgaacctggataaaaatgattctactcagattcaatagtttcttatattttcaacggagggagggagtaaaacgttagcagtcctcttatcttgtgcagaatatgattgtacactgttcagaactcttgagattcagaatattgtttgcctgagggaggttgatagatatttgtgcatgtgatgctgataccaaaaaaaaaaaaaaa

SEQ ID NO: 87445 - DNA, 1612 bp, Oryza sativa
  Clone ID: PAT_MRT4530_8638C.1
atgcccactggagaagagattgcggtgaagaagctatatgttatacctggtcttgatgatgtgcagtttaaaaaggagtttaataaccttatgaaagtccaccatcagaatgtcgtaaggctagttggctactgctatgaaacaaagaagaaacatattgaacgcaacggagaatttgtattttctaacgttgaagaaagagctctctgctttgaacatgtgcagcttggaagccttgacaaacatatttctggtacaaggaaactggaagaaaagactgcatgcagcaacatcgagagacctgagcctagggagtttcttgggttcgaccctctagagctacgcttcccattcgagactaacaaggcgatatcctgcgtactgcagctaacaaacaagtcagatgacatcgtcgagttctatgcaaacacaaacaagaagaagtaccaaatacacagggaccaaggagttatggcaccatggtctaggtgctatgtcatcgtaacgctgcaaccacaggggagcgcaccaccgaacatgcagtgcgacgatatgttctttgtacggagcactagggtgagggagacagacatcggctcacttgacattaatgtcactgagcagcacttggaaaaacagatgggtgaggttaagtcattgccgattgtctttgttccaattccctcagcctccaacaaagttcttcgatttgtgtttgctcgggttcggcggtctaaccggcgagacaccagcgatcagaccggcggtatcgcagcggtcagaccggcggattcaaggcagtcagaccggcaatggcaacagggagcagaggcgacttcagggcggtcgaatcgagcgttctacatcggtcagaccgacggcttccaggcggtcagaccagcacgactacttcgggaccaaagcgacggcggcacacgggctgggcggccaccggcggcggcggcacggcgcgcgcaagcacgggaagcggccggccaaggggagaaagagggaagagggggtggagtgctcacctagggcggcgacgaggggcggggaaaggagggggagctcggcgtcggcgctcctcgggacgaaggcggaacggcgacccggcggcgttccgcgaacgggaaccggcggacggcggccggaaggacctggggaggatgggggagaggttaagagggggagagagggctcccagcggcatgaatcgctggtcggaggtgagaacgggcggcggatgcgcaccggcgcaaggggaaccgtgttccggcgggatcctggccgtgaaaagcggcggccgaggagcggcgccaagcggcggctggagtcggcggcggcggtggaaggaggtggtgcgcgtggcgacggtgcttcggaggcggggaggggaaatggagcggacgccggggtgcggcacgacgcggcgaagccgcttgtggcggtcgcgcggaacgacggtggtgggagcggctgtggcgaccggctggagggtcgtcggcgagcggcggcgggaggtgcgacggtggcggggtggttttcgtgcacgggagggctcgggagagaggggaaaagggagagggaggtgcggggaatgtttttatag

SEQ ID NO: 87446 - DNA, 342 bp, Oryza sativa
  Clone ID: PAT_MRT4530_86390C.1
ctgagagatgatgctctgatattacatctctagactactagacacggagtgtacgcttctttacctgactgtacaactaaggaaaccgtaaaatatggcctttctcttgaagtgaaaaatggaaaagcaatttattactatgaaaaaaaaaaaaaaaaaaaaaaaaaaaaaaaaaaaaaaatttttttaaatattgtattatataaaaaataaacaaagaaaaataattataatgggggcggccgttttaaaggttcaaagttttcatcccggggggcggcgctaaaagagctcttttatagggccccttaatttcaatttattggcctttttttaagaccc

SEQ ID NO: 87447 - DNA, 807 bp, Oryza sativa
  Clone ID: PAT_MRT4530_86391C.1
atgtcgaggaagctgggtgtatcatatcagcatcagtatcaggctatatatcagccagcaacagacaggaagtattcttcccggttggatcccttcaatggcggacgcgtgcatgtcaaagcacgaaagcgaccaccacaagagaagagacgacggtgccacactaattacacagtacaacgcagacactcacaacacacgcgcactcacccctataaacacacgcacgcaaaccctatctctatgagcatcttcgaagactgggcctatgaacacacgtacaattacacagtacaacgcagatactcacaacgcacacgcactcacccctataaacatacgcacgcaaaccctatccctatgagcatcttcgaagactgggcctatgaacacacgcacgcaaaccctatccctatgaacatcttcgaagacagggccgtaatatgtattgatataggagtagtacgtactatcaccgtcaaaagtgaggtaggagtgcaatataaaagtggctggtggtttaccaccagctttcgtccactgatggaccacattgcgcagcagcaagcaggtagaaaggagaaacgagaaagcacatgcttaagaagcactggtctagaaaaagaaaaggagttggagtactcaacaactgatctggtcaaattgatgagtatggagaaatatttttttttgtgttgtgtcttctctgctctctcgccattgccgccgcggcgccgcctcctcctcctcttcttcccccgctggtccggcgaatacggcggcaagccggcgccggtggagacgggg

SEQ ID NO: 87448 - DNA, 475 bp, Oryza sativa
  Clone ID: PAT_MRT4530_86392C.1
gttctttgctttgctcatggcaaccataggagtttcccagacaagtgcgatgggttcagattctgccaaggccaaggcgtcggcatcctcaatatttgccatgattgaccgtgaatcgaagatcgactcgagcagtgatgacggcatggtcttagctaatgtggctggtgagctcgaactccaccacgtctgtttctcatacccatcacgcccagacatacaaatattcagaaatctgtcactgagaataccatcaggaaagatggttgcccttgtcggagagagcggctgtggcaaatcaaccgtgatagcactactggaaagattttacgaccctgattcaggaacagtgacactagacggcgtcgacatcaagaacctcaaagtcgggtttctgcggcagcagatggggctggtgagccaagagcccgtcctgttcaacgacacggtccgcgccaacatcgtctacggcaag

SEQ ID NO: 87449 - DNA, 492 bp, Oryza sativa
  Clone ID: PAT_MRT4530_86393C.1
gcatcatcgtggaggtgttcaagacgcagggcgccgaggtcggcgacggcaccacctcggtggccgtcttcgccggcgagctgctgcgccaggcgcaggagctggtggagcagaagatccacccgcagaccatcatccgcggctggcgcaaggccgtcaaggtggcctacgacgcgctgcaccagtccagcaaggacaacagcgccaacccggagctgttccgccgcgacctggtcaacatcgccgccaccaccctcagctccaagatcctcaacgtggacaaggagtacttcgccgagctggcggtctcggccgtgctgcgcctgcgcggcagcaccgacctgcagaacatccagatcctgaagaaggtgggcggatccatgcgcgactcgtacctggacgagggcttcatcctggacaagtccatcggcgtgggccagcccaagggcattgagaatgtgggtattatggtggccaacacggccatggaca

SEQ ID NO: 87450 - DNA, 822 bp, Oryza sativa
  Clone ID: PAT_MRT4530_86394C.1
atggaccggcgagtccagcggctggtcagcggcgtcgccgccgccgcggccaccgtctcgctcctgtacctcatctcccacgcctccacctcctgcttccccggcgccacgacgcttcccctcgcccgcttcccgcgaacctcctgcgacgccgcctcccgccgcgtcgtgccgccgggccgccgcctcgcgaagctccgcgcctccgcgcgctggcgccgccgctccgtggcactggcatcctcctccgcattcgcctcgctccgtggcctccgccttctagctggctcctcccgtgccctctgcctggccgccggcgccggccacgccgtcgacgcgctccgcgccgagggggtcggtgacgtcaccgggatcgacttcgtcgacttcccgccgctcgttcgccgcgctgacccccaccacctccccttctctgacggcgccttcgacctcatcttctccgacgaccccgcggggttctccggcgccctcttcccgtccaggttcgccgcggaagccgagcgcgccgtccgttctggaggcaccatcgcgctcgccgtcgatcggcacctcgatccgtcggccgtcgcggtgctcttcaagaggtcccgcattgtagaccagagggatctcaccatggatggatcacagagttatgctggggttaccagctttacattcaacccagagcacacaaggcaaaaagaggagggcaaccaaaatgccagaaagcaggagcgtggccgttctccagtcccagatatgatgatgatgaggaaggaggaggaggaggccggcgacaaacagccagggacaagctaa

SEQ ID NO: 87451 - DNA, 299 bp, Oryza sativa
  unsure (1)..(299): unsure at all n locations
  Clone ID: PAT_MRT4530_86395C.1
aaacagatgaacaacttaattcaggattggtttattatacatgcgagctgatacacncaaacacacattatctattaaccaaatcacacacattaacactcaataactagctacatccaccaggctagtcttcagctatcgtacaccaatatcagacaccgcctacgccattgcagattatcaccttaaataataacgtttattatgcttgagcctgctagacttttcttttgagatacgctattcatttcttagaccattatttgcgagagtacggaagatggaactctctactgaaa

SEQ ID NO: 87452 - DNA, 203 bp, Oryza sativa
  unsure (1)..(203): unsure at all n locations
  Clone ID: PAT_MRT4530_86396C.1
aattaaanaaaatttaatttaagggggaaaattaaaaagtttggaacctttttttagtcctggtttgggacaaaatcacccccaaggggcatacttggggggttttattttactctaccccgatactagttttaaaataacattactttgggggttcgttttcggactaattcccgaacccttgggcgaacccttgggcgaac

SEQ ID NO: 87453 - DNA, 357 bp, Oryza sativa
  Clone ID: PAT_MRT4530_86397C.1
atgaacagcgttaacaacaggagcaggagaaggatataccccgagaatggccctccgctggattgtgaggcagaattgcctccgttggtgtcgacgttcgcggcaccggctccaggcgcgccatctcctccagcagcagtagcggcggcgccggcggcagctccggctccaggcgtagacatggcgaaggtgtggttccggaggccctgctccttccgatctctcgtgcgcgcaagcgatcagaagcgaggaggcgagagcagcacaggagagaggcagttgtgggaacgtgggatcgtggacgcgccgttgcggagacagtcgtgggaacgtgggttcgtggttgcaaaagaatag

SEQ ID NO: 87454 - DNA, 269 bp, Oryza sativa
  Clone ID: PAT_MRT4530_86398C.1
aaaaaaaaaaaaaaaaaaaaaaaaaaaaaaaaaaaaaaaaaaaaaaaaaaaatttaaaaaaaaaaaaaaaaaaggggaggggttcttttaaaaagaataaactcatccagcccattatatgaacatctgcggcgcgccgcttgtgcgggccccatattaagttccctttctttccccgtcaaccccttttttttgctcgctcttaacaaaatttaacctgggtacccccaccctttctcccccggaaaacccctgttctcccccccttt

SEQ ID NO: 87455 - DNA, 316 bp, Oryza sativa
  Clone ID: PAT_MRT4530_86399C.1
ggcgaggcaaaccacacgaatacacccctgattaattttactgagaattgcacgggtacatcacatcacacaaattcatacgttgatacacgcatagcccccaaagctaccaggtgcttaattaatcaataacacacgggtttaattcagcaataatcaggacacacacaaaccacactcatatgggtggtttttattgacgactaattaaggccggtgactcacctgccgccaaggttaggttggttcgtcacttaacttgccacactttcagtccgggcaggaacagcttgtgccccacttgcagccacctttt

SEQ ID NO: 87456 - DNA, 1681 bp, Oryza sativa
  Clone ID: PAT_MRT4530_8639C.1
atgcataaggtggtgagagagattaagctggaggtgaaaaaggtggcggggaataaggtggcggcattcagtgccgttgtcgtcgcggaggaggagcgggaagagaagtgtgcgttcctcgcgtggagagaaatggtagagagagagaggggaaggggaatggataggaccgtgtcggtgatatgggtccggggactagacggaggaggctacccccaatgccacgtggccctcccccgaggggggtcgggcccgaggtggggtggcggccactccctcccaaagactagtcgggagaggctgccccccaatgccacgtggccctcccccgaggggagtgatgcccgaggaaaaagcttaagcgctgacgtcatcaaagaggccggcgccgacaggcgggccccacacgtcaacgggtcaagggaatcggtccaccgtggaccgggaccacggggtggcgcggctgagcacgggcacggctcaggccggcccggccgagcgacggctcgcggcggcgcggcctcctgctgcgacggctggtgcatgcgagaaagcggcggtgaggcgcggcaatgggatccgggcggcccaggcgagcggggcggcggcaagccggccggccgacctaacggcagcggcgcacggcccgatggtcgccggcggcggccaccggcgcggcaacgcgcacgggagacagaggagggaggcaaggagggagaggaggagctcccccaaggacgcggcgacgaggggcggggaaaggcggggggggggggggaagctcggcgtcggcgctcctcgggatgaaggcggaacggtggcccggcggcgttccgcgagcgagaaccggcagacggcagccggaaggacctggggaggatgggggagaggttaggagggggagagagggctcccagcggcatgaatcgctggtcggaggggagaacgggcggcggatgctcaccggcgcgaggggaaccgtgttccggcgggatcccggccgtgaaaagcggcggccgaggtgctcctcggcgctgcgaagcgagcggcggcgacagcgcgacttggggtggctaggagcggcgccaagcggcggctggagtcggcggcggcggtggaaggaggtggtgcgcgtggcgacggtgcttcggaggcggggaggggaaatggagcggacgccggggtgcggcacgacgcggcgaagccgctggtggcggtcgcgtggaacgacggtggtgggagcggctgtggcgaccggctggagggtcgtcggcgagcggtggcgggaggtgcgacggtggcggggtggtttttgtgcacgggagggctcgggagagaggggaaaatggagagggaggtgcggggaatgtttttataggggaggggaggcgggatcgagcccgagagaggtagaaaccggccggagacgtgggaggagagagagatgcgggaggcggcgacgtggccggattttgcggggagagtggggggaaacggcgcggacgtgggcgacgaccgcgtccacgcacgcgcgggagagggagtcgcgcgggagaggcggcgacgtgggaggatttggcggccatggcggcggttggggatggagctggaggtaggagatgacatgtggggcccacctgtcggagagagggggaggggaaaacgggctagggaggaaatg

SEQ ID NO: 87457 - DNA, 2301 bp, Oryza sativa
  Clone ID: PAT_MRT4530_863C.1
atggcgacggcggtgggggcggcggtggtgctgtatttcgtgctgagccggcggctggcccaggaggatgggggtggtgggggtgggggtgggggtggaggggggaagcggcggagggtgcgcgcggcgaggcggcccgcgcagccgccggcgacgtggatcgaggcggtgggcacgctggcggagacgctgcggttcacctactcggagacgctcgggaaatggcccatcggggacctcgcgttcgggatcaagtacctcatgcgccgccagggaaatttacatgtcgctagtgtatatgctggaaacaattgcattgaactgaaagggcctgaaataatggaagagcttattgttctgagacgattaatcgatctttgctttcttttttctaagaaaccatttccggtcttcctggaattagctggattttccccagaggatgttcttattgaggaacctaaagcggggattttaaagcctgcccatacaatcctgcgtgatgaatgcaccaaatccttccttgtgttgattcgtgggacacatagtatgaaagacacattgactgcagctactggtgctgtagtaccatttcaccactcacttttagatgaaggtggtgtcagcaagttagtgctgggatatgcacactgtgggatggttgcagcagcccgctggattgcaagaagtataacaccatgtctctgtcaagcagtcagtcaatgcccagactaccaaatcagggttgttggccattcattgggtggtggtactgctgcattactgacctacatcctgagagaacaccaggagttgtcttcaacaacttgtgttgcctttgctccagcttcatgcatgacatgggagttagcagaatcaggcaagcattttgtgaggactattgtaaacggtgctgatctggttcctacagtatcaacttcatctatagatgatctccgttcagaggtaacggcatcttcatggttaaatgatttgagggatcagatacagcagacacgcttcctaaatgttgtttaccggtctgctactgctttaggaactcgcctgcaatcattttctggtgccagagatagggttgcaggtgctggtgcactgctacgacctgtttcaagcaaaactcaggttgtgatgaaacaggcacagaatgttgcgcaggctgttgctagaagtagatcagcattttcttcatggtcatgcatgggtgcacgccgtcgaggtgttggtgtagttgctgcaagcgctaaagaggaaataacagtggaaacccacgtcacatctaccactaattcagagtcctatgttgtagaacaacgtggcaccaagaccatggaggagctgcagtacactgcagatagtgtttcagttcatgaggaaacagaagaagaggcccttctgagtgagcatgaatcctctagggagcatgcagaagaagaaataactgaaggtgagatgtggtttcagtacgagaaggacctggatcggcaggctgaagtggaggctcagaccaggcaggaagaagcagctgctgccaaggaaataatggaggaggaaagtgctgttctaaaaaatgttgaggataggcaatccttttcatctgatagtttggagaggcagcagttctaccctcctggtagaatcatgcacatggttgccatgcctcctgcagattcttgccctgatgatccggttgctgctgatgagtgcagtgtgggaatatacgagaccccaagggatctttacagtaaaatccgtctatccaacaccatgatcaatgaccattacatgccgatgtataagaaaacaatggaaatattgattgagaagtttgcgaacaatgatgaaaatttctgtacagactcgacagtagaataatatggatgacttgtaacatcgaagtgtatagtagttctttctgtttagctttaaccacctgatatgctcctgatatgcaatatagaaaagagatgctgtcctgaattacaatatagaagagatgctgtcctgaattagttaagagagttgtggatgatatgatatgtaaaatgtaaatgaaaaatagaattaatggatgtttattaacggaaaataatcctcaaaaaaaaaaaatgaaaaaacatagaacaggacgtgccactcgctaaaaaaaaaaacaaaaggatgaaaacgggccggccgagtctaaaggattctaagctacggcacacgttcatgcctacgacggagctcttctatagggccaccgaaagaaaagtggggctggcctaccaaaaacaacctcat

SEQ ID NO: 87458 - DNA, 692 bp, Oryza sativa
  Clone ID: PAT_MRT4530_86400C.1
tcggtcagatcggcccccagtcagacgggctgcacaccctctgtcagacgggcctcctgcttgtgtgttggctttggtggcaaggaaggagaacgtgtggatcgtggattccggttgttcgcggcatatgaccggtgataaaaattggttctcctctctcaaaaaggcatccaagactgaatcgattatctttggtgatgcttctacaagtgccgttctcgttacaggtttggttaaggtaaatgaaaaatttgaattgaagaatgtagttttgtttgaggacttaaagtacaatttgctttcggtttcacaaattgttgatgaaaattttgaggttcactttaagaaaactggaagtaaagttttttattattgtgatgattctgtgttgaatatttctcgctatggaagattgtttaaagctgattttgaaaatcctgtttcacctgtgataacatgtttggttgctaagtttgataaaaatgtgatgttttggcatcgtagacttggacatgttggttttgatcatctcactaggttaagtggtttggatcttgttcgtggtttacctaaacttaagaaagatcttaatttggtttgtacaccgtgtcgtcatgctaagatggttgcttcttcatatgctcctattgtttatgtgatgacggatgcaccaggatagttattacatatgg

SEQ ID NO: 87459 - DNA, 1149 bp, Oryza sativa
  Clone ID: PAT_MRT4530_86401C.1
ggtcagaccggccttggaggaatttttctgaaaattctcaaactgtttttgcacatggctttggtggcaaggaaggagaacgtgtggatcgtggattccagttgttcgcggcacatgaccggtgataaaaattggttctcctccctaagaaaggcatccaagactgaatggattatctttggtgatgcttctacaagtgccgttcttgctacaggtttggttaaggtaaatgaaaattttgaattgaagaatgtagctttggttaaggacctaaagtataatttgctttcagtttcacaaattgttgatgaagattttgaggttcactttaagaaaattggaagtaaagtttttgattcttgtggtgattctgtgttgaatatttctcgctatgaaagagtgtttaaagctgattttgataatcctgtttcataacatgtttggtagctaagtttgataaaaatgtgatgtttgggcatcgtagactaaaaaaaagttggttttgatcatctcactaggttaagtggtttggatcttgttcgtggtttgcctaaacttaagaaagatcttgatttggtttgtacaccatgtcgtcatgctaagatggttgcttcttcacatgctcctattgtttctgtgatgacggatgcaccaggacagctattacatatggacactgttggtccagctagagtgcaatctgttggaggaaagtggtatgtgttggttattgttgacgatttttctcaatattcttgggttttctttatggcaactaaggacgaagcttttcaacactttcgtgatttgtttcttcgattgaatcttgaatttcctggttctttgaaaagaattcgaagtgataatggtggtgagtttaaaaatgcttcttttgaacaattttgcaatgaaagaggtcttgaacatgaattttcttctcctcgtgttcctcaacaaaacagtgttgttgaaaggaaaaatcgtgtttttgttgagatggctagaatgatgttggatgaatataaaactcctagaaaattttgggctgaggcgattaacactgcatgctatatttcaaatctggttttcttgagatcaaaacttcttatgaacttcgatttggacgtcaatccaaagtttcacatttgc

SEQ ID NO: 87460 - DNA, 209 bp, Oryza sativa
  Clone ID: PAT_MRT4530_86402C.1
cgagaggtcgtcggactccgccccaaacaccgacgacggcaaggaaggcacgcacacgctcgatctctcatcgtcatgggtggatagcgacgacgaggagatagtagggagggtgccggagttcgggctggcgctgccggggacgtcgacgacggacaaaggcactgttcctccagcaatgcacgctcccccgacggcgcggctgaacg

SEQ ID NO: 87461 - DNA, 552 bp, Oryza sativa
  Clone ID: PAT_MRT4530_86403C.1
atggatcaggcagcagcagcagcagcatctggctctcgctcccgtgtcctgtctgaaatcgacccccacagcgaatggattcacggtgacgagttcgacacgctcgtcctcgacgttacagggttcagcaaggaccatctcaaggtccaggtggaggcgtcggggagcctcaggatcagcggcgagcgcgccgtcaacggcggcggccgccattggctccacttcctcaagcgcttcgacctccctcccggcgccgccgacgacgcgtcggcgatcaaggtccagctcgacaagggcgtcctctacgtccaggtgcccggccccggcgctcccgccgccgccggcggcagcgacggcgagcagcagcagcagcaggagggagagatcgccggcggccgccgccgcgcggcggcggcgaggcgcggcgggcacccggcgtggcagctcgccggggcgctgagccggcaccggcaggtcgtcctcaacgtcgtgatcgccgtcgtcttgctctggctcgtcacgttcgccaacaaactgaccaagaacgagtga

SEQ ID NO: 87462 - DNA, 228 bp, Oryza sativa
  Clone ID: PAT_MRT4530_86404C.1
ccccgtggtggtgtcatcagcggtatctctctctctcatcatcctatgtctcgacgccgcctcgatagtatcctagccgcatcactacgcccacttataacactaattaatacgcagctgaagccggagtcagcgccgaagccggagcactccgactagctcacgctcacgtccccatcctggtgacgctggcacatggccacgccacagcacgctctagccatgccc

SEQ ID NO: 87463 - DNA, 513 bp, Oryza sativa
  Clone ID: PAT_MRT4530_86405C.1
aaccaatcggcgccggccatctccgccctctcgagtttagtcacttcaaacatctcgttgtcgaatagaggcaggtcgcatcgcgtgattgggccgcctctttggtctcccctttccgtgtgtgaatgtctctgcatttctggcttctcccacagtgctctccgctctgctcgacgtcggcgtcgcgatcatcgtttccggtcctcaggtttggggctgcgttgcgcgccactcgaccggaatggcagccggatgcttccaaggttgacgctccatccagctcgccggacagcaacggctcggcggacggccggaggcggcaggatcggacggcggaggaggggttggaccacccgatcgacggctggatgggctccttgtctcgcatcggtagcacagggagtggctcagttccgtcctcgcggcagccaccactttacagattgtcacttcccaggtgatggaaatgtgcaggcgccgcgctagctgccagctcgcttcacgatcgagctg

SEQ ID NO: 87464 - DNA, 736 bp, Oryza sativa
  Clone ID: PAT_MRT4530_86406C.1
acagccatctccaaaaaaaaataccacgcagttctttcgattctacttggcgacgacatccatgtgttgaaccatgttcatcttaacaacggtgattcaagggagagccggtgtcatattgcctgatgcaagcatcttgtagaccacaatcacaggtgcattttcttttgactagaagctgttcgatctatttccccttccgtaacttgagcgtacacgcatctgtgagttggtgtggggaacggggcgggggttgaagagcagtgctgcaatgatgccgccgccggtggtagtgaggtgtggtgaatggaggctgcggtcggctgggcacgtggttgtcgtaggggtgaccggtggccggtagaaaggcgccgggccaaggcgtgattgcacggggtggagatggccagccggctaggaagctggtgcctgcatctagaaagctagagactagagtcctagagctaaggttgtggttagtgtttcttgattactgaaaatggatagatgtaggaggagaaaagcattggagttctacaaccgacaggtgcatgtttctctgtactagttctattctctgcttttgtagtagggaggcactggatagatatctttgtttatctggaatcttgttggatgttgtggcaatgcacctgctatggattgcttcacatggatctgcagctttacattctgtaattggaactcagtagatacattgctcttttacatcagt

SEQ ID NO: 87465 - DNA, 2538 bp, Oryza sativa
  Clone ID: PAT_MRT4530_86407C.1
atgcgtgccggcggctgcgcggtgcagcaggcgctggcggcggaggcggcgggggtggtgaggcaggcggtgacgctggcgcggcggcgcggccacgcgcaggtcacgccgctccacgtcgccagcgccatgctctccgccgccggcctcctccgcgccgcctgcctccagtcccactcccacccgctccagtgcaaggccctcgagctctgcttcaacgtcgccctcaaccgcctccccaccgccggccccgccgccgccgcggccatcttccaccaccacccacaccaccccggcggcggcggcggtcaccaccccgcgctgtcgaacgcgctcgtcgccgcgttcaagcgcgcccaggcgcaccagcggcgtgggtccgtcgagggacagccgccgccgcagccgccgccgtcgccggtggtcgcgtccaaggtcgagctcgagcagctcatcatctccatcctcgatgaccccagcgtcagccgcgtcatgcgcgaggccggcttctccagctcgcaggtcaaggccaacgtcgagaaggccgtcgtcgcgtcgttggaccacgcgaacgcggcaggcggcggcggcggccacgcgggctctcccaactccggccatggagggaggcgcaaggagagctcatcatccagagcaagggtcgacgacgacgccatgcgcgtgctggactgcatggcgagcgggacgaaacggtgcgtggtggtcgtcggcggcgagggcgcggccgcggcggaggcggtggtgaaggcggtgatggacagggtgagcaaggcggagctgcaccaccggcacgagcgcctcaagaacctccagttcgtgcccctctccatcgcgtcgttccacggcgcgccgagggaggaggtggaggccaaggccagcgacctccgcgcgctcgtccgctccggctgcgccgccggcaagggcgtcgtgctcgtcctcgaggacctcgcctacgccgccgacgcgtgggccgccgcgtcgaacaccagacgccgcgccgccgccgccgccggcgggcagagctactgccccatggaacacgccgtgatggaggtgagcagcttggtgtccggcggcggcggcggcggcgagaggttctgggtgctagggttcgggagctaccaggtgtacatgaagtgcagggccgccgggcagccgccgctcgaggccgtctgggagctccaccccgtcgtcgtccccgacggcggcctcgccttgagcctcacctgcagtgaagcttcacaagctactcatcaagcggcggcgccaacagctgggtggcccttcgtcaatggcgccggcgaggcggcggcgacgacggcgagcccgaccattccgccgtggcttcgccggtatcaagatccagatcacgccacgccggcgagctgcggcaccggtttgcagatacaagatctgtggaatcccatgagaaatggatcagcaccacaccacacatccgagcttacattgagtttctcctctccatcaccttcttccatctcaggatataccagctgctacaacaacaacaacatgatgagctccaagccatggcaactcgaagcgaggcagccatggccaattcatggacatgaaggtcagagaatggccatggcatcatatcatgatcatcatccgttggatacaaaccctagcccagagtccaactcggtgtccaattcattggatggcggtgagacgaggcggcccaagttcatcgagctcaatgcagagaacctcaagatcttgtgcaatgcgctcgagagccgcgtcccgcaacatagcaacattgttccagacattgcgagcaccgtgctccaatgtcgatccggcatgaagaagatgaagttgaggcataaggagatcatcaaggcaagctcaactacttggttactattccaaggaagagatgttgatggtaagaaggccatggcacaagagctcgcaaagcttgtctttggttcatctaccgagttctcttccatctccttcgatgagctcacatcgccctactccgattctagctccggtgagctcaccctcaagaggcaaagatcagcagacagcaatgagcatagctttgcgcagagactatgtgaaattgtgagcaaaaacccacaccaggtcatagtgatcaatgacattgagcaacttgatcaagattcagaaattagtatcaagaaagcgattgcgaacggaagaatgagaggatgcaccggtgaagaagttgatttcgaggatgctatcatagtgttgagctatgaagaagaattcgattcgaggtctagggcttcctcctcccctcgggtcaagcagaggctcatgaacaataatgatgatgaagaaagtagcagcacggagaagggagataattcaccacaacgttttagcttggatttgaatgcatgtctcgaggatgaagaagaggatgaggggtttttgctaattgataatggtgtggggatgcatgatattgtggatggtgttttcttcttcgggttgatggcagatttctga

SEQ ID NO: 87466 - DNA, 386 bp, Oryza sativa
  Clone ID: PAT_MRT4530_86408C.1
catgtaaaaaatgtttttgggtttaattagattttcatatatataaccaaactttaaaaatttttaaaaataacctttaagatgaaattttgtagccggcgatgagctgatggccaaactagaattgttcacccatcaggattcagcgcatgctttgttttagcgaaccatgatttcggtttttgtcacttggtaagaatagccctccagaagtagggcagtagaagatctcaaagtgggggatacgggaaaactacccaagaagccatcgtatagggcataattaacaggggctgatgggatttcagcatcaacttgacatggatctgggtttcctgcaattgagatctacagcaacagaaatttcagtttgggtcctgaaaatt

SEQ ID NO: 87467 - DNA, 254 bp, Oryza sativa
  Clone ID: PAT_MRT4530_86409C.1
aagtcctcgagcaaagcaggagagagcttggtgagctgcagagatggccccctcggtgacggcgttgtcggccaccaccgaccttcactaacagatgctcaagtccaccgccggcatgctcatcgtcagcagttgggcgagctgcagctcggatagggtgaagtacctggggccattctcgggaaagaccctgtggtacctggagggcatgaagacaggtcgactacttgtggtacacggcagcgctatccatg

SEQ ID NO: 87468 - DNA, 478 bp, Oryza sativa
  Clone ID: PAT_MRT4530_8640C.1
aggaaacgacagcctggatggatgaagcttaatgtagatggctcatttgatccgaactatgagaatggaggcattggcgcgatcttgaaagatgagagaggaactgtcatcttttcttcctgcagattttttgaaaggtgctatgatgcactggaaatggagcttctggcgtgtaaggaagaaattgtttttggcgattcatggactctaaaactcatcgtggtggaatcagattgcttggaagcggtacgcatgctgcaatctgcagagagatctatctactctggcctataaccagggagatcaatgctcttatgtgtagaaatagagagattattattcagaaagtccactgtggtcaagattgtgctagtcacattttagcaaataaagctagatgtgaggaggtgtctaatctttggctagaggatgaagagactacgcagaagagaagggggcagacggcagaggaagggaa

SEQ ID NO: 87469 - DNA, 1487 bp, Oryza sativa
  Clone ID: PAT_MRT4530_86410C.1
gactcgacccacggacccaggcccacgcgtccacgcacgcacgcaccacacacgtagcagcagagcaatggcggcggccatggcgctgcaggtggtggccggcggcggctgctgttgccagcggcccgttcttggagctggtcggcggcggttggcggcggcgcgtgcggtggcgtcggacgcggcggcggcgaaggtgagcgaggaggaggggaaggtgaggctgggtgggtcggaagtggcggtgagcaagctcggcatcggcgcctggtcgtggggggacaccacctactggaacgactccgagtgggacgacaggagactgcaggaggctaaagcagcatttgacacaagcatagataatgggatgaccttatttgatacagcagaagtttatggtacagcgctgatgggagcagtaaattctgaaagtttactcggaggtttcatcaaggaaaggcaggagaaagaacagattgatgttgccgtcgcaacaaagtttgctgcacttccatggagatttggccgaggaagtgttctttccgcactgaagaaatcgcttgaccgtcttgggttatcttcagttgagctctaccaacttcattggccagggctatggggaaatgaagggtatcttgatggacttgcagatgcctatgagcaaggccttgtaaaggctgttggagtctcaaactacaatgagaaacgccttcgggatgcatatgcgcggatgaagaaaagaggagttccacttgctgcaaaccaagtgaactacagcctaatatacaggactcctgagttgaatggtgtgaaggcagcttgtgatgagcttggcatcaccctgattgcttattccccaatagcccaaggtgttctgtcaggaaaatacactccagaaaaacctcctaccggtcctcgagcaaacacatatacccctgagttcctcaccaagcttcaaccactcatgaacaggatcaaggagattggagaaagctatgggaagaacccaacccaggtttcactgaactggctgacatgccaaggcaatgtggtgccaatccccggagccaagaacgccggccaggcgcaggagttcgccggcgcgctcggctggagcctcaccggcgacgaggtcgaagagttgcggtctctggcacgcgagatcaagggcatcaagatgcccatcgaggagtcatagacatgtaaaaactgaagaagtttttcatgtatatgataggagatgtgtattgattgtaccatgcaatagtaaacattttacggcgataaaatgtgtagaaggtgtagaaaatgagtcagaaatttctgcctgcatgaatagaaaaggtttatatgactttgagccagccctgcccagtgatgattcaaatgcctgtacaatgtaactttgacgcaaacacgcgtgaaccattacacacttgtatttaaaaaaagaaatagatctcatacgtacgttttatattctagtt

SEQ ID NO: 87470 - DNA, 539 bp, Oryza sativa
  Clone ID: PAT_MRT4530_86411C.1
gcacgagctcgtgccgaattcggcacgaggtggtttcttccctacgactgccattgaaatttggaaatctaccaagctcctatttattctggtcatgagagggaggaaaaaacatctcttatcgcccattcgctctccggttgcagcaagtctgccatcatagcctctggtgagtcaagctatcatcattcctctctgattcatttatattccttacaaaatttgacgtgttttttctgcgtggtgccctgcctgcatggtgtaagtctaaatggtttgttgggcttgagatttggatcgatcctagcttttaaataagtagcttcaaaaatttaaaggtaccttattttcaccagttaggcattgttaatagaatctaaatttaaaattgctaatgaaacgcatgagagaaatttttcgtttggagttagatctgtagatgcttgcattattatatagataatgatcactgaaaactgcttattttttggtagaatatttctatgactacctcaaaagataataaacttatccgattg

SEQ ID NO: 87471 - DNA, 414 bp, Oryza sativa
  Clone ID: PAT_MRT4530_86412C.1
atggcggcggccatggcgctgcaggtggtggccggcggcggctgctgttgccagcggcccgttcttggagctggtcggcggcggttggcggcggcgcgtgcggtggcgtcggacgcggcggcggcgaaggtgagcgaggaggaggggaaggtgaggctgggtgggtcggaagtggcggtgagcaagctcggcatcggcgcctggtcgtggggggacaccacctactggaacgactccgagtgggacgtaggtctggttctaagcagctcaaagcagcaggggcagaaagtgtgtgatcaggtcatgcttcccatgcgcacaagacaggagactgcaggaggtaaagcagcatttgacacaagcatagataatgggatgaccttatttgatacagcagaagtttatggtacagcg

SEQ ID NO: 87472 - DNA, 467 bp, Oryza sativa
  unsure (1)..(467): unsure at all n locations
  Clone ID: PAT_MRT4530_86413C.1
ttggatgggccccatagactgaacagcatgctgtgatgctagctgctatgcaataccaaccaggcagctgtgcaaactgcaaacgaatgtgcagacaggttgaccgggatgaggcctgggactggcccccatgcaaactgaaatgcgtgcaagggtgcgtgtgctgtgctgcgcctgatgcaaacttgccggatgcaagcagatgcaaaccgagtgcgaagctgcaagatgagcatggccatggttgctgccncggagatgacatgggatgaattgggatgagtgcagatgccctgtgccngtgttggaggtgcactgatggtgaaaaaaaagaggatgggtgttggagattggattggattggttgcgggacgggagccagcttggttggtggtttgggttgctgggtgtttgctcaatgttggatgatgatgctgctggctgctgaatgtgcaaaaaaaaaaaaa

SEQ ID NO: 87473 - DNA, 809 bp, Oryza sativa
  Clone ID: PAT_MRT4530_86414C.1
gcacgagggaacaccttgtgagcatggcttcatcatcactggttggagccgaagccggcgtagctgaccgcgggagctgtggctcgggccgcctctacttcttctgctgccttgcatcaacgccgggagccgctggacgtcggggagagtgcgtcgaacacctgcgtgcgctgccgacgtcgattcgcccctgcttcacccgcaccgtgccgcgcatcaccgacctatgccgttgctccaccgcacgattccgagggagtggttgagttgactgcaaaacaaggacagcaagacatgtgagcaagatgagatgggcgcattccactctgcatgcatgcatgcaggctttaaatgtgtagctagtctcttcgttaaacatgcatggatttaattcctctcagcaaccgaacagtattcttttgcatgcatgcaaatccatccgttgcctattcgcgagcggtgggcgcggacggttgcggtgttgcacacacgcgtatcgtgcatcaaccgaagcgtcgcttcctctaaatccatgcagatgtagcgatggttaaatgcgtcggagagttccttggtcttggtgcaaaacgtaataggactgagacttttggaaggagggagtatatatgagtgagaccaatgtttacttgaactttatcttatttagtcttctttacattgagaacatcaacataatgaaggtttgtatttatgtgtctttattattgctacatgcgttctccatgtgtagggaacaaaccccattggtttttctctaattatgcaaaaaaaaaaaaaaaaaaaaaaaa

SEQ ID NO: 87474 - DNA, 2550 bp, Oryza sativa
  Clone ID: PAT_MRT4530_86415C.1
cggtcgcgtggggccatttctcccccccatctcctctctgcttgcgagcttgtcaaccgcgcaaaggttcatatatacaccgatcgaaatcgatcggtgtagagccacactcttggagtcgatcgttcgctggttagctaactaagctaagctgagctgccttgctctcttcgacgatcaggttgcttggtttgacgagctgacgatcgaggagaagaggacggcgaacgttttttttgcaggatcagtactagggttcatcttggagaaccaatttgattcgatagaacgagcgagtcgaagaagatggtgctcgcgagcacgccgaaggtggtgctgggatgcgtggcgttcacgatcttctgggtgctggccgtgttcccgtcggtgccgttcatgccggtgggtcgcacggcggggtccctcctgggcgccatgctgatggtgctcttccgcgtgatgacacccgaggaggcgtacgccgccatcgacctccccatcctcggcctcctcttcggcaccatggtcgtctccatcttcctggagcgcgccgacatgttcaagtacctcggcaacatgctgtcgtggaagagccgcggcagcaaggacctcctcttccgcgtctgcgtcgtctccgccgtcgccagcgcgctcttcaccaacgacaccacctgcgtcgtcctcaccgagttcatcctcaaggtggcgcgccagaacaacctcccgccgcagccgttcctcctcgcgctcgcgtcgagctccaacatcgggtcggcggcgacgcccatcggcaacccgcagaacctcgtcatcgccgtcgagagcggcatcacgttcggccagttcctcctcggcgtgttcccggcgatggtcgtcggcatcctcgccaacacctgcatcctcctctgctacttctggaggtacctctccgccgaccgcgaccagctcgagggcggcggcggcgcgcatggtcccgaggtcgtcgccgacgaggaggtcacctcgcaccggttcaccccggcgaggatgtcccacgcgtcgtccgtcaacgacagcgactgcatcagcgagcccatccgccggagcgagagcatgaaccgcgccgacgcgctccgcagccggagctacaactccgagggcgacatccaggtcgccatccgctcgctccgggcgtcgagcctgtcgcgcgagatggtggaggtgtccaccgtctgcgaccgccgcgacgtcgtcgtcgacggcggcggcggcggcgggccgcgcaagatcaccaggtcgacgagccaccagcggagcgtcatcatcgaggacgcgccggagcagcaccagcatccggccggccttttcgacggcgagaaggacaaggacgacgaggcgatcggcaagcggcggcggtggaaggtgatcgtgtggaagtacgccgtctacctcaccaccctcggcatgctcgccgccctcctcctcggcctcaacatgtcgtggaccgccattaccgccgccctcatcctcctcgccctcgacttcactgacgcccaagcttgcctcgagaaggtgtcatactcgctgctgatcttcttctgcgggatgttcatcacggtggatggattcaacaagactggaattccaaacactctctgggagctcgtcgagccgtatgcgagaatcgatagcccgaaaggcgtcgttcttctcgcgatcgtcatccttgttctgtcaaatgtggcatcaaatgttccaacagttctactgctgggcacaagagtggcagcatcagccgcagcgatctcccctgcatcggagaagaaagcctggctgatcctggcctgggtgagcacggtggccggcaacctgaccctcctcggctcagccgcgaacctgatcgtctgcgagcaggcgaggcgcgcgcagttcttcgggtacaacctcaccttctggagccacctccgcttcggcgtgccgtcgacgatcatcgtcaccgccatcggccttctcatcgtcatgagctactgatgaacaagcctcaaatggagaagaagaagtaagtaagtagcagcaatcgaaatcacgtagcagcagtacaagattgaaggttttactactactactactactatttcagctggtttcttccacaaaggtaaagaagaatggaaggaagcagctgtggatatgatggatgcagatggggactgaactgaaatactaggttcagctgagaaaaaacaatgtgatactttgtaatgtgttttttgttgttatagctgggttttgtgttctgtacttgtaatcttttaatccatgcatgcatgcgcgaagcaaaattaagcgcgaggttgtgtcgctaattaatctgctgaaaagcaaaaaaataagtgggggcagattattgtttgtagatgatgataattaatgacccagtcgatggaacttggaattagtcggcgtactttgtaccctgttgtaaggtgaagcaaggcctttgataggaatggatatatggtgatgttattttgcttcaaaaaaaaaaaaaaaaaaaaaaaagggcgccgc

SEQ ID NO: 87475 - DNA, 294 bp, Oryza sativa
  Clone ID: PAT_MRT4530_86416C.1
atgccgtccaaagagagaaatggtgtagtaatcagcatgtacggtttggcaaagggatcaccggacgacgaaatatatggacgaaaacgcaacgagcccagcgagaagggcgcgcctgtttttccattgcaatcaagccaagaagcgtgcaaacgccgcgccgcgcaccgcgcaagcagggcatcccccggcgtccgaatatgggccaagaccaccatgggcatcgtcatccggctgcaaactttcctcctcttaccccccctagtagtcgactctcgggaccacgctctctga

SEQ ID NO: 87476 - DNA, 2316 bp, Oryza sativa
  Clone ID: PAT_MRT4530_86417C.1
atgccgccggagacgaccgaggcggccgccctgaggggggccatcctcgccgcgtccacggcgggggcggcggggagggcggtctcgtcggtggcggactacctccgccgccacgcgggcgaccacccgcgggccttcttcgccgacgcgctgccctcgctgctcttccgggtgttcgtcgcgtccccggactcgccgtccttcatcgatctcgccgccggggaccccgcgctcgccgagctcctcgcgtcgctgctcgccccgtcagggccgctcctcgccgccgtctccgccgcggatcgccacgcgctcctccgattcgtgttcccacccgagcggctacccgattggctccgcctcgcgctgtcgtccgccaccgccgcctcctcctcctcctcctcctcctctgatgaggtgatctcccctctcctcgctggccgcgtcgactccgagcttcacctgtcggtattcgaatactacctcttctggttcgcgtactaccccatctcagctgccacggccaaggccacaggaatggctgcggctcgggccccaaaaattccgccctccatttcagaacaatcacttaagtcgctcggccgcattgagagctggatgtccaccctaggttcatcagccggacgcaatctgggtcagaagctagagagctcgctatatctgaagcttctgtactcctaccttaaggagttcgtgcccagcggatgtgtaccgccgcgtaatatgggtggaactctgctgcatcgaactgtcaatgatggtattgatgctgctgaatccttcaggcgagctgagttcttcgtgcacacactcatccagttctggcttgttggagatgacttctcgccactggctgtgcagacttgccgtgcatatgggctccctttactgtctcttcagtctcatgcaaatgccacattggttgagcagccgccagcaccaggactcggcgatgcggtgaagctttttgtgatgtatatgaacaggatcaatgcttctgtggatatagatgcgccaaatgtcttcgagggaatatcttcatggagggaggcatgcaacagccctgttggatactggaatccattgatacagaggcctctgtatcgatttttgctcaggacattcttgttctgccccatgggtgtagaaataaagaatgttgcacaggttttctctgcatggatagtctatatggagccatggaaggctcagaaggatgatttggatgcgtatgatctgcctcctccaggttgccacaatgtgcaccgagttactgagggaaagaggcaggtgtctgaagcagtgtactctccagaatgggagaactttgtgctgtccaactacttgttctacagttctttggtcgttcatttcctggggtttgcacataaatttatccactctgatgtttcctcagtgttgcagatggtatcaaaggttttggaggttttggcatcttctacagaattattggggctcatctacagtgttgatgctacatatcatcatagattttttggttcagcatcttgttatttggatcatgtgcttaagtatgtgccatcaatccgagaacagctacaggactgggaatatggtttatcagaaagtgatgctgatgggtctttcttgcatgagcgtaggaactttaatctgaggcttttcagctttgatgaggaaggggcttacaacttgcttcagttgctgttgctacgggcagagtcagagattcaacgtttgccaggtgatgctatgcaaagtcttcagactctggatttaattaaatcccagatgaagaaaattttccgtgaacacattgaaagttcccagcctatgaacttggtagagagagaatgcagtcagcaccatgggcgtggtgaggtattcgcacctaagcatccaaggccatggaaacactcactagctaatgtgaactggatgacaaggcccatctcagactctgaagtggcctggctagcaagtttgctgatccgtttttctgcttggctgaatgagatccttcgactcgaccgtgacgattcagatgctatccccacaggcccaaccaacatcaagtttgatggaaatgaacttaatggggttgggggcccaaaggatgctgccagaatggtgtttattggtgcttgttcattgcttgtgctggtggggcagtcaatcctgcacttcatgaggacacacagtattaggatcaatctgagaattcttgcatctaaaaagcttctcactgctgttatgttgtatgccttgttcactgtggcaagaaatgcgctgtcgtaa

SEQ ID NO: 87477 - DNA, 322 bp, Oryza sativa
  Clone ID: PAT_MRT4530_86418C.1
gactactatagggaacctgtacgcctgccgtaccgcaccggaattctcggcaagatctcacacgtccaagcaaacccgagatctccaaccttgcgaaggggaagcatggacgagatctactggcggcgccgccggctgcatgaacgccgtaaactcagtggtcgactcgttgagcgagttcacaaaggacagcgtacggattgtaaagcgctggcacaagcgacaccgaaaggagttcaccaaggtggctgcgaggactgctatcggattcttatttatgggcttattaagattattattgaagcttatgtttattccgatc

SEQ ID NO: 87478 - DNA, 1878 bp, Oryza sativa
  Clone ID: PAT_MRT4530_86419C.1
cccgcgccgcccccccttccccggcccccgccgccctcgccgccggccgcagcagggggcgtgctcgacgggcctgagtgcgcagtgggggcgatgtcgatggaggaggcggaggagtgctcggcggcgtgcggcttctcgctgacgtgccaagaagacggcgccgacctcggcgacggcgtggtcgacgacgacgacgacggcgacgtattcttgttctacaatgccgttgcggcggcggacgacgaggaggaggaggaggagtacgtggagcagatggtctccaaggaggctagcttctgctgctcctcttcttcctccctcttcgacgccgccgccggcgacggctacggcgacggcgacggcgacggggactggttccggcaagcccgcctcgccgctgtcaagtggatcctcgaaacgagggggtacttcgggttcggccaccggacggcgtacctcgccatcgcctacttcgaccgcttctgcctccggcgacgcgtcgatagggaggcgatgccgtgggcggcgcggctgctgtctatcgcgtgcgtgtccgtggcggcgaagatggaggagtaccagtcgccggcgctgtcggagttcgacgccggcggcggccgcgtgttctgctcggactccatccgccggatggagctgctcgtgctgtccacgctggggtggcgcatgggcgccgtcacgccattcgacttcctcccctgcttctcctcccgcctccaccgccaccaccacggcggcgccggcgccgccggccatggcgccgccgccgccgcccgcgttgccctcaacgccgtcggcttcatctttgccacagctgaagctggaagtgtgctagattacaggccatcaactgttgctgcagctgcaatcttggctgcatcctatggagctccactgacaaaagaagcattggagtccaagatgagcaacctttctccatcttgtcttattgacaaggagaatgtacatgcctgctacagtatgatggttggggacatgaacaacaacaggaggagcagcaagcgaccattgcaatgttcagactccaatgagattaccaccaccagtacatatgattctgttcttgttgatgatgttaccgacaccgccgccttcgctgcgacggcgatgaataagcggctcaggccagagccgccgcgaatccgttgaggaagctagcaccaccagggacacacaatttttagtcagatgtctagggggcgcttggtttggatcttctccttttccccttctttttttctccctttttttgacataagtttccaaaatatttattaggttctttgagccattgccattggttggcatttggcaaatgttgttggattggattggtttggtttgtgagaaggagaagagataatgaacaaaggaaaaaaggggctgagtgagctctcctaaggagaggagagcttgagttacttgaagccccaaattccagtgcccaaatggagcacatttcctctgaaaactttagtccaaagctgcacaatttgaaatgccattgtggatgccatgtttcattgcactgcatgtctgcatatggtgaagatgctgttgcatgcagaagttgcaaaaccagcagcagtgttcagaaaaaggttggccattgtttatacagcctctctgttatttttttccctctcttcttgcaagtggatgatgtgtgagagagtgtggggtttcactcagctgcactgcagttgcatggggttactataccacattggtttttgttacaagctatgccatattggattggttgtcactgtaagcttctgtaaccagtaaccctctccctgttcttgagaaatgaaatctgatttcatttggtgt

SEQ ID NO: 87479 - DNA, 1139 bp, Oryza sativa
  Clone ID: PAT_MRT4530_8641C.1
atgagtagagtgtccactagttggggttttgtttattccagggtgaacaagccgagggggaggggcgcgcggaccgggttcacgggagtggggcccacgcggcagcctcacggtccacggtggaccgggtgcacccgggctcacaccggccggcgccgtgggccccacacgtcagccgcacccgagggcgcgggcggctgacggccgggccccacgcggcagccactcggcgcgcccgagggcggccacgccggcgcggtcggcgggaggcggcgcgcccacgccccgatggtcgccgccggcgaccaccggcgcggcggagcggcggccgagagaggggagggaagggggaaaggaggcgacgatccacggctcaccctggggcgacggcggcgacggaggaggcggccggagcagagggaggcggcggcgcggctcgggtcgacggggtcgacggcgttccggcggtcggcgaccgaaacggagaggtggatgaggtcggcgaggatgcggcgaacccgaaggaggcggtgccgaggtgggaggcggtccggggcgacgacagcggcggaccggagcttggcggcgacggcggagagagagagcgacgtcgcgagctcgaatccggcgaggaggaagggcggcgagaggtggaaacggacggaggaggtgtggggagggtttaaatagggttggaagggggagagagcggccggaggggaaggaaaccggcgcaggaggtccggccgccatcaatggcgccggcgagatttgcgggggcaaatccgcccgtttgaacgcgagagagagagggaaaaatggggggaaagggagaggggatcacggggagtaattcccccctattgattgaacgcggggacgacgggatgcgacggattcggcggcggcggcggcgctaggcgcgggggaggcggcgggagcggcgggaggtcggggatgacgggtgggccccacccgtcagcgagggtggcgggcgggcccgcccgtcagcggcgcgcgcgcggggagaggccgagtgggccgcggggagaggagagagagggggagagagatgggccgaatttggcccattagagagaaggagggattttagggtttttctttttataaaacctttt

SEQ ID NO: 87480 - DNA, 1807 bp, Oryza sativa
  Clone ID: PAT_MRT4530_86420C.1
cccgaatttaacgcggagcgaagctcagagcagagcacgccggccatggcgcgcgcctcgagctcctcgtctccgccgtcgccgcgcctcctcctcctcctcctggtggcggtggcggcgacgctgctccccgaggcggcggcgctgggcaacttcacggcggagtcccgcggcgcgcggtggcggtctcgccgcgcgcggcgccgcgccttcgagaacggcctcggccgcacgccgcagatggggtggaatagctggaaccacttctactgcgggatcaacgagcagatcatcagggaaacagctgatgcattggtcaacactggtctggcgaaattggggtaccagtatgtgaatatagatgattgctgggcagaatatagtagggattcccagggtaactttgtgccaaataggcagacgttcccctctggtatcaaggcactggcagattatgtgcatgcaaaagggctgaagcttggcatctacagcgatgccgggtcacaaacatgcagtaacaaaatgccaggatcacttgatcatgaagagcaagatgtcaagaccttcgcgtcttggggagttgattatctgaagtatgacaactgcaatgatgctggcaggagtgtcatggaaagatacactagaatgagcaatgccatgaagacctatggaaagaatatcttcttctcactctgtgaatgggggaaagaaaatcctgctacatgggcaggccgcatgggtaacagctggagaacaactggcgacatcgccgacaactggggcagtatgacatctcgtgcagacgaaaatgaccaatgggctgcctatgctggacctggtggatggaatgatcctgacatgcttgaagtgggaaatggtgggatgtctgaagctgagtaccggtcacacttcagtatctgggcactagcaaaggctcctcttttgatcggatgcgatgtgcgctcaatgagccagcagacgaagaacatactcagcaactcggaggtgatcgctgtcaaccaagatagtctaggtgtccaaggaaagaaagtacaatctgacaacggattggaggtttgggccgggccactcagcaacaacaggaaggctgtggtgctctggaacaggcagtcataccaggcaaccatcactgcacattggtcgaacatcgggctcgctggatcggtcgcggtcactgctcgtgatctatgggcgcactcttcgttcgcggctcagggacagatatcagcatcggtggcgcctcatgactgcaagatgtatgtcttgacaccaaactagtcagcaaagaaaagcagcacaggttagtacgtgtccggcgaatacagctaaattgatcaggattcaggaagaaggtttgcaatttgcaaggattggtagagctggaaatgggatgccatttggttatgtatgtagaaataagctgtaagcctgtaagcgtatatgtaatcagccgtcaaatgctggcgagtgtatttctgaagtttgcaacgaaagttgcagcaataaaaatacaaaaagaaggctttcctgccactatataaaataaaaaaaaatgaaaaaaataaaaaaaaaacaacaccgcctcaccaacggccccgtcgagctccagatggaccccatcaccacctccgatgaccacgacgacgacgacgagctcatcatcgataggaggggctggatgaactggaggacgccggagaagagggcgaagaggatgctcgaggaggaacaggaggagctggaggacgaagccagatggaggaataagcttaaggaggaagcttaa

SEQ ID NO: 87481 - DNA, 420 bp, Oryza sativa
  unsure (1)..(420): unsure at all n locations
  Clone ID: PAT_MRT4530_86421C.1
cgtacgnggacgcgtgggcggacgcgtgggccgactcgtgtgtggcggtggggtcggtgtagagcggatgttgtaggtgcacagggcggaggaggtcgacggctctagtgatgaaaaaagaaagagagggtggtggtggttgagttagcgaagagtcacagcgtgaacaggagtcgtatatacctgtgcatggtggaacttagatgcaattgaggggacgtggacttactacttgtatagtgtaaaagtatacgaactcgagttattngacttagagaggatattactttcgagagatagtttagattataaaatggccccaagaatgtgcattaggaggagttgatcgaacatgaatggttaattggacacgttctatagtagtgtattaagcactgcgggtatgatgatttatattag

SEQ ID NO: 87482 - DNA, 232 bp, Oryza sativa
  unsure (1)..(232): unsure at all n locations
  Clone ID: PAT_MRT4530_86422C.1
aaccatcagcatccaaggggtcatccatccattggnataagctccccatgatgcatgctgcatgcgaagctcaaaatggttgcgcccttttacaggttgngtttcagcaactacccactattcatgcagtgggcagggagctccaagtataacatcaccacaatcattggtcactgtgcactgctgttgtgtgttcctgcaccccggtggcacattcccgggcacctgggta

SEQ ID NO: 87483 - DNA, 260 bp, Oryza sativa
  Clone ID: PAT_MRT4530_86423C.1
ctgtcaattcgtccgaccacgcgtccgggtcgatctcaagtctgacttacaaagaacgggggtccgccttgctcagaatgactgttatatagatgccatctgacccgttgtaatgggacacctttctcaattttaattttaggccatacctggggtatcttaacatgggtacctgctatactctcacaatgccatacaggctctgaatgaaaataatgggacggcttgtgtcctggagtaggttatttattggggcactt

SEQ ID NO: 87484 - DNA, 1710 bp, Oryza sativa
  Clone ID: PAT_MRT4530_86424C.1
atggcgccacgtaaaaaaaaggaagtgttcgcctcgtcacaaggcaagcaaatccgctttctccattacaaagcggagaccccgccgcaacgccaagagccaaaccgcctcctccttcccaaaaggccaaaaccgcccacctcctctcgccccttctcgccgcctccgccgccgccgccgccgacgaggaggaggccgatgggctccgaggaggagccgtcgcagatgcggagggcgctggtggacgcgctcgcgggggccatctccggcggcatctcccgcaccgtcacctcccccctcgacgtcatcaaaatccgcttccaggttcaattggagcccacaacctcgtggggtgtacttcgaagggatgtctatggaccttccaagtacactgggcttttgcaagcaagtaaagatattctccgagaggaagggattttggagaggaaatgttccagccctattaatgtatatgccatatacagctatacaattcactgttctacacaagctgaaaacatttgcttctggttcatccaaaacagtccttacctgatctgtgttatttgcccagaggatcatttgcacttgagtccttacctatcgtatgtaagtggggctatagcaggatgtgcagcaacagtaggatcatatccatttgaccttctcagaacaattcttgcatcacagggtgaaccgaaggtttaccctgacatgaggtctgcatttcttgatataatgaaaacccgcggtttccgaggactttacgccggtctaactccaactcttgttgaaatcataccatatgctggcttacagtttggttcatatgatactttcaaacggtcgatgatgacatggaataggtaccgatattcacatcttaactcaggaagtgaggatgattcagtatcaagcttccagttatttctttgtggatttgcagccggaacattttcaaaagctgcttgtcacccacttgatgttgtaaagaaaagatttcagattgaaggattaaaacgacatccaagatatggcgcccgaattgagagcagcacatacaagggcatgtaccatgccctaaaagagattgttgcgaaggaggggtttggaggcctttataaaggacttttcccatctttggtgaaatcggctcctgctggtgccgtgacatttgtggcatatgaatacatctcagactggatagggagcaaagctggagtcgagtgagttcttggatgaaggagccattgagagatacaacatacaatgatgagagaacagtgtccactcttaattgttttgtgaccgcaaggtcgaaagttaaaaagtgcatacaatcccttgagagctgatacttggaaagccttgcatagaattagctactcttgtcatttctctgcctttttgccccattgacctgtgttgttgcattcgttgagatgtaacagtgaggatgagtaaaactaaggaaagtgtagagcttgtgacgcttgatgaaggccggggagcggcaggcatttttgttaagatgatattatctcactcctatatgtccctcactcacataatgcagttaatgtgaactgttacatgattcgtagcttatctgcctttatggctcatgcaaactgtaactctgggagactgggactgaaagtcgttatttgcttcgtgatgagtagcaaaaaaaaaaaaaaaaaaaaaaaa

SEQ ID NO: 87485 - DNA, 1241 bp, Oryza sativa
  Clone ID: PAT_MRT4530_86425C.1
tggatcttacattgtactttaaaacttctccagaaacaagagtgtacggcgtggatttggtagctggacatgccaaagtccaagttgacatggtcaaagacaattgctgaattggcaactaccaatcccaccaaaggacgagatacttacactcgctcatgcacgtggaatgtttatccaatggccaaaagacctcatcaccacaaagattattccaaggtcaaatgttgcagcaggcccaactcatctagctcggtcagctaaagctcatgcacctcagatggccattgaagctccttttgggtcccacgtcttggattttggtggaatggccatagatcgtcctccttcaaagaaaagaaaaggccaattcatctccaccgatggtgtctagcaggccaaatcatggaaggggaaaattgaaaggaaaaggaaaggtaggagggtcgtccttacctcccaaacggctagatctagataaggaggtgtacgttgctctcaagatcctagatcacgacacattctggccagggatgccgttggatcaagacaatgaattagccagaatgggcactattactcgagagctgcgtcggtactacgtggataaattgaactccaagaggaagaatagtgatatgtccatactgggtcatcatgaccaagcgcccttcctggggccacccagttatatcatagtgggcttctctgatcttttcaacctctttaggctacgagcggtggacaccgatctcccaaagtgctactcattgttatgttggatggaagcacggaagaccagaagtcaagttagattcctagatccacgtcaagtcaatgagacacaacttaagtcttgattggatgatgtggtcggttacatcatgaacaacttgagggcccactaggacaaaggcttcatcatattagcacacaatcaatagttccattggattctattgtgcatagtgccaaaatggagtaggttttactatcttaactgccgcataagcgacaaatatgactttaacgctctcaaagaggcattgaacacagcatgggactaatacgtgcaaaaatgggcatgcatcaagaaggaaaaatccaacctctatcaccatgacgacttcaaatgcaagcaacaatccagcgagacctgtggtttccacgtgtgccataccatgaaggtcctcacaggacaggtgactgcgctagatcccgaggtttgtggtatattgatt

SEQ ID NO: 87486 - DNA, 883 bp, Oryza sativa
  Clone ID: PAT_MRT4530_86426C.1
cggacgcgtgggggggtttggaggcctttataaaggacttttcccatctttggtgaaatcggctcctgctggtgccgtgacatttgtggcatatgaatacatctcagactggttagagtcaatactgatgtgacaaatcgccatgcagtgttattcattttcctccccgttttgtgttgtattgtccttattatttcgccctgctgttgcacacttgaattagtttaattgatccatttctggaagaggctgcagttcctttagatcttgcagtctatacaagatttgaggagcctacaaaaccagctggatgagtaatgcttgtaagctcctctcatgggttttggacatcacttaacattaccagaactaagcagtcagattggtgatttaagcatttggcttgctagatatctgcttacgtgctcagccagacctacctgttgcttttttttactgaacatgctacatagttctcttgcgtgtcactgtgtcagtgtgtgcataagtgcattattgtatgacatcaaatcactgaatctgaaattgttttgcaggatagggagcaaagctggagtcgagtgagttcttggatgaaggagccattgagagatacaacatacaatgatgagagaacagtgtccactcttaattgttttgtgaccgcaaggtcgaaagttaaaaagtgcatacaatcccttgagagctgatacttggaaagccttgcatagaattagctactcttgtcatttctctgcctttttgccccattgacctgtgttgttgcattcgttgagatgtaacagtgaggatgagtaaaactaaggaaagtgtagagcttgtgacgcttgatgaaggccggggagcggcaggcatttttgtt

SEQ ID NO: 87487 - DNA, 717 bp, Oryza sativa
  Clone ID: PAT_MRT4530_86427C.1
atggggcgaccgggcattggtcagactaccatgggagttgcggtccgaccagacaacacactccggtcggactaccataagggctgcagtcagactacagggcatatcactaacagggacggcgaggacgggtcactgacgaatgctggaaggacgaggcgtgcgccggcggtggcaagaggacgacgtcgtgacgggcgaacggatgacttcctgttgctactgctctttgttgtgaacgaatggatggacttgccacccgcggtgagaacgcaccgcgacaagcggctgtggcagacggcggagatgggcacaacgacgggcggtgaggccagatttggtgttgagtcgaccggatctgatccccgccgatctggcgggaggggaggtggcggcggcagctcggtggcaggaggggaggcggcggtggtccgacggctcggcggtggtgcgctcccctccgtcaaatctggcgggaggtggcggtggcggtctggcagtggaaggggatacagcaacgacggcttggcggcggtggtccgacggcccgagaggtggcgacagtggcttcccgcgacagcgacagcggtggtggtggagaaggcagcggcgccctcctcctctccatccgacgatgacggcggtgatggagacgtcagtggcggcggtgcggtggagaaagcagtggcgtcctcctcccctccatccagttcttga

SEQ ID NO: 87488 - DNA, 265 bp, Oryza sativa
  unsure (1)..(265): unsure at all n locations
  Clone ID: PAT_MRT4530_86428C.1
ggnnnntttttttttttttttttttgggacgaaaaattttttggcggggaccccacaaaaaaaagggcccgactaataatggttaggggggggaaacttttttttatttggggggccggggttttaaattgggggcgccggccgattgattgaaaatccttgtaaccccccttgggatcattggccacattgtacggggggggggggacagtctccaggggtgcaccctaaaccatgaagccgggcttaggaccctgggggtgcc

SEQ ID NO: 87489 - DNA, 2886 bp, Oryza sativa
  Clone ID: PAT_MRT4530_86429C.1
tcagttgacactgctgctgatgccccttacccattcacgacccatcagctcttttgctctggccacaagagcggaaagtggtgtgttgtgctccatgagtcctgtgtctcctgaaaacaacttgtagttttcagatctcgagggcgtacgttctaccattgatagtgtttccaccatccagcatttgtggaaatcatttgcatagcgagaattgaactccatcaagtatatggcatgctgaacaattaccctcctgatgccaggacaatgggcactgggtctcatatgtgcattaagcacatcgacaagcctctttacgaatttttccttaatttgaccatgctctacttctcgggcaaagtcttcaggaatgactttacatatttgtgaactaaggccaataaagacctctagttctgccccttctgcatccattgttcgttccagcacaatgctatcaatattaagagcacatatgtgtatgctttgagaaacaatgtgcaaactgcaggtcggttctccctctcgtaagatgtaagacagttccttcaggtctgagttgctgagctcaggctgagcatgctcgcacatattccacagcaggcttgctgctgtacatttgtacctgttatcatggatcatagttgtaagttctctaatgaacacataccctggttccattaacataaccaaacagttatctgtactctccattgccagaattgccagtgcttgaccagcatttttccgtagcaagtgattacagtttctacttgaggatggatcttggctgagaaattcacgcatcaaactactgatgatcactcggatgtgcccgatgtcctcactagtgtttctatccatggcaaggttcttcaggatttctgctgccaactgcttcaaatcatggctgctcccattgtcatccatgatctctgcaagattgctcaatatgaaggtatgttccaaaatctgttgccgcagagttacacctaacttcccttcagcacttgcaagtcttctcagcaccctaagtgacaaacttgccagcattatttggtgggcttcactagtacttgtcatatgatttctgtagcttataaaatctatcatctttgagatgaggcctgttgttctgctgatttccatgcagtttccaggatcaaagttagcaagcctctgaagaattagcagtccttgtatggggaggaaatcttggtccgtggatggctcctcctctggaactgaccagcgttttgtgatctgcttccaccatctgagcaaacgtgagttccgttgatgcgtgttagatggctcatccaccggaataaaaaaatatattgccatctgtttcaagtacttaagcacaggggagttctgttcagccatgccaacttgctgaattggtgagtcttctcttcccacttggctatcaattaacagaaaatgatcccttattctctgttggtgatcagtgtccagaagtgaggctacaagctgtgttgccccagggatttgaacaactcggaggctaccagcaagctcggcagtgacctttgcggcgaagaatctgatttcttcatccccgtcacttgtccagcccagcatatcgaacaacaaagctaccgtcttcttggcatttgtgagttttgtgattgttttagtccttagctgctcctttttgagaaatctgtgcagcatctgaaccccatagagcttattcctggatgagtctgagttgagggaatccatggcaaatgtgatgaggctgatcttctttggagcaagcacagcccctcccatgcatttctcaaaggcatatgcatagtacaaattgacatattccactcccatctgacctccaaatccgctacggcggatgaggtatctccgagggatgaatgaaaatacctccagtaagcaggccacaatgtagagaatcccttgtgcaagcaccatcccgtagaagatgtttagtgacggctcgaggtttttctcgctatcatgctcaccattcttgtcatctaccaagtatttatgcggtttctgcggtacaaggcgtagcagtgcgaggacgacacgcacaacagctgctggaatctggaagttgccaaatgacaccaccactagagcacaaagctggtacacgatcatcgcatatggaccgagctcactgaaaatgaataccagcatcacaatcgcagcaagcatgcacaagtttagaatgatttgacgccaaactgactgtttggtgttgggaaaactgtctgctagttttctgatgcatgggagccgcagcctgctgattgtcgcgatcaataggatcgcaagtaatgggctccacagcgatatagcatgtcgtagcggatcgcaaagtagttttagagctgctggagacagcaactgacccaatgcaagtagcatcgccatatccacaagtaaagccaccaatacattaccaccaatggaagcgagagagcgtgacaggatcaccagcacaacggaaaaatataccgccacagtcagcaacccgctccagccaagaagtctaaaagctcctctagtactgaaaaataactggtaatctagcctgttatcgcggctaaacatcctggcagcttcgaggaagaccatggtggtggcgaaccagaaatcatcctcaggacggagcacggttgggtagcctcctagcaggacaacggttgcccaggtgaaggccagcgtccccagggcgttgcccatcctctcgatcactgcaaggatgtgaacgaagcagttcagctgcttttccggcgcagctagctgcttctgccgccggccgccgccgccttgagccggcatttggacgcggtgctctccgccggtgatgtccgccgccaccgccat

SEQ ID NO: 87490 - DNA, 1082 bp, Oryza sativa
  Clone ID: PAT_MRT4530_8642C.1
ggaaaagaggatttattgcgtcagcggctagggtttcggtggaccgggcgcacggcggcggttcacgcgaacggacggccgagatcgacttgatccaaaacggacggctgagatcgatcggtccacgaccggctcacggcgaacggccccgatgacgtcagcgatgacgtcaccaccggcggcggcggctcggcggctcgggcttgcatgctcgctggcgaacgacggcacggcggcgcaaacggaaggcaccaacgggtagagcgcgacgcgacgaactcaccggtgaccaaaagagcggcggaagatcaacggacggcgacggcgacgacgaagaaacggtggcggtcttcaggtcaacgacggcgacggtgctccggcggtcaacagcgacggcgaaggagtggacgaggacggcgacgcgatggcgatcttcccgagcgacggcaacgtctggaacggcggcggcgcacggctggagcgacggcggcgatggcggcgctagggcacacggcgttagggcgctacggacgacgagaggcgaaggcgagggtggcggcgggtagagaagagctcgggggtccttttaaaggggctcggaggcgacggcgaaggcccacgacgaccggcgacgagaaggaaaggtcgggcttggagagaggaaagccgatccgattcgaactcgaatccatcgatttccaaaccgatttagccgaagcttccaaaggagaaaaggtagaggagatcccgaggatcatttcccctctatcaattcggtcggagaaggaaaggaacggccggatttggaaaggaacggcggcggcgcgaaactagggtttcgggcggcggcggccggaggtagacgacgggcctgacaagtggaccccacctgtcagcggcagcgagggcgcgcgcgcgggcggcggactgggccggctgggccgaggagagagagaagggtttttgggccgactttcggcccaaagccaaaagaagactttttaaaacctttttcaatttaaattatttcttagatgcaattccatttattaaaaatacttccttagctcaaatcaatccca

SEQ ID NO: 87491 - DNA, 330 bp, Oryza sativa
  Clone ID: PAT_MRT4530_86430C.1
atgcagtccgcaggaaagcaccttgatgatgatctcgtctcctacatccttgctagtatggatgttgattttaatccggtggtgacatcagttgcaaaccggactaaagctatcactgtgggtgaactctttgctcgacttgttagctttgagactcgtatggagtcgtggaggctttcgaccgcaggcaaggtggtgactgcggccgcggacgtcggcgcgacaataacattcatcccatggaaacaaatattaattgttagatttgtcattataattgcttccaaattatttctccttccattttattcatattataagatactttga

SEQ ID NO: 87492 - DNA, 160 bp, Oryza sativa
  Clone ID: PAT_MRT4530_86431C.1
atggctagttttgaaagtggctggcgatgttcttttttcgtcagcgagttgattgctatgtcgagcagaaacgtcccgacaaaccataatgcgtatatctttaagcccaactccaaatcactcataaatcctcttggccttatcgcggcgaacggaacgg

SEQ ID NO: 87493 - DNA, 189 bp, Oryza sativa
  Clone ID: PAT_MRT4530_86432C.1
atgccgccgcacaccgtgtacttgccgttcccggcacaggggcacatcacgccgatgatgaagccgccgccggctcctagtccatgcgcccctcacctcgaccagcagggcgaccagcggcagctagtgatcgagttggaagctcactcgcacgctcgtaggcttcgcagctgctgcaaagaggcgtag

SEQ ID NO: 87494 - DNA, 174 bp, Oryza sativa
  Clone ID: PAT_MRT4530_86433C.1
atgaagtttctcgtagactccgacaagggcatgagcgagaaggccttggccgtgctcgatgccgccctgtgcacggagcgggcatcaaggtcgacgagggggaagcggcgtgccaggggtcgggagatgtcgttgagtagcgccccgcatgtcacggagggggacacggcctag

SEQ ID NO: 87495 - DNA, 3357 bp, Oryza sativa
  Clone ID: PAT_MRT4530_86434C.1
atggagaaggcgaccgcgacgaccaaagtggctggccggagacagaggggaatggatagctcaccggctcacgagggagatggggttccggtggggttccggcgacgcgaggcggtggccgagatggcccacacggcggcggagctagcggcggcggcggcttggcgcggcggcggccctagtggcaacggcacgcggccggagatgggcggcggcgacggagctcggcgagcgtggcgcgacggcggtagagggcgtgggagaggacgtccactagagctcatgaaacgtgtagaaattgggaggagtttgttagggcagtgtgtgcaaaatttggaggaggttttggaatctgttcgaagggaaaatcgtagagccgaggttgtgggaggagcacgcggcagtttcaaatctgggggtttctcttctgtgtcagctcgtgcaattcctggtgttggtggacgagcggatgatcggcgtagtcaggatgatcatcgcacacctgaggacaagattgcagccctacaagcctatcgtcgagcgaagggtttgtgtcacacatgtggggagaaatggagtaaggaatacaagtgtggaccaacagtgcaattgcatatagtggaagaattgttgggtatgttccctagtgaggctgctgatgggtgtgacagtgattgccgggaagatgaagttactgaatctgagggagttctctgtcaaatctccaaagaagctatactcgaatttgctgataagctttctacccagcaatatttctgtccagctattaaggtgaaagtggctgatggagggtctatttttgatgaaccacaagggttgccaccatctcgagtgtttgatcactctattccattgcttccgggtgcaaaacctgtcaatttgcatccttatcgctacaacccagcacaaaaagatgaaatcgaaaagcaagtacgtgagatgctgcaacaaggtgtaattcagcccagtgccaaccctttttcttctcttgtccttttggtactgaaaaaggatgggacatggcggttttgtatcgattaccatcatttgaatgctattattgtcaagaacagatatccccttccaattattgatgagttgttggacgaattgttgggtgcttgtgtgtttactagtttggatcttcgagcaggctttcataaaatccatatgaagctggaagatgaacacaagacagctttcaagactcacaatgggtattacgaattccgggttaagcgctcgaagtgtacctttgccagttcacaactcacatatttggggcatgtcattagtgatgcgggtgtgtccaccgaccctaagaatattgcagctgttgttcgttgggcagtacctcaaaatgtgaaggaagtgcgcggatttttgggcttagcaggatactaccgcaagtttgtgcgccattttggggtgatcagccgtccccttactgatctcctaaagaagcatgtcgtgtttgtttggactagcgagcatcaagctgcttttgatgcgttaaaggcagctttgacttcggcaccggtgcttgcacttcctgactttactcaaacttttgagattgaaactgatgcttcagaccggggagtgggagctgttttgatgcaagtggaccattggcgttcatatttacaatttggggagtttatcatccgtactgatcaaagaagccttattcatttgggggatcagcgtcttgctaccctttggcagcaaaaagcactcaccaaattgcttggactgcagtacaaactggtgtataggaaaggtgttgagaatcgggcagctgacgctctgtcgcgctgtgactctcctgagattcttcagttaagtgctttatctgtgtgtgttccctcctggttggatgaggttcgggacagttatgctagtcacccacatacatccagcttgctttctcaagtacttttgcaaccagaatcagctcctcattttagtgtaacagatggagtattacgttacaaggggcgcatttggttgggccataatgtgggactacagcagaaggttcttggagcattgcacaatgctgctgttggtgaccattctggagtgcaggtaacctatacccgattgcgcagactgtttgcttggcctggtctcaagaagtcggtgcagctctttgtggattcctgttctatgtgtaaacaagctaaggcagaacgggtgcgatacccgggacttcttcagccattacctgtcccagaacatgcctggcaagtggtgtctttggattttatcgaaggattacctctctcattgggattcaactgcattttggtggttgtggataagttttctcgctatgcacactttattgccttggctcatccgttcacagcttttgatgtggctttagcatatatgcaaaatgtgtacaagcttcatggtctgcctcaatctatgatttcagatcgtgactgtatcttcaccagtaatttatggtctgaattgttcaaattgactgatactcagttgcgcatgagttcggcatatcatcctcaaactgatggacaaacggagcgcgtgaatcagtgcttggaaacctttcttcggtgctttgtccatgcttgcccgcgtaaatggtttcggtggttggcgttggcagaattttggtacaatacaactcctcactctgctctcggtaccactccttttgaagctttatatggtcatcctcctcgccacttcggtgtacgttatattgctgaatgtgcggtacctgacttgactgaatggttgcaagagcgtcagatcatcactaatctcttgcgtcagcaccatcttcgtgcacaacaaaggactaaatctcaagcggacaagcatcgttctgatcgggtcttcgctgttggggattgggtttttctgaaggtgacggcgcgtgttggtccggtggcttaccgtttgcagccgccttacgactgtgctatccatcctgtcgttcacgtatctcagctccgcaaggcttcacctccacaatcagctgttgcagttcggcctcttcctcttgttgagtctgaagaattgattccagttcagatcatcgctcgtcgtctgtacaagcgtggcgcggctgctgtggagcaagttaaggtgcgttggatggggcaatcgtcttctgatgctacttgggaggatcttgctgtgctgaagcagaagtttccaactgtgccggcttggggacaagccggttgcccagaaggggggcatgttacagctgatgataaccctatcaagactatcagacgctcagctagagagagacggcccaacactcgtgtaactgggccggagtgggtctga

SEQ ID NO: 87496 - DNA, 2683 bp, Oryza sativa
  Clone ID: PAT_MRT4530_86435C.1
caccccgcgccgcaccaacacacgcagaggtggtgaactggttgatcgatgcttgctgctgctgcgcgtcgaggcggctccatcggcggcaaccgctgatcgatcgatcgatcccgcgggtttcgtagcacccgagcagaatgggtgctggaaagaagactcagaccgagaacgagttccgtgagctcccggaaaaggagctaggaggggtggtcttttgttgcaataacaacacattcgatgaatgcttcactaaacagttatttggtttgcctcaacgcaatatcttgtatgtgaagaatgttaaacctggcttgcctctctttctgttcaattatagtaacagacaattgcatggcattttcaaggctacaagcactggccagcttaatatcgaccgatttgcttggatgtctgaacagtctaatgatgcaaagacaaatgcaaagacaacaccatttcctgcacaggtccgcttctctaccaggacagagtgccctccacttccagaaagcaaatacaaaagtgtaatcataaacaattatcgcaaggataaacctagccacttccgttttgagctagaccatcgacaaacaagagatttgatttctttgtttctacctgctcctgttcgcgctaatcaaaacaaacttagtattccaaaacctcctgctaccgctcatactgttccaaatccatggaatcgacctctgccatttcttacagcaaaagcacctgttgtttctgataaagtgaagagtgaatccaatgtgaaggatgtggatcagttcaatgtttcatcacactcacatgatattgttcctcataccttgcctgatgtagaagtcgaccttgctagcacaagtacaacatcaaggagcaaccttaacaaagatgcttctggctgtgatgacctggttgctggtttgatcaaggaagataaagaatctgtggatgatgaccagcatgctaaaatggatttaccagtaaagctgcaagagctgtcttctttacaacagaaggaagccaatttcttggaggatgctcctgtttctacttcagctcaaagcatacgtcaagatacacggtttgctgctactctccccaaagattcatttaatgccacatctcaatgtgacacatcattgaaagatacatcctttgtgcaatgccatgaatatgctgagctgtatcaaattatcaatgatttatccaagaagaccgaagaaatggaaaagatgaaggttgattcagatcaagaaattttgttgttgaagaaattggtaaaggttatggaaagaaaagttgaacatctggaacagcagcttgagaaatcgcatagctcttcagcaccactcttcggtgtaacaaatgatgatgtagaagggccatcaatactcctaacaggtggccataatggcattaactggctgtcatcccttgattcatattgccctgcaacggacatactagaaactctaatgccgatgagctcagcccgtgcatatgcggctgttgccacattaaaggaccatgtcttcatttttggtggttggaatggcattcgcagtttgtggtacaacacagtggagtgctacaacaggggagccaataagtggataggattgccctgcttgaatcatgagaaagggcatcttgctggagctaccttgaatggtaaaatatttgctattggtgggggtgatgggtctcagtctttttcagaagtagagatgtttgatccagcagtggggaaatggatatacagtttgtccatgcagcaacctcgatgtgctcctgctgcggctgaattaaatggcgttctctatgtaattggtggttatgatggcaacatgtcagcagaaaggtatgatccaagggaaggcttctggacccaacttccacgtatgcggacaagaagaggatcccattcagtagttgtcttgggggattcactacatgctctgggtggcctgaatagaaataccacgttttccagcgtagagatttttgacacccgtgccaactcatggagaagggggagcccactcagcgtcccaagagcacacggatgtgcggttacattggacggcaacgcatacctcattggtggtatccaaagcagtgaagaatacgttgaaactgttgaggtttacaaggagggccaaggctggtccatctctggttccaaggcattcgggaagagagctttcgcatgcgccgttgccatttgacaggattgcagaagtgcagatgaacccccgggccggttttgtacagcaccagtccccaaccccgcctcacagtattaccttctctcaagcgaaatattgccgctcattgctgagcactgacgcctgacggcccatccattctgtgcatcccagtcatacggtttttacattttagaaacaacaccgtagcgagttctggtatgcgttaactctgcccgttgttgtttctcactgaagataggtgttgttggttgtcacctgattgtagcggagcaaactgaactgtctacaggacactagttacttagagaagttcgaatgaacaaactttagctggtgatagcagtacatatgggaggcttggaagctggtataatttttgatttttttttaagcaacttttcaggttctgcttgctgggagcaggcgggaataatagctgcaacaat

SEQ ID NO: 87497 - DNA, 1288 bp, Oryza sativa
  Clone ID: PAT_MRT4530_86436C.1
atgaggccgtcgctgctgagatacgccgcgcaggcgctccgccgccgcgactactcctccgccgccgcggccgctgagcggaaggtggccatcctcggggcggcgggcgggatcggccagccgctcgcgctcctcatgaagctcaacccgctcgtctcgtccctctccctctacgatatcgccggaacccccggcgtcgccgccgatgtctcccacatcaactcgccggcgctggtgaaaggcttcgtcggggaggagcagctcggggaggcgttggagggttcggacgtcgtaatcatcccggccggtgtgccgaggaagcccggcatgaccagggacgacctcttcaacatcaacgccggcattgttaagggcctctgcactgccatctccaagtactgccccaacgctcttgtcaatatgatcagcaaccctgtcaactcgactgtccccatcgcagcggaggtgttcaagaaggctggtacttacgatgagaagaaactgtttggtgtgaccacgcttgatgttgtgcgcgctaaaactttctatgctggaaaggctaatgtgccagttactgaagtgaatgtccctgtggttggtggccatgctggtattactatcctgccactgttctcgcaggcaacccctgcaagtaatgcattgtcgcatgaggacattaaggctctgaccaagaggacacaagatggtgggacggaagttgttgaagcaaaggctggaaagggttctgcaacattgtctatggcatatgctggtgcggtatttgcagatgcgtgcttgaaggggcttaatggagttcctgatgttgtagagtgctcttttgtgcaatcaacagtaacagagctgccattcttcgcctcaaaggtaaggcttggcaagaacggagtggaggaagtacttgggctgggccagctttccgagtttgagaaggagggtctggagaacctgaagggtgagctcaagtcttcgattgagaagggcatcaagtttgctcacgcgaactaggcaacctatgcagattctaacaattcaaatgtgaactagagggggggtccctcgaatttttggtttgactgttgttctgccccgatctgctggggcaccgagatgttgtgctccagaataaaatcttgcggcttgatgccaacctgaactcaaaacttgtacctgaaacagcgactccggtgctatttttcaccttgtacctgaaactgcgtacagtgaacccaaatcatgacccgagtgtcggtcttcagtttgttgggcgatt

SEQ ID NO: 87498 - DNA, 459 bp, Oryza sativa
  unsure (1)..(459): unsure at all n locations
  Clone ID: PAT_MRT4530_86437C.1
caacactacgacttgttctccaattccaatgacagtggctctgtgccgttntactttgttgatctgccaccgggctgttgtaatgatgacatcaccacccgcccgctttctgactcctatccaccagagatgtaccgttctatcgtgtgtntcggagcagcatcaagttcgtnaccattgaaggctacctccgcgacanactgcccctatcgaggatcggatggtgactatgtggagcctganaccccaggaatcttggtcgtggaggaaagaccgtgacctcagcattggaggcatatgcgcgcagttttcaagaagattcctatatgcgcaaacgatgctggaggccgatgccgaatatggcaccgaggagtcctatcctgagcaacggnggattgcagcctccatttccttatcgtgatnatacagaattaaatntcgggaatcaggattttatgg

SEQ ID NO: 87499 - DNA, 424 bp, Oryza sativa
  unsure (1)..(424): unsure at all n locations
  Clone ID: PAT_MRT4530_86438C.1
gtggggctaaagaaatgatccagtagtgattttcatgagataaaaacactgaagctagaacaactacttttgatgaactgaactaacttttgtatgctgctcttttggtgtttcatcaaacactgagatttaacttgtggaggcacttcctgaaaattcaaatcagaatgcaactgctttcatcatttttgtaatcattgactttcctgttgctgtagtaactgttggccttattaaaaattagagctcaagatcatacactttgaaaggtttgaagattgtggtagcaaagctcttattggttncaggttttatttttctttgtcatcctagggtttgataattggtcagatccatataattgaccacataatggcgtatggaatcccggggtccaaataattccaaatgcccatgtgctttt

SEQ ID NO: 87500 - DNA, 564 bp, Oryza sativa
  unsure (1)..(564): unsure at all n locations
  Clone ID: PAT_MRT4530_86439C.1
cactagcgtctctctgacgtccggctcgggcgttctattcgtcaacgacgagtgagagagaagggctaaagggacagctgcgacgactgcagctggttgtaatgccacgaacactgtacccgggcccaagaggcccaaactacaagatgtgctggcattgcatccaagaccgatcgcttggtactttgggaagcacacttgcagaaagagctgataccgcgctgtctggcaaatagatgtcgtaccaaatgcatatcggatctaagcacaagacgctctgagggctcagcgtggtcacagaggaagagcgaccggcattcactgatgatctatccaaaagctgccacgacgtgcatacatgccggagaatgctgttatggcgagcggccttaaggctcagtcggtgcaacctggaacacacaggcggttcctttgtctgcctcacattcggtggtggcatggattaaaataattattttattcttgattaattaattaattaggccttcgctttattgattctcgctgtttgcttgttctttctngcggtttcatgtttggatg

SEQ ID NO: 87501 - DNA, 756 bp, Oryza sativa
  Clone ID: PAT_MRT4530_8643C.1
atgggcgacgaggaggccgggccgtcctcgtccggacactcctcccccacctccaacaccagcaccacgcccccacctcagccgccgccgccgccgcctccaccgccgcacccgcaggcgtgcgccgcgtgcaaacaccagaggcggaggtgcacgccggagtgccggctggcgcgctacttcccggccaaccagccggcgcggttccggaacgcgcaccgcctgttcggcatcaagaacatcctcagggtcatggcctcggcgtcggaggagctgcgcgacgacgccatgaagtcggtcgtctacgagtccgacgcgtgggtgatcgaccccctcggcggcgccgccggcatcgtcaagggcctcagccaggagctcgcccgcttgaaggccgagctcgacgcggtgaaggggctgatcgagctccatcgccgtgccgcggcccagcagcaacagcagccgcccgtcgccgtcgcctccaatgggggcttcctcccctcgccgccgccaccgccacaggggcagcagcagctgctgtttctgccgccgccaccgccgacgatgatgctacaagatggccactgcgacgacgagacggttgaagatgattacctcgttgatccacccgccgtagatgctgctgcggcgacgtcgacggcgccggaacgccatggggacggacatgcgcctcctgccaacgtcaaggaagaaggcaacgtcgaccatacctcgtcgataagcttccgcgatagatga

SEQ ID NO: 87502 - DNA, 1317 bp, Oryza sativa
  Clone ID: PAT_MRT4530_86440C.1
atgacgaagaagaagcttcaggtcgtcaggcccagagcggtgtcgccgctcccggcgctcgccgccgccgccgccgtcgccgtcgtcctcctcctcctcacggcggcgggacgcccttctttcctcggaagatacgaggctatcaccatcagcggcgtcgcgtcgctgccgttcggttactcctcggagagcgcgcggcgcgcaccaccggccgtcgccgtggcgcgggtgccgagcgactgcgacatcttccgcggcgagtgggtgcccgacgacggcggcggcgcggcgccgtactacacgaacgagagctgcccgttgatccaggagcaccagaactgcatgaagtacgggaggcccgacctcgggttcctccggtggcggtggcggccggagcgctgcgagctcccgcggttcgacgcggcggcgttcttggagctcgtcagaggcaagtcgatggcgttcgtcggagactcgctcgccaggaaccatatgcagtcgctcatgtgcctcctctccaaggtggagtacccgaaggacgtgtcgaagacgacggatccggggttcaggacgatgcactacgggtcccacaacttcaccatcgccgtcttctggtcgccgtacctcgtgacggcgaaccagtcgtcggaccccgccgccggagggctgtgggacctctacctcgacgagccggacgccgcctgggcggtcgccgtggcgggcttcgactacgccgtcgtctccgcggcgaactggttcacccgcccgtccatgttccacgagcgcggccgcctcgtcggctgccactactgcctcgtcccgggcgtccccgacctcacgctccgctactccctccgcgccgcgttccgcaccgcgctgcgcgcgctcgccgccggcgccggcggcgccggcgtgttcaacggcacggcgatcgttcgcacgctgtcgccgacgtcgcacttcgagggcggggagtggaacaagggcggcgactgccggcgcacgcggccgtccacggcgaacgagacgcggatgtccgggctggacctcgacttccacacggcgcaggtggaggagttcaggagggcggccatggcgagcgggcggagcgcggcgaggctgctgctgatggacacgacggcggcgatggtgctccggccggacgggcacccgagcagatacgggcactgggcgcacgagaaggtgacgctgtacaacgactgcgtgcactggtgcctccctggacccatcgacgtgtggaacgagatgctgctccagatgctgctgctccatcaaccaggagctgtttctgtttga

SEQ ID NO: 87503 - DNA, 933 bp, Oryza sativa
  Clone ID: PAT_MRT4530_86441C.1
atggtggttgggacatctggcggtggggggttcatgataggcggagagctcgagaaggtgctcgccacgccatccctaagccaccgccgttacttcgatggggaagatgcagaaaagggggagagtggttgtcacgcccagaaatttaacccaaatttccagactattttgcgtattaaatccctgtccaggaccagccaggaggccgtcgcagggcccgccccgctccatcacgcccacccttgcctggatgcattgactagaggaaagctacactacaagcccagccgttgcccacgctggcttgtgcgagacgaggtggcggtccaccgtggaccgggaccacaaggacggtccaccgccggtccacgggttggacggcccagatcggccaaggcagatcggacggctggggatggccgggcggcgcgcagacggccagacaaccggcggcggcggtggcgcaacgcggcgctggcacgggaggcggccggcgaagaggaaaaggaggagggaggcggctcaccgagaggcgcggcgacggatggagcggccgcggagggaggcggcggcgctccacggggcgaagacgacggcggcgattcggcggtctccaacgaaggtgaaggagcggccggggtacgggggagcgcggcgaacgcagtagaggcggtggtgtggcgcgaggtggcaaggaacagcgaggccggggtgctacgtgatgcggcgaagccgacggtggcagtggcgtggcttggtggtggctatggcggcggtggcgcgctgccggagtcggcaaagtggcggtggagctcgggttcacggtggaatcggtgcccgggtggtttattgcggaagcggagcggtggacgggatgcggcaaagcgcggcgaggccggcgatgcaagcggcgcggcacggggacggcggtag

SEQ ID NO: 87504 - DNA, 170 bp, Oryza sativa
  Clone ID: PAT_MRT4530_86442C.1
tgtacgacggcgtctacgtgaaggtgttggatctacaaatctttatcacggatcgcagggttcggctcaggatactcaggatgaagactgtcaaggtgcggaagcgggacgtcgttcttacgttcgttggggccaggtgcatttttgcctttttttttctcctatttctt

SEQ ID NO: 87505 - DNA, 1874 bp, Oryza sativa
  Clone ID: PAT_MRT4530_86443C.1
gtcagctaaaacgttgtcatataaagtctcaaaaattacattttatcaaactgcgttcaacacttcttgggactacaagtgcacgtggtgcacagttcaataacagatgttgccatttgaaattacaacagtagtttctgacgcattacacctcaaaaaatgctctattgttcatgacatcccctatgtctgaaaaagaatacatcaccaacctagactagaccggagatgctagagttgtgattggcaaattacaattacaccagggcaagctctacaaacttctgtagtcaagaacggtaacttcctcgtccggagcatcaaggtcattgtaacttcgcaaacggcgaggatcttgacgaaaagatggaggcatggttataattggcgcaggaccacccatcattggtccaagcactcctgggttggcatgaggaggtccgtttggttcaaatggaggtggcggcccttgctctctcagcatatgcatggctatttctggaggtgcaggaacaaatggacccaaaggaccagcaccaggaataggcatcaaaattggcggagcgggaagttcaggaacaaaaggagcatttggacctcgcccacggaaagcatcaaacatctgatcatcagcgccatcaagacttggagaacgatcacctctaccatatctgcttccatctctctctgccctatcatattctctacgattggcacggtcatatctcagacgattatccataccaggtctctgtcttgatttgtctggtgcagactgttgcataactggagttccaccaggtgcattaggatcattcatgtaattttggaaatagagatcctctcggactttggaagtcaactctaacacaagctctggatgcttcagcctcaaatgcttgtgaacgaactcaggagcatggaaaagtttcgtacaacccttagctccacagccatatttccaaccatatttttcatcccttatcttcctgacataaggttccagaacttccacagctgctgcatcgattttgtccttggctgctaatattaccatggggtcctgacctctcagcctttcttgccagaaagtatccaccttcttttcccagtcagcggcattaatattggttgtattagacgtcttattgtctgctctgacatggcgactgccttttgcttcatttgtctcagacatgccatagtaatcaacaccatgaatacgccataaataggtaagaagagtatctaggagctcaacaccttcaaggcctttgacagtggttaagcctcggattataattataggccccatagatccaatatgagacttgtctacatctgatttgtcatgatcgccacttgataggatattccccacaatacccttctcagtgtcaagcttatgcacaagggctagagcttgttcaatgtcaacttgaacccgtcgagattcagagctaactggatgagccacgggagcaccagaaagagggtctgtttcttttgaggaacccctgccatgctttcttctcttgtcactgtctccatcatcatcagaatttccatcactgccacttgctgcagccgcagttattccagggccaaggtccagagttccattttgcaaatcatgaaagaaatcctttgctgttgccttacaactatcattcctcctgtcaataacagatgacaagttggtcggatggtacttgtctttcaaccgatcatcattcttgttaaggtcaaaataagcacgtttttgagtagtgatgtactctgtcctgtattcttgataccgtttctcagcttcagcaggtgaaatatcatcctcaagaacttggatgaactgtttgtaagtcatcagtccttcc

SEQ ID NO: 87506 - DNA, 1335 bp, Oryza sativa
  Clone ID: PAT_MRT4530_86444C.1
atgcagagaaacaaaggtgccgagttcgagaagagtttacccacgcttgctctagtctctgacttcctccccatctcttttcaccatatatatctgaagcaaatgggagacaagaaacttacgaagctcaaggttcggggtgcaaacgacgtagaggtcaagagcgtacttcgtcaagagttcaaagaatctgtcgaccaggataatttcaaagtaaaagtagatggcagcagtttgaaggtggacgtgccagggactgtcgacgtcgggaagctctatgagcgcctcaagaaaatgtcatccagtgtcaagattgaatcagttgtgccggatgatctaatggcgaaaatggatcgatacaaaaaggaccttcagaacatgaagaaacagaaggaagctgtcgagtcaaagcaaatcaaacaagaggaaggatacaagcttctccagcaagaacaacgaaaatggaagagagacaaagaaaatctcaactcaaagctcgaaaaaaagacaaaggagaccaaagatgccaaggaagaactcaaaatcacaaagagagagaaggaatatctcaacacaaaacttgagacaaagagggaagagaacaagcgcctcgatgaggaaaacaagaaattgcagcgaaaaatcaaggatctacaggaaatgcagaaggtttttgtctgttgctaaacacttgatttggactgaaatggacagaagtatatcggttagaaatttcggtggtcaccggatttcaggaatcttggtggtgtttcgcacggaattatttaaaattttgaaagaaacttgaaaatcttggaccatatattagcttgctgggattcggaaattaccaaaatttcaaaccctgatataattttcggcaatcgtgcggctgatttttggtctgcgttttaactgcagggatggataactacaacttcaactaagttggacagtttcgaatctgtggaccataatcatcatggtatgcatcacagagtgcataaggaggtgcacaggcatgaatttcacatgcatcaagaggttcgtcaccacggtaatgtgatggcattggagaatgatggtaggagggcgcactaacaacccaggctggaatattaccactgaggaaattaaatttatcctcctaccaaaactatatacatatgtgtgctgacgtggtttgtgctatgtttgtgtgtggtttacttgcctttcttggagttttctctctgtttgttgtgatgttctagcataataaataaagctgcattattgagaaccattttctggaaaaaaaaaaaaaaaaaaaaaaaaaaaaaaaaaaaaaaaaaa

SEQ ID NO: 87507 - DNA, 327 bp, Oryza sativa
  unsure (1)..(327): unsure at all n locations
  Clone ID: PAT_MRT4530_86445C.1
tcgtgggctcttgccgccggggtggtggggttccttttcggcttcgctctcctggctgttgctgcttgccttgcctctgccctccgttgttgtgctgggtccctgtcttctgttgtgtctcctgtcgtctcctgtcctgttgcggctcctgggcttcgccctttcttgtggggggggggggctgtttggcctttcgtcccgccccttgttgccctcngctgcgctttccctctcttctctctttgtctgtcttcttctcgtgctggtggcgctcctttctctctttcggctctttgtccttgttcttgcttttttttttctttttcg

SEQ ID NO: 87508 - DNA, 393 bp, Oryza sativa
  unsure (1)..(393): unsure at all n locations
  Clone ID: PAT_MRT4530_86447C.1
cacttccacaactgcttttcccaaatctctaacgcgtctattctcctttgcggtcagaggcataatgggggggggggctcgcttccatcttaaaccatccttcatacactaatactactttttaatcacgtcgaggccatctgcatccagaccgtctcctccgcctacatcctttccgtcaccgcccaaaactacataattctctactatttaactgcccttctttataccaaccctatccaatcataatttagtttttgaactgcgaaccaaagccaatcaaatacctacctccctgccccttcctctatcctctctcaacttatcggcaatttctccaaaaacggactcctatnnnanccacatggttgctctctcaagcgcacacactat

SEQ ID NO: 87509 - DNA, 538 bp, Oryza sativa
  Clone ID: PAT_MRT4530_86448C.1
gtgttgacggcccacgcggagcagcagagagtggcgggctcagtgtcgggctcgccggagtccggccaatccggtcggttcatgcttcattctctcggttctgtcttctcagtccgtgtgagtgtttcatcatattggctaccaagatgatcactcttcgtttatcaagagagtagggacattaacctggtttacttgtaagaaagtaaagccatggactcctcataccagcatgacaagcctctgctggatgaagagaactcctcgcaagtgacccttgaatatacaggtgatggatctgtttgcatccgtgggcatcctgctttaaggaaacatacagggaactggaagggttgctcattagccatcgcttgttcattctgctcttatctggcctttacttgaatggtaaaaaacctagtcagttatctcacaaaagttctacatgaaacatacgtggccgctgcaagagatgttgcaacttggtcaggaacaagttatctcgcacctctggttggagccttcttagctgattcat

SEQ ID NO: 87510 - DNA, 1758 bp, Oryza sativa
  Clone ID: PAT_MRT4530_86449C.1
atgttccgcaacaaagtcctcgtgcgcgcccgcgccgtcccctccgcgccacctcctccgttcatcctccgacaactctccttccccgccgccgtccccgccctcgacctcgacatcctctgctgcaggctctcccgccgccaccgcctcgcgtgcctcccccagcccccgtccgacgtcctcgttgtctaccagagatgccagtcttgcgctgccgcggaggccgtgtcggggatcgcggaggcgttcgagggtgccgcggttggcgaggaggaggaggtggtttgttcgggctcactggttgcgaaagctgtcgagtgcgacctgcgctccctgatgcttgagcatggatggaggtgtcttggggagagcgtgtatgtcctttcgacgtttgctgatactaaggagagaactgaccaatgcacggtgaacgtggaagtcaagcttgggagaaatgatgatattgaatttgctgtctcaccagatgcacttcggtttacaacacctaagttctctgattttgttagctctgatgagatggaaacatttgaaaacggcaaggaagtaattttggattattgtaatttccgaacagcatgtactactcttccaacccttcaggaaggccatgtgatagaagatttttatttccccctcataacaggttttagcaagacactccctacaggacagtgcttggacaagtttatgcagctttgctcacttaagcatgatttagaggcagactacagtcattatgcagcagtcagatttggttacgaatcttcccatgaaatatggttgccttgttcatttgttctacaaggttcagggctccaaccagcccccaaatcttctagagcatcaagggcaatgtgtgccttgcaatcctttatgggattattgaatgcttggaacttctttggccagaatcaactagtaattaaggagcagttactactcaattctacagcaactctgcctacctgggataaggctatgagcagtgcaagaactaacaactctgaggatcttagactagttcatacaaatattttgacgaatgatcaatctttggctctagcacaagttgccttattgaagccgtcattcagcagaggtaaatcagaacagggacacaaaagaaagcattcttcagaacattctgatgcagataactcggacaaattgagacatacttctctgacaaattcaacactggtaactttccctaaagcaagctatctgaaccctgttagtttatcaaatgcaagtctatccaagagggctgaaaccctcagtgatccttgcaggtttctggaggtcataaaagaaagcatgcagagtctctggatagaaattgtcaagaagtatcaaaagcttggcttttgtagcactaagagcattaaagattgtatacctcaagtcccagatgagactagagcaataccaggtgtcaagaatgatatgcttagcactaaggtggtagataatcagaaggatgagctaatgaaaaaggcaacaaaggcaaaaggaaggagagtagttaacagcactgagttaacttcaatgaactcaaaaacaaactctgatgtactcaatgatgacatagttagaaaggtgacagatcatcagaagcgaggtgagctgcgtttgctaacagttgcagatctgaagtgcttccttagtgcaagaaaagtgaaggttggagggacaaaggaaatgcttatcaaaagagtcgctgagctcattggttaa

SEQ ID NO: 87511 - DNA, 2430 bp, Oryza sativa
  Clone ID: PAT_MRT4530_8644C.1
atgaagatcggcatgctcggcgttggccaggacagtgccgttctcagtataaaagatgacggcgctcccaataaattgccatcaacgccgcaagccctagcttcgcagtcgccgccgccgttccagccgtgctccgccgccgttccagacgccgccgtcgctcgggaagaccgccgtcgtcatcgccgttgcgtcgccgtcctcgtccgccccttcgccgccgccgaagaccgccggagcaccctcgtcaccgtcgacccgaagagcttcgccgcttcctcctcgtcgccgtcgccgtccgttgatcttccgccgccgttttggtcaccgatgccgcgctacaagcctgagtacctgtttggtgttgagggttttgtccaggagttgcgtacgatgtcctttgccattggatttgggactgcccctttttatgcccagattcctcatgatcgtcatgaagagaagtgccgagtcaaagtcaccttaaacagcaatagtgaagaggtcccctcagtgatgttcgaagctggaggaagaaactacatccatgcatgtcaggaagtggcaaggattgccataggagagctccgtgatcgctacagtgatcagttggccgacactgagtatcgctaccatcctcgtcaaccccagggaagtgaccgtggcagctaccttgaaactgaaggaattgagaatgatgctaccacaaggcatttggttgagatgctgtgggctatggatgaaagtcgtgcggagactgtgttagcggctcaagatcgtgaagaccggaatcgtggtaagatttgcaagctagaagacaaggtggatcgtttggaaaaggaactagccgcgttgaagggagaagcaccgccgcagaaggccaggattcgtctcaccgcaaggaagagagctctattcgtccctcgctatcaattggcgccaaaggtccgtgtggtggagaaagaagttgccccagctcaagcggatcctccggtcatcatcataagtgatgaagaagaagaagaatccaagcgcaaccattccaagattgagtgggtagcaactcaagatgatgaagacgagccgaacgagccttcaatcgacctccgatgctcggaagaactagataccactaatcctgttgaagctggtgattggctgcatgccatagagaagaagttggatttacttcagtgcactgatcaggagaaggtctcatttgcatcacatcagttgcatggccctgcctctgaatggtgggatcacttccgcctgaataggattactgctgaacctatcacttggcttgaattcactgctgctttccggaagacgcatataccatcaggagtagtgtctctcaagaagaaggagttcaggtcgcttactcagggatctcgctctgttacggagtatctgcacgagttcaatcgtcttgctcgttatgctccggaagatgtgcgtaatgatgaagagcgtcaggagaagtttttgggaggacttaatgatgagctttcttacccactcatggttggagattatcctgatttccagaaattagtggataaggctatacgtcaggaggacaagtacaattgcatggagcagaggaaacgtcggattgctcacttcaaggcacaacaggggagtaatcagaagccgcgccttactttaggaccccagtctatgccacagggaggttcttcgtctgttgttcgtccgcagcgtcagttcttcaacaacaatgctggcaacaacatccgcaatcaagctccacgtcctgttgcagctccaacacagcaacaacctgccaagagggagcaaggcagtaagtccgtggtgtgtttcaactgtggagacccaggacattatgctgacaagtgtccgaagccccgtcgcgtgaaggttgtccctgctcagaataactctaccgtaccagcatcaaaagcccgtgtcaatcatgtcgctgctgcagaagctcaagatgctccagatgtgattttggtccgggagtatcccgatgtgttcccagatgatttacctggatattaccggaggtttatagagaatttttcaaagatcgctaagcccatgacacgactgcttcagaaagatgtgaagtacaagtggtcggaagaatcgccgcaagccctagcttcgcagtcgccgccgccgctccagccgtgctccgccgccgttccagacgccgccgtcgctcgggaagaccgccgtcgtgatcgccgttgcgtcgccgtcctcgtccgccccttcgccgccgccgaagaccgccggagcaccctcgtcaccgtcgacccgaagagcttcgccgcttcctcctcgtcgccgtcgccgtccgttgatcttccgccgccgttttggtcaccggtgagttcgccgcgtcgtcctctacgtgctggtgcccttcgttag

SEQ ID NO: 87512 - DNA, 459 bp, Oryza sativa
  Clone ID: PAT_MRT4530_86450C.1
atggcgatcggtggtggcggagcagctgggcgccgggtgctggctgccatgatgatggacgtgctgacctcgaaagaaggaaggaaattgaaagcagagcaacagcagcagcaactcccggatggatcgacgatcgacgtacgtcgccgttgccgacttgtagtgtacgcattaatcacaaattcacaacacgtgaacctggtgtgcaatgctgtgcccttgattttgtcgttgctacgtcgagctctcaacgatccccggggcatgattacacgcggagaaacagcagcagtgctgcttggatacagagagcgagagatcatcatgtttgacaattcagttttaacggtgaacgcactaccatatacccaaaccattcatccagcaaatcaaactcagcaactcaccactgaacaggggtggatctaccgtagaaaggccggtatcaaacgacaccga

SEQ ID NO: 87513 - DNA, 1023 bp, Oryza sativa
  Clone ID: PAT_MRT4530_86451C.1
atggcgacggctcgcggggcgcgcggggcgacaggcgacgcgacggcgacgcggcgcggtagcggcggcgcgcagctcgaagcggcgatgggacgcgacacggggctcggcgtggatgttacaagtactaagtctggtacctatgggtatcagaccgatctaggtacctggtacctacaggataaggtcctcgagcacgacgctgtgggtgtgttcctgacgcactccgggtggaactcgacgctggagagccccgcctccggcgtgctgatgctgagctggctgttcttcgcggagcagcagacgaactgccggtacaagcagacagagtggggcgtcgcgatggagatcggcggcgaggcgtggcgaggagaggtggcggccatgacactggaggccatggaaggggagaaggggcgtgagatgcggcagcgtgcagaagagtggaagcagaaggctgtacaagtgacgctgctaggtgggccctgggacaccaaccttgaccgagtcatccacgaggtgctgctgtcatgtaaggataaaactctcagcgtgaatgcatcagcatcagcacaaattcttgcattatatgagcttcagaagcagcagcacaaattcctggagcagcaacataatttccagatgccacagaatttccagaagcaacagcaccaatcttcagcagtagcaatatcattccagcaacagcagcagcaacagattctagctaacagcaccattaaagcgggaagtttaattttcccgttggcgacgcccggtgccgaggacgaggacgccacgcaggacatccccgcgctgtgccagtctaccatgacgaactgcctcggccacctcctcgcgctgctggcgaggctcaaagagtggaaggagaaggccgtacgagtaacgatgccaagtgggcccggggacaccaaccttgatcggatcatccacgaggtgttgctgtcatgcaagggtgaaaacgggtctggttcggttggttctcatccttcccattcctaa

SEQ ID NO: 87514 - DNA, 889 bp, Oryza sativa
  Clone ID: PAT_MRT4530_86452C.1
tcgggagaggtggttatggcatcgtctacaaggcaaaacttcggaacgagactgttgctatgaagattctcaatgagagtagccggcaaggagaacgggagttcaagcaagagattgcgatactcaaaagaataaggcatcaaaacctgatcactctcagaggagcatgcagtgagaaattcgcactcatgtatgagcttttacctaatggcacccttgaagatcgccttattaatgagaaacaaagggaatcattctcatgggaagaaagagtaagagtggcaactagcatctgcactgctcttgtatttctccacaacgccaagcctaatccaattgctcatggtgatcttaaaccaggcaacatcctcttcgatgatgaaaacatatgcaagctcagtgactttggaatctcccgtttgttacagcagacaaacgacacaggaacgcctaaccatattacagaagtgccaaagggtagcggtccctatatggaccctgaattcaagaatacaggcaaattgactcctcagtcagatgtattcgcgttgggtatcattctgctgcagctagtcacaggccaaagtgcaacgggcctaagaaagcacatcgttgataaattggaaggtaaaaaattggaaaaaatggacacacgcaagttggatgacacgtctatacaggatgctgtaaagatggtttcactgggcctgagatgcagcaatagtgaaaggaaacgtcgtccaagcttggaaattgaggtgtggcctgagattgagtcaatcaggaccaaagtaatcacaagtttttcctcaaatgtgttgcaccttccatccaccacttcaccagcctattttgtagcttaccgctaaaacaaggctgcagcattgag

SEQ ID NO: 87515 - DNA, 2529 bp, Oryza sativa
  Clone ID: PAT_MRT4530_86453C.1
ctaatcaatattcctttaaattgttggcaacggagcgctttcttgttgttaaagcatgaccagacagctgccagttccttgtgtaaatatcataagttagaaaacaatctcaagtgtgacaaaattgtttttgcatgactaaaagccgtacttcccgaactagctaactgatgggatgcagcatcgtgaggggttttttctgttcagattgagctccccgatgcagtatgatgtctacaagctccttcatgggtgattggatatcctgataatgtctttttctgcttatctgcttctaggtggacctcccgtttcactgtgccaatcactaaccaagattccatagaaaatgatgccaacggagcgccttcttgaggctgcacaatgacaagaacgctttccatcccaaccttttggtcaatgtcctatcacatgtggacttgtatgaacatttcattgggaagatgagcgccatcctggcaatgaggccccaccagagctttcaagaacttccaggtaatgaacaaatgatggcaccactacgtccaacttgccatcgctgttgatatcagcgatcaacggagtttcatcaatgctagaactaacttcagtctgccatctcagctctacatgttttagacacttggacttcaataaagcatcttcatcaaggtgggggtatccaagcatgtcgtcggtggcctcgcgctgccggaacttgttcgccttctcctccttctcgagcactagagcagcagtcatgatcataacatccgttacagatgggaagggctgaagttttgagccatcctttccactaagaacacctatgtttcctggcacggttgggaccgcaactggagtgggagaagctacattaactccacgtagagtcgggcgctcccagatttcttctccctctgcagtccatgctgctacattgccatggacatcagcagtgaccatctcgattttcccatcatcattgatatctgctgcaatgactggtgcatgaatctccgccatctcaagtgggaacttgttcctaaccttaccacgatgatcgataacataaaacaagccaaaggaagttccaacaagaatatccaaatttccatcaccatccaaatcaaccacggtcggcgaagaatatgcatgggcagtaaaatttccactatctgtactcaaatcaagttctgcagtccatttgacttgtcttgtgtcaaggttaaaaacaactatactgcttgcaatatatttgccaatgtcaatccctcctaactcctttagatgttctggtttatcataatactcgtggtcaaagaagtaagatacagaaatcaccatttcttgtatgccatctctgtcaatatctgcaatcactggggtggacaagatgtgagcatctatgctcacataatcttctgccttttcatgttgttgttctttccagtcctcgtctccccacatggtttcatcaacgtagtcatcataatcgtaattgtactcatcaggcagatcttctacatcccgaaacaaattaaatgatgcatcagcatcagcctctagaggctcgctattttcaacagtagctgcttttgctgttccggtatcacttgcatcagtttctgagcttcctgcttgattacttttctcatctgtttgaagcaaccttctctgaacatgtgatgcattctctgttgtagtacttaaactagagttgttcccagcatctgtgctgtttagattgtttaacacatccatattctcctgtcctcgggtagaattaggtttactttcaactggctcttccttagacgcatgtttcatggaatcaactcctcgtgttgttgagtcatttgtgctccgtgactgggattccttagaagattcattcacaactggcttgtcctgaatatttgggtgagattcttcagaagcagctttctttgcaattgagctgtcatgaacatctggatgggagcggtcaacgggatctgtattcagcccaacataccagtctttgtgtaccttcctacgaggtacttctagcttgtccatcatcatataacctgataccctgaagaaattcactacaccattgtaagttgccaaaactatttcccgtgtcccgtccttgtcaatatcatatagaagtggacttgaatgaacatttgactggtgaaatgcaggccatcctggcaatttgtccccatcagagccttcaagaacttccaggtaatgaacaaatgatggcaccactacttccaactttccatcgctgttgatatcagcgatcaacggagttgcataaatgctggaactaacttcagtctgccatctcagctctacatgttttggacacttggtcttcaataaagcatcttcatcaaggtgggggtatccaagcatgtcgtcggtggcctcgcgctgccggaacttgttcgccttctcctcctccgcggccgccggcgctgcggcagccacgagaagggcgcataccgccgcgaaggcgaggaggggacgcat

SEQ ID NO: 87516 - DNA, 305 bp, Oryza sativa
  Clone ID: PAT_MRT4530_86454C.1
ctatattaatgctgctcccctgggggacctctcctcaattccctgctcgacccacccctccgttttatctccctcccccctcctaccctccccgggggggtttttttaacaaccctggtggtttacaaaacctcctttcccctaccaccatcttctttctaaacccttaccttcctcttcctgatgcactacacctctcctcacctaatttccttcttttacctctactacatccatatgatcttcatccagaactatccctttattctccctaatgccctcccctataccatccacttttacct

SEQ ID NO: 87517 - DNA, 733 bp, Oryza sativa
  Clone ID: PAT_MRT4530_86455C.1
atatagataaaatcttagtaatccaaggactacacgttcacatccaaatgtaacccttgatggtactacacacaaaaagaaaaggaactctcatatatatccgtggccttaattcactgccacaccgcagcgacgtgttaaaactggtggtacttggttgggtcgtagtcatgaaacgccctggtcgaggggttaccagatgaataggaattgatcacgacataaatatcgagcaaagatgacgaccgtaatgtcttctcttgagggggaaaaaaaaagcatgcaccttggattgaaaaacggtgtgcagatttctcacatgcgaccatatatatatctcagattgtcgccgtcctgcccgcccagaatctaagtacttgttcaaatatcacccgattcttctgtcgctgccttctccatccgaggccgtcgctgccgccttccctcctgccaccgcccgcctctaccgcctctcaccgctgctgcaccttgcgtcgggccagagcctcccctcccgaccggatttagcggtggggagacgctgctgccacctcccctcccgccaccgcctgcctctgccgccgccgccttccatcccgccaccgcctgcctctactactagcctgatctggcggaggtcgccgtcgcctccgccgcctcccctcccgagcggatctggcggaggggaggcaccaccaccgcctccactgccgggccgccactgaacgcgtgg

SEQ ID NO: 87518 - DNA, 465 bp, Oryza sativa
  Clone ID: PAT_MRT4530_86456C.1
atgcaaattctgactaatccagtgactgaatcaagtacgagctatttggatgatcacataatcgatgcatacgttacttgtctacgtgagaaagatatgaaggaaggtacagggactagggcagaaggtatggtgttcctagagaaaccgttaataacaaagttgctacaaagagatggcgaacactatgtttccaaagacatcatcgatcgggcaatggctaaagcaacggcaaatagatatctaaagcatgatatgattttcctccccatgaacataaaagaaaaacattggtacctggcagtcatacatgccaaacgccgcatcatgcaagtgcttgactccagggcgaattcatccacacaacgcaaggaactaagaaaagttgaagatataaaatattttagaaggaagttagctgcaattttggggggcgctcagaagaaggataaaaagagaaactaa

SEQ ID NO: 87519 - DNA, 473 bp, Oryza sativa
  Clone ID: PAT_MRT4530_86457C.1
atggagtacaattttatttacagaaggaaaagccgatctttggtaggacacaccattagcaaatcatgaaaatggtactcgtgtacatttttatttaccaagggaaaagatagtctgtatttcggcatttccattctaatacacttttacttatttgctcaagaaacggtagcaacctgagctgtagccgcgagcagaaatcagagtagatagctcttgagtatagttatgtggtttttgcttttgccaaggccttcttccgctgggcgatcaagtagcgaaacaagcgtggatatactggggcatacaaaaccatgaaaaagatagaggcatagaagtagttgaaggagaaattccatttgttgggcatcctaaggcagtatttcccagatgcctgatattgctcatgcaaaagaagagcatttaaacaagatttgttatgaaatggaggcagagatcttcctttctaagtt

SEQ ID NO: 87520 - DNA, 853 bp, Oryza sativa
  Clone ID: PAT_MRT4530_86458C.1
ctcggctcgcatgggcgaccgccaccgctgtcttctgtcggcgccgccctcgccgtcgacagccacagtcgctgccgccaccgggagccaaaatcggcgccgccgccatcgaaatcgattcgatttctctcctttcctcctctcgtgtattttccggccaccgaaaaccctatctcttccaaaaaaatccccaaatcggcgccggctgctgggtctacgggaggtcgccggctgctgggtctacgggagggcgaggcctgctggggaccttgactgccgcatcggcaggggcagccggccggcggtaggtggcagcggcagggcagcatgccgcagcagcagcaggccatggctgtcgcgaggcagaccctcttgttgcatgctatggctctggctctagctatgtcacagcgtgaacaggccctataccgaagctgccgatggaagaaagcaatgtcatagctgcagcacaacagagttccttgcgttgtgtggatgaattcgccatggagtcaagcacttggatgatgcggcgtatggcgtgtatgactgccaggtaccgatgtttttcttttatgttcatggggaggaaaatctgtacaaaggaaatcattggtaaggataatattagtagtataaaacttgctgaaaatttggatagtattgtggcataaatattaccatatcatgctttagatatctatttgccgttgctttagccattgcccgatcgatgatgtctttggaaacatagtgttcgccatctcttggtagcaaccttgttattaacggtttctctaggaacaccgtaccttctgccctattccctgtaccttccttcatatctttctca

SEQ ID NO: 87521 - DNA, 320 bp, Oryza sativa
  Clone ID: PAT_MRT4530_86459C.1
tcgatagagcaaagaatgagagagctcggtgagctgcacaaatggccctctccgtgatggcctcaagtgccaccaccgtatgtcccttccaggggcttaagtccactgccggtatgcccgcgtcccgacggtccggcagctccagctcatgcaacgggagcactggcaggacgatcaggtgcatgcaagtgtgtcctaccgagggcatctaaaagttcgagaccttctgctacctatcaccgatcaccgtggaggacctcctgaagcatatcgagtacctgctacggtccaagtgggttacctggctaacgacaaacacg

SEQ ID NO: 87522 - DNA, 711 bp, Oryza sativa
  Clone ID: PAT_MRT4530_8645C.1
atggcggccggacctcccgcgcctattccttccctgccggccgctctctcccccttccaaccctatttaaaccctccccgcacctcctccgtccgtttccgcctctcgccgcccttcctcctcgccggaatcgagctcgcgccgttgctctctctctccgccgtcgccgtcgagctccggtccgccgccgtcgtcgctccggaccacctcccacctcggcgccgcctccttcggcttcgccgcatcctcgccgacctcgtccacccctccgtttcgctcgctgaccgccggaacgccgtcgaccccgtcgacccgagccgcgccgccgccttccttcgctccggccgcctttttcgtcgtcgccgtcgacctagggtgagccgtggaccgccgcttcttttcccccttcccttcccctctctcggccgccgctccgccgtgcctatggccgccgccggcgaccataggggcgcgggcgccgcctcccgccggctgcgccggcttggccgccctcgggcgcgccgagtggctgccgtgtggggctcggccgtcagccgcccgcgccctcgggtgcggctgacgcgtgggaccacggcgccggtcggtgtgagcccgggtgcacccgtcgccgcagcttcggaagatccgctcttcgtggaagttgaagccgacgtttgggaaagcgagcaaggcaagtcacatcatccttga

SEQ ID NO: 87523 - DNA, 623 bp, Oryza sativa
  unsure (1)..(623): unsure at all n locations
  Clone ID: PAT_MRT4530_86460C.1
ctttcggtggaaagtgtgtcatatggaggaatggggttatatgtggtgtcctggtgttccccccgctttgaggttcctgataaccactatatggccaaccacggttgttttcctttgaccgtcaccctgtgcgattggatactcgatactactggaacgccatttgtctaccgcgcggtgtccacattggtagcgatgcctcagtcacgtcggactccacaccgactatatgcgaagtacgtggaaacccgccactgcggagatttggtgtgtatgggcaccacatctatgattgagaaaggctttgttcaccgaacggacggaggtggaggatatccactcaagcataagtgatggatgggaagagggccacgtggagtaccaagaggtaatgcagctaagtggatgcccaaaagccccacggaagccagcaccaagtaggtcgggagcctcatgaccaagaaccacttgctgaattttgtacccaaatatttatccaattagtatagcttgtgnanacatcgtggtttcttcagtgtaaggatctgtgtaacacgtagtatgccaaaaaaaaaaaaaatanccccccaaaaaaaaaaagaaaaaaaatataaaaaaaaaaa

SEQ ID NO: 87524 - DNA, 381 bp, Oryza sativa
  Clone ID: PAT_MRT4530_86461C.1
cccacgcgtccgcccacgcgtccgacgacgcttacctgtcgagactggagataccataaaaatactgatagtgacacatgcaatgactagggatgagaaaggaaatgtcaagacgctagatgacctgcacactatgacgggactgatagaacaaagcgagttacgctgtactaaaattcgctatcactgaactgaaacacagaaccggatgtacactacgtctcatgacaacacgggcagggatatgaggcatgctggcaagctgcatatctataagccactatggccatagataaaggtggatcgtagcatgaataacacatgatacgtacgaataagtacattgataattggatatacgatccaatatccatgagtaga

SEQ ID NO: 87525 - DNA, 3604 bp, Oryza sativa
  Clone ID: PAT_MRT4530_86462C.1
atgggtttcgtctccggcatcgacgacttcgtcttccctcccgggcaggcgttccgtcggggagaggctaggtctccgccccgttcgatacccccgaactcggccgagttctaccccaagatcatctcgattgagtcggcttcaaaccactcggacgagatccaatctactccaacacgacctgatcaagacgatgggccctatccctcaatcctgatgaaactccccgatgatttggccactgtcttcaccaggagggtgtcttctccccgtaagcctagacgggatccagcttcggctccgatccagtctaactctagggaagtcggcatcatactccaacctctcgggacggtttcgatggaagaattagacagctacctcagctctcccggtgttgattctcgaccaacggagatcctcgagtacgacgacttcggctaccactatgactacagcaatttcgatgacttcgatgaaggctacgaagacaactacacgcctctcttcttcggcgtattcatggctgataacgagacggcagaatagcatcgagcccgagaagcggaagaagagcgcacatgacaagaagccgagcgtcaccgactggaggaaggacgacaagcacaagagcgagaacggctgcagcgtgaacaactggagcgcgagcgggctgcgaaggaggctgaggatcggcggcagcgtgccttggaagctggacgatgagcacgagagcttatcggacaacaagacgttgaaggaacggcggtttttgcacccccagcaaaacgcggtcgcagcgatcacccttctggaaactttgcttaaggaagatgtgcccgatcacgtcgtcaacatcttgaaccagaccaagaccatgatcgccgcctcggtcccagtgaactcctcaagcgtccgcacgccgactggcagccgagttccacctcttcgatcacaagactatcaccaaccaagcctcagcgttgtcggcgcaggatcaagccgcaggagcagggatcatggcgaacgatctgttcactcgcctcctgatcgacacagggagcatcgggctgcacagtctcgctctccacgtcacaggcgtcccgtcgatcttcgtgatactattaaccagcgttgtgcggcaagaggctacatcccccaccattcatcagatcgttacgacgacgacgtggatggagttgctgccttcacaagtgacctgcgtcgagtggattggccggccggcttcaaaccaactgggatcgagaagtacgacggcacgacaaatcctgagtcttggcttaccgtcaaaggcctcgcaattcgcgcagcaggaggagatagcaaagccatggctaattatctgcccgtggccttagcggactatgcccgatcttggcttcacgggctaccccgtggcatgatcgggttctgggcggagcttcgcgaccatttcatcgccaacttccagggtacttttgaatgccctgtcgggcagcacctggaagccaaagaaagatacgccgactatagggggagtggaaataccaaccacaaggatcgcaagcgcaagcccgaggaacttgtggaaactactacaccatcctcccgacagcgttcacgcgtcaacacctttgacaagatcatgaactcccaatgcccacatcatccaaattcaaatcacgcagccaaagattgcttcgtctacaagcaattcgtggagcaatatgccaagaccgcacggaagccgactgatggagatcaaagcacgtcgaagaagaaggatgatgaagatgatgccctgactggttttcaggactcccgcaaggaactcaaccatatctttggcggacctctggcttacgaatccaagcggaagcaaaagctgaccgaacgagagatcaatgctgtgcagcccgatacgccccaatatcttcggcggtcagagacagctaccaagtttgaccgctcggatcatcctgaccgagtggtccacctggggcggtaccccctggtgctagacccagtgattggacgcaacgtcgaagcatatgttgatgatgtagtcgtcaagaccaagcagaaggatgacttaattgcagatctagaagagacctttgcaagcatccgcaccttcaggatgaagttgaatcctgaaaaatgtatcttcggagtaccgccagggaagttgcttggctttatggtatcccataggggcatacaggccaaccaggagaagatcaatgccatcctcaacatgaaaccgccgagttcccaaaaagacgtccaaaagctaactgggtgcatggcggcgctcagccggtttgtctcacgactcggcgagcaggggatgccctttttcaagctactaaagaaaaccgacaatttccagtggggacctgaagcgcaaaaatcctttgaagacttcaagaaacttctcaccactccaccggttttagcttcgccgtatccgcaagagccgttgttgttatatgtgtcggcaacatctcaggttgaggtatgcaagttagaagataagtttgatggcctcgagctagcccatgttcttcgacataacaatgaggtagccgacagactggccaatttcggttcgaaacgagaagcagctccttccgatgtgtttgttgaacatctttatgaaccaactgtaccaaagaaagaagtaaccgaagctgcggacactcaagaagtaaacatcattgaagtcgacttgagggagcccctcatcaagtttctgactaaacaagaactccctcaggacaaagacaaagccgaacggatctctaggcacagtaggctttatgtcatgcatgagaccgagctgtacaagaaaagtccttcagggattctgcaatgctgtgtgtctttggaggagggaaggcaattgctaaaagatatacactcgggcatgtgcggcaatcacgtcgccgcacgaaccattgtcagcaaagcttatcggcagggttttttctggcctactgctgtgttcgacgcagacaaaattgtgcgaacgtgcgaaggttgtcggttttttgcccgacagactcatttaccggctcaggagttgcaaaccatcccattatcctggccgttcgtggtttgggggcttgacatggttggcctattcaaaagggctactggtggttacactcatctttttgttgctattgacaagttctccacgtggattgaagccaaaccagtcgtcatgattacagcagacaaggctagagatttcttcatcaacatcatgcaccggtttggggtacccaatcgaattatcactgataatggtactcaattcactggcggagtgttcaaagatttctgtgaagacttcggcatgaaaatttgctatgcctctgtagcgcatcctatgagtaatggacaagtcgaacgcgccaatggtatggtgcttcaaggaatcaaaacacgagtcttccaccgactgcatccttatgctggcaaatgggtagatcagctgccatccgtaatttggtctctgcgtactacgcccagtcgggccacgggtcagtcaccgtttttcctggtctatggtgtggaagcaatgttgccaagctag

SEQ ID NO: 87526 - DNA, 758 bp, Oryza sativa
  Clone ID: PAT_MRT4530_86463C.1
atggagcagcaacctcagaagaagatggttgtgtccaagaagatcatgaaggttgggccatggggcggcaccggagggagcccctgggacgacggcggtcacaccggcgttcgtagcatcaccctgtcgtacgaccggtgcatcgactccatcgccgtcgagtatgaccggaacggcgtcgccgtcgccggcgagcggcacggcggcgccggcggcaaccagaccacccagatcaagctgggcttcccggaggagtacctgacggcggtgagcgggcactacgcggcggtggcgcagggcggcgcgccggcggtgatcaggtggctggcgttcaggaccaaccggagggagtacgggccgttaggcggcggcgcggcggagggcacgccgttcgcgttcccggtggacggcggcgccatcgtcgggttctgggggaggagcggccggcagctcgacgccgtcggcctgcacgtcgcgccgctgcggccggagaccatgtacgagaaggcgcacaagctcgggctcatggcgtaccgctcggtccggcaacgcttcgggcctcagcagcagcagcaggtgcaagtgcaacatcacaacagctttgcactctcacagagtggcagaactttctagagcttccgcttgtcagaaactcacaatgcaaaatcatctccctcacgggttcacattctctaccataataacattatcattgcaaatacttcaaaatatttgacaccaaaaaaaaaaaaaaaaaa

SEQ ID NO: 87527 - DNA, 1890 bp, Oryza sativa
  Clone ID: PAT_MRT4530_86464C.1
ctccatccgagtttcaagatcttcccacaatttcggtcccgacagcaatggagccatgggccattagagtggcctacttcatagtgttctcctttcttgtcactgcaagatttgggtcctgtgctccctgcagtgaagaagggagagctctcccgggatatagcgagagcgagcaagaccaatcaactgattctttgtcaaatcggggagaagggaagctcattggcagagtgctcaacttattactcaaagagaaaatgttttccagtgaaacaccatccgaattgaaagagcatagcacaatttcagagtctgtacctcatggcagtgcaggatttgaaccatgcagaaaatgtttagcaaaaactgttcacaatgccacaccaaggcgacttctgcaagccagggagctggtttctaatcaaacacaaaaacaccacaaaaagcaatcacctccagttcaatcatcagcatcacacctggtacctcgttgggctatttacgcattgactgttgctggagtccttttcattgcagcagtagctactgccatatatgtattcttctcccgtagaaagaaggataatactgtcatgccatgggctacagggctgagtggacagctaaagaaggcatttgtaacaggtgtgccttctcttgagaggacagaactggaggcggcatgcgagggtttcatcaatgtgatcggcactttacctgaatgcacattgtataagggaactctgtcaagtggagttgaaatagctgttctgtccacttcacttaactcttcacaacaatggtcagctcagtctgaggagcaattcaggaacaagatctcggtgctgtccagagtgaaccataagaacttcatgaacctgattggttactgcgcatgcgaggagccattcaccaggatgatggtgttcgagtatgctccatgtggttccctctttgagcatttgcatatcagagaagcagaacatctggactggaaaacacggctacgaatcataatgggagtagcctactgcctggagcacatgagccagctagatcctcctcctcttctcccaacaaatttgagctcatcatccatctatctcaccgaggacaacgcagccaagatcgccgacatcgaattctggaaggatgacatcaacaagcaggacgaccaagaaagcgtggtgtacaagttcgggatactggttctggaggtgatctccgggcggcggccattctccgaggacgaccggctcctggtgctgtgggcgtccagctacctggacggcaagaggccactcagcgccatggctgaccggacgctggtgaggtcgtcgtctgccgcgccggagaaagatgtggcggcgctgtgcgacgtggtgcggcagtgcgtgaggaggccggagggggggaagagagcgataagcatgggcgaggtggcgaggctggtgaggggcatcgccgggttgtcgccggagcaggcggcgccgagggagaagcccctgtggtgggcggagcttgagatcgcctcctccgaaaccgcctgaaattctgtggaggccccgcttcctgggcggcagccgccactcagcccagggcgggccggccctggcgtgtctcgctccgcgccggagtacgctgcggcggcctgcgcgtcgtggtccggccgggcgtgaggtggccggtggggggggggggggcgataagcgtgggcgagggcgcgtggcccgtgaggggcatcgcccaaaattagttagtttcagagtacatatgcgtttgaaagcctgaaactgaaaaaaaaaaaaattcagtgcgttctctcttctttctggtatcatataccctccgtcccataaaaaactaacctagtccacatcataatacaac

SEQ ID NO: 87528 - DNA, 864 bp, Oryza sativa
  Clone ID: PAT_MRT4530_86465C.1
atggccctatatggcaccgtcatgctttctgccgcccttggcccttcgccgctcaccgtgccaccgtggtatggcctgtttttgcttttgccatggaaaccggatgctatcaaccaatttgtcatgacaatccacggtatccaccgaggagcccacgatgtacagggcaccaactctgggcccacaccattttgtgtcccgtgccctccgggaagagagagaggaccaaaggaggagaggcatccacaccaccgagctcgtcggaaagagagaaagaggactggaccggcgccggcgatggcaatgcagccacctcggaggaagactgggccggcaccgacgatgacgacgcagccactgcggataaggatcggaaggggtgaagaagaggggagggggagaggggagctcgaggtcgatccgcgccgtcgcttgggccacaccgctgccaccgtcgttgggggtggaggagagggcgccgccgctactccgctcgacagccgccgtagcgaggaggaggagaggagtggtggtcgccgcggagcttgtccgcgcgttggccaggaggggcgcccgtcaaaggaggagataaggggcgtcgaccggagctggaagaagagggaagctggggaagaaggagcggcggcgcggtggggtgagcggccgccggatctggccgcccctccaccgcttcgaccggcgccgtcgccgccccgccaccgctccgcccggtgccgtcgccgctcaagctgccacccggctctctacgggtggaaaaggaagagaggggagagggaaaagtggaaaagtggtattggtgagacccaaactttttcgctagttttaggttataagatgttttaa

SEQ ID NO: 87529 - DNA, 253 bp, Oryza sativa
  unsure (1)..(253): unsure at all n locations
  Clone ID: PAT_MRT4530_86466C.1
ngagcgactacgtagcatgtaagacttncacngctcttttatctctttctctggccaccaagctggttgttgtatatnactagtagtaatccgtcgccgatagctgcttcgtgttgctcgatctttgaccagccagtngggttggaggagggagggagctagctatagttgcnagcgtgtttacgtttttaccggcgangagtcgacggagatntttgaggggtgctacggcggagtcnggtcngcggcggcg

SEQ ID NO: 87530 - DNA, 1329 bp, Oryza sativa
  Clone ID: PAT_MRT4530_86467C.1
atggccaaagatggcgatggcgagtttgcctttgatctgaacgagcctccgttggagcacggcaacggttttgatttgaacttgccactaaatgaatttggtgtagtcgatttcgattatgtacaacacctcgctgaacatgtcgtggctcccattgaagtaaaccatcgaaggaaagacatgaccgaagaagtgagaaaacaagtttatcaagctttgttggctagaagcaagaatgggaaactaggcaagaaagatacaagagttgttgcagatcagtttggtctacacattcgtgcagttcagcgcctgtggaagcgagccattcaagcaattcaatacaagaagaatgcaaaaacagtagaggcactaattccaacggttcaagaggcattcatggagtattctccacacaaagcaaaccgaatgtttctaacacttcaaagtgttttgaaggaagctatgaagcgagagcacggccacagtgacgagtgcgcacgattccatgcttggcggtcctcatggacgagatggcagcgagcgcatagaaaagcgcccggcggcaaggaatccggcaccatctccgagtccggcggcaaagagtccggcaccatctccgagtccggcgccatctctgcgtctggcagtgccaactccgacgaggcgaagtccggtggaagcaacatctccgagtccggcaacacctccgacaagaccagcgctacctccatcttcgagtctggcaccacctccatggctttgcgagcaaacgaggtgagcgggcgcaacgagcggcgcgacggcggcggcgaccgcgacgagagcggggccggcgagcacgatgcaagcggcggtggtggcgagtgcgacgagagcagcggcggcgagcgtgacgagagtgcggccggcgagcgcgacgcaagtggcagcggcggcgagagcgacgagagcagggccggcgagcttgacgcaagcggcggcggcgaggttgagcggcgtgctgcatgcctgcatgcgacgcttaaggaattaaatgaggcgagcgcgggcgtgctgcggattaattgcgggagcggctatcgaatagacgagggaaaaagtacaccgaaggtccctcaacttatcatcaagttacaaaatcgtccctcaatcacaacatgctcggttttcaccccggccggcgacgggcggcgctgtggggaggaggccgccgtggggagaggaggaggtacggcggccggcggaggaaacaccgccgtccgcatcctcgttgccccgtcgtggcacagcgccgccggactcgtcctggaggctgtgcgcgaggtgtag

SEQ ID NO: 87531 - DNA, 512 bp, Oryza sativa
  unsure (1)..(512): unsure at all n locations
  Clone ID: PAT_MRT4530_86468C.1
caggaaatattctccagctggactcacaagacagagcatttccaaaagattcagaggaagactgggattccttacaaatccatgcttttctttgatgacgaggacagaaatattgaatcgatactccaaaatgggagtgacgagcgtgctggtggagaaccggggtgaatcttgacatgtttaagttgggtctgagtaactttgccctacaaatgttgctgccctcgagcacaagtaaagatgtaatagcctctattgaacgactagaaccacagaccaagaaaaacatataaatttaagttaagcatgcatttctnncgtaatttagtattgcccttgctcatgtaccgagatggagtatttgagtaccaggataacttctgagagcaagtctttgcttcatttatgtggatgttacgattcgatcgaatcagatgaatttggattcgatcggtgaattgagtcatactgaattaacttaaatgtatattccaaaaaaaaaaaaaaaaaaa

SEQ ID NO: 87532 - DNA, 1458 bp, Oryza sativa
  unsure (1)..(1458): unsure at all n locations
  Clone ID: PAT_MRT4530_86469C.1
ctaagcttcgtccaatgctactactcctggaagttcctttccttccagcaattccaaacttgcaccacctccggttgaaatatggctcataacattggcaactcctaccttctcaacagctgcaacagagtctttacctccaattattgttgttacacccttgccactaagctcagccagcttctttgcaattgcctgacagttagcctcaggagcaaacttatcagcaacaattacatcgccacccaatagaaggatgtcacacttctccaagagtgattcaataactccaatcttagatgacactttggaaccacctacaatagccgcaaatggccgcttggggtttgaaacagctccaacaaggtaatcaagctccttataaagatcagcgagggaggcaagcttcttcgcaaactctgggtcattcttctcctcctccttgtaaaatctgacattttcaagcagtaaaacactgccgtttggcagcacagagaccgatttctcaacttctggaccaataacatcatctgccttttgaacctgtatgccaagaagttcagataaccttggtacaagaggagctaagctaaatttgggagtgatacccttaggacggcccaagtggctgcaaaggatgaccttggccccgttgccaatgaggtgtttgatggtggggatggcggctatgactcgggtgtcgtcggtgatgttctggctggcgtcgaggggcacattgaggtcggcgcgcaagagcacgcgcttcccctcgaggtccgcggctgccaggtcgcccacgctcttcttcgccatcgtcgccacggcgcgcgccaggcggctccccgccgacgccgaggccgctcgacgccgcgacgagacgtggatcgccagccgcgggtcggtcccgcgggccgcgaagcccagcgagcgcgccgtcgggcacggggaggcaacgccagcgcggggaagcggcacggtggaggcggcggcgccggccacgatcccgcgggccgcggggcgggccatggaggggaaagtggtagcggccaccgacgccattggcaggagttgggtgcagtcgtgcagagcgggaaggagtgagagggacgacttcttcggagacagggaaaggatctgcgactgcgaatgtcgaccggtcacctccgcgtcttcgcggtcttcctcgtcgtgcaagtttacctgcttgcgatgatggccgcgccatggacggtacaggccggacctgtggtctcgttgctttcgaatgtatgctgctctatgcacattgccggctgttgccccgccattgccggcggcggtggcggcagcggcgatgccaccaaggccaagccttgacctatgcatccatggaaacgccacattcctgcggcttccgtcaatctcctcccggtatttggtatccagcattgtgacaagantaaacaaatngctcggtgt

SEQ ID NO: 87533 - DNA, 1905 bp, Oryza sativa
  Clone ID: PAT_MRT4530_8646C.1
atgtcatccatcttcgccgacaacagcgtcaacaccaacctccaccagggatttcctgcttcaacaatgctggtgtggactcaagtcggcgaaatcgtcttcccggtttacaccacgatgccaatctcagccgatccatcaatgaccggaaacgagaacgcagtggctacaacccagaacgactccatgttgaaggatcctcccgctgaagcggagaacggaacatcgacgacatccgagctcgagaaggattctaatgcggcaaaaccttttcgtttagacaagagccacgagccgacgagaatgacttccgaagcgacaaggtcatggtgtcctatccacaaaaccaggaaacacactttgcaagcctgctgggtttttctcaacgtccgcgccgaaattcgcgcctgcaaagagcgtggaattcagcgtatttctccaactcgtgatgtctattgtcctattcacaagacaaagaatcacgacctctcaagctgcaaggtcttcctcagcgccacgaagacgtcatctcctaaggtccagcaatcgggcatatcccttagagatgaagacaaggaacaaggaacgacgctggtttcagatcgattcgttggcgtaatcgacatcagctcacccgaacaatcagtcctgcatctactcgaggactatggctcatcgccagcaaacagacatccacgaaggacacacgatcgccgacaacccaccttccccaacgctgggtgtagagctttcagtcgttccctgcgtgatgtccgatggcctgagagattccgacccggagcaatagagaagtacgatgggagcaccgacccagaagagttccttcaagtctactccacagtactctacgctgccggagcagatgacaacgcattggcgaattatttgccaactgcgttaaaaggctctaactcgggtgaatccttgagggaatatgttcggcgcttcaacgagtgcagaaatacaatccccgaaatcaccgacgcttctgtaattcgcgccttcaagtccggcgtcagagatcactatactacccaggagttggcgacaagacgtatcacgactactcggagattgttcgagatcgttgagcaatgcgcccacgcaaatgatgcgctgagacgcaagaacgataagccgaagaccgggggagagaagaaaccagccacggacgcacccgagtcaagcaagaagaaaaatcgcaaaaatgggaaaaggaaagctcaagcggaagttctcgcagcagaatacgcaaaccctcccaagcgcccagacccacaaggtaacgacgcgaagaaagcatggtgccccatacacaagacagacaaacattctttggaagattgccttgttttcaaaaagtcgctcaagaagcacatagcatttgaaaaaggcaagcgagtacgcgtggtcgagaaggatgcggaggcggctcctcaggaatcggactcagcatatccagactctgacctccacgtttcacacattttcggaggttccacagcgtactcctcaaagcgagaatacaagaaagtggaacgcgaagtctgttcgacatggcagggggctgcacccaagatgaagtggtctgaacagaagatagaattttcggaagaagaccatcccaagactgccatcatcccaggacgctatccgatcgtggtcgaacccactattcggaacatcaaagtcgcacaggttctcatcgacggtggcagctcaatcaacctcctcttcgccagcactttagacgtgatgagaattccgcaaagcgagttgacacccaccaatcaacccttccatggaattactccccagtcctcgtccaaaccattgggcaaaattacgttgcctgtgactttcagccaagcaaacaacttctga

SEQ ID NO: 87534 - DNA, 339 bp, Oryza sativa
  Clone ID: PAT_MRT4530_86470C.1
accttaattcctctactaccaccatttcactcacctccccatatcctctctcccctacattcactactcaactctcctcccctattccctacttccaaacacctccttcaccttatccctacactctccacccctcttcccaccactactcttatcctcctccatcatactctcaatcttcctacttcaaccatcaatactttacccactatatctcctaccaccatactcccattcctcactacttattatcccatctacataacccccatccaaaatacccaccctcaccactccttctttattaaccccaccactcacccatacaaactaccttaa

SEQ ID NO: 87535 - DNA, 815 bp, Oryza sativa
  Clone ID: PAT_MRT4530_86471C.1
gtgaggcccatgcaaagattgcaagaacgaaatgttgctgcaaataccgaaagatgtattgtcgcacatcgtagagcgaggatttaagaagggttacaagatatggactcttcatggggaagtcgccggtcataacaaagaggctgaagattcctgctttgatgatgcagaaaatttataatcgaagacatatcacagggaacgatcctggaatgtggtggctctggtatagacgatacaaatattgattttgatctggaacatatgttgcgtcatgttgaaccagaggtcctaactggtagaagacgagggttggacaattaggaagcgctggaaaaaatagtgaaggaacttcttcacgacgaagcgaaaggatgcgacaagaactatatggtgttgcgctctgtgcttgaacttctcagattgaaggccatacatgaatggtcggacactagcttcaatgatttgatggatcttctgagagtgaacacatatcaagcgaagaaattgatatgtccattatctctaggtgttcagaagatccatgcatgtgaaaatcattgcatactgtacaacaaggaatacgcggatttagactcttgcccaacatgtgagacgagtcggtacaagacgggcaacggagcctccgatggagaggtggtcgaccaagatgcatcggtggatgaaaaaaaaagattcctagaatggtgatgtggtacccgcctgtgaaagattgcctgaagtggctattttcgaaccgtacagatgccgagttgatgagatggcaacaagagggtaggaaaaaagatggtggg

SEQ ID NO: 87536 - DNA, 1320 bp, Oryza sativa
  Clone ID: PAT_MRT4530_86472C.1
ttttgcttttcttttgtgtttttttttcttgttgctctgtttttttttttttagaaaatagcaggaccattgtatgaaaaaaaaaagcccaagccttgataggagttatacacatgaaaaacaacccaaacttggttgagttagcccctctcgagagtaaaacacggccactaatctcaaaaagctaagattaacgtcatcattttcaccatataccccacgcgcaatttactaattaatcggaaactgatgaaatcatcatcgggtgtagttggaaacccccacacccacctgagccgccgccgccgccgccgggcgagtgggctcatgggaggttgaggaacacggcggtcgggtccgggtcggcgaacccggcgccggccggccagtaggacgccatgtcgaacgccggcggcggccactcgaagtgcaggtccgggtcggccagactcttggtgatggacgggtagtcggagaagtcgaggccgagggtgacggcggcggagtccggctgcaggaggtccgtgaacgagtcctcctccacggccgggacgacgagctccgtggtgatctcgctcgtggtgtcaggcgccggcggtgtcgtcgtcgttgtggaagtcgtcgtcttcttctccgacgtagcttcggtcgtcgtcttggcggcggagtcagcggcggcttcggtgaggacgggggtggtggcggcgaggggctcgggagtcgtgacgcggcgcttcttcgacgtcttctggcgcttggcggcgggtgctgcggcggcggcggatgacgaggaagacgacgacgacgaagacgaggacttcttgcgcgtgccgccgccgacggggacgttgcggagcgtgccacccttggtccagtagcggcggcaacacttgcagaagtgccggggctgggaggtgttgtagttgttgtagtagcagaatttggtgtcccgcgactcgcaccgcgggcacgggtcaccctcccccgccgccgccgctgccgccgtcgcagccgggccagcggcggcagcagcagtcgcagccgaaccaggctgtggcgtcgcgggagccgccgcgtagcccttgggacggcgcaggtcgacggtggcgaactgctgcgccggccggcggccggtctccggctgctgctcctgcatgcgcggcggcgccgtggctgctctggtccctccgcgcgcgcgcgccggtggagtcgggaggaaccgaggagcgggggcaagcaaatcgtcgaacgggtggtgggcggttggcggaagcgggagtctcttatggtcgcagtcgccctcgtgccgaattcctgcag

SEQ ID NO: 87537 - DNA, 421 bp, Oryza sativa
  unsure (1)..(421): unsure at all n locations
  Clone ID: PAT_MRT4530_86473C.1
gcgcaccggcggggccatcaggaactgcatctcgatgcaggcgtacactaccggctagggcctcaacgcgatcatgttcaggcacatcaaggagtccatcgtgtatagcgagatgacccggctgtacatgaccgacatgaggacctacaccgacaccgaatttggcctccggggagcctggttcgccgggctctaatgcgcatacgagctctgcagagacccgtacgagagcgacaacggcataaaacagtctgagacgcacggcggaagcacgtggctcgggggacatgtgttctacgacactgtggtgctcaagccgtgacacgtaggactaaacgagcgtagctgcgggtgcgacaagcatgatgactacgtaaatagtaagcacgcggtgctcatcacctncaccgacatgagccgc

SEQ ID NO: 87538 - DNA, 639 bp, Oryza sativa
  Clone ID: PAT_MRT4530_86474C.1
tggacccccgggcggcgcgccgcaggccgcggcgacaagatcaaaggatgctctcgttgcggccgccttgtactctgtcgcccgcaccgtggcggagacggcgcaccctccacggagccgcggggaccccgcagcgcgtcagcgcggcggcgccttccgccatcgtagaggccgtttcgccgccggcgaggctctctttcccgatactggtgaatggatgcactggtaaaatggggttatctgtggctgaggcagccacttcaagtggtcttcacctagttcctatttcattcagtagtagagatacgctagacagaacagtacgggttggtcatacggatgttcggatatatggtccttctgcaagagaagatgttctatcatctgttattgatgaattcccagatgttgttgttgtggactacacagcacctgactctgtgaatgctaatgctgagctctattgcaagctcggtttgccatttgttatgggcacaactggtggagataggcagttactctataaatcagttcaagattcaaataactatgcactgatatctccacagatgggaaaacaggctatcatttggaggtgcaattctaccctgaatatcctttttaggaattcaagattca

SEQ ID NO: 87539 - DNA, 672 bp, Oryza sativa
  Clone ID: PAT_MRT4530_86475C.1
atgacgaccgccgccgccgccaccgccaccgccatggccgccggcgttctcccccgaccgcgcccgcacttcctccgccgcggcatcctcccctcgccggcctccccgctccccttcgcttcccgggtctcctccgctgcgcccctccgccaccgcctcccgccgccgcgcttctccctctccccgatccccaagaccctctcctcgccgtcgcacgtccccgtccgctccctcttcaccggcatcgtcgaggacgtcggcaccgtccgccgcatcggcccgccgcccgcgccgccctccggcggcggcggcgaggcccccggcgttgacctcgagggccacgtggacgggacgggggagatcgccgcgttccgggccgagggggactcgctctgggtcaccgtgcgcgcgccgccggagatcctgcggctgctggtgtccaagggcttcgtcgccgtcgacggcgcgagcctcaccgtggtgaacgtcgacgaggaaggcgggtggttcgacttcatgctggtgaggtacacccaggacaacatcgtgctgccgaacaagaaggttggggacaaggtgaacctcgaggccgacatactcggcaagtacgtcgagaagctcctcgccgggagattggaggcgatgtcgaaggcaggaaagagaagggaatga

SEQ ID NO: 87540 - DNA, 639 bp, Oryza sativa
  Clone ID: PAT_MRT4530_86476C.1
gtcaccgccatggccgccggcgttctcccccgaccgcgcccgcacttcctccgccgcggcatcctcccctcgccggcctccccgctccccttcgcttcccgggtctcctccgctgcgcccctccgccaccgcctcccgccgccgcgcttctccctctccccgatccccaagaccctctcctcgccgtcgcacgtccccgtccgctccctcttcaccggcatcgtcgaggacgtcggcaccgtccgccgcatcggcccgccgcccgcgccgccctccggcggcggcggcgaggcccccggcgttgacctcgaggtggagacgagcaccctcctcgccgggacgcagctcggggacagcgtggccgtcgacggggcctgcctcaccgtcgcggccatcgacgcggcggcgtcgacgctcaccttcggcgtcgcgccggagacactgcgccagacgtccctcggcggccggaccgccggcgacgccgggaacctggagcgcgcgctcacgccgtggtcgcgcatggggggccacttggtgcagggacacgtggacgggacgggggagatcgccgcgttccggaccgagggggactcgctacgggtcaccgcgcgcgcgccgtcggagatcctgcggatgctg

SEQ ID NO: 87541 - DNA, 375 bp, Oryza sativa
  unsure (1)..(375): unsure at all n locations
  Clone ID: PAT_MRT4530_86477C.1
agaaaccaagatcggtgatggatgcttaattagggtgtgattgatacatgntcaattaattaattaatcgccnttgtatattgtaggagaaagaaagaaagaaaaatagatggatagatagcccaagaattgcagctgtcaggtactgtactaccatnagacaatcatggatggacatgttatatagtactccagctgtgcaatgcctgaagactagtagtactactacatatatcaacagactntgcaggcacatatanatagtgaccaaaaaccctcctgcttgtgaattttcaacccttnttgtcttggaatggaatgcccagtttcccaaaaaaaaaaaaaaaaaaaaaaaaaaaaaaaaaaaaaaaaaaa

SEQ ID NO: 87542 - DNA, 254 bp, Oryza sativa
  Clone ID: PAT_MRT4530_86478C.1
gcgtgactggtgcggaatcgaccccagctgcatgcccgtgccaggatgctggaaccaccaacggaacgaagggaagggaaaccaattgctgcaaccaccgatggttctgccctccagtttggcaagatacggaacacgcggccaaaatttgaatgcctgatgtggcaatgatgaatgttggtgctgctggtgatggtgaaaagttgaaatgtgttgtaaccccatcgatcacttattaaggataaggagtataa

SEQ ID NO: 87543 - DNA, 504 bp, Oryza sativa
  Clone ID: PAT_MRT4530_86479C.1
gtcgccgccatcgccggcgctgccgccgttcttgcaagcgagctctacagtcggaggtgccgtcggttggcgacgagggtccgggagctggaggcctcgcttgccgccgccacggagaaggccgccgccgagcgccgcggtagggttcgggcgcagcagtcgctaaggaaggctctgagcgagcaagagctcagctcggatgagaagaagaagctgagccaatcccccaagtcgttccccatggcttcgatcggtgtcgtgcagtcatgcttctccactaggaatgggacgccgaggcagcctttggtggtgccacttgccagagcaaccgtgatgcttgatccagcccgtgtccctgcggaagcgcttgagggacttgccgattactcgcactgctggatcctttatgtgttccatctgaacactgaccttgataaaatgtggaatgaccctgctaggtccaagctaaaagcaaatgtgagagtacctaggttgcaagggggc

SEQ ID NO: 87544 - DNA, 316 bp, Oryza sativa
  Clone ID: PAT_MRT4530_8647C.1
cgggtcgacccaagccgtcggcccgttcctcttcaactaattcctttccttttcttatccaagcggcggtgccggttctggttcaagcttgtttgaatcccgtatcttgagagatcgagggcgcgccccaatctctgtgaggaggagggagagcatgacctctctccgaatatgtgcgctcgccagatcgctctccgcgctctatgtgcgcggaaagacgtcgaacgtctcccccaattgctgaatgggaattatacgacccaacgtccgctgatggatgcacagagttatctatcacagccacagatgagaaaaa

SEQ ID NO: 87545 - DNA, 825 bp, Oryza sativa
  Clone ID: PAT_MRT4530_86480C.1
atggccgccggagcggacgagcggtgccgcgcgctggtgtccggcctgctgtcgtcgatcgaccggtctataagcatcgcgaggtcgtgctgcacggaggccgccgccgccgggcgcctgacccagcaggccggcgccgcgcctgagtcgccgccgtccgccgacggtagcgccggctcggacctcggcgccgactcccggtgccgcgccaatgcggcggggccgtgcaagaagaggaagacgctgcccaagtggagcaagcaggtgaaggtgaggtccgtgcaggacgtcggccccctcgacgacgggttcagctggaggaagtacgggcagaaggacatcctcggcgccaagtacccaagagcctacttccggtgcacgcaccggcacacgcagggctgccacgccagcaagcaggtgcagcgcgcggacggcgacccgctgctcttcgacgtcgtgtaccacggcgaccacacctgcgcgcatggcgtgcgctccgccgccgccgccatcgacggccaggccgcggcgagcgcggagcaaaagcatcagccgacgccgccgcaggagcagaacgccgtctcggtcgcgttcacctccatggccgtcgtcaacgcatcgacgtcgtcgcccttcgtgtccccggcgatgtcggactgccagattagctacgagctgggcggtggcagcatggccggagtccgcaacgtgcccgacgtggagcttgcctccaagacgaactcctccatgggagacgacatggagttcatgttctcgctggactccgatttcttggacacctacaagtactccagctatttctaa

SEQ ID NO: 87546 - DNA, 447 bp, Oryza sativa
  Clone ID: PAT_MRT4530_86481C.1
tcgttgaggaggaggaggaggatgaggaggaagcggctgtggctgcggctaggcgtgtcaagagggaggtcgcggatgacctgaacggggagcccgcggaggaggaggatgacgacgaggaggaggtggtggtggaggaggacgaggaggtggcctgttctctcaccctgtcccgcagcaccccatgtagcctgcatcagtgggtaagatttgctttaccctacttacctcttcacactttgataaaaccttccattcgcactacgtccgtctgctatatgctactcactttagtagacgtgcttcatcctcgcgccatattctgcaggtttgagacagtcaattcaaactctttctgcaaatttttctcacaactaatcagtgaactgatgaacttattactagcaacgtattaagtattaataacaccaacggttcatcagcaac

SEQ ID NO: 87547 - DNA, 156 bp, Oryza sativa
  Clone ID: PAT_MRT4530_86482C.1
cttgtttgttgtccaccttgtaagaatgtgtaagatttagagtgtgaagccaatttcatttcatgtacatgaaggtgcagaagttcttctggattttggacctgcttgcgtgcttgcaaataattgtgaaaagatgctactcgccggttattgccc

SEQ ID NO: 87548 - DNA, 818 bp, Oryza sativa
  Clone ID: PAT_MRT4530_86483C.1
actctataaagcacatatactatatagtgacagaaataaacatttctaacatggtaaatagtaaatcaaatagtttgcaagttgcaatacaacaatttattatcgataaataatatcgatagtataattgacaactaaaaaacactatagaaacaaagtagtatgaatacattaataggagaccacaaacatcctatatcccttataaaaaagagcttcttcacgtatttcttgaagcgaaatcatttcttttgtgaaccgattaattgatctccccgttttcttttgtttcttttctgagcacctgacaaatgtttttttggtaacattgtaacacctgagccagggggattttggttttgaatcacttgggcgtttccaggactctgttgagtctttgtctccaaagagagcatttttagagacaacttccgcaagtaatcagaccggctggtggctccagtatagattttctcttcaaatcgcactgctaacttttgaagttcattcagcccctcaggccctgatactggtagatgcttcttcagagtctccagtatcttgttgacgatcctggtgcgtccctcagactggagctgggagcgccagtcgccgccggcgggggcgggggcgggggcgctgagatcgatgcccccagcggcggcggggtcggccccctgggtgggcctccagttgccgccgccgccatccatcctcctcttcgtcttcctcttcttcttcttcgattgcaatttgcaagccagcgaagaagcagcagccgtggagctgatctgtagccgatttggtgagatacccat

SEQ ID NO: 87549 - DNA, 4400 bp, Oryza sativa
  Clone ID: PAT_MRT4530_86484C.1
attacgagcagcgatctcacagtatatttatattagaatcaaaccaggctggagatgtagactgttctgtacaagaggggccgctaccaaatccagctagtaaacagggaggatttccaaaagtacaaccacacataataaataagtacacaccagtagcaattgcatgtttgctaaaatgttaattatggttacatatatttatgtgcatatatttatagagcgatgcattaaccgttccagttaagggcgtgcaagcgatcgcacaatatcgatgcaaaacgaagattggtgccagcaggactgaagaagaatggggattaagcacccacgcaattttcccaacaaccatagctcgaactgaaactgcctccaccagtctgttgagcatactcagcaattactttgcgggcacacgcgtcccacgtcctcgcaatttctcttagtgacatgggctcagctaaaccccgaagcaatatgctgaacttcgacctcgctttggtcgacaggtcatccgagtttctttgttcatctgggaacttgtctaggagaaccggggagcacttagggtagctagcggggacaagcaccctcaatggcaaaattggactcatctgtgctgatgcaaacatggacttcaagctggggctaacagccacagcagtaaatgtgcatttgatgactgtcccttctgtcccttctgatgtagcaccaaaagactcagcatcatcctcgcaaacatggagctctgtatctatgagctgttggtttatctcatgtatttcctccataagagcatggtttatctcggttttttgcccctttacacgtgaggttgcagttgactgcaattcaggggtacctatgctgaatgtttgcttcaaactgtcattaacacttccagctgatgacacattaagaggcatagcactagtgtcacgcttcattttctttgatgtaccggtcccatcatgtgttatgaaattcctggcttgcaatcggcactttgtcatagcaactaaatcttcaccaacagcagctctagaaccattaccaggcgcagacccagcaatcctgtcaatcatgctgacaacagaacctatgtcgcttactgcagcactcaaggactggcgttgtgttgtccgcaacgctttaagtaagcggtctaaaggcctttctgctgcacttgatttggttagaacttgggttggcatgttagcctgatttccatcaacacttgtaaattctgccaacaagggtgaggccgagatccctggagtgttaacggcgattgattgtgactgaggcgccatgtttgtttgctgatgtgtagcctgaccagtattagtaagtgatgatgataaattggagagtggtttctctgaatccactggtataggagacggggcaacaggtggcgatggagatggcatatatggtgagttagctgactgcaatggtgtcccggtcttcacttgagacggcaagagattgtgctgatcaacctgaggagaatggtgtgaaatttggggggatgatgcttggaggttttgtggtgacgaaattgggaaagcactgccctgtttcatttgctgattataaaagttattgcgctgagccaagtgctgttgataaatcccaggtttcattgcagctccttgtctaaccttcagctcgtttgcatcatttccagaatgatgctgtggaacctgcatctgtgattgctgctgtttctgtaattgttgctgtgctgggagttgctgctgaagcatttgtttttgctggaactgctgaaacatttgacgcttcatttgctgattctgcatcatatgatgctcctgctgttgctgcttcagctgctgtaatgaatttgcgttggcttgcatggaattggcattagcctgcattgtacctactgagttgtgagataacatgctactactggcctgctgttgtgcattcagtgtaccctgcatgggcccagtgcttccctgttgcaaagcaccactcattgaaccatgctgcaaagaattaaaattgcttccttgagtaacctccaaattagaggtagcctgtggtgcatttgtgacattttgctgtgttgctggaacaccaaagtttgttgctggggatgcaggtaaatgttggataccagctgcacctgaggattgtaatccggtgctcatacttggcatgcttgcttgaggcatctgattagtatggttatcatgctgctgcaaaccttgggaaggttgttgttgttgcggaatgttagaggtaggaccttgcccagcagattgttgaaattgtgtctgctggccttgcacccttggcctcttttgcgaatttaggatactgataatttgcctctcgtacgcaggaattttgtccctaagggcaggctgaatgttgcccttgttcaattgcagaacatgcattgtacgctccaacatcagtttgaaattcttcatcttttcatactgttctgttggcttttgaggtggaaccatgttgtcaacatgctgtagcttcaaagagatcttattgtacaaatcatttaattcaggaaaatattggtcctttaagttcttcaccatttgatatgcctcctcttgccaatctcctgtacctgtacctgtatgacctgtttgggcagtggagtccacagatgtgctagacgaaacttcttgaaggcccctttgtgcctgcataaattgcttttgttgatcaatgttattttgttgcaagagcatgccagctgacgtttgaagcctttgttgcatgggaggttgctgcggcattcccagttgttgctgcagctggttaggttgagcttggaattgtgacataagatgctgctgtgattgctgaagttggttatgttgtgattgaggctgcatcaaacccagtgatgactgctgagcatgctgctgctgctgtggttgctgaactgcctttgtttgtagcatatgcattcgttgaatgttcggaacattaggcacagttccaagaagctgttgttgctgctgattttgttgctgctgctgttgtagagttgaaatatttgcctgggagcccaattgttgctgctggtgcgagggcatagactgctggttcaacatctgctgtgtctgctgcatattcaaaagattattcgattgaactggtagtctctgttgctgtggcatatccacagcaccattctgctgaccaattaactgattttgttgtaaattttgctgctggcccattaattgatgttgcaaaggaatgttaggctgctgagttggttgagcttgctgcagagaaggctgtggatgcatggaggactgtgagtgttgctgctgcctcatagcagattgtgtaggttgctggagtaacgattgcacagattgtggtaccgagttcaaagcattctgttgaataccaccctgagatgatgactgtaccattggttgtgtctgcggaatggactgcccgggttggaggctagatggtatttgcatcattggctgttgtgaggattgcatctgtgttggctgcaacaaagattgctgttgcataagtgaattttgctgcaacttctgcttcatcataatttgctgctgctggtaaattaattggttctgagattgttgctgctgctgctgccttcctgccatttgcctttgcgtagcatatatatcttgtgaagcgccttgtgccaagccattattcatagtgttctgcggcatgccagacatgttctgcagtgtggatgtctggttgacacctggcaagttctgaccaagattagtaagagaagattggacagacgtagaatttggctgccgggcctgttgctgagacatcaaagggatcgctgatgactgtgttggattactgccttgagggagtccaggtactgttgcagaaaagatcgtgaatgtgcataaataccttgtagacaatacttgcaaaattgtaaaaagcataacaacaccccaaataagcatgataaagacatatttgagacgagattctgagccagggggattttggttttgaatcacttgggcgtttccaggattctgttgagtctttgtctccatagagagcatttttagagaaatcttccgcaagtaatcagactggctggtggctgcagtatagattttctcttcaaatcgcactgctatcttttgaagttcattcaacccctcaggcactgatactggtagatgcttcttcagagtgtccattatcttgttgacgatcctgttgcgggcctccgactggagctgggagcgccagtcgccgccggcgagggcgggggccggggcgttgggatcgatgcccccagaggcggcggggtcggccccctgggtgggcctccagttgccgccgccgccgccatccat

SEQ ID NO: 87550 - DNA, 1032 bp, Oryza sativa
  Clone ID: PAT_MRT4530_86485C.1
aggagcgcgtaggggaaagcggcggcggcggtggcgacgcagacgcgactgggagtcgacggcgcgacagcgacgcggagctctccccggcggcggtgctctctcctccggcgaccgccccctccgctggccaccttctcaccggtgactaggaaacaagcttttctctgttggatatacctcttctcttgttggaatggaggccaaggttttcaggtttctgaagcttgtcggagttggcttcaaagcaaggacagagcgtgaaggccgtgagttgtttctgaaacttggttacagccatgaggtgcagttcactgctccacctgctgttcgtgtcttctgcttcaaacccaacttaatttgctgtactggtatcgacaagaatcgggtgcacaactttgcgggcgctgttcggaactgtaagcctccagaggtatacaaagggaaaggcatattgtacattgatgaagttatcaagctgaagccagggaagaagcaaaagaagtaatgtagggatgagcctccatattttactttcagtctgctaagatgctgtagcacatttttagtggcgcatatgttcttgtggttttcttgttctggtctgctggatcatctttgccacagtgccatgctggaactggaagacccaataattctcttatgcagtgtatgtgaaattgtgaatcatatgttgagcctgtatgacatacagaccagagggacaaatcaccttccaaattttttttggactggcaacgtgtaaaactttcgatgggtttgctgttctttccactgttctgctctgctatcctagacattgagctcagtgtaaaactggatctgtgcattccaggagtaatgtttttttgtactgagctaaaatctgcagttttatatgcatcatttgatttgtgatggtgataatggtaaagccatgctgccaactaaataattgtgaagaacaacgtgcagcttacacgttgtagtctcatcggtccttttcagtaaagatggctgcttcagttgttg

SEQ ID NO: 87551 - DNA, 387 bp, Oryza sativa
  unsure (1)..(387): unsure at all n locations
  Clone ID: PAT_MRT4530_86486C.1
atcaaancactcctctcctatcctctactcaaatcggatcgcgagagccccaatcccacgaccgagcgatccattactgcggctcacnaccaccgcaaaacgatatagagacacagctccacctcgtcggcggctgaatgatcgcagcagcagcagccgccgtatatcangatgagaggcaaagatatcatctgtgttcaacgaccatgagaccgcccccttcttaggcttactcagcgccggctccggcctaatattctcatgcatagcggcagcataccggacggcaaaaagcggcgtcgatgtggcgtagatcggcgtgatgcacccacaactcgatataaactccatcgtacccctcgtcatagctggtgtgcttggtatcta

SEQ ID NO: 87552 - DNA, 1086 bp, Oryza sativa
  Clone ID: PAT_MRT4530_86487C.1
atggcagcagctcgtctggcctccacggtgctcgccgggaggaggagggcggcctccgtcgtcatcgctgccggcccacgctacggcggcggcggcggcggcgtccacgtgcacccgtgggcggccttcccctccccgaccgccaccacgcgccacgccgtcgtcgctgccggcggtggcgtcccctgcctgctcccgagggcggccttcccctccccgacgctgccgcccaagccacgggccttctcctcatcaggcagcctgggtcgccgggatggtggtgcacccagaggcgggagcttcctcggatggaccaaaaccgtcgacttggatctctcccggatcctcaccaacatggagatgctcgtcaagaccaccggctcgcacaaggccctcctcgaagaatacgctcaaacacttgagaagctaaccatagcggtggagaaaaatgagaggagcaagggcagcctagcaacaacttccttatttctcatggcttcagtggtcactatttcttttggtgtctacttttttggggttttcactgggcgagtagatgttaatgggtttctcaagggtttcatcatcgatttccttgatgatcctaccatttccgtcaaaatgcacgattacgttgatgatttggccggcagtgcagtggagtccattaacccaatcaaaagatttgtccactggttgtctggacaacccaggcctgctcattatcagaagctcaatgaggaagtccttaactattataccgactggtcatctatccttgcatttgccgtcaactccattgccaaatcagaagggggcaaaatatctgaaaaggctttgtggcgctttttgatcaatgtgggggtgcaggaaactaaactgaacaaggcattgctgaaagtactagtgagagagaggttcattttgagacaagagtacaaaggcgtcatcagttacaagatggtggagaatgaatacaaaaccaatttcaagggcaaaattcaggagaggattcggcctatcctgaaaagtgagtttgtgatgccagctgctgcacgtggtccaaaatctaagcccagccattaa

SEQ ID NO: 87553 - DNA, 273 bp, Oryza sativa
  Clone ID: PAT_MRT4530_86488C.1
atggtgcaccagatgggttggtggaagaagacattgttgcaggcggagatctcgtcaaggagagagtcgcctagaaatcgcctttgcgccggaggagtcgccggagaagaaagagaagaggtgttaacaaccaaatttggtaacatcgatgttaggaaagaagattggatcaaagcgaagtcggaagcggagatcgagttcggaaacagagcaggaatcggccggagtccagattggctacggttaggatcggctaggtctgagtcgggctaa

SEQ ID NO: 87554 - DNA, 322 bp, Oryza sativa
  Clone ID: PAT_MRT4530_86489C.1
tttctaccccaccggccaaaccacgcgcgaagggaggctgtcgacaccacagcgcataccaacactggtggacacaagaaccgtacgcgcgggcgggcaccgcagatgccgacccgggaccgagcacgttagccgacggaaccacagataactgccggcggcctgagaccgtgaaggaccggagctaggaggagctggagagccgtggccgctagctcagttagctcgtcacgccgcaccaagctcggcgacccggccgagccggagccggagcctgagccggaggcggcgagggagagggagagggaggcggccggcgaca

SEQ ID NO: 87555 - DNA, 741 bp, Oryza sativa
  Clone ID: PAT_MRT4530_8648C.1
atggcggccgacctcccgcgccggtttccttccttccccggccgccctctctcgccccggctctatttaaaccctccccgtacctcctccgtccgtttccgcctctcgccgcccttcctcctcgccggaatcgagctcccgccgtcgctctctctctccgccgtcgccgccgagctccggtccgccgccgtcgtcgccccggaccacctcccacctcagcgccgcctccttcggcttcgccgcatcctcgccgacctcgtccaccccttcgtttcgctcaccgaccgccggaacgccgtcgaccccgtcgacccgagccgcgccgccgccttcctccgctcccgccgcctttttcgtcgtcgccgtcgacctagggtgagccgtggaccgccgcctcttttcccccttcccttcccctctctcggccgccgctccgccgtgcctatggccgccgccggcgaccataggggcgcgggcgccgcctcccgcctgctgcgccggcttggccgccctcgggcgcgccgagtggctgccgcgtggggcccggccgtcagccgcccgcgccctcggttgcggctgacgcgtggggcccacggcgccggccggtgtgagcccgggtgcacccggtccaccgtggaccgtgaggctaccgcgtgggccccactcccgtggacccgtcttgctcaatttttcccaaacccagaagtggagttcctagaagatgaaggctttggtgtctag

SEQ ID NO: 87556 - DNA, 160 bp, Oryza sativa
  Clone ID: PAT_MRT4530_86490C.1
cttcttaggtcaagcaaaacccactttattttcatgtacctggcaaacccagcgctgttaatacttttcaaacagtaaaaaaaacgtatccacggttcaaactatgggcattaattaccacacttccccgatttttttctccatacctgacagggtacaa

SEQ ID NO: 87557 - DNA, 562 bp, Oryza sativa
  Clone ID: PAT_MRT4530_86491C.1
cgtttttgtgagagggcttgaagaagaagtcgtgtactccgctggtgaaatctacaaaattcttgacaagggttctgcaaagaggcgcactgcagagacactgctgaacaagcaaagtagtaggtcacactccattttctctatcacaattcacatcaaggaactgactcatgagggtgaggagatgatcaaaattgggaagcttaatctagtcgatctagctggttcagaaaatatctcacggtcaggtgctagagatggcagagcgagagaggctggggagatcaacaagagcttgctgacacttggtcgagtcatcaatgctcttgttgaacactctggacatgtcccatacagagatagcaaactgacaagattgctaagagactcattgggagggaaaacaaagacttgcattattgccacaatatcaccttcagtatatagtttggaagagacactgagcacactggactatgcacaccgtgctaaaaatatcaagaacaagcctgaggtgaaccaaaggatgatgacatctgctgtgatcaaggacctgtactct

SEQ ID NO: 87558 - DNA, 276 bp, Oryza sativa
  Clone ID: PAT_MRT4530_86492C.1
gcggccgggatctttcttcccccgattgcgcccacctgctttggtgctactcgtcagcatggcagtacacgctcgtattcttctcaagccaagtgatcatcgccgtcctcctctcggagcaacccgtctgccatctagatgctcataccaggtgatgacccgccatttttattgcggtatggaagccgacctcaggaccacctcgtcaagaggatgacggacatgccgcgaaagggaacaacctgacgcgtgaggacgtttctgccgacgagagag

SEQ ID NO: 87559 - DNA, 259 bp, Oryza sativa
  unsure (1)..(259): unsure at all n locations
  Clone ID: PAT_MRT4530_86493C.1
agaaaatgtaccaggcgatcccgtacaacgcgaaccgggcttggccggcggcgagcnngtgncgancngngcggcggcgcncnnccgctgtttgngncgnanggnaatgantgaggtgaggagggcggtggcggagtgcccggtggtggtggtgggtcggagcgggtgctgcctgagccacgtcgtgaagcggctgctgcaggggctcggggtcaacccggcggtgcacgaggtcgccggcgaggcgagctcgcggggt

SEQ ID NO: 87560 - DNA, 1709 bp, Oryza sativa
  Clone ID: PAT_MRT4530_86494C.1
gtttcattccatctccaccagctaaaagcaagccagccagccaagctctgtcttccatcttgcatacatcaacgtcagaaaaatcatcagatcgagatatcgacatggtggtggtggtggcggcggccatggcggcggcgagcttgtgctgcggcgtggcggcgtacctctactacgtcctgtggctggcgccggagaggctccgcgcccacctgagaagacaagggatcggcggcccaaccccgtccttcccttacggcaacctcgccgacatgaggagccacgccgccgccgccgccggcggcaaggctaccggagaaggacgacaagaaggcgacatcgtgcacgactaccggcaggccgtcttccccttctacgagaattggagaaaacaatacggcccggtattcacgtattcagtagggaacatggtgttcctgcacgtgagccggccggacatagtccgggagctgagcctgtgcgtgtcgctggacctcggcaagagctcgtacatgaaggccacgcaccagcctctcttcggcgagggcatcctcaagtccaacggcaacgcctgggctcaccagagaaagctcattgcccccgagttcttccccgacaaggtcaagggtatggtcgatctgatggtggactcggcacaggtcctagtcagttcatgggaagacaggattgacagaagtggcgggaatgcactggacctgatgattgacgatgacatcagggcatactctgctgatgtgatctccaggacatgcttcggtagcagctacgtgaaaggcaagcagatcttcgacatgatcagggagctgcagaagacggtgtccaccaagaagcagaacctgctcgccgagatgaccgggctcagcttcctcttcccgaaggcgagcggccgcgcggcgtggcggctcaacgggcgtgtccgcgccctgatactcgacctcgtcggagagaacggggaggaggacggtggcaacctcctcagcgcgatgctccggagcgccagaggcggcggcggtggcggcggcgaggtcgccgccgcggccgaggacttcgttgtggacaactgcaagaacatctacttcgccgggtacgagagcacggcggtcaccgccgcgtggtgcttgatgctgctcgcgcttcaccctgagtggcaggaccgggtgcgagacgaggtgcaggcggcgtgctgcggcggcggcggacggtcgccggacttcccggcactgcagaagatgaagaacctgacgatggtgatccaggagacgctgcggctgtacccggcgggcgcggtggtgtcgcggcaggcgctgcgggagctcagcctcggcggcgtgcgcgtgccgaggggcgtcaacatctacgtcccggtctcgacgctgcacctggacgcggagctgtgggggggcggcgccggcgcggcggagttcgacccggcgcggttcgccgacgcccggccgccgctgcacgcgtacctgccgttcggcgccggcgcgcgcacctgcctcggccagaccttcgccatggcagagctcaaggtgctcctctcgctcgtgctctgcaggttcgaggtggcgctgtcgccggagtacgtgcactcgccggcgcacaagctcatcgtggaggccgagcacggcgtgcgccttgtgctcaagaaagtgcggtccaagtgtgattgggctggatttgattag

SEQ ID NO: 87561 - DNA, 1042 bp, Oryza sativa
  Clone ID: PAT_MRT4530_86495C.1
ccccacagagttaaatttctacttcgccagttgggagagaaccaaaaatcccccagctttttggttcttatgtctaagctgactcctactgctctaacgtatggacgtatggacgtatgcacagcaattccaggctcgaatggcaagcagtgcggcgttggccctaccacgcggcgaatcattgctggtgcagatctcgaggccggcagcggcagcggcagtggcgccgcgcggcgaaatcaggatctaagtacatggtcaaaatgggactacgtaccgtaccgtaccgtcaacgtgacgatcctggaggagattataaaaacggaacgaacccgacaactcgaagatccccgtcgtgacatagcgtatggtcgcgtggatgtatgtatgtatatgccgtcgccaacagtgcatcggtcgggcaccttttggcgttgcgtccgtagcgaatggcacgggtacatgacaaaaaatcatgagtctctcaagacaatggagcctacgagcataaataccatcgagatacaagcaaagaaagatcccagagactattccaacaatcacttttcaccaaaccccttcatcgagagcgtcaacaaagggaaaaccccggtcccaagtgctgtggaatcggtctcccaccggcactgcagggcagtaccagtactgcaccggtatacacaaaagaatgcaaaagagcaacagattaggagtaggagtacgtatgctaaaatagtcggtggcagctggctccaactttcggttcttcagttactggagtaccagtaccagtaccactgccattcagggcagtctgggagtagaagtttaggacggccggcgggcagcggcagcagcaagctggccggcaatggctggatccatgagctcgccggcttgccctcattgactcgtcaaatccgcctagtgaccacaactccgcccctggctgaagatgcagatgcagaggcgcagctgtttggtattgatcgtcgcatggaatataaccaccgcaaatatgataaagattaataggtaactg

SEQ ID NO: 87562 - DNA, 1797 bp, Oryza sativa
  Clone ID: PAT_MRT4530_86496C.1
atggaggggtacctcaccggtgcgaaacgcgcaccgtcaacggaagtcgacgtcaaggagggcgacaaagtcgtcacaaagatcaaccctgcctacgaggagtgggttgttgccaatcaacagatgcttgggttcctccttgcatctgtatcgaaggatatcctcactcaggtcgtcaatctggagacggtggcggagacatggagtgcaatcatgacaatgctctcctcacaatcccgtgcgcgtgcgttgaacacacgtcttgcgctgtccatgacccacaaggacaatctaagtgtaacggagtacattggcaagatgaagacgctggctgacaagatgtcatctgccgacaaacctctcgacgatgaggagatgatgtcttacatcctcactgggctggacaatgattacgagcccgtcgtctcttcccttgtcggcaaggcggaggcaattccagttgttgagatctatactcagcttcccagttttgagagccgagccaagctacgacaacaggcgaacggatcctccgtcaacagcgcaaggcatggaggtaagggagacggcttcaccgacaacagccccttcggcaacaccaactccttccgcgctcgtggcaacagcggaggctatgcagctgcggcttcctatggtgtcgatgcaaattggtatatggacaccggagctaccgatcacatcacgggagagttggacaagctgacgacgcatgagaagtacaacggcaaagaacaaattcatacggcaagctatgcagccgttgataaccatgcctttgttgaagttcactctcattctattgctattaaggatcaggtcacgaagaatcttcttcttagagggccatgccgcaatggactgtacctgttgccaacatcttcattctctacatccaagcaagttcttggagccatcaagcccacaatttcaaggtggcataatcgcttgggtcacccatctttagctattgttcaaaagatcaacaggaacaatccaaagaaggtgctgaaaatactggatagaataaccaagttactgcagaaaatcttgaagaagatgcagcagatccagatttcacagaagatcccggagacaacatctctgatggctcaaatcccgagggtgatacccctgcctcacttgcgcactcgcctgcgctctcattcaacaatgacgaggatgtcaatggttcgcttactcaacagcagggggatcaatcgtcggctatcacgtccccaattcctagcaatcatggcgatggcagtgaaggatcctttgtgcctacttcggatccgactgtggctcagcctacatggccaactactcatctccattgaggaggtgtatatgaaacaaccccctggttatgaaaataagagtaagcctcgttatatttgcaaactagacaaagctctttatgggttaaagcaagctcctcgagcttggtactcaagactgagtactaagttagttaatcttggttgtcaagcatctaaagctgatatgccactgttcttttataacaaaggaagtgttacaatatttgttcttatctatgttgatgatataattgtagcagtgactgcattgctggcagacttgaggcaagaatttgcactcaaggacttgggagatcttcattattttctgggtatagagaaaaggaggattttaaaggtattgggccctgtccatgagcatattgtgaaagcaaatatgcttaagtccctaaagacacatggcatgtcgcacccgaatataggctgcgaacgctaa

SEQ ID NO: 87563 - DNA, 242 bp, Oryza sativa
  unsure (1)..(242): unsure at all n locations
  Clone ID: PAT_MRT4530_86497C.1
tcttctgcntgagacngtttccccaattngaattctaanggcggcngaaaaaatgaaagctttattganggttgnggacacgtgacntgcaaatcntgctngtgctntgtattccctgantaaagggtgcaatagttggttggcgnataatcaagcaatnttnaattcccaatggtaatcctcttgggagggttnttgggaccantcccaaattcctntgatttntctttcttacctattat

SEQ ID NO: 87564 - DNA, 158 bp, Oryza sativa
  Clone ID: PAT_MRT4530_86498C.1
caaccaggaaaaacaacccatttttggttataaaacatggggccctggaaggggacaaggctgggttccagacacacaaaaccgtggggtggggagccacaaaaacacatttccttttgtggccgggttgaaaaaggcagcattttctaacatggacc

SEQ ID NO: 87565 - DNA, 491 bp, Oryza sativa
  Clone ID: PAT_MRT4530_86499C.1
cgcgagacgaatcttttgagactaattaagccgtcatgcacgcgctcctcccctccgtgaatcacttctctcccccacaggccagatcgcgctcactatccaaccgtcgacgccgctcccctcatccttcgccgcgcccccaccacgccttcgccaaccgccactcctgctcgcctgaatccacgccgccgccgtcgcggatccctgctctcccggtccctcccgccccatcgccccaacacttcccccgtcagcaccgcctccatccatccgccgcgtctcgctgccggccgcacccccgcctccatccatccaccgcagatcgccatcgcacgcctccgcctctcaaggtcgcacgctcatcgccgcccgacaccccgccgattggggaccgaacgctgaccctgcatcgacgccacaacagtcgacagaggggagatgttgaagacctcactccaacgacggctgcgcgcggcgacactaccaggcac

SEQ ID NO: 87566 - DNA, 186 bp, Oryza sativa
  Clone ID: PAT_MRT4530_8649C.1
acgcgtccgagtagaagttgtgcgtttgtgttgttcttcgccggcgccgccgcccatggcctcttccatggccgccaccggggcgcgctctcgccgacagttttatccgccgagaggccaactgtccgcggcggcctattctagcccccttcgccggcgacctaccgctctctccgactccaatcc

SEQ ID NO: 87567 - DNA, 329 bp, Oryza sativa
  Clone ID: PAT_MRT4530_864C.1
cgtcccccctcttcccggcgcggcggttgctctccagccatggccgacgccggcggcgacggcgtcgcctgcggcatgtctacatccttcctcatccacctttcgccttcgccgccagcgtattaccacgtgcctatccctcggactccgacttcgtacgcgcacccgcgacgagcagcattctgtttcctatgcaccgcacctaagcctagagcacgcgccgacagttgcaactcatccctcaactttcgaggtgacacataactgatgacatcatccagccgtatactacgtgatagccctatatctgaaaagccatatacatggca

SEQ ID NO: 87568 - DNA, 1606 bp, Oryza sativa
  Clone ID: PAT_MRT4530_86500C.1
ctacccgtcgtacacctggtttgcaatagcttcacggtaagccgacatagctgcctcgctgttgggtgagtcgtaccatgtgcgtaggggtggcgcctgtggcacatgggggtacccattgtaaagcacaaaaggttatcaatctccaagtttccttttgtttactcagatattcagtgcaacacaacgcctgtagcaattcctgtctcagattgttacatggcatcaaaacagggagcatcaatataaggatgataccatgtcccaaaattcaaaaatgatttccaaaattcagctaaacctcacagaggcacgagcattacaggcgacggagtacttattaccgaagtaacaaattggacatgagcatagcagctggcaaaatcccgaacaaaaaagacaacttgttatagtcattctcgagaagaggtatgtgcatctcatcaactgcaccaactgcatcacagaaaggaaggcaggcaggctcctgccttagacggtaatgttgagcagttgtttggatcaactcattggattcctggttctggctttgcatcttcagtcggtgaattaagaccctcttcgttgtcaacagaagcatgaagaaatcgatatctatttaccgtggcattgcaacgaaccatcctattgttgatagccctcacgaaatagccacctgccatagagtacagaaacattccaattccttccatagggcatacctcataggtaccatgcagatggtacctcctgagcatgatggtagagggaaaacctccaccattaggaaacttcatggcatagtggaagagaatgtaatactcacgcatctcctcgccaccgcatcgcctcctcagcagccccgtgccccgcgccccgcgtcccgcgccgccctcgaccgccgacgctgcgacccgcgccgtctcctcgctgccgtcgccgcgccccgagtcccgcgtcccgcgctgccctcgccgaggagccgcttcctcgccgccgtcgcgacgacccgcgccgccctcgactgccgccacctccgcagatcgccatcgcacgcctccgcctctcaaggtcacacgctcatcgccgcccgacaccccgccgattggggaccgaacgctgacctcgcccctcgcccaagtcggcgccaagggcggggttcgccaatctgcttcccagccgcctcgcccgctccatgggagaggtgacacctgtgcccgcctccagcgctccatcgtgcttgctgttgagtaggctgcaattttggtcggagtgcttcaagcggccctttaggtttttgagggtgtcctccttgcttccccaaagcccaatcagcagaatcaaagtaagctcgctcatgatccttggctataagcgctggctttctgggaactattccaccatactttttctttattgctgcttcctcttcctgaggtgaaggcatcacctctttttcattctggttggcaatttctactttctcatcggaaccatctacttcgggcctcacttgacctgttgtatcatcagatggcttccccgacatactgtatatgtttcaacaagctgggttcgagacgaggtggggaggagcgcgtggagg

SEQ ID NO: 87569 - DNA, 190 bp, Oryza sativa
  Clone ID: PAT_MRT4530_86501C.1
atgccgtggccacccccagcgtcgctgtgttgtgccgcacctcggccgctgcccctcgctgccggaatcccacgggagcccgcttttccccgttcaagggtcccggaggtccccggccatcactcgtcgcccatcggccgccgttggagcaccaccgctatctcgcctccgtccggtgccgtgccgcttg

SEQ ID NO: 87570 - DNA, 834 bp, Oryza sativa
  Clone ID: PAT_MRT4530_86502C.1
cagtgcaacacgacggctgttgcaattccgtctcagattgttacatgcatcaaaacagggagcatcaatataaggatgataccatgtcccaaaattcaaaaatgatttccaaaattcagctaaacctcacagaggcacgagcattacaggcgacggagtacttattaccgaagtaacaaattggcatgagcatagcagctggcaaaatcccgaacaaaaaagacaacttgttatagtcattctcgtatctaaaccgcgtacagtggttttgtggtgaaacttggaatcggttaaaagcaatcatttatcgtccttgacctcattggattcctggttctggcttgcatcttcagtcggtgaattaagaccctcttcgttgtcaacagaagcatgaagaaatcgacgcgaacgtgcttgctgttgagtaggctgcaattttggtcggagtgcttcaagcggccctttaggtttttgagggtgtcctccttgcttccccaaagcccaatcagcagaatcaaagtaagctcgctcatgatccttggctataagcgctggctttctgggaactattccaccatactttttctttattgctgcttcctcttcctgaggtgaaggcatcacctctttttcattctggttggcaattcctactttctcatcggaaccatctacttcgggcctcacttgacctgttgtatcatcagatggcttccccgacatactgtatatgtttcgacaagctgggttcgagacgaggtggggaggagcgcgtggaggtggaggggaggaggaggagagggaatggatcgaagaggcaaaaatcccggccgg

SEQ ID NO: 87571 - DNA, 662 bp, Oryza sativa
  Clone ID: PAT_MRT4530_86503C.1
tcatccttcgccgcgcccccaccacgccttcaccgaccgccactcctgctcgcccgaatcgacgccgccgccgtcgcgggtcgacatcgccgctcctcctatcgcgctcctccccgccggcacctgcatcgacgccacaacagccgacagatgggagatgttgaagacctcactccaacgacggctgcgcgcggtgacactaccaggcgttgagggagagaatgcagtgcgaggtgcgacggggttgttcgtccttgcccagatcaatgccgccgccgatccctcactcgcccctcgcccaagtcggcgccaagggcggggttcgccaatctgcttcccagccgcctcgcccgctccatgggagaggtgacacctgtgcccgcctccagcgctccatgcccccggataccatccgagcacgatccctccttagcttctgccggagaagggacgcatgcgccgaccttcagcactctacgcgccctgtggataattggttcgttctctttacgttgcaatccattcatttgtcaagaatcatcattgtgagtgccgaggctcaagatgaacaaccacaccaaccccaagatcaccaactaagcctatcctgcttcatgattgttgctgcaaactccaacatgcttgctgctggtgcaatctga

SEQ ID NO: 87572 - DNA, 371 bp, Oryza sativa
  Clone ID: PAT_MRT4530_86504C.1
atgaagttaagcatgaaacgacccccgtacaaccgcacttctcgtatgggtctttccctcccgggtgcgccagaactcctctcactgctagaaaccgtgtacgcctagagtgcatgaggatgtaaagttcatggagcaggtactgccaatgcgaggttatcaaaaagctttgccatgacgcgtctcatgtgctaggacgaggctcatgtgttgggcagttgcggagtgcgggtaaagtgtatattcactacagtgtgagtaaaccaaatctattcgaatagccgtgctcgcggttattgagcaccctaaagaacgacgagtcctaagaatgttaatatagggtggcaagaagtggtccacctgaataacgt

SEQ ID NO: 87573 - DNA, 2303 bp, Oryza sativa
  Clone ID: PAT_MRT4530_86505C.1
tcggtcgcacgcgcacctcacctcctattctctgggggtcctcgccaacctcctgctgtgcctctgtccctctctctctcgctctccattcccaaatctcctccgcatcgggatggcgcaggtggtggctgcggcagggacggcggcggcggtggcggcggtggggaggccgctgggtggcggcggatctggggccgacgcgctccgcccggcggcgaggctgtcgttcgcgccgcgctggtgcggtgggagcgcgggggcagcaagggcgcgccgcgagtccgccgtcacgtccgtgattagccgcgccccgcgtctcgacgccgaggtgctgccggtgtcggccgacgacgacgcggacgtgaaggaagaagaaaacttccagcatctcaaggccattcagcaacttgcaacatcagccaatggtgtgtggtctaaaccaaatgtgagacgcaagacaaagatcgtgtgcaccattggtccttcaactaacacaaaggagatgatatggaaacttgctgaggctggcatgaatgtggctcggcttaatatgtcacatggagaccatgcatcacaccagaaagttattgacttagtaaaggaatataatgctcaaacaaaggatagcaggatttctgtaatcctgctgagggctggcatgaatgtggctcggcttaatatgtcacatggagaccatgcatcacaccagacagttattgacttagtaaaggaatataatgctcaaacaaaggataacgtgattgctattatgcttgacacgaagggaccagaagttaggagtggagatttgcctcaaccaataatgttggaaactggccaggagttcactttcacaattaagagaggagttgggactgagacatgtgttagcgttaactatgatgactttgttaatgatgtagaagtggattcggtaaaatgtgaagttattgatggaggtgaactgaaatccaggcgtcacctgaatgttcgtggaaagagcgcaaccttgccaggaataactctgaaatccaggcgtcacctgaatgttcgtggaaagagcgcaaccttgccatcaataactgacaaggattgggatgatattaagtttggtgtggagaatcaagttgactactatgccgtttcttttgtcaaagatgctcaagttgtgcatgaattgaaggattatctcagaagctccaatgccgatatacatgtaattgtaaagattgaaagtgcagattccattccaaacctacactcaatcatcacagcatcggatggggctatggttgccagaggtgacttgggagctgaactccctattgaggaggtaccgctgctgcaggaagaaattattagaatgtgcaggagcatgggaaaagctgttattgttgccactaatatgctagaaagtatgattgttcatccaactccaacccgagcagaagtttcagacattgctatagctgttcgagaaggttctgatggcattatgctttctggggaaactgcacacggaaagtttcctttgaaagctgttaaggtcatgcatacttgttcaagaatcacatgagtgaaatgtttgcataccattcaacaatgatgtccaacactcttggaacatcaattgtggttttcaccaggacaggatttatggctatcctacttagtcattaccgcccttctggcaccatttttgcctttacggaccaggagagagttagacaacgattggctttgtaccaaggtgtatgtccagtccagatggaattttctgatgatgctgagaagacatttggtgacgctttgtcatacttgctgaaacatggtatggtgaaggaaggcgaggaggttgcacttgttcaaagtggcaggcaacctatctggcggtcgcagtccacccataatattcaggtcaggaaggtttgatgtgaagactgcgggcacagatattaacccatgaatgaattgacggtcttccagcaaaaccttaggcctgatgataataccacgctggcattactggcatcatttaactgtgagcttagtgagttgtgtgcaagacatgagagagcccttgttgtgattctatattcgttgctaaatatgttaccttgcatgtaaaatggtgtgagcgatcgttcccaatccgtagcatgagtatcgcagggttctttgatttgtattactgcctatatgtttccttgtcagagattgtatgaacagaaacaattttattatatgaattactgtaaggcttgatagataaaaaaaaaaaaaaaaaaaaaaaaaaaaaaaaa

SEQ ID NO: 87574 - DNA, 606 bp, Oryza sativa
  Clone ID: PAT_MRT4530_86506C.1
atggcgatctgcggtggatggatggaggcgggggtgcggccggcagcgagacgcggcggatggatggaggcggtgctgacgggggaagtgttggggcgatggggcgggagggaccgggagagcaggcggcagaggaggaatggatcggtggtgcgactggcggcgagacgcggcggatggatggaggcggtgccggcgggggaggagcgcgataggaggagcggcgatgtcgatccgcgacggcggcggcgtggattcaggcgagcaggagtggcggttggcgaaggcgtggtgggggcgcggcgaaggatgaggggagcggcgtcgacggttggatatatgtcggggaagccatctgatgatacaacaggtcaagtgaggcccgaagtagatggttccgatgagaaagtagaaattgccaaccagaatgaaaaagaggtgatgccttcacctcaggaagaggaagcagcaataaagaaaaagtatggtggaatagttcccagaaagccagcgcttatagccaaggatcatgagcgagcttactttgattctgctgattgggctttggggaaggtattgtcatcttatttccaaagtgaaaactaa

SEQ ID NO: 87575 - DNA, 407 bp, Oryza sativa
  Clone ID: PAT_MRT4530_86507C.1
ttgacctcctccccacgcccactcctcctcctcccacgccgcgtccttcgccctcctccctgggcgaagctcgccccgccgccgcatcgcctcctcaccagccacgcccgccggcctcctccgcgatcgccgccgccctctccaacgcgcctccacctcgcatcggatcgatcatccaccttcgccctcctccctgcgtcgcctcctcgcctcgccgccgcatcgcctcctcagcagccccgtgccccgcgccccgcgtcccgcgttccgcgccgccctcgaccgccgacgctgcgacccgcgccgtcttctcgctggcggcgccgcgccccgagtgccgtgtcccgcgccggcctagaccggcaacgcgggagcaggaggtcacgccgtgacaacaccgcccagga

SEQ ID NO: 87576 - DNA, 761 bp, Oryza sativa
  Clone ID: PAT_MRT4530_86508C.1
caatttagtgagaggatttactggttttgatttctgacatagcagacgcatcttacagacacacgtaatctcatccatccgattgccatatccaacggcgtcaatctcctccccatcacgcgctcgctcctctcttgaatcgacctcctccccacgcccactcctcctcccacgccgcgtccttcgccctcctccatgggtgacgctcgccccgccgccgcatcgcctcctcaccagccacgcccgccggcctcctccgcgatcgccgccgccctctccaacgcgcctccacctcgcatcggatcgatcatccaccttcgccctcctccctgcgtcgcctcctcgcctcgccgccgcatcgcctcctcagcagccccgtgccccgcgccgccctcgaccgccgacgctgcgacccgcgccgtctcctcgctgccgtcgccgcgccccgagtcccgcgtcccgcgccgccgccgcgtcaacaccgccgaggagccgcttcctcgccgccgtcgcgacgacccacgccgccctcgactgccgccacctccgccggtcacgatcgccgtcatctgaaggtatgtatcccctcctgtcccaccacttctgtcagccgccgctgccgcaatagccgcacgccacaccatccccgacctgcaaaccggccattgccgcccgcacgccacaccacgctgctgcgaatccccggttgctaggtctaggttaccatctccgtcgccgctgcccaatccccaaccagccat

SEQ ID NO: 87577 - DNA, 654 bp, Oryza sativa
  Clone ID: PAT_MRT4530_86509C.1
atgaatttccttaatgtacacgggaaatatccatcggacggtgctgaggatcccatcgcacgcactcctcccctccgcgaatcacacttttctcccccacaggccggatcgcgctcgctatccaaccgtcgacgccgctcccctcatccttcgccgcgcccccaccacgccttcaccgaccgccactcctgctcgcccgaatcgacgccgccgtcgtcgcgggtcgacatcgccgctcctcctatcgcactcctccccgccggcactgcctccatccatccgccgcgtctcgccgccggtcgcaccaccgatccattcctcctctgccgcctgctctcccggtccctcccgccctatcgccccaacactcccccccccggcaccgcctccatccatccgccgcgtctcgccgtcggccgcacccccgcttccatccatccactgcagatcgccatcgcacgcctccgcctctcaaggtcacacgctcgtcgccaccgctcgtcgcccgacaccccgccgattggggaccggacgctgaccctgcatcgacgccacaacagccgacagatgggagatgttgaagacctcactccaacgacggctgcgcgcggtgacactaccaggcgttgaaggacacaatgcgctgcgaggtgc

SEQ ID NO: 87578 - DNA, 1150 bp, Oryza sativa
  Clone ID: PAT_MRT4530_8650C.1
atgagtggagtgtccactagttggggttttgtttattctagggtgaacaagccgagggaaggggcgtgcggaccgggtccacgggagtggggcccacgcggcagcctcacggtccacggtggaccgggtgcacgcggcttgcgccggccggcgccgtgggtcccacgcgtcagccgcacccgagggcgcgggcggctgacggccgggccccacatggcagccgcggggcgcgcccgaaggcggctttgccggcacggccgacgggaggcggcgcgcccgcgccccgatggtcgccggcggcgacctccggcgcgacggagcggcgcccgagagaggggagggaagggggaagcgaaaaggcggtcctcggctcaccccgggtcgacagcgacgacggaaacggcgaccgaagcggagagaggcggcggcgcggctcgggtcgacgaggacggcggcgttccggcggtcggcgggcgaaacgaaggggtggacgaggtcgacgaggacgcgacgaagccgaaggaggcgatgccgaagcgggaggaggaccggggcgacgacggcggcgaaccgaagctcggcggcgacggcggagagagaggacgacggcgcgagctcgattccgacggggagagaaagcggcaagggtcggaaacggaggagggaggcacggggagtgcttaaatagtgttgggagtgagagagggcggccggaggggaaggaaaccggcgcggcgatctcggctccatcaatgacgccggcgaagtttgcgggaggatttccaaacgaatccgagggagagagagagagggaaaagtggggggaaagagggagggaatcacggggagtgatttccccctctttattgcgcgcggggacggcgggatgcggcgggatccgcggcggcggcggtgctagggcacaggcgaggcggcgggcgcggcgcgaggtaggggatgacgggtgggccccacccgtcagcgagggtggcgggcgggcccgcccgtcagcgacgcgcgcgcgggggaaggccgatgggccgcgggggagaggagagagggaaggagaggattgggccgagccggcccaagaagggaagggggggaaagaagacttcttttagggtttttttctttttataaacctttt

SEQ ID NO: 87579 - DNA, 1449 bp, Oryza sativa
  Clone ID: PAT_MRT4530_86510C.1
ctacccgtcgtacacctggtttgcaatagcttcacggtaagccgacatagctgcctcgctgttgggtgagtcgtaccatgtgcgtaggggtggcgcctgtggcacatgggggtacccgttgtacaatgggtgatgtgtcataaagtggaggtcgttactatcaatcttaaagttgtgaagagcaaaagtagcaactataatctttgtctgagcatcagcctctccaaataaaggaattcccgtaagactctccactgactcttgatcatcccaaaaactaaacgtaactcgttcatcccaaccaataacggtgagcacattccttgaagtctcgttgtgacggttcccgtgtacagttgaagttgaggaccgcacgagaagaggtatgtgcatctcatcaactgcaccaactgcatcacagaaaggaaggcaggcaggctcttgccctagacggtaatgttgagcgaagttgtttggatcaacacatttgatgatgtcggctgccattgcatgcacaacattcaataccttgtgaaaatatctatttaccgtggcattgcaacgaaccatcctattgttgatagccctcacgaaatagccaccatcagctcccccagtgccatcatccccagggtcacccccatcgtccccatcaaaccctccaccaccaggtggaaaccaacctcctgagcatgatggtagagggaaaacctccaccattaggaaagtaatctcaaccatccgattgccatatccaacggcgtcaatcttctccccatcacgcgctcgctcctctcttgaatcgatctcctccccacgcccactcctcctcctcccacgccgcgtccttcgccctcctccctgggcgacgctcgccccgccgccgcatcgcctcctcaccagccacgcccgccggcctcctccgcgatcgccgccgccctctccaacgcgcctccacctcgcatcggatcgatcatccaccttcgccctcctccctgcgtcgcctcctcgcctcctcaccttcacacctcgccaccgcatcgcctcctcagctgccccgtgccccgcgccccgcgtcccgcgccgccctcgaccgccgacgctgcgacccgcgccgtctcctcgctgccgtcgccgcgccccgagtcccgcgtcccgcgctgccctctaccgccgatgcgggagcaggaggtcacgccgcgtcaacaccgccgaggagccgcttcctcgccgccgtcgcgacgacccgcgccgccctcgactgccgccacctccgcagatcgccatcgcacgcctccgcctctcaaggtcacacgctcatcgccgcccgacaccccgccgattggggaccgaacgctgaccctgcatcgacgccacaacagtcgacagaggggagatgttgaagacctcactccaacgacggctgcgcgcggcgacactaccaggcac

SEQ ID NO: 87580 - DNA, 225 bp, Oryza sativa
  Clone ID: PAT_MRT4530_86511C.1
atggaggatggggcgctggtggagaggcgtggaggtggcaatgtcgacgcacctggtggtgtcgacgacaagctcctcctctccattaggcacgacgatgggggaatggatgtggcgacggcaaggcacgggacggggaggacggcaaggtgcgacagcgcttgggtggcggccgtccaggtcgaccgctacgccggcggatcgagcgcttcaatattgaaatag

SEQ ID NO: 87581 - DNA, 2182 bp, Oryza sativa
  Clone ID: PAT_MRT4530_86512C.1
ccccaacaaagatttaaggccctcaaaattttgcgcgacggcggcggcgcggcggcctgggagagaggagggggagggctgcggtgattccacaggggattttagccgatcttatgctaggggaaatcggctaattcagaggaggctgcctgttcatcagaggttaggtccgatacatcaagattgctttcaggatgaggatgagggcaagaattcgcaatggtgcccttctggcatttttaccaagaattagaagagaaaggtccagaggatgaggaacatggagcgtttttaggaagtgcagcaagagatcaatcatcggctgaaaaaggttgtgacaaagcaagaatggcgtgttaagagtaaggtcctaatggccgatgaagtcgaagctgacaaagcaaagagaatgattaaggggaaagcggttacatcttcatcggtaaacacggtttttgtgctacctgcagaatatgaagctaatcaagccgatgcagatgttatggaagaaacttttgccaagttggttttgtcacccgaacaagctatctttgagaaaccagagggggtagagtatcggcacctcaagtcattgtatgttaaggggtttgttaacggtaagccgatgtccaagatgatggttgatggtggggctgctgtgaatttgatgccttatgctacattcagaaagctaggatagaatgcatacgatcttatcaagactaacatggttcttaaagattttggtggcaatccttcagaaactaaaggagtgttgaatgtggaattgaccatcggcagcaaaattattcctactatgttttttgtcattgatgggaagggttcctatagtctgttgcttggaagggattggattaatgcaaattgttgtattccttcgactatgcaccacattttgattcaatggcaatgcgacaagttagaaatcgtgccaaccgacaggtcagtaaatgttgctagtgctgatttaactgtttgggagatggatggaattgattgcctgtctggaaaaggcgtcgtggagggttcaaatttctacaccaaggacactgtagatgatctcgatggcaaattaggacagggttttatgtcgggcgatgaattagaagaggttgatataggtccaggagatagaccaaggccgactttcattagtaagaatctatcatctgaattctgaaccaagttaatagagcttttgaaagagtacagggattgctttgcttgggaatagatgctaggacttagccgatcgattgttgaacatcggcttcctatcaaaccgggatatcggccatatcaaaaaccgcctaggagatgtaaagccgagatgtatgatgctattaaagccaaaattactcatttatatgatgctggttttattcagccatgccgatatgctgagtgggtttctaatatagttccatttataaagaaaaatggtaaacttagggtctgtattgattttcggaatttaaataaggctacccctaaggacgagtacccaatgacggttgccgatcagttggttgatgctgcttcagggcacgaaattataagttttatggatggtaatactggttacaatcagatttttatggcagaggaggatattcatcagactgctttcagatgtcctggtgcaatcggtttatatgagtgggttgtaatgacttttggtttgaaaagtgctggaactacatatcaaagagccatgaattacatatttaatgatctgatcggtttattggttgagatctatatcgatgatgtggtagtaaaatcaaaggaggtcgatgatcatatagccaatttgagaaaagtttctgacagaacaagaaagtatggcttgaagatgaatcctacaaagtgtgcttttggtgtatcggcagggcagtttttgggttttcttgttcatgagagaggggttgaggtaacacagaggagcattaatgtgatcaagaagattcaacctccggagaacaagaaacagttacagtcgttgatcggcaaggttaatttcgttgtaaggtttatttctaacttgtttggaaggttagaaccttttacgcctttgctcagaatgaaaacctgtcacgtcctgagctggggggtggtgtagcaggtgttactctcgtgcggagcggtctatatgagggga

SEQ ID NO: 87582 - DNA, 219 bp, Oryza sativa
  Clone ID: PAT_MRT4530_86513C.1
atggggagaggactcgctgtggtcgagaacaacgcatgtgctcctcggctccagccgtggcccgcagatcgatggcacgacctcgtcatccgcctcaacaacgcgcccatggcggagcagagccctagattatccagaggtggctccttcactctcttcttccttctcttttccacatcagcaaatgagtctacatgtcatctaggggcaagtgtttaa

SEQ ID NO: 87583 - DNA, 551 bp, Oryza sativa
  Clone ID: PAT_MRT4530_86514C.1
ataacatagacattacattatatcacagcaatatcgttctttgtcccaagtcaatcccttgttgactgttacccaaaaaagtgagaaaaacaaaacatctggcctgtcgatgaaaatttacaatcgatgtatctcaatgcctaacaaggctgtgcttttgattgtagatagatctgtgtgagcatgaattggttgctactccctttttttcacaatgtaagtcattttagcatttcccacattcatattgatgttgataaatctaaacatatatatctatctagattcattaaatcaatatgaatgtgagaaatgcaagaatgaattacattatgaaacggaggaagtactacattagacatactagcagactagcttaccgtacagcagaaactaccacattgtatattttcaactagaaaaaggggcaagaaaagaaaatgtctagaagcatagttttacaaaaaatcacttcaagctttgcacatggatagatctttaatggatttggcaaaaactgggtattctctaaatctgaactggtataatgc

SEQ ID NO: 87584 - DNA, 295 bp, Oryza sativa
  unsure (1)..(295): unsure at all n locations
  Clone ID: PAT_MRT4530_86515C.1
ccggnngtcgacccacgccgtcttttgtagtcccagnnctctcgcagctgcaaggacgaggctcaagaaaagccaaggggagcagctgggctctccaccgannncactccaagcggcgccgcccctgcaggtagggccgtaggaccgtccagggcgcaggtcggtcggtcggcgtcccgcgcccaggtcagggacttccgagtgcgcagnctcgcccgaagtctctcctccgcgcgagggagagtccgttctctctctgagnncttcgnnccggctggtccccaggagcccgcga

SEQ ID NO: 87585 - DNA, 454 bp, Oryza sativa
  Clone ID: PAT_MRT4530_86516C.1
gcacgaggctgcgatgaaatactcagatttcgttgcagcggtgaatgctggccaaattaagcaagtcacaattgacggtttaaatattaatggtgaaaaaactaacggatcacagtttgaaactgttcgtccgcaagttgaagacactgaacttatgccgagcttaaataagcaaaatgttgttgtagagggaacagctcctcaacgtcaaggcattttgatgcaacttctcattgctagtttccctgtactgttaatcattctgttattcatgttctttatgcgtaacatgggtggtggtgcaggcggaaaaaatggaccgataagttttggtaagtcgaaagcaaaaatgctttctgaagaccaaatcaaagttaatttttctgacgttgccggctgtgatgaagcaaaacaagaagttgttgaaattgtagatttcttaaaagaccctagc

SEQ ID NO: 87586 - DNA, 1026 bp, Oryza sativa
  Clone ID: PAT_MRT4530_86517C.1
gttgttttcaccgtcttcacaccatctctcatgtttgctagcctggcgaggacggtcacgttttctgacgtcatttcttggtggtttatgccaattaacatagggatcacattcatggctggtggcactctaggctggatagcatgtagaatcttgaaaccaccacaacatttcagaggaatgatcattgccttctgctcagctggaaatcttggcaacttgctcctgattgttgtcccagcagtctgtgacgaagatggcaacccgttcggaaaagacagcagccgctgccgctctcttgggctctcctattcatcattgtccatggctcttggtggcttgtacatatggacgcatacgtacagtcttatgaagaagaagagaggtcaaatgtatcaccagcctaacagcactcagtgcctggacgacagcgatgaagaacatcattctaagaaattcaaagcaaatggtgaagctgcttacgccgatgaggaggcaactcttccggtgtcagctaaactggctcaacacaacgaagagaaccaaatggaagctccattgctgtcttgcgagagcaaggttgctaagaaatgctcgtggacaacaacaaacctgaaggacaccatccaccacgttgtcgaggagctgatggcaccaccaactctatctgctatacttggatttgtttttgggctagttccatggttgaaatctcttgtcatcggtgatggcgcccctctcagagtcatccaggactccatccaactgatgggaaatggcacgattccttgcgtcaccctcatccttggtggaaatctgataaaagggctaaggaagtcggagctcaagcgtacggtgatcatcgcgatcgtctgcatccgctacgtgatccttcctctagtggggattgcagtagttcatggtgcatactgggtcggattcttgccacacgacccgctgtaccgctacgtgctgatgatgcagttcgcgctgccacctgcaatgactattggtaatctttcccta

SEQ ID NO: 87587 - DNA, 1635 bp, Oryza sativa
  Clone ID: PAT_MRT4530_86518C.1
atgccggaggtggatccacctccctcggcagcggatctggccccccgcattcatatcgggatggagtggcgctcccgtggccagatcgagatggagcggcgctggccgtgccgcatcgggaaggaagccaaggtacaagcgaaggacgtcatggctctgacggtggcggtcgcggtacccatggaggaggctgaggtgcaggtggaggaggtcgcgatgctggcggtggaggtcgcggtgccgacagaggagatcatggcgccgtccagaggggtttgcgcttacgacggaggaggcggaggccactgcgacggtggcgcagcccacggtgcgaccgagtggaggaggcatagggcgtgggcagccccagcgttcctaaggagggagaggcggcgagggaagagcccaattaaccgtactattgttgcgtcatgggccgggccaaatcagaccacttcgggatgtagcccatcgtactcagagtctcttgttaaagcccaagtagagcgcaaatccggcccggtcagagttcccctcctcctggttcccggcggcgactgcggcggcggcggcggcggcgacgcgaacgccgagatgagcgtgttcggcggcgacagctgggcgcgcgacgcgcggcagcggaagcgccgcctcgacgacctcatgctccccgcctcggcagtgtccccatcctcgtcctcgcccgattcgttcaggaggctctccaacggcaagttcgcctgcctcgtctgcccccaccgccccgtcctcgactcccccctcatgctctccatgcataataaaggttcacggcacattgcagcagaatcgaggctgagggagaaagaattatcaagacaacaagagatcaacaagagacttgctatttctccagaagcttccgtttcaagttctggtaagcaacattatggtgttaggtctagtgatatgaaagaaaaaccattgattcagcagacaagacaagctattttggaagcacagtccagcagatttatcatcgacagcgccaacaagaaatctcatgatctggagaggacatcaaattcttcactgtgtgattcccaagttactcctagtgttccaatggaaaaatggagtggagatactgtgaaaggaaaaatctttgctggtgacagaactgcaaccaaaatgcttgcagaggagcaagcagatttccaaaaacgccaggagcaagaactcaaattcactgcttcaggatggaaacgagatggccatggaagatggtacagggatgaaaatgtggagtttgactcagatgaagatgatcctaacatatgccttggctaaccattttaagggcattctggatgcaacatgataatggttcgaccttaaactcagattgctattttcaatgccagatgaaaagcatgagtccctcaaagatttttgctcatctatgctgtcagtcttccatacttactggctacttgtaaccccggtatcttgtctaacaggttgattattagttgtgccgtggttgttgtactgtctgttttctaattctttttccttgtatgtattcataaaatgatgatgtactataatgtgcctactgaactgaatttgtctttgcgagtgaaaaaaaaacaa

SEQ ID NO: 87588 - DNA, 3913 bp, Oryza sativa
  Clone ID: PAT_MRT4530_86519C.1
atgcacctcgcggcgcgcggccgccgtcaccccttcgccgccgcgcgcctccgtccaatcccgctttcctccggcccctccttcgcttcctcctccaccaccacgacctccaatggcgcctgttcgtcctccgccgcggaccccgatgccgtggccgccgaggtggccaccctcctctcccgctgctccggctactggaggcacgcaatctactcctacgacatcccatcccacctctcccctttcgccaactcctccctcatccgacgatggtggtcctcatcctccccgcgcctccaacctaagctcctcctcgacatattctactggtccagctcccatctcgcgctatcggcccctttcctcgataccttcgaacacctggccatgtccctattcgccggctcacttttcaaccaggccaacggcctcctcatcaagaagatccgcgcctacccgtcacctcccgtcgtactcgcgaccatacattgcacgctaccgaattctggcgtaggttcgccggcggttctcgacgtgctcgtagatacataaaattattcagggagattgcctggcgccgtggattaagtcctaatgatgagagatcggggcatctctcctagcattcggtgctgcaacgcgctgttgaaggatctgctgcgcgcggacgccatggctctgctttggaaggtgcgagagttcatggttggcgctgggatttccccggatgtgtatacgtactcgactctgatcgaagcctactgcaaggtccgggaatttgatactgccaagactaggctggatagcatgtaaaatcttgaaagcggcctgaacaccgtaacctacaatgtgctgattgctgggttatgcaggtctggggctgtcgaagaggcgtttgggttcaagaatgccatagaggattgtggactcgttcctgaagggtttacatacggcgcactcatcaatggcctgcgcatgagccattggtcaaagcaggcggaggcgtttatggatgagatggctcgtcctgtgctaatgccaaatgtcgaagtctaaggcatcatcattgtaacatcattgagggcgtgcaatgcagtaatgacgtagatgatgataaggaagtcgatgcctactgtggtgcagcttgccaagattaccaagcaccagctcggtcgggggctagacaaggctgaacacaaggaggggaactaaatgcttgggtcaaaaaaactcagtgttatgaacatgtctgaaactctggcatctaaaatgatgattggagaaagtgcccgtctttataacgatacgcatgcattacggcatttgattgaaatggtgaatgatgttattgcggctattgtatttactacttgcacaatgattcatatgctcatccaaagttgtgaatcagagaggcaaagtgatctacttttgtgaatatatacattaagattgaaggattcagcactcggttatgcgcctcttatctcagggtactgtagagaaggtaatgtttcattggcatgtgaaatttttgataagatgacaaaggtgaatgtactccctgatttgtactgctacaattctcttatatttggactatctaaggtgggaagggtggaggaatctacaaagtactttgctcagatgcaggagagaggattgctgccaaatgaattcacatacagtggcctcattcatgggtatctaaagaatggtgatctagaaagtgctgaacagttagtgcagcggatgcttgacactggactaaaaccaaatgatgttatctacattgatctcctagaaagctactttaagtcagatgatattgaaaaggtgtcctctactttcaagtccatgttagaccagggagttatgcttgacaaccgtatctatggaatcttgattcataatctgtccagttctggaaatatggaagcagcatttagggttctttcagggattgagaagaatggatctgttccggatgtgcatgtgtacagctcgttgatatcaggtctttgcaagacagctgacagggaaaaagcttttggtattcttgatgaaatgtctaagaagggagtagatcctaatattgtatgctataatgccctaattgatgggctgtgcaagtctggtgatatttcttatgcccgcaatgtcttcaatagcatattagctaagggattagtgccaaactgtgtgacatacacaagtttgattgatggaagctgcaaagttggtgacatcagcaatgcattctatctttataatgaaatgctagcaaaggcaatgtttctgattgaggaaatgtttcttaggggacatgcaagtatttcttctttcaataatttagttgatggtttctgcaaacgtggaaagatgcaggaaactttgaagttgttgcatgtgataatgggcaggggcctagtacctaatgccctgactattgaaaacatcatcagtggacttagtgaggctggaaaactcagtgaagtgcacacaatttttgttgagttgcagcagaaaacttcagaaagcgctgcccgccacttttcctcattgtttatggacatgataaatcaaggaaaaattcctcttgatgtggttgatgacatgattcgagatcattgtaaagaaggaaatctggacaaggctttaatgctgcgagatgttattgttgcgaaaagtgcaccaatgggctgctcgtcctatcttgctatagtggacaatctatgccggaagggaaaattaagtgaagcgttgaatttgctgaaagaaatggacaagagagggaaccttcagccaactttggttgctctgcttggcatcttctggttcaggaggcatcatcatatattgaacaagcttggtggcttgtacatatggacgcatacgtacagtcttatgaagaagaagagaggtcaaatgtatcaccagcctaacagcattcagggcctggacgacagcaatgaagaacatcatgctaagaaattcaaagcaaatggtgaagctgcttgcgccgatgaggaggcaactcttctggtgtcagctaaactggctgaacacaacgaggagaaccaaatggaagctccattgctgtctggagagagtgagattgctaagaaaggctcgcggccaacctcgctcctgaaggacaccgtccaccaggttgtcgaggagctgatggcaccaccaactctatctgcggtatgttcttggatttgttgttggcctagtcccatggttgaaatctcttgtcatcggtgatggcgcccctctcagagtcatccaggactccatccaactgatgggaaatggcacgattccttgcgtctccctcatccttggtggcaatctgataaaagggctaaggaagttggagttcaagcatacggtgatcattgcgatcgtctgcatccgctacatgatccttcctctagtggggattgcagtagttcatggtgcatactgggtcggattcttgccacacgacccgctgtaccgctacgtgctgatgatgcagttcgcgctgccacctgcaatgactattggaaccatggctcaactgtttgatgttgcccaggaggaatgctcagtgatatttctgtggacttacctggtttcttccatttctctcaccacctggtccatgatattcatgtccatcccgtctttaggtcaaagtgcaatgatttcagcatttcagctaactcaaagggaggaggttgaagacaataatacgcctctagaaaagagtcgatccaactgaggcttgttcgtgtcaccgtttgcaccacctgtataaaagaagttgagcagtttaggcacacggttttttttctatcccaatctattggttcatttaattggaatggttttcatcttttaagggatattcaaattcactgtt

SEQ ID NO: 87589 - DNA, 2309 bp, Oryza sativa
  Clone ID: PAT_MRT4530_8651C.1
ttagtcatcgccgccaccatcatcagcctccacgggatcatcatcatacccttcatcctcttggtcgccagcatcgtcgacttctttttttggaacaatatgcacaactgccgtgcaaaattatagccgcagacaaattaaagccagttgagcagttttcagctcttttggtgcaaggggctttgtatacatacataacttaaaacataagatgtagctatgcctgcaactatgaactcaggcattcagccacctctcgcacccgaaatagcaaagaatcacggcactgaatttgtaattcgaaggctcaactaaaggccctggctgtggctggggtccagcatccaagtccacctaaacaaatgttgctcttctacattcttctatgtggtagtgaataattagtcatcgccgccaccatcatcagccaccccatcatctgcattttcctctacatcttctttagagtcagcaccgtcgacctacataagttcgtcctccaaaagctcttcgttatgcccgtccagtgataggacagctaccagcgcagtagaagctagttctggttaccgcattgtcattttatcatacacaagggttatgatgtccacttcctgctcattcacatatcaaccccttccagatgcttgggccacagtcccatccacatcaaagaagcagaatgggtcgaaacagctgtaggaatgccatggacgtttcttgctgagtccctccccgtcttctaggacaccttcgtagaattctttcgaggggaatatactaatctctgggtgcatgcgatactgaattttgagcatttgcacaggaaaacctgcagcctgaaatctcttgaacaaactagtaccgtaccctaacttctgagcagtagatgaaattacagttgcaggcaactgaactgggtcaccaacagcttgtgcagcttcatcaattataacaacatcaaaagcacgagccatcctgctgaaaatggatgatccactaaaacttagcgtagaaaacacgatggctgcttcatcaagaatggaagatctaattcgatcatattcaccagcccctcgtctcccaccatctgatgagcgatccacaccagaaagtttttgttgtataaggtaatccatggaaactgctttaacagagtgatgcgccttcagtccaattcgcacaatcttaggattataggtgttgttattttcatcgcgtattcctgtttgcagaactcgcagcacaatctcatcaagtgctgagttggatggagcacagaccaagacatgggcccgatacttgcgattggaacttacgacctcaggttttagctcattcccagtaggataaaaaccatcatcgccgtcaacaggcataattaaatctcgaggatttacaccaatcagccacggggaggccttcatccagtgtgcatgcctatcacatgagctctggataagaacaaaggatctgcgagaaagacctgcgttgactgcatctagttgtgaatcattaaggtttgttttaagataatccataagtggctcagggacattccaagcacggttttgatcattcccaccactgttcttctcactagctgaaagaatcagatccttaaaaggaagtgatgctacagagtgcatgcccgagaattctcgcattatggtagacaagctgcaaatctttaaaatccagaggaagctctctgtagttgaaaaaatggaagcaatacgctgcagcctagaacagctcacaggctttgctacattaagattttttatttcacctgccacaaatgtccttagagaaatcgtttctctgccaccccgctgttccactaaggcaaaggcatatgcactgggggtcactccctcttcaaatttctctttggacagcagcaggagatcgttctccgacaccatctcccggaaatcatcaagcacggccatggacaccttgtggaacccctccgactcggtgcacgacgccacaatccccttctgccagttctgcccagcctcttcctcctcgtcgctgcgcccctggacgatctgcgccttcacctcctcgaacagcagcggctcgaacacagcgaggtactcggccaccgaggcgtacgtgttcttcacgcgccccagccccttcgcctgctgctgcccgcccttggagtccgcgacgaggcggacgtagtcccagctgaggacgatcttgtggaagcggtccatggtggaggcggcgacgcccgacgaggaggaggaggcgccgcctccgcctccgccgccgccggatttgtccaccgccat

SEQ ID NO: 87590 - DNA, 396 bp, Oryza sativa
  Clone ID: PAT_MRT4530_86521C.1
tttttggggacttgtatatttggggagtaatatattacatatgaacctatcatgtcaatttttttaaaaattctccataattatttagatgacatgtatgaaacgggtgaatgtccaacgagggtttaaaacggtttcccgtcaacacctgatgcaggagttcactcaatcaaacaagaacaacaagtggcataaaattactcacactgactatatccgatttcttagccggacccacaggccgcccttgatgttcatcggtgccgtcatgttgtacgccggcggcgattccatggtcggagccggcgccgccacctcgacgctgaaccttcgttgaatggctggcggcaccgtctttattggcacgtacgccatcttcttcccgaggcacgccct

SEQ ID NO: 87591 - DNA, 661 bp, Oryza sativa
  unsure (1)..(661): unsure at all n locations
  Clone ID: PAT_MRT4530_86522C.1
cctcaccgggaggggttctgaccaacgatgggttcacggaagctatgacctatctgggatggacccccccaccccctatgaccnctgaacccaccgttagatgaaagtccctggaaatgtgaccacctatatcgccctcttctcccaccacacgtggaanaccctntgggcacccaaaaggatgatagtgccagatgactgccaggatggatgcccccaaatgggcgtgcaccanatgctcacccagcacccactgtatggcgtntgtacttggtgtatatgggtgaactgnaggaatgtgaaacgccagaacttgggtgtgtaggtgaactgtatgtgggtgggtgccgtgtgatatgtgcaccctgtggtgaaatnaatgttggtctaggtggcntggagttgcaggtccattttagcaccagtgacctgcgtgttattccnggtgtgtgcttatnataactgagccnctggtaaaatcaccaactactgaggcaccttttggtaagttgagactgtccagataatgtggagctnatcttgtgttcgccaaatcttcggttgtgttttgaataaaacganccttttggctccaaaaaaaaaaaaaaaaaaaaaaaaaaaancncccccccaaaaaaancaaaaaaaaaaaaaaaaaaaa

SEQ ID NO: 87592 - DNA, 765 bp, Oryza sativa
  unsure (1)..(765): unsure at all n locations
  Clone ID: PAT_MRT4530_86523C.1
attcggctcgaggaattaagcaacattttactgggttcataattttagagagnaactgaaattatgtggaggtgcatcaatggaagaattgccagaagatttttatccacttcttctgccagtgcccgtggttggtgggaccatgtaaggccagcaccgaaggaccccattgttcgtgtgaacgaggcatttctagctgacccttttccccataagatcaatcttggaataggtacttataagggtgatgatggcaaagctttcattcctcaaagcgttcgtgaggcagaaacaaagattcagagatgtaaattggaggagtcaaacgcttccgcagtcagatcaaaatttgttcaggagtgtgtgagattagcatatgggaatgattcaaatgttgtaagagaaggattgtttgcaggagttccaactctgtctggaaccggtgcatgtcggctttttgctgaatttcaacggcatttctatcccgattctcaaatgtatctaccagatcctacttggtcaaatcaccacaatatatggagacaggctgaaattccagtcaaaaccttccactactaccatccagatacaaagggtttagattttgctgcactcctcaatgatgtcaagaatgcaccagattgttctttcttcttgcttcatccgtgtgcccacaacccaactggtgttgaccccactgaggagcaatggagagaaatatcataccagttccaggtaaaaaatcatttccctttctttgacatg

SEQ ID NO: 87593 - DNA, 447 bp, Oryza sativa
  Clone ID: PAT_MRT4530_86524C.1
gaagtacatcacactgtagtcatctgtttcatgttgcaatcctgtatacagaccgttaaggttgaataaatcttctctagggtggggtggggatgggagccgagaacattttgtggtgaccaactctaagaagcttgctgttgaaatgaccatatctttgggtattacccatatctttgcatttcacagtgcctgcacgcaggccgatccatgtcgctcataaacacaggaatgcattaattcataaacttgtgagttttataagaaacatgtgttagtaacaaaacgggatgaaattatgcccatgatggtggaatcatttttcatctatcttgccaatttataagactgacattgaacttgaacgagacaaggtcaggtcctcctcttttcatcttttcttgtttactgaatatattttttggtactaaggacttgggtaataac

SEQ ID NO: 87594 - DNA, 1110 bp, Oryza sativa
  Clone ID: PAT_MRT4530_86525C.1
gcagatccgtttttggcagatccatcgttgtgccgtgtgggcactccagagataatccctaaaccttcggtagtagatgcaagtgagcccctgcagcggcgaagtagttgtttgtcaactgggattccagaatgacatccacctgtctcagtcgaatattttctggattgtatgcagggcgtagcccaatgcatcctacaagttagggttacacaaacattctgttgtcatgctgccgagggctaaccatacaaacctactccataaacaagagttcgcggtgcagatttggtggctagacatgtcaaagtacaagttgacatggtgaatgctgattggatgaactggcaacttccaatcccgtggtatcttcatccaatggctaaaagacctcatcatcatcaaggtcactttgaggacaactttagctccagctccacctcgcccagattcttccacaaaagtcccttcacctcctctggccatcgaagctccatttgagagccatggtacggacttcggtgaaatggccaaacttcaccctcctccgcaaaacaccaaggccatttcatctccaccgatggtgcaaagaagggcgcatcatgcaagagatagatcaaaaggaaaaagaaaggcacaagagccgtagttacctcccaaacaactagatctggataaggaggtcaacgttactccaaaaaacaagctccaggtacatttcagcaacaggtgccattggttgcagaccatgagttagccaaaatgggttctgcttgccaagtgctgcatagatactacatggagaaaacaaactccaagagcaagatgagggacacgtccatagtaggttaccacgaccaagaaccatccttggggcaacaaaattattttgcagtggccttctcggatcttttttacctctataagctacgagcagtggacaccggcttgttaaagtgctacacattgatacgttcgaaagaggcacggaggaacaaaaaccagggggtcggcaccgagaagatatacccgacctctatcaccatgataactacaaatgcaagaaacaaaccggcgaaacctgtgtatttcatgtatgtcatcagatga

SEQ ID NO: 87595 - DNA, 402 bp, Oryza sativa
  Clone ID: PAT_MRT4530_86526C.1
atgacgctggagtccgcgccggtgcgaagagccccggcagcccggcgtgccggaggcgaggtgcgctcctccgccgaggccgttggtggtaggctgagagctaaccaaaatcaccaggttgcttctggtggccgccgagatttcatgcagcatttcgccgacgagaatttagccatggcggcgccgccgccgacggcccgcggcgagccggctgttgatgggcgatgccgcttctgccatggagatccgcccgccgctgcctcccgccggcgagtggcgacatctctggcgccaccgcgtggcgccgaactactgctgcacccctccgcccacgtgcacggctctgaactccgcgcggggtctgcgccggcgccgcggacgaagacgaggagtagcttctag

SEQ ID NO: 87596 - DNA, 1407 bp, Oryza sativa
  Clone ID: PAT_MRT4530_86527C.1
ttaaaattttgttgaagccttcagctcagcagtggcggctaaaacaatccttaagctgagaagtccaactaagctgatcgacaatccagggcagtgggcacatgagagaaaacgccgcgccgagccaatgctagggcatctcctggggcattgcagcgtgtgcttgatcgcttgaacgctgcatcgcgtgttgcagcggagggcctctggtgcacgatgcttgagcacgagggtgatgcaccgggtagtcgggctagtctcgttaggtcgggttcttcccgttttcttctcgttagtgaggcgatggaagttggagatggcggcggcgacgcgattgtgaccagcgacggtggaggcgacgaggttacggctcgcaactgcgatggcgacgcggatacgacccgaggcgacggcggccgcgcagatccagtccgtggcggcagcggcggcgcggatcagttccgcggcggcggcgacgacgtggttgcggcccgatgtgacggcggcggtgcggatccagtccgcggtggcagcggcggcgcggatcaggtccgcggcggcggcgacgatgtggttgcggcccgacgtgacggcggcggcgcggacgcggcccgtggcgacggcggcagcacggatccagtcctcagcggcggcctttctcgttgcttccagtttcatggtgcaggccatctcttcctcaaccatctccatcatctcagcaagacaagttgatttgcagccattcaagtgctccatcgttgaaggttggctgctcttcggattcacccttcctgttgttccctaacagaagaaaccatgctgggtttgtcattcgggttgagctcgaaccatctgcgcaatttcagttgacagggttgatgttagagctcctcagattcaatgatgagcctcgtggggatccttcgctgagtccagtgatgcacacaccaaaatctacggctcagcaacaaacctcggtcttgtgccgtttccgtggaggcagctgatggggattaacggtttgtcaagcggagtgcacatcttttgaggcccagggtagcagtcgtcgcggcttcgccgcagatccctatcgacttgctcctttttctgctattaggttatttcaggaagattgatttcgtagttcagttaaccctcccttctcaggggtggctcttttgctttcagcttttatccttggttatgtaatggggtttatcccctaattctgctcttgcttaacaaagttgatgtgttttaaaaaaaaagaaaaaaaaagggcgatctagaaccactaatattggttgttgtgatgaaagtcataagtatggttctacgtagatcaagagtgaaaggatatgaacaagtgttggggtaccccataataaattggtagtagatgagtct

SEQ ID NO: 87597 - DNA, 369 bp, Oryza sativa
  Clone ID: PAT_MRT4530_86528C.1
atggccagcaaggcgaggtgggacggcaccatggttccacgctgtgctcaccttctccgcctcctgcgccgccgaccaggcgaggtcgagtcatggagggagttcgagatagcggcgggcttgtcgcctccttcccgcgagctccatctctgttgccactccagttgcctccgcgcaagctccgcttccgctgacctccccaaacgacgttcagctccgccgctggacaccgcctccaactccctcactaagctcgagacggcggcgggcttgtcgctgcctccacacgagcttgacattagcaaggatgacaccatcagcaacatcctcttcgtgctcggcttcaatagaggtcgccgcagcacatag

SEQ ID NO: 87598 - DNA, 660 bp, Oryza sativa
  Clone ID: PAT_MRT4530_86529C.1
atggaagttgaagacggtggcggtggcgcgattgaggccggtgacggtggaggcgacaaggttggcgacggcggcggcgcggatccggttcgcggcggcggcggcggcgcggatccagtctgcggcgacggcggtggcgcggaccagctccgcggcaacggcggcggctcgaacgcggcccgtggtgacggcggcgcggatccagtccgcggcagcgccggcggctcggacgctgcccgtggcgacggcggcggcgcggatccagtccgcggcagcgccggcggctcggacgctgcccgtggcgacggcggcggcgcggatccagtccgcggcagcgccggcggctcggacgctgcccgtggcgacggcggtggcgcggatcctgtccgcggcggcgccggcggctcggacgctgcctgtggcgtctgcggcggcgcggatccagtccgcagcggcggcagcggctcggtcgcggcccgtggtgacggcggcgtcgccgatccagtctgtagcggcggcgatggtgcggacgtggcctgcggcgacagtggcggcgcgagggctgtctcccacgtcgttgcttccagttgtgtcgttgtttcatggtgcaggccatctctttctcagccatctccatcatctcagcaggacagaagctga

SEQ ID NO: 87599 - DNA, 351 bp, Oryza sativa
  Clone ID: PAT_MRT4530_8652C.1
gggaagggaaataaaccgggtttattactgggcccataaaaaccaacacactcgggtccggggggaaaccgggaaagtaaaaaaacaaaacccggattttttatttggggcccggcccgctgtaacaagaaaggggcccaaaaaaccagcccacgagcagagcttcccgcccaaacccaaaaaggaaacgggggggatgccccccccccccccggccaaacccccccccgggaaaaaagccccgccgccccctttaaaggcccccccgaggcgaaacggcgtccggcccggcccggtcaaaaggggataaatttttgcccccgaccaaaatataggggggggggggggggc

SEQ ID NO: 87600 - DNA, 2023 bp, Oryza sativa
  Clone ID: PAT_MRT4530_86530C.1
cccacgcgtccgctctctcgaaccctccctcgcctgctacagtaaaattcccctttctcgacccctcttcctcctcgattccggcggcctcgtcgccggtgacgggagggagaggggtcgtccccctcccctagtttagtatcttcttcaagccctacctccgctgctacgagaaattccgcttccaccgccccgatgccgcacctatcgaggcgcgcctgccgacggtaaaatccccagcctcgacccctcttcctcctcgattccggcgacctcgtcgccggaggcgagggggggagggctcctcccccctcccccacgggagttacgtagtcgggctagtctcgttaggtcgggttcttcccgttttcttctcgtttgtgatggcgatggaagttggagacggtggcggcggcgcgattgaggccggcgacggtggaggcgacaaggttacggttcgcggcagcggcggcggcgcggatccgatctgcggcgacggcggtggcgcggacccggcccgtggcgacggcggcggcgcggatccagtccgcggcggcgccggcggctcggacgctgcccgtggcgacggcggcggcgcggatccagtccgcggcggcgccggcggctcccgtggcggtggcggatcctgtccgcggcggcgccggcggctcggacgctgcctgtggcgtctgcggcggcgcggatagtccgcagcggcggcagcggctgtcgcggcccgtggtgacggcggcgtcgccgatccagtctgtagcggcggcgatggtgtggacgcggcctgcggcgacagtggcggcgcgagggctgtctcccacgtcgttgcttccagttgctttctcgttgtttcatggtgcaggccatctctttctcagccatctccatcatctcagcaggacagaagctgatttgcagccattcaagtgcttcttccttgaaggttggctgttcttcggattcatctatcctgttgttccctaacagaagaaaccatgtagggtttgtcattcgggttgagctcggaccacctgatgagccccgtggggatcctttgctgagtccggtgacgcacacaccaaaatctacggctcagcatcaaacctcggtcttgtgccgtttccgtggaggcagccgatggggattaacggtttgtcaagcggactgcacatcttttgaggcccagggtagcagtcgtcgcggcttcgccgcagatccctgtcgacttgctcctttttctgatgttaggttatttcaggaaggttgctttcgtagttcagttaaccctcctttcttaaggatggctcttttgcttggatatgtaatggggtttattccctagatctgttcctgcttaataaagttgatgtgttttctcaaaaaaaaaaaaaaaaaaaaaaaaaaaaaaaaaaaatgccaactcgaaaacaccccgcgagtcgccaactcgccaccgcgccgcaagccacaacagacactgtacatcattaacaaccccccggatgcggcgcccccctcccccatctccaaacggcgttgcgcgccgcagaaaaaatttcggcggagccgccacgccacgcgccgcgtccaaccgcgtgcaagaaaaaacacacgtccacttctgtcgatccgtggcgaattcgtcacgtacaccgctcggcttttcaccatcggcacttggaagttgaaatcaatgctttttattctacaccaaaccaactaccagatgctgacacgttttacttctactgctcctacgtactcctacctgttcttggcacaatcaatgactgagtcagtcgaccattcgacctatcgccgagacctgttctccctaatcaagtccatgactgcgattcgttttcgggacatcaccggtgaaaacctcatccgaccggcaccactgctccactcaatatcggccttcacatcgagcctccgtagcactgacgcgttcgacctcgagtcccaccagtatcggcgccggcgcaataacacccttcagccaagc

SEQ ID NO: 87601 - DNA, 572 bp, Oryza sativa
  Clone ID: PAT_MRT4530_86531C.1
ggtcgtccccctcccctagtttagtatagtagtcgggctagtctcgttaggtcgggtttttcccgtttctcgtttctatggcgatggaagttgaagacggtggcggtggcgcgattgaggccggtgacggtggaggcgacaaggttggcgacggcggcggcgcggatccggttcgcggcagcggcggcggcgcggatccaatctgcggcgacggcggtggcgcggaccagctccgcggcaacggcggcggctcgaacgcggcccgtggcgacggcggcggcgcggatccagtccgcggcggcgccggcggctcggacgctgcccgtggcgacggcggcggcgcggatccagtccgcggcggcgccgggcggcttcggacggtgcccgtggcgaagggcagttgcgcggatcctgtccgcggcggcgccggcggctcggacgctgcctgtggcgtctgcggcggcgcggatccagtccgcagcggcggcagcggctcggtcgcggtccgtggtgacggcggtcgtcgtccgatccagtctggtagcgggcggtcgatgggtggtggtacgccg

SEQ ID NO: 87602 - DNA, 1194 bp, Oryza sativa
  Clone ID: PAT_MRT4530_86532C.1
atggcggcggtcgcctccgcctccccgctccccgccgcggcggcgccctccacccgctgctcgccgccgcccgccttcctccctctccgtgcgcaccgcccccgcgtcggcaccgtcgccaccaggagggttttccgcgcggaggcgatgaggacgcagcgggagaaggagcagaccgaggtggccgtcgaggagtccttccccttcagggagacggctcctcctgacgagccactggtcaccgccgaggagagctgggtggttaagctcgagcagtccgtgaacattttcctcacggagtcagtcatcacgatacttgatggattgtaccgtgaccgcaactacgctagatttttcgtattggagacgattgctagggtgccgtattttgcgtttatctcggtgcttcacatgtatgaaacctttggctggtggaggagagccgattatataaaggtgcactttgctgagagctggaatgagttccatcacctcttaatcatggaagaattgggtggcaactctttatgggttgatcgttttcttgcacggtttgctgcatttttttactacttcatgactgttgcgatgtacatggtgagcccaagaatggcataccatttttctgaatgtgttgagaggcatgcgtactcaacctatgacaagtttattaagctccatgaagatgagttgaaaaagctaccagctcccgaggcggctttaaactattacctgaatgaggatctttacttattcgataacttgtatgatgtatttgtcaatatacgagatgatgaggcagaacattgcaagacgatgaaggcctgtcaaacacatggaaaccttcgttctcctcactctatgcagaaatgcttagaaactgacaccgagtgtgtaatacctgaagatgactgtgaaggtatcgtggattgtgtcaaaaaatctcttgtgagtaaagagtgagtgaagccctacaaaatttgcaatcttgatgtgctgtggttctatggaaagttcggttgcttgctgcttcttaagttcacaagctgctctgtaagggaaatggagatggctcatgatcaggcagcatacggtgaatatggtcagctcaaggtggaactgactcaaaccgtagaatttcgtgaagatgagaaggaagctcactgcagtatcgaagaagtcaatgcgaaatga

SEQ ID NO: 87603 - DNA, 882 bp, Oryza sativa
  Clone ID: PAT_MRT4530_86533C.1
atggaagttggagatggcggcggcgacgcgattgtgaccagcgacggtggaggcgacgaggttacggctcgcaactgcgatggcgacgcggatacgacccgaggcgacggcggccgcgcagatccagtccgtggcggcagcggcggcgcggatcagttccgcggcggcggcgacgacgtggttgcggcccgatgtgacggcggcggtgcggatccagtccgcggtggcagcggcggcgcggatcaggtccgcggcggcggcgacgatgtggttgcggcccgacgtgacggcggcggcgcggacgcggcccgtggcgacggcggcagcacggatccagtcctcagcggcggctgcggcgcggacgcggcccgcgacgacggtggcggcgcgagggccgtctcctgcgtcgttgcttccagttgcagctcaccctttctcgttgcttccagtttcatggtgcaggccatctcttcctcaaccatctccatcatctcagcaagacaagttgatttgcagccattcaagtgctccatcgttgaaggttggctgctcttcggattcacccttcctgttgttccctaacagaagaaaccatgctgggtttgtcattcgggttgagctcgaaccatctgcgcaatttcagttgacagggttgatgttagagctcctcagattcaatgatgagcctcgtggggatccttcgctgagtccagtgatgcacacaccaaaatctacggctcagcaacaaacctcggtcttgtgccgtttccgtggaggcagctgatggggattaacggtttgtcaagcggagtgcacatcttttgaggcccagggtagcagtggtcggcggcttcgccgcagatccctatcgacttgctcctt

SEQ ID NO: 87604 - DNA, 735 bp, Oryza sativa
  Clone ID: PAT_MRT4530_86534C.1
atggtggcggtcgcctccgcctccccgctcaccgccgcggcggcgccctccatgtgctgctcgccgcccgccttcctccctctccgtgcgcaccgcaggaggattttccgcgcggaggcgatgaagacgcagcaggagaagaagcagaccgaggtggccgtcgaggagtccttccccttcagggagacggctcctcctgatgagccgctggtcaccgccgaggagagctgggtggttaagctcgaacagtctgtgaacattttcctcacggagtcagtcatcacgatacttgatggattgtaccgtgaccgcaactacgctagatttttcgtcttggagacgattgctagggtgccgtattttgcgtttatctctatgcttcacatgtatgaaacatttggctggtggaggagagctgattatataaaggtgcactttgctgagagctggaatgagttccatcacctcttaatcatggaaggaacgacagagaattgccactctctaacccaagaaatatcacagttgcaagatcttggcagcacacttattgagttgtggaacctaatggacacaccaactgctgaacagaaatgctttgaccatgttacgtctttgatttcagtctcaccaaatacaaaaatgccccaaggatgccttgcacgtgaacttattgagaagtttacaattgatcgaccattttatgttcttttgctttatttggattgtcattga

SEQ ID NO: 87605 - DNA, 658 bp, Oryza sativa
  Clone ID: PAT_MRT4530_86535C.1
aaaagttatgtgagctcttaccctcaatgaatcgctatagttgtattgacaatgatcagaagaattcaacctcttaacctcaaccggattttacagaaaaattaagttagcttcaatgacaatccaaataaagcaaaagaacataaaatggtcgatcaattgtaaacttctcaataagttcacgtgcaaggcatccttggggcatttttgtatttggtgagactgaaatcaaagacgtaacatggtcaaagcatttctgttcagcagttggtgtgtccattaggttccacaactcaataagtgtgctgccaagatcttgcaactgtgatatttcttgggttagagagtggcaattctctgtcgttccctttcgttttcttggaaaagctgtatactctttgatagcttattgcgtgtgctctcaaggaagaagagcactacaggaagtcattccttgatattgatattaggtatgccactcatgggtggcatgcaggcatggcatcagctacatttttccatgattaagaggtgatggaactcattccagctctcagcaaagtgcacctttatataatcagctctcctccaccagccaaatgtttcatacatgtgaagcatagagataaacgctgcaggctatagcgagcatgtacga

SEQ ID NO: 87606 - DNA, 220 bp, Oryza sativa
  unsure (1)..(220): unsure at all n locations
  Clone ID: PAT_MRT4530_86536C.1
ggttggttggagagwagaagtggatnagtagggnggagcaagcgaktagcagaagaagaagcytgkcgtagttaanttttagcgtgycccyttttaggcatcgccccgccaagaaagttttagnttctaattattaggtcyttagtttvgcgtagcgctacctggagatgtagtacgacgttgatgcacgaaccgaacgtagcgcgtaggggaacccyta

SEQ ID NO: 87607 - DNA, 2512 bp, Oryza sativa
  Clone ID: PAT_MRT4530_86537C.1
ccgggctcgcgtgggttcggttcttccctcttcccatttccgcgcggcgcaacaccttctggacgtcggcatggcggcggtcgcctccgcctccccgctccccgccgcggcggcgccctccacccgctgctcgccgccgcccgccttcctccctctccgtgcgcaccgcccccgcgtcggcaccgtcgccaccaggagggttttccgcgcggaggcgatgaggacgcagcgggagaaggagcagaccgaggtggccgtcgaggagtccttccccttcagggagacggctcctcctgacgagccactggtcaccgccgaggagagctgggtggttaagctcgagcagtccgtgaacattttcctcacggagtcagtcatcacgatacttgatggattgtaccgtgaccgcaactacgctagattttacgaggggagaattctcaatgatcttattgattctggtaaagcagatctctcagatttgcttacaggatttggctggtggaggagagccgattatataaaggtgcactttgctgagagctggaatgagttccatcacctcttaatcatggaagaattgggtggcaactctttatgggttgatcgttttcttgcacggtttgctgcatttttttactacttcatgactgttgcgatgtacatggtgagcccaagaatggcataccatttttctgaatgtgttgagaggcatgcgtactcaacctatgacaagtttattaagctccatgaagatgagttgaaaaagctaccagctcccgaggcggctttaaactattacctgaatgaggatctttacttattcgatgaatttcaaacagcaagagtcccatgttctaggagacctaaaattgataacttgtatgatgtatttgtcaatatacgagatgatgaggcagaacattgcaagacgatgaaggcctgtcaaacacatggaaaccttcgttctcctcactctatgcagaaatgcttagaaactgacaccgagtgtgtaatacctgaagatgactgtgaaggtatcgtggattgtgtcaaaaaatctcttgtgagtaaagagtgactgatcctaattggaatggagtgcgtcatagtctcatagaatagagttttgataacagtcggtttccttttttctttcaaaagatagggaccactataatcttaacattcttgataatccttcagaataggctagctgtatcacaataaaaataatatattcatgagatagatgttactgcaagttgtgaagccctacaaaatttgcaatcttgatgtgctgtggttctatggaaagttcggttgcttgctgcttcttaagttcacaaagctgctctgtaagggaaatggagatggctcatgatcaggcagcatacggtgaatatggtcagctcaaggtggaactgactcaaaccgtagaatttcgtgaagatgagaaggaagctcactgcagtatcgaagaagtcaatgcgaaatgaaaaatcaatcatactgctgctttgttttttctgaagatttatttgtcatttattcagtgtacagatgatactattacatctcaggcaaattactgtatcgtcgttctcataatcttatctatagcactatgcattataatgatctgtatggtgagattagctttgtatgtgtgattgtgtgtctacctaagcgtatgtgggaatggtagccacagcagaccgatgctccgttgctcacatcttgcacactttatcatctttgcattcggctgctagttttctggattccataatttcctctagtggaggtcgacctgtaatttgcatccggtatttggcccacacaccatatattgcatttgctactttagctacaggctcatacttagtaactgcataaatccaaccaagtcccacttcctcatacagctttctaaatgcctcaacatctgtgactattgttccatctgaaagtatagcatgtatcctccccatggcagtttcataatcaaggttctgattgtcttgtggagagtaatctttcgagcttatgtcaacaaattttatagctccataggatttgtttctttccctcagcatgtttacctcacgcatacagagtgggcaatcgccatcatagagcatcttgatcctccaacttccagatgaattttccccatcctttaaccctgaactagggcctactttgacgtcagagtgaacttgacatctgaaaccgtacaccggagcgcggcggagcgccgccgcggagtcccaccgccccggtggcggcgggaaccgcgccgcggcgcgcggccgcacccggggcagcgccgcacccatgcgtgccagcgagctcgccattcgataagcatcctgctaaacagaagggccgttatgtgatatgaacttttgaagcgaaaaccattctgacgtgaaatgaccccatctataggatgattctgtactggaagattcctgattccaaaaaaaaaaaaaaaaaaggagcggcc

SEQ ID NO: 87608 - DNA, 384 bp, Oryza sativa
  unsure (1)..(384): unsure at all n locations
  Clone ID: PAT_MRT4530_86538C.1
atggcgctcaagcggcttgttctgccgtcgttcgtggtaattattgtgctcntcatggctgtccaaggggagtcccagcggtgcgcactgtctagcatcgatgtcagtcagaccaataccgggaagaaggtcggaacactcgacacggtgttccaggtgatggtgatcaacaggtgccagtgcgcggtgagggccatcttcctccgtgccgatggcttcgcgagctcggtcacaatcaatcccaagctgttccgccaggctggtgctgtcggctacctcatcggcgatggccggcggatcccgagcggcgagtctatcgcctttcagtatgcgtgggaccactactttcagatgactcctgctagcgtccaggccgattgctag

SEQ ID NO: 87609 - DNA, 963 bp, Oryza sativa
  Clone ID: PAT_MRT4530_86539C.1
atgggagagcccgacgacgagatcacgttcgagttcctgccgctgatccggtgctacaggagcggccgcgtcgaccgcctcctcccggacacccgcgtcccgccctccgtcgacgccgccaccggcgtcgcctcccgcgacgtcaccatcgacccggccaccggcctgtgggcgcgcctctacctccccgacctcgacggcggcgagaggaagctgctgcccgtcgtcgtgtacctccacggcggtggcctcgtcgtcggctccgccgcggacgcgctcgagcacgggttcgccaaccgtctctgcgcgcgggcgcgcgccctcgtggtgtccgtcgactaccgcctcgcgcccgagcaccccgtccccgcctgctacgacgacgcgtggtccgcgctgcagtgggccgtcgccgccgcgagcgccgacccgtggctccgcgaccacggcgacagggagcgcgtcttcgtgctcgggtacagctccggcggcaacatcgcccacaacgtcaccctccgcgccggggccgaggagctccccggcggcgcgagcgtcaaggggatggcgctgctgcacccgtacttcatggcggccaagaaggccgacggcgaggtgaagaacgcgtggctgaggggcaagctggaggagatgtgggcgttggcgtgcggcggcggccggaccacggcggggctggacgacccgcggatcaacccggtggccgacggcgcgccgagcctgcgccggctcggctgcgaccgcgtcctggtctgcctcgccgacgacgagctggaggtccggggcaaggcgtactacgacgggttgctggagagcgggtgggcagaggacgccgccgagctgcttgtctccggcgaggatcacgagtacgtccaccgcgatcccgacagcgccaaggccgtggttgtgatggaccggctagccgcgctctttggcgggaaaaattag

SEQ ID NO: 87610 - DNA, 264 bp, Oryza sativa
  Clone ID: PAT_MRT4530_8653C.1
atgccttccctattgcagaccttggaagaagaagaagggaaggagaacaaagggaaagaaggaagcggagggaatcaatgtgaagatggaaatgaggggtttgattaccgctgcccatggaggcctagaattggaggtatcgagttgttaatatatgttgcttttataggaagattatcgtttgaggctgagtcggtgtttattcaggtgatgccactttggaatgcaactagagttcatctcgccatcggtgaaggcaagtaa

SEQ ID NO: 87611 - DNA, 1227 bp, Oryza sativa
  Clone ID: PAT_MRT4530_86540C.1
cagacgcgtacgtccacgcgtagaagaacgcgtccggagccagcgactgtgccaatgtactactcctaccccctctcctactcctgttaacaagttgtgctgctatatagaggagcagccgagcaagtgtgttgccacaagaaaagccttgtgagttggtaattgatagtagcaagacaatgtgtgggggagcgatcatcgccgacttcgtcccgcccgccggcgcccgccgcgccgctgcctccgacatctccgacaacgccgtcctctccgctgccggtgccggtgacgagtcgttcgcggcggccaaggcgccggcgccggggaggaagacggcgtaccgcggcatccggcgccggccgtggggacgctgggcggcggagatccgcgacccgaggaagggcgcccgcgtctggctcggcacctacgccaccgccgaggaggccgcccgcgcctacgacgtcgtggcgcgcgacatccgcggcgccaaggccaagctcaacttccccccgaccatcggcgccgccgccgcgccaccgccgcccaagaagcgacgcaaagccgccgccgcggcgaaccaccaccaccaccaccaccagcaggagagctcaggctcctcgtcggcgtcgtcgctgcctcccaccccgccgccggccgccgagcaccagctccgcgagtgcatgtccgggctggaggcgttcttgggcctcgaggaggaggaggacgacggcggcgccggtgagccatgggacgccgtcgacatgatgctcgagtaggctcgccgggaatggcagcgttgccatgctcatgcatccaagcttattcatgcatgcagcagcaagatatacaactttagtactactactatgttaattactacttactgcgtaggtaaatgaaataaaatggggttggttaattagggtgttcttctgggaatccttggctttgctaattgctagtactactatgtactttggcgttaagcattgcattgccaggtgatgcatgtcatgtaatcgtggtaattatatggccgtcctcctagagctagctagcagattagatttactatataaagtggtagtagaaatatatgtcctcctagagctaactagtgtcttgtaatgatttcagacttcttgggcaacatgagcaatgcatttcgacttccactttacatctatttaaaaaaaaaaaaaaaaaaaaaaaaaaaaaaaaaaaaaa

SEQ ID NO: 87612 - DNA, 499 bp, Oryza sativa
  unsure (1)..(499): unsure at all n locations
  Clone ID: PAT_MRT4530_86541C.1
cggggtcattgaatgcgcttgaagctccacgccgtggaggccgctctaaactatggatcccccgggctgcaggaattcggcacgagctcgtgccgaattcggcacgagcgctcaccctcttcgcggttattggtgatgaaagtgatattgaacagaagcaaaccttctgcccttgtgatattgctgccaatttggccattggcaatgtttcctttatgggatacatggcagtactttcatgcacagataccttgcacattcaacaaagttcctatatttaacattttcccacttccaaaggcacccacacctccttgttatttccctttaattcccttttgggaaacctcctttataaaccatttcccccttttgaaaggggtcttttatttttggggaaaaccccaatggggggggggggggcccctcctccaatttcctcccggttcccctcggggttttgtaaacccccccggggaaaaatcccccnagaattccc

SEQ ID NO: 87613 - DNA, 2041 bp, Oryza sativa
  Clone ID: PAT_MRT4530_86542C.1
ggcggtcgcggcgcccccgggctgcaggaactccgcgcgcggcgcctcaaccccaccccaagaacaccaaagccacatcccatcccatcccagtccacggtgaggttgagcgatctgagaaaaatcatcagcgacgagcagcaacaggtttgttctctgaacttctctgatctttttagaagcaggtaacacacaagaaaggtcctgtcccaagaaggtacttctttcgggtttattagatcgaaagaggagttcttgtgcgtacaggttctttctcatcccatcaacttctcctaggaggaacagagatccagagaaccttttttctcttctggattcttgccgatttttaggcttcctttgcttttctaaggccagaaagggttgttttgcaatacccttctagttcatcctctcaaatttttcttctttctattcaaaagctctttctttctttgcaccctttgtttctctacttttattgaggaacagggctgatttttcacttcttgcatccaaaaagcaccccttttttctttcctgtttttaagatttccatacccttgccatcttcatcttctacctccatccagtcctcatggccgcagcaatagacatgtacaagtataacactagcacacaccagatcgcatcctcggatcaggagctcatgaaagcgctcgaaccttttattaggagcgcttcttcttcctccgcttcctccccctgccaccactactactcttcttctccttccatgagccaagattcttacatgcccaccccatcttatcccacttcctctatcacaaccgccgccgccaccaccacctcgtctttctcgcagctacctccgctgtactcttcgcagtatcatgctgcttcacctgcggcgtcggcgacgaacgggccgatggggctgacccacctgggcccagcccagatccagcagatccaggcccagttcttggcccagcagcagcagcagagggccctggccggcgccttccttcggccgcgtggccagccgatgaagcagtccgggtcgccgccgcgcgcggggccgttcgcggcggtcgccggggcggcgcagtcgaagctctaccgcggagtgcggcagcgccactgggggaagtgggtggcggagatccgcctcccgaagaaccggacgcggctgtggctcggcaccttcgacaccgccgaggacgccgcgctcgcctacgacaaggccgccttccgcctccgcggcgacctcgcgcggctcaacttccccaccctccgccgcggcggcgcccacctcgccggcccgctccacgcctccgtcgacgccaagctcaccgccatctgccagtccctcgccacgagctcgtccaagaacacccccgccgagtcagcggcctccgcggcggagccggagtcccccaagtgctcggcgtcgacggaaggggaggactcggtgtccgccggctcccctcctccgcccacgccgctgtcgcccccggtgccggagatggagaagctggacttcacggaggcgccatgggacgagtcggagacattccacctgcgcaagtacccgtcctgggagatcgactgggactcaatcctctcataaacaagcagaagcagctactactagtctattactagtactagtagtagtcttcgtcaagctagagtcactcaactcaactagctgtgtaatcttctctgaattccgtggcttccatggctcggtggcattttagacgtcggccatggctgctgcgagtagcagtaactagtcagtactcagtagtagtaaggtcgttggtattacgtcgtcgtgcaagtgtcgttggtgtactcagtgatctgatctcctggttgagctgccggttgtttttttcacggcgcggccggtcgagaattaagctgtaatcccttgttacatgttggaaattcagtagcttatgtaactatatgtacctttctcaaaaaaaaaaaaaaaaaaaaatatgtgagtaattgtgtaaaaaaaaaaaaaaaaaaaaaaaaaaaa

SEQ ID NO: 87614 - DNA, 518 bp, Oryza sativa
  Clone ID: PAT_MRT4530_86543C.1
gtgagagatcaagagagaggaagtgatagattttttttacctgacctagctgtttgatactttgatttgttaatttcttgtgcatttgctgtttgtgatccgttgctgtgatcgatgtgcccctgaacgaggtccacgacgtcgttggagttggcgccggcgagccggcgaagatggatcgccgccgcgcggcggagctgatgctgctgtccctctcctcgcagagaacgcgcatggcgctcgtgggtggcaaccacaccgccgcccgcttctgcacccgctaaccccgccgccgccgccgtctcctcctcttcttctcccatctcttctctctcttgatcatcttctccgttcatctctgctctgagtgtgttttaacctcttcttggcgatatttttgtgttgggatcaatggcgactatgaagaaattagctgcgagggatggcagggccgccagcaatggcaggcttctccggctggtggcgcgggcggggctccttcgccgcgtcgtgctttc

SEQ ID NO: 87615 - DNA, 276 bp, Oryza sativa
  Clone ID: PAT_MRT4530_86544C.1
ggcggaaagcatagggggaaggtaaaacacatatggggggagaccctatcaactcagaataatgcataggaacacttgatcaaacctgtaaccagcgcactgcggttcgaacgtcctatgataccggatcagaagagcaccaccactcgcggctacgtggagggctacaaaatatcaatttccagggccccggtgggctgcaccacataggcgaaagcgagttctgaaaccgcgtagggcacccaggcaagaggcaaacttgggacttatcacgtc

SEQ ID NO: 87616 - DNA, 574 bp, Oryza sativa
  Clone ID: PAT_MRT4530_86545C.1
ccggccggtgtctcctcatctgtacacatcacgccgacacccacgtgcgcgtgcgaccagcaagaaacccacatcagcagcaggagcgaatgaggaagagaagcagaggataggtaatccaaggtgagggaggcatagcatggagtgctccatctcgaggacgaatctgaattgcatcagcctgcctgacccggacacacaataaatcgtgcgctgtctcctctcgcaggcatgtctgtattcaggcttcttctatgtggaggatcatgtaatatgccactagttaaagcatgatgtttttgctccggagcaagatgttctttggccttcccatccatgacaatatgtagcttctccggcatgataagaatcgaggatatacacccatgctatatgagattcttgatccacattatcaagtcgaatgtcgactaccatgaaggtcattatataggtattgggataccataagatgatgccacgacgctgcagaccattctatggtccaaatcactgaacatccgatcgaatattgccacgatggaggaaggtgatgagacagcatcatacgcga

SEQ ID NO: 87617 - DNA, 1167 bp, Oryza sativa
  Clone ID: PAT_MRT4530_86546C.1
atggcgctcgtcgcgggcgacatggcggaggaggcgtacaggaagacgaaagcgcggcgcggccccggccccgacgccgtcctcatctcccggcgggagcacgtgtcgatgcgcgacgcggggcacggccgcggccacaagaccttcgtcaacgtccgcggcaaggaacgggagatctcggtggatctcgtgtcgcgcggccacggcaaggacagggacaaggacaaggacaaggagagggacaaggccgacgtcggcatgtcggtcaccgtcgacggcgagcgcgtgctccacatccggcgcctgcgctggaagttccgcggcaccgagaaggtcgacctcggcggcggcgacggcgtccaggtctcctgggacctccaccactggctcttccccaaccgcgacacggcccccgccgacgcctccgcggtcaccccgcctccccagcccgcccacgccgtcttcatcttccgcttcgagctcgccgacatcgccggcgacgaccgcgactctgccgaggtcaaggacgagcacctcctcgaaaacgccgggagcggcggcggcggcggcgcgtgggcaggctacctcgggaggtgggggcgaggggactggagcgagagcagcagcaacggggagaaccggaggaagagggggcaagcccggaggctggccaaggcgagctcgtcgtcatcggcgtcggtggcttcctcctccgcgtcgtgggcgagcggctcgacggtgatggactgggcgagccccgaggaggccgagctgcagcgcggccatggcttctccctcctcgtctacgcctggaaatgctagccattggcgccgagcaaagcattctttccacttgatgatgattgatggtaattcagtgagattttttcttcttcttcttcttctatcttcttcggattgttgtaagttgcaattgttatccgagcaatgttcttgtgcagtttttgaaaattgtttcatcagctgaccaaattgttcattagtaaatttcaaagcccaagaaatcaaacagatagaagagttagagaagtcgtatttatgatcccctggtcttcctttttccaaattaggtggcgaatttgcttagtaattggctaattccctcaagtcatctggttggttgattaaaaaaaaaaaaaaaaaaaa

SEQ ID NO: 87618 - DNA, 1902 bp, Oryza sativa
  Clone ID: PAT_MRT4530_86547C.1
cggagagtggcgacagtccccaaccatatcacatcgggatcggcgacaagagaacgcgataaacggcagccaataaccccggggtaattcccgcgcgaggcgccagctcgggccattatggcccctccataagaagtcggctggctcatccattgcggcagcccgaatgaactccgttatgagcctaggggaggtccgttcatccccctgtctgggcatcgcgcctcggtaacggctgttttggtaatccggcacagactttcgttgcgctatggccagacagtgggatgtacggtcctcttctaggtacataacgtatttcatttctgctgcttcaatgtatgaaatgcatggcagtccattgaaggaatcaagccgtcgccgttcaccatgctcagcgtcctcgtcatcgcccacaccgccgcccatgtcgctgcaagagacgacatcgaggtcgtcgctcccggaccggctcatctcgttctccactgccacgccctcctcctccccgccgctcggctgctggtgcggtggtgactgctgtggaagcagctcaaccacctcggtaacaccgggttcgacctggcgctgttccgcgtcaacgcctacagcaacatgctctacctccatgccgactccacctcgcctctcacgtaagacatcgaccactggttccccaatgttcagatgccaagtattcttgccatggtcatgcagctgtgtttcttgcagtgcttttcgcgcagatgaaacttctaccagtttatgcaatttaaaatcgcatatttgcatggcagccacctcgtctgcagcgccgctggtgacatggtggcccagaccaggcaggccaaggttgaggttgaaacccatgccaacgcacccctccagcagcggtgccgcaccgagcacgaacagcgagtcagagcagctggcccacatgctgggcagaggtcgccggcggcggcggcaggatgatgatgatgagccggtggtgatctcgccgccatgctcctgccagcggttgcaacgagtagtgacacagaagggtgtgggaggcagagaggaaggtggcaagccaccggcggcgtcaagcgaagtggtggtggtgccgtggctgtcaatgtcataggaagacgaatgtgatttggggacaatccagtggaagcccatgggctgaatccactttctacccaaactttcactggtgttcgggcacgagctccagttaggcagtggcaaactgcaattttgtggtaccccccatgacaatgccccaaatctttttaagcttggtggcatagacatataattcctccagtcttccattatgactcttagatcatgaagtttgctcttgtttaaatctctgctgggttcacaaatgccaccaaagtatgtagtgcttaggaacttaattttcagtccaatatctgtaatgtaaggatcatgatagttaaatcccccgtttgctatgttccccaaatcagttgcattgcctacatagtgatcacatgcaatctgaaaatctccatcaggatagaaatgaggaaaaggattgcggaaccacgtgatgtctgcatccgagaaaatgaagctgtaacctttttcaagaactagccgcaagaaatccagccttttccacatcatgtccagataaccagcagtcagaaacctcttctcttgagaaaaatccacattctcggttgcaagagcaaagcagtatgcgtggatcttcatacaccttttgtaagccttccaatcaaatgttattatcacaagatgtctcaaaagtgagctagtcctaacaccacggcgaaaactgtcgataaaaagatcaatgaccgagcctgaagaagcccatgcagcattcagtgttgtcaatataatggtcttattatccat

SEQ ID NO: 87619 - DNA, 324 bp, Oryza sativa
  Clone ID: PAT_MRT4530_86548C.1
ttagcccgtgacgctccaaattaactcatcgaagccggcttgctcctggaagaactcttcatcagcaggatccgcttcatcttcttcagcaaaaggttggcacccggccaacagcttttcaacggccacccgggccaacaacttttcaaacggccacccgggccaaccactttcaaacgcccacccgggcctagctgatcccgtcagccggatcacccagcccgtggggatcagccacgtcgggagacctccaagtgtgccaggaagcccaggggggtcctctccgacaccaccccggcgaatccacatgtctctcggcatcat

SEQ ID NO: 87620 - DNA, 489 bp, Oryza sativa
  unsure (1)..(489): unsure at all n locations
  Clone ID: PAT_MRT4530_86549C.1
gggatgccctgcnctgcccantgnggatgggagtttgctgtgggctagatgattgtggtgaatntgcgtgtgctgtggttgtgctttggtgttgtgctgtgcgttgtgcgtgctgtgcgtgctgtgcttgcttgcttggatgccatgggacagtgtgngtgcatgccatgtgcggtgctgcccatgttggttgaccaggtgtgacaggaggacaaggattggatgggtggaattgacctggattggccccccaatngtgttgtgtgctgtgctgtgctntgttaactgcgatgccaatgtgatgtgacctgactgaggaggttgcatgcttggcacaagttgggcggtggtggaaaaacctggaaaaagaaaagggtggtaaaatttgttgctgatgctgagcaagtgagcacatgctgtatgctctcaggtatgaacaaaataaacagtaaaattatctgcagctgtttgaccaaaaaaaaaaaaaaa

SEQ ID NO: 87621 - DNA, 1009 bp, Oryza sativa
  Clone ID: PAT_MRT4530_8654C.1
aggaaaagaagattattgcgtcagcgggctagggtttcggtggaccgggcgcacgggcggcggttcacgcgaacggacggccgagatcgatccaatccaaaacggacggctgagatcgaacggtccacgaccggctcacggcggacgaccccgatgacgtcggcaatgacgtcaccgacagcggcggcggctcggcagagcggacggctcgggcggcgcacgctcgccggcgaacggcggcactaggacgcaaacggaggccaccagcacgtagaggacgacgcggcgaacacaccggtgaccaaaacggcggcggaagaacaacggacgacgacggcgacgaggaggaaacggcggaaaccttcgggttgatgacggcgacgaagctctggcggtcttcggcggcggcgaaggggcggacgaggacggcgacgacttggcgaccacgacggcggtcttcccgagcgacggcgacgaccgagacggcggcggcgcacggctggagcgacggcggcaacggcggcgctagggcacacggcgctagagcgattccgacgacgagaggcgaaggcaagggtggcggcgggtagaggagacaccggggatccttttaaaggggctcggaggcggcggcaaaggcccacggcggccggtgacgaggaaggaaagatcgggaagaacgaatccgagacaaactcgaatccacacgctttccaaaacgatttagccaaagattccaaaggagaaaaggtagaggagatcccggagatcatttcccctctatcaattcggccggagaaggaaagggacggccggattggaaagcggcggcggcggcgcgaaactagggtttcggcccgaggaagacgacgggcttgacaggtgggacctacctgtcagcgacagcgagggcgcgcgcgcgcggcggctgcggactgggccggactgggccgaggagagagagagaggttttgggccgactttcggcccaaagccaaaagaggacttt

SEQ ID NO: 87622 - DNA, 504 bp, Oryza sativa
  Clone ID: PAT_MRT4530_86550C.1
atggctggtgatggccatggagtcgaggtcgacgacgtggaggtcggccggagttgcgtcgcggtggcgccgccgccgccgccggccgaagaggaggagaagaaggagggtgctgtggggacgacgtcgtcgacggcatcagcgctcgccgtcgccgccgcggccgccgtcgagctgaccaacctcttcttcttcctccacggcaccggcgacggccgggcagtggcaccgcggcggcgagggcggcggcggtgctgcgagatgggcgtcgctcctgtggagcttgttgaggcggccaccgtgatcttggctctcgccgccttcctttcggccgccggcctcctgctcctccggcacgcggccggtgatcttggtgggcaccaccggatcgtctctccggcgtgcagcacggccgtcctggttgcttccacggcggcgctcttcctcgcgtcgctcggcaccgtcgtcttgctgctgaacgattatcaaactgtcatgtactaa

SEQ ID NO: 87623 - DNA, 489 bp, Oryza sativa
  Clone ID: PAT_MRT4530_86551C.1
ccggccggggagtcacctcccgcatcgagttcttccgcggctcttcttcaccgaagaagaggaggggagggggacacaggcaccgactgcaaccacaacaccgtcgtgaggggacactggcgccggttccgaagccgccaccggcccagacgtagccaggggaggggaacacctacgccggtcacgtaggcttggccgcaggcccctttgcgttggctccgatgggcggcggtcgtgcagccggctccgctcttgcgtgcaatgccctctgcttccacccagccaacgccagccgggtcagcgtagaccgaccgtccggccggcaccagatccagctttcaccctctcctctacgtggatgcgaaggagaccacaacgcgtccggataaaggtagacgaagccgaagctgaagaggaatccaaagaatcggacgcatttgccgtccccgaccttatcgacgttcgccgccgaggagtcgccttgccacc

SEQ ID NO: 87624 - DNA, 399 bp, Oryza sativa
  Clone ID: PAT_MRT4530_86552C.1
atggctaatgtcttccagtcgtccaagtggtatgtcggtcttcataacgcggactttcccaatgtggggagtcgacgaacgttggttaccaaggctagagggcattacgattacatggctcgaagcgtgtacgagtacttcactgaggcgttcgatctacttaaggaggatacgttcagtggtgtccatacacggaagaggagacacaacgtcgtgcccctgccgacctcacgtgtaatgaggcaattcagcctttaccaagaagtgcctctcctgcttgaggatccatatattcctgaaatagccgacgtggacacgctgtaccctatgcagtcagcgccagttacccacctgacggccttcgacataggcaagaccctcagcttccacacgtcctag

SEQ ID NO: 87625 - DNA, 282 bp, Oryza sativa
  Clone ID: PAT_MRT4530_86553C.1
atgagggaatggatccagaagcaagatagtatcggtaatcaacccaactggtggagtgcggcgccggcggggaaggaccttgccatcaggaaccaccacggtgccagcgggggcagtggagtggcgcggcaaaagggtaaggacttcaccgtcgggaaccaccatggcgtcggcgaggggaggctgcggtgtagtgtggtggaggctgggaaggacctagctgtcggaaaacaccacggcgccggtggtgactggagaagaagccggatccagcgagggtag

SEQ ID NO: 87626 - DNA, 339 bp, Oryza sativa
  Clone ID: PAT_MRT4530_86554C.1
atgagcctcagatttcaagtttcctttttttttatcccgtgtttgacctttgaattgcatctcaggcttagtatcatggttaatctgccaacttattcaatatcatggaataaaatacaaagaaagaatttcactccatgccctcttcccccccgcgcaggggtcagattgttgaggaattgtcatgtcaccttggttgctttgcagctgcaaatggtagatgtccaaaagcatctgagatttattaacttattgaagtacaatgagaatttatttgaagacattactcctatagtcatacaggaatttaagaagcgcatcaagaatctctcaaattga

SEQ ID NO: 87627 - DNA, 349 bp, Oryza sativa
  Clone ID: PAT_MRT4530_86555C.1
attggaaggaggctttgctgggtttccttttggtaaggccctgtttggaaggcatgaattttagtttcaaatgaaacgggtcgatttccaaaggaatttgagcattttcccgcataccaaacgagcccctaagccctaactaaaccaatgcaagaaccaacctaaaaagccaatacaccctgttaaaaggggcttggaagcagaaaacccaaattggactgaagaacaaaacaatttacccagttaaacactaccaaaatttaaagctttccactctttttttttaactggaaggaaaaaactgaaaatgcattccggaaaccatttttggacgaaaaccggtgccccc

SEQ ID NO: 87628 - DNA, 1255 bp, Oryza sativa
  unsure (1)..(1255): unsure at all n locations
  Clone ID: PAT_MRT4530_86556C.1
atgtccgccgccgccgccgccgccgcatcctcccccgctccccgttctttaaatttgatttgggttctttcctctggagaaaaggttggaaagcaaggttgcgctggttaccggtggtgcttcagagagcatggtgcaaaggtatgtattgcagatatccaagatgaagcaggtcagaagctccgggactcccttggaggtgaccaagatgtcttatttgtccactgcgatgtttcggtggaagaggatgtagcccgagcggtcgatgcaacagctgaaaagtttggtactcttgacatcatggtcaacaatgctggctttacaggccagaaaatcacagatatccgaaacatcgacttttctgaagtcaggaaggtaatcgacatcaatttagttggtgtattccacgggatgaaacacgcagcgcgcatcatgatccccaataagaaggggtccatcatctcattgggaagtgtttctagtgtcattggagggttgggacctcattcatacacagcaaccaagcatgctgtggtgggtctaaccaagaatgtagctggggaattggggaagcatgggatacgcgtgaactgcgtatctccctatgcagtgcccacggctctctccatgccgtatctgccccagggcgagcgcaaggatgatgccctgaaagactttttcgcctttgttggtggtgaagcaaacctgaaaggtgtggatctgctacctaaggatgttgctcaagcagtgctctacttggcaagcgatgaagcgaggtacatcagcgcgctcaacctcatggtggatggtggctttacctctgtgaatcacaatttgagagcatttgaagattaacagaagttgttaggcacaattggtactctagtttcagatgctatgtaccattctgattttagaactttgatcaattacctaaagtaagaatgtcaataaggaatgcaatcttgtatctgtggtattgtatagtactatgattgtattgccggtgcttaaggacaatcattgattattatcagcactattatgttacagttctgaaaaaaaaaaaaaaaaaaaaaaaaaaaaaaaaaaaaaaaaaaaaaaaaaaaaaaaaaaaaaaaaaaaaaaaaaaaaaaaaaaaaaaaaaaaaaaaaaaaaaaaaaaaaaaaaaaaaaaaaaaaaaaaaaaaaangggggggggcgttttaaaggaccaaaattttttacccccttcggtgtcacaaaaaattttttt

SEQ ID NO: 87629 - DNA, 286 bp, Oryza sativa
  unsure (1)..(286): unsure at all n locations
  Clone ID: PAT_MRT4530_86557C.1
cctagtctaaagtaaaaatcaaaaacggcgagctcaggtcagaggcaaccaccacgaccaccttgagcaaaacgagcgagcgaagttatcanagcacactgttattaatggcggtggaagtggctgtggcttggccctccattgaggtggggcaggaccttccgggctttcgttttcaccccacggaggaggagcttcttgacttctaccttttccgcggtgtgctagggaagaaggttcacttttacattattgggacccttaacattttacggcattattcctt

SEQ ID NO: 87630 - DNA, 2049 bp, Oryza sativa
  Clone ID: PAT_MRT4530_86558C.1
atgcctcccgctgccgccgcggaggcggagatctccccgccgcccccggcggccgacgggggggccatagcggatacggcggaggctggtgtcgcggctgagaaggagagtgacgggatggaggtggaggatcgcggcgaggtggtctcccaggaggccacggcggtgaagccggatgaggcggaggagcccgaggaggatcctgaggaagtcggcgagggggccgaggaggcgccggcggcgggtcctggagacgtcgcggccgccgcggctgagtcggggcccgtcgcgatggaggccggtgatggggagccggcgctggaggtggccattactgcccatgagccggtggaagaggagcccaaggatgtaatggagacgggcgaggaagcaatagagccggaggaggatgaggaaccagaagaggcagaggtagaggaggatgaggaaccagaagagttggagatggaggaggaggaacctgaagatgcagattcagaggagtcgatggaggaggaggcaggctcagaggtctctgaagaagaagctgcggcggatgacatgaaggaaatagctgacaaggattctgaagaagctcaagatgaagataaacatggggataatcataagggtgaagttgctgaccaattgagcaatgatgaggatgttggtggacgtgaaaatgatgaatcaccaaatgatgaactcgacacctcattgcttgtgctggattcagttccagatgggaatgacaaaacccttgaattatttgtcggtggcttgcctaaggactgtgttgaagaggacattagagtggtgttttctcaatgtggagaggttgaatctattagaatagttaaaaagagaaagcgcattgcattcgttcgttatgcagatatcagtgccacaaagaaggctcttactgaatttaaggatggaatcaaggtaaatggcaaaagtgtcagagtatctgttgctgaacctcatagaaaatctagtgagcagaaggctcttacgaaggttaaaacagtatatctggaacattttcctcgttcttgggatgagagaaatatcgaagaatgctgtgaaggatatgggaatattcaaaaagttaacattttgcggtcaaaaaagaaagttgtttcttttgttgaattctcatcacggaagagtgcgttagcttgtgtcgaaggaataagcaaggccaagatcaatgatagggaagttaagttggctgcaagtcttgctcgaccacaatctaaagttcaactggccaatgagagtagtaagggtggtttcaatgtccacagtggtgcaacttctaaaagtcctgataaatctaaaatgaaaaaggaccagacagacgagactattgtgaagaaatcacagcttaaattgttgaaaggtgatgagagcaagctgccctccaaagatgatgtggaagtgccacaaacatcaacccattccaaaggaaaagcgaaagttggaaagcgtcaaaatacatctatagatgaaaggccatcaaagaaatcacgggagagtggtgagagcaagctgacctctcaagatgaaggggaagtcgggaagagcaaaagtaaatctgtaaatgaaaggccattgaagaaagcatcgaaaaaccgaaatattaagcattctgcaggttctcgatatgtaactagccaccaagcttaccccactgtgggtgcaacttccagatctaaaccacattcccatgatttggcacctcatgctggattcatccctccttcaagtcgtgttcaaaggactcctgcacgtgatcaccaaagaactgcaccgtacaatatccgtcagatcagtggttctccttatgctagagaaagagtagctccgcgaccagcatattctgttcacacaagcaatgctgctggatacgaggctggatatgcatacacctaccttcccccaccaccaccaccttcacctagtatatcttatcatccacctcctccggcaagtatatcttatcatccggggagtggcccatacatcatacgaagatactactga

SEQ ID NO: 87631 - DNA, 2283 bp, Oryza sativa
  Clone ID: PAT_MRT4530_86559C.1
atggacttccacgcgctcccccgccgcgacctgcaggcgctgtgcaagcgcaacggcgtccgcgccaacatgaccaacgccgccatggccgatgccctcgccaagctcgccacggttgatgggatcgaggagttcgtcaagcaggcagtcgccctgccaccggcgccggcgaccaagccggcggttaaggcggtggcggaggaggatccgcgcgagaagaaggggagcccgctcccgcgcggccgccgcgtcacggtcagctcgccggaggtggtcaacctggacgacagcgacgaggaggctccggggcagagtaaggacgcccctctcccccgtggccgccgcggcacggtcaggtcgtcgaagctcatcaggccggacgacggcgaggaggagggcaaggaggacgaaaatcggggcgagaacgcgcctgtgcatggcgaggggcggcgcggtgccagcaggcgcgcccgggccgagcccgtggtcgctccaactacgaggagaagggccgctcccactagtaagatcgagacaggtgatgtggctgtggaagcgccaccggctccgaccactcgccggaggccgcagactagtacggaggctgcaccggcaccaaccactcgccggagggcccagagtactgtagcagcatctgcagaggagaaggtgccgaggggtagacggacgacgaggagagcagcggcgaagaagcccgatatgctggaggaagaaaccagagaacctcttgcgcctgagcaaaatagcgcacacgaggagccagtgcaggaagagcaaggaattgaagtggaggtgcctgcagaaactgtcgaggcagtagctcaggaatgcttgcctgaccctgatgcagtagttgaagagaagccggtgcaggaagaggaagttgggaggtctgacttgagtgtgcctgttcgattggtaaattcagggatagaagtggaagcacctgcagaaactgtcgaggcagtagctcaggaatgctcacctgatgcagttgtagaagatgagcaggcagctgtcgaagctgaacagactatcagccaggatgattcgcccatttttggcatcgtgactgggacaattgttggagcgagtgaggaagcccctgtgtgcaacagtgagtgtcccaagaacatggcgactgaagagagttccgacacagttagtgaagagaaggaagccgtgcctgctgatgaggtgccgctggttacggtgacatgcggcgaagcaactagggatgctgaattgcccaccaatattggcaatgccaaagaagaggatgatgatgaaatggaggctgcgcatgaggctggttttgcggttgaagtggacggatctgagactgttgatgagctgattggtacactgacagagcatgctgacaatgccattcagcttaatttctcagcagagctcagttgtgctgatgaagaggcgggagtatttgccaccgatgatctgcagcagagctcagcgactgtgaagactatggtggcagacagcgaggccaacgaggaagaggatgcactggaagcagaaaatgaggtcggttttgcggttgaggagaaggaagttaggacaggcgatgagccgcatgaaacactgtcaaatgatgctgacggtgccattcagcttggggaggatgcactggaagcagcaaatgaggccggttgtgcagttgaggagaagggagttgagacagttgacgagccacatgatacagagacaaatgctgctgaaaatgctcaagaggagggagttgtggccagtgaggatctgctgcagatttcagagaccgagcaagatgaattcaactcggatatttgccatgccgttgaacacaatgaaagggacaatgtagaaagtgtgtcatcagagagggaggatgtcagtatggagaatgcgttcaccggtgacctcacactgaagttcgacggtcctggagacttgggtgatcgcaatacctctcttttggaagagggagctcggaccttgccactatctactgaaacgcccaacaatgtcactgatgcggtggtcacagctgccgaggaaatggtgtctgaaaccatgggtgtcagtaataagaagagtactgaactagctgcaatggaagacggcaacgaagtgaaggttgtggagaagcagaaggaggatcctgtggaactagttaaacttagcctaaggactcttagagccaagctcaaggagcagctgactaagcacaaggtaatgacacctgaccttatttatgcactgtag

SEQ ID NO: 87632 - DNA, 1446 bp, Oryza sativa
  Clone ID: PAT_MRT4530_8655C.1
agagcaaccttctttttttggaacaatatgcacaactgccgtgcaaaattatagccgcagacaaattaaagccagttgagcagttttcagctcttttggtgcaaggggctttgtatacatacataacttaaaacataagatgtagctatgcctgcaactatgaactcaggcattcagccacctctcgcacccgaaatagcaaagaatcacggcactgaatttgtaattcgaaggctcaactaaaggccctggctgtggctggggtccagcatccaagtccacctaaacaaatgttgctcttctacatacctctatgtggtagtgaatggttagtcatcgccgccaccatcatcagcctccacgggatcatcatcatacccttcatcctcttggtcgccagcatcgtcgacatccatgagttcttgccctacaactgcttcgtttattgcttccaatgcttgcacagtcctcagctccggaggagctctctccactttcatggttttcagcttatcatccacaaagaatgcggtgttaatcacgcgctaatgaaccgctccgtttaccgtgcggaggcactatgttcccaacctggataagaacaaaggatctgcgagaaagacctgcgttgactgcatctagttgtgaatcattaaggtttgttttaagataatccataagtggctcagggacattccaagcacggttttgatcattcccaccactgttcttctcactagctgaaagaatcagatccttaaaaggaagtgatgctacagagtgcatgcccgagaattctcgcattatggtagacaagctgcaaatctttaaaatccagaggaagctctctgtagttgaaaaaatggaagcaatacgctgcagcctagaacagctcacaggctttgctacattaagattttttatttcacctgccacaaatgtccttagagaaatcgtttctctgccaccccgctgttccactaaggcaaaggcatatgcactgggggtcactccctcttcaaatttctctttggacagcagcaggagatcgttctccgacaccatctcccggaaatcatcaagcacggccatggacaccttgtggaacccctccgactcggtgcacgacgccacaatccccttctgccagtcctgcccagcctctttcttctcgtcgctgcgcccctggacgatctgcgccttcacctcctcgaacagcagtggctcgaacacagcgaggtactcggccaccgaggcgtacgtgttcttcacgcgccccagccccttcgcctgctgctgcccgcccttggagtccgcgacgaggcggacgtagtcccagctgaggacgatcttgtggaagcggtccatggtggaggcggcgacgcccgacgaggaggaagaggcgccggcttcgcctccgccgccgccggatttgtccaccgccat

SEQ ID NO: 87633 - DNA, 291 bp, Oryza sativa
  Clone ID: PAT_MRT4530_86560C.1
cttaaaacccaaacccccccccttttttctccccttacaaacaaccgaatctggcaaaaagccccctgaataaatagggccccatgtacccgcaatatcaaaacaccaggccccctttataagtcgccccaaggccccacccccacccgcttacctttttattatcccaaaatttccaaaaccccaataatttacttattgactcccccccaccccccccccaaaggaattggtttttccgaaaacccaaccccaagcggccccctgggccgccccctgggtcccccccga

SEQ ID NO: 87634 - DNA, 2236 bp, Oryza sativa
  Clone ID: PAT_MRT4530_86561C.1
aatatggtggttgaggcatctggaggcacagcagatcctagctccggcgatgcctcccgctgccgccgcggaggcggagatctccccgccgcccccggcggccgacgggggggccatagcggatacggcggaggctggtgtcgcggctgagaaggagagtgacgggatggaggtggaggatcgcggcgaggtggtctcccaggaggccacggcggtgaagccggatgaggcggaggagcccgaggaggatcctgaggaagtcggcgagggggccgaggaggcgccggcggcgggtcctggagacgtcgcggccgccgcggctgagtcggggcccgtcgcgatggaggccggtgatggggagccggcgctggaggtggccattactgcccatgagccggtggaagaggagcccaaggatgtaatggagacgggcgaggaagcaatagagccggaggaggatgaggaaccagaagaggcagaggtagaggaggatgaggaaccagaagagttggagatggaggaggaggaacctgaagatgcagattcagaggagtcgatggaggaggaggcaggctcagaggtctctgaagaagaagctgcggcggatgacatgaaggaaatagctgacaaggattctgaagaagctcaagatgaagataaacatggggataatcataagggtgaagttgctgaccaattgagcaatgatgaggatgttggtggacgtgaaaatgatgaatcaccaaatgatgaactcgacacctcattgcttgtgctggattcagttccagatgggaatgacaaaacccttgaattatttgtcggtggcttgcctaaggactgtgttgaagaggacattagagtggtgttttctcaatgtggagaggttgaatctattagaatagttaaaaagagaaagcgcattgcattcgttcgttatgcagatatcagtgccacaaagaaggctcttactgaatttaaggatggaatcaaggtaaatggcaaaagtgtcagagtatctgttgctgaacctcatagaaaatctagtgagcagaaggctcttacgaaggttaaaacagtatatctggaacattttcctcgttcttgggatgagagaaatatcgaagaatgctgtgaaggatatgggaatattcaaaaagttaacattttgcggtcaaaaaagaaagttgtttcttttgttgaattctcatcacggaagagtgcgttagcttgtgtcgaaggaataagcaaggccaagatcaatgatagggaagttaagttggctgcaagtcttgctcgaccacaatctaaagttcaactggccaatgagagtagtaagggtggtttcaatgtccacagtggtgcaacttctaaaagtcctgataaatctaaaatgaaaaaggaccagacagacgagactattgtgaagaaatcacagcttaaattgttgaaaggtgatgagagcaagctgccctccaaagatgatgtggaagtgccacaaacatcaacccattccaaaggaaaagcgaaagttggaaagcgtcaaaatacatctatagatgaaaggccatcaaagaaatcacgggagagtggtgagagcaagctgacctctcaagatgaaggggaagtcgggaagagcaaaagtaaatctgtaaatgaaaggccattgaagaaagcatcgaaaaaccgtgatgacgttaagctgccttcgcaaagtggtttggaagaaccacaaacatccaaccgttctaagcgcaaaaggaaagtccggaagaatagaagtacaactgtaaatgaaagaccagtggagaaagcatggaagaatcgaaatattaagcatcctgcaggttctcgatatgtaactagcaaccaagcttaccccactgtgggtgcaacttccagatctaaaccacattcccatgatttggcacctcatgctggattcatccctccttcaagtcgtgttcaaaggactcctgcacgtgatcaccaaagaactgcaccgtacaatatccgtcagatcagtggttctccttatgctagagaaagagtagctccgcgaccagcatattctgttcacacaagcaatgctgctggatacgaggctggatatgcatacacctaccttcccccaccaccaccacctccacctagtatatcttatcatccacctcctccggcaagtatatcttatcatccggggagtggcccatacatcatacgaagatactactga

SEQ ID NO: 87635 - DNA, 1715 bp, Oryza sativa
  Clone ID: PAT_MRT4530_86562C.1
ctacccgttcgttactagtagttcgctgcttgcacgatttcccggtgcgccctggccgtccgatctcctcggcgcgggatttcgacggctcagatctcctccctcctcatcactgactcggtccctctccgccgcgaagcgtggcggccaccgtcgcggcgtccgcttccacctccagctcgccgccgcagccgcctcctcctccatctccacctccacctcctcctcgcctccgttgggcgagagggagacggagaattctccgctgccatggctccggtgcggctcggggctcccacttccggcgccctgctgcttcttgtcctcctcctcatctgcggcggcggcggaggcggtggcgttgctgccgggggtggaggcggaggtggaggcgggaaggggagctcggtgtacccggcgcccgtggtgtacccgcaccactcccgccagatctcctggaagcccagggtgttcctctaccagcatttcctcagcgacgacgaggccaaccacctcgtctccctcgcgagaacggagctcaagaggtcagcggtggctgataacctgtccggcaagagcgagctcagcgacgcccgcaccagctccggcaccttcatccgcaagagccaggatccaattgttgctggtatagaggaaaaaattgctgcgtggacatttcttcctaaagagaatggtgaggatatccaagtgttaaggtataagcacggcgagaagtatgaacggcactatgattacttcagcgacaatgttaacactctccgtggtggtcatcgcatagctactgttcttatgtacttaacagatgttgcagaaggtggagaaacagttttccctctagctgaggagtttacagaaagtggcacaaacaatgaagattcaaccttgtcagaatgtgctaaaaaaggtgttgcagtgaaaccacgaaaaggggatgcacttctgttcttcaaccttagcccagatgcttcaaaagattcattgagcctccacgctggatgcccagtcataaagggtgagaaatggtctgctacaaagtggattcgtgtagcctcattcgacaaggtttatcacacacaaggcaattgcactgacgacaatgagagttgtgaaaaatgggctgccttgggagagtgcataaagaacccagaatacatgattggaacagcagcattaccaggttactgcaggaagagttgcaacatatgttagcgatccaattgtaaataatcaacggtaactgctttgtcggcagtctgatttatacaggaatgggttaaaataagtaggttcatgaggtttttggcacaaattctaccagttttggttacttcctgatgacaacttggtttttgttaccattcttcaatggtaactggcaggaattagaaagcaactcattgttagtatccataatttatgctagatggagatgcactttatcagtgcaatttctttggagagcaggtttttgtttttatttcatagagttgtcgacttgagcctactaggttatggttggattctgccagaatttacaaacatctggtctggttttcatctgtaatccttgagttgtcgacttgaacctactaggtcatggttagatcctgccagaatttacaaacatctggcctggttttcatacctgtaatccttctcatttgtggtatatagcttcagtgatttttgaattc

SEQ ID NO: 87636 - DNA, 363 bp, Oryza sativa
  Clone ID: PAT_MRT4530_86563C.1
ccggccgggcccttcccttccggctcgatggccgccgcttcgccgccggcggcggcggcggaggtcgttgtatccctccactctgccccagccaactaatagcgtaagagacaggagaatcgcggcgcggagcggcctctataggagcaggcagcgggcgcctcatcgtcctccgattccattccgccatggtcgacgacccccatcttcctcctcgcctgcggcaagcaaggaggatgcatattggggattccaactcaaactacaagagcagggatttgaactgttctatgtgaaatttatgcaaaaattcgtatggaactctactgttccagacggaaaaaaaaaaaaaaaaaagcggcc

SEQ ID NO: 87637 - DNA, 531 bp, Oryza sativa
  unsure (1)..(531): unsure at all n locations
  Clone ID: PAT_MRT4530_86564C.1
tttgtactgaaagatatactgtcaccgcagaactgnaggattgatggaagttatttttcgtgccaagataggccttttgtgttattcccacacacacatattcagtgctagtgtctcaagcatacagagaaaacacagctcctgaagtgctcagttctcaacaagaaagtgaaaaaggtaaggcagaacgcaaggtcttccaccagcatcctgcaaaattcctgtcttttcatagtactcaatgctgtctgtgagtgtctcctccaatttccttggcttccagcccaggctcttcaatttctctgacgaaattggtgtaaatatttcagtcttgccattcacttcagcactacactttacataattgtagttggggtaaatgttcttgagaaactccacagtagcctttgggctgatgtgatacggtgcgcaaagatatctgccagatgattctggtttctcgtataccagaatcaaagcttcagccacatcacggacatctactatgtgcaacaacatgttcctcattac

SEQ ID NO: 87638 - DNA, 508 bp, Oryza sativa
  Clone ID: PAT_MRT4530_86565C.1
cacaaaggtaaggtatgttacatagagaaaacattgcttgaggtgcaagcattaagacccgtaatttggattggagaaaattcgaatcaacaaggtttcaaactgcacgggcgaacatacacgtggcccggagcaacccaacacaacaatatcatgggcacacattaggaatgccctgatgcgatgccatgggctgaaaaaactgaccgcactcgccgacctacactggacactacctgaacagatctacttccagctcaccaattggctgaaccttgcgcattgccccatggccaacagccgtcaggtgctcctgaaaccatggcacgcttgcagacaatctgaagatcacgactcaatcagccgataatggtgcaaggctggacacaaagttacaagcagttgatggggacgatgcctggaccagagtcatcggatacggccttggagagccacatgtggtgaaaggtactgagagacgccaggatggaacctccaattcagacac

SEQ ID NO: 87639 - DNA, 326 bp, Oryza sativa
  Clone ID: PAT_MRT4530_86566C.1
atgcagctcaacccaaaagtaagaactcgtcgaaataaaactaaaacaaaagggtggcgatgcgccgagattgtattgaacgtgactctatccatatgcagcaatcaccttgaagcacctcaatcctacccgatatcatacatcaagctgcgttgccggaatcggctctatcggcttacctagtctgactcagacccagccgatcctaatcgtagccgatttggactccagccgattcctgctttgttttcgaactcgatctccgccttcgattttgcttcgatctaatcttctttcctgatgctgatgttaccaaattcggttgt

SEQ ID NO: 87640 - DNA, 6035 bp, Oryza sativa
  Clone ID: PAT_MRT4530_86567C.1
ccagccgggccggggcgaatcgccagccgccacaccgagctccgccgccgccaaccccaccgcggcgagctccgccttccgccggccgcgatggctcccaaggccgctgtaaagaaggctgatggaaagactcaacaagccttgaaggttgccaaggcagtgaagtctgggtcaatcaagagaaagtcaaagaagatccgcacttcggtgacatttcacagaccaaagaccctgaagaaggcgagagaccctaagtacccaagagtcagtgcacctggcaggaacaagcttgatcagtaccaaatcctcaagtacccccttacgaccgaatctgccatgaagaagattgaagacaacaacacccttgtcttcatcgtcgacctcaaggcagacaagaagaagatcaaggcagctgtcaagaagatgtatgacatccaggcaaagaaagttaacactctgatcaggcctgacggcaaagtaagaaggcttacgtcgaagctcactccagactatgtatgctcttgatgtggcaaacaaaattggcatcatttaagttagggcgctttttttccatcatgttgaacgtaacgattttggttggctagttcttaatgttgaacagaaccttataacttgcaaaagaacatcttagagttttgttgatcgaatatcagcagtgtgagcgcacaattgatgaaaaagtaaataaatgtcaattgtgaataatattccaaaattaatcttacgtacaaataaggataaaaataatggatcttcaaagaatgatatggtgtcaaatcgattggtaaacttgtttataactttacaattataacaaaattaaaaatgacgaaaaatacgatctcaagagactttgaagttgtaaacataagttagagcactgaatttgccagcctacactgacctttgaacaacttcgtttgaagcctttgcagatcatttgagaatcttgaaacggttgactacgtgaattttggagcgaatagccattcaggaggaacgctttacgaatcaaaccctgcaatctttagggttgcttcttaatatattaatactgatacaagctgtgccttaagcaatgtcgggaacaactttctggctacagttggagtgaacatattaaatagtggaaggattatccacaatattcttcattcaagactattctacctcgcgaaagacacgtcatgttcaggaggttctccagactattaaccctttgctggagactatggtagtaagcgttctttcagaggctaagataatacaatgtaggaattggatgtcatcaacgaatgcagttcataagattccgtaagcggccataagaagtgaccagttagcaatacaggaacattcttccaggtgccattcgagactacgatcatatcatgctattgacagaccaattgagttgccaccaagggaatacgtaaagctgggggcacgtcatcagcgtcaatgatatgcatgatttgagtgctggagaaggaacaaaccagaggaaaacagatctgggaagcttttggttctggctcttctcgcagtttggttagtgcaggaagaaccaagatgtggaattgtatccatggctgaagcatatcaacagacgtaggtatgtggaggatgactcgggtatgcaaagacagtgatgttggataatttgattcctcaagtttgtttattagtcccttctatatcggtgtgtattgatgtaatttggtcatgtaaggtacatttctacttattcaagacctattaagattcatatcagtaagtaacatcataaatatgatagcatgttactgcaaccatattaaaaactgtctaacagaaagtattgcaattgctggaatatcgattggtgcctcagttgtaggattagcagccctatttggaatatttatgttcataaagaagaactgtctacttgcaagcaagcaaggactccttgactgggcctgggaccagtatgaaaaggagcaagctctcagaattccttgacccaaatctcaagggattcaacaaggatgaagcttttagagtcatccgtgttgcgctgcactgcacgcagggctcaccacatcagcgaccaccaatgtcgaaggtcgtggcaatgctcaccggagaagttgaggtacctaaggtggtcacaaagccaagctacatcactgagtggcaaatgatggacggtaatagaagctatgtcaccagcagctactcagggtctaccacccatgagttcggcaggcagaacgagatcgaacctctgcagcaatcaccacctataatcaaagcgggaaggtgaaaattaagttgaattgtgcagaaaatcgattttgggtagatgtgacaatattgaatactgctcgttcttacttacatatatagttgcatgctgatgttagtggtatttggatatttatagatatttcaggaaccaagctgtaataagtttaaactgtaataaggggcgaccccatagtgtcataagaaaccaaacttaaggaaataaatggttgaaacatcataccataaaccgaacaaaacacaaaaataaaaaattttgaacgcgctagccacgatgatgagatcaagactcatgtcagcacggggattgcgggcacatttggttatctggctcctgagtatgcaatgagacgtcatttgactgaaaaggttgatgtttatgcattcggggtggtcgcattagagactgtcgctggtcgatcgaacactaataactccatcgaggaaagcaagatctatcttttagagtgggcctgggacctgtacgaaaaggagcaagcacaaagaatcgttgatccaagacttgaggatttcaataaagatgaagttctcagagtcattcatgttgcgctcctctgcacacagggctcaccaaatcagcgaccgccaatgtcgagggtcatggcagtgctcactggagatgctgaggtagttgagatggtgacgaaaccgagctacatcactgagtggcaatatagagatggaaacagcaccaactcagaatctaccacctcagagttcagcaggcagaaggagatcgaccctctcaccatgtcgccaacaatcaccggatctagtcatgatggaaggcgattttggatgtccagacaagcccacaaaagattgcatttcgctaatttcaacttacgaatactgttcaagctcagcaagcagcgagaactgatccagcagaagtgtttggctgcactgaacacgatcctggggagatggggcctgcgggcgtcgccggcgtggaacatcagcggcgagccctgcagcggcgtcgccatcgacgagaccggcgtcgacaacaaccccaacatcaacccggccatcaagtgcgactgctccttcaacgccggcaccgtctgccacatcatcagactggcggtgtccctcaatccgttatctggacctcttccgaaggagatcgggaatcttagaaatcttctatcattgggcattagttcaaacaattttactggtgaactccctgcagaactgggcaatttggaaaaactcgagcaaatgtatattattagttctggcttcagtggtcccttcccttcaacattctcaaagcttaagaatttgaagattctgtgggcatcagataatgatttaacaggaaaaatacctgattattttgggagctttccaaatttacaagatttaatactgaggaactgcaagatatctgataatcttggaacagttaacttttctaagcttgcagggttaaccttactggacttgagctttaacaatatcacaggtcatgttcctcaatccatactgaatctggacaagcttagcttcttgtttcttgggaacaacagcctttctggaagcttgccatatgacaaaagcccttcactgaacaatttagatttttcatataaccatctctctggaagctttcctccatgggttactgggaacaatttgcaactgaatttggtggctaatgacttcattcttgatagcaccaacaatagcattttaccttcagggctaaactgtctccagcaagatactccttgtttccgtggttctccagaatattattcctttgcggtcgactgtggcagtaataaatctacaaggggatcagataatactttgtatgaaactgatgctcaaaacattggagccgcatcttattatgttagtgacaatgcgagatggggtgtaagcagtgtaggtaaattcaatgaggcttccaatggaagttatgcaatatatagcccccagcagtttcagagtgcacttaactcagaattattccaaactgcaagaatgtcaccatcatcacttagatactatggtattggacttgagaatgggaattacactgtctcacttgagttcgcagagtttgtttatccaaactcactaacttcaaatagcatcgggcggagagtttttgacatatatgttcagggtgagctgaaggaaaagaacttcaatataaggaagatggctggtggaaagtctcttattgctgtcaataagagatatactgcaactgtgtccaaaaacttccttgagatccatctgttctgggctgggaaggattttattcctactgtgcaaaatggtgttccaaaaaagaaaagtaaagcagggacaatttctggagtagtgatcggcgcttcattctttggattagcagtcctagttggattatttatgttgctaaagaagagaaggagaacgtcacaacggaaagaagaactctacaacatggttggaaggcgtaatgtcttcagcaatgcggagcttaagttagctacggagaattttggttctcaaaacattcttggagaaggaggatatggaccagtctataagggtatattaactgatggaagggtggtagctgtgaaacaactttctcaatcatcccagcaggggaaaagccagtttgtgacagaggttgcaacaatctcttctgtgcaacatcggaaccttgtgaaattatatggctgctgcattgacagtaatacaccattgttggtttatgagtacctcgaaaatggaagtctggatcaagcactcttcggggatggtaggttcaaccttggctggtcaacacgttttgaaatcattttaggcattgcaagagggctaagttatcttcatgaggaggccaatgtgcgcatcgtgcatcgggacatcaaggctagtaacatcctactcgaccctgatttaacacccaagatatctgattttgggcttgccaagctctatgatgagaagaagactcatgttaacacaaaagttgccggcacgtttggctacctggcacctgagtatgcaatgagaggccatttaactgaaaaggttgatgttttctcatttggtgtggtcgctctagagactgtcgctggtcgatcaaacaccgactactcccttgtggaagacaagaaatatctctttgaatgggcttgggggctctatgaacgagagcaagcgctcggaatcgtggacccaaggctcgaggaaatcaatgaagaggaggtcttgagagtcattcgtatgtcgttcctttgcacccaaggctcaccacaccaaagaccacctatgtcaagggtggtggcaatgctcaccggagacattccggtgagtgatgtggtggcgaagccgaactacatcattgagttgcagctcaggggaaggaatagcagccatgtcaccaccggctactccgggtctactgccgatgagctcagtgggcagagggagacatcccctctcacaccttccctagagattaacagagaaattatcgatgatggaagatgaatgcgaagttgcaaagtgatggtagtgatcttcgtttcaagagctaattttggacattattcgtgttcaaataaattgcatttttatgtgagttagagctaataaaattgaatgtgacatgtgctactattgtgccgttgactgtttgattataactaattcatgagctcaggatg

SEQ ID NO: 87641 - DNA, 1341 bp, Oryza sativa
  Clone ID: PAT_MRT4530_86568C.1
atgcgcgccctcctgccgcggctgccgcggcggcagcggcggccggggccggagctgcgcgtcccggcgagggggctcctggaggcgcgggtgccgtgggtgcgggaccgggcgctggaccacgtggtggagcgggagcgccacctggtgccgttcctgctcgccaaggacgcgctcctctcggcggcgccgccgccgcacgccgtgccgctccactcgctgccgtccaccatcccgttcccgttccgcccgctccgcttcctccggctytacacgtccgccttcgcgctctcgccgcaccccgtcgccgtctccccgacgccccgcctcgcggggatccactccgcggaggcgcaggtgctcgactccacccgcgccgacgccgccgaccgcctcctgcgcctcctcatgctggccccggcccgcgcgctcccgctccacctcgtcgcccgcctccgcctcgacctcggcctcgcccccgacttcccccggtcgctcctccccaactacccggactacttcgcgctctcccgcgacggcgccctcctcgagctcgtctgctaccggaaggaccttgccgtgtcggcaatgcagtcctacgcgcagcgcaccggcgggtacaaggtcggcgacgcggtccccttcccgctctcgttcccgcgagggttcgagctcgacaagaaggtgcgcaagtggctcgacgactggcagaggctgccatacatctcgccgtacgaggacggctcacacctgacaccgaggagcgacatcacggagaagaggaccgcggcggtgctgcacgaggtgctgagcctcaccgtggggaagaagatggagaaggaggtgctggtgaagctcggcgaggccctgcggctgccgccggggttcaggaaggtgttggcgaggcacccggggatcttctacttatctcacaagctgaggacgcagacggtggtgctccgggagtcattccggcggcatatgctggtcgacaagcacccgatgatggggataaggtatcagtacctgcatttgatgcatatggggcaggaggaggccgggaagcgcaagggcaagggtcggaagacagttcgcggcgagcagatgataggggaggagtttggtgcggagggcgagaatgacgatgaagaagacgaagagtatgatgatgatgaggaggaagacatggaagctggtgttgcttctggagatgaggacagcgatgatgatgatgatgatgaggaaggtgagaaggaagatatggaagctggtgttgcttctagagatgaggacagtgatgatgaggatgcggatgataccgatcacgccgcaaagggatag

SEQ ID NO: 87642 - DNA, 275 bp, Oryza sativa
  unsure (1)..(275): unsure at all n locations
  Clone ID: PAT_MRT4530_86569C.1
attcccggcgtcgacccacgcgtccgccgccagctccggtgatcttgccgcctcctccattgaatctcctccccgcaccggctccagtctctcgcccctcctccgttgagtccccgccnccaccagcaccagttatcttgcnccctcctcctgtgccgtctcncccgccaccngcgccggtcttctcgcgccccccgcctgtgaaggctgcgcctcctcccgcgcccgtcgtcttgccccccccgcctgtgcggtctccccctccgcctgcgccg

SEQ ID NO: 87643 - DNA, 412 bp, Oryza sativa
  Clone ID: PAT_MRT4530_8656C.1
cctcacaaagatgcgcaaagatgctaagaaaggcgatagaagttcaaaaccaggagaagaaactcggaaggcggaggaagaagtcgcctatcagttggagttacctcaatccttggcaggtgtccataatgtgtttcatgtgtcacagttaaagaaatgtttaagggtacccactgaagaagctaatcttgaacagatagaaatccaagtggatctgacatatgttgagaaaccaatccgtatcttggagacagatgagagaaggaccaggaatcgagttatctgtttctgtaaggtccaatggagtaatcactcggaagaagaagctacttgggagcgagaagatgaattaaagtcagctcatccgcatcttttcgccagctcttccgaatctcggggatgagattctgtt

SEQ ID NO: 87644 - DNA, 252 bp, Oryza sativa
  Clone ID: PAT_MRT4530_86570C.1
atggaggaaggcgcctatcagaagagcgacaaagatgacaccgagacggaagactatattggactaaaaatgtcccggttctttttggaaccgaggctattatggttttcgtccgacctagtaaagatcagttctccagtagtggtagcagacattggagggaacatgcaagcctgcaagatcaccaccgcgcacagccacagcagcagctactgcctcaacctggcgcagccgccgccgctgccgctgtga

SEQ ID NO: 87645 - DNA, 420 bp, Oryza sativa
  Clone ID: PAT_MRT4530_86571C.1
atgggctattacgaccttctcccacaagaagtggatgaggccggcattgcggacggctatcggcggcggacgcttacggcggcttcgagcctcgtcccggccgcgtgcggtagcacgggaggcatgccgtgcataccggcggcgaggagaggcaggtgtaagcttctcggcgtcgctacgggcgacggctgtcaattgcgttgcggatggcctcgaaaggctgtcgagtcggcgtttcagatggcggatcgacaaggacaggtctggattgattcggcaaccattgacaaaggggaatacgtcatgcggtggcgtcagggtgtctctacgtgcaggcggcagcagcggcgcatgcaggtgccgatgactcggatttgttaccatctacttcatacagatagcaatatgacggattattaa

SEQ ID NO: 87646 - DNA, 642 bp, Oryza sativa
  Clone ID: PAT_MRT4530_86572C.1
gtgcaatgcgtagagctcgcaatcgccaacccacgaggaccaggtgagttcagggtcttcaaccagttcaccgagcagttctcggtcaacgagctggcaaagctggttacggccgccggtgcaaagcttgggctggaggtgcagaccaagtcggtgcccaacccgcgggtggaagcggaggaacactactacaacgccaagcacaccaagctcatggagctcggcctggagccccacctgctgtcggactcgctcctcgactcgctgctcaacttcgccgtccagtacaaggacagggtcgacacggcgcagatcatgcccagcgtgtcgtggaagaagatgggggcgaagccgaagacggtgtccgtctaagaggaggctggttttgccatggcggggtataatgtcaaccgtgacattgacattataaatttggtgtgtagtaatgcaataattatgtgcgtttagtataatgcacgttgtagtgggtgtggttacggtgttagatttcttttttgttcttcctcacgaatagatgctgcaatctgatcgaaggggattccttctgtatttctgttgtaaacttttatccagctcttgatcagcaaatgggtatccaggatgcaggggggtatttgagcc

SEQ ID NO: 87647 - DNA, 333 bp, Oryza sativa
  Clone ID: PAT_MRT4530_86573C.1
atggcggacggctatcggcggcgggcgctcacggcggcttcgacccttgtcccggccgcgtgcggtagcgcgggaggcatgccgtgcgtaccggcggcgaggggaggcgggcgtaagctcctcggcgtcgctacgggcggcggccgtcaattgcgttgcggatggcctcgaaaggccgtcgagtcggcgtttcagatggcggatcgacgaaggaaagtctctggattgattcggcaaccattgacaaaggggaagacgtcatgcggtggcgtcaaggtgtcgctacgtgcaggcggcggcggcggcggcagcggcgcatacaggtgccgatga

SEQ ID NO: 87648 - DNA, 210 bp, Oryza sativa
  Clone ID: PAT_MRT4530_86574C.1
gggatagagtacaggaatgatagatatagctggacttgaccaaagctcagatcaaaatacattggcacatgacacggactgagccatgcacaccacatgtgcggacacacctagggcatggatgtacataaaaaaacgcatcacacgctgaactcaccaactgaactgtcatcctttgactgtacgagcacgaagactctagtataaaac

SEQ ID NO: 87649 - DNA, 427 bp, Oryza sativa
  unsure (1)..(427): unsure at all n locations
  Clone ID: PAT_MRT4530_86575C.1
ancgctaaccccaggtttcctacgagcgcgctctctcttacgagcactctcgcgggggtgttctctctgtgaggctctgcagcgagagggagagagatccatcgcttggatcgacattctccccctggattcaaccgatgaaaattcctacaaatatcatatatggtgccaatgacagatgaaatttccaacaaagatcagatatggtgcataataatagcttccatgagaaactacagagctatgtccgacgaaaatctctatgaagaacagatacgaggcacaataatagatcctgctttggttttgcttaacaagtgctgcccgggacataactcttatgtgtctacttattcctttcattaaaacagaaaaggagaactagccagggaaattctaagaacgtcaaaccttcccttgcagaaaa

SEQ ID NO: 87650 - DNA, 450 bp, Oryza sativa
  Clone ID: PAT_MRT4530_86576C.1
atgcgccgccgcctcgttgccgaagctgccgcacaccgctgccttgcgccgccgcacaccaccatcgcctcccgccgccgtctagtgcctgtgccgacccacgaggagccgccgcgccgccggaccttggggagccgccggccccgcaagaggctgccgcgccgccttgggagcaccgccaccgaagacctacgccggttcttcgtcgggaaccgccgcagccgccgccgcaagctctcgctcgagctccgacggacgccgccgagtaccacgccgccacacaccgcctgcaaggatgcgcctccagccacccgtgacctcgccgcccaaaccacctccgcctttgcgaaaatcgggtacgaatctcgccctctgctagtcctcgtccgattccccttcgtgttgaaacttggtatccactgtttgtcttcaattgtgtccgcgccgtga

SEQ ID NO: 87651 - DNA, 491 bp, Oryza sativa
  Clone ID: PAT_MRT4530_86577C.1
ttctgttcctcctttggttttcggtcgttgaaggacatcactacgaaagggggatgattgcaacttcattgggaacaaagtacttcttgcgaaatgtagtcacgcaaggctccagaattgctggaagggccctcagcactgagtcgtcaatctttacttctcatttgtgcaaccaaaagcgggacaatgaatcgcctcagcgagagttcaaggctttcaagagtaccgcggctgccactcctgcccaaggaaagggagaatctcgtgacacgtacaaagtagcccagcatttggtcggaacggacgcttgtgccaaggttggcttgaactctcttggcatcaccggacctaccacgatttaccgcaacatgacattccaagagctttttgaacacgaacaagccaacaacgaaagaaaggttgctgctgctgccaatggtgacactttcactgtctacacgggaaaatacactggtcgttctcccaaggat

SEQ ID NO: 87652 - DNA, 177 bp, Oryza sativa
  unsure (1)..(177): unsure at all n locations
  Clone ID: PAT_MRT4530_86578C.1
gcaaatattctatcatactggtaccggtatgctaagttggtatttggctaacactagttaattcatgttgtgatgtttggtttagtgtactttaatttcaacaagtaaatgggcatgcgagcatcaagagttacatgcatgaaacgtcaacagaggttaccancgacagatggcaaa

SEQ ID NO: 87653 - DNA, 387 bp, Oryza sativa
  Clone ID: PAT_MRT4530_86579C.1
atggtggcgatgaacctgagtggcggcggcggcggcaggtggtggtggcggatggggacagagcccgagcggcggtgtatggcggcgatgagcccaaatggcggcagatgggggccggccaggcgcgaccaccgccctccgcgccgtcaccggccacgaccgccgccctcctccgcgccatcgccggctgccaccgcagccctccacgccatcgtcggctgccaccgcagccctctgtgccgtcgccggccacaaccgctgccttcctccgcgccgtcgccagccgcgaccgctgccctccgcgccgtcactggccacgattgctgccgtcctctgcgccatcaacgggagaagaaaggagaggaaggaggaggaatgagagactga

SEQ ID NO: 87654 - DNA, 295 bp, Oryza sativa
  Clone ID: PAT_MRT4530_8657C.1
accaaagaaaaagggggtaaaaagggaaactttttataataatttttttaaaacatttttgggggggttttttgaacacactgggaaaaaattttgcattatggggggaacaactcccggttaggaaaaaagtggggggatatttttctggggtttactaaaaacagctttcaaattttttgaaccctccgggccctacggagaaattccccacgcgtttaaattgatgatgggggacaattttctcagggtgttttttttaaaaagggttggggtaaaatgacaaaatgaacgg

SEQ ID NO: 87655 - DNA, 592 bp, Oryza sativa
  Clone ID: PAT_MRT4530_86580C.1
cacatcacaagttcacagcaattgccaagtactctctgagctctcaagctacaagttcttaattacatagtagcttcttcagtgatcgtgaggttaacaacaagaacaagaaacgatgaggtttgtattggtgaacaaggcgtacatggcggtgacgctgggcgccgccattgagctcaaggagcaagtggcaaagccgtgctcgtcggcggcgaagcggggcgcctcggtgctcgccgtccggccctcctcgtcggcggcgacggcggccgcggccgccgccgaggagtcgcttaggatggtcatgaacatgcatgctaagccatgggtaaatgggtcttacaggaacaatagtccattagcaaagaatgatgtggccaacagtgggccaccaaagaaaaaagaagagagttataggtacttatcaggatggtataagttggttttcaggtggacaagagagggagatcaggacagaaaggcttttacaaggacatacgtttattctatagagtacctacttatacactttaggtgcttagggcagaaaagaaaaggagttgctaagtggagaataaatgccttgctttaa

SEQ ID NO: 87656 - DNA, 132 bp, Oryza sativa
  Clone ID: PAT_MRT4530_86581C.1
atgcggccccctgtggtggtggccaacggtggtgtcatatctggcgcgtcccagttggggtcgggcaaggccaaaactccggtgcgagagctggtcgtcaatggtgtctacccggtctttgtgcaggtcgtg

SEQ ID NO: 87657 - DNA, 328 bp, Oryza sativa
  unsure (1)..(328): unsure at all n locations
  Clone ID: PAT_MRT4530_86582C.1
ncaggnttactntgccgtgctcatcattgactncaacanngntnttnnnnaggctngcatctncaagnatgtccagacccgagagcacgntctncttnntnanacnntnggcgtgaagcagatgatctgctgcnncaacaagatggntgccaccantcccaagtactccaaggnccgttatgatgaaatcgtgaaggaagtttcantctacctgaaganggcnggctacaatcctnacacgattccctncgttcccatctctgggtntgaggntgacagcatgattnagaggtccaacanncttgactggtacatgggtcccancctt

SEQ ID NO: 87658 - DNA, 179 bp, Oryza sativa
  Clone ID: PAT_MRT4530_86583C.1
gacgcagggcactcaggccgtgacggggtgagcctgccgacccagctctacgtgcggaaagcgtgtcagcattaagcaggcagttcgaccgtctgcacatgccgagcacgcgccagctctagaggatccaagctttacgtacgcgtgcatgcaacgtcatagctcttcaatagtggtca

SEQ ID NO: 87659 - DNA, 1246 bp, Oryza sativa
  Clone ID: PAT_MRT4530_86584C.1
aggaattccggcacgaggctcacttcactgcttacaccgcgcgacgcgtcacacacgtacgtagtagctagctgcgatggcgtcgccgctggtacggctgctcctcctcctcctcctcgtcgtcgcggcggcgagccgcggcgcggcgtcggcggcgaaggcgaaggcggcgcgggtgacggcggtgatcgtgttcggggactcgacggtggacacggggaacaacaaccagatcgggacgccgctgcggagcgacttcccgccgtacgggcgcgacatgcccggcggcgcgcgcgcgacggggaggttcggcaacggccgcctcgcgccggacttcatgtcggagtccctcggcctgccgccgctcgtcccggcgtacctcgacccggcctacggcatcgccgacttcgcccgcggcgtctgcttcgcctccgccggcaccggcctcgacaacgccaccgccggcgtcctgtcagtgatcccgctgtggaaggaggtggagtactaccgggagtaccagcggcggctgcgcgcgcacgcgggcgccgcggcggcgcgcgacgtcgtgcgcggcgcgctccacgtcgtgagcatcggcaccaacgacttcctggagaactactacatgctcgccacggggcggttcgcgcggtacagcgtgggggagtacgaggactacctcgtcgccgcggcgcgcgcgttcctcgccgcgatccaccgcctcggcgcgcggcgcgtcacgttcgcggggctctcgccgatggggtgcctgccgctggagcgcaccgccggcgcgctcctcggcggcggcggcggcggctgcgtcgaggagtacaaccgggtggcgcgcgagtacaacggcaaggtggaggccatggtgaggtcgctccgcgccgagctcccgcgactcaaggtcgccttcatccccgtctatgacaacatgctcgacctcatcacccacccggaaaagtacgaaaatatgatatctactgttaattacgagaggaaggcacattctattctcataagaacacgaaaaattatagtagggctggagaacgtggaggaggggtgctgcgcgacggggaggttcgagatggggttcatgtgcaacgacgagtcgccattgacgtgcgacgacgccagcaagtacctcttctgggacgccttccaccccacggagaaggtgaaccggatcatggcgcagcacacgctcgacgtctgctaccagcaaggcgtcctctga

SEQ ID NO: 87660 - DNA, 162 bp, Oryza sativa
  Clone ID: PAT_MRT4530_86585C.1
atggccgtggaccagaaatatgctgctgctatcatcatgggttcattccttgccatatttgctgcagttagtgctagagcttgggatatgccgatctctaaccaggatcgcttttggatcgccggaaggcttgaaaccgtcgtcggagagctcgaggaatag

SEQ ID NO: 87661 - DNA, 330 bp, Oryza sativa
  Clone ID: PAT_MRT4530_86586C.1
atgccctcgggtttcctggaaatctggcgggtgtcggaacacgaatcacgtccgccaccgccagatccgctgagggttctttcccagctgcaggcgctgatgggggcggcggaggcgatccctgacctgcctgttgccgccagcgccaccgccactatggagctgtgggtcgaaatcctcatcgtccgactcaagtcggcggtgtcctcctgccatgcagaaagatcttgcagaaggattcgcacaaaatcaccagaaaaacccctacctggcatgccagctgccgagggggcggtccctcggacagcgggtagtggagaccactcctag

SEQ ID NO: 87662 - DNA, 627 bp, Oryza sativa
  Clone ID: PAT_MRT4530_86587C.1
atggagccccgactccacctcgccaatgtcggtgccttggcgtcgtccaccatcgaagccgccgtcgccgccgtcttcatccgcccaagccatcgtcatcaccacacccgagcccagctcgagctcgtcgctgaaccgccgccgccacgcacagccaagtctgctgcgcgggcgccgcctccgtgcacggccgagccggccacctccccgtgtcgcctcttccccttccgtcgtgcgccacctggccgggccacccaacgccgcccaggccgcctccagggcgtcgccgcccagcctcagcgccgcgctgcgccgtcaccggagaaggaggcggatgagaggcggagggccacgctgtcgggcctccctctggcgcatgcggcggcggcggcagcaggtggacggtggatgggcgccgcgagcgccggcggcgcgacggcggggagatgtgtcaaggtggcggtggctgcacggctcgctgctcctgccctcgcccgtcctgtcgtcgtcgctacggccctcaattgcgcgccgccaccgctcgttctcgcagcccgccgtccgctgaaggggaagaaggggagagaaagagagaagggagagagaggctggaggaagaagggctga

SEQ ID NO: 87663 - DNA, 1047 bp, Oryza sativa
  Clone ID: PAT_MRT4530_86588C.1
atgcgaccgggcgggccgccgagcttgcgggcggggctgcagcagcagcagcagcagcagccggggacgccggggaggtcgcggcgccggccggatctcacgctgccgctgccgcagcgggacctcacgtcgctcgcggtgccgctgccgctgccgctgccgccgtcgtcggcgccgtcgtcgacgtcgtcgtccgggtcgtcctcgctcggcggcgtgcccaccccgccgaattcggtcggctccgcgccgccggccccgccgccgctgtcggagctggagcgcgtccgccgcatcgggaacggcgcgggcgggacggtgtggatggtccggcaccgccccacggggcggccgtacgcgctcaaggtgctttacgggaaccacgacgacgccgtgcggcggcagatcacgggcgagatcgggatcctccgcacgccgagcacccggccgtcgtgcggtgcccggcatggccgccgcattgcctccgaggccttcctcgccgacgtcgcgcgccaggtgctttccgggattgcctacctccaccgccgccacattgtccaccgggacatcaagccatccaacctcctcatcgactccggccgccgcgtcaagatcgccgacttcggcgtcggccgcatcctcaaccagaccatggacccctgcaactcctccgtcgggaccatcgcctacatgagccccgagcgcatcaacaccgacctcaacgacggcgcctacgacggctacgccggcgacatctggagcttcggcctgagcattctcgagttctacatgggcaggttccccctcggggagaatctcggcaagcagggagactgggccgccctcatgtgcgcgatttgctactccgactcgccggcgccgccgcccaacgcctcgccggagttcaagagcttcatcagctgctgcctccagaagaacccggcgcggcggccatcggcggcgcagcttctccaacatcggttcgtcgccgggccacagcagcagcagcagccgcagccgcagcccctcgcaccgcctccgtcatga

SEQ ID NO: 87664 - DNA, 1734 bp, Oryza sativa
  Clone ID: PAT_MRT4530_86589C.1
atgcgaccgggcgggccgccgagcttgcgggcggggctgcagcagcagcagcagcagcagccggggacgccggggaggtcgcggcgccggccggatctcacgctgccgctgccgcagcgggacctcacgtcgctcgcggtgccgctgccgctgccgctgccgccgtcgtcggcgccgtcgtcgacgtcgtcgtccgggtcgtcctcgctcggcggcgtgcccaccccgccgaattcggtcggctccgcgccgccggccccgccgccgctgtcggagctggagcgcgtccgccgcatcgggagcggcgcgggcgggacggtgtggatggtgcggcaccgccccacggggcggccgtacgcgctcaaggtgctctacgggaaccacgacgacgccgtgcggcggcagatcacgcgcgagatcgcgatcctccgcaccgccgagcacccggccgtcgtgcggtgccacggcatgtacgagcaggccggcgagctccagatcctgctcgagtacatggacgggggatccctcgagggccgccgcatcgcctccgaggccttcctcgccgacgtcgcgcgccaggtgctctccgggatcgcctacctccaccgccgccacatcgtccaccgcgacatcaagccatccaacctcctcatcgactccggccgccgcgtcaagatcgccgacttcggcgtcggccgcatcctcaaccagaccatggacccctgcaactcctccgtcgggaccatcgcctacatgagccccgagcgcatcaacaccgacctcaacgacggcgcctacgacggctacgccggcgacatctggagcttcggcctgagcattctcgagttctacatgggcaggttccccctcggggagaatctcggcaagcagggagactgggccgccctcatgtgcgcgatttgctactccgactcgccggcgccgccgcccaacgcctcgccggagttcaagagcttcatcagctgctgcctccagaagaacccggcgcggcggccatcggcggcgcagcttctccaacatcggttcgtcgccgggccacagcagcagcagcagccgcagccgcagcccctcgcaccgcctccgtcatgatgaattccgatgggattccggcgttgatccggctcggccatggatggacggtggtttggcattgagacgtgggatctaggagtgctcttcctagccattttgggtattcaagccaccaccacaatttagtgatttaccctcatcatcatcccctctcttgttgctgttgctcctggaattaagctcctctcctctcctccccttcccctcctcaacttttctttaatctcttcttttttttttcttcttcttcttccaattaagttcatgttcttccaaatgatcatcatataatatgggttgttaagaaagcaatttcttcttagttaatttattttctaaaatcatcattggagcagtagaagtagtagtagtagtaggtggtggtgtccatctgctccagttgcaggaggaggagaagatggtgacaaaacaacattgtgatgctttgctgtgctggcttcttggattctgcaaattgtggggggttggattggattggattggatggatcatggatggttggagcaagcaaatcttgaaatgggaaccaaatcaactttatttaaaaaaaaaaaaaaaaaaaaaaaaaaaaaaaaactcgagactagtctctctctctcc

SEQ ID NO: 87665 - DNA, 711 bp, Oryza sativa
  Clone ID: PAT_MRT4530_8658C.1
atggcggccgacctcccgcgccggtttcctcccttccccggccaccctctctcgccccggctctatttaaaccctccccgcacctcctccgtccggttccgcctctcgccgcccttcctcctcgccggatttgagctcgcgacgtcgctctctctctccgtcgtcgccgccgagctccggcccgccgccgtcgtcaccccggaccgcctcccacctcggcgccgcctccttcggcttcgccgcgtcctcgccgacctcgtccactcctccgtttcgcccgccgaccgccggaacgccgccgtcctcgtcgacccgagctgcgccgccgcctccctccgctccggccgcctcctccgtcgccgccgtcgccccggggtgagccgtggaccgtcgcctcctttcccccttccctcccttctctcggccgccgctccgccgcgccggtggtcgccggcggcgaccatcgggacgcgggcgcgccgcctcccgccggccgcgctggcgaggccgccttcgggcgcgccccgcggctgccatgtggggcccggccgtcagccgcccgcgccctcgggtgcggctgacgcgtgggacccacggcgccggccggcgcaagccgcgtgcacccggtccaccgtggaccgtgaggctgccgcgtgggccccactcccgtggacccggtccacgcgcccctcccctcggctgacgcaataa

SEQ ID NO: 87666 - DNA, 399 bp, Oryza sativa
  Clone ID: PAT_MRT4530_86590C.1
ctagtcctcctctttcgtttgccccatctcctgagccatcccgtgccccgcagcctcgccgccgtcgccgcctagtccgcgccgccgccggccgagctccatccgcgccgcgccgccgcctccaccatcaccgtcgcttgccgtcgccgccattgttttcaccaaggggtggggaagcccggtcgcacctccgccctcgccgccggccgtcggagccccgtcgccgccggtcaatcgaaccaccgccaccgcccgttcgtcgtcgaccaccgtcggtcgtcgtttggctcgagggtgagtaccgttgggttcatctcgtcgttctccacgtgtacatgtcctccaattttgcagccgaccatccaatctccggcgaggtcgccaacccgggccggccat

SEQ ID NO: 87667 - DNA, 208 bp, Oryza sativa
  unsure (1)..(208): unsure at all n locations
  Clone ID: PAT_MRT4530_86591C.1
ctgaggaatccgtccgtcctcgccagggccaccgacgagctggaccgcgtggtcggncgccgccgcctcgtcgccgagggcgaattacccaacctcccctacctcgacgccgtgtcaaggagagcatgcggctccaccccgtngtgccgctcctngtcccgcgcgtttcccgcnaggacggcttctccgtntncttngccggcgccgc

SEQ ID NO: 87668 - DNA, 355 bp, Oryza sativa
  unsure (1)..(355): unsure at all n locations
  Clone ID: PAT_MRT4530_86592C.1
aaaaacagaaaaccgaaaccgagggagaaggagcaaccaaccaaaccaacggacgccatcgccaccaccatcctcgccgtcgcctctccaactcaccactcctcctcctcctataaaccaacgaagaacacaaactcaaactcctccttcacacacacgcacgcgacaccggtcaagaagcgcgcgcgcgcgcaccactgcaccgcgcgagcggcaacggcggaggaggagaggctgtgagtggtgggcaatggccgtggcggcgcggctgaggtcggcgggggcaaggctcgtggtcgggccggcggcgatggcggtgggacgtggtggtggtggggaggggaagttgnttggg

SEQ ID NO: 87669 - DNA, 1467 bp, Oryza sativa
  Clone ID: PAT_MRT4530_86593C.1
atgggagcacctccgccgccggcaagacccgggcgccgctcccgctcccgcgccgtggcccgcggcccaggcccacccctccccagcaagaaccgcatcatccccgggcggccctcccgcctgtggctggaccggtgcctccgcgcgctcttcgtcgccgcgctcgcgctctctctgtcgctgtctcctccgccgccgtcgctcctcctccctgctgcccctgcccgtgctgcctcctcccccgtcggcgagcgtcgtcggaatccggaagcgccgccgtacccctgcgaagatgtagggaggtattacgcgggcctagacggcctcgccggcgacgagctcatggcgaagctccgcgccgtcgtttcgcctcacgccgcgctgcgttataaggatgtgtgggaggcactcaagattcttgatgcagctgatgcacccaaaccagaggcgtcccttgacgtgattgagatatactcgcagagagctgtgccgaagaacttggcaggcaagccggacggatggaacataaactcatcaaggggaaacaagtattatggacattgtgctgccacatcagtaagatgtatgagacctgcaaatcatgaagctgcacctgacacagagacagatagtgaaagatgggcacctcctttaaaggtgcgtggagatgtatctagggccctgatgtacatggcagtaagctatggatctgaccagaaagatggagcaccacatttggaactttctgattcaccaagtattcaaagcagaaaaatgggtctcctatcagctctcctaaagtggaatgaacttgatccgccatcaaggtcagagcagcttaggaacaatcgagtttgcagcctgtaccagcataatcgaaaccctttcgttgaccatccagaatatgcaaatcttatatgggggaattcccttggtgagagttcaagttcggtcagaacatttccagaggcttgggtaaatgagttccactatgaaaacaaaggcaaagatgagaatgagtttgttgagttagcggtacgcacgtcattagatgcaaaagatcttacgctcatactgtataatggagcaaacgggcgaatgtacaattctctgaatctagatgacaaggatggcttcagtgttgctgaaagcagttctagttctagttatttgatctacacagcattcatcactctccaaaatggacctgctgatggcatagctcttgtctataaaaatggaaacagaaaagaagtcttggattttctctcctatgaaggtagtatgagagcactggatggaccagccaagggcatggtctctgtagacatgatgctcaaggagacagacgagtcatctcaacaagattcgttgggacttaccgggaacaagattggcgactttgcatggagaaagctagaaggttatgcaacccctggaaagttgaatgtcgggcagatgttttag

SEQ ID NO: 87670 - DNA, 2886 bp, Oryza sativa
  Clone ID: PAT_MRT4530_86594C.1
atggtcggagccacggcgagtgctttgatcggggtgatgaatcccctcctcacgaagctctccggcctgctcgagagggagtacggcaagctcaagggggtgggccgcgaggtcgcgctcctgcgagacgagctgagcagcatgaacaccgcgctggaggcggtctccgattcggaggaggagcccagctcgcaggtcaaggagtggatgcgccagctgcgggagctgtcctatgatgtagaggattgcatcgacgtcttcgtgcaccgccttggccaccatgaccccggcgacgggctcttccgcaggaccaaacgccggctcaaggctctccggagccgccactgcatcgcaggccagatcgccgagctgaaggatcgtgccgtgctggtcaatgaccggcgcaagaggtatgagttggatgcagctgcatctagctctgctgcgatcgccatcgattccaggctgcctgcgctgttcgaggagatggacaggcttgtgggcatcgaaggtccaagggatgaacttgttgaatttcttacgggaggaatcaatttggctccacaacgcagagttgtctctattgtcggatttgggggattaggcaagacaactcttgccaatcaggtctatcaacatatcaaaagccaatttgatcgcacagcttttgtgtctgtgtcacggaatcccaacgtcaataagatcctagccaacatacttattggaattctcgagacaagaaagctatcatcagttcatcagaagcagcatagtgacacaatagaagatctaaagcacaaaacttttgaagattgtaagcttatcagcctgataagagaaaacctacagaatagcaggtacttcattgtaattgatgatatatgggataaagctgcatggcgagaccacctccgatttgcttttcctgagaataactctgcaagcagaataattacaactacacgcatcaatgatgtagctatagcttgtcacttctcacatgaagattttgtttatgccatgaagccccttagcagtgagaactctgaggcattattttttagaagaatctttagctccaaggagaaatgcccccctgaattggaagaagttgctgatgatatacttaaaaagtgtgatggtttgccattggccatagttagtatagctagccttttatcatgtaaaccagttacgaagcaggagtgggtatgggtgctgaactcctttggttctacagttatgaaagatcaggggtcacacgagttggcagtagtgaagaggatactatttcttagttacagtgatctacctcaccacttaaagtcttgtcttttgtatttaagcattttccctgaggatcatacaattactagagattttttgatatcgagatggatcgctgaaggattcattactgaacaacgaggagagagtttagaggaagtgggagaaaaatattttaatgagctcataaataggaatatggttcaatcatttgagattgacccttttagtagaagagaggcctatcggatgcatgatatcatgcttgatcttatgatatctctgtctactgaagaaaattttgcaactatactggatggtcagcactgtgcaccatcatccaacaagattcaccgtttctccctccaatgtaaaagtgtggaaaggatcacgtggctgagaaccactagtttttctcatgctcggtcgctctctgtctttggtgattttaacaagataccccctcttgtggaccttgaagttttacgagtactagacctcttgaattgctctagtttgaaggatgatcatatcgagaatattggaagtttatttcaactgaggtatgtcagacttggaaatattagcaggataccaaggcaaattgggaagctaaagctcttgcaaacactggacctaagtggaacagcggtaaagaagttacctcaatctattgttcaactgctccaattggtccgcctttttctgccttggcgtgtagaattgccaaatggaattggtaacatggaagctcttcaggtgctatcagtgttcgatggcactgaaaacacatcagctatcattcaagagctcggtaacctaaccaaactgaaggatcttgatgtgtactggaattgcaacgacacagaaagtggtcatgaagtgtacatcaaccatttagtcagatctctctgcaagctaggtggatttaaccttcagtctctttgtattcggaatatatacccctgttccttagatatcttggctgaatcgtggtcccctcctccacgtcatcttcagacatttcagactgatatgggctgttatttttctagtcttccaacatggatgtcctccctctctgagctcacctgcttaagaatacacatgaagaaggtgggagaggaggatctccaggttctcaagtgcttgcctgccctgcttcgtctcgatctatacccagggtaccccaagcatactctcaaagttagctgcagtggattctcatgcctgaaggaatttacttatggtccatcctatgttgatctggctttgatcttgcgtcatcagtcaactatcaaaaatggacttggtatgggtgtgatgtttgaagcaggggctatgccgaagctccagcagcttgagtttggtttcaacgcacatgatatggtatctgcgtatggagctggactcgattttggcatccagcactttgcctccctcaggcatgttcgtgtcttcatcgactgtagggatgcaagtgattgtgagatggaggctgcactggctgcaaccgctaactcggtttctctccgaggaagctaccacgttgaaattcgtagaattttaaagaatgtggaaaatgatgagcagagctga

SEQ ID NO: 87671 - DNA, 276 bp, Oryza sativa
  Clone ID: PAT_MRT4530_86595C.1
atggcgagccagatggggcgggaggtcgtggagcaggcggcggagcggctggtcgacgccgggatgatccagttcaccgcgctgccggagccacgggcgccaccgccggcggcggcggcggcgacggcgagggggcggtggcggtgccgcgtgtgccaggtggagtgcggcggggtggtggggttccgggagcactgcatgtcggacgaacactacgccggcctccagctcttcgccctccactcccacctcttcactgaccaccccaacctctag

SEQ ID NO: 87672 - DNA, 167 bp, Oryza sativa
  Clone ID: PAT_MRT4530_86596C.1
aacccccaagataccccgctttggtttggatatcaccggttggttttgaaaacggcccgaggtttggggggtcccccaacgagaaaattcccaagatacaggaaggcgggttattcagtttcaaaaccggggggactcgaacaaagatttgccccataacagattac

SEQ ID NO: 87673 - DNA, 255 bp, Oryza sativa
  Clone ID: PAT_MRT4530_86597C.1
gcgcttattttagcaatactgatcttataagatgtgcctgtaattttttttttttttgcaattgatcgaagttccgtaaacaaggaaagaaaactgaacaactccttagttacggtttactgtttaccttacataaaaaaaactgccactcttctcacatataattataattgaatgggttatgtttcattttgattattttcttaattcttacacacaagtatatttatcaatagactcataaaaattatattc

SEQ ID NO: 87674 - DNA, 319 bp, Oryza sativa
  Clone ID: PAT_MRT4530_86598C.1
ttctataaagggcaacataaagatcctaagaggcctatacaataacatgttagagtgcagctgggatagggataaaagttactaccaagagatttgggatgtacatctggacaagagcatttaggtggatgtttactgcagccacctccctgctgctggtcaatgggtgcctagaatgtacggattggagaaggatgctctcctgggctccatgcttatactaaccagttacttggttgtcgggaggtttattgctgcttggattggagcctttgtatccaaagactaggagagcaaaagtggtgcgaaggggacaata

SEQ ID NO: 87675 - DNA, 1176 bp, Oryza sativa
  Clone ID: PAT_MRT4530_86599C.1
atggggaacgctgcggtggctactgacgaagacggccaggcttcgcgtaggcagcaattcggggtcggtgcagcaccacgaacacgggaagctggtgcagacgagacatgcacacaagaagaggccggggccgggggtagtcgggatgacttggggcgggcacacaaacgcacaacacaagctgacagcgtcgcagcgctggagatcgaaccacgcaacccaacccgtgctgcgaatcacaccacgccctaccagctggaccggagatggaccagccgcacctcgcagccaccccacggcccccgagaagagaaccccgccaccgcgggagcgggacccaccccgccggaaggagaggaagagaggtggaggttgcctttggctggctgtggagagggtgagacggtgggtgggaaatttcaaacttggccgccggcgtgctgttcttggctccccggggcggcgctgagaaggatgggggtgtccgggaaaggcggtttcttggcggtggtggcggtggtggggagaggcgctgtcctgctcgcggatgcggcgagggtggtggatttcggcgaggtgggctcgccgcctgcgccgtcaccggtggcggacgcgccctatctccctgatgtggcgtctcctcctgcagtgcaaactgagggtggcaaccattaccaaaaggagatccttgttgcagtcatcttggcacttgccgcagtcattgtaacggtggccatacctcagataagtgatagaacgaagctaccaaatataattgatccggttatcagaaacaccatggatttgaggcatctatatcaggttgctgcagtagctgtcctttgtgtccagccagagccgagctatagaccgctaatcacagatgttctacattctcttgttcctcttgttcctgtagagcttggggggacactgaggggcggaggcggcgcggagggtggatgcagcggcggctccgccgggagtggggagggccctttcttccgcggcggccctcccctctggatctggcgcggagtcgggtggtggctgcggcggctaccggcggcggctccgccgggaggggggagggcggtggtggcggtggccctcccctcccgatttggcgcggcgtcgggctgcggcggtggcgtctaccgacgatggcagcggtga

SEQ ID NO: 87676 - DNA, 345 bp, Oryza sativa
  Clone ID: PAT_MRT4530_8659C.1
atgcatgtcacgaaaacgaacgcaacgaaacgcttcgaattggtgagctgcgtgtgctgcggccatgagatttctgtcgacatcggccagatctctagcaccaaactagcagcgagcaccgaaggtgtaaatggccaaacaaacggaggggatcaaaaaatcggagaagaaactttatgcaagaaacgaaacgcgacgctccgaccaacacccacgaactggatgataaactttaaacgaaagcagcagagaaacgaacttgcaatcgaaagaacgaaacagaaggatcaagaagcaaaactgaaccgagcaacctacccttaacgaaaggcttcgaacgggtga

SEQ ID NO: 87677 - DNA, 501 bp, Oryza sativa
  unsure (1)..(501): unsure at all n locations
  Clone ID: PAT_MRT4530_865C.1
tcggcggcccggccggcgaatggtcgacggcggcgccggtgccgcttgattgcttgccttgttgtcttgctagctcgtgtctacgtactccctccgtacctatatatttaacnccgttaatttttttaatatatttgacagtttatcttattaaaaaaataaaaaaatatttttttcttattattaaatatgtttttattatatananagttttacatatttaaaaaaattaaataaaataaacgattaaatatatttaaataaattaacggcgttaaatatttaaaaacggagggagtagtcgaggtcgccatgcgtgcactcctgcatgcatgcatgcgtggtggtggtgtgtgganacgatgatattggtgtcggcngtgtatcatttcagttgccgatcgatttacggctgatggtgtcgttgaccatacaactgtttggtgactgagggaaatatatgtaacgtgtgtccatcggtaaaaaaaaaaaaaaaaaaaa

SEQ ID NO: 87678 - DNA, 1471 bp, Oryza sativa
  Clone ID: PAT_MRT4530_86600C.1
gaaacagcaggaaggagaggaagagaggtggaggttgcctttggctggctgtggagagggtgagacggtgggggggaaatttcaaacctggccgccggcgtgctgttcttggctccccggggcggcgctgagagggatgggggtgtccgggaaaggcggtttcttggcggtggtggcggtggtggggagaggcgctgtcctgctcgcggatgcggcgagggtggtggatttcggcgaggtgggctcgccgcctgcgccgtcaccggtggcggacgcgccctatctccctgatgtggcgtctcctcctgcagtgcaaactgagggtggcaaccattaccaaaaggagatccttgttgcagtcatcttggcacttgccgcagtcattgtaacggtggtatcagcaatttatgcatggaccttctggaaaaaaactcgtcaagctctggattccaaggacaagaaactctcaagtactaccaaggggcacatgctgttacccatgtttgggaaactgaattcaatgaaaacgtccaagaaagaagtggttgcaatgatggacttttcagtcttagactctgctacgggcaagttcagtgagaataacatattgggaaaaggaggttttggttgtgtatatagagcatgtcttgatagaggggttgttgcagctgttaagaaacttaattgttgtagacaagaagtagagaaagaatttgagaatgagctggagtttcttggaaaaattcggcatcccaacgtgatctccgtgctaggatattgcattcatgaagacacaaggctgcttgtatatgagctgatgcaaaatggttctctagaaacacaattacatggaccttcaaatggatcagctttaagttggtacattcggttgaaaattgctcttgatgcagcaagaggattggaacaccttcatgagcactgcaatccattgattattcacagagatataaagtcgtccaatatacttcttgattcagacttcaatgcaaagatatcagattttggccttgcaatttatggtgggaaccacaacaaagctgatttaaagccttctggaactgtcggttatgttgcaccagagtatcttctagatggtcaattaactgagaagagtgatgtgtatgcttttggggtggttcttctcgaactgttacttggaaggaaaccagtagagaagattggagattctcactgtcaatccattgtgtcatgggccatacctcagataagtgatagaacgaagctaccaaatataattgatccggttatcagaaacaccatggatttgaggcatctatatcaggttgctgcagtagctgtcctttgtgtccagccagagccgagctatagaccgctaatcacagatgttctacattctcttgttcctcttgttcctgtagagcttggggggacactgagggtagtagagcaaccccgtcaaacgggctaa

SEQ ID NO: 87679 - DNA, 712 bp, Oryza sativa
  Clone ID: PAT_MRT4530_86601C.1
cggacgcgtggggtttaatacttcaaatgcgtatccgtatatccaatgtgacaaccaaacccaaaaattctccccaactaaacacagccttagggtctgtttgggggagcttaagattctgagaagcagctgctgagaagctagctggtaaaaatttggagaagctggaaaacccagcttctagcttgttcattttctagattctacaactacagattcttagaatctaggtaaaaagctaaattgtttgagggagcttctggtaactggagattctataagaagatgtagctgctagaagctccctaaacaagcccttagtatgacttaaacatgatcgttgggtagatagagtaggagtgtctgatcatgacatgaccatatatgcgtgtgtacatataatatcagtgcatatgtgtataccgcaattgccatagtcgtagttagctccatgctccttggtgcttggggccaagccaagcacaatggtactcttctcttcccttccacctgagctgcaaatgcatgtggtgggcccacatctcccaggtctactagagaggacctgtttgtgcatttgtgcttgttcacttgtgcaatgcaatcagagagagagagagagaggaggttagctttggctatggtaagggtagccatgcatgcacgcttcaaggattcttcatcaggtttctctccttccaagggctggatc

SEQ ID NO: 87680 - DNA, 691 bp, Oryza sativa
  Clone ID: PAT_MRT4530_86602C.1
gctaaaagaaatgacaaatttgttatatgtaaattagaacaatctgaaaattactgaaggtggcatccggtattcagatcacgcctcctttaccgaccaaccaaacaggcaccaagaacagggtgcactgaatgacggagtctgaaataattaagtagtgttctgcatttcttcctcgcatttcctgcactgcttacagcgcattcgccccccaaaatttacaacttctgttatacgatttaccgtgtaaaaacagcatcctgattcctagacaggtttgctgctgaacagttctagataggcactgagctgcgtggtagtaactgaagaaatgtacacaaaaatgtggtcagtccttgagtttagcaggattcaccactcagtcactcaccacgaaggtttcccagtgcatcatcatcatcatcatcatctgaaaccctgaatgacgaacccaaaatgtttcagacaagtaccccagatgtcaagcaggatcaccatggcgcagtggcgatcttccgcagcgcaatgtcatggttcctcacgctcgactccatctcctccatctcggcatcgatcttcttcagcacatccttcactgtcaacatcatggactccagagccttcaccttctccccagcacgagaccgctcaagcttcagctcattgtacttgctacactccgatggatccc

SEQ ID NO: 87681 - DNA, 2051 bp, Oryza sativa
  Clone ID: PAT_MRT4530_86603C.1
gaaccattttgtccgctgagccggggcaggtcgacctctccgtccccttcacccgcgggttccctgcgccgatctccatcatcgggagcggcgtgcgccgacggcgtccaccgcatactctcgcctctgaatctttgcgcccaagtcgatctacccgttccctcggcctcaactcccatctcctgcgagttcgtcgccgcctccgccgatctccatcaggcgagcagcggtgccgtcgtcgtgctgcttccgcctccgccctccgtgctgagaagatgcggagcggtcgttatgatctcagaagtaacttgaagagggatgaaaaaactgattttgtcatgacgtattcaaagaagcatagaataaaggaggacatagtttgcaatgaaggagagatagctgagtccttggtttcaggtgacttgccctgcgaatcgaatcaaggtgtcttctggagtgagctcagtggagaagttgcatctaatctgtccaaaagtgttgtttcacttgccctgcacgatggaaacacaatgttatttgtatgctcgggcatagctgtacaccgtaatggacatgttataaaattgctgacctcagcaagcttgcttaaagcttttaatgacgcaagaaaagatcatgataacttgaaggttgaagtgcaccatgaagacactgttgtcatagggtttttgagagaatataatttagatcacaacatggctgctgtcattgtggagaacttacctgatcttcgtcctgtgcctttcaacaatgttcagaaatttgtaccgcatagcaaggtagtagctctaggccgtgatatctctggcaaattaatgaccacaagtggggtattgattggtgaatcatacaatggatatcttatgtcgtccacttgtaaattctctgaggtttatgaaggtgggccactttttgattttgatggggactttcttggcatgaacctttccttcactaccgagggaaccgtatttgtgccaggggatagagttcttgaccagcttgtgaattgtatactcgatcatgaggtcagatttgctgcgcggttagaggctttgaaggaagtctgggttggagaaagtcccagcggtgagatgcctagctctcatcaagtacatagagatgttcttaacaaggatcgatacggggatctagaatccttgggctatcctgagcccccaaaatcgaaagatggcatgattttggcttatacttttgaagagccttttggtgacatatttggtaaaggtgtctggagtgaactaagtgaagatgttgcctctagcatatgcgaaaatactgtcgcacttgcttcattcaacggagataaacgaacttttgcatgcacgggtttctttattgaatggaacgagtgtgccactattctgacttcagcgaacttacttagggattctagtgatgaaaacaggattgctgaaaacttgaggattgaagtgttgcttccaaataatctgcgcaccgtagggacagtacaacattataatttacattacaatgttgctctagtcagtgtgaaggatcactgtgttcgccaaccagtgaaaattcaaccttatgggcataactgtcggaaattactagctgtagggcgtatcttcgaatctggcagattaatggctgcaagagggcaacaatttcccactgttgtcacacatgactgcaaatttcttagttactctggatgtacaaccactaaggctggcattggagggcctcttctttgtttcgatggaacctttgttggcatgaacttctacgatgagggtgtagaaggcaccgcattcctatcatggtgtgagattcgcgagatcctgaagtattttaagacaaaaggggctgttgctgaacatagccatggtaatccatctgatgtgcttgattggaagattgctggagatgatagtgttcaccctgatagagatggcaaggatgaagcagcggtcgctgagtttgatagcgagcacggcggcgccgacgaagcaatgcaagaatctgactctatctcgtag

SEQ ID NO: 87682 - DNA, 1467 bp, Oryza sativa
  Clone ID: PAT_MRT4530_86604C.1
atggttgtacaacgtgatggacatgttataaagttgctgacctcagcaagcttgcttaaagcttttaatgatgaaagtcaagaccatgataacttgaaggtcgaagtgcaccataaagacgctgttgtcatagggtctttgagagaatatcatttagatcataacatggctgctgtcgtcgtcgagaacttacctgatcttcgccctgtgcctttcaacaatgttcagaaatttgtaccacatagcatggtagtagctctaggccgtgatatctctggaaaattaatggccacaggtgggttgttgattggtggttcaagcggatcatacaatcctaagcttatgtcgtcgacttgtaaattctctgaggtttatgaaggcgggccactttttgattttgatggggactttcttggcatgaacctttccctcactactgagggaaccttatttgtgccaggggatagagttcttgatcagcttgtgaattggatactccatcatgaggttaaatttgctgcacggttagcggctttgaaggcattgaggtcttcttttatctatacttttcttaacaaggatcaatatggggatctagaatccttgggctatcccgagcccccaatatcgaatgatggcatgattttggctaatacttttgaagagccttttggtaacgtgtgtggtaaaggtgtctggagtgaactaagtgaagatgttgcctctaacatatgtgaaaatattgtcgcacttgcttcattcaatggtgattttacagagaaaaacgaagttttgcatgcacgggttttttttattgaatggaacgagtgtgccactattctgacttcagcgaacttacttagagatcctcgtgatgcagacaagattatcgaaaacttgaggattaaagtgttgcttccaaacaatcggcgcaccaaagggacagtacaacattataatttacgttacaacgttgctctagttagtgtgaaggattaccgtgttctccaaccagtaaaaattcaaccttataggcattacgctagtgaattactagctgtagggtgtatcttcaaatctggcagattaatggcctcaagagggcgacaacttcccatcggtgtcacacatgaccgcaaatttcttggttattctcaatgtacaatcactaaggctggcattggaggtccgcttcttggtttcgatgggaactttgttggcatgaacttctacgatgagggagtagaaggaaccccattcctatcatggtgtgagatttgcgagatccttaagtattttaagacaaaagagactgttgctgaacataggcatggtaatccatctgatgtgcttgattggaagatcgttggagatgacagtgttttccctgctaggtattatgatgcattgctttactgtatcacgttcaatgttagtataaatttgttgataacagaaaattactga

SEQ ID NO: 87683 - DNA, 271 bp, Oryza sativa
  Clone ID: PAT_MRT4530_86605C.1
ttttgtggaaaatcaccaaagaggggcaataacattggaagttgagacttcagccgcaccctgtggacacacgtaagacaacctaccaagccctattgcaaaggtgataaagaaaacaagaactaaaacccgaaaacaggaggggaatcaacaaggtgaccacgacacgtcgtcacttatgatcccaccaaaacggttcggcactacgcaacgcaccgcgtgtcaaagcgggggattacgcgcgctcgccgcggatgcggcgggcgagctg

SEQ ID NO: 87684 - DNA, 552 bp, Oryza sativa
  Clone ID: PAT_MRT4530_86606C.1
atggccggtgctgctgttccgcgcatcaccgagttcatggcggaggcggcgcttgaggagggtaccacgacggagaccgcggtggtggtggagcgcgcgagtaagctgggcggcggcggcggcaaggcggaagcggcgcctccgcttaaggagcgcgacgcaaacaagaagagggagaaggcgactggctctgctcaggttgtcaacgccgagtccgccgtcgccgtcgccgccgcgggtggagaaggcgaccagaagcaggagccatggccgaccttcgagtacctggactccctctcgcttgagaagcgcagtgaggaattgaagagtgctgaacgccgctccaagctggacgacgacttggagaagctccagaaggatgtccgtgacggcatcgacaaggatggctactatctggtcgatgagagttacctcgctgagtcggccgcctgcaaggctcagatagacgaactatgggccaagatcgactgggatctctacaactttggggactgggactacgatgacccagaatacgttgtgtacctgtga

SEQ ID NO: 87685 - DNA, 452 bp, Oryza sativa
  Clone ID: PAT_MRT4530_86607C.1
ggctcctacgctttctttaaggtgccagctggtactcattgacatgaggtctgcttattgagctccttattgtcaccgggtcgggtagacatcagagccaggaatacggggcacattcaggcctgattgactgaaaacagaagagctctaaatgagctggtgttggaacctctcaaagaagagcagttctactagaaaagggagcctctgtccattatgtcactactgaagagccctatgcatgtgacgctagtttatatggtcataatggacttcgttatgcccaaagcgatagcaaacatatagcccgtagagataaacaacgctcaagaacacatgaggaacttccctggttcatcctgtattggtctattagcaagagcgaacagctagacatactacacggggatactgtatgggttaagaaagtgtatgatgggatgaagagcagt

SEQ ID NO: 87686 - DNA, 547 bp, Oryza sativa
  unsure (1)..(547): unsure at all n locations
  Clone ID: PAT_MRT4530_86608C.1
gatcaagctccttttatacattcatagtttcacaactgttttccatctaggaataggtgatgaaatccgtaatatatgtacatatcgagtatcaaccatgccaatcactattttttttcaacgaactacataagaagatagaagatgcaaagttaccatgccaatcactataaaaacccaaccaattacattacaaattctgtggtgacttcgtcaatctccaagatggatttgtcggcccaatcttcgaagatgctcgtaggggtaaagtttgcgtgcgtgcgttatgactacctgtgttgtactgtgtaattctaaaaaaaaaaaccgtggtgagcgcacatatttgtgaatacattcacccaggtttgagtctcaccttcttatggcgagtgtaagnagggaataaatttatccttctcacatcacggttttttttagacacctatctaatgaccatagccaactaaccaatctctaaatattggtgagacccatggatntttttcacaaccatatctagcccataaatatttttaagccaaaa

SEQ ID NO: 87687 - DNA, 677 bp, Oryza sativa
  unsure (1)..(677): unsure at all n locations
  Clone ID: PAT_MRT4530_86609C.1
aagtgtacctcagcaatttgagagtgataagaaggaagattatgaccaaagataggttcccttaggtggatgaatgagttctcgcaataccacacaacttcttgtagatgaattggaaaacttgcgcaagcttcatcttgatgtgaccatcatctatgccgattactatggagctgccatggaagttttccntttcccccctgaacgaattttgggaaatttggaaggaatccctttgttcgcctttgcctggttgttggaaaggaagggacccttaattgggttggtattcctgccatcctggttacccctgttgggaatatggccgaataaccacaaagttgttgttggaatgaaccccagccaaaatatgccatccgttggnatggcttccattccatcagaaccttgccattaaccaagggccattccaattgccctgctaccagggttcaatacaccttcaacactccaattgttaccattcacctaattcttgtccccancccattnccttgggttcctctgttgaacaccaaggcccatggtacgacttgtaattcttggtaattatatttttattattatacacaatattgattaaaatatttaaaggaatatttgttattccntcccattatagaaccacagtactgttctaaaaaaaaaaaaaaaaa

SEQ ID NO: 87688 - DNA, 203 bp, Oryza sativa
  Clone ID: PAT_MRT4530_8660C.1
gggaaacgaataaaatcattattgcaaaaacattattttcttcttcatcttcttagtgtacacaacaccaactcgatcatcactctcgtcgcactaaacccattcttccccaacccaaagacaaccgaatcttgctggcacacaaatccattccaaccaccaattaacccactgctacagctacggtcccccccactttcact

SEQ ID NO: 87689 - DNA, 705 bp, Oryza sativa
  Clone ID: PAT_MRT4530_86610C.1
ctaggcctacagcaacaccacagagacgagattccgaaaaacgacgccaccacggtagtcacgacatccagaatgacgccatcacctatctaaaaagtggttttcacctagagatgctcgtcaagaaagagagaggaaacttcccgcaaagaagaagatgagctccaggaaggacgagggtgctgactggtaacaagaaagacgacacaccgccgccagctccctttgcactgccatctggccgccggtggcactgccgctccggaccggcgcccccattgtccggccgccgtacttcacctggccaccgcgttggcatcccggctgctcggccaccgatgccaagccgccaccgaggcctggctgccgcgtccgcgcacgggctgaccacgccaccgttgccccaagcacctgccgcctccgcgcacgggccggccacgccactaccgccccaagcgtccgccgcttccgctcccgggtgggccacactgagtcgccatcgagccgcagtcgtccgccgcctccgcgctcgagccgggccggccgagccacagccgcccaccgccgcgccagatccaagggggacgccatgaagaagaaatgcctcgccgtcgccttccctgcttgccgccggcgagctccggcggcggcgaggtgaggggaaaggagcggaggcgcaggcggctagggtttaccgagccgccc

SEQ ID NO: 87690 - DNA, 323 bp, Oryza sativa
  Clone ID: PAT_MRT4530_86611C.1
tccgaccaacccatcctcatcgtcgactagcttagctatcgatctagccacagtactaaatcatcaaactccactattaattccactgtcactagctcgatcggtaattaaaggcaaggagctttaatttggtgtcaagcaaaaatttatccaaccaacttatgtatgatgtactgcagcagctgcaatggctactgtagggattgtagtttgctactatatctgtttgcaggacggatccaggaacaaaaaaataattagggggactcaattacgcaatttcttcaacctccagccatttaggaaaaaaaaaaaaaaaaaaa

SEQ ID NO: 87691 - DNA, 951 bp, Oryza sativa
  Clone ID: PAT_MRT4530_86612C.1
atgtggacggggcgccattccctcaccggtgcggtccgaggcggccacggcagcgaggtgtggggaggcggcggatccggcgcccccaaggctggatccggccatccctcacttggatctggcgcggcggtgggcggctgtggctcggccggcccggctcgagcgcggaggcggcggacgactgcggctcgatggcgactcagtgtggcccacccgggagcggaagcggcggacgcttggggcggtagtggcgtggccggcccgtgcgcggaggcggcaggtgcttggggcaacggtggcgtggtcagcccgtgcgcggacgcggctcgacagcggccgctcaatgcggcagcgacgcccccgctcacccgctcgccccggccggccggcggcagcccaagacgcagcgaccgtggttccccggtgcgtgagcagcccttgggctcggtgggccgtcttcctcggcagccaggcctcggtggcggcttggcatcggtggccgagcagccgggatgccaacgcggtggccaggtgaagtacggcggccggacaatgggggcgccggtccggagcggcagtgccaccggcggccagatggcagtgcaaagggagctggcggcgaagtgggacccctcaagatcctggggtaccgtgggccctactaagaccaacaagatctacatcttcaagaagcttgcccaatgtaacaagaaaatatttacttggcaacgggagcccctaacatgtagggtgccctggacacgtggctaccccaagcacagtggccacgccggaacaaggctcgggtgtctcgactctcgaggccctagacaagggcacgagcacaccctctccaccgggctctcctgggaaacccgtacccgctgtgttgccaactctactaaagtcgtgttcgattgtgtgggttggaatttgggaacccttccctag

SEQ ID NO: 87692 - DNA, 1486 bp, Oryza sativa
  Clone ID: PAT_MRT4530_86613C.1
cgggctgcaggaatcggcacgaggagagacttgtctcctttttttttttttttttttttaaccataatggactccatgcatctttattttccatataagtttcaagactgacaactgtacctcagtgccaatggcaatctacatgtatggggctgtgaaattgacttcaaaatggtagcacttaaatttgttgtaagtagtatagaggtcagggttgctatcaatcagctaacccaaagaatagaaggcagctcaattaacccaactgcatcatatattcatatatggtgttattttttagataggtggtactcgaagcatcctagagttctggtgggggcaggcagaactgatagaactgtatcttcaatggcaaatcaaagattactgttgcaataatcccaccagatcatatacgctgtttgtataaagatctggatggatagtatttgaagcgtcctgaagttctggtaaggtagtcacgccagacagaacaagtagtgttttgcaaccagtgttctggccaaatagtatgtcagtgtctagtctgtcaccgaccatgcacattcttgatgtctccaaattgaagcttttcaagaggaagtccattaaaaagcttgaaggttttccaacaacaatgggctctttctgcacagagcaactaacagcagcaaccatagttcccgctcctggccattcttgaacggatgtcatatgaccagtaggatcacggttggtcgcaatgaaaagacagcctggattctcacgaatacacaagctcgcatacaacaataatctgttgactgttgcaatcaataaatcactggcagcaaccggaatcaggagtaactgaaattgtccatgtccccactccctcttttctcctgcagcaccttgtcctacaccatttgcttgctgagccatcacttgcattttgtagtagttgaagtactgatcaagtccaacaatgacagctccaaccgggccacctaaacattcaaaaccggctaatctgagctcttccaaaataccatcctcaccgacaacataaaccttcttttctggagagaaattatttaacttcaagaacatggctgctgcaaatgatgatgtaaagatctcttcctctgtaacttcaagtccaagtgctctgaacttcttcgcatactgtcttctcgactttctagagttgttcgttacaaaaactaatttcttgcccattttccgcaggaggtccaaagtctcagggaccccttcgattagctgatcccccttccaaatcaccccgtcgcagtcgaagaggaaggcgtcgacggagtcgacgagggatcgggcggcgtcggcggtgaggagggggttggggagcccgttggccatggatggatgattccttggctgctgttttctgctccgcctccgctggtttttggtgagattcgaatgtgcccccttccaacgacgacgccaccgttataacagacgggga

SEQ ID NO: 87693 - DNA, 600 bp, Oryza sativa
  Clone ID: PAT_MRT4530_86614C.1
gacgcgccgatgaccgcgaggtggccgccggcggcggcggcgaggctgccgccgttcaccgcggcgcagtacgaggagctggagcagcaggcgctcatatacaagtacctggtggcaggcgtgcccgtcccgccggatctcgtgctccccatccgccgcggactcgactccctcgccgcccgcttctacaaccatcccgcccgtacgtcgtgttcctatttcttgctatggtccgtacttcggcaagaagctggacccagagccagggcggtgccggcgtacggacggcaagaaatggcggtgctcgaaggaggccgcgccggattccaagtactgcgagcgccacatgcaccgcggccgcaaccgttcaagaaagcctgtggaaacgcagctggtcgcccagtcccaaccgccctcatctgttgtcggttctgcggcggcgccccttgctgctgcctccaatggcagcagctcgactagtcctcccatatatcccactgaccacccacacccacatgaatcacccacggtgtcgcctgccacaggccgagccaagctgccacccgccgtacccccaatgcaacgatctatacaagaaag

SEQ ID NO: 87694 - DNA, 401 bp, Oryza sativa
  Clone ID: PAT_MRT4530_86615C.1
tttgttgtttttttaattttgggggggccccccctttcttttttttttttttttttttttttttttttttttttttttttttttttttttaaaggggccccccccctttttttggggggaattttaaaatgtttaaaacttttggccccccccaaaaaaaagggggggccccggccccccaggcgttctggttttaaaaaaaattggggggggtttggggcgggcaactaatctttcccccttcaaagggccctttcttttttcgaaacattgggggaaaaaggcttggggccttggtccttttaaatcttaacggggaaccggggctggttttccaaatttttttaaaaaagcctgggaacaggggggccctttgggttcacccttttaaaaagggcccc

SEQ ID NO: 87695 - DNA, 237 bp, Oryza sativa
  Clone ID: PAT_MRT4530_86616C.1
gacacaaaacaatggaggctttatagtatttcaaaagaaaatttcaacatggccattttgtgggggaaaaacgagggcacaaacttgattggaactaaagactgaataatgggaaccaatgaaaaaacttatttgcaattcttagctggaatataaaaggtttccacgcgaggcgctggcaaacaagagcacatagcagcactttcatgatgaggaatcaatgaacagcttagatcc

SEQ ID NO: 87696 - DNA, 1302 bp, Oryza sativa
  Clone ID: PAT_MRT4530_86617C.1
atggacggcggcatgaaggagcaggggatactcctggtgcggaaggcggtggaggaggacgacgccggcaaccacgcgcgggcgctgccgctgtacgtgcacgcgctcgactacctcgccgcgcacctcaagtacgagcggaaccccagggtccgcgacgccatcactgccaagctcgccggctacatcgcccgcgccgaggagatccgcgacgcgctcctccccgccgccggcgacgacgccacgccgcctgcggcagcggcggaggagggcaaggcgaagtgcggcggcggggaagacgagtcggatcgggccaagctgcgggcggggctccactcggcgatcgtctcggagaagcccaacgtgaggtggagcgacgtctccgggctggatggagcaaagcaggcgctgcaggaggccgtcgtgctccccgtcgagttcccgcagttcttcaccggcaagcggaagccatggaaagccttcctcctgtacgggccaccggggacgggcaaatcttacttggccaaagccgtcgcgacagaggccgattccacattcttcagtatatcttcgtcggatcttctctccaagtggatgggagaaagtgagaagctggtgacgaacctgttccagatggcccgtgaaaatgcaccctccattatcttcatcgatgagatcgactctctgtgtggccaacgaggggaaggcaacgagagcgaggcttctcggagagttaagacagaattcctcgtgcagatgcagggtgttggacataacgatgataaagtccttgttcttgctgccacaaacactccatatgctctggatcaggctgtacggcggcgttttgacaaacgtatctacattccgctacccgaccttaaagctaggcagcacatgttcaaggtccatctgggtgacacccctcacagcctcaccaagggcgacttcgagagcttggctcgccggaccgacggcttctccggctccgacatcgccgtctgcgtgaaggacgtgttgttcgagccggtgcgcaagacgcaggatgccatgttcttcttcgggacggcggagggcgacggcgacggcggcgcgtggacgccgtgtgggccgacgcggccgggcgccgtgcagatcaccatgcaggagctcgcggccaaaggcctggctgctcagatcacgccgccgccgatcacgaggacggacttggacaaggtgctggcgaggcagaaggcgacggtgagcgagaaggatctggaggtgtacaccaggttcaccagagagtttggcgaggaaggctag

SEQ ID NO: 87697 - DNA, 1543 bp, Oryza sativa
  unsure (1)..(1543): unsure at all n locations
  Clone ID: PAT_MRT4530_86618C.1
cttggnaccagtagtgcaacaacttgttcagtcganaggaataccttctagccttctagtagccaggatggccatggagagagcttggaagccaagggaaattgctgacacttttggcattgagatggatgaagaggaggctgcggctgcggcgataccgcctccgcagacgccattggagcccatggagtacctgtcgaggtcatggagcgtgtcagcgtcagagatatccaagatccttttcaacgggagcaagaagagctttgccgccaagcgtctgccggagatgaccataccggaaaactctgtggtcgctgcgtccattgttcccagccatctgcaacatatagacacaagaaggaattcaatcagcagccaccacctgccaattgggaggtggttccaacacaaggaggcaagccgggtcaagcagagcagcaaagagaagctgcgagccgagaaggcccatgtacacgccatggtgtcggtggcccgggtcgcagctgccgttgctgcggttaccgcggccaccacgagctcagatatccagacctccaagatggccgcggccatggtgtcggccaccgagctattggcttcgcactgcgtggagatcgcgcagcacgcgggggcacgccatgagcaggtggcctgtgccatccagtctgcagttggtgttagaagctctggtgatctgatgacactcacagcagcagcagctactgctcttcgaggagccgcaacaatgaagcagagagtgcagcgagagatgagaagcaatgcgagtgttcttccgtatgagaagggtcactcatggagtcctgacatctggtgcaaggagggggagttactgaaacgcacaagaaaaggagatttacacaagacacgagtatctatatacatcaacaagaggtcacaggtcatattgaagttgaagagtaaacacataggaggagcactatcaaagaagaacaagagtgtggtttttggtgtgtacaacgagcttcccacatgggttgaggcagggaaacatttcacagaggagagatgctgctttggcctgagcacggcacaaggtctggtagagtttgagtgtgagaacagcacaagtaaacagaggtgggtcgatgatgtgaagaatctgcttcggcaggtcgctgcagaagagcaagtggaaaataagttgggatcagtgaagctcagttgatgtagttcatacatgtgtacactattttcatgttggcaggtggtataccatagaaggtgccttattgatgccaggcgtatatattgttgtactcttaaattgtcaggtagttttgtactgtacacacaaaatgataagatacataatagatcatatgttagtccactctagtctgttgctatgatacagtcatacagatacattatactctaaggaccaaacacagtaacagaagactcaaatagggtattggaccattaattaatgctctgttaattgtaccatacaccatttttttttgaaaagaatcagcacgagattgtgctatttcattgg

SEQ ID NO: 87698 - DNA, 155 bp, Oryza sativa
  Clone ID: PAT_MRT4530_86619C.1
atgagctgcaatggtggcaatggtgggactggcaacaagcaacaaattaatggccaaccaccagcaataggcagcagtctctccaagggcaacaacccacacgcacaaagatccagtggccaaccatcaggtgctctcatggagagtggaagcag

SEQ ID NO: 87699 - DNA, 2616 bp, Oryza sativa
  Clone ID: PAT_MRT4530_8661C.1
atttattaaaaaactgaagcaaaaggttcgcaacaaggctcgtgttgaagggtcaatagtggaggcttatcttgtagaggagatctcgcacttcacatcactgttcttacctgatctcattgctagctcacgcaatcgtccacatcggtatgctcaagttggccctgctagtgaaagcaaccttagcctgttccaagttcaagggtggaagaccggtagaggaatttctcgaactttaacttttgaagaacaaaagaaagcaatgatatacatatacacaaacatgagtgaaatggatggatttgttgagaagtttgaacaagaacagtggatgcgctcaagaccaccaaatcagaaggagctagataaattaatatggaacggagctggtaatggaaaaccaaacttattggactggttcaaaaaattgtgttccaaggacgctagtatacataatgatttgcgtcgtttatcacgtggatttggcctaaaggtcaagtcatatgatatttatgaagttaatgggtataaatttcggtctgaaaagtatgagaaatccaaaggaaatctaactactgtcaacacaggggtgctagctgttggaatcgatgataacacaggcaaagagctagagtactatggcattataatggacattattgaattgaaatttgatggtgatgaaaatttcaagcttgttttatttgattgccattggtttcatcctgtcaatggagtacgccgtttagaaaaatttggattagtcgaggttgcacatgcatcatgcaatccagcggatgaaccttttgtacttgctagtcaagtatcacaggtgtattatgttccatacgcatgtacaactgatcctaatctcaatgcatggtgggttgcatacaaagtaagacccctaggaagcttgcctattacctcgttggatgattataacagcagtgacccatcttgtgttgatatcttccaagaagatggcttagaaggtgaattcatcatagacattggccaaggtctggataatattgtcattactgatgtagatgagatcactgatcaacaagacctgtcaacaataaataatcggagtactgatatgagtgaagacaatgacctagtatctgaagatgaagaaagtgaagacgacaatgaatcaattcctgaaatgaatgattactattaccgtcaagaagaagctgatgatgaagtggaagatgaggtgaattttcacttgcaaggttgttcagaacttccacctattatccccaacatagaagaccgtccactgattgaacctgaagggaaaacacaatggcatgaaattccaaccttaggaaagggaagaaggccagcaagtgttctatcctgcctactaaagaagaactatcctggcatagtccaatataaaggcaagtcagtgattgctacaacttggaatcactacaaagcagacaaggactcaaatgggagaagcaaagctgatgtggttgaagaaggtttttggctaaggttcaaacatcaaccaagccaagatcaggcgcgtgctgcaaaagtgcatgttcgtaagtgttgcggtgtgttgttgggatggcttaagtattatgctcgaattcaagccataatggatcactgtcgtaaggttgaaggagtgcagatctgtgacaagagagcagggctaagatacctctccaaggaagaatacttggcacagcaacctgagtggtgtgatcaaatggcttgggatgcaatggctactgtttgggttgatcctgaatggatcgaaaaatctaaaacaaaccgagccaaccgcaagacccctaaatttaagcctcatagaggaggatccaactctattgctacagtacgacaaaaactggagcgatataaaaccaaggcaacggagttgaatggtccaaactttgattggatgaactcccctgttgactcaagggccttatatgaatgttcttgcggtagaccacatggaaaatgggaaacatttaatgggatggttgatgatagcgaggctatggctaagatcaagagaagatctacatcttcaacagctaacaagcgtcgtcgacaagaagaagatggccatgaaagagcaaggctgatcaaggatgctcgtatagcaaaggaatatgcacaccgagtgctggagtggagtagtggccaagacagctacaccaacactataaaacttattcttgagagtgctatccgtcatatacctattatttttattagcatactggaatgcctctacctgttgcaattccacatccaccgccgccgccgccaccacctacatacggagtttatcattctgcagatcaatctacggtgaatgctcgtagcagtggctcagttgttggagctggagaagagaatcatgctgggactgcaactgttggagccggagaagagaatcatggtgggattgcagctagagaggagaataatggtggtattgcagttggcgaagataatccagaagaaactttggctagaatttctctaggcatgtttggagggcatattaatgcatctggcagtgcaggtggaaaatactctcctcctttggaagagcttggcccattttga

SEQ ID NO: 87700 - DNA, 158 bp, Oryza sativa
  Clone ID: PAT_MRT4530_86620C.1
atgtggagtggggttgacgacatcatgagttgtcgtcgctcggtgcagctagatgaggcggacgaaaacacaaacgcgctcctgaatcggatgtgtgcagtggccaacggtgcaaaagcgaaaactaacgacaagggcaagcatgagagtcagatgac

SEQ ID NO: 87701 - DNA, 4521 bp, Oryza sativa
  Clone ID: PAT_MRT4530_86621C.1
atggaggagctgttcatgcaggtgttcgagcggcgggactgggtggcggcgcagctgcggcagcaggtggagtcctacgaccagtccctcgcctgcgcgctcctcgccgccggccgcccccccccgccgtggctcctcccgtcgcgccccgctgcgccgcaggggctgaatggcaaaccagcgccatcggagtttgttttcactggaagccatattaccacaccagcaatcaatagaactgtctatcagccttcagctgttcctagtacttccttaagaaatgtggggcttccaagtggatatagccatctatggactgcttgtaattctctggatactgaccaacaccaagaggtccagcaagagcagactaaagttaatgaggagtttgtcaacactagagctgaagccaacatgttttcaaggattcaacgttccaggtcaaggcaaaggaatatcgaagaccgcttacgtgaaagggatgaagctgcaaatggtggaagtagtgatggtttgcaagacaggatggagaggtctaagattgctggcgtgcggctaaacaggaccaccacatcatcatcctctgaaccatgtggtggtgatgcaaacaattctggagcaacacacccttttcgaggtcaggagaatgatatttataccaacaagaggaactcagttgaattcttaaagtgcagtaaagagggtggtcttggaagtggagttcacttagattgttccccatctctggttctagaaaacaagattgttagttctgacagtctcttcaaggttcctaatgactgctccgctagagattcatcaagaacacaagttgcagatagcgtgtgccatcccctccctgaaactcatctatttgttgagcccaaaattcttcaatttgaaggtgttgaatcagtatgcatgaatttttcaagtgaaaaaatggggcagccactggaaagtgcccatcttgatcttgctgaggcacatcctttaaatgaagacccatcttctactggctgttatcatgtaccttgttccgtgggaagctcattggttgatggtgttgaattgggacttttaagcactgacagtgcaacattgaagcagcaccttcaatgtggcagtcctgatcttagtcccacacattctcgaaacaaggacccgtgtccaaccatttcctctgaagtacctaattacacgagtgaaccattagttgagcaggatacatattgtaatcctgaaatcaattctctggaaggaccatgttctaaggtcagccaactgcttgaaaaggaagaaacgaaggcatgccccgatgccaatccactgcttaaaacagatgcattgcataccataggaagcaccgaaagaataagaaatcttgcctctcggaactccactcctcttgaacaacggagctctgatcctcatgtcttgccttgtcaacgcagtagatctgtgcaaccagctgacagtagttctcggcctcctctatcaacaggaatattgccggacagtttgttggaagcggttggtttagaccaccttccgcattcaaatgatacaaatagccaatgctccccatctaggtctgctgcaagcccagatctgcttccacttcgactcgttaattctggtgatgtttatcaaccgagcttctcttgttgtaaatcacaaaataacaaagattccaatggttgtgctgttgagggcaccactgtatccatagagaaaccgccgtcccaggagcaatatttattggatagaccacctatggaactcaatggttttgcagatgaggatactcccttgggccacactctgggtacacataatgagatgctgaaaggaaagaaggcagacgacttggtgaactgccattctggaaagctcaacagttctcagaaaaaacccaagggtttgactgaagcatctggtttttcttccggaaagaatgagtctgcagggcaaaaggttgaaagcaatatttcaactggtgtgatgcacacaacagaaaggagcagggggttttgtgccatgaactgcacggaagatctccaacaagatggaacagaacaagaaacctctccttttgataatgctgttcaaataaatgctaatcgatgcaccgcagataacaataagcaaatcaaatctttacgaccttctgttcgatactctttacgtagcttgatgtcacatgagaaaattaatctgctccagtcagaaggaagaagtgctgcttgtggccagaagaggtcagatgcagatggagttcaagtaaacggtggcccatcatctaagagaagaagaataaagcgtcaatcaaatgctgctctctccagctctcctaacacaaattcattgtctgtggtccaccaagttgatattgacaatcatgtgttaccccttggaaatttctcagggaagtctcagccttcaggccgttacttcttaagggatttagggtcctctgggagcatgtctctcaagtcagaggagaggaatgctgtgagtcacggcaacatatcagtatctagtatccataataaaaccagcagttctcctgaaagatataataaggctagtttagataatgaaaatgggaattctccaggacagttacaaaatacattagatgttgtgaaaacaaccgctgctttgcctagctgctatggtaccttaattgataatgagaaatcatgcgcagaagaggaaaatccttgcttagaaggtaaacacgcaaatgatacttgttcgagtgtggtacaccagcaaatgactcttcagattgataacattgcatctcagagtgtaatattaaattcagaaaattattctagagagaactcaattactatatctgcaagttatgtttcggatcaaaatggtgatcaagcacatgcaccaagtgcattggttcgtgagaatttaagttatggctccagtgtagaacttgacaggagatgtaaaagtaatggttcaaagggaagtttgttgtctggtgctgctattactatgcaagatggggatgaatctgttgactgtgatgccacaatgccggaattcgagcgatttgatgttcctatccaatttgacagcccatgtgctgagacaaagacatctgaagccctttgtgagtccagaaaattagtcaccctcagttcaaagttctcaaattatgacactaacacagaaagtggtgtgagccacctattgtcagccatgtctgggaagcctataaacttccctgatgatttgcaacaatacagagcaaataatgatagaagcataactgacatttttggagcatgtggattgggacttgatgattccttttctatttatgatgtcacagcttcatgttcttcaaatggtagcagtgcaaaagagaacaatgacaatccattgaccccatcagttgaaaaatatggcctggggaaactgtcagctagatctggatctagttcagaacatatgggctctattcctgaactagaatgcttccgaattgatgaacatagcagcatcgcagaagaaaatgaataccaagggatgttacatggatctgctggtttgagttactcgcatcagttgccatctggcagaaaagcacttcaggatatcactggattatgtcaaaacactgtaaattctgcctctctttcctcaatattcttggatacaggtaatgagctcaatcatcagacagatctcataaatggtcatgccaacgataagccaaaaaacagtcttgctgcttcaaccaagagagagagaaaaatatctgattcccttcatcctagattaaggaggacagaactacataacagaaatggaagacaccagagtgaagccaatattgacaaacaatctaagcctagcaatattgttgccaatgtgacatcatttatacctcttgtaaaaccaaagttgcaacctacaacagcatgtgtgaaaaaagatgtcagagtgaaggcacttgaggcagctgaagctgcaaaacgccttgaagaaaagaaacaaaatgaacgtgaaatgcgcaaagcagctgcaaaactagagcgtgaaagactgaagcaagagaaagaattaaagcaaaaacaggaggaacaaaagaagaagagagatgccgatgtggctgctaaaaaacggcaaagaggagaggaggaaaggaaggaaaagcagagaaaaagaaaatgcactgaggaggctcggaaacaacagaagcagcctacagaaaaaagtcttgctgtgaatgatgagaaagatgtttgtcgaaaaacatctgataatatagagctgacaaaacctgatgggagaactaccgaacctgctatgaccaatattccaaacagtcttgaagagtcataccaaatgtctccctataaggattctgatgaagaggatgatgatgattttgaacatgagcaagaatccagacgtaggaggaaatttattccttcgtgggctcgcctttatttgagaaaaagttgtgtgtttgatgtgatgcactga

SEQ ID NO: 87702 - DNA, 464 bp, Oryza sativa
  Clone ID: PAT_MRT4530_86622C.1
tttttgttttttttttttttttttttttttttttttttttttttttttttttttttttttttttttttttttttttttttttttttttttttaaatatttttttttttttttttttaataaaactattttttatttttttttaaaaagggggggggtgatttttctaaatttaaggaaggttttttaaatttaattttgggggtggggggataaattttgattgttggggtttaaattgggattattaggggggttttaaggggtttttgtttgtttttgttaaacttaagggggttataccggggtgatttttttgatttgaaaatttagtcttttttctttctggcctgtgggttttccctgtaatttccgacctgttccttcagggtaatcaattttctttatattgagtggttttaaaatttgccataaaaatggtcattaaaatttccttgggaaaatt

SEQ ID NO: 87703 - DNA, 1662 bp, Oryza sativa
  unsure (1)..(1662): unsure at all n locations
  Clone ID: PAT_MRT4530_86623C.1
ccggccgggacacccctatctcacccaccactatcccaaggcggcgcgacgacccatctcgccgccgcgaattctctctccggcgaattccaactcgaaccctccctccgccgactccgctcacgagacctaaaccctccttccctctcctctcgtctcgttcccaccaccatgctgggcgtcgcgaggaggcgcctcggatccggatgcgcgctggggcaactcatgcaggcgctccgaccggccgccgccgccgccgcggcgaggacctactccgccgccgccaaggagatgactgtgcgtgaagcattgaattctgcccttgatgaggagatgtctgctgacccttctgttttcttgatgggagaagaggttggagaataccaaggggcatataagatatcgaagggtttgttagacaaatatggccctgatagggttcttgacacaccaatcacagaggctggttttactggaattggtgttggtgctgcctatcaaggtcttcgccctgtggttgagttcatgacatttaacttctctatgcaggcaattgatcacatcataaattcagctgccaagtcgaactacatgtcagctggtcagataaacgttcctattgtttttagagggccaaacggtgctgctgctggtgttggtgctcagcactctcagtgttatgcggcttggtatgcgcatgtaccaggattgaaggtcctaactccttattctgcagaagatgctcggggcttgctaaaagcagcaatcagggatccagaccctgttgttttcttggaaaatgaactgctctatggtgaatcattccctgtttctgcggaagttcttgattctagcttctgtcttccgattgggaaggctaagatagagcaagaaggaaaagatgttacaattaccgcattctccaagatggtcggatatgctcttcaggatgttagagagccacaaatgaaggagaaggatgtcaaatttcaggctgcagagatactttccaaggagggaatcagtgctgaggtgatcaatcttcggtcaattaggccattggatagagctactatcaatgcatcagttaggaaaaccaacagattggtaacccttgaggaaagcttcccacagcatgggattggtgctgagatatgcatgtctgttgttgaggaaagctttgaatatcttgatgcaccagttgagagaattgctggagctgatgtacccatgccctatgctgccaatcttgagaggatggctgtcccacaggttgacgatattgtccgtgcagcgaagcgtgcgtgctacagagcggtgcccatggcagcaactgcctgataggagagacctcttttacatcatctttcttttcccgtccggccaacatatgattcataatggtgtccaacaattgcccaaactcaaagcgagctaattttgcaagatatttccatgacccccacctattcttttagctgcagttgcatcactgcgttcgttggtggtgacccaaatttccctctttttttttggtgtgtatgcgagaattatgcagcttatggtgattggttcacagtacacactggcgctagttacataaatgaaagaaaaatctgagctcttgatggacaaatnataaatatatttgatattatgata

SEQ ID NO: 87704 - DNA, 996 bp, Oryza sativa
  Clone ID: PAT_MRT4530_86624C.1
atgtacatgatagatctattccctaatgtcgtaccccagacaatcgactcttcccctccacgtcaaagcaacagtggtagagatatccaatatgccctagatttaattccaaatggaggtggaccatcccctcctgtcatcggctataatgcccccaagacctcaactcttcttcaagggctcatcagagaaccagccgatgtaggcaagaagagaagaaccaggtcatcgattgtggacacattagctctagccccaaagaagaaggctaaactcaagaagcctaaaccaactgatgatctacctatccttgatccatctattgaacaagctctagacgaagaagacatcgaagacgatattgatcaagctgcagccgaacctcctcctcctccttctcctcctgtacagcaatcatcaagcgaccgaactccatcgactgtggggagtcaccacattgaggaagagatacaaccagctgctcctaccattccggccttagccgatctgttttctttcgacattaaagattatcttgatggagaaacagaagaagataccaccagcaaatctctgaaccaagctctaatcccagatgagctagccgacatccttactctagcggtctatcttgagcaacatcaattcaagctggagaaggccaagctaagactagccgaacgtcgggagcttaaggatatcgaagccacaatccaagccaatcggcagcttgtacatgaagagaagtccaagcttgatcagctgtctgagggccagatcaaatctaatattgatcggctcgaggctcacaagattgagctcttggcacagcttgaagaatgcaacgccgagctggatatagaacacaaaaagctagccgacctcccaaagtctatcgaagagcagaaggcaagacttaaatcggctatcaagaatgttgctgatctgaccaagtctttgaaaatcatccctggaaccgatgctcaagacgcctaa

SEQ ID NO: 87705 - DNA, 678 bp, Oryza sativa
  Clone ID: PAT_MRT4530_86625C.1
atggatcggctgctcaatctccaaggacctcctctgggcagtattgaaaatatcgagctggcgggattcaagagcaaaaactttgacagatggtggggcgagtggaaactgcatttattccaccaatcagcttctatgtatatgatagatctttttcctgatgtcatacctctgagaaaaccagccgatgcaggcaagaagagaagaacaaggtcatcggctgcggacacattagctctagcctcaaagaagaaggctaaactcaagaagcctaaaccaactgatgatctgcctgtcctagatccatctattgaacaagctctggatgaagaagacatcgaagatgatgttgatcaagctacagccgaactgcagaagaagaaaactgctataaagaagaaatcagcagcaacaactatcaaaccagctccaccacaatcatcaagtgaccgaactccatcggctgtggggagtcaccacattgaggaagaaatacaaccagctgctcctgccatcccggcgttagctgatctgttttctttcgacattaaagactatcttgacgaagaaacagaagaagataccaccagcaaatctttacttcccttgtccgatgatatgaagaaaacccttgaagacatctctcatcggctggaagcatcatcactggaaaacttg

SEQ ID NO: 87706 - DNA, 1062 bp, Oryza sativa
  Clone ID: PAT_MRT4530_86626C.1
tgcacacgggagcgataccaagtactctctttctcactcgattgattcaagcagcaaataattagcctagcttactctttccatagctagctagcttgttgcgagcaagatcaggttgccggtgcagtaacagagagcaaccatgggtgtattggacagcctctctgatatgtgcagcctgacagagaccaaggaagccctcaagctaaggaagaagcggccactgcagacggtgaacatcaaggtgaagatggactgcgaggggtgcgagaggagggtgaagaacgcggtgaagtcgatgcgaggggtgacgagcgtggcggtgaacccgaagcagagccggtgcacggtgaccgggtacgtggaggcgagcaaggtgctggagcgcgtgaagagcaccgggaaggcggcggagatgtggccctacgtcccgtacaccatgaccacctacccgtacgtcggcggcgcctacgacaagaaggcccccgccggcttcgtccgcggcaaccccgccgccatggccgacccctccgcccccgaggtccgctacatgaccatgttcagcgacgagaacgtcgactcctgctccatcatgtaaaaccaataatccatatatatactacaactccggcgacttctccggccggccggcaacatgcttgcttaattagctagcttgcttggttgatgtgtactactgcgttaagcctgcatagagatgaggtgtctagctactgtgtatattatggccatatgttatgtagtactacgtgctttgttttggattattactaaaatagttgcataaagagagtgaaagctagagctgtggctacgtgttctgaattgtgattacgtgtacgaactagaaacgacacgtctgttgtcgattgaattggtcttttttggagcggtagctaggccgggtgaaggggcggggttaatcaatcaattgtttggttgaaccgctaggtaagctctctatgatgatatgaataaaaaatccctgtcagtgtcaaaaaaaaaaaaaaaaaaaaaaacaaaaaaaaaaaaaaaaaccaa

SEQ ID NO: 87707 - DNA, 2331 bp, Oryza sativa
  Clone ID: PAT_MRT4530_86627C.1
atggccgccgccacctatttctggtccaacaccatcaatgcctttctgttcaaccaaaggccgatgactccaactttaatcgacatcaccatgatcaccggattagatgtgacctcatcggctaaccctatgagtatgaacaccaagaaccaatttgactttaggaccaaaagcatagggggttggtctggatatgtagcagcatatatgggtaaagtgtctgtcactcctcgagaacatgtagctttcttgctaatgtggctagaaaagttcctcttctgtggatccagctgtggtcccacaactaattggcaatttgtagccgaagccctagaatcgaagaaacagtttcctttaggcaaaatcctcctcggctatctataccaaatgctgaataatacatcggccaagatagctgtcggctcagtagttggagcaggtggaccgtggtggctgctgcagacttggctaaatctgatggtcatgaaagttgtcaatcggccatctatgacagaagctgaatttccaaggttggagccgattgtggacgacgatggagaagaacgcactcattgtagatgcatgtcatatggagaatatgcatctacgccagccaatgctggggcaaaactatcggctgaactgctcaaggattggttctgcagcttttatgaaggcttccaaaaagacgcccgggtttggtttccttatgaagactcagaagaccttgagctcccatcggactttagatttgaagatatcaatcatgagagatatcaaaagtctagggaagttttctcagctgcaatcagcccatgcattcttcctgtcggcattcatcagggaagaaacattcaagtctcttatgaactttatcacccgatgagctcagctagacaacttggagtgggccaactcccaatcggcctattcttcgccgataaaatccaatgccgaggggaaatttcatcgaccttaatgatggattggctgctcaatctccaaggacctcctctgggtagtattgaaaatatcgagttggcgggttttaagagcaaaaactttgacagatggtggggcgagtggaaactgcatctattccaccaatcggcttctatgtatatgacagatctctttcccgatgttatacctcagacaacagaatcttcccctccacatcagagcaacagtggtaaagatatccaatatgccctaggtttaattccaaatggaggtggaccatctcctcctgtcatcggctacaatgcccccaagacctcaacccttcttcaagggctcatcagagaaccagccgatgcaggcaagaagagaagaaccaggtcatcagctgcagacacattagctctagccccaaagaagaaggctaaactcaagaagcctaaaccaactgatgatctacctgtcctggacccatctattgagcaagctctggacgaagaagacatcgaagacgatgttgatcaagctgcagccgaagtgagtgatacagaaaaaacaccatcggctttacccaagcagatccctccaactccttctgctccaactcatttttcaaggcctcatcatcctccttctcctcctgtacaacaatcatcaagtgaccgaactccatcggctatgggaagtcaccatattaaggaagaaatacaaccaactgctcctgctatcctagttttagccgatctcttctcttttgacattagagattatgttgatgaggcagaggaagatacttcgagcaaagccctagcccccttatccgatgatgtgaagaaaacgcttgaagatatttctcatcggctagaggcctcctctttagatagcttggtggtcgactgtggatcgattaggacacggttgcatgaagttcaagctctgcttcccgaagaattggccaacgtccttactccagctgcttatctcgaacaacatcaattcaagttagagaaagccaagcaaagactagccgaatgtcgggagcgcaaggagattgaagccataatccaactatctgagggcccgatcaaatctaacattgaccggctcgaggctcgcaagattgaactcttggcacaacttgaagaatgcaacgccgagctagacatagaacataaaaagctgaccgatctcccaaaatctgttgaagaacaaaaggctagattgagatcggccatcaagaatgtcgttgacatgaccaagtccctaaaggttatttttggaaccgatgctcaagacgctcaagccattgaagaagtagaacaaattaggcaaagagctattttggctatccagcgatatttgtctccgtga

SEQ ID NO: 87708 - DNA, 732 bp, Oryza sativa
  Clone ID: PAT_MRT4530_86628C.1
aacaatggcataatctccaatttctcgtcgtcagcaagcaactgcacttgacattgggtcggttagggtataaacacacaagcacacagcacacggtgcgccatagaggccgtgagggagaaggacgaggaagagagattgtggtggtgatgaccgaatctcgaaaacgtggctaaaaacgaaatcgaaagaaaatccatggcgaggcggctcagatctcaccttggccgacccgccctccccttaccggaagccgcggcatcgcctccccaccgcccccacggtccccgatcccccaacgccgatgcgccccgtggcggcgcggacggggggagggatggccccgcgaaggcggagggttccgacgcgcgcggccgccgctcggggagacgcgtccgcgccaagggccggggcctcctcatcgccgccggtgttcccgagatggccgcggtctcgatcgggtggtgcggtcatcggccgccgcgagcaggacggacggagcggcgaggtcgagtactcgccgtcgccggcgccgccgctcgcggtggcctcacactccaataacatcattcctctagcggattcccttcgccctcttttgacgacgccagatctagctctcaactccaatacctccctcttcgccaatgtcggcccatcgtccgctgccgaccctatgccttcgatagcaccgccacctccgcctcgccccacccttatccgcaagtccat

SEQ ID NO: 87709 - DNA, 1881 bp, Oryza sativa
  Clone ID: PAT_MRT4530_86629C.1
atggccttccagttgttaccagccatgatcatagcagcttccttgctgcatgtcgcagcagcagttggcaacgagaccagcagcaacaacaacacaagctgcgcgccggcgagatgcgggaacctgaccatcacgtaccccttctcgctcagcggcgtgcagccgctctactgcggctacccggtgttggacctcacctgcgacaaccgaaccggccacgccttcctcagcaggacgttccgggagcacctgttccgcatcgacaatatattctacgagaatagttcgctggtggcagccgtgcagaccaccttcgccggcgacgccgactgccccatcccggatttcaacacgacgatgggagcttacatctccgatcggtggaacagcacgccgccgtcggggattccagggaactgcatctccgtgagcttgccggtgcgtggtggagatggaatgaagctgttagatcaacactacgagcaattgatcgctgatacgatcggtggtagaactatcattcatggtgatggtggtgggtccattggtggaaatggtaatgggtcaattcaacagtacgagcgattgatcagtgatgggttcgtcttggagtggcagagggcggtaacaagagatccagactgcgacgcatgcagaagaaacggcggggagtgcaggttccaacaacttatgttccagtgcgtcagctgccacgggttgatctgctcgaattcgacatctccatgcgaccaagatgacgactgtgtcaaagccttttctctacttctgagggaactattttcttgcattcatccaccagttgatgaaggatgtctccggaagctggcttggcagccaatgacacttagtcaggaagattggagtaatcggaagctgaatgtcagggcaattttgatagctggcgtggtttttatgtgtctcgtttggataatgcaccgacggaagcaaacacttggttttatcattcaccacaagtacactggaaatgagtcaaatacagaagaggaattaaagagataccagtctctgtctcccaaaaggtacaggtactcagacctgaagaaaataacgaaatgtttcaaggaaaaattaggagaaggtgggtttggtacggcattcaagggtaatctaaaagatggccgtatggttgctgtgaaacttctaaaaggggctaaaggcaatggagaggaattcctaaatgaggttactagtattggtaggacatctcatgtcaacattgttaatttacttggcttttgtttagagagatctaagcgagccctcgtttatgagtacatggctaacggttctttggggaagtatatttattctgagagtttgaggttagctattggattggaaagtttacagaaaatagcaattggcgttgcacgaggattggagtatttgcatcagggttgcagcacccggatcatccatttcgatatcaagcctcacaacgtccttcttgatgaagacttatgtcctaaaattgcagattttggattggcaaaactttgccacctcaaggatagtgccatctcaatggctgaagcaagaggtaccatcggtttcattgcaccagaagtattttcaagaggcttcggagttgtgtcaactaagtcagatgtttacagttatggaatgatgctgttagagatggtagaaggaaggaaaaatgttaaaacaaatactgataattctagtgcatatttccccaactggatttatgatcatttagcgaaagatttgcaaagccatgaagtcacatgcgagaatgaagagattgcgaggaagatcacactagttggcctgtggtgcatacaaactgcccccaggaaatcgtccttcaatgagtaa

SEQ ID NO: 87710 - DNA, 225 bp, Oryza sativa
  Clone ID: PAT_MRT4530_8662C.1
atggcggcctgtgggatcaagccacaacggtcatggtggttcaggttcgcaagaggaggttgcgacggcgtggaccgcaggaggaggttgcagcagcggcaatggctcacagaatcattcaagggctttcaaagtcaactaaaagaattttttttaaagaaaaatcataagcgtggtactaacatgtttgggggagtttctagcagagctccccaaacagtctaa

SEQ ID NO: 87711 - DNA, 252 bp, Oryza sativa
  Clone ID: PAT_MRT4530_86630C.1
gcatgcaagcttgatcagctgtctgagggccagatcaaatctaatattgatcggctcgaggctcacaagattgagctcttggcacagcttgaagaatgcaacgccgagctggatatagaacacaaaaagctagccgacctcccaaagtctatcgaagagcagaaggcaagacttaaatcggctatcaagaatgttgctgatctgaccaagtctttgaaaatcatccctggaaccgatgctcaagacgcctaa

SEQ ID NO: 87712 - DNA, 939 bp, Oryza sativa
  Clone ID: PAT_MRT4530_86631C.1
atggatcggctgctcaatctccaaggacctcctctgggcagtattgaaaatatcgagctggcgggattcaagagcaaaaactttgacagatggtggggcgagtggaaactgcatttattccaccaatcagcttctatgtatatgatagatctttttcctgatgtcatacctctgagaaaaccagccgatgcaggcaagaagagaagaacaaggtcatcggctgcggacacattagctctagcctcaaagaagaaggctaaactcaagaagcctaaaccaactgatgatctgcctgtcctagatccatctattgaacaagctctggatgaagaagacatcgaagatgatgttgatcaagctacagccgaactgcagaagaagaaaactgctataaagaagaaatcagcagcaacaactatcaaaccagctccaccacctcctcctcctccttctcctcctgtacagcaatcatcaagtgaccgaactccatcggctgtggggagtcaccacattgaggaagaaatacaaccagctgctcctgccatcccggcgttagctgatctgttttctttcgacattaaagactatcttgacgaagaaacagaagaagataccaccagcaaatctttacttcccttgtccgatgatatgaagaaaacccttgaagacatctctcatcggctggaagcatcatcactggaaaacttggtggtaaactgtggaccgattaggactcggctacatgagatccaagctctaatcccagatgagctagccgatatccttactccagctgtctatcttgagcaacatcaattcaagctggagaaagccaagctaagactagccgaacgtcgggagcgcaaggatatcgaagccacaatccaagccaatcggcagcttgtgcatgaagagaagtccaagcttgatcagctctga

SEQ ID NO: 87713 - DNA, 2616 bp, Oryza sativa
  Clone ID: PAT_MRT4530_86632C.1
atgtcgtcttccgccagcccgtctgccacgccgttggctgagtacgctgagcatctttccaacctagttgcaattccaagcttgtcgcacgaaaattactactttctcggtccagtcggcaaccctgatcctaccgagttcatcattggtgaaaccaataggattcccttcagattggccaacccagatctaggtcactggaaaaacaccttcaaatcctggccatctctcgagaaaactccacccgagaaaagttggatcacatggttcaagcgcatgtcggctagcaaaagagttcattgggacgaaatcggaatcggccaagcacttgacctaaccatagccaactcacctaaggacgagaccttaatggcagccgcttcttatttttggtccaacaccattaatgccttcttgttcaatcaatggccgatgaccccaactctagtagacatcaccatgatcaccggtttggatgttacctcatcggctaaccccatgagtttgaacacgaagaaccagtatgacttcaggaccaaaagcataggtagttggtcaggctacgtggcagcatatatgggccaaggttcggtaaccccccgagagcatgtagcctttcttctaatgtggctggagaaatttctcttctgtagatcaagctgcggccctacgaccaactggcagtttgtagccgaagccttggaatcaaaaagacaattccccttaggcaagatcctccttggctacttgtaccaaatgatgaacaatgcatcggctaagatagtcgtcggctcagtagttggagcaggtggaccatggtggttattacaatcttggctgaatttaattgtcatgaagtttgtcaatcggccatctataacagaagccgaattcccaagactggagccaatcgtagacgatgatggagaggaacgcacccatcgtaggtgcacatcttatggagaatacgcctccacaccaaccgatgcaggagcaaaactctcggccgaactgctcaaggactggttctgcagcttatctgatggctttctcaaagaaactcgaatttggtttctctatgaagattcagcacttctggaaaatccatcagactttagattcgaggatatcaaccatgaaagataccaaaagtctagagaagtcttttcagctgcaatcagcccatgtatccttcctgtcggcattcatcaaggaagaaatatcaaggtctcttatgagttctatcacccaatgagctcggcagacaattgggaatgggtcagctcccaatcagcttgttcttcgctgataagatccaatgccgaggagaaatctcataaccccgatgatggatcggctgctaaatctccaaggatcccctctaggaagagcaaaacatttgacagatggtggggcgaatggaaactgcacctattgcatcaatcggcctccatgtatatgacagatctctttccagacgttatccctcagacaacagaatcttctcctcctcaccagagcaatagtggtagaaatatcaaatatgctccgggtctaattcctaatggaggcggaccatctccccctgtcatcggctttcatgcccccaagacttcaactcttcttcaaggactcatcagagaaccagccgatgctggcaaaaagaaaaggaccagatcatcgactgtagatgtatcagctcctgctccaaagaagaaggccaaactaaagaagcctacaccaactaatgatttgcctgccctagagccatctattgaacaagctctggatgaagaagaaatcggcgaagatgttgatcaagccacagatgaacctcctcctcctccttctccttttgtacagcaatctccatcagcagtggagagtcaccatattgaggaagaagtacaaccaactgctcctgctatcccagttttagccgatctcttctcttttgacattagagattatcttaatgaggcagaagatgatacttcgagcaaagccctagcccccttatccaatgatgtgaagaaaacgcttaaagatatctctcatcgggtagaggcatcatcactggacaacttggtggtaaactgtgggccgattaggactcggctacatgagatccaagctctaatcccagatgagttagccgatatccttaccccagctgtctatcttgagcagcatcaattcaagctggagaaagctaagctaagactagccgaacgtcgggagcgcaaggacatcaaagccacaatccaagccaatcggcagcttgtgcatgaagataagtccaagcttgatcagctgtttgagggcccaatcaaatctaatattgatcggctcaaggctcgcaagattgagctcttggcacaacttgaagaatgcaacgccgagctggacatggaacataaaaagctagccgatctcccaaagtctgtcgaagagcagaaagcaagactcaaatcggctatcaagaatgttgctgatctgaccaagtctttgaaaatcatccctggaaccgatgctcaagacgcccaagctattgaagaagtagaacaaattaggcaaagggctatatcggctatccagcactatttgtctcggtga

SEQ ID NO: 87714 - DNA, 422 bp, Oryza sativa
  Clone ID: PAT_MRT4530_86633C.1
tttattctattcaggcgcaacgtcttattttatcacttttctacaacatagtggtaaaataagttcattttggtttgtttattcacaatcagttggacctggagctgttctacaaggcccacttgtaaatggaagtagtgatgatgtggccccaaagctgaactgtgaagatgagagttgtcctatggaaatctttcatcctcccgaggattgcaacctgaacacttcattgtcttttaccctacagatatgccgtgttgaagacattgttgtttctggccttgtgcaaggaactgttattaatttcaacagagcaagaaatgtcactgtgagatcatctgggaccattagtgcaacaggattaggctgccgaggtggaattggacgaggaagaatgttaagcagtggccttagtggtgggg

SEQ ID NO: 87715 - DNA, 360 bp, Oryza sativa
  Clone ID: PAT_MRT4530_86634C.1
atggcgatggtggaggcggcgaggagggcgatggggtggtgcggggcgaagaagaagagggagacggcgtcgcggaaggcgccgggggcgtgcccgcggtgcggcggcgcggtggtggccaccgacgtggagagctcccggcggatcctgtgcctcccgctctgcctccgcaacaagaagaaggagtacgttgcttactggaatgttgttttgatccttcctcccgcggcgacggcgacggtggctgcctgtggcgaaggcgacgacaacggcgagggcggcggtccgcggcggctgcctgcggcgaaggtgacggcggctgcccgcggcgaaggcgaagacagcgcgcggcgggcgtag

SEQ ID NO: 87716 - DNA, 972 bp, Oryza sativa
  Clone ID: PAT_MRT4530_86635C.1
cccgtgggcaccacgaaccgccgcgcctcctcgccgacgtacaccgcgaagtaccccttcggcacgccgccgccaccggccgtcggcgacgacgacgacgccatgacaatctatgaagagatgttgaatagtttcatttttcatacaaaagcaacatcttaagctaccattccaattccgtctcgccaaattatccttggttaacacaactcccttaagcaagtaccacataaagatcttaatcttaagcggcatcttaaatttccatgtatatttgtttctctcaatataaccgttgttaattaaagctagatacattgaccttactgagaacctatcattctgatgataattccatctaaaacagtcagaagaaggatttaattgaatatgtacaatagaagcacacaattcatgccaatatacaagattctgaccaactaaagctcttctaaaagaaacattaagcggaacagatcccataacagtggcaatagtggatgatttacttcggactatagcatataaagatggaaatttatccttgaaagccaagttacctagccatttatcttcccaaaatcttatttgttccccatcattcacaatccaagagcctatatctaaaaaagtacttttgactttcataagccctgaccaaaaaagggaatcaccttgtttcttgtccacttgggttatagacttgttataaagatatttccttttcaataagttctgccaaacccctttctcatttattagcttgtacaaccacttactcaaaagacatttattttgtaattccaaattatgaacacccaatccaccctggtctttgggttgacaaattatatcccatctagttagtctatattttttcttatggtcatcccctttccaactactaagtttcctctctattctttgttcaataaccttccaatcattattactcaacttcctaaaatgcat

SEQ ID NO: 87717 - DNA, 444 bp, Oryza sativa
  Clone ID: PAT_MRT4530_86636C.1
acaaaaatacccctccacctttctactgaaaaagtacgaattaccccccccccccaaactatcacggtcgtccgaattacccccctgaaccacaaaaccggacattcttcacccccaactatacaaaccggacgaattacccccctcgacccaatccgcggtggttttggactacgtggcgtacacgtggcagtccatcctatctctctcacacacactctctctctcctctcggcaatggcggaggcagtgagcgccgggaggcgaggcgaggtgagcggcggcggcgaggcagtggaggagcgcctcctctgccaccgctctcgcctcctctgccgctacgcttgcctccttcgtcggagccgagcgcgtgcaggcgtaggtgccaccgccgccgcacgcagccgccttcggccttggctcctcgccctccgcccgcagccg

SEQ ID NO: 87718 - DNA, 753 bp, Oryza sativa
  unsure (1)..(753): unsure at all n locations
  Clone ID: PAT_MRT4530_86637C.1
gtcaatcacaatcatcacagcgagcgatagcaattggggtcgtcgaagtcctcccagtcggcgaagacgatgtcgccccagtcgatcttggcccatccttccttgagctgagcctggatctcggcctctcctcgacctcgcggcggacctccgcctggaactcctcgaagctgtcgcccaactcgttgcaggtggcagccatctcctcacgcatcttgcggtgctccggcgagagcatctccccgtcgtctgggagagggaagggcctcttcttccatgccaggatgtagtccacgtactcctgcggcatgggcagcttcacagacggctgctgctgcttctcgtcaccgccgtctccgtccacggtggtcgccgccaccgccgcgtcgtcggcacagtccactccggtgacaacttcagctgctgcggtggcggcggcaggcgtgttctctgcctcgtcggaagctgccgccttcttcgtcgcagaagcgtccatattttgcgcgtttgtcggtgatcgatcgagcggaatgctgctgctaatcggcaacgacgacatcgtcttcgttntcttgttgcctcgttcctgagcccctctcgatatatatagtgccgctgcgttcggagtcgatcgatcgggagtggggagtacgacaaacccggattggtgcacatcccctttgattgatttattgagagggttgggtgggtttattctaggctttattatcctacttcagtaatatatgaggc

SEQ ID NO: 87719 - DNA, 156 bp, Oryza sativa
  Clone ID: PAT_MRT4530_86638C.1
atggggaattttgtgaaaaaagccgacgaggtcccatgctaccagacatttggagccatgacaagaatcctccccagaccacaggaacgcatggcgacgtttatctatagcttcaatggttccctttgggagcatgtaacgctccgcttctcgtga

SEQ ID NO: 87720 - DNA, 319 bp, Oryza sativa
  Clone ID: PAT_MRT4530_86639C.1
ttttgggggattataaaaaattgggggttttttttttttttttttttttttttttttttttttcatttttttttttttggaaggaacaaaacacaaccccaaacaaaaaacccccccagcgcccacattaaaaagggaaacaacatattttcccccaaaagccacgcaaccgaaaactaaactttagtgagcaactgacaaaatggaatgctggttagacaacacaaactggatcaaccaacgaaaaaatttaccccgcttataaaaagaggttttctgggggcagaataaatccccccaaaaaggaacgcccccaaaa

SEQ ID NO: 87721 - DNA, 471 bp, Oryza sativa
  Clone ID: PAT_MRT4530_8663C.1
cggccgcgtccaaggacgccatcatctccaaggagttccagggcagctccggccgcgcctacctcttcgatcatgtagtgaacatatgcttaggccctaacgaggatcgttatcttataactggactgcacacggtgaatgacatctactgtagctgctgccaacagattcttggctggcgatatgagaaagcctacgaccaaagccagaaatacaaggaagggaagttcattctcgaaagagcaagaatgtggaaggacagctaatgatggtggaatgcttgtcaacagccaaacacggaacttgtatatgttttttttatcagttgccaatattagtagtctagacaaatttgaaatcaatctgccatttgattgatgaacattgaactcaaaagaaaggtagtttgtaccgaatgttatttgacacataatgatagcatcttggttttcagttaccacctgttaaaaa

SEQ ID NO: 87722 - DNA, 873 bp, Oryza sativa
  Clone ID: PAT_MRT4530_86640C.1
tcacggcatgtgacagcaagtcgggtcgtcgtagtcccagtcgccgaacttgatgctcttcaggtcgatcttggcgaattcttcgctgaccagagcctgcagctcatcctcctgctcggtgaagatctcctcggctgcagcaccggtgaccgacttcacgatcgtcgtacccttctcggcctccatgcgcttgatccgctcgattggccgctgcaattcgccttgcctcgccttgcctggagtactctggagatgtctactaagctcgtacggatggttggggattgtggctgtagagcgatcgacagcaattggggtcgtcgaagtcatcccagtcggcgaagacgatgtcgccccagtcgatcttggcccatccttgagctgagcctgtatctcggcctgattggcgaagtagctctcgtcgacctcgtagaaccccttctcctcgacctcgcgccggacctccgcctggaactcctcgaagccgtcgcccaactcgttgcaggtggcggccatccgctcacgcatctcgcgatgctccggcgagaggatctccccgtcgtcggggagagggaagggcctcttcttccatgccaggatgtagtcgacgtactcctgcggcatgtgcagcttgttcacagacggctgctgctgctgcttcgaattctcgtcaccgccgtctccgtccacggtggtcgccgccgccgccgcatcgtcggcatgcacagtccactccggtggcggcttcagctgccgctgccgccaccgttgctgctgctgctgctgcctcgtcggaggcggctgccgctgccctattgaaaaggagggagttcctttctcaattccccatccccatcccaccaaaattctcat

SEQ ID NO: 87723 - DNA, 961 bp, Oryza sativa
  Clone ID: PAT_MRT4530_86641C.1
ttttttttttttttttttttttttttttttttttaagatggggaactgaagcttcttattcctcagttaagatctgcacaacgatgaaagtgcgatacatcttcacattttctctccacacgcattttatgtaccggaacatgtgctctgcaaacaagtgacaacacaccactcgcaaccatagtttccactcgacaaatttcacagctcagagctccaccttcttggcctgctggttctgcccctcgccggcgccgccgatgctcttcttgccaccgtcgtcaccgccggcggaggcgatgccgacgacgcgcgggcccttgatctggtcgggcgccagcttccggaaccggacggtgagcacgccgttgtcgagggaggcggcgatggagtcgaggtcggcgttgtcggggaggcggagctgccgccagaacctgccgtaggaccgctcctcccggtgccagtggtcgccgccgcccttctgctccgtcgtctcctcccgccgccgctcgccgctgatccgcagcacccggttgtcctccacctccacccgcaggtcctccttcctcatccccggcacgtccaccacgacctcgtgcgcgtcgccggtctcccgccagtccacccgcgccatcgacagcatcgccacgtcgtcgcggtcgaacccgaacggcacgtgctccaggatccggaacgggtcggccgccgccaggagccccaactccggcaccgcctcgtcccgcgcgccgccgccgccgaaccacgggagcagcgcgccgtccgccgccgtgctcgccagaacgacggcgatgcaggccagcatcgccgccgccgccgcagttctcatcgacgccatcacggacgttctctcgtcggaatcttagctagcactagcagcgtgtgtgtatgtgtaagtgtgcgttgcgttcgttctcgtcgtgttttgctctgtgcgattttt

SEQ ID NO: 87724 - DNA, 300 bp, Oryza sativa
  Clone ID: PAT_MRT4530_86642C.1
atgaattttcgacttccgtccgatatcgcggcggctgcttcggcctgcgcctgcctctcggctcgatctccggccgtcgcgagcgagtgttggctggccgctttgcgtgaccggcccaggctcccagcgatagctccatgcattgggaggtgtataacaagggctgttgcagccaacatcgatggaaaggcaaagcagcttttacaccttttagcgggctcccggcgcaagaacggcgtgtcgctcgaggacaaccccgcgggcgggctgattctagaatcgtttcgctcttggttttga

SEQ ID NO: 87725 - DNA, 852 bp, Oryza sativa
  Clone ID: PAT_MRT4530_86644C.1
atgggcaccccgcaggaccgtgcgcctacccctgatgagaacgatcaggcgctgcacttcctgcgacaccacctctacgccacgctcaagaatgagtacatgggattgcggagcccaatcactctctggaccgcactcaagaagcggttcgagaagttgaagtacaccatcctaccccaagcagagcaggactgggctcgcctgaggttcgccgacttcaagagcgtcgccgagtacaactccgcactgcatcagatctgtaccaacctctccctctgtggcaaggttgtcacggacgaggagatgattgagaagacgctctccaccttccaccctagcgccatgcaaagcgctcgtaactacaggcaggcgtcatacaaggagtatgacgagatgatcgatatcatgcaggtgtctgagtctcatgaagaggttctccgcaagaactttgtctcccagccacctggcaagagtgttggccttgaagtcaatgctagcagttacaaggtccgcaagcccgtccagaggaagaggggcaagtgtggtgagaagaaggcaaccgagaagtcagagggaaaagctcctcctacccagggagcacagggaggcaagggcaagaaggaagccaagccacctcgcaatgacaagccatatggccagcaggaccagacatgctacaagtgtggcatttggggccactggagttgtatttgcgaggagcccccgcacgtcgtcgacgcataccaggccagcaggaaggccaaggcatccacagaagcacacatggttgatgctcacactacggccactccccaaccactactccacttgacgcccctgcagctgcagtag

SEQ ID NO: 87726 - DNA, 424 bp, Oryza sativa
  Clone ID: PAT_MRT4530_86645C.1
gccacacatgctaaacaatcagtggggggagagacagtcttgtcaacatctcatgctggacgcgctactaatctcacttccaggcctttattagctttcaaccgattgtgcttcaactactactgaagcaggtcggcattcgactacgtttactcatactcaacctcaaactcaaactgtggggggggtgaaccttccatccatatgtggtgtttatactaactactacattatatacctggtgcattcccaccgatagaatagtatgtgtctgaattggaatactcttatggcatacatacacatataaaagtcatgtataatcattcccatcatacaaaactatatatcttatagattttactgacttaatctattatattttcactggggccttttatggatacctcaagagctttttacc

SEQ ID NO: 87727 - DNA, 215 bp, Oryza sativa
  Clone ID: PAT_MRT4530_86646C.1
cccagttgaattataaattttcatgtgcttcagtcattcacatgttagccttcaacttgctggattgaaatagaatggagatatggatagtgactatagcatgggaaatgtacctccctgctatttaaagtactaaataattggatctagatttcaggggcgctgtagtttcagtttctctaagacaaaatggaaatggaaattgatttcaatgc

SEQ ID NO: 87728 - DNA, 359 bp, Oryza sativa
  Clone ID: PAT_MRT4530_86647C.1
gaaataacccacgtaagacagcgcgaagggggcatataacatgaaaaattactacatctgtctcagaataaattaatctaatacaagttatatcctaataccacgaatctagatagatgcctatcaagttaaagtcatgtactaaaatgacttattcagagacggaggtagtacacgattacaattctactccctccttcccataatataagggattttgagtttttgcttgcaccgtttgaccactcgtcttatttaaaaaatttgtgcaaatacaaaaaacgaaaagttgtacttaaagtactttggataataaagtaagtcacaagaaatataaataataatttccaaattttttt

SEQ ID NO: 87729 - DNA, 1290 bp, Oryza sativa
  Clone ID: PAT_MRT4530_86648C.1
atgtcgacgtcccgtcaatcgatcgacatcaacggccaccgccgccagccgattctcctggacacgaacgtcctcatcaccgacgccatgaacgacgacaccgtcgccaccctcacatccagcagaggccacaccatcaaggtatcttcctggatctcccaacctccggcaatctcctacctatcgttccactgccactactcctcccaccctaggtacaacaacttcgacgaactcgatgccaaaattgtcggagcagaaggctcgttcatcctcctcactgctctcgcaagccctcgcggcagcgagagatacgactatttgatgtataagctacatggctatggtgacaatggcgagtcgtggtcgtcgtcgctggagcaggttccacttcctcatgtttatcctctaccggtaatcgaggagttcggtatcgtcccaaatggtggtaaacatttcgatctagctgctctcgtcgtcgattatcggtcaccgatgaagtgttcgtattcgatgcacatctattcatccaaggacactaactggagagtcattccgatggtcgatccgtacccggaggttaggaaggttattgcaaccaaggtgatcacgatcgcggaaggtgtgctgggatgggttgatctcgatcacggcgtgatggtttgcgacctgcgtgaagatgtccccggtttacgctacgttcctctacccgcgccgctgcctcagaactggtacagattgaaggagtttctcccaggaactttggctaagtcgttccgtgatctcgtgtgcgtcgacggtgtgatgagcttcgtcgagatggaacaccgtgtgatcgtaacaactgagaagccaagtgatcccagcaaaatgcaagttctttacgacactgacctgatagtgtcatataacctcaaagatttgaacaagaaaccccagcagctgcagagaaaggatggttggaggattgtgtcatggagtcggcatgtttcgtccaactgttgggaaaaaggttgtgaggttgatgctgttgacatatcagggttaagtccaaatcttgcagagaatttagcttctccaaccctgggtgtggatgatggtgatgttgtgtacatgagatctaaggctagcttgggtaagggaaagatggtagctattgatcttagaaggaagaaagtgaaggcaattggaccgtattcctttgaaaagcatgatcctttttctttgaaagctttctcgacatgcttattgcctccagatgattggagaaaacgatcaaagtataagtaa

SEQ ID NO: 87730 - DNA, 486 bp, Oryza sativa
  Clone ID: PAT_MRT4530_86649C.1
atgtcgtactacgtgagccaccacggctcccgggacagcccagatcgtgtgtcagatagtatggacctgcgcagctgtgagaccggtcaggttcttaaatggcgtgacggatggatcctcggcttcgtcaatcggccaggccggcagggaaagcccacacggccacacgcatctcgtgacggaaagccagccactgggcggagcaaaggacagccacagcccgaaaggcgagggcaaacgactcacgccgcaacgaacgagaaccgcgcggcgtgccgcggcaagttgcgcatgacacgccaaagcttagccagccgaatatcccgcgccgctgtgcggcctcggctcatgcgttccgtcttcatccccccgggcacaagacagcaccaacagtctgtcacaagcgaccaagagggtaggcactgtcgcgaaaaggcgctagcgtccagtgaaccaccagtactgatggcgctggtgcacgactga

SEQ ID NO: 87731 - DNA, 1689 bp, Oryza sativa
  Clone ID: PAT_MRT4530_8664C.1
atggcctctgctgcgtccagtctccctctgctggtttcgtctcttctgcttgcccttttcgccctcggtgcacatgccgatgtcaagagataccaatttgatattgtgatgagcaacgtgagcagattgtgccacgagaaagccatggtgacggtgaacgggagctacccggggccgaccatctacgcgcgcgaaggagaccgggtcatcgtcaacgtgaccaaccacgtgaagcacaacatgacgatccactggcacgggctgaagcagcggcggaacgggtgggcggacgggccggcgtacgtgacgcagtgcccgatcggcagcggcgggagctacgtgtacgacttcaacgtgacgaggcagcgcggcacgctgtggtggcacgcgcacatcgcgtggatgcgcgccaccgtgcacggcgccatcgtcatcctccccgcggccggcgtcccctacccgttccccaagcccgacgacgaggccgagatcgtcctcggcgagtggtggcacgcggacgtggagactgtggagaggcagggcagcatgctcggcatggcgcccaacatgtcggatgcgcacaccatcaacggcaagcccggcccgctcgtcccgttctgctccgagaaacatacctacgcgttgcaggtgcagagcggcaagacgtacctcctccggatcatcaacgctgcagtcaacgacgagctcttcttctcgatcgccggccacaacatgacggtggtcgagatcgacgcgacctacaccaagccgttcgccgcgtccaccgtccagctctccccggggcagaccatgaacgtgctcgtcagtgccgaccagagtcccggccggtacttcatggtcgccaagcccttcaacgacgtgcccatccccgccgacaacaagacggccaccgccatcctccagtacgccggcgtcccgacctccgtcgtcccggcgctgccccagacgatgccggccacgaacagcaccggctccgtggccgcgttccacgacaagctgcggagcctcaactcgccgcggtacccggctgacgtgccgctcgccgtcgaccggcacctgctctacaccatcgggctcaacatcgacccgtgcgagacgtgcctgaacaggtcgcgcctcgcggcgtcgctgaacaacatcaccttcgtgatgccgcggacggcgctgctgcaggcgcactactacggccagaagggcgtgttcgccgccgacttcccggaccgcccgccggcgcggttcaactacacgggcgtgccgctcaccgccggcctcggcacgtcgctcggcacgaggctgagcaagatcgcgtacaacgccaccgtggagctggtgctgcaggacaccaacctcctgtccgtcgagtcgcacccgttccacctccacggctacaacttcttcgtcgtcgggagaggcgtcggcaacttcgacccggccaaggaccccgccaagtacaacctcgtcgacccgccggagaggaacaccgtcggcgtgcccgccggaggctggaccgcgatcaggttcagagcagacaacccaggtgtttggttcttgcattgccaccttgaggtgcacacgagctggggcttaaaaatggcgtttttagtggaggacgggagcggtcctgatgagtcggttttgccaccgcccaaggatctgcccaagtgctga

SEQ ID NO: 87732 - DNA, 527 bp, Oryza sativa
  Clone ID: PAT_MRT4530_86650C.1
ctacggttgagccgcgagcgcttcatcttcttctctcagtgaacgccgccgcctctcgccgcgaacgccggcgccgcctcctcctctcaccgcatccgtcggagccgccgccttcagacggatccaccgacgccgcctccgtttctccccggtgcaagtgcaaatgtcttccctgccgctggcgccgcctcccttcttccccagtgccggctcctcctcccttcctccaccaccgccgccgaggatctcaggttcgtgcttcaccgtgtgggcacatccttctgctagcccctctccccgctgctgttcgtgtggcaagatttgctgccactgttgctccgtccggctagcatcctccaagtcctgcaaggaccttgagggcatcgacatcatcttctattaactcatcctagaaccgtccaggtatatcaaatttcatcctttgcacaatcattattccctttcttgcttactttcttgcagtagttgtaatggatagaatatgaagtatatatatcatgtgattt

SEQ ID NO: 87733 - DNA, 2493 bp, Oryza sativa
  Clone ID: PAT_MRT4530_86651C.1
ggagagagagagagagagaactagtctcgattttttttttttttttttcaaactctagcttttcatataatacattgcatatcgaagctcagttgtagcacattgaacatataaaataaatgtctacagcccacctaaaatgaaaccaatttttacatacactacacagctgattaaatatcaacatgtccccacagaagtttctatatgaatggttatggtgatagggacaataacataataacagaagggaagacatttgataagtaggaaatgtcccaattacgcacattgtcccccaccatcttctgttcaccttcaccatgagaactatagaagagcctatgttcatatgccaccaatattctcatcacaggttcattattgggcctcacgtccagtgtggagcaatttgctgactggccgaaaatgaatcattgttacatatcccattattgcataaatagtagaaccaaccatttggttcttcaaccaaagctatttcactgtagaagcactccgataaaagcctgtcatcgcactggtaatcttgtcatttgtgtgcctgatttggaagctcccagccctcctgggccggggaatgaagagcgcactgagcatcttctccaaaccatcaactgtgtactttacatacttgctagcactaacatcctgctccaccagtggcccatagttctgcatataactccggtaagcaggaacaattgcctgaaccacaagaccacatgtcttctccctcaagtccttctctggtataacccatgcagattgtttacggaacatctcatcaaagctcgcattgaatgttttaaggcgctgcttcaccaggtcctttgccgtggcccggcccttggagaacaagattagcccctcccggttgagcagcggtgaaaccaccccccaactatccctcataaacaccgtcagatagtagtccttaaactgttcatgctcttgcagccacgcatcacccaaaagctcgcctaacctagtagccttcaagttcttaaagaaatgccagtgtgtgttcatcatgaagagatatgacagtgtcacattgtcatatgcctttgaccagacatcaaaattagcttcaagggccttgacgatgttaagcaccgcgttaacaagcatcttgtcactgaatgtctctttgcgccaactgcgatggatggtgagaacttgcgcaagcacaggcctgtacttctcactaaggaggcgattgcagtactcaaccacaaagctaactagtcgcggcacacccccatcaggtgggggaggcatgtgccgctgcagctccacctgcacaagcaactcctcaaagatctcaacagcaccatccactaacaacttcacaaggtcccttgtttggttctgaatctctacacacgccttctttccaccaaacaaccggttgaagtccaaccttagcttattcaaagaatcaaacacctccagcaaacgcaggagcttaatggggtccttcttcgcatcagcagccgcacgaccaaagctcaagaaatcaagaatgccggcgtgcgctgcaacatcagcgaagcacgctgatgcgtcatccttgcgctgcccaaacaccttgttgcagagctgtcgctcggactcaagaaggcagcgcaccacaaactccaaatgccgcccccacaactcaactccagggcccaacgcctgcgcgacgtcgaccgggtttcgcaagtaatcgaggccaagggcacggaggctggcactcaccacgcctccgcgggcatcagcatacacggacaaacaacggtcctgcctgccattggcaatgaggcggtcaagaatcaggctgagcttgtgaacggtcgcggccgggatgagagacggcgcggcagtagatgcagaggttgtgttcagctgctgcatcgcgagcgggagcggtgcagagtggtcggcgagaaggcggcggaactctgcctcgagcatgtccagagcggccgccaggaggccaccgtcgaggtcaccggaaggtttcttgagcccctcgagggtgacggcgaggtcggcgaggaaccttgggtcagcgaggtcatggtcgccgaggtactcgacgatgtccgcaagccactgcgcggcgaggccggagttatcggagaggaacctgagggcctcctcgaggcggccgagcacggcgaggtaacccgcgaggtccccggcgacggcgcccgcggcgaggagcggcggctcgaggccgtgcacggcgtcgaacaccttgagcacggccgcggcggggccgacggcgcggtcgatgtggggccccgccgcggccagctcggcccgcggcgcacggatcgggcgcacggcggcctccagcgccggcagcgcgagctggatctcctccacccgcggccccgcccgcgccagcgcctgccccagcgcccgcgacttctccaccccggcacgcagcgaccgcgccgccgccgccacgctctccat

SEQ ID NO: 87734 - DNA, 324 bp, Oryza sativa
  Clone ID: PAT_MRT4530_86652C.1
gaaaatggttacaggggggcccaacgaaaccaaaacaaaattccccagattatgttttacttttggaggcccaaaactttggaactgccgggtggtgcccaacccaggggatgggcaaccaccataaggggaagtatgggatctttttgactaaccaggggaagaacattttcaagccccacaaccgggggtttgggaaaataaccctttaaaaaaaatggggccacccaacaaagggggggtttaaccttcaaaagctacaccggcccaagaggttagctctgggctttggggcccccccctgggggataggaacagaaaaac

SEQ ID NO: 87735 - DNA, 195 bp, Oryza sativa
  Clone ID: PAT_MRT4530_86653C.1
atgggtgcgagatggatgatgagatttggggcgaggacggcagcgagtgaagaggagattggtgcggtggatgtgcggaagatctatgcaagagcactaagcttcgagaagggtggaatgcccttcacagtctttgactttagtactcgggagaccaaggcagaagaagttgaaacactcggattatcgttttga

SEQ ID NO: 87736 - DNA, 350 bp, Oryza sativa
  Clone ID: PAT_MRT4530_86654C.1
cggaaagactctggctggtaattcggaaaaaagattttacaacaagagaaacaggacgaggtcaaaaagtcttttccatggatggccgtgcataatcaaatatcgagcgcttaaaaagaacaaccacagagggcctagtgctccacagaccgaagccataatcatcccccaagatgaaaaaaaatacaatgggacgcaagatctattaaaccgcgagatggagaaacccccttagaaacagttctaatcgggccaaaagtcataaggacccaccagtaattacttacaacctggagtcaaggatttatggatggatatcctacaacggatacaccttgaatctttattac

SEQ ID NO: 87737 - DNA, 408 bp, Oryza sativa
  unsure (1)..(408): unsure at all n locations
  Clone ID: PAT_MRT4530_86655C.1
gancgcattcataattaaatctcgcagcaaaaaaacagcatatcccccgtgcaaatagcggcacacagaaaatatattccaaattttaccctccccttcaccacaaacagacacacttggccctatttaaaccaaaaacagcagagtcctcggccactctaaccacccaaacccaccggcatgtttccttaatcacacaggcccccaagtttatacccaactacacccagtctaacacacacaccacctgaatactgccgaagataaacgcctgccatgttgcataagcactccttctacggccaatccccagagcgtggctagcgggcacgcaattgagggccaagctaaccccctcgtactggaatctgaaccgggcgtggacactcctggcgccgtaccaccttc

SEQ ID NO: 87738 - DNA, 102 bp, Oryza sativa
  Clone ID: PAT_MRT4530_86656C.1
atggctagccgcacacctcacccttggtcgcccggatcatatctcctagaagcccgtgggcatgaatcaaccgaggcacacaatgacaatattgataataga

SEQ ID NO: 87739 - DNA, 207 bp, Oryza sativa
  Clone ID: PAT_MRT4530_86657C.1
atgaaggtcacctttgacgggtcctacaagataccgtcatcggtgagccatccggctatgacccgtcacaggtctgtgacgggtctcaattcagacccctcacaggtgacttatgtcatcagtgaccattggtctgtgaccacacgctttatccgtcacagggtgtacttaacaacaaaaatggacatggatcccactcaaatttaa

SEQ ID NO: 87740 - DNA, 1166 bp, Oryza sativa
  Clone ID: PAT_MRT4530_86658C.1
ctatggaggtggttcctaatctcgaagaaaaggatgttgttgcttagagttttttccaattaatggattcaccgttttgagttatctatatttaaacataaatgatgtgaccagaactcgaaactctaaatggactaaacgcgagcaacgaaagctctgataccacctgatgaaccctgagttcctctcaacactcaaggctgttgttggcccgatctttcagtgagttgtagataagagacgttgtgttgcaccttagcggtcgatacacctctccgagggttgttgatcctgccggtgcaaatcaaccttattcctgcaagcaaatcgaagaaacaagcaagaacaagggtcatgctccacctggttgaggcgcaccccacttgggccccacttgggccagggtcccaaatgaagctacaagcccataggcccattacaggtggcgcagcaccttggtctatcaattgcggctcactgtgatggaatttcgcaatgaggctggatccgttggaaagaggactccgatagctttccatgaagtatgcacgggccgaaaacggagctcgtatgcagatttggcggccgtttgaaatcagtagtgcagcaggtggccgaatcggattccagcacttgatctcgatatcttcttgttcatccatgatatgagctatggatgcatctgtggttgctatggtcacatcaataaatgtagtcttagcgaacaaaatgatgtatttaggagcatttgtaggagtgccacgtgacgttttaggagcatttatagggtgtttaatggacttttagtatataatagataatagatagataacataagaaatgatcccgaatccttactttatagaagaagactctccgaacccggagtagagtgtaccgacagctccggtactactctagaattactcatagaaagaaagctacactcgtcgaggtagaagtcggagagagcgccaaacttccgggcactcctccagagtttctcctcactctctacctattttctaatgtacaaaagatacaatagagcctcttgtaattcagctcaaagttgtgtgttttggaacgagagcctctcctccttttataggctccagatggcagttatagccatgggaaatgacaaaaatacccttcaaccatca

SEQ ID NO: 87741 - DNA, 354 bp, Oryza sativa
  Clone ID: PAT_MRT4530_86659C.1
taaccccaagggcttggagtactacaacaatctgatagacgaattgataatgcatggaatacaacctcatgtcaccatctaccattttgatctccctcaggcccttcaggatgaagaagattactcggcttatgccgaggtgtgcttcaagaacttcggtgacagggtgaagcactgggccacctttaaccagccgaacatcgagcccatcggcggcttcgacgccggcgaccggccgccgcggcggtgctcctaccccttcggcaccaactgcaccggcggcgactcctcgacggagccgtacatcgtggctcaccacctgctgctcgctcatgcctcggcagtgtccatcta

SEQ ID NO: 87742 - DNA, 420 bp, Oryza sativa
  Clone ID: PAT_MRT4530_8665C.1
atggggctctcacatgccaggtccgggaagagatgcaacgatttcaaggtgggaggtgagttgagttgccggggccagaaggcaacgtttgaaccgcgggggggtgggtccggagtccggacgctgcgatctgaccctgggccggagacttctcgcgccaaacaaaccacgagctcgggctccgccaccgaaatggcgtcccacggtgagccgagccttgccctcgccaactctaccctccgaagctggagtgacaggcccgcgctaccagacccggcgaccgagtcggggatgtggccggatttatcgcgcgcgcattccgcgcgaaatggcgaggtgggactaaagagtcgccgatcgatccgctacctgaggaaggaagaaacaagcacacacagggtcccgtccccgtcgtcgtcc

SEQ ID NO: 87743 - DNA, 296 bp, Oryza sativa
  Clone ID: PAT_MRT4530_86660C.1
ggcatcctcgaacaaaggcggagtatagaggggcgatcatgctccacccgttcttggtcgggagcacggcaatagacggcgagtccgacgagccggtctacatagcctcgaaggagcactggctggtgccgagggaccgcgcgtactacggctccgtggccaccagcgcgtggcgcgggagctcggcgtggcacgatacggagggagaggggcacgtcttcttccttcgcgatccggggtgcgacaaggccaagcagctcatggaccgcgtcgtggcgttcatagccagcgcatga

SEQ ID NO: 87744 - DNA, 597 bp, Oryza sativa
  Clone ID: PAT_MRT4530_86661C.1
ctttcatattccattgtcatccacactgtctatgtaccctcaaagagaatatatatgcactgtattagctacctacaagctatatcatccacaagtgtcaacctcattcttgaagcaccaaaacaacgcttcagtagatcttaacaaagtacaaactcattatctacctggaggctggagggaatctcccttgtgccactgggaatatgcccttgaattttgtttctcccatttatggtactatttccaaatcttatgccaaaacatgctgtggacattggccatgctgtactgaggaacgcaatgatgatttatgcccccatcctgtattagacaaacttaacgacatactctgttcttcactcatgatggtggtagctcatcataaatttctttttgtcagcacatatgtgttaccactgaaggaggcaggcgtttctgtgttggaagacctgtgtttaaagccgaggtatttcctgcttaacatcagagagatgtaaacatcgagagctcacgtttgcttgtctctcaatgaacttattttttcttgcatagtagcagcaaaatccatgccattttctctccagatatagggaa

SEQ ID NO: 87745 - DNA, 1927 bp, Oryza sativa
  Clone ID: PAT_MRT4530_86662C.1
cggacgcgtgggcggccggggcacgagctctcgtgccctcgcccttcatcgtcgtcgtcttcctcctgctcgccgccgcggcgagagacgcttccgcgctcacccggcatgacttccccgagggcttcgtcttcggcgcaggcacctccgctttccaggtggaaggggcagctgcagaggatgggaggaagcctagcatctgggatactttcacccatcaagggtactcgcctggcggtgccattgcagatgtctcagcagatcaatatcaccattacaaggaggatgtaaagcttatgtatgacatgggcctggatgcgtacagattctccattgcttggcctcgtcttattccagatggaagaggagagatcaaccccaagggcttggaatactacaacaatctgatagacgaattgataatgcacggaatacaacctcatgtcaccatctaccactttgatctccctcaggcccttcaggatgagtacggtggaatactcagccccagattcatagaagattacacggcttatgccgaggtttgcttcaagaacttcggtgacaggggtaagcactgggtgacagtgaatgagccgaacatagagcccatcggcggctacgacgccggcgttcagccgccgcggcggtgctcctaccccttcggcaccaactgcaccggcggcgactcctcgacggagccgtacatcgtggctcaccacctgctgcttgctcatgcctcggcagtgtccatctacagacagaagtatcaggcaattcaaggaggtcagatagggatcactctgctgggctggtggtatgagccctacaccgacgcggtggcagatgcagctgctgcaatcaggatgaatgaattccatattggatggtttatgaatcctctggtgcatggagactaccctccggtaatgaggagccgcgtaggcgctcggttgccatccataacggcgtccgattcggagaaaatacggggatcgttcgacttcatcggcatcaaccattacttcgttatctttgtgcaatccagcgacgcaaatcatgaccagaaactaagggactactacgttgatgcaggtgttcaagagaatggtggaggaggattcgacaaggagcactatcagcttcatccctgggctcttggcaagatgctacatcacctgaagctcaagtatggcaaccccccagtcatgatccacgagaatggcgacgcagattcaccggagaccccgggcaagatcgactacgacgacgactttagatcggatttcttgcagagctacctggaagttctgcacctgtccatacggaacggatcgaacacgcggggatacttcgtgtggtcactgctcgacgggttcgagttcctctccggctacggcaaccgctttggcctgtgctgcgtcgacttcaccgcgccggcgaggacgaggtacgtcaggagctcggcacggtggtactccgacttcctcaacggcggcgagctccggccggtgaaacccttcgtcgcattatgaatcgggaagatattaatccggagacgtagactagaagatgagcaacttactactctctccgtcccaaaaaagccaatcctctcccagtacaacgattctgaattatactaggaggggtcacatttttaggttgggttttttttttaaaaaaagtatgcagttaatattttttttctttttactatatacgaaagtggaaggttccaaccctccacgcaatagccaaaaataataaaagcgacatcgtcttctagaaggaggccagagaatgtgtatggatgtaaatggaaaaatcggacagaatcacgaacagaggagatcagaaacacctggaattcagaaaaaatggtgagagttggcgaccaatttgagttgctgtactcctttgtgcc

SEQ ID NO: 87746 - DNA, 898 bp, Oryza sativa
  Clone ID: PAT_MRT4530_86663C.1
aaatcttgctcctctaactatttcatattatgtttttttttaaccagcgtgctttgtgttgtgatcttatccgcatctactaagctccagcctccagacgctgtcgccagcatagtcgccagatccatcgccagccgaggttgccgtccgctaccgtcgtctccgaggtcagcccgagcggcggtggcggcggatggggatggggcggcggcggcggagaggaccaactctcacctgctggcggcgatgggcacggcgacggcggtcggatcagggcggcggtcggcgcggcgacggtggagggcggtgatgcggaggaggcgggagcaagggggcgccggaaggagtcgatgcggggcgacggttggcggaggcagccacggcacaatgacggcgacggcgaggtggcgacccggccggacagggacggagtgaggaggcggcttcggggcctgcgacccgtgctagggagggaggcggcctcgtgggcggcgggaacggcggtagggattgcggcggtggcggcgacggcggcggcggaggcggcggacggcggtagggacggcggcgggcggcagcagggatggcgccggcgccaggccgccagtgggaggaggaggatcgcggactacctcaacgacggcgaggagctcgggatcgaggggtcgccggcggtgacgccgcggtcccccgcgctcgcggcggcgaggtcgctgctgccgaggtttaggtgggcccgggcggcgagtaggattgggaggaaggggaaggcggagaaggagggggtggtggtggtggaggaggagattgcggtggaggcggatccggcggtggtgcgggttggtgcgggttagggatccgttggtcgtgggggcgcggtgcggcctcccgtcgttgg

SEQ ID NO: 87747 - DNA, 555 bp, Oryza sativa
  Clone ID: PAT_MRT4530_86664C.1
ttgtgggtatttatagatgcaattttaaaagtatgccacttaggaatcaacactcaggcgcatgcttctcaaaaaccaggtcagagttaaaatgatgattttcaccctctattaaaagtttattggttattcccgagcgtaggaaaggcttatggcagagtaaactgattttgacatttggtttctatactctggtcatgacttccaaattaacaaactatggtcattgtcattgttatgtttcgtgatattaagagagttccacaggcatttgcctatgctctaaaaaccataatgtcaatcatgctcagccataatgctagcaactaaaaacaattcctaagctgacagtagtactgctgggtggcgaaggtctcattgatcactgatggctttagaaagcccctatgccgccgaacaagtataaagagctccttactgtaagcctgaacaagtataaagaactccttactaagactaattgtcgtagtatattatttcttggaggtgatcaatactaggtgatatgtatggaaggacgtgtacactgttatg

SEQ ID NO: 87748 - DNA, 2307 bp, Oryza sativa
  Clone ID: PAT_MRT4530_86665C.1
atggctgataatagggaccctgtgtgggagcacggggagagcataggaaatggatttcattgtaaatattgccatcagcaaaagagcggtggtagggcaactagacttaaaattcatttggctggaaagggaaaggggacaacatattgcaattcagtgcctccagatgtccgtgacttgttcaagcgcgagttggacaggataaaagctgccggtgctaggcgtaagagtgaaaagtcaaccagggttgaagcggcaagggtcatctatcatgacctcacaggtgatgccgacgaggaggaacaaatggaacaggccatggaagcatcacggcgagagcaagactttagaagggatgtggaggagcgaggtggcacatatgagcatggcgatggaagtggatccgctcagcctgaggcaaggagaggtaaaagtaacccaattgccaatttgctacgaagggctacatctcagagggagtcaccttttttgagagattacaatctagcagttgccaaggcccctgtgcagacacgcattgagacagggttcttcacaaagaagggaaagcaggctagggaggccattggtgagtcacgggcaaggtttttcttcacctccggaattgctgcaagaaatgccgataatccttactttgtcagcgtcgtgagagagacacagaagtggggtgaaaacataccttctccatcaagtagggagatagatggtaaataccttgattctacggagaaggacgtgaagaaacaatttgagaggttcaagcacgactgggatgattatggtgttactttgatgtgtgattcgtggactagaccgaccggtatggccatcatcaactttttgatatactgtaatggaataatgttctttcataagtccattgatgcgacaggccaaagccaggatgctcaatttgtacttaaggagatcaggaaggtggtatgcaaagtaggccatcaacatgtcatgcaaattatcactaataatgggtccaactataagaaggcctgcaaactgcttatgcaagagtaccgagctattatgtggcaaccttgcgtagctcacacaattaacttgatgcttaaggaggttggaaagatggcagaccatgatatggtgattgctagtggtagaaaaatttgcagatggctatacaatcattcgaagctgcattctatgatggtctcagcgataggtggtgaattggttaagtggaatgctacgcggtttggcaccaattgcatgttccttcagagtttcctaaaggaagcgatatcagttcatgcagtggatggcttcctctacattcatgcaaaggataagtacaacgcttatatggatattgtggacagaaggatgcacgacctcaccactaaaacactcatcaatgcaacacaatggtggtctatgttcgcctcagacacaccgaacttgaagaagcttgcgttacatttggttggacaatgttgctcctcaaatggatgtgaacgtaattggagcacgtttgcattcatacatacaaagctccgtaataaacttacacacaagaaactcaacaagcttgtgtatgtcaactacaaccttcagcttcgcatacaacaagcaaatgcacaaattaggaaggaagatgacgatccccttcagaggctagcggatctttcattttatgacatgaacaatcaaattaaagactggatggacaatgcttggtctaatgcttgccctgaacttgatgaagactcgaccgagagtgacgcccctgtgcctagtccactagtagccgacctagtggacttgacagacatctgcagggccactggggcttctagtgttgctgagtgggctgaaaagaacgtaggcgacaatcatattgggaagaggaagactcgacagcggccaaaagcacctgcagccaaaaaaacaaagggcaaagctacaactacacggttgaggagtgtcgatagtgatgccgacgctgaaggaagcccggaataccaagagtccgatgacagtagctccagatggatacagatgatggagatgacggtggtcaaggaggccaaggaggccaaggcaccactgatgtgccttctaggggtcacacacctcagtgaggccgactttactcacgctactcaagaccaggatgatggtgctccaacctcacaaagaactactattaatccgataggccgccaacaacaacaacagtttgacacgccccaggatagctacagctctttcagtgcctctagcattgaaagtggctatcaaacctatgtgtaa

SEQ ID NO: 87749 - DNA, 750 bp, Oryza sativa
  Clone ID: PAT_MRT4530_86666C.1
cccacgcgtccgataattcacaattattagaattgtagcgaagatgtcccattggggccatagaccagcaagggccaagcaccatagagttccatctctaattccggaggacttcgctgttgtagacttcaaggaggagactatagtgtcccgtggagaaaacacaacgggaagacaaccacttagggaggaaccacagaagatgacagtgatggaggaatcacacaatattcacaatcaggccaagcatcagtgctctaaggagctaagcgatgaagaggactctgagaagggtgaaagtagtggtcaaaagaatggtgatgataaaaaggattccaaaaagcatggtagcaatggtgaaaaacgagtatgataattgaaggtatatatgcagtgaagatgtatggatcctatgaaactagcaataaatggaataagcatgcatggcttgcttaatagtaattataaccatatgtggaaatggatatttgaattccagtagttattgtaagtatttttagtttcttctatgaaagttatgtattataattttattaatacctactcccttcattccaaataaaccacctactaagcatgtgacacatcctagtaccaggttggtttattttgggacggagggaataccatcttgctatcttgtcatatcatcagtggctttattgtctatacatttgagtcaagcataatgcttagcaaatggttaatttggataaaaaaaaaaaaaaa

SEQ ID NO: 87750 - DNA, 330 bp, Oryza sativa
  Clone ID: PAT_MRT4530_86667C.1
ttttggggttttttaaaaaattgggttttccgtctcgcgggcctccctttgggaggcctgctacgccaaaagcgagaaaaactccatccgttagcttttgacatcctaatgccgacccaccacacggggggggccatggcacacgtcaaaaaggggatcctatcactgtcaactaatttgatccgacctaggataataagcttatgaggttgcccttacttaaccctaaaccaatgaagtacttccatatctaagtacagcttcagacctagctgcatttttttggcgcgctaatcagagtcatactaaaatgcccaaaaggcctaagcg

SEQ ID NO: 87751 - DNA, 588 bp, Oryza sativa
  Clone ID: PAT_MRT4530_86668C.1
tccatatatatcatgtgtgcacacatatgactcttgcagatacgtggaggtgaacgagagtacgggcgtgcgtctcttctactactttgtccagtcagagaaggatcctgatgtagacccacttttattgtggctatcaggtgggcctggctgttctagtctctctggcctaacccacgagatagtccaattcgccgcaaaacggtattacagtggaggattgccgaaaattatctatcaaccagagacttggactaaggtgagcaacataatttttgtggattctcccgtaggggcaggattctcatacgcggcaacacaggaaggctccaagactagcgataccaagacagtgaaacagcttgttattttcctcagaaagcagtttagatatcattttaaatttaataataccaaaacatataaataagagatatcaagttgtactttgattgtgcctcgattatctattcttgtagttaacgtgagagcttcctcagagcgcccgattagcatagactagtcgccaatccgtgcacgggctatttatttatacataacatgaatataaaatatttgacatacata

SEQ ID NO: 87752 - DNA, 741 bp, Oryza sativa
  Clone ID: PAT_MRT4530_86669C.1
gctcctggcctcggaagccctgcaggcgatttgcgccgccgggccgacgccgccgtcgcgcgccgcccgtgctcaagccgcatcgccccgccgccggtccggcccagcaccgcgtcgcccggcaccggggcttctccgacggcggcgcgcgccgcatcgcctcgccgccccgcccgtccagctagcaccacgtcgcgcggcagccgtcacagcctactgtaccgtacgccaagctcaacatactactgcaagtcttgacacttgtgagcattctcctccgctccttgcgccggagtcgtggccggcgagaggagcaggggagaggatcatggtggcattctgttctccaaagagcagaaacatggttaatgcaataaaggggttgttcatctcctgcgatgtaccgatggcacagttcattgttaatctgaatgcttcaatgcccgcttcggacaagttcatcctgcacatgcttgaccctacacacatgtttgtgcagcctcatgtggcggagatgatcagaggtaagatatcagagttcagagaccaaaacagctacgagaagccaacatgaaagatcattctaccccacagtaagatatcctgtgtgtacaccactgaaaagataccaacgcttgtctatggtttataatcgtgtgtgatgtgagcttcatgtgccactcatcaatcatgatgatgttcaagaatgataaacttgcagtatcagaaaatgttgggctt

SEQ ID NO: 87753 - DNA, 338 bp, Oryza sativa
  unsure (1)..(338): unsure at all n locations
  Clone ID: PAT_MRT4530_8666C.1
cccggtcgaccccgcgtccgcacttcccttccccaccttcctcctctcccccgctctctctctctctctctctctctgctctctcagtctctctctcccccccagnaagaaatccattcctctctcacgcgcctccgcgtcgccgcattcggggacgcccaccgccgccggatccggccagccttcccccctggggggggggggcggccgctcccctcctcggtnagatccggcgccgggtccgtgtcgtgccccggcgtgttgtcgcgggcgatggcggtggccgtggtggcggtggngctcgtgctgttcctggtcgctgtgtgcttcgtctccct

SEQ ID NO: 87754 - DNA, 189 bp, Oryza sativa
  Clone ID: PAT_MRT4530_86670C.1
atgacggagcgtggggctcctcaccgggagaccgcgcaggcccccctttgccggttcggccgggggctcagggagtggcccgacccccctcggggagaccaagaggtgggcgcacacatcaccctcgggcccgacgtcccccgagggtgccaggccacgtgggcgattgtgtctgcctcaagcctctag

SEQ ID NO: 87755 - DNA, 828 bp, Oryza sativa
  Clone ID: PAT_MRT4530_86671C.1
atggggcccaatggtaataggagatccacgcttttaggtttggatgataagctgagggagaagagtaagaggataagccgatcggattctcacaggttcaaccagctgcttgagggcatcgatggggtacagcaagctcaacatactactgcaagtcttgacacttgtgagcattctcctccgctccttgcgccgccgggacgagtcgtggccggcgatctccatcgggcgagcagagcaggggagaggatcatggtggcattctgttctccaaagagcagaaaacatggttaatgcaataaaggggttgttcatctcctgcgatgtaccgatggcacagctcattgttaatctgaatgcttcaatgcccgcttcggacaagttcatcctgcacatgcttgacccgacacacatgtttgtgcagcctcatgtggcggagatgatcagaagtaagatttcagagttcagagaccaaaacagctacgagaagccaacatgaaagatcactctaccccacaattcctgtgtgtgcaccattgaaaagataccaacgcttgtctatggtttatagtttttctttagatagtctatggtttagtatagttgtgtgtgatgtgacttgtgagcgtcatgtgccactcatcaatcatgatgatgttcaagaatgataaacttgcagtatcagaaaatgttgtggcttatgacttatttgtcttcagtgatagtattaatcacctgtccatttggtagcgttggaacattgagagacagcctatttcttaagaacagttaactttatgtgtattcctcttcctgttatgttcttat

SEQ ID NO: 87756 - DNA, 1918 bp, Oryza sativa
  Clone ID: PAT_MRT4530_86672C.1
cctggcaatcgcctggagccttcgacgcgtacgggggtagccgccccggatcagccgccggcgccgcccatcgccgacgcagccgacgcgggcgcggccgccatggcgccgttcaggcgctgggcggacctgccgccggacctgctgtgccgcgtcggcgacaggctggacctcaagtgctacgccagcgcgcgcggggcgtgcacggcgtggcggtcggcgctgtcgccggcgtcgccggcgctcctcgtgctgtccgacgccaggatgtgcccctcggcggcgtccctcccgacgcggcggtgcttcgacctcgcggcgatactgacggggggcagatgcgtcgggtccagcaacgggtggctcgtcctgtccatcgcgctctacggcgggcagagcgcgttcgtgctcttcaaccccatcaccaccacggagatcgtcctcccgcccctgatctacgagagcaggtgggtctccaaggtcgtgttcgcgcccagccccgccaaggacgactacgccgccgccgccatctgcgacatcgacaggatcgcctacgtcaccgcgggcgccaggaggtgggccgtcctcgaccccgtccgcctcgtcaccggcgaccagctcaccgacgtcgtctaccacgacaaaggtaaggtctactgcctcacgaggtgcggagacgtgcacctgctccgcctccccgagcgccgtcgccggaaacccgccgatgagccagggccatcagaacaaccaccagaggcaccagtggtgccgcttcctgaatgcgcagttgcaattcgagctaggcgaacccaactccaccacaactttcgcatggtctgctatgaccatcttggaccaagggatcagatgatgccgatgaagctcactgtctgttcagagacactcatccctttcaattataggaggttcgcgatcggacctctcgaaccggacctaaatgcgccggcgacggtcgagccattgttgccagaggggaacctcccgtttgatcctgccaccagtttcgctccgccatacaacaccgtgtctgcttttaccaatgccaagaacattgtgctgtgtgagggcaacttgtaccagatctggaggaatgcaagctgcactgtgactttgcagctgcccggaggcggtcaccgtcgtgtatcggagaatgaaatcttggttctaaggtactacccccgtcgccagccgtgctgggatgctgtgacagacttggggggctactcagtgtttgttgggcggaacaatgccgtgtcgatgtatgctgagggtgtgcatggtctcaagggcaactgtgtgtactggattggtgggcgtggtagggatcagggcatggtgttcgacatggaaaccgggaggtctacgccttgctatcctttggttggtggcatgccagggcctttgcaaagcacgatctgctggttcttcttgagtgatatagtgaacgccagcaacaatagtggaggaaggagagtttatcagacacgatcaaggtcccgtgcggaacgtgcacaggatatggaagagtaatgcgtcgccagattgcttggtgacatagtgggtttcaccgatcacgatgatagaagtttgagcttatgtaccatagcaaaagtgtgatctgaacgtgcataagttgtggcagagctggtgtttcaaaactgcccgtgtagccgatagtttattgcgatttgtttgttttccaaatcaattttctctgtctagttgtgcttatgtaactcgtatcatccttatatatttgtgtaatgaaacaatcgctgtcatcttgttgagcttgtattcatcatattatgatggaataagaaaatggattctggaaaaaaaaaaaaaaaaaaaaaaaaaaaaaaaaaaaaaaaaaaaaaaaaaaactcgagggggg

SEQ ID NO: 87757 - DNA, 173 bp, Oryza sativa
  Clone ID: PAT_MRT4530_86673C.1
tcggtttaacactggcagagaaggatcaacattggctgcatacaccagcatgatcagtgccctgacagcattaattgctctatctgcaagcgcacatacagcgaacaccactatgcatcatcaaccaccaccagtagacaggggcaccatgcatccgccatgcagcacatgat

SEQ ID NO: 87758 - DNA, 407 bp, Oryza sativa
  Clone ID: PAT_MRT4530_86674C.1
ggacgcgtgggttttcccgttttatcgaggaccgtggcctgcaggggtaacaactttccctatagggagggggatcaaattttgccttaatcaaggtcatagatagctccggagaaaaatggatatagggtaacacttgcaaaaaatatatgagccggaagcttaaagtgaaaagcctggggggcctaataagtgagcaaacccggattacttgaggggggctcactgccacgtttccaggggggaaacctgtggcgccttttgaattaagaaacccgccaacccccggggatagacgattagacaatcggccgccaggggggtttttctttttaccacggaaagggggaaattttgtttgccattcaccgccgggccctgagatagttctaccacgcggtgcccgc

SEQ ID NO: 87759 - DNA, 475 bp, Oryza sativa
  Clone ID: PAT_MRT4530_86675C.1
caagaaaaaacataaggcaaaatcccaccccagccatgagggtttccatttttagcataacagccggaaggtttattccaccatcctcaaaatgcccatccatttgacaaagtggcagggggttaaaaggggcgcaaaaaccccacccaaggataaactgggggtttgggtgaaaactgtaaaaagttccatcgaaccccagagaaaaaatttgtccaaataggacacaggggacgacaacctttttacaaaaaccattacacggtttaacaattttaacggggagcagaaaccggccgcctaaattcctgggggccttttcgttatttcccaattgtaggggtaagatagggagaacaacactggttttactccgtttggggccaggaaaggccctcccccccccccgcctggggggggaaaaaaacctggccaagagaaaaaaaaagggggagccccctgggggtaaaattaa

SEQ ID NO: 87760 - DNA, 330 bp, Oryza sativa
  unsure (1)..(330): unsure at all n locations
  Clone ID: PAT_MRT4530_86676C.1
gccgaaaggatgggttttgaggttgctgggtattggtnctaggtatcaagagctgctgccttctgttatcatctcaggtcaggttggaggcgctggtcaattgatgggtctaagttgatgaatactagtgtattgatcaatggatgcccataaggctgtgccaatccttagttataatgattatggttatggtcagtgtcaggctgtagaaataatcctgtgttgtgtccctttgaattgtagaataatcgtctgtaataatttcgatatactttcgtggtccaagacatcataaatctaagtgattagctactaaaaaaaaaaaaaaaa

SEQ ID NO: 87761 - DNA, 1503 bp, Oryza sativa
  Clone ID: PAT_MRT4530_86678C.1
atgagcctctcctccctctcccgcgccctcgcccggtccgcgcgctcctcccggcagcgccagggttctctgctcggggggcatggcgggctccgtgcttcgtcgccgccgctgccctgcggcgagttgggttttctgcgcagctatgtgacgtcagttatcgggaatcgggcagcggtggcctccggggcagggaagggtggggactggaggttcctgcttgctagccggcagttccggcggctattctccgacaagtcgaagaaaaaccacgggaagcattcggaggaggagaataaaggtaaaggggatgagagtgacaagtccgactcaaagatgctagcctgctcaggtgatcaatggaatttcgaggagagcattaaacaattcaaggacatgattgctcctttattcctttttggcctattattgttatctgcatcagcatcttcatcagagcaggagataagcttccaagaattcaagaataagttgttggaacctggtttagttgaccacattgttgtttcaaacaagtcaattgctaaggtttacgtcaggagttcaccttcaattgatcgaattcaggatagtgatatccatataactacaagtcatcttcctgggatagagtctcctagcagctacaagtattacttcaatattggaagtgttgactcctttgaagagaagttacaagaggcccagaaagcattggagatagatccacactattatgtcccaatcacttacactactgaagcaaaatggtttgaggaagtaatgaagtatgtcccaaccgttctaattattggattaatatatttgcttgggaaaaggatacaaaatggatttactgttgggggtggtcctgggaaaggaggccgtagcattttcagtattggaaaagttcaagtgacaaaattggataaaaactccaaaaataaggtgttctttaaggatgtagctggctgtgatgaagccaaacaagaaattatggaatttgttcatttcctgaaaaatcccaagaaatatgaagaactgggagcaaaaataccaaagggtgctcttcttgttggtcccccaggcacaggaaagactctccttgctaaagctactgcaggagagtctggtgtgcccttcttgtctatttctggttcagacttcatggaaatgtttgttggtgttggaccatccagggtgcggaacttatttcaagaagctcggcagtgttcacctagtattgtattcattgatgaaattgatgcaatcggccgtgctagaggccgtggaggtttttctggtggacatgatgagcgtgaaagcacattgaaccagttacttgtagagatggatgggtttggaactacatctggtgttgttgttcttgctggtaccaataggcctgacatcctggataaggctttgctaagaccaggaagatttgatcgtcagataagtattgagaatactcaagcttgcatgcctgcaggtcgactctag

SEQ ID NO: 87762 - DNA, 336 bp, Oryza sativa
  Clone ID: PAT_MRT4530_86679C.1
tcgcccacgcgttcgcccacgcgttcgtctcatctcccctcttgggaatcactgtgggcgtgtgtcctgtgtcccccgggggatcggccgaggccaacaactgagttgcgtcgattgatgcgcacgatgcaatggcggtgtactctccaacttacgctccgcataagaagaggaaatggctgctcagcaacatgaaggggatcgacaagtacctgatggaggcgacggctattattgcgacggcgccggaagcacgcggctgggacgccatatcggccctcggtctactagacgcggcgctggagctgtcgccgcggatggagtccacactggagc

SEQ ID NO: 87763 - DNA, 248 bp, Oryza sativa
  Clone ID: PAT_MRT4530_8667C.1
atgtctttcgtgattagtctcacacttctcatcttaataaaaggtgctttaattggtaataatttgatttgctcctggtttggaatggtacattcctggtttggagatagaactgtgcagccgggatggttgttcagaatggttgggcctgtacaacagggtatgttgtgtagcgttggattaatattgtttaatacttaactgttttattaaattctcaaatgtttgttaaatgctgtttatgcaaa

SEQ ID NO: 87764 - DNA, 408 bp, Oryza sativa
  Clone ID: PAT_MRT4530_86680C.1
atgggccacagggacctgctcgcctggtacgccatcaggggaatgtacagtgacgtcctcgcgctcgcggtgaccatggttcttgatcacgaggattttacaggcgtgcgcgttaagtcgggaactttgtttgacaacattcttatcactgatgaccctgagtatgccaagaaatttgcagaagaaacctgggccaagcataaagatgctgagaaaactgccttcgatgaggccgagaagaggaggcttgaggaggatgatgaggatgaggcggacgatgacaaggctgatgtagttgctgagcagacaaaggactcggatgatgataaaccacaggacatcaaggtctctgctgatgagaagccaaatagcagcaagtatgattcttccctctgcgaagagggatga

SEQ ID NO: 87765 - DNA, 474 bp, Oryza sativa
  Clone ID: PAT_MRT4530_86681C.1
agggctgcgagggagatggtgtcacatgcatgtcagccaagacaccagcttcattttgctttgattgtgattaattaagccgggagctaattggatcggtacaaggactcgtggaagattggatttgtattggttgggaagataaggatgcatgtatagtggctgtcagttttcatgaagccagctgaaattaaagctatgaaatgcgaggctactactagtagcttctgctaaagacaacgcgtcagaacagagcacgccgaccaccgaaagtgatccctgcaagaaccactaatgcctcctttttgcaggagaagatttgatagaaactgtcatgtagcaaatcagtcattacctgcctaatctaacctgcccttggattaggcagttgtcgcctaattaagattttgatctgttttcaatgcaacaaagcgggaattctgtgtgcaattcgtgtgttcccgagggagactg

SEQ ID NO: 87766 - DNA, 487 bp, Oryza sativa
  Clone ID: PAT_MRT4530_86682C.1
gttgttggaaaccacccgggccccacccaaagaacagggctttggttttttgggacaggggggaaacaagctgaaacccaaacttttttttagcccccggaaaatttcgcctttattgggggggggccctccgggggggggaaataataacaaattttttcccccccaagaattaatttcccccccaatcggctaaaattgggtttgggaacatttgggttcatcatcaccccaggaggaaggccccattgggattggcattggcaacgggaaaggtggaagcctaccctgtttttttgggggaagccatccccccaggggcggcaaaaagggggggtcctgcacccacaggggtgtggggggaagcccacccattctttcccggcgactcgaaatttgaagggccccccccgccttttttcgggggacaaaaacggggggaatccaggggcaatttaaagcttttccaaccgatttgccttggggg

SEQ ID NO: 87767 - DNA, 443 bp, Oryza sativa
  Clone ID: PAT_MRT4530_86683C.1
atgtcattccctcgtaaatgggtgaagacttgtggtggtccttttctcatggagggaaccctgaatgacgccctgatgggacgggtcatacctacttccactccgcctgttacagaggcgacgtggggcacggccgcccgttcaatcggatatgaccggcaacaggccgttggggcgctgcgcattgatggctgttcagcctgggcccccttcctgctcgctccccccgccacatggcagctgggcgagggcctcggggcgaggcagcgggagagcccgaggggcacgacgtggcaccccgaggcccccccggccgcttctgtgactcgcgaggcgcgggagtagggccaggctgtagagccacgcggctggatggaaaggtaactttcccccacttcgcatacccccgggcccatatctccgacagtagcccccggcaccat

SEQ ID NO: 87768 - DNA, 857 bp, Oryza sativa
  unsure (1)..(857): unsure at all n locations
  Clone ID: PAT_MRT4530_86684C.1
agcgacnccntgcgtgcaggatggnntnngcccaagccgagctcaccgcgggcggccgctctagactagtggatccnncggctgcggcggtctctgcagagacgcctgcatcatctgaagagaatgctttagctgtgatgcaaccattcagatgatctatgcgacgtttcggcggattcacctatatacaacatagataagcttgctggaattgaagacatgcagtccgaggctaggtctcaaaagatctagctgcgtatgatatcgtcactttcttagcatacacgaagttaagttctggtgactttgaagttctagcgagatttcatgcgattggagctgaagaggatgaatggatcaatgtccggaggctatccacctgcatcctcccgttggatcatcaactgaaactatatggaaggactgtcttgtcaggtagatgtaagatggttgtccatgtctgaatcagctaacacaccttagggagtcactgtgcttcttgcaatcacactagaaccggaaggcaactgtagatgcccgcggtcaagactctgatgctgtgtaactgcaatccattgctgtgccctgcgatcctatgctgactacggactcgacaaatgggctactttgctgacaaactatcacctctggcaatcgactattggctgtctgggcgctatgccattctgctattggcggaaagggatacagacgactagacatttcccggacatcgcatgcttaatcttctcggcgaactcattcatgaacgattgaacctcgttggaagagggccgaccatctccattgatttaacctctcgccgttcacatgtgtatcgggtgacactctgctcg

SEQ ID NO: 87769 - DNA, 108 bp, Oryza sativa
  Clone ID: PAT_MRT4530_86685C.1
tagcagagaagaagaataggatgccgaccggtgctatcatggtaatgggatcgtcctgcgtattcacccttgttgtcaaggggcgcagcctgcacattcaggctcctc

SEQ ID NO: 87770 - DNA, 858 bp, Oryza sativa
  Clone ID: PAT_MRT4530_86686C.1
atggaactaactggttggcatcttccagaaccaccgtcttccaccgtccgatctgtgatcgacggcggcggtgctcaccacccacgtttgataagcagccaggtaggccagccagcgaggcctacctcgccatcaccattgccaccgcgccatcgccaccgccacattccaaaagcagaagcagtccaaggcgagagacagagtccgcgacatggttcgatggagttgtcggcttctgctctgggtttcggtctttgtcttgaccctcacccagttgggggccttcgtcgtcgtcttcggcgagggggaggacgccatacctcgcgttctgattgccgccgccgtcttggctacgtaccacgtcctgctcactttccggtgagcggagtcggcggcggcttgcgcgggttcctccaccgcgcgccgccgggttctgcccggaacgacaagggctgcgcgaggcgccacaagacggcgtcgagttcggcgacgagcgcggaacccatggacgagggcgaggccgacctcctccagtttctcttcgtcacctccggtgtctcctggggaggcatcgtgggggtcgtcgtcgccgtgaacgcctccgtaccggctgcgcgggtgtggatgctccccggcgtcaccacgctggaccgggagctgggcggcgacgactgctcgatgtgccagtacgacaaggatgccggagccgtcgtccgcacgctctcctgcgaccacgtcttccacaaggcgtgcatcgacgtgtggctccgcgagcacggcatggcctgccgactttgccgccgtaccgctagctgcgtgctgccctggaaaaccggagggcgccgccgacacggctga

SEQ ID NO: 87771 - DNA, 734 bp, Oryza sativa
  Clone ID: PAT_MRT4530_86687C.1
acgactccgttctggtgcagatgcaatgcggccagctgatgcagcctctcggttgacaaccctgttcctggagcagcaacccacgaccaaccatgaaaatgctctcgtctcttggtgtgctcgaggagggagatgcaactcgtgctcttgcttccaaccatcaatggagttctgaaaacgaaatgatcgcaacagcacgaaggacaagtagtaacagcacagtagccaagcattgcgctgctgctaaattaagctccctactaccgtgtatcccggatgatgagaggaagaagaagaagaagaagaatcacgagatagaagaaaaagaagaagaagaagaagcatattggacatggcatctctgcatttcgcatctgtgtacataagaccaagaccaaggttaaataattagttcacaattgatatttgatactccattgattatctcctgtgctatgggaggaggcacaggatgggtactactaccagctagacaccgtttttgttgatgtactattagtcaagttattattgtcatgcaagtattatttggagatatagcacgtagcagcagcatctcgtcactggttctctctctctctcgcccccccgggccgctgccggcggcccgagcattggtcaccctctcattgacccttgctttattaatgataattatggtttttatcaaaaaaaaaaaaaaaaaaaaaaaaaaaaaaaaaaaaaaaaaaaaa

SEQ ID NO: 87772 - DNA, 533 bp, Oryza sativa
  Clone ID: PAT_MRT4530_86688C.1
tgtgtaaattaactatgttaccccttagaaaagtgcactcaattaggattgtgaaccagaccaaataatcctagggattctactcaaatcatccgaagagccctatataaatccaacgttaacacgacttgtgaaacgaagttaaacgaattttaattatctcgctaacattactacaacttatcataatactaacgtgaacattacctaacaggaggatagtaaccagtgcaatcaaagcagcaagaggcttacaggtcctacaggaagaacatacaaaccaacaaatcggactgacttctgctacgaatcaagagcgcgaacggacacatacgaattacggggtgaaaagaagaggaaaccaaacaccaaccccgaaggaaatatctgaattgtacatcgagaaggaggatcttaccaaaaaaaacatacacaaagcccatcaagaacgctttacgaggtcaaaagaaaataaaaacgattagcccaacaccgataaaaaattctgaagagttgacaaaaaaaaaaaaaaa

SEQ ID NO: 87773 - DNA, 459 bp, Oryza sativa
  Clone ID: PAT_MRT4530_86689C.1
gtatgcttgactttgcaactgtacatgatcaacatcacatccatacatcccgactgcagcccaaacagggctcaaaccgcacgacccaccccaacagcaccaccaactgcgtacaaccaatgcaacaccctgctgcaacccccaacatacagcacaccttttactgtacccggcccgccatactgcctgcgccgcctgctcctacgcccgcgctgctgctgccactgctgatgttctcatacatgttgtctatcaacgcctgataggccaccttggcttgcggccgcttcaacttgaaggtgggtgtcaggagctcattctctacagtgaagggctccgggaccaaggtgattgctgacacgtgttcaaagccacgcagctgcgcggccctgccctcctgcgccatgctgtgcatgacggtttggatcacggcctttctcctggcacagggcaggcatg

SEQ ID NO: 87774 - DNA, 360 bp, Oryza sativa
  Clone ID: PAT_MRT4530_8668C.1
aagctttttttttttaataataatatggatcatgtttatttaataaaagttgttatcgataacaaaagaaaaaagagattgtttaaacgggttctgagtgagaaaataagttactgcatttggaggcatatcgttcatgaagagcgttccaaagttttggaattttgtgtttaagtcgatgtggttcttcgcaagtactaacaaataatccaacaatcgcagaatcaacagtttctaaccaaacaacaataacaccgtaaccagttaagaagccgagaaggaaactgataccaactgtggtagcatcagccaaattaacgagttcaaagaatacagaaatgcccaatgcggtaaaagctt

SEQ ID NO: 87775 - DNA, 423 bp, Oryza sativa
  Clone ID: PAT_MRT4530_86690C.1
atgagctacatccggaaaagcagcaatgaatcaagttgtgccacccacagcatccagcaaaaccgcgaccatttcgacgtcaagcctacatcaactttgcgtgttgcaagaacatcacgcgacagtagcggtgacaacaaaggagagtggaagacagtgggtgcaggagagggtgccaacggcggagaggctggcgagccggtggtcggcgacagcaagcttctcggcctcattgtggctggcacaacccagatcaggtgccgccgcacgcttgcgcttgctgctatatggatagagacggcgagctcggtgcgcctctcagattgcttgcttgaatatcatggtgacaggcttgcattcctgatgccttctcttcctactaaactactttactgtctatatcgacagaacctagcattctag

SEQ ID NO: 87776 - DNA, 1115 bp, Oryza sativa
  unsure (1)..(1115): unsure at all n locations
  Clone ID: PAT_MRT4530_86691C.1
ntttagagagcaccnnncnacaaaacaaacataagaggcgacgccgggccccgcggcgnnnnaancagcgcgntggggggggncnnttttatnantcccttcctatcaaaaggggcctacggtgttgagagggaggaggganaaaagagaaaataagttttttttgagagggaggagggaggaccgaggngngagggaggngngngnggggaggcnnnancngggggagaatgtaaaacncaaacgagcgcaancaacccccccgcgcccggcacgaggagcaacgaaacaaaaatcaaaccccgtggggggcggcggggaagaaaggaaaaaaaagaagaaaggaagaacgcaaaacaaaacattacacccccacccccgacgaaacagacacccacgcgcgcccaccggggacaactgcgcgcaaccgaacgcgcagacagcaaacgagcaccgacccgaaagcggcgccggaccccgaccatagcaaaacccaaccccaaacacaagaaaaaaaagccgggagcgaacgaccccgcacaacaccccacaacacccacacctccgccccagccgcgcacgagagtgagcgagaaacggaaataccatcacgcgacaagggaaggaggcgcggacaccagaaagaacaagaagaaacgaaccagaggggaagggagaagcaagcccaccgcgcgcgacgaccgccgccacaaaagaagagaacccgcaatcacacgaaggagccaaaagcaacacgacgacaggagagcgcgaaacaaacaagacaacacagcagaaggacagagctaaacgaaaggacacccgaaggagatgcaaccacaggtggcccggcagaacaaaagggagcacgaccacacgcagcagacgactgccacagcaccagccgccgacaccagcagagaaggcgacgcgccaggcagcggcaaacatgccgacaacaaacagaatacacaaccgcaccgaaagacacaacaagatcacgagacacataaagacgcgaggacacagaatacagcgaagagcgagaagcgacagtgatgagaggacggacacgagtaagaggacnnacgcagcccngagagcccgagaaaaac

SEQ ID NO: 87777 - DNA, 339 bp, Oryza sativa
  unsure (1)..(339): unsure at all n locations
  Clone ID: PAT_MRT4530_86692C.1
tcgcccacgcgtacgaatccatcaacctatagcttaacgatcactgccattgcaatggcgcggagcacttagctcgttctcctcgtggcggcggaggtggacggacgtcccgctcgacggcggccagccatagggctacctgctgcgactgtacgtccgagcaggggagcgcctacgagaacaacctactgaacctggcccttacccttcgcgacggagcctactaccaggggatgctgttctacacgggctccaacggcgccggcccgaacaccgactacgggcttcttctatgccgcggcgacatntaacgcgccggctgctacgactgcagcacca

SEQ ID NO: 87778 - DNA, 474 bp, Oryza sativa
  Clone ID: PAT_MRT4530_86693C.1
tcactcttcctcttcatcaccatcaccatcaccatcaccaccagaggcctccttctggttctttctctttgacccttccaggctcaccgccagtgggctgatgtggtgttgcctgatgagtacatgatcatgatgaatggatttcaccgtgccgttcttgaagacaatggtctggaggcggcactgaaggaagttctcaacggtgagcgcaagcacgtaatcaagcttgttctggccctcaccaaggagaccatagcggttcatgtggcgcaggagagcctcgccctcaaagatacgtcgggggttcttctcatcaagggtgagcagctcctgcacacgccacagctcacacttggacctgaggccatactcaccatacagcttcagctcagcatcaggacgctctttctcgtatggacgccttggtttcttgaaagtcttgccatagttgcgatagaagctaacgcgcaccat

SEQ ID NO: 87779 - DNA, 258 bp, Oryza sativa
  Clone ID: PAT_MRT4530_86694C.1
atgggggtgatcgcctggggcggtcacccgcccattagccgccccccacatagatgggctagttcacatgcacaactagagaagttggctaaagcgctgatgcggcgggggacacatcctgactgccaggggcggatccagcatgggggcggcgggctcttgagcctccactactgtcgtgaagactatgaaagcccccacgaagatctgccgctgctgaccagcgacggcggtgtaggatatggctcgaaggagtag

SEQ ID NO: 87780 - DNA, 437 bp, Oryza sativa
  Clone ID: PAT_MRT4530_86695C.1
accctgaattaaaaagcctccttttgttgaatatatagccttataatcaggaaagttctacatcaggaagacagaaaagagggaaatctgtattgggggatgtattcaaggcggttctatgttcaattcgtttttgtacacagcagtcaccatctcaaaaatgtacatttcggaacagctttgggacagatgaataagaataaatcaccccatgttatacatttttaaccatggtattaccaacaaattctatgatatgctgtctgctgctatggcttgttgggagaaagctagcgattgcatcgcatgaaccgttgaatctgaatgagctcccctcatacatactctccagataattagtgcatcatataatggcatctggatgatcattgaccacgaatgcaatgtcccagcttccagttccacttattgactga

SEQ ID NO: 87781 - DNA, 990 bp, Oryza sativa
  unsure (1)..(990): unsure at all n locations
  Clone ID: PAT_MRT4530_86696C.1
ncacgactggtgatagaggcttcaatttgtgaatttaatccgttatcacccccggccccccctctggctttctgcaaatattcccaacagtattagcttgtgagacctgggatatatttcctgggtacactgaattcacatgttcatgaggagataaacttcaaatcaaaatttcaacagcgcaaacaacaatttttgacaaccctcggtggctaatttttgttttctactcatgtaacaaaaattaggtccctaataagacaagttcccgcaaaattaggtcctataacaaaaccgagctgacatcacatattcactcttcctcttcatcaccatcaccatcaccatcaccaccagaggcctccttctggttctttctctttgacccttccaggctcaccgccagtgggctggtaagggagaagtcgatgtgcttctctaatcaagtctcaccatgaataaggggatgttgacaagctgccttcccactctgatgtggtgttgcctgatgagtacatgatcatgatgaatggatttcaccgtgccgttcttgaagacaatggtctggaggcggcactgaaggaagttctcaacggtgagcgcaagcacgtaatcaagcttgttctggccctcaccaaggagaccatagcggttcatgtggcgcaggagagcctcgccctcaaagatacgtcgggggttcttctcatcaagggtgagcagctcccttgcagcattgcggatagggcttagggcttactgcacacgccacagctcacacttggacctgaggccatactcaccatacagcttcagctcagcatcaggacgctctttctcgtatggacgccttggtttcttgaaagtcttgccatagttgcgatagaagctaacgcgcaccatggctgacgccgcccccgcccccgccgctcgccgccggtctcggccgccgccgccgccgcggcgagatggattgtggttcgtggcggnatt

SEQ ID NO: 87782 - DNA, 102 bp, Oryza sativa
  Clone ID: PAT_MRT4530_86697C.1
gctcatatgggtttacttcagaccctttgggtgcctgtaggccaggcagatatactgttaccaggtgtataatttatggcccttgtactggttacacaaaca

SEQ ID NO: 87783 - DNA, 228 bp, Oryza sativa
  Clone ID: PAT_MRT4530_86698C.1
gcgacgctgatgctgttcgcggggagttcgggctggcgccgtcggcggaccggaagtcgccgcggggctgaatgctggaggcgcgctgactccggcctgcagaccggcgagcccccccgggttcacgctcgtcctgacccgctggcctcggcgccctcggccacatcatgggcctcggctcgtcctcggcctccaggacatcggcgttctggacccgatcatcggcta

SEQ ID NO: 87784 - DNA, 275 bp, Oryza sativa
  Clone ID: PAT_MRT4530_86699C.1
gttgggcgcggtcgctggtgcttcgcgcgacgggacaccggctgcttctccactctgctgacgtcacgatccccgacagccacccgtctttaccgtctgacgactacccaccaacgacacacccgtaactggcgactgacggcaccgacccatcagactgcacggactggacctacccacgcacgcccccttctgacgacaccactacggggctatatcggacggacgcacggcacggacttacttctcactgctacacgacgcacgcactactg

SEQ ID NO: 87785 - DNA, 765 bp, Oryza sativa
  Clone ID: PAT_MRT4530_8669C.1
tcatggatctataaggaaccctgaaaatgcatatggcatcaaaagcaacataaggacacgtctgtctctttccatttcttctataatatctccttcatttcccctatgacttgctatgtagaccagcgatccaccccatacaagaccacacatgagtctgaagcgaaactgcatcctgtttgcctcagcctccatcatctcaacccttgccattgctctttgtttttcaactgcgaacttcatcagttgcacctcccgcttcagctcaaactccaccatatttatcctgccgttcatctccgccaaatctgccaccttggcgcacctcccacctccgtttgagcaaccacgagacgcgaccttctggacagaagatgcagaaactattctacctataccccggaccgagaaatttgataataagccatcccatccgtgcgcctttgataatataacatccaatccgcatgcctttgataaaataccactgggcctgcgaattttttgattccatgtcactttcaccagaggaagacaggagatggtggccactggcagcggcagcgatggcgcgggcagcagcggggcgatgtagtggcggcacgagtagcagcagcagcagccgatgtcatcgtcggccatagcggggagggaggaagtccgggtagcgggagccttcgagaggagttcgccggccgccagtcccgcaccggcgccggatccgccgcgcatcgccctggctagcgccgccgtcgccatcgccat

SEQ ID NO: 87786 - DNA, 279 bp, Oryza sativa
  Clone ID: PAT_MRT4530_866C.1
atgggatgtttttattcccacgcaaaaccaacaggtagatgctagatagatacataacatagccggtgttgacagtattatgttaaacaaaaccattctccgacagcaaccaaaccacacactaagcttcttcgctgctcacttcttcaatcacttgcttgggaagcagcttttattttcgatccataccacacttcgcaaaggatcaaaattatttattcaaaacatattttttggggggcccattaggcattgattgaccgattttagtttgttaag

SEQ ID NO: 87787 - DNA, 577 bp, Oryza sativa
  Clone ID: PAT_MRT4530_86700C.1
caagagaaatcaaatcaataatttaccaaattatcagttaacaatttgaattacatcataacttgattatcagttagcatctgttgaaaaaaaaaatcgcgctgggtcaatgatgttggatctatgttggcacgaactaagtcgacaaacacaatgacctgggagatctgcttaactccagtgtaggttcaaaatattgatgagatacaggcatgactgtcaattcgatcctgcaactgacaagatagataagtagatgatcaaagagccgatcagctgattagccgatggagtagttccagccgatgctgataccagccaatgttgatagggttttaaacaatcggctatatgtccattctaatacttgagaaaataatgatataaaggcaatcggctgatgataataaaataaaacaataatataatccagtagaaactaatcggccaataataatataatagaacaagtgttctgttctgatggttaaagcatacatcgcctgaaggtctgatgtcattaaatccaaatgattagataaataatgaaatctttgtcgcgatcggttaaatccaa

SEQ ID NO: 87788 - DNA, 1345 bp, Oryza sativa
  Clone ID: PAT_MRT4530_86701C.1
cccacgcgtccggttgactattgagaacggatattcgaatggagtgagggttttgtatggctaatcgtgagctgagctgggtgatctggtcttcgtgacagttctgagcacgaactggggaactggcttcgcattgaggttccaagaaggtcaccggatttggcgcatgggggtctccgccagctgcttgtggggtggctccgagtcgagggggaaccaaaatggttctgctgcggtgacgtctcctcgttcaggtcaagtaatatcaagagctggaagtaatgtacgagtcttctccctaaaggagttgaagcttgccactcgaaactttcacatgatgaactgcgttggccgtgggggttttggagcagtgtacaagggaaacctgaaagatggcactcaaattgcaattaaaaagctgtcagctgaatcaaagcaaggggcaaatgagttcttgacagagataaatgtcatatccaatgtcaggcaccccaaccttgtaaagctaattggttgctgtgttgaagggactaacagactactagtgtatgaatatgcagagaacaatagcttggcacatgctttacttggaccaaggagtaggtgtattccgttaaactggcaaaaaagagcagctatttgtatcggaactgcttctggccttgcatttcttcatgaggaagcacagccacgcattgttcatcgtgatatcaaggccagcaacattttacttgataagaaactacttcctaaaattggagattttggactggccaagctttttcctgacaccattactcacattagcacacgtgttgcaggaacaatgggttacttagcaccagagtatgccttgttgggacagttaaccaagaaagcagatatatatagttttggggtccttgtccttgaagtgataagtggtgaaagcagtagcaaatcgacttgggggcaagatatgaatgtccttgtggaatggacatggaagcttcgagaacaaggaaggcttttggaaattgttgatccagaactggaagaatacccagaggaggaaatgcttcgtttcatcaaggtggcactcgtgtgcacccaggccacgtcccagcagaggccatccatgaaacaggtggtggatatgctatctaacccaacagaaatcagtctggagaacttagtcgcaccaggtgtgctgaaagaaccccgccatcattcaagtagttcgggtttgacaccggacacaacctcaaacagaagcaccaaagccaatccagctgattcctacagcacacagaccagagacatgaatagctatcagttgagcacgattgaggtgtcgcctaggtga

SEQ ID NO: 87789 - DNA, 337 bp, Oryza sativa
  Clone ID: PAT_MRT4530_86702C.1
tttggggttttttttatttcttggggtggattttttttgttttttttttttttttctcctaaatacagtttagcgacaattagttaaaaaggccgcctgaattccccgcgggcatgcccagcacgcagagggggggacaccaagaacaccaggccaaccaaacggactgaccagcgaacaagagaaatagaggggccccggtgtgccaagcatcacgaagggggaacaacccgattgtagcagacaacatgaaaggaccaggatgggggaatgccaacgagatgggcgatgaagaccgcggcttggggggcgggaaagggcaacgctgtgaaacccc

SEQ ID NO: 87790 - DNA, 204 bp, Oryza sativa
  Clone ID: PAT_MRT4530_86703C.1
atgtcaagaaaacgagatgggatcagtgtatggttgattgagtacaatgtgggggaggaagctgcagagaaagaaaaacaacaacaaatgaaagtgacacaaaagtcagaattgggtaaagcatcttctgtgcatgcaatagacaagcaccagcacagggccattgagcagcagggtgcagtgctgtttaccgacattctctga

SEQ ID NO: 87791 - DNA, 1621 bp, Oryza sativa
  Clone ID: PAT_MRT4530_86704C.1
aaagatagaggttcgagtatctggcataccttcaacactgccaaattcagctgttgaatcacccagcaccaccagaaattcagctgttgaatcacccagcaccaccagaaccgtcaaggaaattgacatgtctaatctgtatgtctgtaacatgccatcgtcaattgacaccaagaagttggttgagcttttccttccatttggtaagatcacccatgcaagagtggtggcagatcctgacaccttttcagccaaaggatatggtttcatcaagtttactgattctgaatctgctaccaaagctattgcagcaatgaatggagcattggttggaggagaaatgataattgtcagagttgcaggcctttccccatcagcatccatctcagctgtacagaccactcaagacatcaacaagtctagactatacatcactaatcttccacggtcgatgactgccgataagatggttaatcttttcgcgccctttggtcagatcactaaagtcctgatgaatctggagtatagtctagtgtggtatgcagatgcaccctcagctaccaaagctgtccaacacatggatggatacatggttgaaggaaagaggttagtggtcaagagatcagagttatgtacaaccaacgcttcacaagcaggtggcaagccaatcaaggaaatcgacatggccaatctctatgttggcagggttccatcaagtttaactgaagatcaattcatcgatctcttccgcccatttggacgagttgttcaagctagaatgtttcgatttcagaggtatggcatggttaggtttgataatccttcatgtgctgctgcagcaattgatcatttggatggctaccagattggtgtaagcatactggctgtgagagtcgcggggcttccagcagaatccaatgcagccaagggtgctctgacatcacagatgtcttctaatgagcagggacaaatcgacatgactacctttatacttatcgacctcttcctaccatgtggccaaatcactcaagcaaaagtagttgttgagagatacactggtgtgagcaaaggatttggatttgtcaagtttgctgatgcttactctgctgctgtggctctcactcacatgaatggttaccctctggatgggcatgtgttggaggttaggatagctggtgttcatccagatgctatgagcagttacatggcgcatttctactcccacttcacaatgcatgatcccgcaaaggcggctgtcggaatacctacgtcctattggccgcactattacgatgaatccgcatacaatacaacagctgagaacctgggccaagtcaccactacatctgcaaccgatgcttctgctgctcaaacatctcagaaggaaaggttgcctggatctaaatcagtcgatttggttgctgagaaagattgctcttctgcgtcgaacaaagttgccaattgttctgagtcacagccaacagcttgggctggtccacctggctttgagcctcatgccatctccaagaaatgtactggtgggtccaatgcttctcaagcttgttcaaaggatcattttgcacagtcaggaggtggccacaaaaggcgttcaatcgtctag

SEQ ID NO: 87792 - DNA, 276 bp, Oryza sativa
  unsure (1)..(276): unsure at all n locations
  Clone ID: PAT_MRT4530_86705C.1
nttgttttttttttttttgaacggaagaacacnatgacattatataatggtggcacagacttgttttatgtgaagagacacggactttaggtgtgtgttgcatatatacattacaagcgtttgagtaaaaaaaagaggactcacatatttacatgacacagtgaagcgtggctgcaagttcgtatgctcgtcggaagcacacactaggaatttcactcaccagctgtttgatgtgcatctatgttatgcacacttcagtgatgtatcatctacatg

SEQ ID NO: 87793 - DNA, 3252 bp, Oryza sativa
  Clone ID: PAT_MRT4530_86706C.1
ctgcaggaattcggcacgagggagacgcagggtcaccacctaatcaccaccaccacctccaccacctcctctcttctcgggattgttactgctccactcactgctggcccttctctcaccttcttccaacttccccctctccttctactcccctccaggatcgaaccccgcgcgctgcaacaagcctggcattatgaacctcttctttgtgaaccagttgcaggcacaattacgaggtggaaaagtgactttggctgctcagcaggagggtttcagtgacaagatgaattctggtgctgaatatgaagatggcagtgaggaagaagaaccatatgaacgtgtgttttatgatgatgaagacgatggcaatgatgattcaatatgtggggatccctgtgatgattcagtaccaaaagaggaggtgcacagtacttgcaggaagcttatgcatgaagcagagccatatgatgatttggtggctggtgaggaggaatctgttgagaactctgctctgcaagctttcaagaaggaacgaaatgagcaagagctcaagcaggcccagaaaatgggttacagcattaagcaaaaggagataccagtggacatggaaatgggaatgaaaccgttcaaaaaacggcttgtcaagtttgctgatgatgtatcatgttacacatacagtaccgagagttttgctgctgcaaagttggagaaaaggaaagctcagtttgatgaccaggacaagcacctccataagaaacaggaacacactccaccttcgtttcctcaggatggtggcaagctgaaagaagtggacaacactaatctgtatgtgggcaacctacctgcttctgtaggttctcacaagctcatcgagctatttctacctttcggtcaaattgtcagatcaagagttgtggatgattgtttcactggtttgagccagggatatggctttgtgaagtattctgatcctcgctgtgcttctgaagctattaagcgcatgaatgggcgcttggttgaaggaacagctctaaaggtcagagtaactggttttccatcatcagaggataatagccagcagccttcaaaggaaactgacatggctaaattgtatgtgtgcaacctttccttgtccatgaacacagacaggctgattcatctttttctgccttttggggaagtaactaatgcaaaggtggccaaagatcacacaacaggcttaagtaaaggatatggctttgtgcagtactctagtcctcaccatgcagctgaggctgtcatccatttgaatggacgtcttgtcgatggaagaaagatagaggttcgagtatctggcataccttcaacactgccaaattcagctgttgaatcacccagcaccaccagaaattcagctgttgaatcacccagcaccaccagaaccgtcaaggaaattgacatgtctaatctgtatgtctgtaacatgccatcgtcaattgacaccaagaagttggttgagcttttccttccatttggtaagatcacccatgcaagagtggtggcagatcctgacaccttttcagccaaaggatatggtttcatcaagtttactgattctgaatctgctaccaaagctattgcagcaatgaatggagcattggttggaggagaaatgataattgtcagagttgcaggcctttccccatcagcatccatctcagctgtacagaccactcaagacatcaacaagtctagactatacatcactaatcttccacggtcgatgactgccgataagatggttaatcttttcgcgccctttggtcagatcactaaagtcctgatgaatctggagtatagtctagtgtggtatgcagatgcaccctcagctaccaaagctgtccaacacatggatggatacatggttgaaggaaagaggttagtggtcaagagatcagagttatgtacaaccaacgcttcacaagcaggtggcaagccaatcaaggaaatcgacatggccaatctctatgttggcagggttccatcaagtttaactgaagatcaattcatcgatctcttccgcccatttggacgagttgttcaagctagaatgtttcgatttcagaggtatggcatggttaggtttgataatccttcatgtgctgctgcagcaattgatcatttggatggctaccagattggtggaagcatactggctgtgagagtcgcggggcttccagcagaatccaatgcagccaagggtgctctgacatcacagatgtcttctaatgagcagggacaaatcgacatgactaacctttatgtgagccatctcccgagctatgttaacaacgaaagacttatcgacctcttcctaccatgtggccaaatcactcaagcaaaagtagttgttgagagatacactggtgtgagcaaaggatttggatttgtcaagtttgctgatgcttactctgctgctgtggctctcactcacatgaatggttaccctctggatgggcatgtgttggaggttaggatagctggtgttcatccagatgctatgagcagttacatggcgcatttctactcccacttcacaatgcatgatcccgcaaaggcggctgtcggaatacctacgtcctattggccgcactattacgatgaatccgcatacaatacaacagctgagaacctgggccaagtcaccactacatctgcaaccgatgcttctgctgctcaaacatctcagaaggaaaggttgcctggatctaaatcagtcgatttggttgctgagaaagattgctcttctgcgtcgaacaaagttgccaattgttctgagtcacagccaacagcttgggctggtccacctggctttgagcctcatgccatctccaagaaatgtactgctgggtccaatgcttctcaagcttgttcaaaggatcattttgcacagtcaggaggtggccacaaaaggcgttcaatcgtctagcaccattcacttcaggccacttgtggcttgatctaacttgatggaagaatctacctaagtttcccatcacttaagaattattagtcgtcaacgttttcttttgtagggagatttctctttaattgactggttttcccatttggagaaaagaccatgtcctaactttattgggtcagtacagtacttcttagaggtcaggttatctgagctagatggtagatgaaaacaatgtcagtgcaatgtaatggtaaaaacctctatgtggaaccattgcatgtttgttt

SEQ ID NO: 87794 - DNA, 410 bp, Oryza sativa
  Clone ID: PAT_MRT4530_86707C.1
tgagaagttaagcaactggtatactattcaaatatgaggcttgcagacctggtcccaggttagtaaagatacagaccctttcctctcctcaccagagaatatttgcttatattctagaattaaaatgggatttctctccctgcccctgcccccagcccaaatctccttctctctctttggaggggagggtggacaggtcaccagaagctctgctgtgatgtgcccgttgcatgtgtgggagccatcaagctcttactgaatctggggattggacatggggaccaatgcaacatattgatctgtcagctgctttggttgtgggtaataaactatctttatctctaacctagaggtatcatgttttctggcaagtgggttatggtcccatactcttcacaatgcctgtcata

SEQ ID NO: 87795 - DNA, 461 bp, Oryza sativa
  Clone ID: PAT_MRT4530_86708C.1
gggggggggggggggtttatttttttttttttttttggccagtttcaattgtttttggcggctctgcgctctcgggggcccccctcctaagtatcgggggctttttgggagcgccttgggggttggggcggggcccggggtgaacaggaaaaggctgctgctttccgggctcggggggggataggccggggcagggggcttgttggcggggttggtgttggggggaacaaaaaccgggggccttaagggggtggcgggcgggtcttccggcggggggtcgcctgtcccgtgcgtgcttgggggggaggggggggcctgggggtgccctggcgggtttcgcagtctttggggtacttggtggccggtggcttttccggtgggggtcgtcctttgcctttgggccccggctttgctttttgggcgggccctgggtgggggcggggcgggccggcgtgggggtt

SEQ ID NO: 87796 - DNA, 438 bp, Oryza sativa
  Clone ID: PAT_MRT4530_86709C.1
atggtgcgcggacaaccaggcggggtgaggcagatagctattgctgcgctctctcgttttgtaacggacgaatccttccccggttctgttcacctgcgcgctcaggtgtacgggatgagcaggtgcctccgaaactccgtccgcttgagaacctgtatgggtaggcgggcgatcaagtttttgggtaacgcttcaagcgcgactgctcttgttcttcacggctactgctgctgcatcgacgccttcaccaagatgtcgacggagattggagacaagatgatgaacgacatcaacggaggcaatcctgcttcaaaatccagcggtgggatgttttcgggttgcccctttttggtgcaactagatcggctcatcggcgcaaagcagaagcagaagcagggcaccaacgaaatgctaccttatcatgcattgggtgattag

SEQ ID NO: 87797 - DNA, 936 bp, Oryza sativa
  Clone ID: PAT_MRT4530_8670C.1
atgtcggcctgcggctaccactccccgcgcttctccgagaattgcgcgtttatcggaggccctgcacaagagcaacatagttgtctgaacaccatggtgaatgctgctagttgcagtgggtttagcttgcacttgtcgggggatgagggcacgcctactggaactactcctagcaatggcaatgtagtgcctttctctctgcatctttcttcagaaagtacttcaaaactatcctcaactcaagccaatggtctaaactctgttacatgcaaagatgtgttaggtggcttttgtattgatgaccaagcacaagagatcaagacagtgccgcaaaatcaatcggaagccaaagaccttcgagaaatttgtaaaatgtctagcgaggaaatcaataaaacatgtgattcaaaaggacatagaagacagcaactgtctggacgaaaggttgatgttcggaaactccgtagcgcggatgtgaatgatgcagttgaactatcaatcgctgcctctgaagccatggttattgcggaaatgatacttcttgattctcagtctgataaactagctacagcttccttagaagctgctctacatgtgaaagaagctcggaaacagtgttttcttgaggagctagaacattcttgtggatcctctgaaagtgatctggatgagactgataggctttcagaattagatgagactgaaatgctcgatgcatttcaagatgttggcctatctcttgttcaaactgcttgtgcatctcaaggtcagaacataagtggcctgaaacaggaaatctctcacgctagttctcacccttgtgatgcagaagctcacgtattagagagctctcctgagaagcaaaatattagatggaacagccatgatgctgatactaatgaccatgtatctgattctttagcaagtcacaataag

SEQ ID NO: 87798 - DNA, 220 bp, Oryza sativa
  Clone ID: PAT_MRT4530_86710C.1
ggccagaactagtgcacagcgagacaagttggcatcggtggcaggctccagcaagggtggctggaggagggtgcgagaggatcctggtggccggcagcacgaatcgagtctcagcggaggtttatctagtgacatggtgaagaatcatgtcaagaatgtggtgactaacccaacgtcgtcagtcgataacattccagcgccactgtgcgacctcccgtag

SEQ ID NO: 87799 - DNA, 229 bp, Oryza sativa
  Clone ID: PAT_MRT4530_86711C.1
atggaggtgtcaattaatcgaattttgtttgatgacgcggcttcacctggaactgtgcacaagtacagaacccactacgatacccataatgcaaacgaacacaatccatgcaggccgctgaagaagtccgaatgggcatggcggcggttcatcggcgccggtggcggagcaggccatggaatggagagagaggccagttccggcagcacagtggcgtgcggcgactccg

SEQ ID NO: 87800 - DNA, 145 bp, Oryza sativa
  Clone ID: PAT_MRT4530_86712C.1
ggaggagatgacgtggaggacggcgacatcgaggagagcccgcgccgcagcttcgacgaccggatgacgacgcgagttggatcgctcgtctgtcagtcgcagtccgcagagactaccgagacacacactgacactatcaattgct

SEQ ID NO: 87801 - DNA, 468 bp, Oryza sativa
  Clone ID: PAT_MRT4530_86713C.1
gttgaaagtaagataactagatcaattaagcacagctcaggtttggttcagatcatttaccgcctgtacaaatagatatccctaacaccaattaaatagtaccaggagaagagcaaaatctgtaagtgatgacaaaaggtagtccaaaaaaatgtgggaagcccctgatgcatttagcatctgcatcaggacaagacaactaacctagagagcaattcagtatgtacactcgatagtcgataccttggttgaaaaacattgggaaacagtcggtcatgattcgtgactaaccatttctttcgcctgagattttgcacagtaaccatttttcattcttggaagctgcagaatattttttgtgcagttggccaaggctacaaaccacaccaaaactgtgctataggccaacgcattttacccacctgaatgcgtgtcccatcttgaaaggaaggtcataagcttttatga

SEQ ID NO: 87802 - DNA, 365 bp, Oryza sativa
  Clone ID: PAT_MRT4530_86714C.1
aggggaaaacacatttttttgggaccatatttttgcaaccaaaacacacgttagggatttaggggaaaacacattattttgcgtccatatttttggaactgaaacacacttagggggaagcacactttttatcaaacatttttataggggaaaacacatttttttggggatatacacattcttggaactcaaacccactttaaaccactaatggattccctccggttcaaaaaaaaacaacctaaaactggatgtgattggttagattcactgtattgggacatgtcacatcccgttctagaatcactttttttgggccagaggaagtagaacccgttgttttggacatttataaccctccaggt

SEQ ID NO: 87803 - DNA, 1104 bp, Oryza sativa
  Clone ID: PAT_MRT4530_86715C.1
atgatgcagacgcggatggggtcagcggaggtcggggtggtgtcgagggatagaggctgcgagtcgtggagcatagtggctgagggtgagagccgaaagggggagcagggagccttgcacggggagggggaggaccggaggagatcgcgccgggaggaagttagggtttgcgggtttgccttgggtcaggggcggagaaacgcgaggcggggagagggcgcgggtcggggcggagttggtgagcggaggggaggtgtcgatgcatggatgacggcggcggcgtggatgcgggagccggtggtggaggcggcgcgcacctggcgacggaagggcttccggcggcggggatcggtggagggcgagccgacgagcagcggcgatgaggacgagcaggagcggcggtcggcggcaatgcagcacggcgatgggggcgggcgggcggcgcgatgtgggaagagagaaggcggagtgcgagtgacaagagtgtacgacaacttatgtctaagacagcttcggccaagtataacttgtccgccaccgcaactgcagattgcagtccttcgcttggttatccttctcacacactgccgctatcgcatgccccatggtagtcgtgctagcagcgccattagcagcgagcgggtccagcgacagcggcaaaggggacgggtggtggcggtgaccggcggcggcaactcccaagtgcgggcgatggatctggtggtggcggacgggctcggcggcgtggggtggcgtagggaagcctggctcctcccctctccatatccggagtggggtgatgcaggggagtctcatctctctctgggctcgatagtgacgactggcggcggcaaaggggatggggtggcagcggcgactcgcgacagggggcggaccagcggcggggactcctgcgggcgactgatttggtggcagcagccgggggaacctcccctctccgggtcggcggcggcgaccggtggtgaccggcagtggctggggctcggtggtggcaagagagccgtcgtggcggggttcgtcagtgggcggaacgtccctgtgtggacgcggacgacatgttgctttacgcgagaattgagatag

SEQ ID NO: 87804 - DNA, 319 bp, Oryza sativa
  Clone ID: PAT_MRT4530_86716C.1
cccgggctgcaggaattcggcacgagggcctgtggtgacttcgtcaatctcaagatatgccggccacagtcttcgccgacaacgaggcgcctgtggtgacttcgtcaatctcaagatatgccggccggtccagtcttccggaggtgcttatatggggtagggtgtgcatgtgtgcgttgccggcccaatcttccggaggtgcttataggggtagggggtgagtgtgcgctgcgaggcgcctgtgggcccagtcttccggaggtgctcataggggtagggtgtgcatgtgtgtgttcataggggtgagtgtgcgcctgcg

SEQ ID NO: 87805 - DNA, 2114 bp, Oryza sativa
  Clone ID: PAT_MRT4530_86717C.1
cccacgcctcccgctcgctctccctttcgcgcaccagaaaagtcgttttttaattttcgagtttccgtggaagattctcgatacctgtccctcgtcgtcgtcctcctccgccggccgccgccgacgaccgcagcaggggtggatccggggcggcgccgattcgtatcctggtaggatcccactgaattcaactgttgaacaaaaagccaggaaggtggctgttcttgtggcactcagtgctagtggaagtgctccagtactgtataggaccatggatgctctttgtgatttctgcaggggagctatggtcattggtctattcccgatcagatgcaccagccttgtgcgtgtcttgtgatcgtaatttgcattctgtcaatcccctttcccgacggcaaacttgcgtccttctttcatgaccgtgggttatagaccctgcacctgatcgctgtcttgaagagaccacctgcctttgtccacacactgaacggaccgggcgtggtggaggatgctcagttgtttttcatcaaagggagagaagaagatgttaatcgtggtgctcaacttcgacacaactttcgagaatctggtcctcgagtatggatatcccgactgaatctacggagacaaactgtgaggaaggaataaacatgatgagcattaatgacaatgacgtcaataaccattgtggtgctccagaagatggccgcttgttggatatagctagcacagcactcatgagtgatttacctacaggagacaagttcaaacctttaataggttcttcttcaggagatgggatgaatcttctgccacttaattcagatcagccagctgagccagtttcaacgacgcctaaggcaccctgtgtcacagacaaagatatgttcaatgatgggagcgtatatggagacttctgtgtggatgatgctgacctaacatttgagaattatgaagaattattcggtacctctcacgttcaaacagaacaactctttgatgatgctggaattgacagttattttgaaatgaaggatgtgccagcagatgaatctaatgagcagcccaaacctgtgcagccagaatgtagcaatgtcgcatctgttgattctgggatgtcaaacccagctgcaagggctgattccagccattgtattcctggtaggcaggctatatccaacatatccctttccttctctggtttgactggtgaaagcagtgctggatattttcaagattgtggggtatcgtcaatgatccttatgggtgagccaccctggcatcctcctggtcctgaaagttcatctgctggaggcagcagagataatgctcttacacggtacaaggagaagaagaagagaagaaaatttgacaagaagataaggtatgcttctcgtaaggctagggcagatgtgagaaaaagggtcaaaggacggtttgtaaaggctggcgaagcatatgactacgatccgctgagccaaacaagaagctactaaagcctttcactcgattggtttcgtccagtgttcaagtagcaattttcagcagctgatttgatgttggttgcacggcaagcatgatcactggagaacacaagcaattgcggcagaccttgcaattgaaaacggggaaaggaaaccaaacgctgtgatcaaatcaaattaatgaaataaaaaaggaaaaaataggatgcaaacatgcgagaagctcatggatggtaatgctccattttctcctgtacagttcatgcatcttcagttgcttctggttgagatgtctgaatcactctctaccatctgtgcattaatcaaatacaaatacatgggcctaccgcacgacgacgaacgcacctgcttctgttgtgatgttttgtgttgcggctgtcaggctggatctctaggtaacatgattaattatactactgatggaatttgcaccgctgtaatattatttacgaatcacaatctgccgtgggattgttcttctgtcgtgtatgtatgtgtatatagatggatggctgttaagaaaatattgtgacgattataaagtttacctttgtaaaaaaaaaaaaaaaaaaaaattgatctgtaaaaaaaaaaaaacctgcagcccgg

SEQ ID NO: 87806 - DNA, 516 bp, Oryza sativa
  Clone ID: PAT_MRT4530_86718C.1
atggctggcgccggcaccgtctgctccatgtgcggcgacgtcggcttccccgacaagctcttccagtgcgcgcgctgccgctaccgcttccagcactcatactgcacgaactactacggtgacgcggcgcccgccccggccggcgccgacatgtgcgactggtgcctgagcgacgtcgccgggaaggcgaggtactcgtcggcggccgggaagcagcagggcgccggaagccaggagtcatccacgacgacgtcgagctcctccgccggaaggggtggcggcggcaagcccggcgccggcgagcaggagagcgggcggcgggggaccaaggcggccggccgaagttttggggccggggaactgaggagcaactggccatcacgcacgttgcatgctgccaagccgagccatgtcgatgtaggggtcaacgaatcgtacccaaagacccaaagtggccgacaaagacatgctcctacacaaacctcaagctctgcacggcctcctctctacgagtag

SEQ ID NO: 87807 - DNA, 279 bp, Oryza sativa
  Clone ID: PAT_MRT4530_86719C.1
atggggaatcggtgcggtggacgcgtggagaagattcgtggatttttgagaatggattggggcggattgatgaaccctagcttcgtcggcgtggctttgcactgtagcaaggagtggggaaatggcgagagttttggcgaggaagacaaagcgttgcttggactttggacagagcaggaggaattgaagcactcggattattgctacttcgtcgactgcaaaggtctcaggggctactgtggagattgtggatatcccatatctacacggcagctatag

SEQ ID NO: 87808 - DNA, 3459 bp, Oryza sativa
  Clone ID: PAT_MRT4530_8671C.1
atggccggtgaaggtgatcttgtgcacgatgatgatgagcagcgtgctgaagaacaagctgatggcgcacatgctcaggaacagactcgtgttcatggtcttcatccctttggagtttggatcctcgcggaggaagacgttgaggagcatgtaggagaaactggggcatcagcaggagcacggcgctgtgcgacgacgatgatgtcagccggtgccacaacggccaagcgggtgatggagagaaagaggccacaaacacgcttggagctggggcttgccaacgtcgtggctatggcggacgagcggaacaccagcggtgttttcccctcgcttggtctgcaactggacggagacgacagaggtgcatgggctggaaaacgatgctaccgtcggataaatattatagcgccgaaaaaatttgcaaaactagaccctgccgcccttcgcaagggcggcaagccgacgtggcacacggcgcgctggacggcgcgggacggccgtcctcctgccccctcctgccctcttgccgccctggcaaagggcggcaggacccccttgccgcccttacagaaggcggcaggcctggccgcctataaagcccagccggctcctttgaggagcccattccctcctaacctctccacatcaaaaaaaaaaaaaaaaggagaaggggaggagaagaaaagaagaggcgaagccctgccagtttcaaacttcgatttcagtaagtcgggcaacagagggtttttattgggaactaatgccggttcaaaactctgggatgtggagatggatccaagtgtacagatgaacatggatgatggcgaggggccaagtgcagaagtgaatgagattgaagtggatcaggtcaacgcaccagaggaagatggagtagctccagtagtagctccagtaggcatgcaacctggtggagtggctgacgagggggagactgtgggtgccattgtggacgaaatggaaaaagaggatagtgacaacgagcgtgtcgaggaagatgattcgtcagatgatgacgagaacaatattaatccagctgaatgggctagtgatgatttttctggtttggtcatctctgaaggggaaaatgtgagatgggagtacaaggaaaacgagattatcgagggagcgaggtatggtaatggagaagacatgaaggaggcggtgaagcattatgcagtgtcacttcatagggagttttgggttgccaagtctaaccggacacaatatgaagttaggtgtgttaatgaaaaagatgggtgtccgtggagagtgcacgcctataaggggaaatggaaggactactggacagtgtcggtcgttacgaaacatacttgttatctacctggtgttcaaaaataccacaggaacattacatgtgcatttgttgcatctgagatgtatgcgcatgtcgtggacaatctggcatatgaaccgaagtcaataatccgacatatcgaacagactttcaagtatacaattagctatgccaaggcgtggagggccaaacagaaaataatagagatgagatttggaacttatgaagcctcatatgacaatttgccacgtctgctatctgttatccaacaaagaaaccctgggacctcttgtgcactcaagacattcccctcaattgaacatcctggcaagactgtgctgcaaagagcgttcttagctctacatgcatgcaagatggcattcgtgcactgtcgtccagttctttgtattgatggcacatttttgaccgggaagtatcggggccagatactaacggcaattggggtagatgggaacaatcaggtattgccgttggcatttgcttttgtcgagagcgagaacaccgacagctggtactggttcctccatctggttaagacagaagttgttggtatgaggcccaatgtgtgtctaatacatgacaggcacgccggtatgcttcgagcgatagaagagttaaagtttgggactatggaaagaggataccctggccagtgggaagatgtacaaagcaggtggtgcatgcgtcatatgggagctaatttcttcaagcaatttaagaacaaggagttgatgaacatgttcaagaggctatgcaatcagaaccaggagaaaaaattcaatgagctttggaagagattagatgagttgacaggcaaatgtagtgaccagcgtgcaacaagaccagcggccgctgtacctgaccctcctcaagcactcggagctctcccaacagacagtgtaacattggttagaagaactggggagcaaattcgaaaattttctcagtggattgagaatgagccaaaagagaaatgggctaagacttatgacacaggtggtgctagatatggtataatgacaacaaatttggccgaagtttacaactgggtgatgcgcggtgtccgtggactcccactagttggtatactggatgactacggttccgatggtgttcgacatctgtgtcgagccgcacgcaccttaccgcgtgatgcggcagttcggcttccgtactcgcgcaagggtcagcactcagctggtcactggcctgccaagttggggccttttctcgacgactggttgcttgctaccgaggaggtcgtggaccacgcgggagagccacacacggaggaggggtatgaggcgtacctacgttggtatcagccacgcacccgtactagagtcacctacgctccgacggagcaacaggcccacgccgcgagcgccagagacctctacgccaggcaccgcgaccaggacttcgctcgtgcggccgttgagtgcaacagggtcgtcgttgatgctacaacggcgatccaacggttaggcgcggggattgaggtgggggcagacgagcacctgtcgacgtacacgcggatacgggactcgatgcgctcggttctccgtgcgctgacctgtcgtgctgccgacgttgctcaggcagacgcagcaccacaggtgcgtccccgaccgactgctcctcgtccagctgcgcacgttcctacgccgacaccccctcccttcggaggcttcgctcagcctgggacgacgccgggcgcccactcctggcaggctgcggggtcatcgtcacaggcaggtgtgtcggcctcgctgtctgcgcagttctggcaggacgccgggacttcgtcacagccgcccggcacgtcttggcagggtcctaccgggacttcgtccgagcacgggtgggcttccgccacgcacttcgacattagtgacttcgacttcccggacattatcggtccctcacagcttggaggcgcaccgccggtgcacacgcaggagcagtcgccctccaccccactcccagaccctcgcgctacccgtgctgtcccaccggatcgcttcacgtactcccaggaccacgtgcgagcacaggcccggaggaccaagcggggtcgcggcgcgagtcacggccagtag

SEQ ID NO: 87809 - DNA, 1581 bp, Oryza sativa
  Clone ID: PAT_MRT4530_86720C.1
atggcacctgcaccctcgcactgccacgccacgaatggcaacaatggcgccatcgccgcctctgatacgccggtgaagacacagcattgcgcgcggctgctcgacgccgacgagttccggcgtcagggtcgtctggttgtcgaccttatcgccgactactacgccggcatgggggaataccccgtgcaccccaccgtcagccctggcttcctccgccaccgcctcccggcggagccgccgtcccgccgggagcccgacgcgttcgccgcggcgatgcaggacgtccgtgacgtcatcctgccggggctgacgcactggcagagcccccgccacttcgcgcacttcccggcgtcgagcagcaccgccggcgccctcggcgaggcgctcgccgccggcatcaacgtcgttcccttcacgtgggccgcctcgcctgccgccaccgagctggagatggtggtcgtggactggctcggcaaggcgctccacctgccggagcggctgctgttcgccggaggcgggggcggctccatcctcgggaccacctgcgaggccatcctctgcgccctcgtcgccgctagggaccgcaagctggcggcgatcggcgaggggaggatcggcgacctcgtcgtctactgctccgaccagacccacttcgcgttctgcaaggccgcgcgcattgccggcatccggcgcgagcattgccgcgagataccgacctaccgggacgacgcgttcgcgctctctccggcggcgctgcgggccgccatgcggcgcgacgccgacgccggcctggtcccgctgttcgtgtgcgccacggtcgggaccacccagaccaccgccgtggaccccgtcggcgagctctgcgccgccgcggcgccgcacggcgcctgggtgcacgtcgacgcggcgtacgcggggtcggcgatggtgtgcccggagctccgcggcgcggtcgccggcggcgtcgaggccgtggactcgttcagcatgaacgcccacaagtggctgctggcgaacaacgactgctgcgtcatgtgggtgaggacgccgtcggcgctggtggcggcgctgggcacggaccaggagtacatcctcaaggacgccgcggcggagacggcggcggcggacggcggcgagggcgtcgtggactacaaggactggggcatcacgctgacgcggcggttccgcgcgctcaagctgtggctggtgctccgatgctacggcgtggagggcctgcgcgagcacatccggtcccacgtcggcatggccgccgcgttcgagggcatggtcagggccgacgcgaggttcgaggtggtgacgccgaggcggttcgcgctggtgtgcttccggctccggtcacccaacaagaagacggcgaacgagctcaacaggcggctcctcgaggaggtgaacgcggccagctcgggaccgtacatgagctccgccaatgtcggcggcgtgtacatgctcaggtgcgccgtcggcagcacgctcaccgaggagcgccacgtccgggaagcctggaaggttgtccaggatcgggctacgtccatcctttcgaaaatggagattattatgtag

SEQ ID NO: 87810 - DNA, 390 bp, Oryza sativa
  Clone ID: PAT_MRT4530_86721C.1
atggagtcctctttctctgtgtgcttggaggcgagcagatgcgggtgcggcagtgtgactctggccgacggcgagtggcgggcgccgcagctgggtggctccgtctgcggcggccgcagatgggagggaagcatgcagcagcggctgccgaccaaatctggggacgtcgtgctcgtcaacggaggacatcgccgtgtaggagacaggggtggggaaaacgagcgtggtggtcgttcacggcgccggcgggggagagtcgcgagaggacctctggcgccggcgggggagagtcgcgagaggacctccgccgccaacagtggagaaggaagaagaaggagggtcgccgagggagctcgagatggcagcgggctcgtcgattccttcctgtga

SEQ ID NO: 87811 - DNA, 6006 bp, Oryza sativa
  Clone ID: PAT_MRT4530_86722C.1
atggccgggcaagcaaaggcgcacgacctctctccgagtgtgagcggcgacgacggggagccaaacccacgccgtcgagctcgtactccaccgcctcctccacaccaaagtcctaagcagggggaggccctcgagagggtcgacagatccgcggcttcaccgatcgcgggcgatggaggagaacggcgagatggggagcgtcgcctcctcgtctatggcgacggcagcacgccccagggcgcgcttcaggctgctggcgcgctcctacgtcacccgcccgtcgtccctgacccggagtctccagcccagcgatggctggacgacgtggccaacttggtcatgacggcacagcagcgcctgggtgctggtggacggtccgccaccaccaagacctccggcgccgccactaccggctccgtgtcgtcaagacggagggcgcggcgagcggcggctgttgcacgccattcggctgccactccctcgtcggcacctccgactcgggaggatcagcgtggagagccggatgcccgcctcgacatcgagcgccggcgtaatagccggcgtactccccgcgcaacggagggcgcctctttgtccagagtgtcacctcgacatggacgtgaggaccagccctccgtgcccccggctggtggtgtcggctgtagagcctttgtggcgagtcttcggaatgtccgttggcccccaaggttccggcccaccatcaccgagaagtatgatgggagtgtcaaccccaccgagtttctccaggtctatacgaccgggattgaggccgctgggggtgacgacagagtcatggcgaatttctttcccatggccctgaagggacaggcgcggggttggctaatgaacctgccacctgcgtcggtccactcttgggaggatttatgccaacagttcactatgaactttcaaggcacttatccgcgcccaggcgaagaagcggacttgcacgcggtacagcgaggggatgatgagtcacttcgctcgtacattcagcggttttgccaagtccgcaataccataccatgcatccctgcacacgcggtgatctacgcgttcagggggggtgtgcggcacaaccgcatgctcgaaaagatcgcttccaaagagccccagactaccgcggagctttttcagctcgcagaccgagtggctcgtaaggaggaagcatggacctggaacccctccggttccggagtggcagcttcggccgcccccggatccgccgctcagacagggcggcgtgacaggaggaggaagaagtggtcggtccattccggcgacgagggtcatgtcctcgccgtcgagggcgctccgcgggccacccgaaaggggaggcctgcgagcgacaaaaagaaagaggctggtactcccaccagggagcgcccagtcggcaagtggtgctccgtccacaacacctccctccacgatctcgcggactgtcgcacggtcaaaaacttggctgagcgaacgaggaagtgggaggaggacaggaggaaggaacgccgtgagggcaagtcgccggcaactccctccggtaaacggcgaagtgaggccaaacagaaggcccctgctgttgacatcgatgacggtgatgatgacctaggtttccaagaacctggggccaccattgccactgtcgatgggggagcgtgtgctcacgtctctcgccggagcctcaaggccatgaagcgagagcttctggccgcggcccctactcatgaggcgacgcgccgggcgcggtggtcggaggttgccctcactttcgaccagaccgaccacccaccgtgcgtcgcccggggagggcagattgcgatggtggtttcccccaccatctgcaacgtgaagttggggcgtgtcctcatagatgggggagcggccctcaacatcatttcccccgcggcttttgatgccatcaaggccccggggatggtgctccagccgtcccaaccgattatcggtgtgacgccggggcacacatggccgttgggtcacatcgacctaccggtcacctttggtggatcagccaacttccgcacggagcgggtgaacttcgatgtggcggacctcagtctgccctacaacgcggtcctggggaggcccgcgttggtgaagttcatggcggcggtccactacgcctacctccagatgaagatgccgggccccggtggccccatctctgtccatggcgacctgaaagtcgcgctcgcttgcatggagcagcgcgcggaccacctcgctgctgcgtccaagcccgagggtggtgacgagaggcttggcacctccgcccccaccgccccgaggcagcggattgtcacatgcgccgaggtcccggaagacgcgctcgtctccttcctgcgggcaaacgctgacgtcttcgcatggagaccggcggatatgcccggggtccccagggaggtgattgagcaccgtctcgccgtgcggccgggcgcaaggccggtccggcagaaagtgcggcggcaggccccggaacgtcaagccttcatccgcgaggaggtggcgagacttctggaggccggattcatccgtgaagtcatccatccggagtggctggcgaacccggtggtcgttccaaaggcgaacggcaagcttcggatgtgcatcgactacaccgaccttaacaaggcatgtcctaaggacccttaccccctgcctcgcatagatcagattgtcgactccaccgcggggtgcgaccttttgtgttttctagatgcatactctggttaccatcagattcgcatggctagggaggatgaggaaaaaactgcgttcattacccccgtaggaacctattgttatacatcaatgcccttcgggttaaagaatgcaggtcctacttttcaacgtactactcgaatttctttgggtagccaaatagggcataatgttgaggcttatgtcgatgacttggttgtaaagacgcgcaaccaagagactttactcttagatctagaggaaacttttgaaaatctccgctccgcccgcataaaactgaaccccgataagtgcgtgtttggtgtacctgcgggcaagcttctcgggttcttggtctctgcccgaggcatcgaggccaaccccgagaagatacgagctatagagcggatgcgcccccccagcaaacttagggatgtgcaatgcgtcaccggttgcattgccgccctaagtcgtttcatatcgaggctgggagagaaggcgctacccttatttaagctcctcaagcgctcggggccgtttacttggacggaggaagctgaacgtgccctcactcagttgaagacatatctcagctctcccccagttctagtcgccccggggccaaacgagcccctactactctacttagcggcgaccccccaagtagttagtgcagcgttggttgtggagcgcgatgaagacaatcctcatttcgcgcacccccgccctgtgctgacttggcccgggagcgagcagggaggagaagcccccgagtcgaacggtggcctaaggcccctgacgaccggagtcggccctctgcccgcttgtcagacggtgctgggtgcccccgaccctcaggaaggccccgaggccactgcgggaaggccgcacctatcgccctttggccccgaggctaaccctgtgctgactcgacccgggagaaagcagggagaagaggcccccgagccgaacggaggcctgaggcccctgacgaccggagtaggccctttgcccgcttgtccgacgacgccaggagcccccgacccccaggacggccccgaggccactgtgggaaggccgctcctgtcatcctccgaccccgaggtcatcggcacagaagacgagtgcgccccgagaggccacttggacgaagaacgccccggggatgcggcccctagcgaagaggatcggccccgccgaaaggtgcagcggcctgtctactttgttagtgaggccctccgggacgccaagacccgataccctcaggcccagaagatgctttacgctattctgatggcctcgaggaaactgcgccattatttccaggcgcatcgggtcactgtggttacgtcttaccccctcggtcaaatcttgcataatcgagagggtacaggacgagtggtaaaatgggcaatcgagctttctgagttcgatctgcactttgaaccacgccacgctatcaagagccaggccctcgccgattttgtggcagagtgtaccccggctccagagaccgtctcaatccccgaggccagcacggacccctctcagctgcctcacaccgcccactgggtgatgcagttcgacggttctctgtctctccagggcgccggtgcgggggtcacgttgacctctccgaacggagacgtcctcagatacttggtccgtctcgactttcgagcgactaataatatggcagagtacgagggactccttgccggactcagagtggcagctggactggggatccgccgcctcttggtgttaggcgactcccagctggtcgttaaccaggtctgtaaggagtaccggtgctctgacccacagatggacgcttacgtacgccaagtgcggcgtatggagcgccattttgacgggatagagcttcggcatgtacccagacgggataacatggttgccgacgaactctcacggctcgcgtcctcgcgagcccagaccccaccgggcgcctttgaagaaaggcttacccagccgtcggcgcgacccgaccccttaggggagacggatgcgcctgaccggcccccgaggcccgtcggagtccaggcctcgggacccgaagggagcgctccaagctcccttagattgattgcttggatctctgagatccaagcatacctcacagataagactctacctgaggaccgtgaagggagtgaacgcgtccaacgcatttccaaacgctacgtgctggtagaagggaccctctatcggcgcgcggctaatggaatcctcctgaagtgcattcctcaggaacaaggcgttgagcttcttgccgatatccatgaaggcgagtgcggagcccattccgcctcgcgcaccttggttggcaaggcctttcgtcaagggttctattggccgacagctctcaatgatgcagttgatctggtccggcgatgcagagcgtgtcagtttcacgccaagcaaatccatcagccggcccaggccctgcagatcataccactttcgtggccatttgctgtctgggggctcgatatcctgggaccgtttaagcgggccccgggcgggtttgagtatctgtatgtcgcgatcgacaagttcactaagtggcccgaggcttatccggtcgtcaagatcgataagtactctgcacttaaattcattaagggcatcacggcccgttttggagtgcctaaccgtattattacggataatggcacccaattcactagtgaactcttcggcgactactgcgaagacatgggcatcaagctcttttcgcctcacctgcccaccccagaagcaatggccaagtggagcgcgccaatgcagaaatcctcaaaggccttaaaaccaagaccttcaatattctcaagaagcatggcgattcgtggatcgaggagttgccagcggtgctctgggcaaaccgaaccacaccaagccgagcaaccggggaaacgcctttcttcctcgtctacggcgcagaagcgagatgacctcgactacttggaagagcgaaggaggcgcgcggccctccgagccgcgcgctaccagcagagcctgcggcgctaccatcagcgccacgtccgggcccgatcactctgcgtcgacgacctcgtcttacgccgcgtccaaacgcgtgctggattgagcaagctctcaccaatgtgggagggtccgtatcgagtgatcggtgtcccccggccgggctccatacggctggccacgggcgacggcactgagctgcctaacccgtggaacatcgaacaccttcgtcgcttctacccctga

SEQ ID NO: 87812 - DNA, 697 bp, Oryza sativa
  Clone ID: PAT_MRT4530_86723C.1
actagtggatccccgggctgcaggttttttttttgattgagcaaagtaatgtgctaatatttttttcttttttattaagcgatagacgcgcgcgcgtacaccattacacacaacaccacactcacacctccgtgaatgcgtcccctaacaaacgttctgagagacggagaccagtagcagttccctgcaagtgacagtacatacctcatctactagcgttcaattatgatattctgtgacggggagcttttctgttttctctttatttaacggttttgcatcatacgagttcttaagcattgaaacaattgtggtgaacgtttgagtcttcaatcatgtacctccattaacgaaattatatctccagctgattgtttatcactgagtacagaatcttcataatataaggttgtcccagtaggacgctcaggtcagaatccccaaaccaatgtaggattcaaagctatccctgagggtttcctccatgggcctgaaggtccaacctagcttctcaagcttctctgaactaaacctagtgttttgttcctcatccacttccaaaacttttggggatcattgaaagctggatatcagctctttgacgtgtttattatatcacttagttttcttggagttgaactgcatatgtatcgttcagatccccctgaatttgcataaactaaaagaagagcatcgg

SEQ ID NO: 87813 - DNA, 609 bp, Oryza sativa
  Clone ID: PAT_MRT4530_86724C.1
atcgtgtccacctttccgtgatattggacatcgtcatggctctcgctgtctcggcggtcatgtggtccgtcatgcacgcgatcgtggagctgcgggcgctcctgttggtgttaccgctcttcctcatcttgctggtgcgtgcatacgatgtcgttatcagcgcccggtggcggtgccggtggcggtgtcggtggtggagaggatgaaaagccggcgtcgatggagctgaccaaggtcacgttcaccgggtttctggccgtgtcgataccagctgtcaggactggctcactctgcagctccaccgattggttcctcatctttgcggcatccgccattgtttcaggcttcgcttggaggctcctgacgcacgccacagatggggacgacggccaatttcgcttccttctgcacacatttctgcattgccattgcaacggtgccattcacagatatggccgtaaaggctctgcactgatttttatttttatttttttggtacaagggggataacttggagcatcactttgacaagcaaagcagagctgatataattataacctgctatgcggtttagtgtaaaatttgcattcaaaaaaaaaaaaaaaaaaa

SEQ ID NO: 87814 - DNA, 5874 bp, Oryza sativa
  Clone ID: PAT_MRT4530_86725C.1
atggccgagcaagcaaaggtgcacgacctctctccgagtgtgagcggcgacgacggggagccaaacccacgccgtcgagctcgtactcccccacctcctccacaccaaaatcctaagcagggggaggcactcgagagggtcgaaaaatccgcagcatcgccagtcgcgggtgatgcaggagaacggcgagatggggagcgtcgcctcctcgtctacggcgacggcaacacgcctcagggcgcgcttcaggctgttggcgcgctcctacgtaacccgcccgtcgtccctgacccggagtctccagcccagcgatggctggacgacgtggccaacttggtcatgacggcacagcagcgcctgggtgctggtggatggtccgccaccaccaagacctccggcgccgccactaccggctccgtgtcgtcaaggcggagggcgcggcgagcggcggctgttgcacgccattcggctgccactccctcgtcggcacctccgactcgggaggatcagcatggagagccggatgcccgcctcgacatcgagcgccggcgtaatagccggcgtactccccgcgcaacggagggcgcctcttcgtccagagtgtcacctcgacatggacgtgaggaccagccctccgtgcccccggctggtggtgtcggctgtagagcctttgtggcgagtcttcggaatgtccgttggctcccaaggttccggcccaccatcaccgagaagtatgatgggagtgtcaaccccaccgagtttctccaggtctatacgaccgggattgaggccgctgggggtgacgacagggtcatggcgaatttctttcccatggccctgaagggacaggcgcggggttggctaatgaacctgccacctgcgtcggtccactcttgggaggatttatgccaacagttcactatgaactttcaaggcacttatccgcgcccaggtgaagaagcggacttgcacgcggtacagcgaggggatgatgagtcacttcgctcgtacattcagcggttttgccaagtccgcaataccataccatgcatccctgcacacgcggtgatctacgcgttcagggggggtgtgcggcacaaccgcatgctcgaaaagatcgcttccaaagagccccagactaccgcggagctttttcagctcgcagaccgagtggctcgtaaggaggaagcatggacctggaacccctccggttccggagtggcagcttcggccgcccccggatccgccgctcagacagggcggcgtgacaggaggaggaagaagaggtcggtccattccggcgacgagggtcatgtcctcgccgtcgagggcgctccgcgggccacccgaaaggggaggcctgcgagcgacaaaaagaaagaggctggtactcccaccagggagcgcccagccggcaagtggtgctccgtccacaacacctccctccacgatctcgcggactgtcgcgcagtcaaaaacttggctgagcgaacgaggaagtgggaggaggacaggaggaaggaacgccgtgagggcaagtcgccggcaactccctccggtaaacggcgaagtgaggccaaacagaaggcccccgctgttgacatcgatgacggtgatgatgacctaggtttccaagaacctggggccaccattgccactgtcgatgggggagcgtgtgctcacgtctctcgccggagcctcaaggccatgaagcgagagcttctggccgcggcccctactcatgaggcgacgcgccgggcgcggtggtcggaggttgccctcactttcgaccagaccgaccacccaccgtgcgtcgcccggggagggcagattgcgatggtggtttcccccaccatctgcaacgtgaagttggggcgtgtcctcatagatgggggagcggccctcaacatcatttcccccgcggtttttgatgccatcaaggccccggggatggtgctccagccgtcccaaccgattatcggtgtgacgccggggcacacatggccgttgggtcacatcgacctaccggtcacctttggtggatcagccaacttccgcacggagcgggtgaacttcgatgtggcggacctcagtctgccctacaacgcggtcctggggaggcccgcgttggtgaagttcatggcggcggtccactacgcctacctccagatgaagatgccgggccccggtggccccatctctgtccatggcgacctgaaagtcgcgctcgcttgcatggagcagcgcgcggaccacctcgctgctgcgtccaagcccgagggtggtgacgagaggcttggcacctccgcccccaccgccccgaggcagcggattgtcacatgcgccgaggtcccgaaagtgcggcggcaggccccggaacgtcaagccttcatccgcgaggaggtggcgagacttctggaggccggattcatccgtgaagtcatccatccggagtggctggcgaacccggtggtcgttccaaaggcgaatggcaagcttcggatgtgcatcgactacaccgaccttaacaaggcatgtcctaaggacccttaccccctgcctcgcatagatcagattgttgactccaccgcggggtgcgaccttttgtgttttctagatgcatactctggttaccatcagattcgcatggctagggaggatgaggaaaaaactgcattcattacccccgtaggaacctattgttatacatcaatgcccttcgggttaaagaatgcaggtcctacttttcaacgtactactcgaatttctttgggtagccaaatagggcgtaatgttgaggcttatgtcgatgacttggttgtaaagacgcgcaaccaagagactttactctcagatctagcggaaacttttgaaaatctccgctccgcccgcataaaactgaaccccgataagtgcgtgtttggtgtacctgcgggcaagcttctcggcaaacttagggatgtgcaatgcgtcaccggttgcattgccgccctaagtcgtttcatatcgaggctgggagagaaggcgctacccttatttaagctcctcaagcgctcggggccgtttacttggacggaggaagctgaacgtgccctcactcagttgaaggcatatctcagctctcccccagttctagtcgccccggggccaaatgagcccctactactctacttagcggcgaccccccaagtagttagtgcagcgttggttgtggagcgcgatgaagacaatcctcatttcgcgcacccccgccctgtgctgacttggcccgggagcgagcagggaggagaagcccccgagtcgaacggtggcctaaggcccctgacgaccggagtcggccctctgcccgcttgtcagacggtgctgggtgcccccgaccctcaggaaggccccgaggccactgcgggaaggccgcacctatcgccctttggccccgaggctaaccctgtgctgactcgacccgggagaaagcagggagaagaggcccccgagccgaacggaggcctgaggcccctgacgaccggagtaggccctttgcccgcttgtccgacgacgccaggagcccccgacccccaggacggccccgaggccactgtgggaaggccgctcctgtcatcctccgaccccgaggtcatcggcacagaagacgagtgcgccccgagaggccacttggacgaagaacgccccggggatgcggcccctagcgaagaggatcggccccgccgaaaggtgcagcggcctgtctactttgttagtgaggccctccgggacgccaagacccgataccctcaggcccagaagatgctttacgctattctgatggcctcgaggaaactgcgccattatttccatgcgcatcgggtcactgtggttacgtcttaccccctcggtcaaatcttgcgtaatcgagagggtacaggacgagtggtaaaatgggcaatcgagctttctgagttcgatctgcactttgaaccacgccacgctatcaagagccaggccctcgccgattttgtggcagagtggaccccggctccagagaccgtctcaatccccgaggccagcacggacccctctcagctgcctcacaccgtccactgggtgatgcagttcgacggttctctgtctctccagggcgccggtgcgggggtcacgttgacctctccgaacggagacgtcctcagatacttggtccgtctcgactttcgagtgactaataatatggcagagtacgagggactcattgccggactcagagtggcagctggactggggatccgccgcctcttggtgttaggcgactcccagctggtcgttaaccaggtctgtaaggagtaccggtgctctgacccacagatggacgcttacgtacgccaagtgcggcgtatggagcgccattttgacgggatagagcttcggcatgtacccagacgggataacatggttgccgacgaactctcacggctcgcgtcctcgcgagcccagaccccaccgggcgcctttgaagaaaggcttacccagccgtcggcgcgacccgaccccttaggggagacggatgcgcctgaccagcccccgagacccgtcggagtccaggcctcgggacccgaagggagcgctccaagctcccttagattgattgcttggatctctgagatccaagcatacctcacagataagactctacctgaggaccgtgaagggagtgaacgcgtccaacgcatttccaaacgctacgtgctggtagaagggaccctctatcggcgcgcggctaacagaatcctcctgaagtgcattcctcaggaacaaggcgttgagcttcttgccgatatccatgaaggcgagtgcggagcccattccgcctcgcgcaccttggttggcaaggcctttcgtcaagggttctattggccgacagctctcaatgatgcagttgatctggtccggcgatgcagagcgtgtcagtttcacgccaagcaaatccatcagccggcccaggccctgcagatcataccactttcgtggccatttgctgtctgggggctcgatattttgggaccgtttaagcgggccccgggcgggtttgagtatctgtatgtcgcgatcgacaagttcactaagtggcccgaggcttatccggtcgtcaagatcgataagcactctgcacttaaattcattaagggcatcacggcccgttttggagtgcctaaccgtattattacggataatggcacccaattcactagtgaactcttcggcgactactgcgaagacatgggcatcaagctctgcttcgcctcacctgcccaccccagaagcaatggccaagtggagcgcgccaatgcagaaatcctcaaaggccttaaaaccaagaccttcaatattctcaagaagcatggcgattcgtggatcgaggagttgccagcggtgctctgggcaaaccgaaccacaccaagccgagcaaccggggaaacgcctttcttcctcgtttacggcgcagaagcggttctcccatccgagctcaccctgaggtctcctcgggccaccatgtactgcgaagctgatcaagatcagcttcgcagagatgacctcgactacttggaagagcgaaggaggcgcgcggccctccgagccgcgcgctaccagcagagcctgcggcgctaccatcagcgccacgtccgggcccgatcactctgcgtcgatgacctcgtcttacgccgcgtccaaacgcgtgctggattgagcaagctctcaccaatgtgggagggtccgtatcgagtgatcggtgtcccccggccgggctccatacggctggccacgggcgacggcacggagctgcctaacccgtggaatatcgaacaccttcgtcgcttctacccctga

SEQ ID NO: 87815 - DNA, 3909 bp, Oryza sativa
  Clone ID: PAT_MRT4530_86726C.1
atgaggacaccgttggggcgtgtcctcattgatggaggagcagccctcaatatcctttcccccgcagcctttgatgccatcaaggccccggggatgatgctccggccgtcccagccaatcatcggcgtgacgccggggcacacttggccgctaggtcatatcgacctcccggtcacctttggtggacccgccaatttccgcacggagcgggtgaacttcgatgtggcggacctcagtctgccctacaatgcggtcctggggaggcccgcgttggtgaagttcatggcggctgtccactacgcctacctccagatgaagatgccgggccccgacggccccatctctgtccatggcgacctcaaagtcgcgcttgcttgtatggagcagcgtgcggaccgcctcgccgtcgtgtccaagcccgagggcggcgacgagaggcttgacacatccgcccccgccgccccgaagcagcggatagtcacgtccgatgaggtcccggtcaaggaggaagacgcgctcgtctccttcctgcgggcaaacgctgacgtcttcgcatggagaccggcggatatgcccggggtccccagggaggtgattgagcaccgtctcgccgtgcggccgggcgcaaggccggtccggcagaaagtgcggcgccaggccccggaacgtcaagccttcatccgcgaggaggtggcgcgacttctggaggccggattcatccgcgaggtcatccacccggagtggctggcgaacccggtggtcgttcccaaggcgaacggcaagcttcggatgtgcatcgactacaccgaccttaacaaggcatgtcctaaggatccttaccccttgcctcgcatagatcagattgtcgactccacagcagggtgcgaccttttgtgttttctagatgcatattctggttaccatcagattcgcatggctagggaagatgaggaaaaaactgcgttcattactcccataggaacttattgttatacgacaatgccctttgggttaaagaatgcaggtcctacttttcaacgtactactcgaatttctttgggtagccaattaggacgtaatgttgaggcttatgtcgatgacttggttgtaaaaacgcgcaaccaggaaacgttgctttcagatttagcggaaacttttgagagcctccgctccgcccgcataaaactgaaccccgataagtgtgtgtttggtgtacctgcgggcaagcttctcgggttcttggtctctgcccgaggcatcgaggccaaccccgagaagatacgagctatagagcggatgcgcccccccagtaaacttagggatgtgcaatgtgtcaccggttgcatggccgccctaagtcggttcatatcgaaactgggagagaaggcgctacccttatttaagctcctcaagcgctccgggccgtttacttggacggaggaagctgaacgcgccctcactcagttgaaagcatatctcagctctcctccggttctagtcgccccggagccaaacgagcccctgctactctacttagcggcgaccccccaacgagcagggaggagaggccccgagccgaacggtggcctaaggcccctggcgaccggagtcggccctctccccgctcgtcagatggtgctgggcgcccccgaccctcaggaaggccccgaggccactgcgggaaggctgcacctatcgccctctgaccccgaggctaaccctgtaccgattcgacccgggagggagcagggagaagaggcccccgagccgaacggtggcctaaggcccctgacgaccagggttggccctttgcccgcttgtccgacgacgccaggagcccccgacccccaggacggccccgaggccactgcgggaaggccgcccctgtcgtcctccgaccccgaggtcatcggcacagaagacgagtgcgccccgaggggccacttggacgaggagcgccccggggatatggcccttagcgaaggggatcggccccaccgaagggtgcagcggcctgtctactttgttagcgaggccctccgggacgccaagacccgataccctcaggcccagaagatgctttacgctattctgatggcctcgaggaaactgcgccattatttccaggcgcatcgggtcactgtggttacgtcttaccccctcggtcaaatcttgcataatcgagagggtacaggacgagtggtaaaatgggcaatcgagctttctgagttcgatctgcactttgaaccacgccacgctatcaagagccaggccctcgccgattttgtggcagagtggaccccggctccagagaccgtctcaatccccgaggccagcacggacccctctcagctgcctcacaccgcccactgggtgatgcagttcgacggttctctgtctctccagggcgccggtgcgggggtcatgttgacctctccgaacggagacgtcctcagatacttggtccgtctcgactttcgagcgaccaataatatggcagagtacgagggactccttgccggactcagagtggcagctggactggggatccgccgtctcttggtgttaggcgactcccagctagtcgttaaccaagtctgtaaggagtaccggtgctctgacccgcaaatggacgcttacgtacgccaagtgcggtgtatggagcgccattttgacgggatagagcttcggcatgtgcccagacgggataacatgattaccgacgaactctcacggctcgcgtcctcgcgagcccagaccccaccgggcacctttgaagaaaggcttacccagccgtcggcgcgacccgaccccctaggggagacggatgtgcctgaccggcccccgaggtccgtcggagtccaggcctcgggacccgaagggagcgctgcaagctcccttagattgattgcttggatctccgagatccaagcatacctcacagataagactctacctgaggaccgcgaagggagtgaacgcgtccaacgcatttccaaacgctacgtgctggtagaagggatcctctatcggcgcgcggctaatggaatcctcctgaagtgcattcctcaggaacaaggcgttgagcttcttgccgatatccatgaaggcgagtgcggagcccattccgcctcgcgcaccttggttggcaaggcctttcgtcaagggttctattggccgacagctctcaatgatgcagttgatctgggcatcacggcccgttttggagtgcctaaccgtattattacggataatggcacccaattcactagtgaactcttcggcgactactgcgaagacatgggcatcaagctctgcttcgcctcacctgcccaccccagaagcaatggccaagtggagcgcgccaatgcagaaatcctcaaaggccttaaaaccaagaccttcaatattctcaagaagcatggcgattcatggatcgaggagttaccagcggtgctctgggcgaaccgaaccacaccaagccgagcaaccggggaaacgcctttcttcctcgtctacggcgcggaagcggttctcccatccgagctcaccctgaggtctcctcgggctaccatgtactgcgaggttgatcaagatcagcttcgtagagatgacctcgactacttggaagaacgaaggcggcgtgcggccctccgagctgcacgctaccagcagagcctgcggcgttaccatcagcgccacgtccgggcccgatcactctgcgttgacgacctcgtcttacgccgcgttcaaacgcgtgctggattgagcaagctctcaccaatgtgggagggtccgtatcgagtgatcggtatcccccggccgggctccatacggctggccacgggcgacggcacagagttgcctaacccttggaacatcgagcaccttcgtcgcttctacccctga

SEQ ID NO: 87816 - DNA, 5835 bp, Oryza sativa
  Clone ID: PAT_MRT4530_86727C.1
atggccgagcaagcaaaggcgcacgacctctctccgagtgtgagcggcgacgacggggagccaaacccacgccgtcgagctcgtactcccccacctcctccacaccaaagtcctaagcagggggaggcgctcgagagggtcgaaaaatccgcagcatcaccagtcgcgggtgatgcaggagaacggcgagatggggagcgtcgcctactcgtctactgcgacggcagcacgcctcagggcgcgcttcaggctgctggcgcgctcctacgtcacccgcccgtcgtccctgacccggagtctccagcccagcgatggctggacgatgtggccaacttggtcatgacggcacagcagcgcctgggtgctggtggacggcggagggcgcggcgagcggcggctgttgcacgccattcggctgccactccctcgtcggcgcctccgactcgggaggatcagcatggagagccggatgcccgcttcgacatcgagcgccggcgtaatagccggcgtactccccgcgcaacggagggcgcctcttcgtccagagtgtcacctcgacatggacgtgaggaccagccctccgtgcccccggttggtggtgtcggctgtagagcctttgtggcgagtcttcggaatgtccgttggcccccaaggttccggcccaccatcaccgagaagtatgatggcagcgtcaaccccaccgagtttctccaggtctatacgaccgggattgaggccgctgggggtgacgacagggtcatggcgaatttctttcccatggccctgaaaggacaggcgcggggttggctaatgaacctgcctcccgcgtcggtccactcctgggaagatttgtgccaacagttcaccatgaactttcaaggcacttatccgcgcccaggtgaagaagcggacttgcacgcagtacagcgaggggatgatgagtcacttcgctcgtacattcagcggttctgccaagtccgcaataccataccatgcatccctgcacacgcggtgatctacgcgttcagggggggtgtgcggcacaaccgcatgctcgaaaagatcgcttccaaagagccccagactaccgcggagctttttcagctcgcggaccgagtggctcgtaaggaggaagcgtggacctggaacccctccggttccggtgtggcagcttcggccgcccccgggtccaccgctcagatagggcggcgtgacaggaggaggaagaagaggtcggtccattccggcgacgagggtcatgtcctcgccgtcgagggcgcttcgcgggccacccgaaaggggaggcctgcgagcgacaaagagaaaaaggctggtgctcccagcagggagcgcccggccggcaagtggtgctccgtccacaacacctccctccacgatctcgcggattgccgcgcagtcaaaagcttggctgagcggacgaggaagtgggaggaggacaggaggcaggaacgccgtgagggcaagtctccggcggttccttccggcaatcggcgaaaagaggccaagcagaaggcccccgccgaggacatcgatgatggcgatgatgacctaggtttccaagagcctggggccaccattgccaccgtcgatgggggagcgtgtgctcacgtttctcgccggagcttcaaggctatgaagcgagagcttctggccgcggcccctactcatgaggcgacgcgtcgggcgcggtggtcggaggttgccctcacctttgaccagaccgaccacccaccgtgcgttgcccggggagggcagattgcgatggtggtttcccccaccatctgcaacgtgaagttggggcgtgtcctcatagatggaggagcggccctcaacatcctttcccccgcggcttttgatgccatcaaggccccggggatggtgctccagccgtcccaaccgattatcggtgtgacgccggggcacacatggccgttaggtcacatcgacctaccggtcacctttggtggatcagccaacttccgcacggagcgggtgaacttcgatgtggcggacctcagtctgccctacaacgcggtcctggggaggcccgcgttggtgaagttcatggcggcggtccactacgcctacctccagatgaagatgccgggccccggtggccccatctctgtccatggcgacctgaaagtcgcgctcgcctgcatggagcagcgcgcggaccacctcgctgctgcgtccaagcccgagggtggtgacgagaggcttggcacctccgcccccaccgccccgaggcagcggattgtcacatgcgacgaggtcccggaagacgcgctcgtctccttcctgcgggcaaacgctgacgtcttcgcatggagaccggcggatatgcctggggtccccagggaggtgattgagcaccgtctcgccgtgcggccgggcgcaaggccggtccggcagaaagtgcggcggcaggccccggaacgtcaagccttcatccgcgaggaagtggcgaggcttctggaggccggattcatccgtgaagtcatccatccggagtggctggcgaacccggtggtcgttcccaaggcgaacggcaagcttcggatgtgcatcgactacaccgaccttaacaaggcatgtcctaaggacccttaccccctgcctcgcatagatcagattgtcgactccaccgcggggtgcgaccttttgtgttttctagatgcatactctggttaccatcagattcgcatggctagggaggatgaggaaaaaactgcgttcattacccccgtaggaacctattgttatacatcaatgcccttcgggttaaagaatgcaggtcctacttttcaacgtactactcgaatttctttgggtagccaaatagggcgtaatgttgaggcttatgtcgatgacttggttgtaaaaacgcgcaaccaagagactttactctcagatctagcggaaacttttgagagtctccgctccgcccgcataaaactgaaccccgataagtgcgtgtttggtgtacctgcgggcaagcttctcgggttcttggtctctgcccgaggcatcgaggctaaccccgagaagatacgagctatagagcggatgcgcccccccagcaaacttagggatgtgcaatgcgtcactggttgcatggccgccctaagtcgtttcatatctaggctgggagagaaggcgctacccttatttaagctcctcaaacgctccgggccgtttacttggacggaagaagctgaaaatgccctcgcccagttgaaggcgtatctcagctctcctccggttctagtcgccccggagccaaatgagcccctgctactttacttagcggcgaccccccaagtagttagcgcagcgttggttgtggagcgcgatgaggacaatcctcattccgcgcacccccaccctgtgctgacttggcccgggagcaagcagggaggagaggtccccgagtcgaacggtggcctaaggcccccgacgaccggagtcggccccttgcccgcttgtcagacggtgctgggtgcccccgaccctcaggaaggccccgaggccactgcgggaaggccgcacctatcaccctttgaccccgaggctaaccctgtgctgactcgacccgggaggaagcagggagaagaggcccccgagccgaacggtggcctaaggcccctgacgaccggagttggccttttgcccgcttgtccgacgacgccaggagcccccgacccccaggacggccccgaggccactgtgggaaggccgcccctgtcatcctccgaccccgaggtcatcggcacagaagacgagtgcgccccgagaggccacttggacgaagaacgccccgggaatacggcccctagcaaagaggatcggccccgccgaaaggtgcagcggcctgtctactttgttagtgaggccctccgggacgccaagacccgataccctcaggcccagaagatgctttacgctattctgatggcctcaaagaaaacgcgccattatttccaggcgcaccgggtcaccgtggttacgtcttaccccctcggtcaaatcttgcataatcgagagggtacaggacgggtggttaaatgggcaatcgagctttctgagttcgatttgcactttgaaccacgccacgctatcaagagccaggccctcgccgactttgtggcagagtggaccccggctcccgagaccgtctcgatccctgagaccagcacggacccctcgcagctgtctcacacagcccactgggtgatgcagtttgacggctccctatctcttcagggcgccggtgcgggggttacgttgacctctccgagcggagacgtcctcagatacttggtccgcctcgactttcgagcgaccaataatatggcagagtacgagggactccttgccggactcagagtggcagctggactggggatccgccgcctcctggtattaggcgactcccagctggtcgttaaccaagtctgtaaggagtaccggtgctctgatccgcagatggacgcctacgtgcgccaagtacggcgcatggagcgccattttgacgggatagagcttcggcacgtgcccagacgggataacatgattgccgacgaactctcacggctcgcgtcctcgcgagcccagaccccaccgggcgcctttgaagaaaggcttacccagccgtcggcgcgacccaaccccttaggggagacggatgcgcttgaccggcccccgaggcccgtcggagtccaggcctcgggacccgaagggagcgctccaagctcccttagattgattgcttggatctctgagatccaagcatacctcacagataagactctacctaaggaccgcgaagggagtgaacgcgtccaacgcatttccaaacgctacgtgctggtagaagggaccctctatcggcgcgcggctaacggaatcctcctgaagtgcattcctcaggaacaaggcgttgagcttcttgccgatatccatgaaggcgagtgcggagcccattccgcctcgcgcaccttggttggcaaggcctttcgtcaaggattctattggccgacagctctcaatgatgcagtcgatctggtccggcgatgcagagcgtgtcagtttcacgccaagcaaatccatcagccggcccaggccctacagatcataccactttcatggccatttgttgtctgggggctcgatatcctgggaccgtttaagcgggccccgggcgggtttgagtatctgtatgtagcgatcgacaagttcactaagtggcccgaggcttatccggtcgtcaagatcgataagcactctgcacttaaatttattaagggcatcacggcccgttttggagtgcctaaccgtattattacggataatggcacccaattcactagtgaactcttcggcgactactgcgaagacatgggcatcaagctctgcttcgcctcacctgcccaccccagaagcaatggccaagtggaacgcgccaatgcagaaatcctcaaaggccttaaaaccaagaccttcaatattctcaagaagcacggcgattcttggatcgaggagttgccagcggtgctctgggcaaaccgaaccacaccaagccgagcaaccggggaaacgcctttcttcctcgtctacggcgcagaagcggttctcccatccgagctcaccctgaggtctcctcgggccaccatgtactgcgaagctgatcaagatcagcttcgtagagatgacctcgactacttggaagagcgaaggcggcgcgcggccctccgagccgcgcgctaccagcagagcctgcggcgctaccatcagcgccacgtccgggcctga

SEQ ID NO: 87817 - DNA, 182 bp, Oryza sativa
  unsure (1)..(182): unsure at all n locations
  Clone ID: PAT_MRT4530_86728C.1
gaggttaanccctagcccccggccgcagccaccctcccttcctntcccccgcntcgccgccgctagagcttntngccggaaaccntgcgacctgccgggatggnagcagcnaggctacaaaccccggtgcgcttggccntcccgnngttaaggggtngcgcggagagncgggaaggccatgc

SEQ ID NO: 87818 - DNA, 495 bp, Oryza sativa
  Clone ID: PAT_MRT4530_86729C.1
atggcacgcaagaaaacaaaggagcgtggtgggcatcgacggtctcttcacctcctcccgcgcatacagcagttggagcttcatgctcaccttgaattcgatttcatatggtcaattggaggaggccagatgctggctgcgttgcccctagctccaaaccaggtcgtcgggcatgcacatgagaaggcacatggcacacaagggagaaggctagggctgggttgtgacttgggaggaagagggggctgtccacacacccgtgcctgcttatcggtgccgtgcgcgcgagaaggtgaggctagagacaaagaagacatatgggttaggattgggagaggagaagtggtgcgaagtggaggtcgccaggccatggcgttgcggcggcgaaggttagggaaggtgaggaggagcgatagaggcatagggagaaatcatgatcatgaggccaaaggcagtcggacttggatgatggatgaaacggagtatgacgaatag

SEQ ID NO: 87819 - DNA, 5781 bp, Oryza sativa
  unsure (1)..(5781): unsure at all n locations
  Clone ID: PAT_MRT4530_8672C.1
atgggcgccgccccgagcgaccaacagacgcggcagaggaaaagcacacaagagaacccgggcggacggtggggggcggacgccgggccctggcggggaggacggggcgcgagcngccggcggcccccgggcgacgccggagtagctaagggggcggaaccgcaaccacaaccgtcagagcgaagggtagtggtgacatcggagaggaaacacatgtaccaccatttctccccacaccgaacccggccgcgaataggcgcgatccgcccctccgcacctccctgcgagcctgctgtgccgtgccacgccgcgcccgggcccgtcgtgcggcgggggcacggcgggaccgacgtcgggaccggctaccaagcgagggccccgggcaaggccgcgggaggcgtggcggatggagaactggcggacttgatggtgccggtgtaccgggcactctatcggtggcacggcacggcggcgtggatgatgccgggggacgtgaacgcgatgatcggctggctgtttggtgggccgcggaatgcagcggcagcagcgtggaaaggaccccacccgtcagccctcttctcaccttcttctctacctccggtcgccgcccacctcccgccagcccgcgccgtcgtcgaccgccagcccacgctcgcctatccccccgccggccccgctcaccccatgccgtcgacagcgtccaccaccaccactccccctcctcgtctcccccggctccgatccggcgctttgccgacccacacgacggtggccagcgagttcgccgaagccatgctgagctcgccgaaggtcttctcctcgacgaccacctctcgccacgccacgctccgccgcctcctctccaccccggccttctccgctgcctgcctcctcttcggcctcgcgggcttcctcgccggcgctctctccatctcttggtcgccagggagcacgccgcgcgcccgctgcccgaactcctcccacatgctctccgtctctgtcacgtgggacggcgtggggccggcggccgacgatggcgcagggctggtgggaggtgggcgacgaccgaaggtagagaagaagatgaggagaggggctgacggaccaagggaaaaaacgaggttccgctcgtccgcccgccatggccacgatgtcggcgaggcgcttctccgtggatgccatgaccaggcagcagaggttgacggagctgagtacgacgagcagccagtagaagcagtcgagcctcccgtcatcgaggttatcaacgagctagccgccgtcagcgccatggccggtgaaggtgatcttgtgcacgatgatgatgagcagcgtgctgaagaacaagctgatggcgcacatgctcaggaacagactcgtgttcatggtcttcatccctttggagtttggatcctcgcggaggaagacgttgaggagcatgtaggcggtgccacaacggccaagcgggtgatggagagaaagaggccacaaacacgcttggagctggggcttgccaacgtcgtggctatggcggacgagcggaacaccagcggtgttttcccctcgcttggtctgcaactggacggagacgacagagcgccgaaaaaatttgcaaaactagaccctgccgcccttcgcaagggcggcaagccgacgtggcacacggcgcgctggacggcgcgggacggccgtcctcctgccccctcctgccctcttgccgccctggcaaagggcggcaggacccccttgccgcccttacagaaggcggcaggcctggccgcctataaagcccagccggctcctttgaggagcccattccctcctaacctctccacatcaaaaaaaaaaaaaggagaaggggaggagaagaaaagaagaggcgaagccctgccagtttcaaacttcgatttcagtaagtcgggcaacagagggtttttattgggaactaatgccggttcaaaactctgggatgtggagatgatgaacatggatgatggcgaggggccaagtgcagaagtgaatgagattgaagtggatcaggtcaacgcaccagaggaagatggagtagctccagtagtagctccagtaggcatgcaacctggtggagtggctgacgagggggagactgtgggtgccattgtggacgaaatggaaaaagaggatagtgacaacgagcgtgtcgaggaagatgattcgtcagatgatgacgagaacaatattaatccagctgaatgggctagtgatgatttttctggtttggtcatctctgaaggggaaaatgtgagatgggagtacaaggaaaacgagattatcgagggagcgaggtatggtaatggagaagacatgaaggaggcggtattgccgttggcatttgcttttgtcgagagcgagaacaccgacagctggtactggttcctccatctggttaagacagaagttgttggtatgaggcccaatgtgtgtctaatacatgacaggcacgccggtatgcttcgagcgatagaagagttaaagtttgggactatggaaagaggataccctggccagtgggaagatgtacaaagcaggtggtgcatgcgtcatatgggagctaatttcttcaagcaatttaagaacaaggagttgatgaacatgttcaagaggctatgcaatcagaaccaggagaaaaaattcaatgagctttggaagagattagatgagttgacaggcaaatgtagtgaccagcgtgcaacaagaccagcggccgctgtacctgaccctcctcaagcactcggagctctcccaacagacagtgtaacattggttagaagaactggggagcaaattcgaaaattttctcagtggattgagaatgagccaaaagagaaatgggctaagacttatgacacaggtggtgctagatatggtataatgacaacaaatttggcggaagtttacaactgggtgatgcgcggtgtccgtggactcccactagttggtatagtggagttcattttacatgggacatgcaagtatttcagggagcggttccaagcagtttttccctctatgccgaacaacaacattttatttggaactttcatggagaaaaaactagcggagtggcgtgcaaaggccatgaaacatcgagctctagtgcaaggtacccaacaacacaggtttgaggtactctgccaagacaaggcaggcaggggtatctaccgcaagagagtaaagcaggagtgcgttctcaaagacgacggcacatgtcactgctcctgtagaaagccgacgctgctccacaggccatgcacccatgtcatttccgcggcatctgagtgtggcatccaagatgcagtatatgtgtcacaatacttctccaagcaagcaatatatcacacatggagtggcgagatttttggcttcggtgtagctggggagttcacaaagattaacgatctgataatctatattcctgacccaacgaaactccgagacaaggcgggacggaggaagactcggcgcatccgcaacgatatggatgagtcggaggcaggcagggtgaagcggtgcagcaaatgcgatgaacgtggccacacctacaagtattgtcctaaagacaaggaaaaaccaagtgcggcggaggcagagatggcacatcctgagttgttggatccggcgatagatcagcgccaccggtcgtaccttactgcggtggagggggctcagcttgggacgttccgtccacggtcgtcacgtgagcgacttttggttcacgactccttcgtcgagaggttgcgtgaggccggtctcttaccgttggctcggctagttgaggccgcgaccggcgacgatgacgtgacgagacgttgggacccggacaggtccctcctagcagcgttggtcgaccggtggaggccggagacgcacacttttcacctgccgtgcggtgaggtagcccctaccctgcaggatgtctcttacttgttggggctaccgctcgcgggagacgctgtcgggccagttgacatgggtgtcgactggaaggacgagctgacggcacgtttcgcacccgtgcagcgcctaccaggtctaccgctcgagccgttgcagcagcaccgcaacaccgggcctacgaagaggtggctgcttcagttcactgttgaccagctaccggaggaggccgacgagtactccttcagccgttgtttggaggcgtacttgttgtggctttttgggtgggtgatgttctgtggtagtcacggacactcggtcgaccggggtctcgtgcactacgccaggagcatcgccgacgccgcggtcggtgaggtgcctcagtggagttggggctccgcgttgctggcggctcagtaccgtggcctctgcgaggcttgtaccaggacggaccctggcgcgatcttcggtgggtgccctctcttcatttctctttgggcggctgagaggattgcgatcggccgcccccttgtggagcaccacccttacgacgcgtcgctgtacgagaacagaccggcggtcgactacccaacgatgggtactctgtggtgccggcgtcagcgccgatgggctcacgtgcaggttaggcggtcgtacgcggaatttgtgatggagttcgaccgccttctgccgacggacgtagtgtgggagccctacagtgccttgcttacccacagtcgggcgccgctaggcctgtccacactctgcacgagggaccaggcgtactggatgactacggttccgatggtgttcgacatctgtgtcgagccgcacgcaccttaccgcgtgatgcggcagttcggcttccgtcagtcctttccagtcccgtttccggcgggcgtcacggctgccgttcaccggtactcgcgcaagggtcagcactcagctggtcactggcctgccaagttggggccttttctcgacgactggttgcttgctaccgaggaggtcgtggaccacgcgggagagccacacacggaggaggggtatgaggcgtacctacgttggtatcagccacgcacccgtactagagtcacctacgctccgacggagcaacaggcccacgccgcgagcgccagagacctctacgccaggcaccgcgaccaggacttcgctcgtgcggccgttgagtgcaacagggtcgtcgttgatgctacaacggcgatccaacggttaggcgcggggattgaggtgggggcagacgagcacctgtcgacgtacacgcggatacgggactcgatgcgctcggttctccgtgcgctgacctgtcgtgctgccgacgttgctcacgcagacgcagcaccacaggtgcgtccccgaccgactgctcctcgtccagctgcgcacgttcctacgccgacaccccctcccttcggaggcttcgctcagcctgggacgacgccgggcgcccactcctggcaggctgcggggtcatcgtcacaggcaggtgtgtcggcctcgctgtctgcgcagttctggcaggacgccgggacttcgtcacagccgcccggcacgtcttggcagggtcctaccgggacttcgtccgagcacgggtgggcttccgccacgcacttcgacattagtgacttcgacttcccggacattatcggtccctcacagcttggaggcgcaccgccggtgcacacgcaggagcagtcgccctccaccccactcccagaccctcgcgctacccgtgctgtcccaccggatcgcttcacgtactcccaggaccacgtgcgagcacaggcccggaggaccaagcggggtcgcggcgcgagtcacggccagtag

SEQ ID NO: 87820 - DNA, 4823 bp, Oryza sativa
  Clone ID: PAT_MRT4530_86730C.1
ctacatcacccagagggcggtgtgaggcagctgcgatgggcccgagctggcctcgggggcggagacgagctcggtagctggggtccactccgccacaaagtcggtgagggcctggctcttgatcgcgtggcgtggttcaaagcgcaaatcgaattcagagagttcgattgcccatttcaccatccgtccagtaccctctcggttatacaagatttggccgaggggataagacgtaaccaccgtgacccgatgcgcctggaaataatggcgcagtttccttgaagccatcagaatagcgtaaagcatcttctgggcctgagggtatcgggtcttggcgtcccggagggcctcactaacaaagtagacgggccgctgcacctttcggtggggccgatcctcttcgctaggggccacatccctggggcgctctttgtccaagcggcccaggggcagtacagcgaagggatgatgagtcacttcgctcgtacattcagcggttctgtcaagtccgcaacaccataccatgcatccctgcacacgcggtgatctacgcgttcagggggggtgtgcggcacaaccgcatgctcgaaaagatcgcttccaaagagccccagactaccgcggagctttttcagctcgcagaccgagtggctcgtaaggaggaagcatggacctggaacccctccggttccggagtggcagcttcggccgcccccggatccgccgctcagatagggcggcgtgacaggaggaggaagaagaggtcggtctattccggcgacgagggtcatgtcctcgccgtcgagggcgctccgcgggccacccgaaaggggaggcctgcgagcgacaaaaagaaagaggctggtactcccatcagggagcgcccagccggcaagtggtgctccgtccacaacacctccctccacgatctcgcggactgtcgcgcagtcaaaaacttggctgagcgaacaaggaagtgggaggaggacaggaggaaggaacgccgtgagggcaagtcgccggcaactccctccggtaaacggcgaagtgaggccaagcagaaggcccccgctgttgacatcgatgacggtgatgatgacctaggtttccaagaacctggggccaccattgccactgtcgatgggggagcgtgtgctcacatctctcgccggagcctcaaggccatgaagcgagagcttctggccgcggcccctactcatgaggcgacgcgccgggcgcagtggtcggaggttgccctcactttcgaccagaccgaccacccaccgtgcgtcgcccggggagggcagattgcgatggtggtttcccccaccatctgcaacgtgaagttggggcgtgtcctcatagatgggggagcggccctcaacatcatttcccccgcggcttttgatgccatcaaggccccggggatggtgctccagccgtcccaaccgattatcggtgtgatgccggggcacacatggccgttgggtcacatcgacctaccggtcacctttggtggatcagccaacttccgcacggagcgggtgaacttcgatgtggcggacctcagtctgccctacaacgcgatcctggggaggcccgcgttggtgaagttcatggcggcggtccactacgcctacctccagatgaagatgccgggccccggtggccccatctctgtccatggcgacctgaaagtcgcgctcgcttgcatggagcagcgcgcggaccacctcgctgctgcgtccaagcccgagggtggtgacgagaggcttggcacctccgcccccaccgccccgaggcagcggattgtcacatgcgccgaggtcccggaagacgcgctcgtctctttcctgcgggcaaacgctgacgtcttcgcatggagaccggcggatatgcccggggtccccagggaggtgattgagcaccgtctcgccgtgcggccgggcgcaaggccggtccggcagaaagtgcggcggcaggccccggaacgtcaagccttcatccgcgaggaggtggcgagacttctggaggccggattcatccgtgaagtcatccatccggagtggctggcgaacccggtggtcgttccaaaggcgaacggcaagcttcggatgtgcatcgactacaccgaccttaacaaggcatgtcctaaggacccttaccccctgcctcgcatagatcagattgtcgactccaccgcggggtgcgaccttttgtgttttctagatgcatactctggttaccatcagattcgcatggctagggaggatgaggaaaaaactgcgttcattacccccgtaggaacctattgttatacatcaatgcccttcgggttaaagaatgcaggtcctacttttcaacgtactactcgaatttctttgggtagccaaatagggcgtaatgttgaggcttatgtcgatgacttggttgtaaagacgcgcaaccaagagactttgctcttagatctagcggaaacttttgaaaatctccgctccgcccgcataaaactgaaccccgataagtgcgtgtttggtgtacctgcgggcaagcttctcgggttcttggtctctgcccgaggcatcgaggccaaccccgagaagatacgagctatagagcggatgcgcccccccagcaaacttagggatgtgcaatgcgtcaccggttgcattgccgccctaagtcgtttcatatcgaggctgggagagaaggcgctacccttatttaagctcctcaagcgctcggggccgtttacttggacggaggaagctgaacgtgccctcactaagttgaagacatatctcagctctcccccagttctagtcgccccggggccaaatgagcccctactactctacttagcggcgaccccccaagtagttagtgcagcgttggttgtggagcgcgatgaagacaatcctcatttcgcgcacccccgccctgtgctgacttggcccgggagcgagcagggaggagaagcccccgagtcgaacggtggcctaaggcccctgacgaccggagtcggccctctgcccgcttgtcagacggtgctgggtgcccccgaccctcaggaaggccccgaggccactgcgggaaggccgcacctatcgccctttggccccgaggctaaccttgtgctgactcgacccgggagaaagcagggagaagaggcccccgagccgaacggaggcctgaggcccctgacgaccggagtaggccctttgcccgcttgtccgacgacgccaggagcccccgacccccaggacggccccgaggccactgtgggaaggccgctcctgtcatcctccgaccccgaggtcatcggcacagaagacgagtgcgccccgagaggccacttggacgaagaacgccccggggatgcggcccctagcgaagaggatcggccccgccgaaaggtgcagcggcctgtctactttgttagtgaggccctccgggacgccaagacccgataccctcaggcccagaagatgctttacgctattctgatggcctcgaggaaactgcgccattatttccaggcgcatcgggtcactgtggttacgtcttaccccctcggtcaaatcttgcataatcgagagggtacaggacgagtggtaaaatgggcaatcgagctttctgagttcgatctgcactttgaaccacgccacgctatcaagagccaggccctcgccgattttgtggcagaatggaccccggctccagagaccgtctcaatccccgaggccagcacggacccctctcagctgcctcacaccgcccactgggtgatgcagttcgacggttctctgtctctccagggcgccggtgcgggggtcacgttgacctctccgaacggagacgtcctcagatacttggtccgtctcgactttcgagcgactaataatatggcagagtacgagggactccttgccggactcagagtggcagctggactggggatccgccgcctcctggtgttaggcgactcccagctggtcgttaaccagcgggccccgggcgggtttgagtacctgtatgtcgcgatcgacaagttcactaagtggcccgaggcttatccggtcgtcaagatcgataagcactctgcacttaaattcattaagggcatcacggcccgttttggagtgcctaaccgtattattacggataatggcacccaattcactagtgaactcttcggcgactactgcgaagacatgggcatcaagctctgcttcgcctcacctgcccaccccagaagcaatggccaagtggagcgcgccaatgcagaaatcctcaaaggccttaaaaccaagaccttcaatattctcaagaagcatggcgattcgtggatcgaggagttgccagcggtgctctgggcaaaccgaaccacaccaagccgagcaaccggggaaacgcctttcttcctcgtctacggcgcagaagcggttctcccatccgagctcaccctgaggtctcctcgggccaccatgtactgcgaagctgatcaagatcagcttcgcagagatgacctcgactacttggaagagcgaaggaggcgtgcggccctccgagccgcgcgctaccagcagagcctgcggcgctaccatcagcgccacgtccgggcccgatcactctgcgtcgacgacctcgtcttacgccgcgtccaaacgcgtgctggattgagcaagctctcaccaatgtgggagggtccgtatcgagtgatcggtgtcccccggccgggctccatacggctggccacgggcgacggcactgagctgcctaacccgtggaacatcgaacaccttcgtcgcttctacccctga

SEQ ID NO: 87821 - DNA, 357 bp, Oryza sativa
  Clone ID: PAT_MRT4530_86731C.1
atggccgagctgcagagcgcaatcatgcgtgttccacgcatgcccgtgaaccgtacggacacggaaactcatccgccagccctggaattccgtcgttcttgcacgatagaggtgaaatgtgataggattcagtatatttacgagttacttatcactaatcaaatcgcaagtttatttgatggatccaagtttgcattggcatttgttcgtggcctcgatctgtttaatctagagcacgcatacctgtgccctggcatcaaaatatactgtattggtgagcatctggcgatagagatgtatattttgatctggagttcacgcttgccaatgatgtatctgggcctcgatcattactga

SEQ ID NO: 87822 - DNA, 3135 bp, Oryza sativa
  Clone ID: PAT_MRT4530_86732C.1
tcacgcgaacggacggccgagatcgatccaatccaaaacggacggccgagatcgaacggtccacgaccggctcacggcggacgaccccgatgacgtcggcaatgacgtcaccgacagcggcggcggctcggcggagcggacggctcgggcggcgcacgcttgccggcgaacggcggcgctaggacgcaaacggagggcaccagcacgtagaggacgacgcggcgaacacaccggtgaccaaaacggcggcggaagaacaacgaacgacgacggcgacgaggaggaaacggcggaaaccttcgggttgtcgacggcgacgaagctccggcgatctccggcgacggcgaaggggcggacgaggacggcgacgacttggcgagcacaacggtggccttcccgagcgacggcgacggcccgcaagtggttagtgcggcgttggttgtggagcgcgatgaggacaatcctcattccgcgcacccccaccctgtgccgacttggcccgggagcaagcagggaggagaggcccccgagtcgaacggtggcctaaggcccctgacgaccggtgtcggccctctgcccgcttgtcagacggtgctgggtgcctccgaccctcaggaaggccccgaggccactgcgggaaggccgcacctatcgccctttggccccgaggctaaccctgtgctgacttggcccgggagcaagcagggaggagaggcccccgagtcgaacggtggcctaaggcccttgacgaccggagtcggccctctgcccgcttgtcagacggtgctgggtgcccccgaccctcaggaaggccccgaggccactgcgggaaggccgcacctgtcgccctttggccccgaggctaaccctgtgctgactcgacccgggagagagcagggagaagaggcccccgagccgaacggaggcctgaggcccctgacgaccggaattggccctttgcccgcttgtccgacgacgccaggagctcctgacccccaagacggccccgaggccactgtgggaaggccgctcctgtcatcctccgaccccgaggtcatcagcacagaagacgagtgcgccccgagaggccacttggacgaagagcgccccggggatacggcccctagcgaagaggatcggccccgccgaaaggtgcagcggcctgtctactttgttagtgaggccctccgggacgccaagacccgataccctcaggcccagaagatgctttacgctattctgatggcctcgaggaaactgcgccattatttccaggcgcatcgggtcactgtggttacgtcttaccccctcggtcaaatcttgcgtaatcgagagggtacaggacgggtggtaaaatgggcaatcgagctttctgagttcgatctgcactttgaaccacgccacgctatcaagagccaggccctcgccgattttgtggcagagtggaccccggctccagagaccgtctcaatccccgaggccagcacggactcctcacagctgcctcacaccgcccactgggtgatgcagttcgatggttctctgtctctccagggcgccggcgcgggggtcacgttgacctctccgaacggagacgtcctcagatacttggtccgtctcgactttcgagcgaccaataatatggcagagtacgagggactccttgccggactcagagtggcagctggactggggatccgccgcctcttggtgttaggcgactcccagctggtcgttaaccagaccccgccgggcgcctttgaagaaaggcttacccagccgtcggcgcgacccgaccccttaggggagacggatgcgcctgaccggcccccgaggcccgtcggagtccaggcctcgggacccgaagggagcgctccaagcccccttagattgattgcttggatctctgagatccaagcatacctcgcagataagactctacctgaggaccgcgaagggagtgaacgcgtccaacgcatttccaaacgctacgtgctgatagaagggaccctctatcggcgcgcggctaacggaatcctcctgaagtgcattcctcaggaacaaggcgttgagcttcttgccgacatccatgagggcgagtgcggagcccattccgcctcgcgcaccttggttggcaaggcctatcgtcaaggattctattggccgacagctctcaatgatgcagtcgatctggtccggcgatgcagagcgtgtcagtttcacgccaagcaaatccatcagccggcccaggccctgcagatcataccactttcgtggccatttgctgtctgggggctcgatatcctgggaccgtttaagagggccccgggcgggtttgagtatctgtatgtcgcgatcgacaagttcactaagtggcccgaggcttatccggtcgtcaagatcgataagcactctgcacttaaattcattaagggcatcacggcccgttttggagtgcctaaccgtattattacggataatggcacccaattcactagtgaactcttcggcgactactgtgaagacatgggcatcaagctctgcttcgcctcacctgcccaccccagaagcaatggccaagtggagcgcgccaacgcagaaatcctcaaaggccttaaaaccaagaccttcaatattctcaagaagcacggcgattcatggatcgaggagttgccagcggtgctctgggcaaaccgaaccacaccaagccgagcaaccggggaaacgcctttcttcctcgtctacggcgcagaagcggttctcccatccgagctcaccctgaggtctcctcgggccaccatgtactgtgaagctgatcaagatcagcttcgcagagatgacctcgactacttggaagagcgaaggcggcgcgcggccctccgagccgcgcgctaccagcagagcctgcggcgctaccatcagcgccacgtccgggcccgatcactctgcgtcgacgatctcgtcttacgccgcgtccaaacgcgtgctggattgagcaaactctcaccaatgtgggagggtccgtatcgagtgatcggtgtcccccggccgggctccatacggctggccacgggcgacggcacggagctgcctaacccgtggaatatcgaacaccttcgtcgcttctacccctga

SEQ ID NO: 87823 - DNA, 5820 bp, Oryza sativa
  Clone ID: PAT_MRT4530_86733C.1
atggccgagcaagcaaaggtgcacgacctctctccgagtgcgagcggcgacgacggggagccaaacccacgccgtcgagctcgtactcccccacctcctccacaccaagatcctaagcagggggaggcgctcgagagggtcgaaaaatccgcagcatcgccagtcgcgggtggtgcaggagaacggcgagatggggagcgtcgcctcctcgtctacggcaacggcagcacgcctcagggcgcgcttcaggctgttggcgcgctcctacgtcacccgcccgtcgtccctgacccggagtctccagcccagcgatggctggacgacgtggccaacttggtcatgacggcacagcagcgcctgggtgctggtggacggtccgccaccaccaagacctccggcgccgccactaccggctccgtgtcgtcaagacggagggcgcggcgagcggcggctgttgcacaccattcggctgccactccctcgtcggcacctccgactcgggaggatcagcatggagagccggatgcccgcctcgacatcgagcgccggcgtaatagccggcgtactccccgcgcaacggagggcgcctcttcgtccagagtgtcacctcgacatggacgtgggaatcagccctccgtgcccccggttggtggtgttggctgtagagccttcgtggcgagtcttcggaatgtccgttggcccccaaggttccggcccgccatcgccgaaaaatatgatggcagcgtcaaccccgccgagtttctccaggtctacacgaccgggattgaggccgccgggggtgacgacagggtcatggcgaatttctttcccatggccctgaaggggcaagcacggggttggctaatgaacttgccacccgcgtctgtccactcctgggaggatttgtgccagcagttcaccatgaacttccaaggcacgtatccgcgccccgttgaggaagcggacttgcacgctgtacagcgaagggacgatgagtcgcttcgatcgtacattcagcggttttgtcaagtccgcaataccataccatgcatccctgcacacgcagtaatctacgcgttcagggggggtgtgcggcacaaccgcatgctcgaaaagatcgcctccaaagagccccagactaccgcagagctttttcagctcgcggaccgagtggctcgcaaggaggaggcctggacttggaacccctccggttccggagtggcagcttcggccgcccccggatccgccgctcagtcagggcggcgtgacaggaggaggaagaagaggtcagtccgttccgacgacgagggtcatgtcctcgccgtcgagggcacttcacgggccacccgaaaggggaggcctgcgagcgacaaaaagaaggaggccagcgttcccagcagggagcgccctaccggcaagtggtgcaccgtccacaacacctccctccatgaccttgcggactgtcgcgcagtcaaaagcttggctgagcggacaaggaagtgggaggaggagaggaggcaggagcgccgggaaggcaagtccccggcggttccttccggccgtcggcgaagtgaggccaagcagaaggcccccgccgaggacatcgatgatggcgataatgacctaggtttccaagaacctggggccaccattgccactgtcgatgggggagcgtgtgctcacgtctctcgccggagcctcaaggccatgaagcgagagcttctggccgcggcccctactcatgaggcgacgcgccgggcgcggtggtcggaggttgccctcactttcgaccggaccgaccacccaccgtgcgtcgcccggggagggcagattgcgatggtggtttcccccaccatctgcaacgtgaagttggggcgtgtcctcatagatgggggagcggccctcaacatcatttcccccgcagcttttgatgccatcaaggccccggggatggtgctccagccgtcccaaccgattatcggtgtgacgccggggcacacatggccgttgggtcacatcgacctaccggtcacctttggtggatcagccaacttccgcacggagcgggtgaacttcgatgtggcggacctcagtctgccctacaacgcggtcctggggaggcccgcgttggtgaagttcatggcggcggtccactacgcctacctccagatgaagatgccgggccccggtggccccatctctgtccatggcgacctgaaagtcgcgctcgcttgcatggagcagcgcgcggaccacctcgctgctgcgtccaagcccgagggtggtgacgagaggcctggcacctccgcccccaccgccccgaggcagcggattgtcacatgcgccgaggtcccggaagacgcgctcgtctccttcctgcgggcaaacgctgacgtcttcgcatggagaccggcggatatgcccggggtccccagggaggtgattgagcaccgtctcgccgtgcgaccgggcgcaaggccggtccggcagaaagtgcggcgccaggccccggaacgtcaagccttcatccgcgaggaggtggcgcgacttctggaggccggattcatccgcgaggtcatccacccggagtggctggcgaacccggtggtcgttcccaaggcgaacggcaagcttcggatgtgcatcgactacaccgaccttaacaaggcatgtcctaaggatccttaccccttgcctcgcatagatcagattgtcgactccacagcggggtgcgaccttttgtgttttctagatgcatattctggttaccatcagattcgcatggctagggaagatgaggaaaaaactgcgttcattactcccataggaacttattgttatacgacaatgccctttgggttaaagaatgcaggtcctacttttcaacgtactactcgaatttctttgggtagccaaatagggcgtaatgttgaggcttatgtcgatgacttggttgtaaagacgcgcaaccaagagactttactcttagatctagcggaaacttttggaaatctccgctccgcccgcataaaactgaaccccgataagtgcgtgtttggtgtacctgcgggcaagcttctcgggttcttggtctctgcccgaggcatcgaggccaaccccgagaagatacgagctatagagcggatgcgcccccctagcaaacttagggatgtgcaatgcgtcaccggttgcattgccgccctaagtcgtttcatatcgaggctgggagagaaggcgctacccttatttaagctcctcaagcgctcggggccgtttacttggacggaggaagctgaacgtgccctcactcagttgaaggcatatctcagctctcccccagttctagtcgccccggggccaaatgagcccctactactctacttagcggcgaccccccaagtggttagtgcagcgttggttgtggagcgcgatgagggcaatcctcattccgcgcacccccaccctgtgctgacttggcccgggagcgagcagggaggagaggcccccgagccgaacggtggcctaaggcccctggcgaccggagtcggccctctccccgctcgtcagatggtgctgggcgcccccgaccctcaggaaggccccgaggccactgcgggaaggctgcacctatcgccctctgaccccgaggctaaccctgtaccgattcgacccgggaaggagcagggagaagaggcccccgagccgaacggtggcctaaggcccctgacgaccagagttggccctttgcccgcttgtccgacgacgccaggagcccccgacccccaggacggccccgaggccactgtgggaaggccgcccctgtcgtcctccgaccccgaggtcatcggcacagaagacgagtgcgccccgaggggccacttggacgaggaacgccccggggatatggcccttagcgaagggaatcggccccaccgaagggtgcagcggcctgtctactttgttagcgaggccctccgggacgccaagacccgataccctcaggcccagaagatgctttacgctattctgatggcctcgaggaaactgcgccattatttccaggcgcatcgggtcactgtggttacgtcttaccccctcggtcaaatcttgcataatcgagagggtacaggacgagtggtaaaatgggcaatcgagctttctgagttcgatctgcactttgaaccacgccacgctatcaagagccaggccctcgccgattttgtggcagagtggaccccggctccagagaccgtctcaatccccgaggccagcacggacccctctcagctgcctcacaccgcccactgggtgatgcagttcgacggttctctgtctctccagggcgccggtgcgggggtcatgttgacctctccgaacggagacgtcctcagatacttggtccgtctcgactttcgagcgactaataatatggcagagtacgagggactccttgccggactcagagtggcagctggactggggatccgccgcctcttggtgttaggcgactcccagctggtcgttaaccaggtctgtaaggagtaccggtgctctgacccacagatggacgcttacgtacgccaagtgcggcgtatggagcgccattttgacgggatagagcttcggcatgtacccagacgggataacatggttgccgacgaactctcacggctcgcgtcctcgcgagcccagaccccaccgggcgcctttgaagaaaggcttacccagccgtcggcgcgacccgaccccttaggggagacggatgcgcctgaccggcccccgaggcccgtcggagtccaggcctcgggacccgaagggagcgctccaagctcccttagattgattgcttggatctctgagatccaagcatacctcacagataagactctacctgaggaccgtgaagggagtgaacgcgtccaacgcatttccaaacgctacgtgctggtagaagggaccctctatcggcgcgcggctaacggaatcctcctgaagtgcattcctcgggaacaaggcgttgagcttcttgccgatatccatgaaggcgagtgcggagcccattctgcctcgcgcaccctggttggcaaggcctttcgtcaaggattctattggccgactgccctcaatgacgcggtcgacctggttcggcgatgcagagcgtgtcagttccacgccaagcaaatccatcagccggcccaggcactgcagaccataccactttcatggccatttgctgtctgggggctcgatatcctgggaccgtttaggcgggccccgggcgggtttgagtacctgtatgtcgcgatcgacaagttcaccaagtggcccgaggcttatccggtcatcaagatcgataagcactccgcacttaaattcattaagggcatcacggcccggtttggagtgcctaaccgtattattacggataacggcacccaattcactagtgaactcttcggcgactactgcgaagacatgggcatcaagctctgcttcgctcacctgcccaccccagaagcaatgaagcacggcgattcatggatcgaggagttgccagcggtgctctgggcgaaccgaaccacaccaagccgagcaaccggggaaacgcctttcttcctcgtctacggcgcagaagcggttctcccatccgagctcaccctgaggtctcctcgggccaccatgtactgcgaggctgatcaagatcagcttcgcagagatgacctcgactacttggaagaacgaaggcggcgtgcggccctccgagccgcacgctaccagcagagcctgcggcgctaccatcaacgccacgtccgggcctga

SEQ ID NO: 87824 - DNA, 292 bp, Oryza sativa
  Clone ID: PAT_MRT4530_86734C.1
ccctgtccctccctctactattattatggggagatatagagggaaggaacataattaatatgaaccaatttcggcctcgtgtgtgctgtttccagatgggccatcacattgtcttaattctaaacaactattacacctactgacccaattaattctatatgcattcaataatttgttttgttcaatatacaacttgacaagatttatgtcttgaatataaagggtcttgaagccatgatacatggtatagttgattgatggctcattgctattaactttttgccagcaatgg

SEQ ID NO: 87825 - DNA, 6036 bp, Oryza sativa
  Clone ID: PAT_MRT4530_86735C.1
atggccgagcgagcaaaggcgcacgacctctctccgagtgtgagcggcgacgacggggagccaaacccacgccgtcgagctcgtactcccccacctcctccacaccaaagtcctaagcagggggaggcgctcgagagggttgataaatccgcagcatcaccggtcgcgggtgatgcaggagaacggcgagatggggagcgtcgcctcctcgtctacggcgacggcagcacgcctcagggcgcgcttcaggctgctggcgcgctcctacgtcacccgcccgtcgtccctgacccggagtctccagctcagcgatggctggacgacgtggccaacttggtcatgacggcccagcagcgcctgggtgctggtggacggtcctccaccaccaagacctccggcgccgccactaccggctccgtgtcgtcaaggcggagggcgcggcgagcggcggctgttgcacgccattcggctgccactccctcgtcggcacctccgactcgggaggatcagcatggagagccggatgcccgcctcgacatcgagcgccggcgtaatagccggcgtactccccgcgcaacggagggcgcctcttcgtccagagtgtcacctcgacatggacgtgaggaccagccctccgtgcccccggctggtggtgtcggctgtagagcctttgtggcgagtcttcggaatgtccgttggcccccaaggttccggcccaccatcaccgagaagtatgatgggagtgtcaaccccaccgagtttctccaggtctatacgaccgggattgaggccgctgggggtgacgacagggtcatggcgaatttctttcccatggccctgaagggacaggcgcggggttggctaatgaacctgccacctgcgtcggtccactcttgggaggatttatgccaacagttcactatgaactttcaaggcacttatccgcgcccaggcgaagaagcggacttgcacgcggtacagcgaggggatgatgagtcacttcgctcgtacattcagcggttttgccaagtccgcaataccataccatgcatccctgcacacgcggtgatctacgcgttcagggggggtgtgcggcacaaccgcatgctcgaaaaaatcgcttccaaagagccccagactaccgcggagctttttcagctcgcagaccgagtggctcgtaaggaggaagcatggacctggaacccctccggttccggagtggcagcttcggccgcccccggatccgccgctcagacagggcggcgtgacaggaggaggaagaagaggtcggtccattccggcgacgagggtcatgtcctcgccgtcgagggcgctccgcgggccacccgaaaggggaggcctgcgagcgacaaaaagaaagaggctggtactcccaccagggagcgcccagccggcaagtggtgctccgtccacaacacctccctccacgatctcgcggactgtcgcgcagtcaaaaacttggctgagcgaacgaggaagtgggaggaggacaggaggaaggaacgccgtgagggcaagtcgccggcaactccctccggcaaacggcgaagtgaggccaaacagaaggcccccgctgttgacatcgatgacggtgatgatgacctaggtttccaagaacctggggccaccattgccactgtcgatgggggagcgtgtgctcacgtctctcgccggagcctcaaggccatgaagcgagagcttctggccgcggcccctactcatgaggcgacgtgccgggcgcggtggtcggaggttgccctcactttcgaccagaccgaccacccaccgtgcgtcgcccggggagggcagattgcgatggtggtttcccccaccatctgcaacgtgaagttggggcgtgtcctcatagatgggggagcggccctcaacatcctttcccccgcggcttttgatgccatcaaggccccggggatggtgctccagccgtcccaaccgattatcggtgtgacgccggggcacacatggccgttgggtcacatcgacctaccggtcacctttggtggatcagccaacttccgcacggagcgggtgaacttcgatgtggcggacctcagtctgccctacaacgcggtcctggggaggcccgcgttggtgaagttcatggcggcggtccactacgcctacctccagatgaagatgccgggccccggtggccccatctctgtccatggcgacctgaaagtcgcgctcgcttgcatggagcagcgcgcggaccacctcgctgctgcgtccaagcccgagggtggtgacgagaggcttggcacctccgcccccaccgccccgaggcagcggattgtcacatgcgccgaggtcccggaagacgcgctcgtctccttcctgcgggcaaacgctgacgtcttcgcatggagaccggcggatatgcccggggtccccagggaggtgattgagcaccgtctcgccgtgcggccgggcgcaaggccggtccggcagaaagtgcggcggcaggccccggaacgtcaagccttcatccgcgaggaggtggcgagacttctggaggccggattcatccgtgaagtcatccatccggagtggctggcgaacccggtggtcgttccaaaggcgaacggcaagcttcggatgtgcatcgactacaccgaccttaacaaggcatgtcctaaggacccttaccccctgcctcgcatagatcagattgtcgactccaccgcggggtgcgaccttttgtgttttctagatgcatactctggttaccatcagattcgcatggctagggaggatgaggaaaaaactgcgttcattacccccgtaggaacctattgttatacatcaatgcccttcgggttaaagaatgcaggtcctacttttcaacgtactactcgaatttctttgggtagccaaatagggcgtaatgttgaggcttatgtcgatgacttggttgtaaagacgcgcaaccaagagactttactctcagatctagcggaaacttttgaaaatctccgctccgcccgcataaaactgaaccccgataagtgcgtgtttggtgtacctgcgggcaaacttctcgggttcttggtctctgcccgaggcatcgaggccaaccccgagaagatacgagctatagagcggatgcgcccccccccagcaaacttagggatgctgggagagaaggcgctacccttatttaagctcctcaagcgctcggggccgtttacttggacggaggaagctgaacgtgccctcactcagttgaaggcagatctcagctctcccccagttctagtcgccccggggccaaatgagcccctactactctacttagcggcgaccccccaagtagttagtgcagcgttggttgtggagcgcgatgaagacaatcctcatttcgcgcacccccgccctgtgctgacttggcccgggagcgagcagggaggagaagcccccgagtcgaacggtggcctaaggcccctgacgaccggagtcggccctctgcccgcttgtcagacggtgctgggtgcccccgaacctcaggaaggccccgaggccactgcgggaaggccgcacctatcgccctttggccccgaggctaaccctgtgctgactcgacccgggagaaagcagggagaagaggcccccgagccgaacggaggcctgaggcccctgacgaccggagtaggccctttgcctgcttgtccgacgacgccaggagcccccgacccccaggacggccccgaggccactgtgggaaggccgctcctgtcatcctccgaccccgaggtcatcggcacagaagacgagtgcgccccgagaggccacttggacgaagaacgccccggggatgcggcccctagcgaagaggatcggccccgccgaaaggtgcagcggcctgtctactttgttagtgaggccctccgggacgccaagacccgatacccccaggcccagaagatgctttacgctattctgatggcctcgaggaaactgcgccattatttccaggcgcatcgggtcactgtggttacgtcttaccccctcggtcaaatcttgcataatcgagagggtacaggacgagtggtaaaatgggcaatcgagctttctgagttcgatctgcactttgaaccacgccacgctatcaagagccaggccctcgccgattttgtggcagagtggaccccggctccagagaccgtctcaatccccgaggccagcacggacccctctcagctgcctcacaccgcccactgggtgatgcagttcgacggttctctgtctctccagggcgccggtgcgggggtcacgttgacctctccgaacggagacgtcctcagatacttggtccgtctcgactttcgagcgactaataatatggcagagtacgagggactccttgccggactcagagtggcagctggactggggatccgccgcctcttggtgttaggcgactcccagctggtcgttaaccaggtctgtaaggagtaccggtgctctgacccacagatggacgcttacgtacgccaagtgcggcgtatggagcgccattttgacgggatagagcttcggcatgtacccagacgggataacatggttgccgacgaactctcacggctcgcgtcctcgcgagcccagaccccaccgggcgcctttgaagaaaggcttacccagccgtcggcgcgacccgacctcttaggggagacggatgcgcctgaccggcccccgagccccgtcggagtccaggcctcgggacccgaagggagcgctccaagctcccttagattgattgcttggatctctgagatccaagcatacctcacagataagactctacctgaggaccgtgaagggagtgaacgcgtccaacgcatttccaaacgctacgtgctggtagaagggaccctctatcggcgcgcggctaacggaatcctcctgaaatgcattcctcaggaacaaggcgttgagcttcttgccgatatccatgaaggcgagtgcggagcccattccgcctcgcgcactttggttggcaaggcctttcgtcaaggattctattggccgacagctctcaatgatgcagttgatctggtccggcgatgcagagcgtgtcagtttcacgccaagcaaatccatcagccggcccaggccctgcagatcataccactttcgtggccatttgctgtctgggggctcgatatcctgggaccatttaagcgggccccgggcgggtttgagtatctgtatgtcgcgatcgacaagttcactaagtggcccgaggcttatccggtcgtcaagatcgataagcactctgcacttaaattcattaagggcatcacggcccgttttggagtgcctaaccgtattattacggataatggcacccaattcactagtgaactcttcggcgactactgcgaagacatgggcatcaagctctgcttcgcctcacctgcccaccccagaagcaatggccaagtggagcgcgccaatgcagaaatcctcaaaggccttaaaaccaagaccttcaatattctcaagaagcatggcgattcgtggatcgaggagttgccagcggtgctctgggcaaaccgaaccacaccaagccgagcaaccggggaaacgcctttcttcctcgtctacggcgcagaagcggttctcccatccgagctcaccctgaggtctcctcgggccaccatgtactgcgaagctgatcaagatcagcttcgcagagatgacctcgactacttggaagagcgaaggaggcgcgcggccctccgagccgcgcgctaccagcagagcctgcggcgctaccatcagcgccacgtccgggcccgatcactctgcgtcgacgacctcgtcttacgccgcgtccaaacgcgtgctggattgagcaagctctcaccaatgtgggagggtccgtatcgagtgatcggtgtccccaggccgggctccatacggctggccacgggcgacggcacggagctgcctaacccgtggaatatcgaacaccttcgtcgcttctacccctga

SEQ ID NO: 87826 - DNA, 1799 bp, Oryza sativa
  Clone ID: PAT_MRT4530_86736C.1
ggtgctaataagatatactatggcatgccgcggctcgaatgggagaagagccgccggagcaacagacgccggcgccgccgtcaccgccgccggcgagcagctggcctaaggaggtgagggtggatgtaatcgacggcggcggcgcctcgtcggcctccaagcagccgtcgtcgtcgttccgtctctggcgagttcccaagcatgtgcgcgacatcaacaaggaggcgtacgggcccaagttcgcgtgcatcgggccgtaccatcgccgccgccgccgccgcggtggcggcgatcgtgacgccgaggaggaggaggaggaggagagacgcctccgtgtcgagaagctcaaggagcgctacctcgacgagctgctcaccgacgtcgtcgggcctcctcacgtcgacgatcatcgcgccaaacgagacgaaatcctcctactctgcacatgtaggctcggggagatgctggattctgttcgccggttttacgctgaggatcaggagtacttgcgcggcatgacggatgaggagatggtgaggatgctgctactcgacgggtgcttcatcatcaagcacatctacaacttcgccatcgggtacgatgatccggagctgtacgcgacgcggtggtcgccggcgcagctgcgcatcgacctcggcctgctggagaaccagatccccttcttcgtgctggaggagatcttctaccacctcacgccgcagaccttcctgggcaagatcacgcgccgcgtcgccaaggacgacgacaagacgatgcggcggaggaagaggcacaagctgatagtcatggcgatgtggtatatgctgcaggactggttccaactccccacgcgcgagagcgacgatctgtacaagctcatcgccgaggaggaggtccaccacctgctgcacctggtgcacatagctcacctcgccaaggtcgatagcgccggccccaagtctccgccatgcgagtggcagctgtgctggcagtggccgtggcacgccctacagctgctgctctgcatcctcccactctttctcgtcagcttgccgctccacatgtgccggtgttgcgccgccggcggcggcgagaagacggaccccaaggcgaacatcgcgtcggcgtcgcagctgcggggccttggcgtcaagatcaggatggcgaagagggaccgaggcgggatactcgacgtgcggctcaggaaaagccttgagatcagactaataccgccggagctagaggtgccggcgctgtccgtcgaggaggccacggcggtgcttctgcagaacctcgtcgcctacgagcagcagggcacgccggcgcggcaaggacaagaccagcaaacccaagggcggaagggcaaggactacttcaccacctacgccttcctcatgtacaacctcgtcagctccacggaggacatcgccgagctccaggagaagggcgtcctcctcaacaacttcggaagccatgaaacgggaaaggaaataggtgggttctcttcgacaaaggaagatgccaacactgtgctgaacaggaaggagcggcgttggaggtggcaaatcatcaattacttcaagaacctatgccggtggaatcagcggagcaaggaggacacacccatcggcaaggtgctcgatcagctcagggtatgtagccagtaccaattataccgagattgggcggaagcgaagaagtacatggacacccctgtcaaaatccttgcgctcgtcgtgtctactctgctcgccatctccacgatcctgcagactaccaccgccttctatcccaaatga

SEQ ID NO: 87827 - DNA, 5007 bp, Oryza sativa
  Clone ID: PAT_MRT4530_86737C.1
atggctaaacaagcaaaagcgcacaagctctctccgagtgttagcggtgacgacggggagccgaacccacgccgtcgagctcgtactccaccgccccctccacgccaaagtcctaggcgggaggaggcgctcgagagggtcgaaggatccgcgacttcgacatccacgggtgatggagaagggcgccgagatggggagcgtcgcctcctcgtctacggcgacggtagcacgccccagggcgcgctccaagctgcgggcgcgctcctacgtcacccgcccgtcgtccctgacccggagtctccagcccaacgttggctggatgacgtagccaacttggtcatgacggcacggcagcacctaggtgttggtgggcggtcctccgccaccaagacctctggcgctgctaccaccggctccgtgtcgtcaaagcggagggcgcggcgagcggcggctgttgctcgccgttcggctgccactccctcgtcagcacctctgacccgggaagatcagcgtggggggccagatgcccgcatcggtatcgagcgccggcgtaatggtcgacgtgctacccacgcaacggagggtgcctcctcgtccggagtgtcacctcaacacggacgcggggatcagccctccgtgcccccggttggtggtgtcggctgtagagcctttgtagcgagccttcggaacgtccgttggcccccaaggttccggcccaccatcgccgaaaaatatgacgggagcgtcaaccccgccgagtttctccaggtctacacgaccgggatcgaggccgccgggggtgatgacagggtcatggcgaatttctttcccatggccctgaagggacaggcgcggggttggctaatgaacttgccacccgcgtcggtccactcttgggaggatttgtgccaacagtttaccatgaactttcaaggcacatatccgcgcccagcggttctgtcaagtccgcaacaccataccatgcatccctgcacacgcggtgatctacgcgttcaggggggtgtgcggcacaaccgcatgctcgaaaagatcgcctccaaggagccccagactaccgcggagctttttcagctcgcggaccgagtggctcgtaaggaggaggcctggacctggaacccctccggttccggtgtggcaacttcggccgcccccgggtccgctgctcagacagggcgacgtgacaggaggaggaagaagaggtcggcccattccgacgacgagggtcatgtcctcgctgtcgagggcgcttcgcgggccacccgaaaggggaggcctgcgagcgacaaaaagaaggaggccggcgctcccagcagggagcgcccaaccggcaagtggtgcatcgtccacaacacctccctccacgacctcgcggactgccgcgcagtcaaaagtttggctgagcggacgagaaagtgggaggaggagaggaggcaggagcgccgagagggtaagtccccggcggtaccctccggcaatcggcgaagtgaggccaagcagaaggcccccgtcgaggacatcgatggcggcgatgatgacctaggctttcaggagcctggggccaccattgccactgtcgatgggggagcgtgtgctcacgtttctcgccggagccttaaggccatgaagcgagagcttctggccgcggcccccactcatgaggcgacgcgtcgggcgcggtggtcggaggttgccctcaccttcgaccagaccgaccacccaccacggggggggggggggggggcagccctcaacatcctttcccccgcggcctttgacgccatcaaggccccggggatggtgctctggccgtcccagccgattatcggtgtgacgccggggcacacatggccgttaggtcatatcgacctaccggtcaccttcggtggatccgtcaacttccgcacggagcgggtaaacttcgatgtggcggacctaagtctgccctacaacgcggtcctagggaggcccgcgttggtgaagttcatggcggcggtccattacgcttaccttcagatgaagatgccgggccccggtggccccatctctgtccatggcgacctcaaagtcgcgcttgcttgtatggagcagcgcgcggatcacctcgccgctgcgtccaagcccgagggtggcgacgagaggcttggcacctccgttcccgccgccccgaggcagcggatgatcacatgcgacgaggtcccggaagacgcgctcgtctccttcctgcgggcaaacgctgacgtcttcgcatggagaccggcggatatgcccggggtccccagggaggtgattgagcaccgtctcgccgtacggccgggcgcaaggccgatccggcagaaagtgcggcggcaggccccggaacgtcaagccttcatccgcgaggaggtggcgcgacttctggaggccggattcatccgcgaggtcatccatccggagtggctggcaaacccggtggtcgttcccaaggcgaatggcaaacttcggatgtgcatcgactacaccgaccttaacaaggcatgtcctaaggacccttaccccctgcctcgcatagatcagattgtcgactccacagcggggtgcgaccttttgtgttttctagatgcatactctggttaccatcagattcgcatggctagggaggatgaggaaaaaactacattcattacccccataggaacttattgttatacgacaatgcccttcgggttaaagaatgcaggtcctacttttcaacgtactactcgaatttctttgggtagccaaataggacgtaatgttgaggcttatgtcgatgacttggttgtgaagacgcgcgaccaagaaactttactttcagatctggcggaaactttcgagagtctccgctccgcccgcataaagctgaaccccgataagtgcgtgtacggtgtacctgcgggcaagcttctcggcaagcttagggatgtgcaatgcgtcaccggttgcatggccgccctaagtcggttcatatcgaggctgggagagaaggcgctacccttatttaagctcctcaaacgctccgggccgttcacttggacggaggaagctgaacgtgccctcactcagttgaaggcgtatctcagctctcccccagttttgatcgccccggagccagatgaacccttgctactctacttagcggcgaccccgcaagtagttagtgcggcgttggttgtggagcgcgatgaggacaatcctcattccgcgcatccccaccctgtgctggcttggcccgggagagagcagggaggagaggcccccgagccgaacggtggcccaaggcccccgacgaccggagctggccctctgcccgcttgtcagacggtgccaggtgcccccgacccccaggatggcccgggggccactgcgggaaggccgcacctatcgccctctgacctcgaggttaaccctgtgccgactcgacccgggagagagcagggagaagaggcccccgagccgaacggtggcctaaggcccccgacgaccagagttggccctttgcccgcttgtccgacgatgccaggagcccccgacccccaggacggccccgaggccactgtgggaaggccgcgcctgtcgtcctccgaccccgaggtcgtcggcacagaagacgagtgcgccccgcgaggccgcttggacgaagagcgccccagggatgcggcccctggcgaagaggatcggccccaccgaaaggtgcagcggcccgtctactttgttagtgaggccctccgggacgccaagacccgataccctcaggcccagaagatgctttatgctattctgatggcttcgaggaaactgcgccattatttccaggcgcatcgggtcacggtggttacgtcttaccccctcggccaaatcttgcataatcgagagggtataggacgggtggtgaaatgggcaattgaactttctgagttcgatttgcactttgaaccacgtcacgctatcaagagccaagctctcgccgattttgtggcagagtggaccccggctcccgaacccgtctcactccccgaggccagctcgggcccctcgcagctgcctcacaccgcccgctgggtgatgcagttcgacggctccctgtctcttcagggcgccggtgcgggggtcacgttgacctcgccgagcggagaaatcctcagatacctggtctgtatggagtaccggtgctctgacccgcagatggatgcttacgtacgccaagtacggcgtatggagcgccatttcgacgggatagagcttcggcacgtgcccagacgggataacacgattgccgacgaactctcacggctcgcttcctcgcgagcccagaccccaccgagcgcctttgaagaaaggcttgcccagccgtcggcgcgacccgaccccttaggggagacggacgcgcctgaccggcccccgaggcccgtcggagtccaggcctcgggacccgaggggagcgctcccagctcccttagattgattgcttggatcgctgagatccaagcatacctcacagataagactctacccgaggaccgcgaagggagtgaacgcgtccagcgcatctccaaacgctacgtgctggtagaagggaccctctatcggcgcgcggctaacggaatcctcctgaagtgcattcctcgggaacaaggcgtcgagcttcttgccgatatccatgaaggcgaatgcggagcccactccgcctcgcgcaccttggttggcaaagcctttcgtcaaggtttctattggccgacagctctcaatgatgcggtcgacctggtccggcgatgcagagcgtgtcaattccacgccaagcaaatccatcaaccggcccaggccctgcagatcataccactttcatggccatttgctgtctgggggctcgatatcctgggaccgttgtcgcgtcccaaaacgactctaaaattcatcctcaaaattgtgccgagaataattaaaattcatgtgaaagcctccaacaattaa

SEQ ID NO: 87828 - DNA, 1178 bp, Oryza sativa
  unsure (1)..(1178): unsure at all n locations
  Clone ID: PAT_MRT4530_86738C.1
atggcgcagctcccgcccaagatcccggtggcggcgccggggcaccaccagcactgggcctcggccgggggcgccggcgacgcggcgtgggcggatgagttcgccgagttcgcggcgtcgcggcggggcgcgcaccgccggtcgctgagcgactccgtggcgttcgtcgaggtggcgccggcggggtgcggggcgggcggcgagttcgacaggctcgacgacgaccagctcatgtctatgttccccgacgagggcgggtcgtcggccccggggtccgacaacggcggcagcgacagcgacggcggcggcgacaagcacgccgcggcgcagagcgacgacgggcagcacgccgccggggagccgacgcaggagcaggcggcggccacctcgccgacggagctgatccgggaccccaagagggtcaagaggatactggctaatcggcagtcggcccagaggtcgcgagtgaggaagcttcagtacatctccgagctcgagcgcagcgtcacaaccctgcagaagtggcgccagtttgagaccgaccgatggacacagccacactggttggctggcaatagcacacaatgtggcgaggagatgagcgagagcaacgaggtatccgtgctgtcccctcgggtggcgtttctggatcagcagcggacgatcctgaccgtcggcaacagccacctcaagcagcggatcgcggctctagcacaggacaagattttcaaggatgctcatcaggaggcgttgaggaaggagatcgagaggctgaggcaggctgtcctagcctgttacaggctgacggcacctgacctcttgtgcatgatttggttcccgcttctcggtgaaagaaaccaccggaggcgaaaaacctgcgcagcatatcgttatcgtggaacaccgttactgctccagtttcaaggacaagtcgcacagcgtgcaatacaacatctgcattattcagaatttgcagtatatggatctggatcagcgatgattaaccatgctacatgtggtgttcttgtctcaagatactgattgattggagttctggtttacaatgggaattgtgggagatgtcaataagaaaatgtgaactgcaataagattaactgtgatttttgaaagccnnaattaataataataaaaatatttaaatttaattatataataaa

SEQ ID NO: 87829 - DNA, 331 bp, Oryza sativa
  unsure (1)..(331): unsure at all n locations
  Clone ID: PAT_MRT4530_86739C.1
gggttgcaggatncggctngangcgactacgggtgggacaccgcggggctctccgccgacccngagacnttcgccaagaaccgggagctggangtgatccactcccggtgggcgatgctgggcgcgctcggctgcgtcttcccggagctcctcgcccggaacngcgtcnacttcggcgaagccgtgtggttcaangcgggctcacaaatcttcagcgagggcgggcncnactacctcggcaacccnagcctgatccacncgcacagcatcctcnccgtctgggcggtgcaggtggtgctcatagggcccctccaggggtnccatcatcgcc

SEQ ID NO: 87830 - DNA, 207 bp, Oryza sativa
  Clone ID: PAT_MRT4530_8673C.1
agctgaaaaacaataggcaagcgcagaccgaaactgcgaatagatgcaacgcaccaaaaaggatatacactctgcttgacatgattccatatggaaggattgatacgacccagacatccaggttacagaacaagcagttgccagacgcttgagcatctaaagtcagcggttgcacattaaataaacgtaaaggccaaagcacttctt

SEQ ID NO: 87831 - DNA, 1974 bp, Oryza sativa
  Clone ID: PAT_MRT4530_86740C.1
ctgcatagctaagctatagtagctaacagtagcagcagctgtattcttctggttcttgctcttgttgttcttcttcttctccacctgcgattgattcggcctctgaaaatcgatcatggaattcgggttcggcggcggcgaggtcatcacgcagggcgggtcgtcgtcgccggcgggatggattccggtgagctcgtcgtcgtcgtctagaatcggagcatctgtcgcctgtctcttggctgagctctagtggtgtcctgcctgttgctgctgcttcttcttcttccttctcctaggtgttcttcacttcttctccgttgctgagttctgccaagaaaccaaccaattttgacagcatgtgccatggaagtagctaatcttcagtgacacgaagaatggatccccagatttttgtcagactttcagttggacagcttggtctgaaactccccggtgcgaatgcgaggaaggcggcccggagcttccactgcgagatccggctccgaggattccctgtccagatagctcctgtccctctgatcaattattcagagttcaaccttgatccacacaccaatgccgccgtcttctccctcgacgaatctgaactgaaggcgctgtcggcaccggggtgtttcggagctcatgggtcttacctcgaggtcgcggtgtacgttggccggcgtggcgggcattgtggcattgtcaccgggatgaagaggctggttggggtggtcaggatggacattgggcctgagtggcgcgacggcaagccggtgatgcttcaccatggctgggttggcattggcaacggtgaggccaagccggagctgcacttgagggtgaagatggaggctgatccccggtacatctttgagttcgacgacgaggtcgcgctgaatccgcaggttgtccagctccatggccgcaaccggcagcccatcttcagctgcaagttcatccgcgacagacgtggatcacattcggatcagctgtactggtcgagctccggcggcgaggagaaggaggcggagatgatgaggaggagggagaggaaggggtggaaggtggtgatccatgacctgtccggctccgccgtcgccgcggcgttcatggcgacgccgttcgtggcggcgagcggctgcgacacggtggcgcggtccaaccctggcgcgtggctgatcgcgcgcgccggcgcgacggcgccggggtcgacgtcgtcgtcggcggcggtggagagctggcagccgtgggggcggctggaggcgtggcgggatcagggcggcgcggcgaggcaggacacggtgtgcctccggctgcggctcctccccgacggccaggacgcgtgcatgctggtggccgagacgccgctccgcagcgacaggggcggggagttcgccatcgacatggacaggcaggcgccggcgctggccgccggggcggagcactgcgcggcgagcctgggcgaggcgtgcgccggcggcgggttcgtgatgagctgccgcgtggagggggagtcccggagcagcaggccgctcgtgcagctcgccatgcgccacgtcacgtgcatggaggacgccgccatgttcgtggcgctcgccgccgccgtcgacctcagcgtcaaggcgtgccggccgttccggaggaagacgacggcgaccaagaagacggcctctgcctcatcgtcccctgatcccctcgagctcgacacgtagccgatgcatccatgtcctactagtcttcgtcgtcgtcttcttcctcgcacagctggcgaagcaccgatggatcgagcacccatggcggccatcaaaatccttctgtaaattcactttgaaagaattggacactcccttttccgttcgttcaaactttgttgtatgaattttgtagagttcactaaaatccaaccctgaatctgcgcctcattcgagcattttgagaaattccagtcgcttccaaaaaaaaaaaaaaaaa

SEQ ID NO: 87832 - DNA, 685 bp, Oryza sativa
  Clone ID: PAT_MRT4530_86741C.1
atggaggccggcgccgggatcagtggaggatttacctcctggggcagcacgcggctgcccgggtgtcaagcgctcgacccatcaaggcgcagcgatttgtatgcgacccctagaaaaacttatcccaaaaatggtcctttttggggcgccagagtggctggcgccgtcgttcaacaggacggcgccagcctctttggcgccgtccccctgccgacgtggcggggcgatgctgaggaatagaggcggcggcgccagccatgctggcgccctcctccctggggcggcgccagcatggctggcgccctcctcctgccacgtcggttcgcgtgcgccacgtggaccacggcgggaggacccccatggacccacacgacagcccaggcattgggcagagggtgggccccaacggaaccttatccgtgtcctcgcacctcagccgcgccccccggggctccagaacgggcccgctgcgggaaccgagaccgcctggcccccagggcttctggccggcgcgcctcccctgcccgcctggcaccccgggccgcgggcgggacccggccgccaggccgtcccgcccccccctccgctcttggtccccacggcgcgccccgcgccgtggcccccttcccccgtggctggagagctggctggcgtccggcgcccggcacgtcgcccgcatgcagct

SEQ ID NO: 87833 - DNA, 483 bp, Oryza sativa
  Clone ID: PAT_MRT4530_86742C.1
atgggtgcaccttcccgatcatccactgtgacatcaagcccgacaacatactcatggatcacatggagaatccgaagatcactgactttgggaatcgccaagctccttaacaaccagcaggtgcactacaccatcaccaagatcatgggcaccaagggctacgcagcgcctgagtggttcgtggagataatatgctgcgggaggcttcctcccgataatcataggatcggcacaatggtgccgctgctaaactgggttgagagccttatcgaggacgggagaatgtctgaagtctcaactcgtgggggaagaagagagagggccggggcacccatggtgttaggctcgagcatggctgatagcgccgagaggtacgcacgtgtggcgtatatggtgcatacaggtggacccatctatgaggccaacaatacgcgaggtggtgcacatgctcatggatgttgcccctctgccagccttatctag

SEQ ID NO: 87834 - DNA, 348 bp, Oryza sativa
  Clone ID: PAT_MRT4530_86743C.1
atgcccgaagtgatgaacaagcttgggtcttgggctcttgatgatcagaacaaaacgccgcaatcgctcgccgtctcccgtagcgctggaagcccacaatcgctctcaagtctcatcctgtcaaaaatcgtcgtcgccgcccaggagtcacagcccacggcgccacatccccttcgtctgctggccgccggcaagatcgacgccttctcccctgcctacctcagaccgccccaagcccccaaccctcctacctcgcaaatctccaagtcaaccgcatggccgccgtctgacgcccttgtggtcatgcttcctcatcctcgtgcttgcccttctttcgttggctcatga

SEQ ID NO: 87835 - DNA, 2404 bp, Oryza sativa
  Clone ID: PAT_MRT4530_86744C.1
agagctgaaaatgtagcatcatgtttcaaccgggacgaatccaacggtccgagcattcgtacgtgttacaggtatcacatttgcatatctttactgccaacggcattgtacatatgcagtgagatacaaagctttgtcacaaaagagaattagacaagctcacaaaaccaaatcaaccataatccatgttctatccacattccactgaaggcgaagatagttaaagaaaaccaaattctgatgatctaattaatcttaacgggttcactgtacaacgaatatagggccagtgccacatacaagtatacaacaaggcctttgccgctccagaagacccatgtggtgtattttgctgcagcccacaggtacagctctcgcctccggttcaactgatgtgtcaatgataggagcatctttctgaagagaatgtcaatacgaagcattggtaatatatgattctcgagctataagcattagtatagactctcacggacccatgactaaattgccggcggtactgtagcataagttagccgaatggtccatcggtgtggctttgaaagtaaaaccttcactaggtttttcttctctcgaaccatatatattgctagctgcattgccagccatagtcggcattgccattgctggaagtcccatattactgtatactgaacccatgggctgcatttgatactgcatctgatcagaaactgaggactgcaattggtttgtggcatcgctgtggttcgggctgattccaacaccaagatcaaggctgatggtgtcactttcagctgcttgagaatattggtttggaaatgtcctaggttcacatgctctcatcatgccaccaaggccctgcatattgctgttaattggatggacaacaggcttcatggggggagtggacatctcatggctcgcattcctcgacgcagggacttcatggttatgttttccttcatatgttgttatgactgattttggatcatgtgatgctctctcaacatgcttcctgactgggcatcctgtatttgtgcacttgtagtaactccgtggattggggtttcctttaactactttctggccatacttgcgccagcggtacccatcatccaagatgtcaacctcactaaccgtttgtactacaacacgaggctcacggttaggcttgcccatcaaagcagcatcaatagcagcagattccattttccttcgttttgactctaaatcatcatcctcaacagcatcatctccagggtaaggtctccctcctccggcatcattgtcatcatcactagctgagcctggaacaggctcaatcataccagctgtatgtactgcattaccaagaatgctaagaacatttgaagatttgtcatcagtagttgccacaccatcatatctttcttcaccctggattggaggaactgcaccggcagacagcctcctattgggttggggcttagggtgattgtgacgccctttataaaccacttcagtaatctgaccatcaagcgaacgctccaatagcttttttacatcacagttaggatgtgtgcacttgtaatagcttctcgggttctcacttcccttaacatgcttttgcccatatttgcgccagttataaccatcctctgcagacttttcagccacactttcaggctgtgactcctgcatagcatttccagagctattcatctgatgcaactcagatgtaccaacttcagcaggtgagctgtcagttaaaccaaccattccaaccagttggctcggggcacttgaaatattgactgcgagagttgactcacgagaacatagaggtatattgtcgatcatcatatcgtcagatgacagggcagtattcaggctttcatttttcatagaagtttcatgctttttgggatcattgatagcagaagccgtcgattgagaggatgaattcagatgaggcttgaattcaaaatctcgagagccaccatcttcatgggtgctaccagatgttttatccctaggcgaaggaagtatgtctggatttgcactcttgttcataattgcagccatgctcagagtaccagttgtcggagagggttcaaccttgaagttggtgaggaggacgggggactcgaggagagccgaggggctgaagcccgcggggatggtgaggcagggctcccgcgagatcggcagccgcgcgggggacatcgccttgtacctcgcccccgcgcccgccgcgcccgcggcgagcgccgcgacgcgccgatccaccgggggctgcttctccggcgacccgccgacgcccgcggggtggtcaccggagctagggtttggcgaatcggccatttgctgcggttgcgcggcgctgcgtgggaagccctcgtgccgaattcctgcagcccggggg

SEQ ID NO: 87836 - DNA, 2100 bp, Oryza sativa
  Clone ID: PAT_MRT4530_86745C.1
atggcggcgccgccgccggctctccgccgtctcctcctcctcctcctcttctcgctcctcctcctcgcatccgtagcagcagcggcggcagcgccggcggccgaggaggaggagttcacggaggagctgctcctgcgcccgctccccgaccgcaaggcgctggcccacttccacttccgctcctccgcgtcgccctccgccgccgccgccggacgccaccaccacctcttccccaaggccatcgcccagctggtccaacaatttcatattagtgaattggagctatctttcacacaaggtcaatggaattatgagcagtggggtggatatgacccaatgtcgaccaattatgcaaagcctcctggtgttgagctgtgggcagcttttgaccttcctttggatgagattgatgccacatggaagaacctgacacacacactctcaggcctgttttgtgcatccattaactttttagaatcatccactgccttttctgctcctcgttggggattcaaattgaatgaagggaatctaagatatggtgcattgcctcgtgaagcggtgtgcactgagaatctcacaccttggttgaaacttcttccttgtcgtgacaaagctgggatagcttctttgctgtacaggccttcaatatataaaggatattaccattcccaaaaactgaaattgacatcatctcaatcttttggtattattatcgatcagacattgacagtggttctgcagccggatactttttggggtcagcaactacattctactgatggacaactgcagcccagctggtccatgaaagatctgtttaacaggaagttatcaggaaaatgccgtgtctccaaatcgagcagagtatttttagagattgagaacgatatagttgacaaatctggaactgaagcttcttggactaatgaactctttgtgctgtcaactgccccagacagggtgctcaaggaattaaataacatggatgcccaatcttcttctctatatgaatatgatgttagtaactacaacaatgataagcctttggatgttggcataacctggaaacttcccctcatatggtcttgcacccctgcaccgtatcatgcaaacagatttctcatgggtagtggaaatgaaagagggtcgattgctctgtcatttagatccactaatttgcataagcagttatttggaagctcaaatgattgctcaataaaagctgtagttttccaagttgttccatgtaaggctatttcagaagtagttgagaagattcatgtcactccttcagaagacaaacatttacctggtactctagagatgctactaagattaccttgcagtatggaatcagctaccctgtcgctggactttgacaaggggtttctgcatatcgatgaatatcctcctgatgctaatcaaggatttgacatcccatcagctttggtaacatttcctgagttcaattctagccgaagttatcctgaaggtgatacattatttgtgtcacctttgctacaaacgttcaaggaagatggcgtggtcaagtcatatacagaagtattgcttgttcccttgacaactcctgatttcagcatgccatacaatgtcatcaccttcacttgcaccgtcttagcactttattttggttcactacttaatgctttgagacgacgaattggtgaagaagagagggaattgaaaaaagcaggcttgtgcaggttcacaaaagtgctgggacatcttgacactacttccactagcatcaacctccacccgtccaccaagctgctcctctgcagccaggagcaagctggacttaagttcagcctgtcaagggcatgtcctctttatctctatagctacctgagccgcgaagcgtgggctgattcctctgttgatagccaagctaagggggaagaaggtcgacccaccaccacaaggatcttcacctacatctctgttgtcaacaaagctgctactcaaggttgtatttgtggcggtagtagctgtctcacttcattacttgtcaaacagttgaggattgatgccattgtgtacaattttgagcaatgtccaaaaccacggctgtag

SEQ ID NO: 87837 - DNA, 420 bp, Oryza sativa
  Clone ID: PAT_MRT4530_86746C.1
atgaagtggacctcgagccttcacaaactgttattcagcccttggtaccagaagccttcacaaactgttctttggcttttcattgattcaaagacggtgacaatgatggtgaaggaacttcacagactgttcttcagtccttcactgattgatgagggtggtggtgcatggagctggcgaactggacgatggtatgccgctgctgttgctgctacagatcgcagaggttgcttcgatccacgcgacgggcagcgagacaagcgccgcgtggttggggccgagaggatggcgcgggacgaccatgcgactggtggaggagcagcagggacgagtgccgcgacctgcagcgatgaagaaggcgccgtgacgagcggctgcgatgaacggcaacgggcggcagtctcggagtactggatataa

SEQ ID NO: 87838 - DNA, 759 bp, Oryza sativa
  Clone ID: PAT_MRT4530_86748C.1
atggagcgggcgaccgcgcctcagctaggtttctcggcccctaaattggaagagaaaaggcaagaaaatcttggggattggaaaagaagaacaaatcagattcaacaagataaaaaagaaaaagaaagcaaaaccatcatagaaaaatacgacgactgggtcatgctcgactccgacaaccccgcctgctccgactccgatgacgaggaggacgacaatgaggtggggagcgacgctgacggtgcggcaaccactggcgccggcgcctcccggggacgcctccctcacacgtcagttgccgcggcgtcagcgctgctcatgtccactagcgccaccgccgacttcgcctccccagcccgcgcacgtactgatgaggagaggagtcctccagtgcgcgtcggtcaccgcggcgtcggcacctcacctccccggggaggagaagcgagcggcgcggtcgacagcgaggcgaggcgcacggcggtggcatcccccgcgtgctgccgcggcgtgggaggcgaggaggcgtggcggcgtgggaggagaggaggagccgcggtggtgcgggagagaggagaaggaggcggtcgtgccgaggagaggtgcaggaatactcttgcgagtagtaggcacgccatcatcggatctgcctccaccgccgcttcctttcttgaccaccaccaccatggcgcgctcctcaacgagctcctcctgccagtgtggatgaagatcggaacaatctcagttctggccaggaaatga

SEQ ID NO: 87839 - DNA, 249 bp, Oryza sativa
  Clone ID: PAT_MRT4530_86749C.1
atggggagttgtgttgctattcaggttggttcgcagttcgtacaccaggccaggcctactggactatcattgggaggccatggccccatgcgacgcccccgcatcccgtatgaggcggcggcagttgccggcgaggccaccacgttgtcctctgttggcgaaaaaatcgaacacaccggcctgggagatctgcttagctccagtgcaggtccaaatcttgatgagatgcgggcgtgccagtcagtttga

SEQ ID NO: 87840 - DNA, 3258 bp, Oryza sativa
  Clone ID: PAT_MRT4530_8674C.1
atgggtgccctcatgccggcgagggatgcggcgtgggcagcctcgtgggtgtggttggcgtccgggaacaggatcgctcgccaaagccagtcggtgcacgaggtgccgtggataggtacacgaacccgccaccatggagaacaccacaatggccagctgcttcgtctttccgccttcgtcgctggcttcgcctccagagggataggggtagaagaggctcacccgcagcgggagggccaggttgacgacctggccacgccagagcccatcgtggtcccttctttgccagcacgcccccctcttcctcgctgcctccacctccacaccggctgcgtcccacgaggcttcccacaccgaaatattatagcgccgaaaaaatttgcaaaactagaccctgccgcccttcgcaagggcggcaagccgacgtggcacacggcgcgctggacggcgcgggacggccgtcctcctgccccctcctgccctcttgccgccctggcaaagggcggcaggacccccttgccgcccttacagaaggcggcaggcctggccgcctataaagcccagccggctcctttgaggagcccattccctcctaacctctccacatcaaaaaaaaaaaaaaaaggagaaggggaggagaagaaaagaagaggcgaagccctgccagtttcaaacttcgatttcagtaagtcgggcaacagagggtttttattgggaactaatgccggttcaaaactctgggatgtggagatggatccaagtgtacagatgaacatggatgatggtgaggggccaagtgcagaagtgaatgagattgaagtggatcaggtcaacgcaccagaggaagatggagtagctccagtagtagctccagtaggcatgcaacctggtggagtggctgacgagggggagactgtgggtgccattgtggacgaaatggaaaaagaggatagtgacaacgagcgtgtcgaggaagatgattcgtcagatgatgacgagaacaatattaatccagctgaatgggctagtgatgatttttctggtttggtcatctctgaaggggaaaatgtgagatgggagtacaaggaaaacgagattatcgagggagcgaggtatggtaatggagaagacatgaaggaggcggtgaagcattatgcagtgtcacttcatagggagttttgggttgccaagtctaaccggacacaatatgaagttaggtgtgttaatgaaaaagatgggtgtccgtggagagtgcacgcctataaggggaaatggaaggactactggacagtgtcggtcgttacgaaacatacttgttatctacctggtgttcaaaaataccacaggaacattacatgtgcatttgttgcatctgagatgtatgcgcatgtcgtggacaatctggcatatgaaccgaagtcaataatccgacatatcgaacagactttcaagtatacaattagctatgccaaggcgtggagggccaaacagaaaataatagagatgagatttggaacttatgaagcctcatatgacaatttgccacgtctgctatctgttatccaacaaagaaaccctgggacctcttgtgcactcaagacattcccctcaattgaacatcctggcaagactgtgctgcaaagagcgttcttagctctacatgcatgcaagatggcattcgtgcactgtcgtccagttctttgtattgatggcacatttttgaccgggaagtatcggggccagatactaacggcaattggggtagatgggaacaatcaggtattgccgttggcatttgcttttgtcgagagcgagaacaccgacagctggtactggttcctccatctggttaagacagaagttgttggtatgaggcccaatgtgtgtctaatacatgacaggcacgccggtatgcttcgagcgatagaagagttaaagtttgggactatggaaagaggataccctggccagtgggaagatgtacaaagcaggtggtgcatgcgtcatatgggagctaatttcttcaagcaatttaagaacaaggagttgatgaacatgttcaagaggctatgcaatcagaaccaggagaaaaaattcaatgagctttggaagagattagatgagttgacaggcaaatgtagtgaccagcgtgcaacaagaccagcggccgctgtacctgaccctcctcaagcactcggagctctcccaacagacagtgtaacattggttagaagaactggggagcaaattcgaaaattttctcagtggattgagaatgagccaaaagagaaatgggctaagacttatgacacaggtggtgctagatatggtataatgacaacaaatttggcggaagtttacaactgggtgatgcgcggtgtccgtggactcccactagttggtatagtggagttcattttacatgggacatgcaagtatttcagggagcggttccaagcagtttttccctctatgccgaacaacaacattttatttggaactttcatggagaaaaaactagcggagtggcgtgcaaaggccatgaaacatcgagctctagtgcaaggtacccaacaacacaggtttgaggccgttgagtgcaacagggtcgtcgttgatgctacaacggcgatccaacggttaggcgcggggattgaggtgggggcagacgagcacctgtcgacgtacacgcggatacgggactcgatgcgctcggttctccgtgcgctgacctgtcgtgctgccgacgttgctcaggcagacgcagcaccacaggtgcgtccccgaccgactgctcctcgtccagctgcgcacgttcctatgccgacaccccctcccttcggaggcttcgctcagcctgggacgacgccgggcgcccactcctggcaggctgcggggtcatcgtcacaggcaggtgtgtcggcctcgctgtctgcgcagttctggcaggacgccgggacttcgtcacagccgcccggcacgtcttggcagggtcctaccgggacttcgtccgagcacgggtgggcttccgccacgcacttcgacattagtgacttcgacttcccggacattatcggtccctcacagcttggaggcgcaccgccggtgcacacgcaggagcagtcgccctccaccccactcccagaccctcgcgctacccgtgctgtcccaccggatcgcttcacgtactcccaggaccacgtgcgagcacaggcccggaggaccaagcggggtcgcggcgcgagtcacggccagtag

SEQ ID NO: 87841 - DNA, 1532 bp, Oryza sativa
  Clone ID: PAT_MRT4530_86750C.1
ggaggttgaataagtgcctgtcctgcccttctctacttgatttggatgcagtacattctactgtaccaagaataatgccttgggacttcccatgtaaattatcagaaacaatatacatggaaatagacaaaacaatcgtgacagctgaacaaaagaaaaaacagatggaagtatcagaatttgaaggcctcgaattacaaataatgacacctttgaccaagggaagaagtgctggtaaaacaagaaaacctaagaaatccaagttaaagcatggccgctctgctgattgtaatgatgcttcaccttgtaagaatgaccttgacgatttccatgatagtccagatatccctcttccatccaatcatcaaagaatgagaaataggcgtggagtagttttgtttgctgagtctgatgatgatctagctgatgcacatgctgccaaagatgccacatttactgttcaagaaggtagattgctcccacaatcttcagagctgccctgtttatatggccatgggatttccaacattgttccagaaagtgttttcttccaacaatcatctgtgcctcatttacatagggaagtgatttcaaatcaattatgctttcctagcgaatcaagggcctttgaacctgccagttctttccaaaaccagcttgaaagcaacatgcccgggtccatttcacaaatatgtgatacctttatgtctcagggcatttcatgtgtgcctgagtcatcgttcatggttggggggacatctgcatcaatcagcagtgatgatcttttatcaagtctagtgtccaatggtttgtctgcccttcgtaatgagagtacttacactgcatctgtagtggcactagaagacactaacaaggtggagaatcaaatgactgataaacctcaaaaatgcatggaagatgaagttggtgagacttgtgaggcttatgtggaattggctgacaggaatgatcatgcaagctgttcaattacaggatatcaattgatggatgaatgcagtcgtgctgaaagtgtttggttgctttcagggaaaaaaaacaatgactcctgcaaggtcgaacatgtacaagatacttggaacaggctacggcagtgccatcctgtacttccatgtgacatgaatcacaacagatcagtttctggagctttgaagcgtgtttcaagagtgtctgatttaatatcagaatcagatcttatgctcattagctgccacccttttagtaatgatatttcagatccatctttgactccttacactgagtctgatggcttctcgtacagcaagcagcttgagatgggatctatctatgctcagcatggtctttgcatttttctacaggattcccaagctacagatgatggttttgttgattttttacaagagttgttatttagcggtacaactaccacatctttgggtaaatttgttagctctggaatcagctgtggtgatggatctgggaacatttcccatgtaaaatacccaacaagttgtatttctaagagaaggtaa

SEQ ID NO: 87842 - DNA, 422 bp, Oryza sativa
  Clone ID: PAT_MRT4530_86751C.1
aactcataccaagggagtcccttatctctgctgggaaggatcaagtggctggttgtgctaagcacttgggagctgatggtggaactcatcatggaatctaggagaacaacacgatcactagatgaacatgaggcttctaggcattcacatgccctcatatgatgactctattatagagggtgtcgctacttgcatagtttactattccagctagaatggcgccaacatgcatgccagtcatgatctggatgctggctacctagaaatgcagatcgcatttcaaaggagctgcgatactaaatctgcctaagaatagacaggataacgtgccctcctgatgcatatttacttactctgtgcaagctggaataaatgctggcattgatatggtcatggtgccattctttacacccaatacattg

SEQ ID NO: 87843 - DNA, 366 bp, Oryza sativa
  Clone ID: PAT_MRT4530_86752C.1
atggcggcgcgagcggcggcagtcctcggggtgacgatgcaggttgatttagaggtctccaggatgctcactgtgagtctaacgagggttgtcgaggtcttggcagcagcggcgacttgcggaaccgcttggcgacggcgtccttccgcgggtgaacgacgacagctcgaacgggacgatgagctgcaagagaacagcatgcacgagggtagtgaggttacagggatggtttgtgcgcgaggaatcgaacaatggctcaccgaagtggcaggaatcgaagatcgatgccggcggccggagttggagaagatgacgccgatctccctcctcgattcaccgatccatgtggttcttgaggaatcttga

SEQ ID NO: 87844 - DNA, 1101 bp, Oryza sativa
  Clone ID: PAT_MRT4530_86753C.1
atggcggtggcggtggctgccggagaaatcagcgacgacggcggagaccagccgtcgccgtcgccgtcgccgtcggcgtcgtgcgcgcggcggccggtggtgttcgcgttcggcgactcgaacacggacacgggcggcatcgcggccgggatggggtactacttcccgctccccgaggggcgcgccttcttccgccgcgccacgggccgcctctgcgacggccgcctcgtcatcgaccacctatgtgagagcctgaacatgagctacctgagcccgtacctggagcccctgggcaccgacttcaccaatggcgccaacttcgccatctccggcgccgccacggcgccccgcaacgccgcattctccctgcacatccaggtgcagcagttcatccacttcaagcagcgctccctcgagctcgctagccgcggcgaggccgtccccgtcgacgccgacggcttccgcaacgcgctctacctcatcgacatcggccagaacgacctctccgccgccttctccgccggcggcctcccctacgacgacgtcgtccgccagaggtttccggccatcctctccgagatcaaggatgccatccagagtttgtattacaatggagccaagaacctgtggatccatggaacggggcctctcggctgcctgccccagaagctcgccgtgccgagggccgacgacggcgacctcgaccccagcggctgcctgaaaacgctcaacgccggggcctacgagttcaacagccagctctcctccatctgcgaccagctcagctcgcagctcaggggcgcaacgatcgtcttcaccgacatcctcgccatcaagtacgacctcatcgccaaccactccagctacgggttcgaggagccgctaatggcgtgctgcggccatggcgggccgccgtacaactacgacttcaacgtgagctgcctcggggcggggtaccgggtgtgcgaggacggcagcaagttcgtgagctgggacggcgtgcactacaccgacgccgccaacgccgtcgtcgccggcaagatcctctccgccgactactcgaggcccaagctgcccttcagctacttctgcagtgcatag

SEQ ID NO: 87845 - DNA, 165 bp, Oryza sativa
  Clone ID: PAT_MRT4530_86754C.1
caggttcaaaaaccacgatttataaagtgccggaattgaattccacaaattaacattacttcgagttttaataaaacatcatgcgaaaggccagcaaaaacaaaaggcagcttacagctaatgaagctttactggagtagctcgcaaagggtccgacttattttc

SEQ ID NO: 87846 - DNA, 637 bp, Oryza sativa
  Clone ID: PAT_MRT4530_86755C.1
aactagtggatccccgggctgcaggagaatatgaacttctaccatattgttcagacctcatcagctatagtagaattggccgagtacttaatacatgttgagaggatgagaagcagagacagggatttatagttatttaatatttttgttttacatatgaggctattgcaaactctattataccttgcatatgcttgcttttcacataatgatagtttgtaacttcccatgtttatgtggacacatcttttcaaatttttattctttatcttggaattttatttagtgtactgctgatcgtgtgactccccatgcttgtttagtcaaactaatcctattcatcatcttacttgtggacgtgaccctcctcgcatttggtgtccttttctgcgatacagtatttaataatttaagtgagcattgagataactaagtgaacaattattggtgaatgagagtaaacatccaggagctataattatcacacagaaacgatcaccacttgtctaattagtaggttactatttacataatttgattatattggatgcagtttgtgttactccggatgatgatctgcagagaaatcaggttcttcaggtcgctccttctgtgcttttttgaatattgatgctat

SEQ ID NO: 87847 - DNA, 233 bp, Oryza sativa
  unsure (1)..(233): unsure at all n locations
  Clone ID: PAT_MRT4530_86756C.1
ctacctcatcgcnntgngnancccgnnaacattgngggntcccagtggttttgcngtncaattttnacancnngcnggtcantttgatcnntttgggcaacanangcccgttctttttgagcccnaagggnngaantncccgnacagggtccaggcttttcannccagtccaangnccatgagccagngaaacngcgnantnttgctttttttngcanancaccnggggganc

SEQ ID NO: 87848 - DNA, 1206 bp, Oryza sativa
  Clone ID: PAT_MRT4530_86757C.1
atgggcgcctatgaggccaccaaggtggtttttgcccggttgcaagcgcttgagcccaatcttgctccaaacatcattggcatgctcctcaccaaggataacaatgagatggacatgattcatctcgcatgtggccctgacaacctcctccaatctatcattgccaaggtgcgcaccgacctcaccaacaagccttcccctcctatggcctcctggggcttcccgtccgatataggtgaggaggcatctttctccattgacaaggtggggtgtgatggaggtgaagagttctcctctaaggagtatgattggaagttaccaatcggtggcaatcaccatcggagctttttgtcaagcaccgtcaacacccctgggtggaagccatgtctatactaccaaagcggaatgaccacccatcttggtagcgacgacatgcaagagtactcttctcgaccacctcagatagaccaaagtgacctaaccaacaactgcagtgcacgacagatctacttgaccttcccgcctgattccattttcagcaaagaggatgtctgcaactactttagcatgtatgggatggtgcaagatgtgcgtatcccataccaggagaagcgcatgtttggttttgtcaccttcgcctaccaaaagacagtgaagctaattcttgccaagggcaacccacattacatctgtgatgcacgtgttcttgtcaagccatacaaggagaaggacaaggtccccaacaaaaagtttcagcaaagtgactctcctagctacatgaatcacaatagattgctttattctagggtgccctttgacctgcgacgacaccaaatagacaataagctgaagaatgagtttgctatgagggaaattgcctctactgcaatctccacagaagccaagcgcacggtcatctctacggaagaggggaagagagaatatggtcccaaggcagcaacacctaatgatgcttgtggattcctggaaagtggaatggagtacaatttgcctcatagccccttctcatctcctaccaaggcttccaatgttgcagcaacagctcacactagtaacatcagcagcagtagtagccctcataaggtggcctcatctctattcctcccaacatgcacccttgagctgccccctacaactcatgcttccttcaagcgccaagggaaagcattaacagatcatacataa

SEQ ID NO: 87849 - DNA, 1443 bp, Oryza sativa
  Clone ID: PAT_MRT4530_86758C.1
atgggcgcctatgaggccaccaaggtggtttttgcccggttgcaagcgcttgagcccaatcttgctccaaacatcattggcatgctcctcaccaaggataacaatgagatggacatgattcgtctcgcatgtggccctgacaacctcctccaatctatcattgccaaggtgcgcaccgacctcacaaacaagccttcccctcctatggcctcctggggcttcccgtccgatataggtgaggaagcatctttctccgttgacaaggtggggtgtgatggaggtgaagagttctcctctaaggagtatgattggaggttacccatcggtggcaatcaccatcggagctttttgtcaagcaccgtcgacacccttgggtggaagccatgtctatactcccaaagcggagtgaccacccatcttggtagcgacgacatgcaagagtactcttctcgaccacctcagatagaccaaagtgacctaaccaacaactgcagtgcacgacagatctacttgaccttcccgcctgattccatttttagcaaagaggacgtctgcaactactttagcatgtatgggatggtgcaagatgtgcgtatcccataccaggagaagtgcatgtttggtttcgtcaccttcgcctaccaaaagacagtgaagctaattcttgccaagggcaacccacattacatctgtgatgcacgtgttcttgtcaagccatacaaggagaaggacaaggtccccaacaagttcaggcatgttaatcattgcctaattccacttcgtatttttgcacatatattaccttttgagtgttacattgtgttagggccgagaattttgtatagggacattgctagtcatgaggcatcttttaggatgaagcaagatgaacaacaacatgcgaccgagctgcaacgctgttgcttaatgaggcttccgcttctcaatcttcaggattggggccatcatctcagctctcccatgggttcacatgtgcttctaggacaagttgataacaaatataatattaatgagaatgacaatcccactcatttggaggatgtcacatttcgagacaataagctgaagaatgagtttgctatgagggaaattgcctctactgcaatctccacagcagccaagcgcacggtcatctctacggaagaggggaagagagaatatggtcccaaggcagcaacacctaatgatgcttgtggattcctggaaagtggaatggagtacaatttgcctcatagccccttctcatctcccaccaaggcttccaatgttgcagcaacagctcacactagtaacatcagcagcagtagtagccctcataaggtggcctcatctctattccccccaacatgcacccttgagctgccccctacaactcatgcttccttcaagcgccaagggaaagcattaacagatcatacataa

SEQ ID NO: 87850 - DNA, 327 bp, Oryza sativa
  unsure (1)..(327): unsure at all n locations
  Clone ID: PAT_MRT4530_86759C.1
tttttttcataaccaggacttttcatcaatttcaaaccccattatgtacaaaaggaaaaaaagacagcacaacttgagaagatctttacaactgatattagcacggtatagtgagtttactcatgtacaggccgtcaccacatcctaaacaggaaggcacacgaccaattctcacttagaaggggggaaaaactcttatcatcagcttacaaacagatcggaatcacaaagcatcacttgctgcnttctctacaagtggtcaagtaggatctccaatcatacagcctttgagtatggaaattgtgtcagtgtaagttggtcatgcac

SEQ ID NO: 87851 - DNA, 603 bp, Oryza sativa
  Clone ID: PAT_MRT4530_8675C.1
atggggatgaaagcagagaggtcatctccggcgatcagcagggggcgcctcctctcctgggaggaggaagaggagaagaacgtcgtgtcatcttcttctttgcgttctccagcatttctccttcgtgttctcctgctggaacgtcgcttcttctccttcgtctacgaacaaaagctcagggagggaagaacgggacgcttctcacgccgagctgcgccagggagggggaggagggacgcttctcacgccgagctgcgcctcgtttcaagacctgtggagaatgaagaaataattttacaagttaaagtgctgcctggatcaaggaaaggaacaaaaataacacttccttatgaagggtcccatttttacggccagccgccccatgatttaattttgacccttgacatcgcacctcatgagacctacatcctctatggaaatgacctggtagttcattgggttcttcgtcttgtggatgcacttgcaaagtgtaccataaatcttaagacacttgatgggcgctacttgaagatcaaagttgatgaggtcgtgtacccagggtatgagctggacgacaacagcattcaatcagacaggttctag

SEQ ID NO: 87852 - DNA, 725 bp, Oryza sativa
  Clone ID: PAT_MRT4530_86760C.1
gcacgaggttttttttttttttttttttttttttgttttttttttttttcacatggactggcacaagattgagtggtatacagatatagaattcaggtgacacaaaaacttgagttacacatagtagacgttaagttcttggaaatgtttctccccctcaacaatgagtgacacaaaaaaaataactggatggatcatcctactgtggtaaataacagaaactgtaaatgttcaatcatgtcttcagcttcaagtctgggtctgaaggtagcgcccttccgcggtggttgaagatcatgaagtccaggttagccgggagtgaaacaatcctattctcctcagagtgagggagcactgaaaggaacttcgctggaacagcaagacctgcccacatgcataaggccaaccccaggagcaattgcatcatcacatccataggcggactcgagaactcctcctccgtgatcttcagcacggcgcgatactggatggtggcgtaggcggcgtgggcgaggagggcgccgccgaggacgccgagcacgtggccgatccccatgcggcgaggttagcaagactggaggagacgcccgcgagctgctgcctgccgccacgccccgctcttctccggctgccgccgtgcgccgccgcgtccgggtcttctctctctctctctctctctctctctctctctctctctctcgcccgcgatgcgactcgatctgcag

SEQ ID NO: 87853 - DNA, 672 bp, Oryza sativa
  unsure (1)..(672): unsure at all n locations
  Clone ID: PAT_MRT4530_86761C.1
gcggcttcgtactcgcctctctccgcgccctcctccgccggcgctcgccgccgttcgtgctccgccgccaccggcgccgccatgagggagtgcatctcgatccacatggggcaggccggtatccaagtcgggaacgcgtgctgggagctctatagcctcgagcatggcatgcagcctgatggacagaggcccggagacaagaccgtcgggggaggtgaagatgcttctaacaccttcttcagtgatactggagctgggaagcatgtcccccgcgctgctttggtcgatcttgagcctaccgtgattgacgaggtgaggactggagactaccgccagctctgccaccctgagcagctcatcagtggcatggaggatgcaggcaacaactttggccgaggtcactacaccattggcaaggatattgtcggtctgcgcctcgaccgaatgaagaagcttgccgacaactgaactggtcttcaagggcttcttgtggccaacgctgttggaggaagaacgggctccgcgctcggttcccttctccttgagcgtctctctgtggactatggcaagaagtccaatctcgggttcaccgtgtacccgtccgctcagggctncacctcggtgggtgagccatacaacagtggcctgctcacccactcnctccttgagcac

SEQ ID NO: 87854 - DNA, 237 bp, Oryza sativa
  Clone ID: PAT_MRT4530_86762C.1
atattgccagattacggcaaagccataaaccgcggtatggctattaattgagtagcgcaccaacgggtaggcatacgccagccgtaaggattcattgcatgagcggtggaaacagttacacgtataggggagggagagggctaaaaaatcagcatttcttgtagcactgaaggtgctgccggctgagcaacccaatagatgtaaagtcatggccagtgagggtcaaggcatgtcctc

SEQ ID NO: 87855 - DNA, 678 bp, Oryza sativa
  Clone ID: PAT_MRT4530_86763C.1
atgggggggcgcattggtatcaacgttaatgatcaagtaggaccaaattttcaaacatggaagggtctaggacaagaggccgcagcggcaggggatgaggagctcagcgcagcttccaccctccctctcgtcggcagcggcgacgggggacacggagcagcggcgcgtgacgcggagacagcggcggtgggggatgaggagttcggcgcggcttcccctctccctctcggtgtcgtacgcgcggggaggacgagggtgcgagacaagaaggcggcggcggcgaaggcagatgaggcgagcggcagcgggagctcgcgctgctcgaggcgaggcgaggaggcggcggaggaggaggaggcgagcggcggcgagaggaggcgagcgaggcggcatcggcggcgaggcggttggcggggggaccacgtcggcggcgggtggggcttcggcaacctgtggaacgcgctccatggcggccgccgcctcctcgtcatagcctccgtccgtccgtcccgcaatgctgccgcctccttgtcccgccgccccgcgtcacccgctgctgccgtctccacgtcccgcgccaccgccgcctcctcgtccggttgtcccgcggcgctgcccaccgtcgtttacattattgctaattgtattcctcctatatgggctctatatgggctctag

SEQ ID NO: 87856 - DNA, 485 bp, Oryza sativa
  Clone ID: PAT_MRT4530_86764C.1
cttcccgggaaccccggccggcggcgaccggcgacctcccctccgagtcggcgactgggtgccatagaggaaggaggcggtggagacaccggcggtggcaagggcgacatcggcgaagagttcgcctccctcctcctcccatcctatcccacggaagatttggccttcccatggaatctgatgaagatgctaagaaggggtatgctgattttgaggagagggtaaagagaacgatatatatcgatcacctttctcctccctcacaagctcagtaattgaagcagctatttcccagtgtgcacgcgttgtcaatgtggacttcattgttaattacacaatcccatatgatattccttctgctgcgttggtggaactagatgatgaaatacaagctaaggctgctatcgacttgatgaataatttccctttcattctcggcggttagcctatgcctgttagagctatctatgtcttgtctgaaatgt

SEQ ID NO: 87857 - DNA, 1116 bp, Oryza sativa
  Clone ID: PAT_MRT4530_86765C.1
atggctaattctggggaaaaagtacacggaagagttgtcgatgaggaagtgaagccgatctcgccgccgccgaggaaggaagaggaggaggaggagccgatctcgccgccgcaaccactgaagcgggagatctggcaggagaaggcgagtgcgttctcgtcggtggtggtggtgctcggcgacgacaacggcgccaacgcccctcccttgctcctgcgtcgtcgccgccttgttcccccgccgccgccttgctctccttcccacctgttggctggcgacgctggcctgcccagaaccccagagagaagaggtgccatagaggaaggaggcggtggagacaccggcggtggcaagggcgacatcggcgaagagttcgcctccctcctcctcccatcctatcccacggaagctcatgctttggaagttgttgtatgcgtcatttgggagttgcgatttggccttcccatggaatctgatgaagatgctaagaaggggtatgctgattttgaggagagggtaaagagaacgatatatatcgatcacctttctcctcaagtcacaagctcagtaattgaagcagctatttcccagtgtgcacgcgttgtcaatgtggacttcattgttaattacacaatcccatatgatattccttctgctgcgttggtggaactagatgatgaaatacaagctaaggctgctatcgacttgatgaataatttccctttcataatcggtggaaagccaaggcctgtaagagctatctatgcaaagcatgaaatgtttctggatcggcctcctcgccctggaatcaagaaagagttccagtgggtgaaacaagaagatggaatagagtatgaaggaatgaacaaactgcggctccttgcaagaaggcaggaaacagaaaatatggcactcataaagatagcatgtgagaaaatattttcatttggctgttcccttccccagaatctattggaagaggacaaggacctagcaaagcagcaacaggagttacttgatggaatttacaagaagtactgcatactagacagtgacgtgatgaatgatatcaagaacctctctcgccgttatggagtcaacctggccggtgactga

SEQ ID NO: 87858 - DNA, 311 bp, Oryza sativa
  Clone ID: PAT_MRT4530_86766C.1
ccgaccccaaagatatgggtggttaaaactgcactgggtgaaaaccttggaccacattggtacatgaagtggaaaatcccacggaggtgcttgttggtgttggatgctggatgccaacgccaatgccactgtgtgtgttgttttgaatgttgctgctgcttgtgtgttgctgttaatgaaagctggtgtggtgtgtgacgcctggatggtgtgtgtgagaagcctgaactctatgagaaatgagtcaagagagggctgaaaaaaaaagagaatatccctccatgcttacctaaaaaaaaaaaaaaaaaaaa

SEQ ID NO: 87859 - DNA, 954 bp, Oryza sativa
  Clone ID: PAT_MRT4530_86767C.1
atgtcgcccttgccaccgccggtgtctccaccgcctccttcctctatggcaccctacaacaatggggatcaacgctgccaaatcagagtaagagacgctcaggattggcccaagcagaaaagcccacagaagcataccgccacaggtaacgtgtacgacttggggccagaattaggaaaaagccagcgtcgccagccaacaggtgggaaggagagcaaggcggcggcgggggaacaaggcggcgacgacgcaggagcaagggaggggcgttggcgccgttgtcgtcgccgagcaccaccaccacctgcagggggcatggacatcgcgtcgaggatgagcagtgccggacgctgccatcgccgtctcctgtggcctccgcgacgccgacctctgctctcggcgccgccgctcttccccgaggaggaggagcccaccgacgagaacgcactcgccttctcctgccagatctcccgcttcagtggttgcggcggcgagatcggctcctcctcctcctcttccttcctcggcggcggcgagatcggcttcacttcctcatcgacaactctaaggattcaagagcaaatggtggagctcgacgccgcgacgctcggtttgcccccgggctcaaccccatcctcatcggcgccgcaccaagtcgcgccacattgctgtcatcggccaccagacgaggagcaaaccagctgcatgcggactcgtgagcatgcatgctactccagctctcgtagcctcacacgcacctacagtcgcatccaccacctggctggcaatggcataagattcaaggcttcaaaagcacaggggcaaagaggtgcgaaagtatatgcgaatcagtacgtgacctgcacgatcgagttgaagtttgactgcctcgtcgaatcaacggataagcaggcgatcctggccatggttaagtttcatctgccgaggtggtaa

SEQ ID NO: 87860 - DNA, 118 bp, Oryza sativa
  Clone ID: PAT_MRT4530_86768C.1
acgacaagcgtacgatacaacatttgagtcccaacaatcaagctaacgacgccacgattagcagacttaaatcatgtcatttctactacgatgagctgaatacttgctgcatacgcta

SEQ ID NO: 87861 - DNA, 680 bp, Oryza sativa
  Clone ID: PAT_MRT4530_86769C.1
gatactaaaggttgggaatttaaaaacaaatttaaggaaaagggagacgatgatcataagaagaagtatagactcacaagatgggatatgatttgtcaacccaaagatcagggtggtcttggagttcataatttagaaattcaaaatcaatgtcttttgagtgagtggctatttaagttaataaatgagcaaggtgtttggcaagattcgttgaaaaggaaatattttaataatcaatctttaacccaagttgagaggaaatatggagattcccatttttggtcggatcttatgaaagttaagtattcgttcctaactatgggttcctggattgtgaataatggtgaacaagtcagattttaggaggataaatgggttggtaaccattcctttaaatataggtatccatctttatatgctatagtttgagggagaaactcctcggttgcaaatgctatgcattctgttcctttaaatgtttcttttaggagagttttagtagggcagaacttgactaattggcataacttttgtgcttcaattgtgcaaatccatttgacagaaaacaatgatttttttagatggaatcttcatcaaaatggtcaattctcggttcgttctatgtacttagctttaattaataatggctacattgagaggaataagtttaattggaaact

SEQ ID NO: 87862 - DNA, 209 bp, Oryza sativa
  unsure (1)..(209): unsure at all n locations
  Clone ID: PAT_MRT4530_8676C.1
accacaaannnttaaaaatctccagtctccatagagagaaagagagagaagagaaggcagnttgatttggggcgaggagacgcgataccgcgataggntaagcagctggcagcggcggctnctgcgatgntnggcgccgacgtggacgtcgnnacggagctccggntngggcttgccggaggtngnggngggcncnnagncggtgccca

SEQ ID NO: 87863 - DNA, 1090 bp, Oryza sativa
  unsure (1)..(1090): unsure at all n locations
  Clone ID: PAT_MRT4530_86770C.1
ctggtttggtagntnnnnccttgtnngnaccgcagcagacagnggacccccgggctgctccngcaagcgaggaccagctgcagcggctgcaccagctgcaccgcaacagaaagaatcggcgacgacacccggcggcacgaggaaaaaacgtatggangccgcnacaggcgancagagcanggagcgaggccccaacgngcgagcatttggtctcagcccaaaaggaggcaggccncgccccncgcncagacgccgaaacaaaaccggcgacgacgccggcagcgcgcgcgagcgccgaacaaagcaggacggacccccaaccagcccggaaggaccagcgaccacgagggggaacagaacacggacgccngccccaacaccacaagcgcgccaagcaagcggacacgaaacaaacacaccgaaaggcgagagaaacaaacaacaacaagacggcaggaccgcgccccgacagcaccaacgaaagagacgacacccggaggggggcccccgagacaaacaagcaccaccaagggcaaaccagacaccgccccccgccaccaccggcgaggaaaaaacccgggagaaacagggacaacccagagggaaccccagagagaggaggagagaccgcagcccccggaaaagaggcgaaagaaaagaaaaaaacccacaacacgggagaccacaaagcacgaaccacgaaaacgcgaacgacacacgacaccgcgagccaggaggcacaccagacaacgaagagggagaagggaggacccgcaagaggcgcggagaagaggccccagcgcgcggaggaccaacagccgagaaaggaagaccagacgacgagaggcgagcaacagacgcaccaacagcacacgcagcagcgcaggagggaggcaaaaggaggcacaacagagcaaggcgagagagggagcgagcggacggagagggggggcggaacacgagagccacgagccccagcgcggcgacgaccgcaggcgcaacggcagcgacaccagagagaaaaacaangaagcgagggacgggcaggaccgaccgcacaccgcgccgacaaggcaaaacaggcaggaca

SEQ ID NO: 87864 - DNA, 206 bp, Oryza sativa
  Clone ID: PAT_MRT4530_86771C.1
aagttgttagtgcgtactactactactgaaataaaaattgtaaacttggtaatatgataatgttaagtcatggtctgtggtggttgctttacgaggagcgcacatcatcaatcctatctatggtgtatacctaccgttcaaattccggtcgtttcgaacttcgaattgaactcagactagttcatctgtgtggcgtacgacgtcaa

SEQ ID NO: 87865 - DNA, 426 bp, Oryza sativa
  Clone ID: PAT_MRT4530_86772C.1
aaaaaaggggtactggggggcctttcatttccttttaaattacttttggattacaaagaaaagtgtttgttccaaacatgctggtgttgggggcaaaaacaatgatggggctaattttttttccaaaggaataaaggaaatggagcttaaggcattttactgatttgaaatctatctattgataatttctttcaaaacagatggggcaattcacaccattatttttttttgcgacccattttgtccggaagcatggttgtttcaatgcagggtcattttcaggaggttgctgtccaaattttatttcacagctcatgttttcaaaattgggaaacatgtaaaccttcttgccaagggaattttggatgaacttctggcatggaatcttgcaaaggtttgtgcccataccaacacaatttgttcttt

SEQ ID NO: 87866 - DNA, 339 bp, Oryza sativa
  Clone ID: PAT_MRT4530_86773C.1
atggcgaatgacaagggcgccctgcatgatttgatgggccccgcgcagcaaccgacgagcctccgagatcaagatcacacacagtttcgctcaccaaatcctcgaatctcacccgctgcccccggccgaactctcaaaggggggcctcacagccgcctgctagagagggtcacctctcgacagctggcgcgccaggtaggaggcgcgttcgtgatttttgaggttctttcgatcgccggcgtggtgattgtcgcgtcgccgctacgagggaaggcgcagcatcctcaggagtgtcgcgccaccccaggcagggggcaaggccccccacgtccccactag

SEQ ID NO: 87867 - DNA, 545 bp, Oryza sativa
  Clone ID: PAT_MRT4530_86774C.1
ccggccgggccgggaataatctgctgttgtgcgagaaggagtaatggatccagcatcacgctccctctccattattttcttcttagtcgcagtgacatttgtggttgaggtgtctgggcagaagaatgaagcagtataccatttgtttggtggtgaaggctcgctcaccaaaaatgagtgcccagggaaatgcagctaccgttgctcggccacatctcacacgacggtgtgcatgacatactgcaactactgctgcgagaggtgcctgtgtgttccatccggtacatacgggaacaaggaagaatgcccttgctacaacaacatgaaaacccaggaaggcaaaccaaagtgcccctgaaatcaactatgaacaatcaatccatccatgaaagcttggaatgtaccatctgaaatacaatgcttcctgaagcttagattcatatatactacttgtgttgtcatttgtattgttggagaagagtagttcaacttaataaaagttatccatattttggcattaaaaaaaaaaaaaaaaaagcggcccc

SEQ ID NO: 87868 - DNA, 2133 bp, Oryza sativa
  Clone ID: PAT_MRT4530_86775C.1
atggccgcgaaatccgacgaccactcgctgccgccgggcttcggcacgaggccatggctggtgcagggatcacgcggcgacacgctgactttcgtcgatgtgtcagacctcagcctgcacgagaccgttgttcctgaggttcgagggaagacgtgcttgggcggcatgcacggtgactggctgctgatgctgcacgagtctactgccgattgcttcctcctacgcatcagcaccaatccacggaccaagattcagttgccgccgttgcatcagcctctgaattttctatcaacaatcaagatgctcgagtcaccggatagcccgaagtgcaccatcttaattgccagctcaccggaggtggaagaagagagctaccttctatactgccgccccggtgaagacgagtggaccaaactggtttccccgttcaatgacatccatctctctgcttttatgtgcaactacgaaggaaagatctgttctgcttgttctaatctcgtagtgatagatatggtggatggtaagatacaactacagcgagtgggtaccatcaaggatgaagaaaaatatgcccgtggaagtggttgttaccatgttgtcgagtcatgtggaaagttgtttctcttgtggatagaagagctcgggtgctttgggaacgatggattgctcaccgccattgatgttttttgcttggatcttgagttgatgtcatgggagagggtggagagcattggcagcgaccgtacctttcttatctctgaaaattacactttctcatgtccttcaatagaaggtgtattgcaaggaaactgtgtttatcttgtatggtcaagctgcgacagtgagaggctttataagttctgcttggacgacatgaccattagcttccaacagattctttctcaacctacaaaaccctggtgtagagcattttggactgttccagcaagcatcgaatcaatcttgcccatggaaatatcagacaagccaaatagtcttctatcgacaaagctgtcaaaggatattctactcaatgaccttgatgagcacgatggactggggaattctttatgtctatgggaacatctaccagtagacttgctagagttaattgtctcaaacttatccttggtagaccgcatacgatttccaactgtttgcatggcatggagcaaggtgtcgaatccaatagagcaagcaaaagtttggccttggctaatgcacatctctaagcaagatgggatgtgtaggttgtttgaccctctacgcggtgaggtgtacaacatgcaagtctcaatatttgacactaatgaagatcgacacatttttcgctcctccaaagatggttgggtgttcacatcagctgggatctatggtcacgatatattcatcataaatcctttcactgaggatattgtggagcctcctatgttcgaacgtagataccactacaacggtgtatccttttcttcaccaaatccaatgtgtccaaactgttatttttttgggatcaacagtagtctcagcgggaagtttctcaacattcatacgtggcggcatgaagaaactgaatggatcgagcaacgctttgagtacgatgtgccattcccagtaggttacaataaccccgtcatgttttgtgggaagttctactgcctcggaaggaagggcaaccttggtgcctttgatccaacaagcaatacttgggagattcttgacaagccagagccgatccatgttgagatggatctcttacaaaatgatcataggggaagagagttctgctacttggttgatttagaaggagaactgatatctgtactcttgcataatgccagtgaggcgcctcgagtgttcaaacttgatttgacaaaaatgtcctgggttgaagtagaggacattggtggtggtgccttgtttcttgatcacaggacatcgcatggtgtaggatctcccgatggtggtcatggaaataggatatacttccctagatattctgtggatagaaaaccagtgttctatgatatggataacaagatgtactacccatcattttatggtcacattgagccattgaactgtgtgtgggttgtgcctaatctgcacaaaaatgaatcaacatccgaagattga

SEQ ID NO: 87869 - DNA, 195 bp, Oryza sativa
  Clone ID: PAT_MRT4530_86776C.1
atggcgagcattgatcgtgcctcggcgacctgtcaatcctcaccgggacggcgagaccgggtgcaatgcctccaccttggtagccaacgggagaggtggccggcgacgagcaaccatttcggtgggagaggctcgcggcggtcgtcgagagaggacggtggagaggtgcacggcgggtgcaggctcgacggctga

SEQ ID NO: 87870 - DNA, 2266 bp, Oryza sativa
  unsure (1)..(2266): unsure at all n locations
  Clone ID: PAT_MRT4530_86777C.1
tctcctttcttgggggtccttctggcattcgcgtggcggccgctctaacgatacggctcgcgcccttgaactgtacacccccaccgcaaaagggtatgcccccaccgccttgacccacagcacgccatggcttcccccaccccacgttgtagccatagggggggccagcgccccaggtcgccccgttgcacccgcggagggccccttgtcttcccaccgatttcagttattttcttgctttttcttgcagttcataggcaatcaggctgttatagtcgtatcgtacattcgtactgtacaatgatgttcatctatcgacttgagctacaacaggcaataacttgacccaattcacttgtcatgtatttttggtaagaacaacactgccatgtagtttcacagaatacagcaccttttcttcattgttgattcctatcctaaacgaaaacaaaaaaacagctcattattggttgctcacatcgtcacacggctgtggtgatggccaaatatccttgcaagctaaggtacaagagaacgtggccagacaatttgctcaacaggagcaagagcatagcccccatgactcacttgaaggtattttacctgagaactctagctctacaacttctccctgacataacataagtagtctgcttacacctcgaagatcagcttcctgaacttctccatgtgctcagcctgcaatgagatggctatggataggctaccatccttgttcgcgcttgggaggacaaacgccagcccttcataggcgatgccaccaggacccatgaacactggtcttccccatccaaaatctgcatcatgaattggcaagcgcacccagctggtgagcccgaggttcggacaccggaaagtgtgtgctccacggaccaatgctgataaatcaggctgcagctccaggtagtccaatgctgagcggcagtagctatcgttcatcctatctagcgcctcttggatgactgctgctccatctgccagcccactggtcaccttgcctgcctcagcaagtggagtggcggtgaaaatgacattcccaaagtaaccttctggaagtggaggctgcaaccgttgtcgcccatcagtggcacaatacagcttagtgggctgttcagaaggcaggccacgtgcaagagatacgcatcgccagacatgtgcagcaagaactgcatatgtgctgaaacgtggtgcaccttctcctgatgggagctgcgaacgcagtcgaccaaggtctgagcgggtaagcttgaaaatgtccacagcagttggaggtggtgttgtcttattagcagtaacagactggggtacggaggacagcatggctggggcaggctggtactcaacatgtgggtatgatggagttggtggatctcgggctcgtaggagagtgcggtcaatgaagggcatgatggcaatttgagttcctcggcagaggtcagaccatgagttaataaagtgcaaaccggacatgccatccgccacatggtgttgcataccaactccaagggagacacctccgcacttgaagtaggtcacctggagcacgaggagcgagaaggaggagatgtcgtcggtgtaatcaacggcagggatgaggcgcttgagctccatggtgggcgcgaagtcgccgtagtcatcgacggaggcgtcgggcgcgtcggcctcgacgaagagcaccccttccccgttgcagtcgatctcgaccctcccgtcctcgtcgcgcgcgagccgcccggccatcgggtagaacggcacgagcgcctccgccagcgcgcgccgcatccgctccccgtcgaagaacccctccggcgcgccccctccctcggggccccggcggtagaagtagacgcttggggtgtggaaccgcggcaccacgaggtcgaggttcgagttccacagccgcacccgcggcgtctcccacgccggccgcaccatcgtcgaccgcctcaccgtgatcgccatcttccccagaccaacctagaacgaatcagatctgaggcggatgaagaccaaagcgaggcgcggcacaaagcaacgggttgcggggtaggggggcggagcagctcttggtggggggcagcttccgggctcgttgggggtggaccggcttttatagcgcacggncgncggcggcgtgcgggggcggtagagctgagctccgagctcgcgtaggcgtagctcaccatcatgtgtcatgagctgcgcagctcactctggtttccggacgcgtgggcggacgcgtggg

SEQ ID NO: 87871 - DNA, 4704 bp, Oryza sativa
  unsure (1)..(4704): unsure at all n locations
  Clone ID: PAT_MRT4530_86778C.1
atggcgccgaagaagaagcagcagcagcaggcgccgaagcagaagcagaagcccaagcactcctccacctcctcctcgtcgtcctcggccggcggcggcgccgcctccgccgcgccgcggctccagatctcgtcggagaacgagcgccgcctccgccgcctgctcctcaactccggagcgaccgcggcgccagcgcccgcgccggcggatgctcccgcggcgcgtgccgagtcgagggagcagaaggcgcggcggctgcgcggggtgtacgacaagctctccctcgagggcttctcctccgcgcaaatcgagcaggcgctctccgcgctatcggattcggctacgttcgagtcggcgttggattggctgtgctttaatctgcccggcgatgagctccccctcaagttctccagtggcaccgcttcctcttctggggctgggcctttagggacagaaggctcagttaaggtagtatcaacagcgaaagacaattgggtgccacagagtcgtgagtcagaggaggtgcaggggagcaatgagaggttggaaattataattagcaggcggcgagaagaagatgtgacattggatgacgggcaatcatcacaagctgcatggattcggcagtacatggaacaacaagaggaggaagatgatgtgaattctaatgattcctacacatgggaagatcactgcccaccaagtttggaaactgctgaggcaaagccaagtaggcgaaagaagaagggtaaacaagcgaaatcctcatctggaaactcaaaggaagatctcagcagttcagataatgtctttccaaattctgatattgcaaatgctgagggtgatctagttgactctggtgcaactggaaagaaatgtgagagtcctgtccatatggatggaggatccagtttggagaaaaaaatgtccaaggatgttgatgaaaccagcacaaaggaggtagaagaagaggaagtagaacttgataacctgttttttgaagactcttctgcttgggaggcagtggctccagaaatactaaaacagcaaaaaatagagaaattatcacatgatggttatgggcatcttcttggaaacatagatgatatatggaagaagggagattctggtaaaatgccaaaggctgttctgcaaaaattctgtcagaaacttggttgggaagcgccaaaatacagtaaaatatctgaaaaggatcgtaaattcatatatgctgttaatgtactgcgtggctctactggtcgtggtaaaagtcggaaggctggaggcttgacaaaagtcgagttaactgaacaagataaagaatatgcatctgttgaggaagcacaaaacagagtggcagcttttgctctatatcaatttttcgctgatctttcattgcgccaattgcttattgaaccatatgcatcacttgttttaagatggcaagaaggggagttatcatcatcatcttcaagggttatggatactgaggatagtcgaagagctggttttgtggataagttgttggatatggatgcgaatacaactccacatcaagttgaggatgcgtcagatggtgctacatctgttgactctaggagcatcgaggacagctactctgttcatgagaagaaagagacctatctggtgaatcgtacaggatcgagatccgcagagcaggtggaaagcacagtgttgaaaaaacatttggaaaataaaatgaagcagtcgagctatttgaaaatgctggaagcaagagcttctctaccaatctctagattcaaagatcattttctacagttactgaaagagaatgatgtgattgttgtttgcggagaaaccggatgtgggaagacaactcaggtgccacagtttattttggatgatatgattgaatctgagcttggtggttactgcagcatagtctgcacacaaccccggaggatagcggccatttcagtggctgaaagagtgtctagtgagaggtgtgaatcttctcctggatctaaggattctttggtcggatatcaagttcgtcttgacagtgctcggaatgaaaggacaaagcttctgttctgtaccaccggtatccttcttagaaaattatctgggaacaatgatttaagtgatgttactcatgtagtagtagacgaagtacatgaacgtactattttgggtgactttctgttgattgttcttaagagtcttgttgagaagcgttctaatcaaccaggaaggaagttgaaagtgattctcatgtctgctactgttgattcaagcctatttgctcggtattttggngcatgccctgtaattaatgttgaagggagaacacatccagtttcatctcacttccttgaggatgtttatgagaaaatggagtactgtcttgctttggattctcctgcatcaggagcatactttcaacagcatggagaaaagtggaagaatgctagtagcacagtgaataatcgacggggaaagaagaaccttgttttatcctcatggggggatgagtcagtgcttactgaagattatgttaatcctcattatacaactgattgctatcagtcatacagcgaaaggaccaaccaaaatctgaaacgcttaaatgaagatgtgattgattttgatctgttggaagacttgatatgctatattgatgagaactgcccccctggcgctgttcttgtttttcttcctggagtcgcagagattgatatgttgattgatagattatctgcttctgttagatttggaagggaatcatctgattggattcttcctttgcattcactgcttgcacccactgatcaaaggaaggtgttccagtcaccaccagaaaacattcgcaagaaaatgtcaagcatagtagaagattggatttctcgtgcaaatgcaaaacagagacgaggacgggctggtcgtgtgaagcctgggttgtgtttctgcttgtatactcgccatcgttttgaaaaaatgatgcgcccatttcaggtgcctgagatgctgcggatgccattgactgagctgtgtttgcaaataaaatcacttcatctgggtggcataaagtcatttcttttaaaggccatagaaccccctaaagaagaagctatctcctctgctattgacttgttatatcaggttggagcatttgaaggacatgaggaattatcacctcttggctatcatttggccaaattgccagttgatgttttgattggaaagatgatgctctatggtgctatctttggctgcttatctcccattctttctgttgctgcttttctgagttataaatccccattcatctctccaaaagatgagaagcaaaatgtggagaaggcaaaggcttcattgatgaatgaaaaccttgatggatctgcttctacagcagataataaacaatctgaccacctgttaatggttattgcatacaataagtggtctcgcatactaagagagaatggagctagatctgcccatcagttttgccgttcattctacttgaacagtacagtgatgtatatggtcaggaggacagcgccccgtccacccaccccccacccccctggcgccagccataccggcgcgctcccctcggggggtgggcaacacttaactgcgcgggccccagtcgctattactgggtgcgagtggcttggtgcacaaccggcgagcggatccatcacggtgggggtatcagcgttagtgctgacgcccatccaagccatccgcttagcgcgaccttttcacagggttcttgctgatgctccagcggttgccgttccgacagatgtagaaggcaccatgaacctcgggctctgcggtgggaggatgagaaacgggcccactgtactggggaaacggtctgaggggtcgcagctgttttacacgcataagggctcgctaaccaggccacctggattttgctacagtttgtctctctttctcccttacctcctcaaatccactcactttggagccgtttttcatgagattttttgggctaatcgaagagcaagagacatgcgactacagtatgggacattattagcagacattggacttttggatattcctaaagatagcctgaggcctgtggatggaacgaggaaaaatactcttgagagttggtttgcgaatatgtctcttccatttaacttatatgctcgttactcctcagttgtcaagtcagtcatatgcgcaggtctataccctaatgttgcagctactttagagggtgttgatccaggagctctaggtggcaggaagccatctgattttctgtctggaaaggaccgtcctcgatggtatgatggacgacgagaagttcacatacacccatcatctatgaaccacagcttgaaagctggtcaatatccatttttggtgtttcttgagaaggttgagacaagtaaggtatttctacgtgatactagtgttatttctccttactcgctccttctgtttggtggtaccatggttatccaacatcagacaggagtggttatcatagatggatggttaaggctggcagctgctgcacagactgctgtcctattcaagcaacttcgcgtaacacttgatgctgttctgaaagaattgataagaaagccagagatggcaacttttgttgacaatgaagtggtcagatccattattcatttactgttagaagaagaaaaggcccaacaagcatga

SEQ ID NO: 87872 - DNA, 291 bp, Oryza sativa
  unsure (1)..(291): unsure at all n locations
  Clone ID: PAT_MRT4530_86779C.1
ctgacccactgtgtgcgacacatgtctgtgtgacccctcatagatatagtggtatatatggggataccactgaacccatacgccgggtgccttctggattnatgactgatgcacagatgtgtgtgcctgtaatggtgtgttggtctgaggagaagaaatatgtgtctttgtgttgtgtggtatagtgatgaaacccggtntgtgtaaaaagaccactgtgtctcgcacttgattgccatgaccctggtgcacttggtacaccccataccccaaaaaaaaaaaaaaaaaaaa

SEQ ID NO: 87873 - DNA, 5790 bp, Oryza sativa
  Clone ID: PAT_MRT4530_8677C.1
atggatgatggcgaggggccaagtgcagaagtgaatgagattgaagtggatcaggtcaacgcaccagaggaagatggagtagctccagtagtagctccagtaggcatgcaacctggtggagtggctgacgagggggagactgtgggtgccattgtggacgaaatggaaaaagaggatagtgacaacgagcgtgtcgaggaagatgattcgtcagatgatgacgagaacaatattaatccagctgaatgggctagtgatgatttttctggtttggtcatctctgaaggggaaaatgtgagatgggagtacaaggaaaacgagattatcgagggagcgaggtatggtaatggagaagacatgaaggaggcggtgaagcattatgcagtgtcacttcatagggagttttgggttgccaagtctaaccggacacaatatgaagttaggaacattacatgtgcatttgttgcatctgagatgtatgcgcatgtcgtggacaatctggcatatgaaccgaagtcaataatccgacatatcgaacagactttcaagtatacaattagctatgccaaggcgtggagggccaaacagaaaataatagagatgagatttggaacttatgaagcctcatatgacaatttgccacgtctgctatctgttatccaacaaagaaaccctgggacctcttgtgcactcaagacattcccctcaattgaacatcctggcaagactgtgctgcaaagagcgttcttagctctacatgcatgcaagatggcattcgtgcactgtcgtccagttctttgtattgatggcacatttttgaccgggaagtatcggggccagatactaacggcaattggggtagatgggaacaatcaggtattgccgttggcatttgcttttgtcgagagcgagaacaccgacagctggtactggttcctccatctggttaagacagaagttgttggtatgaggcccaatgtgtgtctaatacatgacaggcacgccggtatgcttcgagcgatagaagagttaaagtttgggactatggaaagaggataccctggccagtgggaagatgtacaaagcaggtggtgcatgcgtcatatgggagctaatttcttcaagcaatttaagaacaaggagttgatgaacatgttcaagaggctatgcaatcagaaccaggagaaaaaattcaatgagctttggaagagattagatgagttgacaggcaaatgtagtgaccagcgtgcaacaagaccagcggccgctgtacctgaccctcctcaagcactcggagctctcccaacagacagtgtaacattggttagaagaactggggagcaaattcgaaaattttctcagtggattgagaatgagccaaaagagaaatgggctaagacttatgacacaggtggtgctagatatggtataatgacaacaaatttggcggaagtttacaactgggtgatgcgcggtgtccgtggactcccactagttggtatagtggagttcattttacatgggacatgcaagtatttcagggagcggttccaagcagtttttccctctatgccgaacaacaacattttatttggaactttcatggagaaaaaactagcggagtggcgtgcaaaggccatgaaacatcgagctctagtgcaaggtacccaacaacacaggtttgaggtactctgccaagacaaggcaggcaggggtatctaccgcaagagagtaaagcaggagtgcgttctcaaagacgacggcacatgtcactgctcctgtagaaagccgacgctgctccacaggccatgcacccatgtcatttccgcggcatctgagtgtggcatccaagatgcagtatatgtgtcacaatacttctccaagcaagcaatatatcacacatggagtggcgagatttttggcttcggtgtagctggggagttcacaaagattaacgatctgataatctatattcctgacccaacgaaactccgagacaaggcgggacggaggaagactcggcgcatccgcaacgatatggatgagtcggaggcaggcagggtgaagcggtgcagcaaatgcgatgaacgtggccacacctacaagtattgtcctaaagacaaggaaaaaccaagtgcggcggaggcagagatggcacatcctgagttgttggatccggcgatagatcagcgccaccggtcgtaccttactgcggtggagggggctcagcttgggacgttccgtccacggtcgtcacgtgagcgacttttggttcacgactccttcgtcgagaggttgcgtgaggccggtctcttaccgttggctcggctagttgaggccgcgaccggcgacgacgacgtgacgagacgttgggacccggacaggtccctcctagcagcgttggtcgaccggtggaggccggagacgcacacttttcacctgccgtgcggtgaggtagcccctaccctgcaggatgtctcttacttgttggggctaccgctcgcgggagacgctgtcgggccagttgacatgggtgtcgactggaaggacgagctgacggcacgtttcgcacccgtgcagcgcctaccaggtctaccgctcgagccgttgcagcagcaccgcaacaccgggcctacgaagaggtggctgcttcagttcactgttgaccagctaccggaggaggccgacgagtactccttcagccgttgtttggaggcgtacttgttgtggctttttgggtgggtgatgttctgtggtagtcacggacactcggtcgaccggggtctcgtgcactacgccaggagcatcgccgacgccgcggtcggtgaggtgcctcagtggagttggggctccgcgttgctggcggctcagtaccgtggcctctgcgaggcttgtaccaggacggaccctggcgcgatcttcggtgggtgccctctcttcatttctctttgggcggctgagaggattgcgatcggccgcccccttgtggagcaccacccttacgacgcgtcgctgtacgagaacagaccggcggtcgactacccaacgatgggtactctgtggtgccggcgtcagcgccgatgggctcacgtgcaggttaggcggtcgtacgcggagtttgtgatggagttcgaccgccttctgccgacggacgtagtgtgggagccctacagtgccttgcttacccacagtcgggcgccgctaggcctgtccacactctgcacgagggaccaggcgtactggatgactacggttccgatggtgttcgacatctgtgtcgagccgcacgcaccttaccgcgtgatgcggcagttcggcttccgtcagtcctttccagtcccgtttccggcgggcgtcacggctgccgttcaccggtactcgcgcaagggtcagcactcagctggtcactggcctgccaagttggggccttttctcgacgactggttgcttgctaccgaggaggtcgtggaccacgcgggagagccacacacggaggaggggtatgaggcgtacctacgttggtatcagccacacacccgtactagagtcacctacgctccgacggagcaacaggcccacgccgcgagcgccagagacctctacgccaggcaccgcgaccaggacttcgctcgtgcggccgttgagtgcaacagggtcgtcgttgatgctacaacggcgatccaacggttaggcgcggggattgaggtgggggcagacgagcacctgtcgacgtacacgcggatacgggactcgatgcgctcggttctccgtgcgctgacctgtcgtgctgccgacgttgctcaggcagacgcagcaccacaggtgcgtccccgaccgactgctcctcgtccagctgcgcacgttcctacgccgacaccccctcccttcggaggcttcgctcagcctgggacgacgccgggcgcccactcctggcaggctgcggggtcatcgtcacaggcaggtgtgtcggcctcgctgtctgcgcagttctggcaggacgccgggacttcgtcacagccgcccggcacgtcttggcagggtcctaccgggacttcgtccgagcacgggtgggcttccgccacgcacttcgacattagtgacttcgacttcccggacattatcggtccctcacagcttggaggcgcaccgccggtgcacacgcaggagcagtcgccctccaccccactcccagaccctcgcgctacccgtgctgtcccaccggatcgcttcacagaggaagctgccgcccttgcagagggcggcaagccctcggctccccgcggcccgtgcgcgccgtcaagacgcacacggcgccgtgtgccacgtcggcttgccgcccttgcgaagggcggcaggccgaagcaaatccatgagatcaaggacttccttctcacagcgaggaggaaggatgcccgctccgtgaggatcaagaggagcaaggatgccgtcaagttcaaggtgcgctgctccaggtacctctacacgctgtgtgtacatgacactgacaaggccaacaagctgaagcagtctctccccccaggcttgaccgttcaggagactgatcttaagctacagtattctgacatggaggatgccaagacacgtggaactggtgacgtggcattctcccagtggctacgagagagctgtgggcctggaaagtcatggtccaccgtggacttctccaagtccacgtcttcgtgcgacgtcgccctccatctggccgcgtcgcactgggaaagcagcagtgaagcgtacagccgagctaccaccactctccggcgccggcgagcggcggacacggcgacggcgatgggtcgcctccgccgcggcggggtcggtctcctgcgtggtgccgtggtgctcgcgtcccttctcctcgtcgtctccggcgaagtcatcttcgaggagcgattcgatgatgattggggaagcagatgggtgaaatctgactggaaaaagagcgaagggaaagccgggacattcaaacatacagcagggagctattctggagatcctgacgatagaggtatacaaacaacctcggatgctaagcattttgctatatcggccaagttcccagaattcagtaacaagaaccggacattggtggttcagtattcgataaagattgagcaggatattgaatgtggtggtgcttatatcaagcttatgtctggctatgtgaatcagaagaaatttggcggtgacactccttataggccagatgcctcttatagtctacttgttgataaccgggagagagaatttggtagtatgtacactgactgggacatcctccctcctcgcaagatcaaagaatctaatgcgaagaagccaaaagattgggatgacagggaatatattgaagatcctgatgaagttaaaccagagggctatgactctattcctaaagagattcctgatccaaaggacaaaaagcctgagtcatgggatgatgatgatgatggtgtatggaagcctagaatgataccgaatccagaatacaagggacgttggaaacgcaagaaaattaagaaccctaactacaagggaaaatggaagatcccatggattgataatccaggtggtatgcaggtgaaagctggttcagtttttgacaacattttgatttgtgacgacccggagtatgcaagaagtgttgttgatgaagttagggctgcaaataaagaggctgaaaaggaggccttcgaggaggctgaaaagcggaggaaggctagagaagacgagggtcatcatcgtaggtatgactaccatgacgagctatga

SEQ ID NO: 87874 - DNA, 134 bp, Oryza sativa
  Clone ID: PAT_MRT4530_86780C.1
gcactgagggctgaggtcgacagcgacggcaaagtggggaagaaggcgacagagtgcgcctcgcctctctctctctcctctctcctcgtgctgcgctccccaggcgaggctcggcgagctagccagccacctcc

SEQ ID NO: 87875 - DNA, 288 bp, Oryza sativa
  unsure (1)..(288): unsure at all n locations
  Clone ID: PAT_MRT4530_86781C.1
gctanttatatcggatatgttagatcaagtttaggctcccttntatcacatcttacagtttcccaatcccaatacattgcaacttacgcctgtacccgtgtatccagctatccatattgtaccaaaccagcgttgataacaaaactaaaaccgtctccgcttgctcctgcccaccggccatagcggcccggcctgtcaacctctctcgtctcgcaacaagcaatccttcctctttcctgaaaggactgctgcgagctcaaactctgaccagcttctttcctaggatca

SEQ ID NO: 87876 - DNA, 174 bp, Oryza sativa
  Clone ID: PAT_MRT4530_86782C.1
atggcgcatagcaaggcgaagtggcgcgtgagtcgaatgctggttggcgttgcacggtttcccgtgctcagcgtcctcgtcatcgtcatcgcccatgccaccgcccatgtcgtcgcaagagacgacatcgaggtcgttgcttccggacaagctcatcttgttctccacctctga

SEQ ID NO: 87877 - DNA, 414 bp, Oryza sativa
  Clone ID: PAT_MRT4530_86783C.1
atgcccaccaacagtggcataataggccagccgtataggcagagacaacagtcggcggcggcaaaggcaagccggtcggtgaagacgtggacgccgatgaacggtggtgcggagacaccagtcgacggcggtgaaatccagccggttggtgaagacgtggacgcccatgaacggtggcggagacaccagtcggcggcggtgaaatccagccggtcggtgaagacatggacgcccatgaacagtggtgtgaccaaccaaccatgcggaaacaccaatcggcagcggatgaggcggcggcgcacaaaggcgaaagccccgagcccacggcggaagcggcgtagtctggctgtgttggccgggcgaagaccgaagcccccgacgtgcggcatcgcatccaggtcgtgcgtgccctag

SEQ ID NO: 87878 - DNA, 510 bp, Oryza sativa
  Clone ID: PAT_MRT4530_86784C.1
atgcgatgccgcacgtcgggggcttcggtcttcgcccggccaacacagccagactacgccgcttccgccgtgggctcggggctttcgcctttgtgcgccgccgcctcatccgctgccgattggtgtttccgcctgcacagttggcctattatgccgtcgtttatgggcgtccacgtcttcactgaccggctggcattcgtcaccgctgactggtgttctcgcctacatggttggttggtcacaccactgttcatgggcgtccatgtcttcaccgaccggctggatttcaccgccgccgactggtgtctccgcctacacggctggcctattatgccgtcattgttgggcgtctacgacttcaccgtcggcctgccttcgtcgccgccgactggtgtcctcgcctatacggttggttggtcacaccaccgttcatgggcgtccacgtcttcaccaaccggctggatttcaccgccgtcgactggtgtctccgcctacatggctggcctatga

SEQ ID NO: 87879 - DNA, 780 bp, Oryza sativa
  Clone ID: PAT_MRT4530_86785C.1
atgggcagcggccggtggagaggagttgggcgtgggcgacgacggggaggatggggcaggcccagggccagggaagcaggtgagctctccggtttccccgtccccctcgtcggccccgcctccttcctcttcacgtggtgccagtccgaacataccatcttcgcgcgcgtgctcgccgtcggcctcctcgcctacggtcgcgggtgcggaggaggtccggggctgatgacgggcgacgcgggagcaagcgagccgtcggtgtcggcagtatgggcgcggtggatggatgaggacggggaggactgccatcggtggcgtcggagctacgacagctgtgggggatggcggcgcaaatcatggcactcaactgcgtcgtctacctgcggccgcaagaaagagaggaagaaaagagaaaagcaagaaaggattatgaccggtgggcggcggccggaccggactgaggtggctagcgtcgacgacgacgaggcgtgcgagctagtgagcagcacggacctcgtcatcggtggcgagggcgtccgctcgtacctcctccgcctcccctgctggccacagctgcgcgccaccatcttcgaccgcacgagggggacgcggaggccggcgagctcgcgccgccaccggccacaccaccctcaggccgcgggccgcgcgcgccgccgcctgtgcgagagcagaggcgagaggaaggaaggaaggaaggaaggagagaaacagagaaagaggagaggggaaaagagagtagttgctgacgtggcatcctga

SEQ ID NO: 87880 - DNA, 717 bp, Oryza sativa
  Clone ID: PAT_MRT4530_86786C.1
cgggagcttgcttagcggcggcgggagcgtgccgaggaagcaggcgacggcggcggagtgggtgagcatggtgagcgacttccagaaggggtcgctctcgacgcggctcggcatcccgatgatctacggcatcgacgccgtgcacggacacaacaacgtctacggcgccaccatcttcccccacaacgtcgcgctcggcgccacaagggatccgaacctggtgaagaggatcggcgccgcgacggcgctggaggtgagggcgaccggcatccagtacgcgttcgcgccgtgcatcgcggtgtgcagggatccgaggtgggggaggtgctacgagagctacagcgaggaccaccgcatcgtgcaagccatgacggagctcatccccggcctgcagggcgacgtcccggccaacttcaccagcggcatgccctacgtcgccggaaagaacaacgtggcggcgtgcgccaagcacttcgtgggcgacggcggcacgcagaatggtgtcaacgaggacaacaccatcatcgaccgccgagggctgatgaccatccacatgccggcgtacctcaacgcgctccagaagggcgtctccaccgtcatgatctcctactcgagctggaacggcatcaagatgcacgcccaccacgacctcgtcacccgctacctcaggacaggctcaatttcaaggccttcacaatctcggattgggagggaatt

SEQ ID NO: 87881 - DNA, 2301 bp, Oryza sativa
  Clone ID: PAT_MRT4530_86787C.1
ggggtaaatggaatttctcataatcaaattgatcctcattatgctcgccaatgaggatcgagcatacaccaaaacagagaaaaatagtatcaagggaaacaatggcagggagtacgaattcccatttagtgaaattttcatctttcctatatctccttatcactgcagctaagctagctagtaggtcctaggctgggtggtgaggccgaatccgagcgggaacagcgggtcgtagtgcgcgtcgccgtagttcatcggcagctggtccaccgacttgaaccacgtccgcggcagcttgccggtgaacccgtagtcgccgaacagcacgtcggtgacgccctgcccctcggtccccggcagccacgcggcgacgagcgcgtccatggcgcccaagaacggctgcaccaccaccggccggccgctgatgagcaccgtggcgcactgcgcggcgccgcataccgtcgccaccgtgctcggcccggggtccgggatggtcaggttcaagctgtcacccttggtctccgtgtacgggtgctcgccgaccaccacgatggcgtaggagaagccgccgttcttgacgaagtcggcgtcggggttctcggcgaacaccaccgtcgtcgacgggtccaccgccgccttcacggcgtcgaggatggtcatgccgacggtgatgcggccggtgtcgccctgccactcgatcgtccagccgccgcactggtagcccaggttgtcggcgtggctgccggcgacgaggatcttgggcgccttcttggacagcggcagcatcggcttgtcacttgtcttgccgttcttcaggagcaccagcgacttcctcactgcctccctcgccaaatctctgtgttccttcttccccagctgatcagccatgctcgaatcgggcatggggttctcgaagagtcccatggtgaacttgacgcgcagaatcctagtcactgcgtcgtcgattctgctcatcggaatgatgccgttgttgacatggctggtcaggatgctgatgaacgactggtagttgttcggcaccatgatcatgtcaatgccggcaagaactccagcctggacagagtaggagtagtttgaacctgctggtgttgtgatcctgtcaattccctcccaatccgagattgtgaagcccttgaaattgagcctgtccttgaggtagcgggtgacgaggtcgtggttggcgtgcatcttgatgccgttccagctcgagtaggagatcatgacggtggagacgcccttctggagcgcgttgaggtacgccggcatgtggatggtcatcagccctcggcggtcgatgatggtgttgtcctcgttgacaccattctgcgtgccgccgtcgcccacgaagtgcttggcgcacgccgccacgttgttctttccggcgacgtagggcatgccgctggtgaagttggccgggacgtcgccctgcaggccggggatgagctccgtcatggcttgcacgatgcggtggtcctcgctgtagctctcgtagcacctcccccacctcggatccctgcacaccgcgatgcacggcgcgaacgcgtactggatgccggtcgccctcacctccagcgccgtcgcggcgccgatcctcttcaccaggttcggatccctgctcaaaaacatcaaacaaaaccggatctctcggttagtgaaaaatggaagcagctttgcaaatcttggggagaggagagctgcttgccttgtggcgccgagcgcgacgttgtgggggaagatggtggcgccgtagacgttgttgtgtccgtgcacggcgtcgatgccgtagatcatcgggatgccgagccgcgtcgagagcgaccccttctggaagtcgctcaccatgctcacccactccgccgccgtcgcctgcttcctcggcacgctcccgccgccgctaagcaagctcccgatgaagtagtccttgaggacctgcggcgacgcgacctgccgctcgatctgcgtcatctggccgatcttctccgcgagcgtcatccgcgccaggaggtcggtgacgcgcgcctccaccggcttggtggcgtccttgtacagcacgtattgggcctcgccgtacgccgcccaggtgagcagcagcacggcggcgaccaccggcgccgcgagcaccgccatcctctgccggcgaaggagcgggagcagccgcctccggacctgcgcgtgccattccaggagcacgatgagaaaccccgtgaagcaaccctccagcgactcgagaacgccggagcagtgtctccggccgccgccgccgccgccgttgccggccat

SEQ ID NO: 87882 - DNA, 334 bp, Oryza sativa
  unsure (1)..(334): unsure at all n locations
  Clone ID: PAT_MRT4530_86788C.1
tttnttgcaggattcgncccttctcnngccgaattcggcacganccnncagggangacctgacgnttgatncaattcccntagcaacaagaaacttccaaattactccngcaaagantggnttctgatccaaccaggaagcacctggtncaatncgtgtgacagaaccngatnggatttcctttttgtcattactggttaatgcngttggccagtacggttgtgtncttgatctcngacncaattttcgatgatcaattnggnaagctnctcttcnagtgcangacanatacnaaacattccantggtacncgtgttttnctggcacactccca

SEQ ID NO: 87883 - DNA, 1098 bp, Oryza sativa
  unsure (1)..(1098): unsure at all n locations
  Clone ID: PAT_MRT4530_86789C.1
gtagaaaacacctgacgaacgactctgaatctgaagccatgtgtatagctgcatgggtttggcaagctcacccacagcaccagctcctcctgctgctcaaccgggatgagttccatagcaggccaaccaaggcagtaggatggtggggggagggctcgaagaagattcttggtggtagagatgttcttggtggagggacatggatgggttgcacaaaggatggcaggctcgccttcctcaccaatgtgctcgagccggacgccatgccgggggcgcgcacaaggggagatctccccctcaggttcctgcagagcaacaagagcccacttgaagttgcaactgaggtggcaaaagaagctgacgagtacaacggcttcaaccttgtactggctgatctgaccacaaacgtcatggtttatgtgtcaaatcggccaaaggggcagcctgcaacgatccaacttgtctcaccagggctccatgtgttgtccaatgcaaggctagacagcccttggcagaaggcgattcgcctcggtaagaacttcagggagcatcttaggaagcatggtgatgatgaggttgaagccaaggacatagttgagaggctaatgactgacaccacaaaggctgacaaagataggctgccaaacactggctgtgatccaaactgggagcacggcctgagctccattttcattgaggtgcagactgaccagggactctacgggacacggagcacggcccgttctatcagtgaactacgacggtgaagctagcttgtacgagaaatacctggagagtggtatatggaaggatcacacggtgcattaccagatagagtaggcggtaatatactaatatgggagcctccaataagaaaaggatgacgaaattaatagctacaattgtgcatgtagttatcttcttcacccggtatattgaagatgaagaaatgtaccatgattctctaattacgccgattaaattatatatactgtatgcagattgcttattcatcacatggaagatgataaagttgtcactgatgtgttgaatatatacnttttatcctatacatatttacagaaaaaaaaaaaaaaa

SEQ ID NO: 87884 - DNA, 1581 bp, Oryza sativa
  Clone ID: PAT_MRT4530_8678C.1
atggcaggacagaggaggagtgggccgaacgtgggctatacggcccatggggatgcatttctccttcgtgttctcctgctggaacgtcgcttcttctccttcgtctacgaacaaaagctcagggagggaagaacgggacgcttctcacgccgagctgcgccagggagggggaggagggacgcttctcacgccgagctgcgcctcgtttcaagcatgctatctcagggttacgacataatgaaggatgacataggcacttcctatggtgatttaccagatcacaagtattttatctctgtcagagaattcacgacatcagcgatggaatatatagacagcactcggtgtagtttgttgggagaatacaagaaactcaatgtttggattgttaaggagaggattaagtgttgtgtcagatcaatggctgtggagttattcaatcaacatgaagaggggaattacagtatggaccaaataccagaggactggagatctttaatgtctctaatgctgcacaatccacatgagcatggttatcttatctgcaattatgcaccactgataccaatcgaaaacaggatacttttctatttcaaagcttatgagcatatgaggtttgtcttagcctacaccaatgatgctgcttatcgtgatatacttaagaagcttccataccaaaacagatggtttcaaatcaccgaagggaattatttactggaagcttcgctgaagcacaaaaactatggtgttgatgacaatccggaaaaggctcatgacccagaaacattttttaaatactatcgacattcaaattgccaccggttagacagatgcttcatgatagaggaagttggtggttattccgctgaacagtttgaattgatcttcattgtgaagtatccactattcttaccgttgttgcaacaggaattgcaaagatacaaccagctgaggtgcctaaaaccccacacgttattcttctatggaaatattcaagatgctgaacaaagctgtgcaatgatttatcatgatcaattggataatccacaagcaacagttggagaacttatgtgcacccttgaagagctgtaccagggaactgatttgacagtagcacttcataggaggatcacaagacacactgatgaacctgtggagaatgaagaaataattttacaagttaaagtgctgcctggatcaaggaaaggaacaaaaataacacttccttatgaagggtcccatttttacggccagccgccccatgatttaattttgacccttgacatcgcacctcatgagacctacatcctctatggaaatgacctggtagttcattgggttcttcgtcttgtggatgcacttgcaaagtgtaccataaatcttaagacacttgatgggcgctacttgaagatcaaagttgatgaggtcgtgtacccagggtatgagctggtaataaaggatgaaggatggccaatcggcgagggattgaaaggaaacttgaggataatatttgatgtctcttttcctaaaacactatcaggacgacaacagcattcaatcagacaggttctagatcagtga

SEQ ID NO: 87885 - DNA, 508 bp, Oryza sativa
  Clone ID: PAT_MRT4530_86790C.1
atgaatcggtaatggatgtacaccgtggaccgatggtcgaaggagtttattgatggcatgcattatttttttagtgtggccaatgcccataagcctaagggttttatatattgcccatgtaaaaaatgcaaaaactagaaggagcactctacatcgagaccgcttcgtgtccacttgttggagtcaagattcatgcctagttataattattggacctcgcacggagagttaggggttgcaatgaaagaagatgaagaagaagacaacaatattccagactgggctcaatacgatggatttgcagaaaatccaacaggcgaggtggatggagctgttgcagaaaatgatggtgcagatgatctcgatcatatgttgtgtgatgtaaagaaatactgaaagtgaaaaggacgtctagaaattggagcgtatcttagcagaccacaaaacatccttgtacccaagttacgaacatgggcataaaaggttgggaaccacactgaaatatctt

SEQ ID NO: 87886 - DNA, 333 bp, Oryza sativa
  Clone ID: PAT_MRT4530_86791C.1
atggtactcaccacgacgacaaacgatgaacgacgacggccggcgacgaggaggatggcggcggcggctcgggttagcggcgacggcggagctccggtggccggcggtgaaggaggaggggcggccgaggttcctcacctccgtgcgcacctaacggcggcgacagcaagcggcggagacggcggaggcgacggcgcgacgcggccgaagacggccggcggcggcggcgggcttggcacacgcggcggcggctctacgatgcacgggagagctcgggagagggagcaaacgaaagaggacgacgagaggaagctttataaagcatcggattga

SEQ ID NO: 87887 - DNA, 375 bp, Oryza sativa
  Clone ID: PAT_MRT4530_86792C.1
taatagaagattgagattaaaaatcacattcccatattaatatcaccatcaaattcaatgtccacctatcggctggggcacggcggtagcgaaattaagggtacgttacgcgcacgggcttcccagccaacgtatggtatgttgcttcgtctctctcccgtgaccgattccactacctcctccactaccactactcgaaaaaccatgcttacaaaccatcaacggcaccggcgaggccagccagactggcctcctcccccacctccctctcaacctctcccccactccattagattcgtggccgtcaatccccgcctcctaaccccacgaccttcattgccccccaccaccaaccccgctttgtctccatctcca

SEQ ID NO: 87888 - DNA, 349 bp, Oryza sativa
  Clone ID: PAT_MRT4530_86793C.1
cccacgcgtccgattctatattcgtctaacgaagtcgcagaggaaggataccatgtagatgctgcgcatattccaattgctatatctgatcatggtgatctccctgatggagttggaccatgccaacacatggctatcatggatgcttgtgcataagctgtcagtataatacggcaggatggctctatttattcgcgtagtggtgacctcgacttggcctagcagtattatgcacaccatgctgctgcaatgggtggaagacaggaatcatggatcggtcgctggaatgctgatcagctacggcaacgatatctaacgttcaaacacctgctgacagcacatgttacta

SEQ ID NO: 87889 - DNA, 279 bp, Oryza sativa
  Clone ID: PAT_MRT4530_86794C.1
atgtcggggagcccccatgagccgatggaggttgacgaacacgagaaactcgatgcccttggcgacaaggaggtcgaaccatcgcgcggccacgccacgttgcgcgtcgtcatcaatgaagctgcaagagaggctgacgaaggcgaagggacccgggtgcgcctccaggactgggagacggtgttgttgacgacgcacgaggcggcgcacgcgtgcgcgggcgaggcccgacacctccctgccggaggaggtgggtgtcgacaaggacgagagggctga

SEQ ID NO: 87890 - DNA, 411 bp, Oryza sativa
  Clone ID: PAT_MRT4530_86795C.1
aggacgcacgccaccccgcttagggttaggtcttctacgactccggattgttcctccgacgacgaaatggtaatctacagcttccatgaggactaaataggagaatgccattctctcaaccttcgggaacattaatgctcacagctaaggagtatacaatctaagggcttactcaagttcactttgctagcaacgatggaaaggttagcattaatggcgcaattctgccagggcaagtactaattataccacagccttatgtggtacttaagaaagcattactaactggatttaaatttatagcgcttaatacaaacctaaatgccatgggccaccacatagcatttaagaactcacaactccgtacagtgcctgtggatgggataggtaaggcatatcgcatcccagggc

SEQ ID NO: 87891 - DNA, 345 bp, Oryza sativa
  Clone ID: PAT_MRT4530_86796C.1
atggcagttgtggacggcaacaacgatgcccgaggtcttccccccgtcggctcagctcttcatggagtcataggactcatagccaccagtgatgtggatggagggatgctaggtgctcccgggaggaagaagaaaccaaaaggtaaaatggtccatgatggcatatcagtgatggctcgtttaagtgatgcttccctgacctccgtctctctcaccgacgaggtcaccggcgcctcgccctcttgcgtgtgggccgcgccgcatacctatggcccgcctgccgccacctcctttaagcataagaggagcgagagccgagagagtgggagaggtggaaagggataa

SEQ ID NO: 87892 - DNA, 345 bp, Oryza sativa
  Clone ID: PAT_MRT4530_86797C.1
atggcgcatgcgctattcccagagttctctctcctcatgccatcccgcaaccaccgctcccatccgttctcccatcccatccgaatcgagatcgaggcagagggtgaagtaatgaaggtagatcaaggagagaggatgaggcaaaccttcgtcggccgctcccgccgtcgaccaccttcggccgcgccgcccttccactcccgccgccactttgcttggccgtcggtgagctgctcgcgccgccccttcgcccgcgccacccctccgctctggccggcggtgagccgctcgcgccgcccctccgctcccaccggcggcgagctgctcgtgcccctccgctcctcc

SEQ ID NO: 87893 - DNA, 948 bp, Oryza sativa
  Clone ID: PAT_MRT4530_86798C.1
atggcccatccaaactccatcacgctcacccttccggcggtacgtcagctagggaaaagctacactacaagcccagccattgaccgcactggcttgtgtccggcaaaggccgggctaggatttcaaaagctgctcaccacctacgagtccatggctgacgcaccaatgctccaccaccacccaacctctaccgacatgtgggacccctccactggcgctcccgccggccagccgtcgtgcgccgtagaccgcgccacacccaccagcagctcctcctcataccgtggtcgcctcctccaccaccaacagtgcctcatcgtgccacatcggtctcctccaccgccggatgcgcctcatcgtgccaagccgacctcctgccaccggccgcgcctcaggcgccaaactggcctccaccgctaccggccgcacctcctcacgttgtgcctttctgcgccgagccggccttcgacccctcctccaattgctgcgcgccagccagatgcagccccacagccgccgcagccccagtcctccgcctcctgggctccgccaccgccgttgtcgctccaccaccaaccgcgccgtcatcgccaccccatcgccgtgaagaaggccgccgcgagcatgccgttctccaccttcgtagcttctacggatccgacagcctccgacgcccgccaccgacgtccactcaccggcccgctcgcaccggcgacccgcctcgagccgccggcctgccacagcctgccgccgggcacagcagcactgcctttgtgcctgctacgaccacccgtgcctccgctgcctactgccgccaactccgcaccaccgaggccgccaactccatccacaacctccactcagctgacgctgccaactccacgccgccgaccccgccaactcgacgacccggctctccgctgcccggagcaacagatccgaccatag

SEQ ID NO: 87894 - DNA, 1967 bp, Oryza sativa
  Clone ID: PAT_MRT4530_86799C.1
ctctccgcgcacctgatgcaccccactacccggaaccacctccaccactctcgccgcacgtggttctcctcaaaatcggcgggattcgattttcgaatccagccgtcgtctctctcatcatgatcttttttcagtagttcaagacgcccggtcgctgtgccccgggggtggcgcggctggcgaaacaagccgcgccacctccacccctctcctcccctcccccgtctcgccgctgccggcaaagccaggtggctgcaaggacagcggcggcgggctctctctccctcgcttgcggtcaaggcagtcggggtgccagcaagatggagctcagggcaaggcgccaacaccgaggaagatccgatggcagcttccagatccggcgctggaatgcacggatccggtccccctatggtcggatctgttgctccgggcagcggagagccgggtcgtcgagttggcggggtcggcggcgtggagttggcagcgtcagctgagtggaggttgtggatggagttggcggcctcggtggtgcggagttggcggcagtaggcagcggaggcacgggtggtcgtagcaggcacaaaggcagtgctgctgtgcccggcggcaggctgtggcaggccggcggctcgaggcgggtcgccggtgcgagcgggccggtgagtggacgtcggtggcgggcgtcggaggctgtcggatccgtagaagctacgaaggtggagaacggcatgctcgcggcggccttcttcacggcgatggggtggcgatgacggcgcggttggtggtggagcgacaacggcggtggcggagcccaggaggcggaggactggggctgcggcggctgtggctgtggttgctgtggcgaccgtggctgcggctgtggcgggaggaggcacggcggtctcggatggctagccaggggcgtggcagacggctgcatctggctggcgcgcagcaattggaggaggggtcgaaggccggctcggcgcagaaaggcacaacgtgaggaggtgcggccggtagcggtggaggccagtttggcgcctgaggcgcggccggtggcaggaggtcggcttggcacgatgaggcgcatccggcggtggaggagaccgatgtggcacgatgaggcactgttggtggtggaggaggcgaccacggtatgaggaggagctgctggtgggtgtggcgcggtctacggcgcacgacggctggccggcgggagcgccagtggaggggtcccacatgtcggtagaggttgggtggtggtggagcattggtgcgtcagccatggatctcaccgctcaagggtggttgccgggcgaaagcctagtcttagctcttttgagaccttgatggatggcggcggcggttttccatcgcttctctcgttggagacatcgtttaggtatccccttgtcgaaatcactcgagcaatcggcgcaagcacgctctagattctcatcctcttgtggcggcgtcctagtttctacaagttggccacgtcggagggccgccggaagggtgagcgtgatggagtttggatgggccatgtgatggcttttgcggcttccggattcacctaggcacaggatgggtagcccgccatggttataaaggtggtggcaaaaccctggccggtcctggacaggggttccaatgaacattttatcgcggcggaacttggcaccagatgcggggttgcatcggttttcgatctccggcaaaggggtaagtcctacgttccgccagccccattggccaagcgcggatttttcgtcaactgtgtcgttctcctcagacggtgacttgaaggtgctgacgtcagcaaaactgccatgaccagggtggtagtggtaagcagtgttgtggaggttatggtcgtgcagctcccttatcctggccatcatcatgtaagcggccctctgacaagcatgcttgaaggtgcctcctattgttttcaccaccat

SEQ ID NO: 87895 - DNA, 4758 bp, Oryza sativa
  Clone ID: PAT_MRT4530_8679C.1
atgtccagtaaacttatatttcaactataccatggtcaaggaaacgtccgttatgggccaactggggtagatctgtcagaatttattgtaacagcaaggggaattgataggccagccgagaggagtgtaccttctattaaaaaatggttgatgcggggcttgggagttgatccacagactagtgacattacaatctatgttgtagtaagtcgggcaacagagggtttttattgggaactaatgccggttcaaaactctgggatgtggagatggtatgtggagaatgcattgcaacgtgggtggcctctagctatggttccgtatgttcatccgaaggatccaagtgtacagatgaacatggatgatggcgaggggccaagtgcagaagtgaatgagattgaagtggatcaggtcaacgcaccagaggaagatggagtagctccagtagtagctccagtaggcatgcaacctggtggagtggctgacgagggggagactgtgggtgccattgtggacgaaatggaaaaagaggatcgtgacaacgagcgtgtcgaggaagatgattcgtcagatgatgacgagaacaatattaatccagctgaatgggctagtgatgatttttctggtttggtcatctctgaaggggaaaatgtgagatgggagtacaaggaaaacgagattatcgagggagcgaggtatggtaatggagaagacatgaaggaggcggtgaagcattatgcagtgtcacttcatagggagttttgggttgccaagtctaaccggacacaatatgaagttaggtgtgttaatgaaaaagatgggtgtccgtggagagtgcacgcctataaggggaaatggaaggactactggacagtgtcggtcgttacgaaacatacttgttatctacctggtgttcaaaaataccacaggaacattacatgtgcatttgttgcatctgagatgtatgcgcatgtcgtggacaatctggcatatgaaccgaagtcaataatccgacatatcgaacagactttcaagtatacaattagctatgccaaggcgtggagggccaaacagaaaataatagagatgagatttggaacttatgaagcctcatatgacaatttgccacgtctgctatctgttatccaacaaagaaaccctgggacctcttgtgcactcaagacattcccctcaattgaacatcctggcaagactgtgctgcaaagagcgttcttagctctacatgcatgcaagatggcattcgtgcactgtcgtccagttctttgtattgatggcacatttttgaccgggaagtatcggggccagatactaacggcaattggggtagatgggaacaatcaggtattgccgttggcatttgcttttgtcgagagcgagaacaccgacagctggtactggttcctccatctggttaagacagaagttgttggtatgaggcccaatgtgtgtctaatacatgacaggcacgccggtatgcttcgagcgatagaagagttaaagtttgggagtatggaaagaggataccctggccagtgggaagatgtacaaagcaggtggtgcatgcgtcatatgggagctaatttcttcaagcaatttaagaacaaggagttgatgaacatgttcaagaggctatgcaatcagaaccaggagaaaaaattcaatgagctttggaagagattagatgagttgacaggcaaatgtagtgaccagcgtgcaacaagaccagcggccgctgtacctgaccctcctcaagcactcggagctctcccaacagacagtgtaacattggttagaagaactggggagcaaattcgaaaattttctcagtggattgagaatgagccaaaagagaaatgggctaagacttatgacacaggtggtgctagatatggtataatgacaacaaatttggcggaagtttacaactgggtgatgcgcggtgtccgtggactcccactagttggtataggggagttcattttacatgggacatgcaagtattccagggagcggttccaagcagtttttccctctatgccgaacaacaacattttatttggaactttcatggagaaaaaactagcggagtggcgtgcaaaggccatgaaacatcgagctctagtgcaaggtacccaacaacacaggtttgaggtactctgccaagacaaggcaggcaggggtatctaccgcaagagagtaaagcaggagtgcgttctcaaagacgacggcacatgtcactgctcctgtagaaagccgacgctgctccacaggccatgcacccatgtcatttccgcggcatctgagtgtggcatccaagatgcagtatatgtgtcacaatacttctccaagcaagcaatatatcacacatggagtggcgagatttttggcttcggtgtagctggggagttcacaaagattaacgatccgataatctatattcctgacccaacgaaactccgagacaaggcgggacggaggaagactcggcgcatccgcaacgatatggatgagtcggaggcaggcagggtgaagcggtgcagcaaatgcgatgaacgtggccacacctacaagtattgtcctaaagacaaggaaaaaccaagtgcggcggaggcagagatggcacatcctgagttgttggatccggcgatagatcagcgccaccggtcgtaccttactgcggtggagggggctcagcttgggacgttccgtccacggtcgtcacgtgagcgacttttggttcacgactccttcgtcgagaggttgcgtgaggccggtctcttaccgttggctcggctagttgaggccgcgaccggcgacgatgacgtgacgagacgttgggacccggacaggtccctcctagcagcgttggtcgaccggtggaggccggagacgcacacttttcacctgccgtgcggtgaggtagcccctaccctgcaggatgtctcttacttgttggggctaccgctcgcgggagacgctgtcgggccagttgacatgggtgtcgactggaaggacgagctgacggcacgtttcgcacccgtgcagcgcctaccaggtctaccgctcgagcctttgcagcagcaccgcaacaccgggcctacgaagaggtggctgcttcagttcactgttgaccagctaccggaggaggccgacgagtactccttcagccgttgtttggaggcgtacttgttgtggctttttgggtgggtgatgttctgtggtagtcacggacactcggtcgaccggggtctcgtgcactacgccaggagcatcgccgacgccgcggtcggtgaggtgcctcagtggagttggggctccgcgttgctggcggctcagtaccgtggcctctgcgaggcttgtaccaggacggaccctggcgcgatcttcggtgggtgccctctcttcatttctctttgggcgcctgagaggattgcgatcggccgcccccttgtggagcaccacccttacgacgcgtcgctgtacgagaacagaccggcggtcgactacccaacgatgggtactctgtggtgccggcgtcagcgccgatgggctcacgtgcaggttaggcggtcgtacgcggagtttgtgatggagttcgaccgccttctgccgacggacgtagtgtgggagccctacagtgccttgcttacccacagtcgggcgccgctaggcctgtccacactctgcacgagggaccaggcgtactggatgactacggttccgatggtgttcgacatctgtgtcgagccgcacgcaccttaccgcgtgatgcggcagttcggcttccgtcagtcctttccagtcccgtttccggcgggcgtcacggctgccgttcaccggtactcgcgcaagggtcagcactcagctggtcactggcctgccaagttggggccttttctcgacgactggttgcttgctaccgaggaggtcgtggaccacgcgggagagtcacacacggaggaggggtatgaggcgtacctacgttggtatcagccacgcacccgtactagagtcacctacgctccgacggagcaacaggcccacgccgcgagcgccagagacctctacgccaggcaccgcgaccaggacttcgctcgtgcggccgttgagtgcaacagggtcgtcgttgatgctacaacggcgatccaacggttaggcgcggggattgaggtgggggcagacgagcacctgtcgacgtacacgcggatacgggactcgatgcgctcggttctccgtgcgctgacctgtcgtgctgccgacgttgctcaggcagacgcagcaccacaggcttcgctcagcctgggacgacgccgggcgcccactcctggcaggctgcggggtcatcgtcacaggcaggacgccgggagttcgtcacagccgggcggcacgtctgttgcgtcggcctcgctggctgcgcagttctggcaggacgccgggacttcgtcacagccgcccggcacgtcttggcagggtcctaccgggacttcgtccgagcacgggtgggcttccgccacgcacttcgaccttagtgacttcgacttcccggacattatcggtccctcacagcttggaggcgcaccgccggtgcacacgcaggagcagtcgccctccaccccactcccagaccctcgcgctacccgtgctgtcccaccggatcgcttcacgtactcccaggaccacgtgcgagcacaggcccggaggaccaagcggggtcgcggcgcgagtcacggccagtag

SEQ ID NO: 87896 - DNA, 548 bp, Oryza sativa
  Clone ID: PAT_MRT4530_867C.1
ctcgcttcttaccttacctcctgtgtctgaccctgctcggagcttgcattgcgtggtagccacataagctcctggcattccccgtcccgacactgctattcttcctgccgagactcctatacaatgctctgcttctgctactggatcaaagtctaaccacaatcccagcggggtcccccctgtccctatgccccttaccgagctaacacgtcacattgtgagaaggatgaccctagtgattaggcacaatcttacatagcctgagcctcattcgcaaccaatgagactgaggccgcccccctcgtagcaaattcatcggacaactgtgcactacttgcagcagaccgccactttgacctaggccgatcgtaagtccttcagctggagattcactcgctcctagccaccatagctctagcgaagcctcctcgctcgcgtgatgatgaccctgtatgattacaaaagcgtgctcgctggaggatcacactgacaatcataacagacagtatgatcaacgaagagatcatggtttgtccttcacacaattc

SEQ ID NO: 87897 - DNA, 409 bp, Oryza sativa
  Clone ID: PAT_MRT4530_86800C.1
cccacgcgtccggggctaggcaatagccaaggacatggcgcagcgcaaggtggaaaacatgaagcagattgccaagaaaaaagcaaatgaggaaagaaagcgtctagaatctgagcttgagcttgccctaatggtcgagaaactacaggagcttcgctctatgagagttcaaaaaatgaagaaacaaggtcattttctgccagaagaagatgataaatatcttgagcgtgttaaggctgcagttgaggaagaggagcgccaagctgcaagtgctgctcggactgatgctgccaaggatgctattctgaccgcggaagagtctaggaaggctgtgcagtgttcaaattcaagagaagatgattctgatcaagccaaaaaggcaccaacactggaacaaaaccagagagat

SEQ ID NO: 87898 - DNA, 1305 bp, Oryza sativa
  Clone ID: PAT_MRT4530_86801C.1
atgttccgaccaccgggtgctttcggggtcgcacccccgccgccgccgccgcagcagcagcagcatcagccatggcagtggcagccgcctttccagccgccggccgctacatccttttggcagcgggacaatgtgcgggagcatgtggggaggctgcaggaaaccatcgaattagccactgcagtgataaatgagctcgaggaaattgcgcaggctagaaactcggtcgatgctagcacgcaaggacctgactcgtcttcagcaaaattgtcatcagagcctgatggttcttctgcagataggccccggcatttcgttgagcttgctagagctatgaagattagtcaagacactcatgagtctctggccacagatgctgctaattatctttgttctcagattcagaaccttcttgcacctatttatcctgctgtgaaccaagggggtccttgggaagagaggtatgcaatgattaggttagctcagaagctgcagaaatccaagagaaataagcgatggagaaagagaaaaagaaagcatgttgcagagcttttccagaaggagcatgcagattatgacagaattgatcaggaagctgatgaatggagggctaggcaaatagccaaggacatggcgcagcgcaaggtggaaaacatgaagcagattgccaagaaaaaagcaaatgaggaaagaaagcgtctagaatctgaggcatggattattgggtttgaaaggctaaagtctataatgccctcagctatctgttcggttgatggcataggtcattttctgccagaagaagatgataaatatcttgagcgtgttaaggctgcagttgaggaagaggagcgccaagctgcaagtgctgctcggactgatgctgccaaggatgctattctgaccgcggaagagtcgaggaaggctgtgcagtgttcaaattcaagagaagatgattctgatcaagccaaaagtgcaccaacactggaacaaaaccagagagatccaggaataagcggcagaaatcatcatgcaagccaaaaaacagagcatgaacttcataaagatgacagcaaagggcatgggcattatgattctgtttccagtctgccttttgagttctaccattattatcatggaagcagctacgacatgggaacactcattgaggtccgcaggatgtgggattcctttattagagctggaggaagccgaatacctgggcactgggttcagccaccccctccagctgatgaagtatgggcatcctatttagtgcagcccaactgtccaagtaactccacttag

SEQ ID NO: 87899 - DNA, 670 bp, Oryza sativa
  Clone ID: PAT_MRT4530_86802C.1
atggcggcggcagggctcgcggcggcggccacccccggttctggcgcgggcggacctaaaggtggagctggccggatcagcgtcggcgtcgagttgggcgcacgggagaaggcgtcgatcgatggtgcatgtaggcggcggggatggcgatggcgttggcagagggcgcgaaggcggctgcggtggtccctacgcggcgacgacgtggtgctcggcggcgacggcggcggtctccctcagatctgcgcctcttggccggatctggagggtggccggcggtggtggtcggcgacggcggctgacttgcgacggctggcgacggcagttggcgacggcagcgacggtggtggtcgcggcagttggcggcgacggtgtcggctgacgacgccgatggaggacttggcggcgacgtggcggacggcgacagcgaagcggccgctggcagtggcggctgttcgcggaggcggtggctggcgtcggtggcagcggcgacagcggctgacttgcggcggctgtgactgtggaggcgctggcgatgtcggcggatgtgggtcgctggtggcagcaagtggaggtgcgcggtgaggatagcgacggcgaggtggcggaggcatggcggcctcagacagccgagggagtgggagacggctacatttggtcggcgcggcat

SEQ ID NO: 87900 - DNA, 622 bp, Oryza sativa
  Clone ID: PAT_MRT4530_86803C.1
cagaggtggagatgctagtactagttcagcagagcacttcgttgatcgactaacagtttactgaaattttctggttcagtacagcagtgcaaatgaatatttttgtcctacactggatcaaatagccatatgattttgattttgcgccatgagtaccgatcatatatgacctttgtgagatatatatcggtcatgtgattttgattttgaattacatgccaggtgataactagttaactattagtaccatttttgctgataccatacgagatattttcgaatatatcaaggctggtaccttttatcctgcatacgccatatactcatattggtgggtgtttggaagatctatccggagagggatacatcagagcttagattattatcagccatttcctcgtctatattttatatcttagattcttagttgatcaactagttgttgatgcaggattcagccatggttgaccacatgttaagctgcacaagcattgagaagtcattgacaatgttaatgtggagaacatccaggacgagaatggacttgcaagcccttgtcaataaattagatggaagtctgaaaccttgttagctttgttgaaaaattgaaatgttacctacg

SEQ ID NO: 87901 - DNA, 413 bp, Oryza sativa
  Clone ID: PAT_MRT4530_86804C.1
aaacacaaaaaaagagggaagccaccccctggtaattaaaaaaaccggggaccccaagaaggggaaagggccccaaggggggccttacaaataaacaacagattatttaagggacaacaaaggggggagcttttcgaggggaccgggagttcacaacaggtggaaagcttcagccggaacagctaaaaccttggggggggggggaacccgaaaaccggaaaaaaaattcgggggcccgggtacatggaacatttttggaaaggccaaggtcaaggggcccaaaattttctggaagggtcccttaaccttgggtaggcgagcattaaacccaacccccttttaaacaggacttacggggaaacctttgtagccagggccagaaaaaagcagggtatcctttggcaaggggaaaa

SEQ ID NO: 87902 - DNA, 222 bp, Oryza sativa
  Clone ID: PAT_MRT4530_86805C.1
atggcggtcagctgcgacgctgtcacctctatgtttgacgcgacggggagaagagtaaggggctcacctgatgtctgcactggggaagtcagtggcggccgcggatgtgtctacaagcggctgctccggcagatcagatgtgaggcggcggcggaggatgcggtgggaggagccggcgcgcgacgggacgagaagagcggcacgggaggcaccggcgcgtga

SEQ ID NO: 87903 - DNA, 345 bp, Oryza sativa
  Clone ID: PAT_MRT4530_86806C.1
ggcattgatttacagcgcggggatatagaaaagaccaggaggagggaattacatgccaggcgagaaccaaactggcaaatgtcaccagatgaagattttgtttgtgcagacgaccaagaggtgcaaaggtacatgcggacgaaacgacttagccacgttgaacttaaaataggtaggataggactggggtttcacaaaagggacacttccaggttacaaaaagtgtacaagagaacaggatgaacttgcctataatacaacttgcaagcttccctggatgacagacgatggttcaagcaattggccaaaaattgatgctgaaagaaagccatagttgccagaggc

SEQ ID NO: 87904 - DNA, 1407 bp, Oryza sativa
  Clone ID: PAT_MRT4530_86807C.1
ttttctctggaatcgacttgtctgaatctgagtgttatttgtcaaatattatgctacaaaggaattgagcaaaataacaaattaaagaatcaggcaagctgtcgtgcactcgaagtcgtaggcaactggggtgcatctggaaaacttgagaaagaaaatatccctttacaacatacgaaatacattccgtagcaatgccctatgctcatgcccatccctttacaacatacgaaatacattccgtagcaatgccctatgctcaagtcactacgtaagcctacaggtccaaaattcttctatctacagctaaaacctgagtcctcagtacactacacaacgaagctgacaagctgttgaagcaggtgctaaggagttgacacaaatcacaaatttattgttcttccagactttttgattgtgagttgttgtcagggctacgcttttcagactccaaggttggttgaccattttggttcttcactgtgccagataacgagttttgccgactcccagatgactcgtttgatgataatcttagttgcctgtcactaagctgcatattcctttggctagaagagaacttgttaacattatttgaagcctctagccttgtctgcaaagcttcatgctcagctttgacacgggatgggaccccatccttttgataaacattttgtttagcagtctcctcatccacttcagttgaagcagcagcaaatgggtggtttacgggaatccatctaactgtatctggatcaacatctggtggcaaggaatcaccttctttaagaaaaacagtgggccttttccactgatacgtacgtgatctccttttctgatgcattgcttgttgttcttttgtaagcctaatgggagcaagccggtactccttgccaaacacttgagcggtagaagtatcctcatcaatcttgactaatggattattgaaaggatcatcgtacactcggggttttgctatcccacgttgtcctgattttaattgtccacgccttattaggtcagcaacagagcctttattgtcacgctcatgaatcctaatgatgacctgtcttgcaacagcagccaaaagtgtgatgccgagacagaatccagcaataaagtttagtccaatgtttttcttgatcgcagcaacagcagggggcaccgaggcgacgacagccctcagatctcccaccctcctctccagagccccgaccttccggtccccgtttgcgacgccactaccgtcgctcgaagccctaattggccggggccacctcgcccgccggcggcagggccgaggcgggacgacgcggaaggagagggagacggcgacggaggcgggcgccatcaccgccctcgcatggaggagctgaggcccgcgggccggggtcctgctccccgggc

SEQ ID NO: 87905 - DNA, 586 bp, Oryza sativa
  Clone ID: PAT_MRT4530_86808C.1
gagctcatctagacgcttcctatctcccgactaattcccggctcagctgacatttgccttcccatcacggcattccccatcacgcaaggggcgggtgaaattaaccaactacccccctaccgtaacgtacccaaaagttgggagagagagagagcgtgtggaatcccgggaactcaccggcgccggcgaacggcgagatgggaggggtggatccggcgggggaggccggcggcgtgctggccgcgctcctcggcgacgccgggtaccccgcggggcgcttgatcatgatgctgcgcgtcaccttcaccggcgcctcctccgccccggccggcgtcgtcggcgggacggccaccatcgccgcgtcccctgtcgggtcgttgatcttgacggcggcggggcgggcggcggcgtgcttgcggaggcggccgaggccggtgtcggggcggggccccgcgacggtgtcgtcccacagcttgtcgaggagacccatcacgtcgtcgtcgtcgtcgtcctcctcctcctctccgccaaaattaccgaactgccacggtgacccgaatggatagatccaaaagaggcatctcgc

SEQ ID NO: 87906 - DNA, 406 bp, Oryza sativa
  Clone ID: PAT_MRT4530_86809C.1
actgaatacacaaacgggccgagcgttgaacaaggggcaacaacaatatacactgttgatcggccaactattacagaacagaacgaaacaagcagttattacatactaaacaaactggacggaatgaaggaggaagcagcagaaggatgacctatactctgtccctaccctacaagctcgaccgtcattacaaaactaaacagcccgcgcgaacgcacaccaactcagtaaacccgaatgaattgcacgcgaacgagctcaaaggcataggatgaggccacaggattaagatgagccggagcaaacatataccacatggaacatacatacaccatgaagtggccattctacaaaatggtaaatacagatacattatcttaagttgctaatgaaccgccgcacaaaa

SEQ ID NO: 87907 - DNA, 444 bp, Oryza sativa
  Clone ID: PAT_MRT4530_8680C.1
atgggctcctcaaaggagccggctgggctttataggcggccaggcctgccgccttctgtaagggcggcaagggggtcctgccgccctttgccagggcggcaagagggcaggagggggcaggaggacggccgtcccgcgccgtccagcgcgccgtgtgccacgtcggcttgccgcccttgcgaagggcggcaggccggtgtggaggtggaggcagcgaggaagaggggggcgtgctggcaaagaagggaccacgatgggctctggcgtggccaggtcgtcaacctggccctcccgctgcgggtgagcctcttctacccctatccctctggaggcgaagccagcgacgaaggcggaaagacgaagcagctggccattgtggtgttctccatggtggcggggacaaatttcagattcagtgataaattgagagaccttaagaagtga

SEQ ID NO: 87908 - DNA, 1421 bp, Oryza sativa
  unsure (1)..(1421): unsure at all n locations
  Clone ID: PAT_MRT4530_86810C.1
gcaatgctctggggagcactataggtaggtagggtagatcccacatagggaggcaagttgaagttcaacagagtttggccttgagctggagtctgatcaaagtagacaccactaaattgctgcagttgtagctgttgcacaatcncttgaacaatactaatggcctggtagtgagattgttgtgctaccagcttgagctgttggcatcactcgtcgctgcatgacttggtggttgatcaattgaacggtacgtgcttcctagaaggggtgtccctttttttttttttttttttttgcacaaaagacaggccagttagcttattggaacattccaaatatacagggttcaagcaaaacatcttctagccaagaagcctcgagcattgcaaatatacaaggttcaagcaaagcatctactacttgagaattcagataatacatcaagcaaaatcacacaccagccatcagtgcttccatctttagcatcacagcctgaaagctcattccaccatcctccacatgcccatccatttgacatagttgcagagggcttaaaaggacgcgaaaacacgacgcagcgatgaactgcgggcttggctgcagactgcagcaagctccatcgcagcccagagcaaacatatgtacatatatgacacagcagacgacaaccttactacacaaaccatacacgactcaacatagtagacggcgagcagcagcaggcgtacttaattactagtagcatctacgttatatcacagtagtagaggtaagataggtagacaacactcgacttccatccgcttcggtctctgatatgtctctcctcctcctctgccttgtgtgtgcagtagacgctggcctaggagcaaaaacgagcgtgagcacgctgggggctcacacttcaaagggaggagggtgactggttgtcccaggtgttgccctctcatatgcgtcggacgatgatttccttctgaagcgaccaccggcgccggcgaacggcgagatgggaggggtggatccggcgggggaggccggcggcgtgctggccgcgctcctcggcgacgccgggtaccccgcggggcgcttgatcatgatgctgcgcgtcaccttcaccggcgcctcctccgccccggccggcgtcgtcggcgggacggccaccatcgccgcgtcccctgtcgggtcgttgatcttgacggcggcggggcgggcggcggcgtgcttgcggaggcggccgaggccggtgtcggggcggggccccgcgacggtgtcgtcccacagcttgtcgaggagacccatcacgtcgtcgtcgtcgtcgtcctcctcctcctctccgccaaaattaccgaactgccacggtgacccgaatggatagatccaaaagaggcttctcgctccggcgccggggcgcgcgtccgtct

SEQ ID NO: 87909 - DNA, 422 bp, Oryza sativa
  unsure (1)..(422): unsure at all n locations
  Clone ID: PAT_MRT4530_86811C.1
gacataaaccgctgctttgttttgcgtgttaatgattgaggttcactcccgaacnacaccctagctatcctggtaagaaccaaggaagctccagtgctaatgaagcaagcggatatttagattagcnccataaagttggattaagattccagggagtcggcgatggtgatggctattatcttgttcattgtcnccctgttctgttatcacttattagccatntggagcaggtgtgcaaattatttgtgactaatgctgagaatcaaacttgatgcataaatactgcatacaattgtagatagccaacaaactttgttgcggtggcggctatcttagcacttgtgtgaggtcgcattactatgcattaatggctattgtttagagatgaaaaaaaaaaaaaaaaaaaaaaaaaaaaaaaaaaa

SEQ ID NO: 87910 - DNA, 305 bp, Oryza sativa
  Clone ID: PAT_MRT4530_86812C.1
ggccgattcccgtcgccacgcgtcgcacgcgtcgactgtttagatcgcgcggcgttagagatcagctacgtcgcggctggacgcatagtgtgtatagtgcactaattcatcactgccgcgttacacgtcgtgctggaaacctgcgtaccaactatcgcttgagacatcccttcgcagtgcgatagaaagccgacgtcgctccacatgcagctgatggatggcccctgacggcataggcgcggggaggacccagggacgtcatgcaggctacgcgtcttgttttctctttgcgtgcgttccgagtt

SEQ ID NO: 87911 - DNA, 252 bp, Oryza sativa
  Clone ID: PAT_MRT4530_86813C.1
gggttagtatgcattgggaaatatcgcgtataatcaggtattccgagcagattctctactctatttactagtgtatgcacagcgtcctctttttacaacaaatactattgagttagttggaaaatgattaagccttgggctggacagaatgcgactgttgctgtcatgagttatagtggttacgatattgaagatgcaattgtgatgaacaaattatcccttgaccgatggtttggacggtgcattgcaatg

SEQ ID NO: 87912 - DNA, 695 bp, Oryza sativa
  Clone ID: PAT_MRT4530_86814C.1
atggtgtttccttttactttctttgatctctacactcgtgaagatcctgaagagattgaggtgctgcttggaccatggtggagcagctgccgggtggtcaagtctgacctcacggacatcgtgggcaaccagtgcatatgctgctggcgtggggcggcaacgacgctgcttgtgttcgccgcagtcggggcggcctgcaccgccgggcggcgggcgccggtgacgacaactctcttcagtcttccccctccccccttctctctcaggcacgcgtcgaagggcagtgggcggcggcggcgggtggcacggcagggagtggtggggccggggcaggcggcgggcgtggcgggggcacggcgggcgtggtggagaggcggccggtggccggcgagcgtgacggcgcccgtgcccccctgtcgcggcggagggcaccatagcgcggctaccaggcggttggccggtgggaccacttcccggggatttccgggacccgcaactttttccgccgttactccgcggggcgcccaaccctttttcgcattcgccgacgccgcgcgcccgtgcttccccctatccctgtaccgccggagccgctcgtcgccgtcgccgctggcggttccgccgaccctccattcgcccgtccttaggcgggctcgcccccgccttccccgacccccaccgccccccgtcgccat

SEQ ID NO: 87913 - DNA, 197 bp, Oryza sativa
  Clone ID: PAT_MRT4530_86815C.1
gcatattggcaagaagaaatggacaatgattgaaggaagcgagtaataataattaaatggctgtcaaaaatatctaaaggatggctcagctcatagatgaacgatccacatccattatcgaaaaaaaaagaggaagacgtaatggaacgccgagatgagcaatattcattgatgaagctagcatgccagtgaaagat

SEQ ID NO: 87914 - DNA, 156 bp, Oryza sativa
  Clone ID: PAT_MRT4530_86816C.1
ggcaggaagcacgcttttaacaaaagaaagggaaggttacagccttcgaggaccaatagctctatcattgggaaagaaagagaaaactacatgcgtaaggccacactctaaattcttcttacaatttattgtgtttcagcaagcctgggaagcaca

SEQ ID NO: 87915 - DNA, 150 bp, Oryza sativa
  Clone ID: PAT_MRT4530_86817C.1
aaaaagggagaacgatcgaagaacaacagagcaaagagcgcctctaatcctatatacgtgtacatgcgaccttgtgaaatagcaaataatgctacggcagatgttactgttgatgagtaccatcgctacaagatgatgaaacatgaatag

SEQ ID NO: 87916 - DNA, 448 bp, Oryza sativa
  unsure (1)..(448): unsure at all n locations
  Clone ID: PAT_MRT4530_86818C.1
gcaatgtcgaccgcttccgcaagcttttgctctctctcaaaaacgacgacggcaaaaagggggcatctgccggtgccggtgccgccgccgccgacttcaaagtcgccaaaccctaaggcgccaccacatcgccgcaccgctcgagcccgtctgtcgcccgatgcacctgcaccaccggacctgatggcggcagtgggggcactcgtgttttcggaccctccccactttcgcaccgcccccgggcacaagcggccgttcgggtttggtgggcgtttcggccggccaccgcttcttngccggggcgggcaagcgcttgaagaagacttttggcggctattcgctttgncaaccccgtttttggcgcccgccaagcccggcttgttgcggttcttttctttccccttgtgcttttgcacacgcgtgttccgcaaaaaaaaaaaaaaaaaaa

SEQ ID NO: 87917 - DNA, 595 bp, Oryza sativa
  Clone ID: PAT_MRT4530_86819C.1
tcacttctctccctcatccactcgttctctgcccctctctctcctttctgtctctcacgaaggaccaaaagcggcgctgctcgctgctcgtcggcacggttgggccatagctgccgtgagcagctaggcgtcctccccgtgcggctctccgcaggaactccgcgcggcgtcgacgatggcggctgcgagctccgtgcggcatcgacgacatgcggacgcggctaagctccacggcatcgacgacaacggtcgagctccgtgcggcgctgaggacggtgacggagctccacgcggccgagctccgtgcggcgccgacgaaggcagccaagctccgtggggccggcgaccatgcgttgaagaagatggagcgtaggtttgttttgttggtgttttagggatgttgcattctactgttaagctcgttgcactatgtgtattaaggtgtttcattttgttttgatttaatgttgcattgcaatctattgtatatgttttgttgcactctattttattcgtgtgtttcatccttgttttattggatgttgcatatgatgtacaatgtgttttcttcgatgttgcaaaaaaaaaaaaaaaa

SEQ ID NO: 87918 - DNA, 416 bp, Oryza sativa
  Clone ID: PAT_MRT4530_8681C.1
atattaacattgcacttgattttatatttaaaaaacgcggaggaaaacctggaaaaaccaaactggcaccagaagggggaccaaaacaccgtagaaaaaacgggaaaaagctaggccccgtgataaacataactgcgcccagtgccaaacagaaaaccccccacaaacacaaacaccaaagcatccggagccccaaaagagaaagcccgcgcactctaagcggggagctaactcacatcaatagcgggggggaaactggccgggacccagtccaaaaaaaaatcccgccacccagcagaagaaaatgaccaactaacgcgcaaaggcgggttgttttattaaaccaaagaccgggggcacataaaccggcaacacagccaacacccagagagagattcaccaaaagcgcctgacag

SEQ ID NO: 87919 - DNA, 1250 bp, Oryza sativa
  Clone ID: PAT_MRT4530_86820C.1
atggtggcggcgcttgtgggtgaaggagacgtggaggacgcagacaccaacggttggggatggaggcggcggcctccgtatctgcgtggcggaggacgtcaggggggaggctacagacgtccaccagatccggtggctggtggtccggtggtagaggagaaggcagccagtagatctggctacccgccggatcccatgggcccgccagatccggcggtcggtggtcggtaggcgggggaggcggctatcgccggatccggatccgtcggctaccgtcgggaggtgagggaggcggcggcggctggcggtcggcggagagaacgcagcggtcaggagatcgagagaagagagaagagaggaggaagcgagaagatcgagaggaggaagagagaagagaagagaagagactggtggatgaggttatctctgacgaggcactttggtccatcactaataggccgtcacagatgggccgatctggcgtagtggtactacttaagactagaacatcacaagatagagactcgagtgtggcccaaaagcaagatccaaccgaagcatcatccgatggtcaccgtgacgtcgatggtgccggacgagccccaagtaagcatccggcacgaacagaaacgatttggcctcgaacccctctgcacgcatcggacgcgcggaatggtgcccgatatcgacagatgatcgagcccgtccacggcgcccaccttggccgcctcctcctgccggttgctgctcgcctcctcccaccggccgcttcctcccgtcggccgccgccgccgccacctcctcccgccgacgcggcgctcgccgcccgcatcgttgtcgtcgtcgccgcattctcatcgtcatcgcggcggctgccgagctcgtctcctctctcgtcgcccacgccggctgccgagctcgccttctctctcgccggccgccgagctcgcctcctctctcgtcgcccgcgccggccctcgagctcacctcctctctcgtcgcccgcgccggctgccgagctctccttctctctcgccggccaccgcgctcgtcgcccgcgccgaccgtcctatccgccgcctcgctcgtcgcccgcgccggccgtcctatccgccgcctcgctcgcgtcgtcgtgcaaccaaacactctccaaaaagcggcggccatgtcctatccgggtatatcccaccaaccaaacacacgaggtccgtaggatgtcccgcgttgcggcggcggcggagggccgacgg

SEQ ID NO: 87920 - DNA, 475 bp, Oryza sativa
  unsure (1)..(475): unsure at all n locations
  Clone ID: PAT_MRT4530_86821C.1
aaaaaaaaaactctctctccgtccgtccgcgccgctactcccccctcgccgagagagctctagggtttccgcgtgccgaattttttttttagttcggggggagagatttgaagaggcgtgaccatgttggtctaccaggatctgcttaccggtgtagcgatctcctgacggattcgttgccctacagagagatcgagaacggcatacctctgggaggtcgtggcacagcgaattgctctcctggatatagatgggtgcatggaggtacaacgattggtggcacagggccagtgtggttatggtactagttgccagatgatacagaacatgcaatatgctatttgtggtggacttggccaacaacaaatgatgatgaagatggcgatgcaacttccaaacatgtgtagcatggcccctgcctacttccagctctctccctatgggtgtggntaaccaaacctgtgcttcatgtacg

SEQ ID NO: 87921 - DNA, 853 bp, Oryza sativa
  Clone ID: PAT_MRT4530_86822C.1
tggtatataaacaaaacattgaaaaaagacaaatctcagtgggattttgcagtctccttttgcagttttgttttgctgcggaaaatttggatttgttttttaaaacactccgaataatacgatgtgtgaaactgtgtggagtccagataagttacgcgcgacttatccagtttcggttacgcggagtggagatcgtgcaggcatcctgatatctctatattggttgagccgccgcctccacgcataatacgtgaaatcaatttagggtttgcctcttcctctatactgcgccgtctctcgtagtctactccatcccgctcgtcggcgtgcactggagatggggagagcaggtcttcagaaccttcaccttcgacgtcctacaccgggagaaggcggcaataaggtttttgagaagcgctttgtgcgactgctccctcctcgaccacaacggctcgtcttcctccttggctacttccgttgaattgagcacaactactgaagaagctccggtctttatagtgtagattggcccataagttttagaccattttgtaaaggtatgatgaggcttcttttctttcaattgatgcatatttccaataacgggtaaaccaggaacagctgcaatagaataaacaatcatatgagtactaacgcccttgtagtggactgaaatttgaaatgagtttgcttcacaatatctctggtcactttcctgtgcaaccagcgtttcttctggaggcgggttgttgccgcggtccttgggcggcaccacggcgagggtcgccgccacgacggcggccgccgcagccacgccgatccctcccgcaccggctgcgagcagcgactccat

SEQ ID NO: 87922 - DNA, 1932 bp, Oryza sativa
  Clone ID: PAT_MRT4530_86823C.1
ataaatcagcacatctcttagttgctatttcttctgtctagacaaatcaccaagagatttggcaccagcttgagaaataacataaccctttagcttagttggtcaccttgtggtagcagctgttgttacaaagaaaaaatggctgctcatcgaaaatatttgattatattgctttcgctgttatttacaccaacaatcaagaataaactatgaacaaatctcgtcggagggaaaaaaaactacaagtatgtgtcctaatagaatgagctcgccctccagcaaagtgaattgtgtcaacaaagaggaaagagccctggatcatcatgcgcccaacttttgccaggtagtagtatcagtcatcctagtgattggtttggggagacgcctccgcgagctcgatttcttcactcttttccgcttcatggaagacttctttgatggaggagctttcctgctacctaatctgagttttcgagatggttcactggccgttggagggggcttccaaccggatgcaatcatttgctctagtagctccctgtggtatccctgaataacgaagttgcgtctttcgcagtccaggaacatttcaggcatccagccaactctagcccttattttgtcccggacggtgctgaaactaatttgatccctggaggtgaaacggtcaacttcattgaaccaaaggcatgtgaagagattcgtgatgggaatgtgctctctgatgatgacacaaccttcagggacatcacttgtaataggaagcttagcaggtgcataatatgttaggccctcatttcggtaaaactctatttggtaatcaattgatgcattgtcatacttgccagcagctttattagcttctgcttcttcaaatacatcaaagcgtttgtagtgccgagagatagcaaaagtagcattcttcctccacaaaaacctctcaagcagtagataagggtccacaacgagcttaagctttgcatctatccaaactgaaaatctcacatttggaaaaagcctatggagcagaagcttaggaatcttccccgtacgccttggatcttcgtatgggagatttcgaacgaccactagcctccataagccaactttgttgtttctgtacaatgagctagaattttttacataagcctctgtttcttcatggcatttctccatctctaacagatcatcatcattgatatcaaatccagaaccttggccaggtttctttcctctaacaaagccacagtggacagtcatagactcactaatgtcaaaagatttatttctctgctccagagatggatgcccaccaaatacagagccctgatttgagaaatttgcagtgatgttgtcttcaaatacataacttaagttcttaaggacaggagatggtgaaggttgtggaggcataagagcgaacgcgttggggtagtaggcgtagacacagcggaaggcggcgggcgagggaaggcgggacgaactcctcggccatggggttgagcttggagagcaggtcctccagatcccgcatctccctctccccggcgtccccctcgggcggcggaggcgcggcgtggtcggcggaggtctcgacgacggccatccccgcagcaacgggaaggtggatcggtggatggaaggggacaagcggccaaccaaattaccaaaccacgaggtgagggtggaggggcagtggttggtggaagcgcgggaggggaggctagtgatgacgcatcggatcggcgggaggagaaggagatggaggaggaggtggatcggggaggggaggggacagcagaatcaggaggaggcagagctccgaccaaccggcgcagggggaggagcagagccctagtctcctccttttttctgtttctctctctagagaggaggagacagaggagaaggaaggagctttgcgtttctcat

SEQ ID NO: 87923 - DNA, 601 bp, Oryza sativa
  Clone ID: PAT_MRT4530_86824C.1
gcacgaggggagaacgagtgtacatccattttctggatgccaataagccaaacaaatggtaataagtaaaccagtatatatatattcactgaaaaatttcacatgccatggatgatgaactgttgattttttgtcacaatctctaccatagaaaaaaaaagaacaggcaagaatatttcaggagcaaaacaacctctggtgaaaacacacatcgcgtcatcgtctatcgatcgatcgattgaactcgctagctatcatatattcaggttgcaatttcccaaaggaaaaggaattaaagggaaggggagaaaaattttccatggccatgaaagagacctgcactgtccgtcccagcaagcgcgtggtgacaaaccgaattgcaagcacgaactccaccggcatctagctagcgatggcgataatggtggagattatttgcggtgtggagaggaggcttgtcgccatcgccaacaccaccacctccatcatcacagtgaattctgaattagtagaggccggctggctttaccctggccttagttgtgtggatgattttctaccactcatcgccttgaatgatcttctttctagtggcatctga

SEQ ID NO: 87924 - DNA, 745 bp, Oryza sativa
  Clone ID: PAT_MRT4530_86825C.1
aaaaaaaggacgtaactacttgtcaagcgttcgatttaacactgaaaatcgagtgcataatggccaaaaatggccactggaagattcttttatcttgcccctctcagatgcagcttatggagagttcttgcagctacaagatgaattgaatcatctgcagcttcagcctggaagaggtgatgtttggagcttcatttggggatcagatgtgtacacagcgaaaagattttataagcttaatttctcctcgctgcatcctcccagacccatgatttggctgtggaagaccaaatgtgtcatgaagataaaggtctttgcatggcttttgttttgtgatagactcaacacaagggacatgcttgacaggagacattgtgcaaaagaggatgacgatctcacatgtgccttgtgcaacacacatcaaagagagactaggcttcatctcttttttacatgccccttcagtgtggcttgttggcagtagctgggcatttcctggaattgtaatctggagtttttccagatgcttgtcttggcgagaatcagatttgctcgaaagggtttccttgaggtttttttcatggcagcatggcatctttggaagcaaaggaatgggctaatctttcagtctgtccagccatcgcctcagtcatggaaagctatgtttgtcaaagaagttcttctgcatatgtgccgaatgaaagaccctctcaagcaatccctttctgattggatacaaactttg

SEQ ID NO: 87925 - DNA, 197 bp, Oryza sativa
  Clone ID: PAT_MRT4530_86826C.1
gaattatccaaaggttttactcaacacaaagaagtggggcatgtttaagaagccagtcctgggtggcaaccgcttatgtaagagacattggcctcggctttaagacccccagtgaagcaaccgaagggacatacattgaccactaagtgcccattcactggaactgcttctatcaataggcagaatcttcgcttgaa

SEQ ID NO: 87926 - DNA, 592 bp, Oryza sativa
  unsure (1)..(592): unsure at all n locations
  Clone ID: PAT_MRT4530_86827C.1
ttttggtttttttttttttttttttttttttttttttttttttttttttttttttttttttttttttttttttttttttttttttttttgccaaccacaacacccactttttttttccaggggcgaacattcggtttcttaaacagtctggcgaacagccaaagtttaaacaggggcccaaagtaaatgcccttctgttccaaacgtagcggctttttccaccccaacccacacaggggtgcattttgcattgtcattaccccagcacacccttttacccacccgtggcccacattatttaccaaaagcgaggtccatttcgattttatctaccccacctttgtgaaacggaggtagccctttcccgacggcaggtcggcggtttcaaacccctgggggaactttttctttcccttgtcgtnggaaacccccggagggattaccaccccctccccgggcttccagttcaccggcgttcccaccccgttctttccccccgtttgcagcgcgttaaccccacccaccaccttattcatgttcccccccacccacgccgggtccaaaaagctcagcttcacctttttttcggggc

SEQ ID NO: 87927 - DNA, 1257 bp, Oryza sativa
  Clone ID: PAT_MRT4530_86828C.1
atgccgcacgccccgaaggtcgagaaacactccctgatcccgtccgtgctgcagccacccactttctcacgccaaattaagctccacgactaccacatagatatggataggctcgaatggacgtatcattggccaaggtttttatcgccatatatggaacaagtgtctaaatttattgatattgccaaggtgcacgctaagaaggagaataagaggggtatatattgtccatgtgctgactgtaagaatgaaatagtatgggaaaatctgatgaaagtaaatgagcacttagtcactcgtggatttatggagaagcacgttatatggacacatcatggcgaacatgaagaaggtagacccgttgaaaaagaatatgggccgattgttgaagacatggattacacgaatggttgtgctgaagacaatattgatctggaggaattgttacaccatgcagaacctgatatgctagttgggttggctagaggtttagaaaatttcgatgctttgaagaaggcagcgaaggatgttttgtatgatgagtcaaagggctgtgacagtgacttctcaacgttacgctcccatagcacttgggcagttcttcttaccatgtacaatcttcctacttggctttgccagaagagaaagtgtgtacttctctgcatcctgatacaaggactccaacagcctggtattgatattgacatatttctcgaaccattgttggaagatatggcagatttatggcatgaagggttgaaagtgtgggatgagtacttaagacaacacttcacagtgaaggccatcattttcattaccattaataattaccacgccatgttttcagtttcagggcagatcaaaggtaaaacaggatgggtgatatgcttgaatggaacgtactataggtacctcccaggttccaacaagcttgtttacttgaggcaccggcagttcctatccaagggtcataagtttcgcaagatgaaagcagagttcgatggtactgaagagaatgattctccactgaaacttacacccggggataaagtatgtgaggcgatagagaaaatagaatgtgtgtttggaaaagggactaagaaaaaattaaaggggacaaagcgtaagaaaacatcaaaggggacaaagcggaagaaaccagatggcaacctccctcccctattcaagaagcattccatattccttaagtacctgtcgtactggaaagatctcaatgagcaagtgcatggtgtttag

SEQ ID NO: 87928 - DNA, 406 bp, Oryza sativa
  Clone ID: PAT_MRT4530_86829C.1
ttttgtggtttttttttttttttggttttttattaaataatttttttttttggaaacaaaagggaactttttagggaggtatacaaaaaaaatgggagcaaggataaaggtacctgaactccaaaaaaacaagggggcacaaaaaaccctagccagggctaacggatccagcccaggcaagaggtttccatgcatttgtccgaaacaagtaatcaaccaagtggatgctggacggaacatgactagcgactagaacaaccgttaaaaaaactcccacccaaaccgatgatgcacttgctaataagcaggttggagatactgaaagttagcttgaaaaaaggagtcgtcattttaaaggtcttcagggaacaaataaatgcttggagcaacaggctgggtatggggg

SEQ ID NO: 87929 - DNA, 4791 bp, Oryza sativa
  Clone ID: PAT_MRT4530_8682C.1
atgtccagtaaacttatatttcaactataccatggtcaaggaaacgtccgttatgggccaactggggtagatctgtcagaatttattgtaacagcaaggggaattgataggccagccgagaggagtgtaccttctataaaaaaatggttgatgcggggcttgggagttgatccacagactagtgacattacaatctatgttgtagtaagtcgggcaacatatggtttttattgggaactaatgccggttcaaaactctgggatgtggagatggtatgtggagaatgcattgcaacgtgggtggcctctagctatggttccgtatgttcatccgaaggatccaagtgtacagatgaacatggatgatggcgaggggccaagtgcagaagtgaatgagattgaagtggatcaggtcaacgcaccagaggaagatggagtagctccagtagtagctccagtaggcatgcaacctggtggagtggctgacgagggggagactgtgggtgccattgtggacgaaatggaaaaagaggatagtgacaacgagcgtgtcgaggaagatgattcgtcagatgatgacgagaacaatattaatccagctgaatgggctagtgatgatttttctggtttggtcatctctgaaggggaaaatgtgagatgggagtacaaggaaaacgagattatcgagggagcgaggtatggtaatggagaagacatgaaggaggcggtgaagcattatgcagtgtcacttcatagggagttttgggttgccaagtctaaccggacacaatatgaagttaggtgtgttaatgaaaaagatgggtgtccgtggagagtgcacgcctataaggggaaatggaaggactactggacagtgtcggtcgttacgaaacatacttgttatctacctggtgttcaaaaataccacaggaacattacatgtgcatttgttgcatctgagatgtatgcgcatgtcgtggacaatctggcatatgaaccgaagtcaataatccgacatatcgaacagactttcaagtatacaattagctatgccaaggcgtggagggccaaacagaaaataatagagatgagatttggaacttatgaagcctcatatgacaatttgccacgtctgctatctgttatccaacaaagaaaccctgggacctcttgtgcactcaagacattcccctcaattgaacatcctggcaagactgtgctgcaaagagcgttcttagctctacatgcatgcaagatggcattcgtgcactgtcgtccagttctttgtattgatggcacatttttgaccgggaagtatcggggccagatactaacggcaattggggtagatgggaacaatcaggtattgccgttggcatttgcttttgtcgagagcgagaacaccgacagctggtactggttcctccatctggttaagacagaagttgttggtatgaggcccaatgtgtgtctaatacatgacaggcacgccggtatgcttcgagcgatagaagagttaaagtttgggactatggaaagaggataccctggccagtgggaagatgtacaaagcaggtggtgcatgcgtcatatgggagctaatttcttcaagcaatttaagaacaaggagttgatgaacatgttcaagaggctatgcaatcagaaccaggagaaaaaattcaatgagctttggaagagattagatgagttgacaggcaaatgtagtgaccagcgtgcaacaagaccagcggccgctgtacctgaccctcctcaagcactcggagctctcccaacagacagtgtaacattggttagaagaactggggagcaaattcgaaaattttctcagtggattgagaatgagccaaaagagaaatgggctaagacttatgacacaggtggtgctagatatggtataatgacaacaaatttggcggaagtttacaactgggtgatgcgcggtgtccgtggactcccactagttggtatagtggagttcattttacatgggacatgcaagtatttcagggagcggttccaagcagtttttccctctatgccgaacaacaacattttatttggaactttcatggagaaaaaactagcggagtggcgtgcaaaggccatgaaacatcgagctctagtgcaaggtacccaacaacacaggtttgaggtactctgccaagacaaggcaggcaggggtatctaccgcaagagagtaaagcaggagtgcgttctcaaagacgacggcacatgtcactgctcctgtagaaagccgacgctgctccacaggccatgcacccatgtcatttccgcggcatctgagtgtggcatccaagatgcagtatatgtgtcacaatacttctccaagcaagcaatatatcacacatggagtggcgagatttttggcttcggtgtagctggggagttcacaaagattaacgatctgataatctatattcctgacccaacgaaactccgagacaaggcgggacggaggaagactcggcgcatccgcaacgatatggatgagtcggaggcaggcagggtgaagcggtgcagcaaatgcgatgaacgtggccacacctacaagtattgtcctaaagacaaggaaaaaccaagtgcggcggaggcagagatggcacatcctgagttgttggatccggcgatagatcagcgccaccggtcgtaccttactgcggtggagggggctcagcttgggacgttccgtccacggtcgtcacgtgagcgacttttggttcacgactccttcgtcgagaggttgcgtgaggccggtctcttaccgttggctcggctagttgaggccgcgaccggcgacgatgacgtgacgagacgttgggacccggacaggtccctcctagcagcgttggtcgaccggtggaggccggagacgcacacttttcacctgccgtgcggtgaggtagcccctaccctgcaggatgtctcttacttgttggggctaccgctcgcgggagacgctgtcgggccagttgacatgggtgtcgactggaaggacgagctgacggcacgtttcgcacccgtgcagcgcctaccaggtctaccgctcgagccgttgcagcagcaccgcaacaccgggcctacgaagaggtggctgcttcagttcactgttgaccagctaccggaggaggccgacgagtactccttcagccgttgtttggaggcgtacttgttgtggctttttgggtgggtgatgttctgtggtagtcacggacactcggtcgaccggggtctcgtgcactacgccaggagcatcgccgacgccgcggtcggtgaggtgcctcagtggagttggggctccgcgttgctggcggctcagtaccgtggcctctgcgaggcttgtaccaggacggaccctggcgcgatcttcggtgggtgccctctcttcatttctctttgggcggctgagaggattgcgatcggccgcccccttgtggagcaccacccttacgacgcgtcgctgtacgagaacagaccggcggtcgactacccaacgatgggtactctgtggtgccggcgtcagcgccgatgggctcacgtgcaggttaggcggtcgtacgcggaatttgtgatggagttcgaccgccttctgccgacggacgtagtgtgggagccctacagtgccttgcttacccacagtcgggcgccgctaggcctgtccacactctgcacgagggaccaggcgtactggatgactacggttccgatggtgttcgacatctgtgtcgagccgcacgcaccttaccgcgtgatgcggcagttcggcttccgtcagtcctttccagtcccgtttccggcgggcgtcacggctgccgttcaccggtactcgcgcaagggtcagcactcagctggtcactggcctgccaagttggggccttttctcgacgactggttgcttgctaccgaggaggtcgtggaccacgcgggagagccacacacggaggaggggtatgaggcgtacctacgttggtatcagccacgcacccgtactagagtcacctacgctccgacggagcaacaggcccacgccgcgagcgccagagacctctacgccaggcaccgcgaccaggacttcgctcgtgcggccgttgagtgcaacagggtcgtcgttgatgctacaacggcgatccaacggttaggcgcggggattgaggtgggggcagacgagcacctgtcgacgtacacgcggatacgggactcgatgcgctcggttctccgtgcgctgacctgtcgtgctgccgacgttgctcacgcagacgcagcaccacaggtgcgtccccgaccgactgctcctcgtccagctgcgcacgttcctacgccgacaccccctcccttcggaggcttcgctcagcctgggacgacgccgggcgcccactcctggcaggctgcggggtcatcgtcacaggcaggtgtgtcggcctcgctgtctgcgcagttctggcaggacgccgggacttcgtcacagccgcccggcacgtcttggcagggtcctaccgggacttcgtccgagcacgggtgggcttccgccacgcacttcgacattagtgacttcgacttcccggacattatcggtccctcacagcttggaggcgcaccgccggtgcacacgcaggagcagtcgccctccaccccactcccagaccctcgcgctacccgtgctgtcccaccggatcgcttcacgtactcccaggaccacgtgcgagcacaggcccggaggaccaagcggggtcgcggcgcgagtcacggccagtag

SEQ ID NO: 87930 - DNA, 880 bp, Oryza sativa
  Clone ID: PAT_MRT4530_86830C.1
ggccgcaaattttttttttttttttttgtttttttttttttttttccaaaacgatagaatcaccttcagagttatgttgaatcttatcaggatgcagaaaagaaaacagcacgatcactagatgatactactggagacaaaagacacttggcaaatcaccatagaagttaacagcaaacaaaacactggaagtaactagaagttaacttcaatcatattcaagttcatccggtgttattggtctcttcagtggtatgatggacttcttttcaacgtcttgtgacaaagctttcctcatatcaaggccatcttcttcccctgagtaatagcggagcacccttcgataaaccacatagccaagcttttcatacatccttattgctggcatgttagatgctcttacgaagagatccacaaagtaggccttatccatcttgtcactgatttcctccaaaaggttcataagttttttggctagcttctgcctccgaaattctgtggcaacagacactgctgtaacatgtccatgccaagattcaccttgtccttcaaccttacccatgatgtatcccatgacgcggtccccggggctgacggcggcgtggaagtagtcgggccagcgagccatgtacgtcatgtagaaggacatgttgaaggtctcggtgaggtggtcgaggttgacggaggagaagcggaggaggtcgtcgcagcagaaccggcggatggtcgtcatggcccctcggcctcctggccgcggcggcggcggcgccggtgagggatctcgtcgtcggggcggcgctgtgctctcgagattccggtgagaagagagaagcttcgagcggcggagacccggccggtggacgggtgtggccggccggcc

SEQ ID NO: 87931 - DNA, 1155 bp, Oryza sativa
  Clone ID: PAT_MRT4530_86831C.1
gcccggggagcaaacacaattacacgacgagctcgatcatcaagtggctctagctagctcgatcccacgagtgctccattttggccgtgcgatatcgcgatcaatggcttcgtttaggctaatgatagcggcggtgtctctgagcctcgtgcagctctccatggggagcaggaggttaatggagctgtacatacctccggcgagtgaccagctcacgtaccaccacggcagcgtgctcagtggcgacatcccggtgtccatcctctggtacggcaaattcacgccgacgcagatgtcgatcatcgccgacttcgtcgtctcgctcaccggcgcgccgaacgcggccacgccgtcggtcgggcagtggtggggcaccatcgaacagctctacctgtccaacgccgccacgaacagccagacctccacacgcgtgctcctcgatgagcaggtctcggacgagcagtgctccctcggcaagtctctcaccctggctcagatcgaccagctcgccgcgcgcgtcggcaccaagaggggaggcgtcgcgctcgtcttcaccgacgaggacgtcaccgtcgaaggcttctgcagcagccggtgcggcaagcacggctcggacgcgagcgccggcaccacccacatctgggtcggcaactctgcgaagcagtgcccggggcagtgcgcgtggccgttcgcgcagccggtgtacgggccacagggcacgccgctggtggcgcccaacaacgacgtcggcgcggacgggatggtgatgatcctcgcctcgatggtggccggcacggtgaccaacccgtacggcgatgggttctaccaggggccccaggacgcgccgctggaggcgtgctcggcgtgcccgggagtctacggcagcggcgcgtacccggggaacgccggtaaactcctcgtcgacgccaccaccggagccagctacaacgccaacggcgcgaacaggaggaagtacctgctcccggcgttgtacaatcccgcaacgtcctcctgcgacacgcttgtgtaatccatagtgccggacacgttacgtgttctgtacctgtacgcttgggaagttgtacatacgagttgggaaagtaatggaatcactttgttcgttctaaaaaaaaaaaaaaaaaaaaaaaaaaaaaa

SEQ ID NO: 87932 - DNA, 543 bp, Oryza sativa
  Clone ID: PAT_MRT4530_86832C.1
acatgtgcggctcatcgaatccaaggcgccccgccccccgccatccctgtcggccgcctgcactgactgaacatggcgatgagctcatgctccacagcagcagcatcagcaacagcaagcaacagagtgtcaatccaaatgattgatcctcttcagatgctcccagggatgggttgaattcggtatctattctgcagttctgctcactacttcttggtattagttgggtcgttactccgtgaatccaatgcttgttttatgtacctattgttctgtattgggggagattggaagagggtagagctgaaaatgaggacttggggggaactatttaatgaacccattagcttcgtgtcgttcatctcgtcaacttcttggaaatgttgggtccttagtccataaatccgatgcttgtttagttttatgtatctattgttctgtattgggggagattggaagagagtagacctgaaaatgagaggagttgggagaactatttaatgaatcattagcttcgtgttgttaaaaaaaaaaaaaaaaaaa

SEQ ID NO: 87933 - DNA, 327 bp, Oryza sativa
  Clone ID: PAT_MRT4530_86833C.1
acgcatctaggcaagggtgggcatgatggagtaggatgggccctgcgacggcctttgtcgcttccggattcacctaggcacgagaggagactgcccgctgccttgcgaggagtgggggtgaaacctgaggtgtggtgtgtttggttagagggggttatgcgaagggtcctgtcacggcctctttccgacgtggatctgtatgtcaactttgttgtttgtgtaccctggccggttctggacagggattttaatgcacattctgcttggaattctattcgggaatttctgggtgtgacataaatccaaccatcaccatccaaatcagca

SEQ ID NO: 87934 - DNA, 4372 bp, Oryza sativa
  Clone ID: PAT_MRT4530_86834C.1
aaataagctttggaattttattgctgaagagtacattaattcaaaagttgcattcatggtaagaacaagaacaactatacagagttttagctcctaaaaacttgagtactcacatatgtcaacgtcatttacctagacaaatttgaagaattcagcagaagaaagattatgttcttggttttccatagtccacatcatggtccacatttggagggaaaatgaaaattgagacagtaccgagtagatatctccatatatttgaacctctgaagagaacaatccctgatacaaattactgatgcaaaaataagttgttttcggcccccatagacattatgaaattcctcttgacttgaatacagaaaggattcaatcatgcactaccttttgtacagggagtatttgaatgtttatttggtaacgatgccatgttctcgcagccgacaatggagacagtttccaatgatgagaaggatccttcgtatgactccactagtttcagcttttcacaaaatcgaatatctagttgcccaagtttatcaagcttccctgacaggacttcaagcttaggacactctgaaataattatagttctcatggatgaaggaagagcaagaacctctaccaagcttacacaatatgctattcttaggtattctaagcatggcaggagatatttgcttctccatgttccttgatcttctatagttatagatgcactgagatcactgctagattctgatatagccatgccgttattacgctcaacatatttactttcgacttttatatcctgctttccccttatagatctaagctcagggcaactccaaatgtgtatttccttcagatataggggaaaattgagaagcactactaagctttgacaacttatcactgttagagactccatacaaggtaaatgtgtatttgttgccaaaggtgcatctgcagaggatactaggatgctataagattctgacctcaaatcatctttgttttcagcataccaactcttattttcagtgtccttttgaccccatatgaactcgagcttaccacatctctcaatatatatttcccttagagatgaaggaaggatgagaacctcaaccaatttgggacaatcttttatttctatatactccaagcatgggagtagctgatttttttctaatggcgcttctagaacatcaccagatttagtcagattattgcaagaataaactgttaatcttttcaaggataccaagcattggagctgtttcagtggccaatagacgagttcgttgcagcagttgattactaaatcttgcaggttcacaaaacattcccaatccatacagaagaagtaacatccccgtagttccatagttgcattagaagttttatgactaaattcttctgtaccactgacctgttgtattgcacattgtacttgtgaggaagaagctgcaattgttaatctgacatcggacagtgttgccatatatcttgctatggataaccacatcaatgatttatcttcgggaaatactaatactctcagctttggtgcttcaggtagagttgccaactccgggcactccataatattagcattctcaagttgaggaaatattggttgatatctttcttgtgttccccatgccttcaaactcttcagattgtgcaacttgaggttttttaaagctggaaatggggagttccctttattatctaagaattgagaagattcaccaaatattactgcatctggaaagttttccaagttagagcaactatcaattgatagaatctctagaaggggaaacactagcttttgcccaggtcctccttttacttcccaccaaccattcaaactttttagatcaactaaaataagttcccttaatttaggaaacgttgaagatgtcgaattgtcaacacccgagcacaggtattgcaaactttgcagcccttccaaatgaagaatttcaagagatggcaattgccacaattgcggaaggctctcgcacattgtgcaactaactagttggagcttgattagatcttgcatcattgtggggtttgtcacccaagttggaaaattggaacttctgtaggaatccacagatagaattttaagcctgctgtttggagtaaaagcatctagtaccttctcatgtaaatcaatcacttcattatgatcatccttccatccaaaagatagctgggttaggtctttcccttccccatggctgctcatggatacatctgcctctgttacattttgtagatgacatagctggagttgaccttggagtttgaggtgccttagttctccaatgctactacaaccagaattattgcccacaacaaaatatgttagtgtctgtagggatgttagatgcccaaggtttggaggcatggattttaaggacatgcatccatcagtatagagatgacgaaggccaatcatgtttttaatatccttaggaaggtgaccaagagatatacaacccgaaagatttaatgtttgtagattatacaaaatgcatatttcttcaggaagtgacttgatatgacaattgccagagagatcaagaaacctgaggtgcttcaagtgcttcactcttatctgaagtccacccaagttatggtaatagaggcgtaatgctcgaagagaatggcattttgataaataatgtaacgaagaattgctagtattcataatgcacaaaagtgtttgcataccttgacatctctgctttagtgaaacatctgagagggtttctggacgatcagagcacaagaacaaatgacgaacagtatttggcaaaaactcaatgtaattgtgaccctcagctatagtaaaacattcttttccaataacagaaacagcaacatcatgcatgagatcatggatgctacatatagttcggtaactatgtccactttcatccttgtgtaaaggtacctccttgacatcctgaaagaatgaccttgaagcaagctcattgaaaatctgcttgccttttgtttctgggcgaattgcttcttcagatgggataaaatcattcgccatccagagcaatatcagcatttccacatcaatcacatagtttttgggaaagatcgcacaaaaagcaaaacattgcttcatgtatgatggcagatcatcatagctgagcttcagtataggtaaaattccattctcgtcatcacagatgctacttttggttaatacggccctccattcttctacagctttccgtgtgcttaacattgaacccaaggcttttgcagctaaaggggacccgtgacatctgtccataatctcccagccaatttgaaccagctcatcaggtttctgctcatcaaaacggaatgctcttttttcaaaaattgcaagcaaatcctctttttccattcttaccaattgatgggctttagttgttcccattagctgagctaccccttgatcacgtgttgtcatcaatatggcactcccaacaccaccatattgttgaaggcaatattttagcttcgcccacttatcggcatcgcaattccatacatcatccaaaataaggaggtacctctttccacggacttcctgctggagcttctctagtgcattttcgcattctttctcaattgacatgctgatcttgttagcaatgcttgtaacatcaaaatcatccaagacacacacccacttccgtagctggaaatgcttttggatctcaggatcgttgtaaattatctgagcaaaagtggtcttgcccaaaccacccattccaatgattggaaggaccatgagattcctgttgctggcatcggtaagcagcaaattaacaatatgctgcttctctttctctctgctgacaatattctcagagtcaatgatgattgaatctgtctgtctccactgcttggaggttggcatttgtggtctatacctgaacccaaaggcattcatatcagcaacaaggtcctcaatagaactgacaattttacgcagcttcttgctcatcctgtaacggaacactagaggattgttagcaaggactatactagtgctgagatttccatgatttcccctcctcttagcttcacgacgaagggcttcatacttgaactcatcaaatatgtcattagctttgtaagcaacagccttgagtgctttgagccaagcacttaccccaggacggtgagttccttgctcctcagcatcaatgatgacatccaatatggccggcagtttgcgctccagaattgtgagctgctcctccataccatccagctcttggtactgttgcaacaggtaattggagacctgccgattgaccaaggcgatgagaggcccaagcagcatgctcgtagccat

SEQ ID NO: 87935 - DNA, 372 bp, Oryza sativa
  unsure (1)..(372): unsure at all n locations
  Clone ID: PAT_MRT4530_86835C.1
attccctttcggccgacgcntgcgcccactcgtcctcccacgcgtcccaggacatcaaggccatcaacgtgctgctccaccccaacgggaacggcctnctctgcgacttgcggctctggcnccgctctaccactcactcaccgaccctcacacaacgcacctcgtgggcaccatgggctacctggcgccttagctctcgcacacccgcaatgcttccaaagcgtccccaatctctcacgctccgggccttcattctcgatgtctcctcctgtcccaatcccgttccccatgaccctcgctcactccgcctcgttctcgtccactgggtccttcatcaacccggcaccgagccgatcaccgacactgtggacc

SEQ ID NO: 87936 - DNA, 263 bp, Oryza sativa
  Clone ID: PAT_MRT4530_86836C.1
ccgaccgaaacttggaatctctctaaagggcccgcccttttttttttttttttggaatcagcagtcagtggctagccaaaataaaacttacgcccttacacccatgcatggaaaaatcgcccatgcatcctaatgtaactggattcgcacattttttccattgttagattgcaataccaatcccgccgacacgaaaaagggtacagaaccatcgccctcgggtcatggatgggaaagctagttaaaaatgggaacgacatacc

SEQ ID NO: 87937 - DNA, 456 bp, Oryza sativa
  Clone ID: PAT_MRT4530_86837C.1
gtgtgacaacaaatgtatatacagataccccattcgaaccggaagctatggggctacttttgttagaacaccggacacacataccgcgcatggaagcttcgcgtgatatcatgcactaccaaagacacagcaccaggatgcgtggttggaattacacagatgaggcaggacctttaccctggcgcacatggcaaacaaattgggcttgatgggagcacactgcacagggtgactctggttctgaagatccagtattattaacccaacttgaccgccttgaatgtgggccagctcgctctttcatgagagcagatggaaggtcgaacgtgctcagagctggggatgcatgcgatagtttaccctctttgtcatccaaaaagcccttgagacctgctaccaagtccctgatatcagctgctgtgctcagttcattccaaggcaccggcttactgccca

SEQ ID NO: 87938 - DNA, 434 bp, Oryza sativa
  Clone ID: PAT_MRT4530_86838C.1
gaccggttcgatggccggtccagctttttgcactatgttcacgaggctgtgttccggatggaaggatgggaattaagtttgatctactaagtcgtgcttagaaccataatctctagcctgcttcttgattgccaataagggtttcatcggggtttaagcagatgagttatctggacgttgcatcggcttacaaggattgcatccgattggtttatactggattatattgctatattgtattatcatcagccgattgccttcatatcattatatacattggacatatagccgatagctcaaaatcctattgctatcggctggatcaaactgactggcacgcccgcatctcaccaacctttggacctgcactggagctaagtagatctcctaggccagtgtgtgtttttcgcatcaacaataccgtttagcagttt

SEQ ID NO: 87939 - DNA, 462 bp, Oryza sativa
  unsure (1)..(462): unsure at all n locations
  Clone ID: PAT_MRT4530_86839C.1
aagatatatgcatgtatcgatttatttaaccaagttgagcattgtcctttgtgttgttgagatttacagatctcaatgtaagttctatgaagcatataaacgagtacatgccatctgcaaaggggaatatttatccgtatgcagaagttgcggagtttgttccctagatcacatggtagtgctaatttatttttaaaagtacagattgctgaaattagacgtgatatcctcttcatagtatacgccatcctccttcacatcaaaggtgtgtgaaaaatatgctctgttatgggttatgtcttatgtgaataagagtgggtacttaggttacatatcatatattcaatagtcaatggtgggcaatagctgcctcttattttcggtaactactgtctcctaaactggaaatgatattctatatcttgctacccatgttgagnaggtaggttttatcncctttag

SEQ ID NO: 87940 - DNA, 192 bp, Oryza sativa
  Clone ID: PAT_MRT4530_8683C.1
cgggctcgggttcacggtggaccgggtgcacagcggcggtctacggaacggacggccgagatctactcgatccaaaacgaacggccgaggtcgacttgatctaccgccggactggttgctcgcaaccgaggaggtcgtggagcacgagggagagccacacacagaggaggcgtacgaagcctacctacgctg

SEQ ID NO: 87941 - DNA, 316 bp, Oryza sativa
  Clone ID: PAT_MRT4530_86840C.1
gacacaactactcttgacttttttctttctttttctccccctaaataccgccttacatccagggttgggatccaaacttaattcctttcccatcacatcaatctgtcatacacacacaatttttcattcacatcccctccaatttcaaccaaaatccaaactttgcgctgaactaaacacaagatactttagaacgtctggcacctcgctcgttaccggcacgacctgcttgctttactctcagaaagatatctgagtgtcttgcccggtgattgcccatgcccccccccgcatcccaagtaccccgaactgatcc

SEQ ID NO: 87942 - DNA, 497 bp, Oryza sativa
  Clone ID: PAT_MRT4530_86841C.1
ttttttttttttttttttttatgacaaagtattactgttgtgttttttttttttttcgcaattttagaacgaagtaacacatgcattctccttgattgacaagttccacataacgaaagcacgtaaaacaacagaacgaataacttacagctatcatgcattcccccaaaaagagagtaaaacatcggacatgtaaaaacgcaaaactaagaaataacagggcgatctcgtgctgcatcccagctaccactccagcgacgacctacatatatcttgtatcatgcttgcttaattccgcagcatagataaaatatttaactcctacaaacatgagcttgcgtattggttcgattctgacgcgatcccatccccattcttgcaatgcagccattcatggatctatcagtcaccactcaccagtactgctagctgtggtactgcttcttctatgctggtagcactggctatatcttgatcaactctacagaaaatgccgg

SEQ ID NO: 87943 - DNA, 1106 bp, Oryza sativa
  Clone ID: PAT_MRT4530_86842C.1
atggcgcggcctcggccgcccggcctcatcgccgtcgctgccgccgccgccctcgtcgcctggtgtctttgcgggcctgcctccgccgccgccgccgccggtgccgccgcagctggaacgtcggcctctggcggcggcggcggcgcggcggcgaagcgaggggggagacgggacgagcacgggcggctggtgttcgtccaggagagccggaagcggttcgagatcgaggacctgctgcgtgcgtcggcggaggtgctcggcagcggcaacttcgggtcgtcgtacaaggcgacgctccaggagcgccccgccgtggtggtgaagcggttcaaggacatgaacggcgtcgggcgcgaggacttctccgaacacatgcgccgcctaggccgcctctcccaccccaacctcctccccgtcgtcgcctacctctacaagaaagacgagaagctcctcatcaccgactacatcaccaatggcagcctcgcccatttcctccacgggaatcggggatcggagttggattgggggaagaggctgaggataatcagggggacggcgagggggttggggcacctgtacgacgagctgccgatgctgacggtgccgcacggccacctcaagtcgtcgaacgtgctgctcgacggcgacatggaggcggtgctgtcggactacgcgctggtgccggtggtcacggcgagcgcggcggcgcaggtgatggtggcgtacaaggcgccggagtgcgtcgcggcggcggcggccggcaagccgtcgaagaagagcgacgtgtggagcctcgggatcctcatcctcgaggtgctcaccggcaagttcccggcgaactacctccgccaggggcggcaggacaacgccgacctcgccggctgggtcagctccgtcgtcagcgaggagcgcaccggcgaggtgttcgacaaggacatggccgccgccggcgccggcgccgaggacgacatgctcaagctgctccacgtcggcctcggctgctgcgacgccgacgtcgaccagaggtgggagctcaagacggcgatcgcgcgcatcgaggagatcagggttccggaccccacccccacccccgccgccgccgctga

SEQ ID NO: 87944 - DNA, 664 bp, Oryza sativa
  unsure (1)..(664): unsure at all n locations
  Clone ID: PAT_MRT4530_86843C.1
gaacaaaccaaacatttatgttcgcacaaggctaaaagccgaaatcttgtgccaatctgaacaagtgaagaaatgaaatgacaacaaactgtaacgatttacaattaagagatatacccccagtttccagtaccccaccatatagtgtcagtaggcacctggaaatacaggcatctccatgacattttaagtatccttccaagaaacctaataaacagaacttcattattccaacacactttggtcctgactaaaatagattaagaccagactagtgtttacttgacgctaggcaccttccacaccagtaaaacgacagacaggaaggccctagtacctgtacaaccactgctgctaagcccactaatcttggacgtcttcttcgctggggaatatgaatgttaaaaactaaattttgcccccaacgagttggctagttcatcacagcatagtgttacaacagtgtacgtacatatgcatatcaggtgggtgctatataaatgacccacagaaaggggagatcgttggtctacgagattaatctgaaacctaaagtcacaatctgaagaaggctagttnttccctgagcaaatggaactttcttccaagctcacatcttatgaagggcatgcatgtctccagatatatatgaattgccatctgc

SEQ ID NO: 87945 - DNA, 398 bp, Oryza sativa
  Clone ID: PAT_MRT4530_86844C.1
ggaaaagacaatccttaaaaacccatttttttttaagccccttgctgtcaaattacaatagggcctaaacccccttttaggatacaggctaagggaaaacttttttgggccaaaaaaattgaatggccttaatagcctagtccaaatatttttattttacgcccacaacaaacacatacttgggctgggcagccccccggctttgggaaggaaatccttacaactggaaccttggaaaaattttactacccatccctcgaatgcttgggcatatgtccttgattcggcaaaggggcttttaatttaaaatagcctttaaacaccctttatccaaacccccttttggagcaagctacatgccctgaaagctttcacctaaattccccaaaagggaaaag

SEQ ID NO: 87946 - DNA, 1320 bp, Oryza sativa
  Clone ID: PAT_MRT4530_86845C.1
ctcctttcctccctctcgaggcccaggtgttcgtccgtgtcctcttctccactccacacacgcacacgcacaagccaagcagcaagcagcggcgccgatgagaggaggagtagctgggcccaccgccggcgagccgccggggacggaggcggaggcggaggaggtggaggagagctcagctggggacgacgaggagctggagctcgggctcagccttggctccaagaaacagcagcagcagcagcatgcgccgtgccgaatcctgacggccagggacctgcagccggcggcggcgctgtcaccggactcctccgtgtcgtcgtcatcccccgcggcggcggcggcggcgggggggaagagggctgagggccccaccgccaccacctcgcctgggacggttgcttccggccatccacacagctttggagtggtgggatggccaccgatccgacagttcaggatgaacagcctgttcaatcaggctaaagaaaacacatctgaaaccgacaccaagaagaccgccaccaatgaatctgatgtgcagaaggacaaggaggagggcgaaaagaaaggacgggttgctggatgggtgaaggtgaacatggatggagaggtcattggaaggaaggtggatctcaatgcgcaccgctcatacaagacccttgcattagcccttgaactcatgttcacgaagccgtccattggcctttgcgcttctcataatacaaactcgctgaaactactagacaactctgccgaataccagctcacctacgaggacagggatggtgactggatgctcgttggagatgttccttgggaaatgtttgtcagctctgtgaagaggttgaggatcatgaggacatcagatgcgaatggtcttggtcagcgataccagggaattcacagaaccattgcttcaacaagaggcagatcctgagagcgtgtgacaaggaaaagagctataccgctggtgaagcttggagcgtgcttgatggttaattacttgtccagttaaaatagcagaaggctagtaagaaagagccacagggctcacccggttctgttatatttttgcctttgtggtgcctgtttttgtttgcactgtcgatctgcaagagcatatggtcgccttgctctgcttgcatgtacaagtatgtctttctagtagtttttatggtgtttgatgatgatccttgtgcctacctgattactactgactcttgcacagcctcacaaatctctatgaattagccctggagtttcattgattaaaaaaaaaaaaaaattcctaatatgtgtgatggactagttctctcc

SEQ ID NO: 87947 - DNA, 687 bp, Oryza sativa
  Clone ID: PAT_MRT4530_86846C.1
atggccggcgatgacgccgatcgcaaccgccccggccgtggtcgagagtctcagcccggcggcgccacctcgtcgtcgtccccgccgggctccaacttcgatggcctcgccgcgaccacgaccggcggcgcctccaccggcgacagcagcaggatcgcaagccacctcgtcgagttggaggacaccggccggaggcggagcgccgccttcgtccccagccgccacgaccccatctacgtccccatcggccgccccaatcccttgggccccatcggccatcgggaggactactactccggctccggcagcgccaccgccttcttccccagcagccgcgaccccgtccatgtccccatcggccgcgacaccgccttacccccaatcggccatccttcccagggccgcgtcaagtcgggatcgtcatccgcctccgccggcgacgacatgatcaactcctcctccgccgccgtcagccactcaaccggcgccggtggcggtttctcctcgcgacacgcccctgcttccgacgaggcgaagaagcagcagcgtgtgatggcaataaggcggcagcagcagctacagcttgcgatggaaatctggcggcagcagcagcagcagttagcggcggcaatgtggcagcagcagcagcaggaagatgagtgttctggcagcagctgcgtgcgatga

SEQ ID NO: 87948 - DNA, 279 bp, Oryza sativa
  Clone ID: PAT_MRT4530_86847C.1
atgcagaacaacagaacctggaatgccaggttttgggtgttcaccctcatgttcttcctgctgccttgcatggagctgcaggaaactcctgaaaaatatctcagtttaccagtgcttccgacatctcaacaaggtgctcacgccaatatttccgttccagactttcaagttccgaacatatctgacatggacttcccaccaggtactgtagccagtaatccaggacctgtatcaaggggaataactggaacatacagatctccagaactacagaagtga

SEQ ID NO: 87949 - DNA, 189 bp, Oryza sativa
  Clone ID: PAT_MRT4530_86848C.1
atggaagtcggaggaattccggagttatcgtggttgctgcgtatcccacacgagaaccttgactgtggctttcaaggtgatgatcctcagacgtacagtacaggtcgatcacttggagttgagtcgtacccgtccatcgacgtcttcgcagttacaccattaattgctctgtcgcaattggacctctaa

SEQ ID NO: 87950 - DNA, 1155 bp, Oryza sativa
  Clone ID: PAT_MRT4530_86849C.1
atggggatggtaagagacaagggtttgaatgatgctgaaatgagacccccatcggcgccgccgctcccggcctccgcgccgcccaccgcccgccgccaacgcccctaccctccactggatctggggagggaaggaaggggaagggaggggagccggatcccgcgcggggggagggtggccggctgccggatccgtgcggggacagccgccgcccgcggatcccacgcctccactgccgccgcgtggaagaggccgtcgcgcgccgccgtcgctgtcgccgctcccggcttccgtgctgcccgcctcctgtcggcctccgcgccacgcgtcgtcgtcaccgtgttgcttcaagctcctccaccacaagcttcagtcgctcgccgcggcgacgggaggagaagacgacgcggcggcgttcggggtctcctgccgcgtggccttctccacggcgtcgcctccaaggacctccaagtcgaccccaactcctccctttccgtccgcatcttcctccccacctcgccaccgcacccgcacagcctagggctccgcccgtgccgcgccagcaagccaccgcccaccaccaccatcgccagccgccaggtccctcctcttctgccggctggatggagggagggggcgaggggagacgccgccggccgccccgcgccggcgtcgttgccggcgtccccgccgggctcccccctccctccttcgggcacaatccgggagggagggggccaggggagacgccgtcggttgcgcgcccctggccgtcctcggcgcattgtctttgccgtcgccgtcggagatgagatgcgcgggtatcctttcggcatagcgcagctcacgcgcaggttccgttcccgtcttgtgctcgggccccgttcccccgcgtcgtcctcgcggtttctcgcgtcccgcgatctcccgcggcgcacggtgtccctggcgttcgcccctgcgtttcgtgcggtgtcgttcggtatcgtctctccgtccccgttctctttgtcgttcggtccccgtcttctccgccccctttcctcttcatgtgtgctcttctccgtttactccgtctacatcgatgtttcctggcgcgcggcgtccctccctcgttcccgcggtactgcctcccgcgacctatttttcttccgc

SEQ ID NO: 87951 - DNA, 4863 bp, Oryza sativa
  Clone ID: PAT_MRT4530_8684C.1
atgtccagtaaacttatatttcaactataccatggtcaaggaaacgtccgttatgggccaactggggtagatctgtcagaatttattgtaacagcaaggggaattgataggccagccgagaggagtgtaccttctataaaaaaatggttgatgcggggcttgagagttgatccacagactagtgacattacaatctatgttgtagtaagtcgggcaacagagggtttttattgggaactaatgccggttcaaaactctgggatgtggagatggtatgtggagaatgcattgcaacgtgggtggcctctagctatggttccgtatgttcatccgaaggatccaagtgtacagatgaacatggatgatggcgaggggccaagtgcagaagtgaatgagattgaagtggatcaggtcaacgcaccagaggaagatggagtagctccagtagtagctccagtaggcatgcaacctggtggagtggctgacgagggggagactgtgggtgccattgtggacgaaatggaaaaagaggatagtgacaacgagcgtgtcgaggaagatgattcgtcagatgatgacgagaacaatattaatccagctgaatgggctagtgatgatttttctggtttggtcatctctgaaggggaaaatgtgagatgggagtacaaggaaaacgagattatcgagggagcgaggtatggtaatggagaagacatgaaggaggcggtgaagcattatgcagtgtcacttcatagggagttttgggttgccaagtctaaccggacacaatatgaagttaggtgtgttaatgaaaaagatgggtgtccgtggagagtgcacgcctataaggggaaatggaaggactactggacagtgtcggtcgttacgaaacatacttgttatctacctggtgttcaaaaataccacaggaacattacatgtgcatttgttgcatctgagatgtatgcgcatgtcgtggacaatctggcatatgaaccgaagtcaataatccgacatatcgaacagactttcaagtatacaattagctatgccaaggcgtggagggccaaacagaaaataatagagatgagatttggaacttatgaagcctcatatgacaatttgccacgtctgctatctgttatccaacaaagaaaccctgggacctcttgtgcactcaagacattcccctcaattgaacatcctggcaagactgtgctgcaaagagcgttcttagctctacatgcatgcaagatggcattcgtgcactgtcgtccagttctttgtattgatggcacatttttgaccgggaagtatcggggccagatactaacggcaattggggtagatgggaacaatcaggtattgccgttggcatttgcttttgtcgagagcgagaacaccgacagctggtactggttcctccatctggttaagacagaagttgttggtatgaggcccaatgtgtgtctaatacatgacaggcacgccggtatgcttcgagcgatagaagagttaaagtttgggactatggaaagaggataccctggccagtgggaagatgtacaaagcaggtggtgcatgcgtcatatgggagctaatttcttcaagcaatttaagaacaaggagttgatgaacatgttcaagaggctatgcaatcagaaccaggagaaaaaattcaatgagctttggaagagattagatgagttgacaggcaaatgtagtgaccagcgtgcaacaagaccagcggccgctgtacctgaccctcctcaagcactcggagctctcccaacagacagtgtaacattggttagaagaactggggagcaaattcgaaaattttctcagtggattgagaatgagccaaaagagaaatgggctaagacttatgacacaggtggtgctagatatggtataatgacaacaaatttggcggaagtttacaactgggtgatgcgcggtgtccgtggactcccactagttggtatagtggagttcattttacatgggacatgcaagtatttcagggagcggttccaagcagtttttccctctatgccgaacaacaacattttatttggaactttcatggagaaaaaactagcggagtggcgtgcaaaggccatgaaacatcgagctctagtgcaaggtacccaacaacacaggtttgaggtcctctgccaagacaaggcaggcaggggtatctaccgcaagagagtaaagcaggagtgcgttctcaaagacgacggcacatgtcactgctcctgtagaaagccgacgctgctccacaggccatgcacccatgtcatttccgcggcatctgagtgtggcatccaagatgcagtatatgtgtcacaatacttctccaagcaagcaatatatcacacatggagtggcgagatttttggcttcggtgtagctggggagttcacaaagattaacgatctgataatctatattcctgacccaacgaaactccgagacaaggcgggacggaggaagactcggcgcatccgcaacgatatggatgagtcggaggcaggcagggtgaagcggtgcagcaaatgcgatgaacgtggccacacctacaagtattgtcctaaagacaaggaaaaaccaagtgcggcggaggcagagatggcacatcctgagttgttggatccggcgatagatcagcgccaccggtcgtaccttactgcggtggagggggctcagcttgggacgttccgtccacggtcgtcacgtgagcgacttttggttcacgactccttcgtcgagaggttgcgtgaggccggtctcttaccgttggctcggctagttgaggccgcgaccggcgacgacgacgtgacgagacgttgggacccggacaggtccctcctagcagcgttggtcgaccggtggaggccggagacgcacacttttcacctgccgtgcggtgaggtagcccctaccctgcaggatgtctcttacttgttggggctaccgctcgcgggagacgctgtcgggccagttgacatgggtgtcgactggaaggacgagctgacggcacgtttcgcacccgtgcagcgcctaccaggtctaccgctcgagccgttgcagcagcaccgcaacaccgggcctacgaagaggtggctgcttcagttcactgttgaccagctaccggaggaggccgacgagtactccttcagccgttgtttggaggcgtacttgttgtggctttttgggtgggtgatgttctgtggtagtcacggacactcggtcgaccggggtctcgtgcactacgccaggagcatcgccgacgccgcggtcggtgaggtgcctcagtggagttggggctccgcgttgctggcggctcagtaccgtggcctctgcgaggcttgtaccaggacggaccctggcgcgatcttcggtgggtgccctctcttcatttctctttgggcggctgagaggattgcgatcggccgcccccttgtggagcaccacccttacgacgcgtcgctgtacgagaacagaccggcggtcgactacccaacgatgggtactctgtggtgccggcgtcagcgccgatgggctcacgtgcaggttaggcggtcgtacgcggagtttgtgatggagttcgaccgccttctgccgacggacgtagtgtgggagccctacagtgccttgcttacccacagtcgggcgccgctaggcctgtccacactctgcacgagggaccaggcgtactggatgactacggttccgatggtgttcgacatctgtgtcgagccgcacgcaccttaccgcgtgatgcggcagttcggcttccgtcagtcctttccagtcccgtttccggcgggcgtcacggctgccgttcaccggtactcgcgcaagggtcagcactcagctggtcactggcctgccaagttggggccttttctcgacgactggttgcttgctaccgaggaggtcgtggaccacgcgggagagccacacacggaggaggggtatgaggcgtacctacgttggtatcagccacgcacccgtactagagtcacctacgctccgacggagcaacaggcccacgccgcgagcgccagagacctctacgccaggcaccgcgaccaggacttcgctcgtgcggccgttgagtgcaacagggtcgtcgttgatgctacaacggcgatccaacggttaggcgcggggattgaggtgggggcagacgagcacctgtcgacgtacacgcggatacgggactcgatgcgctcggttctccgtgcgctgacctgtcgtgctgccgacgttgctcaggcagacgcagcaccacaggtgcgtccccgaccgactgctcctcgtccagctgcgcacgttcctaggccgacaccccctcccttcggaggcttcgctcagcctaggacgacgccgggcgcccactcctggcaggctgcggggtcatcgtcacaggcaggtgtgtcggcctcgctgtctacacagttttggcaggacgccgggagttcgtcacagccgggcggcacgtctgttgcgtcggcctcgctggctgcgcagttctggcaggacgccgggacttcgtcacagccgcccggcacgtcttggcagggtcctaccgggacttcgtccgagcacgggtgggcttccgccacgcacttcgaccttagtgacttcgacttcccggacattatcggtccctcacagcttggaggcgcaccgccggtgcacacgcaggagcagtcgccctccaccccactcccagaccctcgcgctacccgtgctgtcccaccggatcgcttcacgtactcccaggaccacgtgcgagcacaggcccggaggaccaagcggggtcgcggcgcgagtcacggccagtag

SEQ ID NO: 87952 - DNA, 507 bp, Oryza sativa
  Clone ID: PAT_MRT4530_86850C.1
tcagcaaagagatggggattgcagcttgaaatgcctcacctggaccccgaggatctcagcgccggcggcgaggaatagcgtcatcctactggtgaggttgaacggcgcggtcagccacctcccggcgggcacgacgagcctcccgccgcctctctccgcgatggacgccaccgccgccacgaacgcctcggtgttgagcgtccgcccgtccccgacgcccccgaactccctcagatcgtagaccggcggcgcggccacccatggccattccatgtcggtctgaaggtctgactcgtagtcgacaacagggtagtctttctcctcgaatctgtgcccggcgagatcagagatagcgcttttgtatctcttgacggtatccggagacaccgtaggggaatagccatgcctatccctgaagtcgatatccggcggcgtgtcttggcgtatgtaggcttgtatgttgtggcttctagtgggcgtgtgttgattgtcatgggtgtcttccat

SEQ ID NO: 87953 - DNA, 207 bp, Oryza sativa
  Clone ID: PAT_MRT4530_86851C.1
ctgcacgcgcacgcaacctaggaccctatactttggattgccctccctttttttttttttatcaaaacaacagttgactcatatgtgctctccatcacatacactacaccacatatatctggtgtcaattgcaacatcctattaacatccagccataatcttgcgacctggcatgtaaacaaaatggcataaaccaaagaacctaat

SEQ ID NO: 87954 - DNA, 564 bp, Oryza sativa
  Clone ID: PAT_MRT4530_86852C.1
atggtgcccgggcaccatgcgacggcgccgaccggaagggcggcggggcttggcgctcgctggcgcaccaccctcctctccctccccccgaaaaacggcgagcaccagcgcgcgggagtggcagaggagctcggtgtcagacgagttggcggcggtcgatctggacggcgtcgggcggcgaggcggtcgagcggcagcccgagctccttcgctcgagctgggacggcgccgggtggcgggggacgacacgcgggagctcgatggtggacggtgtgcgggagctcgacggcggatctggcctcctcttccttcggcaccaacagcgaggttaggtgccgccgccattttcctccggcgctgccatcttccttctcctcgccgcagcctcttcttcctccggcaccgccatcttccttctaccgtcgccgccctgtcgagttcgccagatcaggcctcgagttcgccagatctggcgagtggcacttctttgggggctcggcgtggtttgctcggggtggtgaccttgccggcgaccgagaggaggagaacgctggcgacgcgtga

SEQ ID NO: 87955 - DNA, 209 bp, Oryza sativa
  Clone ID: PAT_MRT4530_86853C.1
actaaacacacttgtttgtggtgatgcttgttgctgttcttgcgtttggctctttctttgttggaagcatttgcaccaagggaattttgatgctacttgtcaatctctctcctctctctctctctcacacacacagacacacacaatcaatcaagtagtatctatcagtggctaatactactcccacgtctcattataaatgcaactat

SEQ ID NO: 87956 - DNA, 249 bp, Oryza sativa
  Clone ID: PAT_MRT4530_86854C.1
atggcagaagacttcggcgccttcatggagagcttcgacatcgccggccgcgtcaccgggttcggcaacccggactgggcgaggacccacgcgcccgccggcgccacctcccccgtcgtcctcgccgcgctcgccgccggcgccaccagcctcggcaccaccatcatggacgagatggcatacaggttggtttgccagagatctatctacgttgtctcgtgtaaccaaagtgttgttgccacttcctga

SEQ ID NO: 87957 - DNA, 439 bp, Oryza sativa
  Clone ID: PAT_MRT4530_86855C.1
ctacatgtgggctgacgatctccctgcaggggggactacctttgagtccctcgaggctatcgatggaaaggacaagcttgtggcatagacttcctgctcactcatgcacacgcggtgcgtatcttgtacataagaccaagctcgatagcaagattaagtcatggcgtcggttgcgttgcccaaaaggtgcttgaagtgaatgcccttgctaaggcaccgactgcacagaatgatgaggcttactttgcaccaaacgctgctgctcaagcctccatgaggtcatcacctcgggtgacaaacgaggaagtgcaaaatgctgctgcagctctgtaggggtctgaccaccgccgtgctaccaatgttagcgctagactggacgcacagtatatgaagctgaaccttgcagtccttcctacaaccacaattggctcattcccac

SEQ ID NO: 87958 - DNA, 459 bp, Oryza sativa
  Clone ID: PAT_MRT4530_86856C.1
atggcgaggaggagggtatccgcaggagctgcgtccacacctattcaccaaatcggtatccagggcagaacaaccaaggcggtggctcaaaggggaggggagggaggtgccggccgggctcggctcggcctcaaggccgactggccggttatggcgagggcggcggcggcgagcggtcgccggcgatggcaaccggcggcgcgggtggcagcggcgtcggccgaaggcgacggcgcacgggcgaagcagcggcgcggcccggcgctaggggggagagggaggagaaacgagcaggagggagcgcctcaccgtgagttggccggagtggggaaagacgacggcgaacaccggcggcaagcggcggacggcggggtgcgcgggatggacgaggcggccctcggacccacgaggccaacggcggcaacaaagcggcgcggcaatggcactatcgacggctag

SEQ ID NO: 87959 - DNA, 1227 bp, Oryza sativa
  Clone ID: PAT_MRT4530_86857C.1
ttacggtcccgggccgtacgggacgcactccggcgcgcccggagctcttgagtcccatccgccctcggggcgcttcccgcctcgccttgccgcgtcggcggcggcggcgctggcgacgtccgcggggctgctcctcatttgcgggcctgatatccggcacgggcgggggaggcggcgagggtggtgcggctgctgagggcggtgtaccacccgcggaaccgctacctgctccacctcgacgccgccgcgggggccgaggagcgcgccgagctcgcggccgccgtgcgcggggtgagggcgtggcgggagcgcgccaacgtcgacgtcgtcggcgagggctacgccgtggaccgcgcggggccgtccgcgctcgccgccgcgctccacggcgccgccgtgctgctcagggtcgccgccgactgggactggttcgtcacgctcagctcctccgattaccctctcgtcacgcaggatgatctgctttatgcattttcttctgtaccaagggacctcaactttattgatcacacaagtgatcttggatggaaagagcatgaaagatttgaaaagctgattgttgacccaagtttatatatggacagaaacagtgagatccttcctgcaacagaaccaagacaaatgcctgatgcattcaagatattcacagtaaactacaaatttctgttgagaacacagtctgttctaaaacatgaaaggaggacaaacaatgatgatggttctccatgggtaattctaagtaggaacttcaccgaacactgtgttcatggttgggataaccttccccgcaaactactgatgtacttcgccaacacagcttactccatggaatcttacttccagactgttatttgcaattcttccaagttcagaaacacaactgtcaacggggacctacgatactttgtgtgggatgatcctccagggcttgagccacttgtacttgatgaatcacattttgatgacatggtaaacagtagtgcagccttcgcaaggcggttcgtggatgattctccggtcctgaagaagattgacaaggagatactaaaccgttcttcggccgtctgtgcaagcttcagcagaagacgggggatggatgtggactcgtgctcaaaatggggtgacgttaatgttcttcaaccagcacgtgctggagagcagcttaggcgcttcatttctgagatcagtcagacaagaggatgcagctag

SEQ ID NO: 87960 - DNA, 826 bp, Oryza sativa
  Clone ID: PAT_MRT4530_86858C.1
actttttgttgctccggtgcaatatatgattaggaaatggtcagaaaatgtgaagtgcactgctccaactgaatgcacttctttgattactcgcatagcaaaggggcttggggttctttctcatgatcagatagcttacatttcagcccatcgtacctatgttgatgaatcttacttagtgcaaggtcacatacttaagcatggagtagatggctctctcatattctttttcccaggttgtacaaatgaaatcccattacccaatccagggtatcatttgtacaactgtcttgagctaaccattcccctatagacgttagaggaatttcgtctaggtacgatgcatagggagccatgtaacatggcaagagaagagcatgaaggatcaacgtcctcaccaccagtgcagatgtacgaggctaactgggaaccaaccggagacgctcccggatggacccaagtaccacactacaatgccggaggttcagcctggtagagtgctagtgaacaccggtggcaagtgtctcaagacacatcgtatgggaactcccgttcttccagcaccagtggcatgctgcgaatctccaagatgtggcgcttcaattcctctcgaggggtcttgggagagctcactaggagaatggacgcactggagttgcaggcgggagaaatctagcacaacctcgaaggacacatggcccaaacgcaagaatggcagcgaaatgctgatgttcaattcgccaacatcaacaatttgatgcagcgacagcaagttgacctgcaggcatactttcgcttccaaggattcaacccctattagggaccc

SEQ ID NO: 87961 - DNA, 330 bp, Oryza sativa
  Clone ID: PAT_MRT4530_86859C.1
atggcggcggcgacgacgctggcgcgaccgaggatgtcgagggcgaggcggcgagcgggcgcaagcaagggggaggatagtgcaaggcgtgaggcgagcgcagcggcatcgtgggatgcagaggcagcggtggctgcggcgtgggatgcggcggcggtgacggcggcgcgggacatcgaggcggcgtggcgggagacgagctcgcgcgtgagcacgtacgaccagagcaccgggaggcaggacgagcggctcatgggtggggagtcggcgtccgtggtggccgcggcggcggcggcggtgaggaggactggagggtggttgctgtggtga

SEQ ID NO: 87962 - DNA, 2204 bp, Oryza sativa
  Clone ID: PAT_MRT4530_8685C.1
atgggagctaatttcttcaagcaatttaagaacaaggagttgatgaacatgttcaagaggctatgcaatcagaaccaggagaaaaaattcaatgagctttggaagagattagatgagttgacaggcaaatgtagtgaccagcgtgcaacaagaccagcggccgctgtacctgaccctcctcaagcactcggagctctcccaacagacagtgtaacattggttagaagaactggggagcaaattcgaaaattttctcagtggattgagaatgagccaaaagagaaatgggctaagacttatgacacaggtggtgctagatatggtataatgacaacaaatttggcggaagtttacaactgggtgatgcgcggtgtccgtggactcccactagttggtatagtggagttcattttacatgggacatgcaagtatttcagggagcggttccaagcagtttttccctctatgccgaacaacaacattttatttggaactttcatggagaaaaaactagcggagtggcgtgcaaaggccatgaaacatcgagctctagtgcaaggtacccaacaacacaggtttgaggtactctgccaagacaaggcaggcaggggtatctaccgcaagagagtaaagcaggagtgcgttctcaaagacgacggcacatgtcactgctcctgtagaaagccgacgctgctccacaggccatgcacccatgtcatttccgcggcatctgagtgtggcatccaagatgcagtatatgtgtcacaatacttctccaagcaagcaatatatcacacatggagtggcgagatttttggcttcggtgtagctggggagttcacaaatattaacgatctgataatctatattcctgacccaacgaaactccgagacaaggcgggacggaggaagactcggcgcatccgcaacgatatggatgagtcggaggcaggcagggtgaagcggtgcagcaaatgcgatgaacgtggccacacctacaagtattgtcctaaagacaaggaaaaaccaagtgcggcggaggcaggtctatcaggatcagcagcagatggagctcgccctacgggtgaaggcactacttcaaggcgaccccgtcctagacgttctcgtggaacgaccgagatggcacatcctgagttgttggatccggcgatagatcagcgccaccggtcgtaccttactgcggtggagggggctcagcttgggacgttccgtccacggtcgtcacgtgagcgacttttggttcacgactccttcgtcgagaggttgcgtgaggccggtctcttaccgttggctcggctagttgaggccgcgaccggcgacgatgacgtgacgagacgttgggacccggacaggtccctcctagcagcgttggtcgaccggtggaggccggagacgcacacttttcacctgccgtgcggtgaggtagcccctaccctgcaggatgtctcttacttgttggggctaccgctcgcgggagacgctgtcgggccagttgacatgggtgtcgactggaaggacgagctgacggcacgtttcgcacccgtgcagcgcctaccaggtctaccgctcgagccgttgcagcagcaccgcaacaccgggcctacgaagaggtggctgcttcagttcactgttgaccagctaccggaggaggccgacgagtactccttcagccgttgtttggaggcgtacttgttgtggctttttgggtgggtgatgttctgtggtagtcacggacactcggtcgaccggggtctcgtgcactacgccaggagcatcgccgacgccgcggtcggtgaggtgcctcagtggagttggggctccgcgttgctggcggctcagtaccgtggcctctgcgaggcttgtaccaggacggaccctggcgcgatcttcggtgggtgccctctcttcatttctctttgggcggctgagaggattgcgatcggccgcccccttgtggagcaccacccttacgacgcgtcgctgtacgagaacagaccggcggtcgactacccaacgatgggtactctgtggtgccggcgtcaggttaggcggtcgtacgcggagtttgtgatggagttcgaccgccttctgccgacggacgtagtgtgggagccctacagtgccttgcttacccacagtcgggcgccgctaggcctgtccacactctgcacgagggaccaagc

SEQ ID NO: 87963 - DNA, 306 bp, Oryza sativa
  Clone ID: PAT_MRT4530_86860C.1
atgcgaggtgtcgtcggcgtcgatggcggtgaggaagagttgccacttgccactgccgtggggggcgtggacggccggggcgcggggccgtggggggcgtggacggtgggggcgcggccgcgcagggccgcggggggcgaggacggccggggcgcggcggcgcgagaccgcaggggcgcggccgcgcagggccgcgaggggcgagggggcgaggacggccggggcgcggcggcgcgaggcgaggagccgaggacggccgcgagatctgtatgccgctcctccagtcctccgcccggctcgctctga

SEQ ID NO: 87964 - DNA, 608 bp, Oryza sativa
  Clone ID: PAT_MRT4530_86861C.1
aagcccacctccgtgccaagaatgttcgcgcaccgcctcgtcgacctctccactcgctgctctacctcccgcgccgcctcaccatctcggacatcacggcgcaccggtggtcgaagcgcaccgcggtggcctccgcgctcctctccccactcctcctcgccgccatcaccgcgcctcaccacagcaaccaccctccagtcctcctcaccgccgccgccgccgcggccaccacggacgccgactccccacccatgagccgctcgtcctgcctcccggtgctctggtcgtacgtgctcacgcgcgagctcgtctccctgctggtctccatcggcgtggcggccggcgtggcggctggcatgctgggcgtgacggtgctcgcgtggggcaactcgcgtcccacgctaccgccacgccgcctcgatgtcccgcgccgccgtcaccgccgccgcatcccacgccgcagccaccgctgcctctgcatcccacgatgccgctgcgctgcttcccatcccacgccgacgcgtgccgtgctctccgagagagagagagaaagagtgagagaggggaaggagagagagagtatatgggtgggccccaccatcttttaa

SEQ ID NO: 87965 - DNA, 167 bp, Oryza sativa
  Clone ID: PAT_MRT4530_86862C.1
tgaataactggggaaaatggtaactacaatatcaatttggaataaaacaaatagtcaatatcactaggtataatagcatatgaaagattgggtacaagttgatagttgcttgcatttaacattttggacactgaataatattatgccttaatatgacaaagcctgca

SEQ ID NO: 87966 - DNA, 184 bp, Oryza sativa
  unsure (1)..(184): unsure at all n locations
  Clone ID: PAT_MRT4530_86863C.1
aaaacccaggngcgcgaggcgcgggacgagagcggaccgtgcgcgggcaagaccaaggggaggtgagacagcgaaagtatttcaaaaagacgaagcaactagaagagaccggaaggagggagagaaggattcacactgaagaagcggacagctaagacaacatagcggttaaggcgcgaagcca

SEQ ID NO: 87967 - DNA, 368 bp, Oryza sativa
  Clone ID: PAT_MRT4530_86864C.1
tctagtcgcaaagtctgcaatccgaacgatgcgggggcgcgggatgcatgcggactcactgccgcgcgctcccgccatgcagcaggggagtcgtagcagcagcagcatactggaggagggtatgactggcgcggagggaggatggtgtcttgtgcggcaatggcaaccctgccggactccgcgggcggaggcagcggtggccgggcggactccgagctgatggtgccgcagttgcacctaaaggcgctgcaagccatcctcgccgagcgcgcgccgtggtcgatcgcgggcgcgcccgcgccggcggcgtttttccggaggcgggacaggtggttccacctgccgtataaagcgccgtcgtcaacgga

SEQ ID NO: 87968 - DNA, 231 bp, Oryza sativa
  Clone ID: PAT_MRT4530_86865C.1
atgcagtgccgagaggagtcgcgcaaagaaccgctctccaaaatcttgatcgcctacttacccatgcagcttcttagatggatggaggaacaaaaggtctgataccgcttccgatcccaccgccggccacccccggtctcgtcggatccgagcgggacaaggcccgcaccgtcggatctggacgggatgaggcccgccgccgccggatccgggagggacgaggcccgcgtc

SEQ ID NO: 87969 - DNA, 894 bp, Oryza sativa
  Clone ID: PAT_MRT4530_86866C.1
atgggcgacgtgggggaaggagcggcgcgcggactcctccgccgaccgccgcccacgaggcccacgaggcagaggaacagcggcgggcgatggcaccgcatcggcctcgtcggaggtgagcgcggcggccccaccctcctcgaccgcgcggcgcgcgaagagggcccccgccgcggcgtcgaagtcgggcgtggagacagcgaggtgggcggcggcgacggcggcggcagcagcggcgagggtggggatgggaacggtggcggctggcggctggcgaggaaggagcgcggcaaagaggagggcagatgtggtggcggtggcgtcaccgattcggcggggaagagggacggcgcggccgacggggaaggagaggcggagaggagaaggagcagcgaagagggtcggcgcggccgacggggaatgagcggcggggaagaggagggcagcggcagggaaaaggcagtgtcggcgggcgttcgcggtggcggagaggcagcggccgcagcagcaacaggcgagcgcggctacggatggggagcggcggcgccgacgactccgcgccgcttggcctcatcgtcggcggcggcttcgagtgggggcaccacgccaccggcttcttgtcgctcgtccgtgacgggggcgccgcgccgccggcttctcgtcagttgtccgctgggccgcggccggaacggagtggcgagcgtcgacgacgacgaggcctacgaactggtgagcggcgcggacctcttcatcggtggcgacatcgacgacgagggcgagggcgtccgtgcatacctcctccgcctcccccgccggccgcagccgcgcgccaccatcgccgacgcccgacggcagcgacttgatggcggcgtcgtcgagtcaatctccgcatga

SEQ ID NO: 87970 - DNA, 3496 bp, Oryza sativa
  unsure (1)..(3496): unsure at all n locations
  Clone ID: PAT_MRT4530_86867C.1
tttttttttttttttgagagaggaataagcctggcttaaagaattcagcaactgagcatgcgtccaaacaaatattgattacacttggtatcttcaaatgccatgtctgcattgaatcaacaagggacatatattaaaccaatgtctgaaaagcattaactaacaaagactaataaaagaagtcagggaaggaactccaagcatggttccgaaattagctactccacaagccatatatatacttctaattgttggagaagaagcagataagtattgttggacagatgaagtgtgcacatgaagaaatccaaacaaaaggttaattttttccaatgcatgatctttggtccagtcgagcttcaactccaaaccttaacttgtagatattgaatgacagcaaatccaatgagggaaccactattgataaataacacggacttcccatgaactaaccaaacatagatcccttttcaactccaacatccaccctttggcgtgtcatcttatataaaaggataatgtctgatagctggccattaggtaaaattcctcaaagtgccgagacaaagaacagcatagagacagacaatccaaatcaagataaatctatgaaacgaccagaccttatctaataacttactgcccttcctcaatttccaggtactagctttctcacagggagctcatttccaaccaaccctgtaatcaatatgcgaacaagaaaacacatgcaccgaatctagaaacaatcgatcaaaccacaaaatggtaaaccacaaaccaggcaatttaatttcctcgagaaaatttcctcgtcacatggacaaaagggagaatctgcatgcagaggaaggcacaaatgacgccaaatcaaatatgggcataagaagctacattatcaaccaaaacagaaatagaaacataagaatgcaaggagagcactaaatcgtatatagttgtaggttgtacgatctcccatgggtctcatctagcttgaagctccaaaacacaccctcgaaccctccccatccctgatgatcgaaattaagagtattcaaattctgtccttgtggggcatttaactttttaataaggagttgaagggaaaatcctggttgttcagaagatttcaatcggaattggatttgccttgcaaaatgaccaaaaatagacctgaaacaggcaaaagactatcttctatgaatctgtataggcggaagcagcttagacatcaaaaacaaattgtcatggtggaaaggagggataagcctgtttagagaggtcagaacatccaaatctgtattgattttgcagctccaatctgtactcaatctgtatgtctgcatttgaattgatggcaggcacataaaagccatgtctgaagagtaataactaaagaagtagaaagattgttaatcacagaagaaaccagtgccctgattagctccaaaatagcaactccaacaaagctagtacttccaattgctggagaaaaaacgaaaatccacataagcatcgctgagaagatgctaaaccggatggtaagtactaaaataatgagtgggtgaatttggcttaatgatctttttccagttatatgatagttgctccagtccaccgtaatatcaaaagatccatcctctactcttggatttaatctcccgatagccacccttctgcatcatctaaaacaaggacaaacacacaaaccacaaaaaaaaaactaactcaggtctcaagtctagaatccactaaaattacgagatactgcaactgatggctggccatcagggaagaccccacacagaaacgccaagccaaacgatccatatgctgaaataatccaggtaacaataatctgcgaaatcaatcagaccttgtgtgcattcagagctccaacccccagaccaacccagagactatcggataaacataggtaacaattgaaggtgataaaacacaaaccgaacaagccaacagcctccaatcaataaccttgtcaacttgggagaaaattaaggaatctgcgaccaacaaagaaagacaaaggcacaccaaaatctaagctacatgtatgaagcaattctgatgaccgaaatagaaactaaacaggaagttaagtattaggcaaactaggaaaagtatgttttggttgtagaattctccagtagtcacatctatcttgaagctccaaaattcctacgcaattccatttctgcagataaatccaagcacttaaattctacccttggtgagtacttctaatgatgaattgaataaggggatttaaagatttcactcagtgaaggctggccatgcaaaattatgaactaggacctgcagtgagcaagagaccacttattcgagaagaaattcaactttgcaagcaattaacttctgatggtaaattgaagagaaaggggtgatgatttaaaggattcactcagattggccatagaaattatgtagaaacctgcagattggccatagaaattatgcagaaacctgcagtgagcaatagattggacttaaatatatctttgtgaggtatataacttctaatgatgaattgaagagaagggtggtgatttaaagatttcactcggtgaaggttggccttgcaaaattatgagataggcctgcagcaagcaagagaacatttatttgggaagaaattcaactttgtaaatttttaacttctaacgatgaattgaagagaaaaagggtagtgagcttcactgagacgagccataacaattactcttatttagagacctacagtgagcaagagtattattttggaggaaagcagcttaagcatagaaaacatgcactaaagactgagtggcataggtataaagcctgtcttgagctcgcagaccgaggcaggtttggattgcaaattccatcttagttgtgtgctatctgcaagaactaagaattactgatgaagaacatggaaaatttgattaaggggaagattgtcgatcacagaaaaagaactgccagcggcctgtatgtatggtgattccaattcatgcagcaaataggactcgccgtgagatgcaactcccaataattctgaagaacaaccaacggcccaaatcagacttttcaaggcattaatcaaattatgctgacaacaactaaatcaaatcaaggggggttcagaatccaaacgaagcattgctattccatctgacaatctcccgtaaatctatctccaaatcacttagaaatctgcacatcttgaggatctgaccaaaggaaatccagtgaacgttgtcacgacaccacaaactttcgtgtcagaataatttcagaaccaccatgaactaatcaaaaagccatgaaccataacaatcaaacctccacctccccgattcatcataataatcaaagcaaccatgaacctggaccataataatcaaacctccaccaattcggttcatctcaacagcctcnctccctcctgcatcatctagagcagcacaaa

SEQ ID NO: 87971 - DNA, 443 bp, Oryza sativa
  Clone ID: PAT_MRT4530_86868C.1
ctcaagcggcacatcgtcaaatatgcgaccaacactatgcccacgcccatcctccttgataacaatgagaaccagccacggataaatagaacgtaaacacaggaggcgaaccttacaccaaggcattgaaatgctcaacaaattgaaggagcatgtccgtaagacctacatgttggatgactttgctttgtatgagaaccaccagacgttgatgcaggagaacatggtgtaacaacaccagatccaaaagcacgtgtactacagtcgggctctcatacttctgtcactgaagagaagcagcaggattctgctactgcgaagacgaaattaccaaatggcgtcaatggagaactgaaggttactgcagagaacgtggcagttccagcactgtactctatgcactgaatgacgaccaaacagcagcgactgaaaaggctgacctt

SEQ ID NO: 87972 - DNA, 638 bp, Oryza sativa
  unsure (1)..(638): unsure at all n locations
  Clone ID: PAT_MRT4530_86869C.1
ctgcaggaattcggcacgaggtttagtttctatttcggtcatcagaatngcttcatacatgtagcttagattttgctgtgcctttgtctttctttgttggtcgcagattccttaattttctcccaagttgacaaggttattgattggaggctgttggcttgttcggtttgtgttttatcaccttcaattgttacctatgtttatccgatagagtctgggttggtctgggggttggagctctgaatgcacacaagatgatgcagaagggtggctatcgggagattaaatccaagagtagaggatggatcttttgatattacggtggactggagcaactatcatataactggaaaaagatcattaagccaaattcacccactcattattttagtacttaccatccggtttagcatcttctcagcgatgcttatgtggattttcgttttttctccagcaattggaagtactagctttgttggagttgctattttggagctaatcagggcactgacatacagattcagtacagatttggagctgcaaaatcaatacagatttggatgttctgacctctctaaacaggtctatttttggtcattttgcaaggcaaatccaattccgattgaaatcttctgaac

SEQ ID NO: 87973 - DNA, 565 bp, Oryza sativa
  Clone ID: PAT_MRT4530_8686C.1
atggcgcctgcaagcgaccggaatggccacgaaggccgccgccgcgtgctgctgctcccgctgccataccacggccacatcaaccccatgctccgcctcgccgccgcgctgcacgaccgcggcctcgccgtcaccgtcgtccacacggagacgcgcgcgcccgaccgccggagcctccccgccgggtgcgagctggtgaccgtgccggacggcctcccgccggagctggccgcgtccggcgacatcccgtcgttcgtgttcgcgctgaacaggaactgcgcggcgccgttccgtgacctcctcgccggcgcgctccggcaggaggaggaggaggaggacggcggcggcgtcgcgtgcgtggtcgccgacgtcgactggttcgcgccgctcgccgcggcgagggagctcggcgtgccggcgctggcgctgatgaccagcagcgcggcgaggttcagggtgtacctggcgtaccctcggctgtgtgaaaagggatatttacctgtccaagaacttcctaaaaatactcccaaaccaccacgtggcactgtacaacgctaatacgccg

SEQ ID NO: 87974 - DNA, 216 bp, Oryza sativa
  Clone ID: PAT_MRT4530_86870C.1
ctgctagacctggcccgattatcggccacctcaacttccatgtatgatgggcattcagacccgaagcagtttttgatgagttatgaagcaactatatcttcatatggaggcaatgcagctgtcatggccaaatccttcgccatggcaatttggaatgtggcccaaacatggtattcttctttctggccagggaccattacttcgtgggaaaagctc

SEQ ID NO: 87975 - DNA, 1747 bp, Oryza sativa
  unsure (1)..(1747): unsure at all n locations
  Clone ID: PAT_MRT4530_86871C.1
tttttttttttttttttttctaacatgggttatttttctttaggngaggnatttgttcttgctttttttttttcaccacaattttttccccttgagttgggattcttactatgaacatactacgtccaaaccgagataaatatacacgtctaacagaatatctaaaccgagagaaatcagaaattagaaagagaattcacatcaacattgacacgggtggttttcgcgctgcaccaatcacgaagcacccaagcacgaatctcggagcgccgatgcctcaacgcatctgagaaaccgttccaagctcgccgccgacgacccggccggaccctcccacgccgccgccatcgcgcgcgcgatctcccccgccttcctcctcatcgcctcgcccttctccgtctcccccatcaccgcccccacggcctcggccacctccccactctccaccgccgagctctccaggttcccgcgcgccacctccacgcacaccccccactccaccaccaccatcgcgttgaagaactgctcggcccccaccggccacccgagcagcggcacgccgtggcggaggctctcgaggatggagttccacccgcagtgggtcaggaacgcgcccgtggacgggtgcgccaggatccgcgcctgcggcgcccacccgcgcaccaccagccccctgcctgcgcgcgccatccggtcctcgaatccggcggggagccacccgggatcgaatccgtccttggggtcgaaccccaccggcggccggacggcccagacgaacggccgcccgctcgcctccagccccagcgccagctccgccatctgacggatgctgatgctgttctgcgacccgaacgagatgtacagcaccgagcgccgcgggtgcgcgtccagccaccggatgatgctggtgtcgtcgtcgtcctgcgatttcgaaggatccggcgccgcgaggatcggcccgatcgcccatgtctggacgccgaagctcgctctgagcatgtctagcccggaggtctccagttcgggatgacccgccggaagaaggcgtccaggggtccgccccgtcgcggcgagcatgtactgcgggatctgggtgcggtggaggacgacgtcggggaagtcgggcagcagcgggaactcgtcgccgccggccgtgagggtgtgcgggaggtgctcccacacggagaagaagacggcgtggccgaaggcgcctccggggaggaacacggcgtgggacgcgccccgcgcgcgcgcgacgtcggccgtccacgcgaagaaggagtcggcgatgacgcagacggggggccggatgccagcgacgaagccatcgaaggccgggcggagggactcggaggcccggaagagggtgatgaactggtggacgtggaggtcggcgagggactcggcgccgtcgggcagaccgtggtcggcgggcgcgaaggggagcgcgtggagccggatcggaggggaggtggccgggagggagagggagccgaggaggcgtggggtggagacgagcgtgacggcgaggcccgggcggagcgtctggaggtggccggcgaggcggaggaaggccgggatgtggccgtgcgcgaggaaggggaagagcacgacgtgcgggctcctcgcctcctctccctctgccgccatggtgaggtgatgatggggacggggtgttcggtacttcggtggaagtggacgctgagagtgatgcggctcccgcgctgccactgaaaaacaaaacgct

SEQ ID NO: 87976 - DNA, 598 bp, Oryza sativa
  Clone ID: PAT_MRT4530_86872C.1
tagcacacaactaagatggaatttgcaatccaaacctgcctcggtctgcgagctcaagacaggctttatacctatgccactcagtctttagtgcatgttttctatgcttaagctgctttcctccaaaataatactcttgctcactgtaggtctctaaataggagtaattgttatggctcgtctcagtgaagctcactaccctttttctcttcaattcatcattagaagttaaaaatttacaaagttgaatttcttcccaaataaatgttctcttgcttactgcaggcctatcataattttgcaaggccaaccttcaccgagtgaaatcttcaaatcaccacccttctcttcaattcatcattagaagttatatacctcacaaagatatatttaagtccaatctattgctcactgcaggtttctgcataatttctatggccaatctgcaggtttctacataatttctatggccaatctgagtcctagttcataattttgcatggccagccttcactgagtgaaatctttaaatccccttattcaattcatcattagaagtactcaccaaggggtagaatttaagtgcttggatttatct

SEQ ID NO: 87977 - DNA, 1003 bp, Oryza sativa
  Clone ID: PAT_MRT4530_86873C.1
ttgaaagatgtcacaatgagagaggaataagcctgggttaaagaattcagcaactgagcacgcgtccaaacaaatattgattacactttgtatcttcaaatgccatgtctgcattgaatcaacaagggacatatataaaaccaatgtctgaaaagcattaactaacaaagactaacaaaagaagtcagggaaggaactccaagcatggttccgaaattagctactccacaagccatatatatacttctaattgttggagaagaagcagataagtattgttggacagatgaagtgtgcacatgaagaaatccaaacaaaaggttaattttttccaatgcatgatctttggtccagtcgagcttcaactccaaaccttaacttgtagatattgaatgacagcaaatccaatgagggaaccactattgataaataacacggacttcccatgaactaaccaaacatagatcccttttcaactccaacatccaccctttggcgtgtcatctaaagcacagaaacacatacgctaaacaagattagcttttaaaataatttataccaagggtacggaacacaccttatataaaaggataatgtctgatagctggccattaggtaaaattcctcaaagtgccgagacaaagaacagcatagagacagacaatccaaatcaagataaatctatgaaacgaccagaccttatctaataacttactgcccttcctcaatttccaggtactagctttctcacagggagctcatttccaaccaaccctgtaatcaatatgcgaacaagaaaacacatgcaccgaatctagaaacaatcgatcaaaccacaaaatggtaatcaatatgcgaacaagaaaacacatgcaccgaatctagaaacaatcaatcaaaccacaaaatggtaaaccacaaaccaggcaatttaatttcctcgagaaaatttcctcgtcacatggacaaaaggagaatctgcatgcagaggaaggcacaaatg

SEQ ID NO: 87978 - DNA, 655 bp, Oryza sativa
  Clone ID: PAT_MRT4530_86874C.1
caggaattcggcacgagggtacttcctacaaacgttcgccatctttttattgaggcttatgacgaaacaataattactgaaagaattttagaaatggaaagtctacatactctggttattcattgtattggtagagacatgatggatcatgaaacggtatatgaaagtatattcatgaagttgaggaaattgcgggttctaaaagtacaatccgacgcgcgctggcgactatacacaggattttcagtactatcattgccagcatctattaaaaaattaaaacatctacggtattttggttatcagtcaggctacgtttacaaattggtcttaccaagcacgattagcacacttcgccattttcaggtgctagattttggtaactgcatggagttggtattttcctcagaagaagatttgagtaaacttaacagcctgcggcacgtaatcgtatccccacttttccctttgagcattcgtcaccttggcaggctgacgtcgctccagacgatgccacctatcaaagtagagaggggggaggggtacgagttacagcagctgaggcagctaaataagcttcgaggcaggctggagatccagggtcttgaaaatgttgagagcaaggaggcagctactgaagccaatcttggtgcca

SEQ ID NO: 87979 - DNA, 492 bp, Oryza sativa
  Clone ID: PAT_MRT4530_86875C.1
atgggtgcagaagcagtagaagaagcagcgcaagcaggaggagaagaagaagcagcggggaaggaggcacctgatcaggctgaaccggccaccaccgaggaatgcttctttgttgggaatggtccgctctcccgcaggcgtggctgctccgcctccatcacactttgcttggggttgccctccagccgtgcccacgcgtgtcgtgctgtccctgatggacaaaaccctcctaacccacgaccggctctccactccatctcgcagtcttcgagatcatttccaccccgcccatgcctccagcctccctggggcagactgtgcttgtctcatgcccaaacaactgaggcagggatggatcagagaatcggagatggaggccaaactggtgatggcaacccgggacgaactaccatctctgagctctatccagaccccatttgtggctcacctgcttcaattttgatcatgtactgggtggatatatcattttga

SEQ ID NO: 87980 - DNA, 273 bp, Oryza sativa
  Clone ID: PAT_MRT4530_86876C.1
atgccattatcactgccaccggtgagctacaatcacttccggctgacgaagaaggagaggtgggtagctcgggttgacggtgaggatggaggtccggtgcttgctgatcttggtgaaggcgtggacgaggaagatctcaatgaggcgaggctggcggcagcgacggcgttgcgggatggcactccggtgaggttggatgcgctgttggaggaagaagacgatggcgtcttcactggtcactggcgaggacactcctccggcgggcttatataa

SEQ ID NO: 87981 - DNA, 1051 bp, Oryza sativa
  unsure (1)..(1051): unsure at all n locations
  Clone ID: PAT_MRT4530_86877C.1
gggaatccccttcgctcgcctcgcttccgcggcaatcccgttcgtgcaagggcgctcgatctcctcctcctccgccggatctcccactaggattagctccaatgggtttcctgcaaaacactttctcattgtgtgtcggcatcgggtgtggtatctacattgcgcagaactatgacgtcccaaacatgaagaaacttatgagggattggatggggaaagcaaaggaagttgaagagtcttacaagaagcctggcggtagcaaaaactgaaggactccatcatgttcagtacagccgtctaatcgtttttagtttgggtttacgctaagtaatggaaaatctttctactctattatccttgctcgttcaagatcaccagtcgtgtacagcaggttcgttgaacatatacttgggtaaggattattcaagcagttggacatgatctacaagtatggatgtgcatgtttaaaaatcttactactagtacaggtgccatgattcaggactgtttaaggagccaaannnnanaannnnnnnnnnnnnnnnnnnnnnnnnnnnnnnnnnnnnnnnnnnnnnnnnnnnnnnnnnnnnnnnnnnnnnnnnnnnnnnnnnnnnnnaaaaaacctgggggggggcccgcggcccaaatcccccctatagggaggttttaccgcgcgctcctggcccgttgtttaacaacgggtgactggaaaacccttgggttacacaattatatggctgggagaaaacccctcttcccaagttgggtaaaacccaaaaagccccnaccgattgccttcccaaaattggcaaacctaaagtgcaatggcaccccctctgancggcccattaaccgcggggtgtttgtgttcccccantgtacattaaattggccagcccctaacgcccgccttttgttttttcctttcttttttgccagttgccgggtttcccggaagatttaaaagggggcccctttttggtccccattaaggctttcggccctncccccaaaaaactttttgggggggggcaacttgggccactcccca

SEQ ID NO: 87982 - DNA, 627 bp, Oryza sativa
  Clone ID: PAT_MRT4530_86878C.1
atggcctccctgttcttttggtgcagtcctacaactactgctatcactccagtagcatcacaggcacctaagctaccatcagaaattgttgggaaaaatgttgagcagattattagggactggaataatgaacttcaagatcgcactgcgaagttccggaagcatgccactgcaatatctgaatgggacaggagaattctgcagaacaggactgttcttataaggcttgaggctgaggtggctaaagttgttgaaacacaaacaagcttggagaggcaacttgagttaatagaaactcaccagaaagaggttgacaaggctctgcagagcatggaggaggaagcagagcgggtattccaggatgaacggctgttgcttcgtgaagatgaggctgcttctgcaagagatacaatacatcagcctcctccaatccagggtgctgagtttgagactgctgatagtatgacaccatttgatgttgctgtccggatactggataatcaactgcgttctttaatgtggatcgatgagaaggctaatgagttctcaagtagaatacagaggctacctaacaacagtgctgcagctgaacgtgactctggaatgccaaggttttggttaagctga

SEQ ID NO: 87983 - DNA, 750 bp, Oryza sativa
  Clone ID: PAT_MRT4530_86879C.1
agcacccatgcaaataggccgaattcgagctcggtacccgggcttgaattatcgcatttaatgcaagcattagatcaattttcaacacgtaagattgtttatgccgatctctattttcaattgagtgtggacgaaagttggtcattagaagattcaattattaaagagggtggcttttatatcgatcgtggttttggtgtccgtgcggtttcaggcgagaaaacgggttttgcttatgccgatcaaattagttttaatcaattattacagtgtgcgcaggcagcacgttcaattgataatacgcatagccacttagccatacagtcgtttaaacaaacggttgctcctcagcgttatgctgcgatcaatccgttggatagtattagtcgtgagcagaaagttgaattattacatttagtcgatcgtaccgcacgagctgaagatagccgagtgatgcaagtgaatgcgggtatttcggcggtttatgaagaaatattgggggctgctactgatggaacctttacccgcagattttcgaccgcttgtgccgttggcggtttccgattagtagaagaagatggcaaacctgagcgtggttaaccggtgccggcgggtcgtatggcttaccgtgtttttgagcctcaatactaatggcaaatggagggctttcccggccgaatttttactaagaagcggttctcaggctttttaattaggggattactgttcggcgggccaaggcaattggtt

SEQ ID NO: 87984 - DNA, 156 bp, Oryza sativa
  Clone ID: PAT_MRT4530_8687C.1
tgtgtttttgaaaaaaaggggggacaaactaagatggtcaaacttgcatcctcgcactacaaaaagggggcatgaaattggctatttatctaaatgtaatcaacctaatctgacattaatacatgtcaccattgaaaatctttatagaagtcatca

SEQ ID NO: 87985 - DNA, 120 bp, Oryza sativa
  Clone ID: PAT_MRT4530_86880C.1
atggcgaacgaagctcgcagcgacgacaagcggacaaggacacaggagcttgaacctggtctggtgatcatgaaaaatcagaggtgcgcccgaggtacagctgcagccgataggcgctga

SEQ ID NO: 87986 - DNA, 405 bp, Oryza sativa
  Clone ID: PAT_MRT4530_86881C.1
ggcagcgtacaacagtaggaaaagggacttaacagtctgacgaatatctcagccacgccgagttacaattccatcagggttctggttgtctgtacctactactaatactcctcaaaatagcagcatcattcgatgatagtattggtacaaaaagggttctacaaaaaggtcatatcaaggaccttaagaaaacagcgaagtatatgtctcacgcctgtactgcaaaacctcacgccatatctgcacttgcagctcttcctctctccaagaaattcagcctcactcatcgaagtgagaggcatggtggatacaaatgaaccatttgccatcaaccttctcaaacacattggtcgcaacctgccttccccagctgctgctccctttggtcttaaccagctccaggca

SEQ ID NO: 87987 - DNA, 1832 bp, Oryza sativa
  Clone ID: PAT_MRT4530_86882C.1
gttctactagggttggcaacggggcgggacggggcgggtgcgggttggataggaacggccccgcctccgcatccttgagggttcacccggccccggccccggacagccgggtggaggaagggaataatgatgtggggaacctgcagcagccggagggagaggaacggtcggagaaggaggagaacagcacaggcgccggcagctggagaggtaggagaacgacatggggcgtcggcggatggcaggatggggagacggcgtccgtgagagcaacgatacgggcagcgtggaagagcgccgaccgccgctacttgatggtgcgggaccaactcgcgaggcgtgatttgtggaggacagagctttgccgttttagtggccagaagatatatccagggaagggcattcgctttattcgtgctgattcacaggtcttcctttttgcaaactcaaaatgcaagcgctacttccacaaccgcctgaagcctgcaaagcttacctggacagccatgtacaggaagcagcacaagaaggatatccatgctgaagctgtcaagaagaggcgccgcaccaccaagaagccatactctaggtcaattgttggtgcttcgttggaagtcatccaaaagaagagagctgaaaagcctgaagttcgtgatgctgctagagaagctgctcttcgtgagatcaaggaacgcatcaagaagaccaaggatgaaaagaaggcgaagaaggctgaggtaaccaagtcccagaagtcgcagtcgaagggtgccgccccgaggggttccaagggcccgaagattggtggtggtggtggaaagcgctgaagatttcttgatccccaggaaagggtcgcctggttctcgccggctgtctaaatcgtatctcatcaaaagctaccctgtagaacctctgttaaattagcactactgccaaaatgttttaacatcgccactggagataatgtcatgaagtttgaaatgctatgtgggaaaaaaaaaaaaaaaaaaaaaaaaaaaaaaaaaaaaaaaaaaaaaaaaaaatagccttagccggccggggccccgggccctgcaccgcacctcgactccccaaacatggcgctcgccctcgtctcgccaatggcggctctctcactccactccgggaggatctcagcggcggctatcggcggcggcctccgctctcgcagggcatccccgatgggcgccgccgccaccccgttcctccggagctccttcgtctcctcctcctccacgtcatccgcctccgcctcccccgccgcgctctctgccgcggtctcggcgtcgctgaccttcacctctgcctcctcatttgctggttcatctttgggaattgaattcagctacaacagagttacaacaggaagatcccggattctgcagattagggctggaaaggctgctctgtgcatgaccaagagaaatagatctaggaagtcgcttgcccgtacacatggttttcgcagacggatgaggactactgccggaagaaaggtcctgaagcgcagacgcgccaaaggaagaagggttctctgcacaaagacgaactcccccactgggaagaaacgaatgttctgattgaatcgcattctaagtcgctctttgtcacaattgtaagtgtatttttttatcccacgttctcggttatactcaaccataacaattggtgcaaatccttcacccggtgtccggttaatgtgtgaagtacattatcaacacaaattcaagttagcctttttgcttgtgcagtaagtaaaaaaagccctaaaaaaagtgaccaaagttagctgaattcagctaccacagagt

SEQ ID NO: 87988 - DNA, 323 bp, Oryza sativa
  Clone ID: PAT_MRT4530_86883C.1
ggccccggtcaacaacttattttcctttttgtccacttacattttaacgggcattaaaataccccaatggtgggcagaatttttgaagtttttaatgtccaagatgtctaccagttcctataaaaagatcggatttcttctcgggcagatcatcatgatgcttttgcccgaaggaatttgagtgctttgggacctttggtttaagtgtagcctccagatatagggcttagcccttggggttattctaaggggtttgggagaaatcaaccctttcaggtggttttggggggttttttaaaaacccccccctttttttggaatgg

SEQ ID NO: 87989 - DNA, 192 bp, Oryza sativa
  unsure (1)..(192): unsure at all n locations
  Clone ID: PAT_MRT4530_86884C.1
ggctgcnngattcngcacgagctcgtgccgaattcggcacgaggtcntggcaaagganaaataacngctnncgggcttggggaanggaaaacnncnagtgggaaatcngcngggaaaagtnaattacnacttgantnnaaatggtacaanaanaatcctcctcnacctgtnancnaattatttccangttgt

SEQ ID NO: 87990 - DNA, 1897 bp, Oryza sativa
  Clone ID: PAT_MRT4530_86885C.1
atggctgtcgaccccaagaagaagaacgccagctatgcattcacctgcgccatcctcgcctccatggcctccatcattctcggctatgacatcggggtgatgagcggcgcatcgctgtacatcaagaaagacctgaagatcactgacgtgcaggtggagatcctgatgggcatcctgaacatctactcgctcgtcggctccttcgccgcggggaggacggcggactggatcggccggcggttcaccgtcgtcttcgctgccgccttcttcttcgccagagctctactcatggggttctccggtgactacgccactctcatggtcggccgcttcgtggcgggcgtcggcgtggggtacgcgatcatgatcgcgcccgtgtacacggccgagatctcgccggcgtcgtcgcgtggcttcctcacgtcgttcccggaggtctccatcaacctcggtatcctcctcggctacgtctccaactatgctttcgcgcgcctgccgctctccctcgggtggcgcgtcatgctcggcgtcggcgcggcgccatccgtgctgctcgcgctcatggtgctcggcatgccggagtcgccacggtggcttgtcatgaagggtcgcctcgccgacgccaaggctgtgctggagaagatcgctgacacgccggaggaggcgtcggagcggctcgctgacatcaaggcggcggctggcatcccagatgacctcgacggcgacgtggtcaccgtgtccaagaagagaggcggcgaggaggggcaggtttggagggagctcgtcgtgtccccgaccccggccatgcggcgaatcgtgctcgcggcggtcggcctccacttcttccagcaggcgtcgggcgtcgactccgtcgtgctctacagcccgcgcgtgttccagagcgcgggcatcaccggcgacgaccagctcctgggcaccacctgcgccgtcggcttcgccaagacggtcttcatcctggtcgccgcgttcctgctcgaccgcgccggccggcggccgctgctgctgaccagcacgggcgggatggtcttctccctcgtcggcctcgcgacggggctcaccgtcgtgggcggcagcccggacgcccaggtgcccagctgggccgtcggcctgtgcgtcgcgtccatcctggcctacgtcgccttcttctccgtcggcctcgggcccatgtccggcgtgtacacctcggagatcttcccgctgcgggcgcgcgcgctgggcttcgcggtcgccgtggcgtgcaaccgcgtcaccagcggcgtcatctccatgaccttcctgtcgctctccagcgccatcaccatcggcggcagcttcttcctctacgccgccatctcgtcgctcgcgtgggtgttcttcttcactcgcctcccggagacgcgcggccagacgctggaggagatcggcaaggtgttcggcatggacgacacggccatggaagcagaggactccgccgcgtacagggaaagactcttggcaacttctccatgaaaggtggaaatggccgccactaactgatcaaactaaccgcaaaatcaccaaatcctaagggttttcttgcaaaaacgtgtgctgtactggctagctagcaagtagtagcagcaacgtgggaagattcgctgatccggcgttgctggagagcgacggccggcgacgacaaagctgagctccagctcgagacttcttaaaatcatcttcaagtacatggattttattttgctctttgctttgtccgtaaaagttgtactatgcgatgaagaataccagtatgtagcaaggctgaggttgtgtgtagctactagaagtgtcagtcacgttgttcttgtaagaaatgtttaactgttaattaagcagtattgttgcagtaatcaacaacctt

SEQ ID NO: 87991 - DNA, 345 bp, Oryza sativa
  Clone ID: PAT_MRT4530_86886C.1
atggcgcgtaaggctctcatcgtgttcacccttctcctcgttgctgctttctgcttcgtcgcctcggcccaagatcctcttagttttcactctcttcacaagccaacaagcagggtggcggcggaggcggaggcggaggcggcggaggaggaggaggaggaggcggcggcggctactaccctccttggaacggcggctactaccccccaggcccaggctactacccgtactggcccaaccacggctgtcgttgggggtgctgccaccgcggctactggggagattgccaccgctgctgctaaggcggcgtggctagctccatcaaccaatccacagagatcatga

SEQ ID NO: 87992 - DNA, 549 bp, Oryza sativa
  Clone ID: PAT_MRT4530_86887C.1
atgctgtctcaccccttactccaatcgtcgaagccaaagaccactgagccagcgacgatctcctccgcggccgccgctgaccggctccgccacccgccgaaacgaacgtcattctgggctggcctggcattgtggcggctgacacaggcggtgccggcggtgggggcgagaaagcggctcaaagacgcctacgcgtatcccaacaccaaccgcatcacagcagccgccgggcgccatagattccgacgcccctccttcgcgtgcgacgacgccgacgcccggcatcgcgtcgccatcaattcccgcctccagtttgacgctgttggcaccccctcacacgcctccaaatcgacgccgccggcatcccctcttgccgactgcgtcgcgacgccaccgccgactccctcgcgccgccaaggatcctgcgccatgtgctctctgttaagccaccaccggaatcctctcgaccacgctggggacaaggtttgctatggcacttccaaggaaagcagcgaacctctcctgtttgctatgggacttcctggttag

SEQ ID NO: 87993 - DNA, 1237 bp, Oryza sativa
  unsure (1)..(1237): unsure at all n locations
  Clone ID: PAT_MRT4530_86888C.1
atggggctgctgtcgcaccgcgtggagcggtcggagatgaagcccggcgaccacatctacacatggcgcgccgcctacacctactcccaccacgtcatcggagctgaatttttcgtgctaaagctgcgcaatgttatctccgggatttacgttggagggagcaaggtggtgcatttcacgaggaagaaggaggcagggacggcaggtctggactcggcgatcgccatctccagcctcctctcgcagggctcgccggagtgccccaccttcccggactgcggcttccagctcccggacagcggcgtcgtcctcacctgcgtcgactgcttcctccgcggcggctccctccacggcttcgagtacggcgtcccgccggcggtgttcctcgccaagctccgcggcggcacctgcaccaccgccgccgccgacccgccggacgccgtcgtccgccgcgccatgcacctgctccagaacgggttcggcagctacgacgtgttcgagaacaactgcgaggacttcgcgctctactgcaagacgggcctcctccccgccgacgagccgggcagcatcggccggagcggccaggcgtcgtcggcgatcggcgtcccgctggcggcgctcctctccacgccgttcaagctgctcgccgccggccccctcggcatggccgccgtcaccgccgggatgtactgcgccggcaggtacatcaccgacatcggggtgaggaaggacgtcgtcaaggtggaggtggagaacctgtcggcgcatcttggctggcgtcgcgccaaagccgaggaagaaatggccatgaaaaaacagcagccttcatcacatgatactaaggtcaagaagagtttacttcctctcaagagaaaacgtgacaatttctgcgaaattattacgagctgaaattctactacaatttgtatggttttgtgtggataggttttggagttaaaatgcaataagtcctggaaatatatgaagcgtcaagtgtgctttgatttaatcaagcattcgctgtctctgtgtgtgtgtgatagatagatcgatctgatcatgaattgggtgtgccaaggagattggattgctgtaccactatagtattatagtcagaaaatttactctctctctctctctctctctctctctctctctctctctctctttttcatttgaaccatctagtagtatatatctctgtattntgataaaaaaaaaaaaaaaaaaaaaaaaa

SEQ ID NO: 87994 - DNA, 275 bp, Oryza sativa
  Clone ID: PAT_MRT4530_86889C.1
cggacccccccctccccctcgccgctctgcctcggccgcgaccgccacgatctgcgctcaggcggcgcctgaacccccctagcgtcccctccatcccccccttctctctcctggccgaccctcctgcgctctcgctcactgacaccgccgctggggctgcgctcgggctctggaagccctcacactggacccgcccacccgcgcgccaaggtcccgccggctgggcgggggtctaccggccgaaagggggaaaacctcgcgcggcgcgggcctaa

SEQ ID NO: 87995 - DNA, 793 bp, Oryza sativa
  Clone ID: PAT_MRT4530_8688C.1
cgagaggtcacagatccacaagagaaaagaaaacacacgtacatcgagatatgacaacaatggcggcgaggaggtcagaagcagcaccggctccgcagcagctgcgggggagccagctgaagcagctccgggagctgttccggcggttcgacatgaacggcgacggcagcctgacgcagctggagctggcggcgctgctgcggtcgctggggctgcgccccacgggcgacgaggtgcacgcgctgctcgccgggatggacgccaacggcaacgggtcggtggagttcgacgagctggcggcggcgatcgcgccggtgctcaccacgcagacgcacctggtggaccaggcgcagctgctcgaggtgttccgggcgttcgaccgcgacggcaacggcttcatctccgccgccgagctcgcccgctccatggcgcgcctcggccagccgctcaccttcgaggagctcacgcggatgatgcgcgacgccgacaccgacggcgacggggtcatcagcttcaaggagttcgccgccgtcatggccaagtccgcgcttgacttcctcggcgtcgcctgaccgacctaaccacgcaaccaaccttgcccgcgtctctagcttagctgttgattcttcttccatttttaggacacaacgactaagtttttctagcgtagctatgaccatgtgtaacgcctaaatgtgtacaaattttgatgaattaatttcttcaccatcttgttcgtacgtttcaccatttgtaaatctgaaacaaattttgatcaaaaaaaaaaaaaaaa

SEQ ID NO: 87996 - DNA, 423 bp, Oryza sativa
  Clone ID: PAT_MRT4530_86890C.1
aacgaacgggggacggatcaattacaatatattgaacacgtctaaacctataaagtttcttaacactcataagggtcatccataatatgacaacatcaaaaagcaaatgggcatcaccgcacccacactgggcaaaaatttatattaaggccaagaagctcagatcaatcaattgttgcaccttaggagaaagaataactgaacattatgggttacacttggaatcggcctttgccaacgatgaaaacatcacctcttcatcaaacccatggcatttgttctttgcatattaccaacgaaacaaacgcttgcttttcttcttctttttcttcccaaagaatgccatgatctcctcttgtcgcttaaaaaaagtcttcctggagaggggcccttttttctgggcccccccgacccccccccccc

SEQ ID NO: 87997 - DNA, 889 bp, Oryza sativa
  Clone ID: PAT_MRT4530_86891C.1
tttttttttttttttttctgtttttttcttttctgttcaacacaatgaaatgcaatttaacacttcatgtgttgtttattaactttattcaatgatagaagtagtaaaggtgacatcgaactgtatctctgcttaaacaatttattcatgtatacatcattacaaagtatgtttatttcatcgactattgggagtaaaaaacatgctcgattctattcaatccacaagcagaagcagatgatacatcatttttcccacaacaccagccatctcaagatgtcttgcgggtcagcctagacatcatatgatcagatctctgctcactgtaaggaagatatttcccatcaaatgtgaccaccacgcgatcttttccatcagcaccttgtaccttgtcaaccgaacagtagaagtctatagctgacatgattccatcaccaaactcctcattgataatttccttgatgctctctccaaaatgcataacagcttcattcaatctgtagatggcgggctcgtggacgatgtccgggtggtaggagcggaacggcggctccatcatgagcgcgacgaggtcgtcggtgagccccggcacggccgcccgcagcgccggcgccgtctccggcttcagctgcgcctgccgccgcagcagctgcgccacgtacacgttggtcagccccgcctcctccccgatctccgagaagctcttccgcgactccgccttcgccgccatcagccgccgcaccacccccgccgccctctccccgccgccgccctccatatccctctcctctcctctcctcccgccgccacgcgtcgcagtcgaggtgagtgggtcgaggtcgtcgtcggcggcggcgcgatgcacggtggcctcaaaatcacagctttt

SEQ ID NO: 87998 - DNA, 577 bp, Oryza sativa
  unsure (1)..(577): unsure at all n locations
  Clone ID: PAT_MRT4530_86892C.1
gccggggaacggaacccgaactaccgactccgcacatggtcaatggacggaacactggcaccactgatggttatgcttctgctatgtactaccagacctacctgctgtacctccggagccgccccgacgcgagagccggataaacaacaagcacatgcccccacccaaaccccgttctcgggaacgcgctagccctgtacctccgaagacgccaccgaatacctggactggagcaccgacctcctcgccgacggacagaactgaaccaacgaggggcacagcgccctcactctcggatccggcgtcgccaccgcaaacacggagactgctgaccactttctgcaggccagatggcacaactacgtcaaggacgcgcgcttcgacgtactcgttgaggaccacctcacacgcagttctgttatcgtcaacggtcgtcactgggccctccaggggaagcatcggctactactccgtatcctccagctcgctccgacaggttctccgcgcgcgtnctctgcgcgcacctccgacgatggctagcactacagcttgacgaaccgtgggcctccgctgaggc

SEQ ID NO: 87999 - DNA, 393 bp, Oryza sativa
  Clone ID: PAT_MRT4530_86893C.1
cggggaaccggtacaccgggggcccttccgggctggacctcggagggctcctggggatttcttactccgacagggcggtggcgctgaccggggtgcagggggcagacaacggggggtggtgggccattgggaaggagccccaggggctaagcctggaggatctaatcgcccggaccacctcctgcaatggattggagcctttcctaacgccatgttcccccaagattgacacctagccgaatgggaaggtgaatgaggaggtcatacgatagctaaccgagctcgccagttcagacggcgggggtgcgcatatttgttctaatggaaaggggcccaaggccggcgatcataagttaccttcatggggaacagcaccacaacacaccattggac

SEQ ID NO: 88000 - DNA, 444 bp, Oryza sativa
  unsure (1)..(444): unsure at all n locations
  Clone ID: PAT_MRT4530_86894C.1
ttctagttctttgaaaaatgccattagtagtttgatagaaattgggctgaaactgtagattgccctaagtattatagtcgttttgactatgttgattcttccaatccaatagcatggaatatctttccatctgtgtctaacgctnattttatgacatgttaagattctcttataaggagaaagtgacagcatataaatgcacaaatgtaaaagatctttaggtcattatctgcctatggccagtctttagtctgaaagcacatttaagtttgagatagaaaaaattatttcgtactttacttttgacatcaaaacaattttgtaggagttcccattgtggctcagtggaaacaaacccaactagtatccaggagtgcatgggtttaaccctgtccttggctaggatctgctgttgctatggctgtggtatgggctggctatagc

SEQ ID NO: 88001 - DNA, 570 bp, Oryza sativa
  Clone ID: PAT_MRT4530_86895C.1
atggaaaccctagctcctgatggaggcggcagcgcggatccaaccgtcgcggcaccggcggcgacagatccggccgtcgcagggcagacagaggcaaatccaatggtcgcggtggaccgcctcgtcgtcgtctgtggttgcgcccctcctagctgcctccttgtcatcctcgttggtggcgacgccgaggatggagccgcctcctcgtcgttgttggcagcgacggcgttgggtgcggacggggatggctccggtggtgccagggcagcccgagaagaatcgttactgaacagaaaggccatgatgcagaattatgatgcggttacagaaattaaattaagccatataactaatatagaacagatccacgagctagttcaacttggcaacatgctgcaacaggtatatttaacttcttccatggatgacaaaatagagtggactcaaacttcttcagggacctacacaacaaagagtgcctatctggcacagttccttggatcggaattcaatgataacttcaagatgggattgtgcgattacaaggcgaatatggctggaggtggctaa

SEQ ID NO: 88002 - DNA, 119 bp, Oryza sativa
  Clone ID: PAT_MRT4530_86896C.1
ggtcagtatgccttaatgcgctcgatatcatatcgctctgaaagggatttgatttgccggggcgcgtctcacacccgcctgaggcagccctacaacccggcgctcccctcccccatgac

SEQ ID NO: 88003 - DNA, 2733 bp, Oryza sativa
  Clone ID: PAT_MRT4530_86897C.1
gaatcgtaaaattcataaactgtcaacttgaaataagccgatgaacataattcatattagaacagaacactacatagagctgtagaattcaaccggagatagattacattgcttgaaacaacaaactctgcccaaacccaaagcagagcaacactctagcagtgtgcaggaatggcaactcgatcacacactcagagcaacactctacgacgtgaggtaggggatcatgtacgccgacgacgccaatgtcccgatcaccttcgcctccgtgtccgggaagaactcggcgcccgggagcgccgtcacggcgccgccgtccttctcgacggcgaccgggtaggtgagcaggtgtccggggaggtcgccgtggagctcctcgccggcgtacagctgccagtgcctgtcggccatcgcgttcactctccggacacactccaggctccccgggtgcacgaagtcgtcgtgcagcatccccaggtgctcgtaccacagcgacatccggaagccatggatctggcctctcgcagcctgcccattgacgttcaggtggtgtggctggaacgctcccatggcgatctccgagtcccgcccgccgtccatcgaccgctggttgatgttggccgacccgacgatgatgtactcatcatcaactatcatcatcttggagtggacatagatcatgaagcggcgcgcgttctgcgccttggcgtagtctgtgtcttgatccgggcgatgtgcaggcacgtactcgccatggctcttggcctccctgttccccaagcagaagaaggtgaggtaatccctcgggtcggcgtcgctgtgattggccttgagcgcgacggcgatgtcgtagtacatcatctccatcgtcctcctctgccagtcgaggatggcctgcatggcctcgttgccagggtggccctcgggccacatcggcaccacgacgtagacggcgaaccgctcgccggcggcgatcttgctcacgatcttgagggagagctccctcgggatcaggttcaccgcctcgacgtcctccggcctgacgccgccgccgggcctccacccgtaggagctcccgatgaagtactggttctcgatgtagatgaagtccctggcgcggcggatggcgtggatgtacgcgtcctggatgctccgctcgatcacgttgttcttcccgctcacgaggtcgaggcgcgccgccgcctccgggctgctcgggaagccgtcgcacgcgccgccgtcgatggagcggaagagctgcacgttccatgcgtcgtcgtggtggtcgtcgttgttggtgccggggagcttcaccggggacggcggcgtgatgaggtgctcgagggcggtgaggttgacgaggaggtcggcgtggccgctctgcttccgccaccgctgctcgaagttgtagaggacgtcccaggcgatggggccctcgagcttggagtggatgtcgtgccatggctccctcggcccgcccttggcgagctcggcgtcgtcgatgctcggctggtggaagtccttgtggtgcgcggcgtcgagcgtccggaagagggagtgggactgcgtgtcgtagcggccgtcgcagaggtcgaggccgccgacgaagctgacgatgcagcggatgtcggagccgccgccgccggtgccggccggcatgtcgtggtcgacgatgacggtcttctggtggtgggtggccaagagtgagaccttcgtgcccatgatgaagctgctgccggcggcggcgtcggcttgccgcgggcagaggacgcagtgcacgtcggagtcctcgaagtaggcgagcgtgtcctcgtcgtgcgtctgcgcgacgctgagcttgatgccgatggcgtggagcgcctggatggaggagacgtcgttccagaccagcatgagcacgcggacgccctcgctggccttgcgcttgaggagctcgccgatggtggcgtcgccgccggggcgctgccgggacgggtcgcggatgagcgtgatgtcggtgaacaccgaccagccggtgatgtatatgaggtgcttggcgttgctgatggcgtcgaacacgtcctcccagcaccgcccctgctggtagtgcgcgccgccggcgagcgggatcctcggcgcgaacgtgtccggcgcgtgcgcgtcctggtacagggtgaccctgcacccggcgtgctgcttgaagtaggtgcacggcacgccggggtacgccgcgtcgccgacgccgccgccccaccacttcccgccgccgtcggcggccacgtccttgaactgcagccggacgtggatggtcggaccgtgggggagcttcttcttgtcgtcgccgaggatgtcgagcttgcgctcgacggcctcgccggacaggaggtccctgacggggaggtaggcgcggccgatgagcttggcatcgacggacagcgcgaccttgacggagaagacgacgttctcggcgaagtgggcgcagtagaagtggaagcgctcgtcccaccgcgggctcaccggctcgtcgtcgatcacccgcgtccggccgagccgcgccctgccgaggtccaccgtcgcgtacagcctcgtcccgccggggccaagcccggtcgtcttctccaacccgttctccagcccttcccaccacttgcggaagccctcgggggcgttgccggtgaggcgggtggggttggtgaggttggtggcctcgaagatggtggcgtcgagcgtgccgtgcatcagcaggtgagccat

SEQ ID NO: 88004 - DNA, 2569 bp, Oryza sativa
  Clone ID: PAT_MRT4530_86898C.1
ctacgaggtgatatcgggggtcatcaacggattgatcgccttcttccccagcaccggcgcctcggtgtccgggaagaacttcgcccccgggagcgccgccaccgtgccgtccttagccacggcgatcgggtaggttagcagatgccccgggaggtcttcatggagctcctcgctggcgtagagctcccagtgcttgttagccatctcgttcactctccggacacactccaggctccccgggtgcaggaagtcgtcgtgcggttcgcctcctaggtgctcataccatagtgacatccggaagccatggatttgacctcttgcaagctggccaccgatgttcaggtggtgtggctggaatgctcccatggcgatctccgagtctcggccgccgtccatcgacctctggttgatgttggccgatcccacgatgatgtactcgtcatcgactatcatcatcttggagtggacatagatcatgaaccggcgcgtcttttgtgccttggcatatggcgtgccatctcttgggtgatgtccgggcacatactcaccactcctcttcacctctctgtttcccaagcagaagaaggtgaggtaatccctcgggtcggcgtccatcctcttcgccttgagcgcgccggcgatgtcggcgtacatcatctccatcgtcctcctctgccaatcgaggatggcctgcatggcctggctgtcagggtggccctccggccacatcggcaccacgacgtagacggtgaaccgctcgccggcggcgatcttgctcatgatcttgagggagagctccctcgggatcaggttcaccgcctcgacgtcctccggcctgacgccgtcgtcgggcctccacccgtaggagctcccgatgaagtactggttctcgatgtagatgaagtccctggcgcggcggatggcgtggatgtacgcgtcctggatgctccgctcgatcacgttgttcttcccgctcacgaggtcgagccgcgccgccgcatccgggctgctcgggaagccgtcgcacgcgccgccgtcgatggagcggaagacctgcacgttccacgcctcgtggtcgtcgttgccgatgacggggagcttcatcgcggactgcggcgcaatgaggtgctcgagggcggtgaggttgacgaggaggtcgccgtggccgctctgcttccgccaccgctgctcgaagttgtagaggacgtcccaggcgacggggccctcgagcctggagtggatgtcgtgccatggctccctcggcccgcccttggcgagctcggcgtcgtcgatgctcggctggtggaagtccttgtggtgcgcggcgtcgagcgtccggaagagggagtgggactgcgtgtcgtagcggccgtcgcagaggtcgaggccgccgacgaagctgacgatgctgcggaggccggagccggcgccggccggcatgtcgtggtcgacgatgacggtcttctggtggtgggtggaagcgaagggcaccttgacgcccatgacgatgctgccgccggcgtcggggtggcgcgcgcagacgacgcagtggacgtcggtgtcctcgaagtactggaacgtctcggcgtcgtgcgtctggctgaagccccacttgatgccgagcgactggaggatctgcagcgacgtgacgtcgttccagaccagcatgagcacgcggacgccctcgctggccttgcgcttgaggagctcgccgatggtggcgtcgccgccggggcgctgccgggacgggtcgcggatgagcgtgatgtcggtgaacaccgaccagccggtgatgtatatgaggtgcttggcgttgctgatggcgtcgaacacgtcctcccagcaccgcccctgctggtagtgcgcgccgccggcgagcgggatcgtcggcgcgaacgtgtccggcacgtgcgcgtcctggtacagggtgaccccgcacccggtgtgctgcttgaagtaggtgcacggcacgccggcgtacccggcgttgccgacgccggcgccccaccacttcccgtcgccgtcgacggcgacgtccttgaactgcagacggacgtggatggtcggcccgtgggggagcttattcttgtgctcgtcgaggatgtcgagcttgcgctcgacgacctcgccggacaggaggtccccgacggggaggtaggcgcggccgatgagcgcggcgtcgatgggcagcgagaccttgacggagaagacgacgttgtcggcgaagtgggcgcagtagaggtggaagcgctcgtcccaccgcgggttcaccggctcgtcgtcgatgacccgcgtccggccgagccgcgccttgccgagatccaccgtcgcgtacagccgcgtcccgccctgcccaaccccggtcgtcttctccaccccttcccaccacttgcggatgccctcgggggcgctgccggtgaggcgggtggggttggtgaggttggtggcctcgaagatggtggcgtcgagggtgccatgcatcagctgctgctccgccattgccactcctcgatgatccagtgagtttcagtcttgacaagaacgggaagaagaagcacggacgcgtggg

SEQ ID NO: 88005 - DNA, 1416 bp, Oryza sativa
  unsure (1)..(1416): unsure at all n locations
  Clone ID: PAT_MRT4530_86899C.1
aaccaaaaaaaataaaaaaaagtgaatcggtcgctcgctgccgccgcgtcgtcgacgtcgtcatctggcccgccgccgcgcccagctcgccgcctggcctggtcgcggccacgcccagcgcctggctcgcccagccgccgcctcgcccgctcgctgtcacggccggctcgccacctggcctgttcatcgtcgtcggcccactcccggccgccgccttgcaggccgccgcctcgccgtcgtcgtcatcgtcggccgtgcgcacgctgctcccggccgccgcctccccacgtccgcccgccgcctccaccgcctcctcatcggcctcctccttacattcaccaacggtggatcccccgccccctcctcctcctcctcctagttgttgatgccgccgccgcgatgagctcattgtttctatcagatctgtccaccgcagtgcagcttgccaccaccacgttgccctctgccgccatcaagcgccgctagatccaagcccccctctcctccatcatcgctagattcttgtccgccgcctcgccggcctgcggcccggccgccttgggctccaccgccgcctggggagcgtcgccgcccgccgcctcgccggccggtgcccgcctgctgccgcctcgggctccgccgcccgcctagggagcgccgccgcctcgctggccgcttgctcggccgcccgcctcagcctgctgcctgcccggccgcctgcctcccgagccgccgcctgcccggccgcccaccgctccgcgccctcccgccccaccgcctccgccggcctctccctccggccgacgattgctctcctcctccgtccgctgccgtccccacaggggttgccgccgtctcctccaccaccacctccactactccctcctcctcctcctctcccctccattccttctcctccctgctgctctcgaatcactatcctcttccttctactgcgacgacaagcaccgccgccgcgccttggcacgacaccggcagccgccacggccaacatctccaggactcatggaaccatatcctgttagggcatggccgacacggggacgtggaccgcacccccagccctccacattagaccatccgccaaaaagcgtcgaggagcacgcgcccgtagggaggcgtggaccttctgcacgtgcgcgcacctctgcgcggggagttgttttgtttcatcctatttattttggtttatgtattgatgatgctactgctgtgatgggtgaatccaacagcaagctccagcatcagccagaagccagcagggtgcaaggagaaaggaacagcatatttccagaagaccctggccagctcctacatgacaatgccgtgaaaaagagaggacagnctgatcaagatgaaagctgtgaggaagcgaagacgatggatctgaggagc

SEQ ID NO: 88006 - DNA, 867 bp, Oryza sativa
  Clone ID: PAT_MRT4530_8689C.1
gtgacgtcaccgacagcggcggcggctcggcagaggagacggctcgggcggcgcacgctcgccggcgaacggcggcgccaggacgcaaacggagggcaccaagacgtagaggacaacacggcgaactcaccggtgacctaaacggcggtggaagaccaacggacggcgacggcgacgaggaggaagcggcgggaaccttcgggtcaacgacggcgaagctgctccggtgatctccggcgacggcgaaggggcggacgaggacggcgacgacttggcgagcacgacggtggtcttcccgagcgacggcgacggctgaaacgacggcggcgcacggctggagcggcggcggcgacggcaaagctagggcacacggcgctagagctcttccggcgacgagaggtgaaggcgagggtggcggcgaaaagagaagactccgggggtccttttaaaggggctcggaggcggcggcgaaggcccacggcgacggcaacgacgaaggaaacctcggcttggagagaaagaaaaccgatccgaatcgaactcgatcccaaagctttccaaagcgatttaaccgatgattccaaaggagaaaaggtagaggagatcccggagattgtttctcctcttttgattcgaccggagaaggaaagaaacggccggattggaaggaaacagcggcggcggctcggcggcggcgcgctagggtttcggcccgaggaagacgacgggcctgacaggtgggacccacctgtcagcgaccgaacgcgcacgcgcgcgcgggcggctgcggactgggccggctgggccgaggagagagagaagagaggttttgggccgactttcggcccaaagccaaaagaagacttt

SEQ ID NO: 88007 - DNA, 278 bp, Oryza sativa
  Clone ID: PAT_MRT4530_868C.1
tctttcataggtcatagactgccctcacagaccaacacaagtcttttttgcacactttgtccacacttgtgcgcacccgggaagaatttcccgatcggaccaacacaacccattgctccaggccaagcacgcttaaccctggagttctttggagatcggcctccggaaaagaagttgcaacttgttgatatgagtattctattaatcctattaagccctaggccgggatgcggtcggcgcggatgggtggctctggctacgtcggcgggagcatcgac

SEQ ID NO: 88008 - DNA, 531 bp, Oryza sativa
  Clone ID: PAT_MRT4530_86900C.1
atggcgatgcgctacctcgccggtaagctgcgggcccccgcccccgccgccgccgctctccgtcgccctcgatccctctccgccaacgcctcccagtcccaggtcggctcgcccctcgactcgtcccagatcgttcgtttcgatcgaccaagatcgggaaagtacaccaatggaagtactacagagcttgcgtcttccatgaaggttgtgaagaatgtggacgagacaattcgacagctacatgaagaagtagctaaaatggaagctgcaagcaaggaaatagcggagataataaggtacaacaggttccacagaaggtgtataatggggtctgttgtccttggggtgggtcttgcaggtgtctcctgtgtccggtatactcgtagttacaggaaggccctcagggagtattatgttgtcggcttggagatggaaaacaacttcaactttagctcttatttcaagttgcagtcgtctttcctcgtccctagattttgcagttccattgctgcatcctccctagataaatga

SEQ ID NO: 88009 - DNA, 618 bp, Oryza sativa
  unsure (1)..(618): unsure at all n locations
  Clone ID: PAT_MRT4530_86901C.1
gcaattcgcacgctctcctcgcctcgcctcgccttctcttctctcctcacctcgcccgcgtcgtcgtcgtcgtcgtctccgcggcggcgggggaagcagcgggaggcggaggcggagcagcagcagcaccaccaccccggggcggggccgcggcgcggtgctcgcgcgcgtcgactccgtgtggacaatcatgtcttctaaagttcctgggttagcattacttaacaccagcataagcaaattttggagcgatgaggagcttgtccgattcttagcagagaggaaagaagcacactctctgccagagaatgtatttgtgggaatgaacatttctctcattgatccacgtaactcaggtttgcatccaatctatacacaggataattaatggtattttccaacaagattatggcatatgtggaatttgtggtctgactttcataattcagtcattatggaccctgaaggcttctttgntntgtcctttttgatttgttatatacttactttacagcattgtattgtatggttgagcagtattgcacattttaattctcaatagacaactaaagaaaatgaattctgcatagaattgataactatttaggggttgaaagg

SEQ ID NO: 88010 - DNA, 1619 bp, Oryza sativa
  Clone ID: PAT_MRT4530_86902C.1
atgcaactccacatcctcctcctcctccttgctgtcacagtactcctctcgtcgccgacatgggcggcggccggcggtgaagatcaggcggtggcctcgcaggaggtgaacccgctgcactacaactgcagcctgtccggcggcaagtacgagccgaacagcacgtacgaggccaacctcagggcgctggcctcgctgctcctcgcggaggcgagggccaccgccttcgcctccgacagcttcggcgccgcgccagacgcggtctacggcatcgcgctctgccgcggcgactacgccggcgacgcctgcgccggcggcctccgcaaggcgttcagggacgccatcgaccacggcgtcttctgcgccggcttcagggacgtgaccgtctactacgacgagcacatgttccggttctccggcgaggacttccgcgccagcctgaccaacgcgccggcgtgggtcacgtggaacatgaacggcgtggccggcgccgccgcgttcggcgaccgcgtcatggagctgatcaacaccaccgccgagttcgccgcgtggaactcgtcgaagcgcgggtacgcgacgggggaggccgggttcggggagctggacgtgggcgcgacccgcctcgggctggttgagcagcagtgcagaagcagccccgacctcgtcatcttcgcgctcgtgcagtgcacgccggacctctcgccggccggctgcctgagctgcctctccggcatcgcctcgcagatgccgaggtggttcactggcgccgccgactaccgcctcggcggccggattctcggggtccggtgcaacctgaggtacgaggtcgatcgcttcttcctagaaagcaacgagacgatcaagattcatatgccaaaacagaaagggggcatgagcaaaacggatatcgcattgatcaccatttctggagttgttactcctgttcttcctttgattctaattggattcatcgtaaagaaaatacgagattgcaagctaagaagagaattaggtgactgggagaagaccgttaccgaagaaattgatgaaaggttttcactttatcctttctccatgataagagatgccacagaaaatttctcagcagaaaatagacttgggcatggatctttcggtcaagtttaccgagtggtattataacttagccggcaccttctccgataagtctgatgtgtatagccttggcgtgcttatcttggaaatcataagtgggacaaaggtgaactctgcctgcttctttcaacaaggaagatcagacaacctgttgacctttgtaagtaattattatctctagtttgataaaatacgggatggtgctctgtgctcatcttctctattctgtagaaagatctatatatgcaggcaagtacatgccatttctggtttaagaatttgcatcatgtatacatgaatacatttgtagaaacacttgataatatatagttttagacatatacttgcatttttagtgcttagatcgtttattgatccggctttgtaagaaatcctaaaggataacagagttcttctattagatatatatgcatatattttcattaaaaatattagaacacatcatatttatttatttgaaaaca

SEQ ID NO: 88011 - DNA, 5589 bp, Oryza sativa
  Clone ID: PAT_MRT4530_86903C.1
atggccgaacgggcagtggcgcacaatctctctccgagcgctagcggtgaagacggggagcagaacccgcgccgtcgagctcgtactccactgtccccctctcgccgaagtcttgggcgggaggaggcgctcgaggaggtcgaaagatccgcgacttcgccgcacgcgggcgatggagaaggacggcgagacggggagcgtcgtctcctcgtctacggtgatggcagcacgccccagggcgcgctccaggctgcgggcgcgctcctgcgtcacccgcccgtcatccctgatccagagactccaacccgacgttggctagatgacgtggccaatttggtcatgacggcgcagcagcgcctaggcgccggctggtggtcctccgccaccaaggccactggcgttgctactgctggctccgtgtcgtcgaggcggagggcgcggcgagcggcggccgctacccgccgttcgtccgccattccctcgtcaacgcctccaacccaagaagatgtgcgtagggggccagatgcccgcttcaatatcgagcgccggtgcaatgatcgccgtgctgcccacgcatcggagggcgcttcctcgtccggagcgccacttcggtccgggcacgggggccagccccctgtgtccccagttggcggtgccggctgtcgagcctttgtggcgagccttcggaacgtccgttggcccccaaggttccggcccaccatcaccgaaaaatacgacggaagcatcaacccctccgagtttctccagatctacacgactgggatcgaggccaccgggggtgacgacagggtcatggcgaatttcttccccatggccctgaaaggacaggcgcggggttggctaatgaacttgccacccgcgtcggtccactcttgggaggatttgtgccagcagttcactatgaacttccagggcacatatccgcgcccaggtgaagaagcggacttgcacgcggtacagcgaggggacgatgagtctcttcgctcatacattcagcggttttgtcaagtccgcaacaccataccgtgcatccctgcacacgcggtgatctacgcgttcagggggggcgtgcgccacaaccgcatgctcgagaagatcgcctccaaggagccccagaccaccgcggagctttttcagctcgcggaccgtgtggctcgcaaggaggaggcctggacctggaactcctccggttccggtgtggcagcttcggccgcccccggatccgccgctcggtcagggcgacgggacaggaggaggaagaagaggtcggcccattccgacgacgagggtcacgtcctcgccgtcgagggcgctttgcgggccacccgaaaggggaggcctgcgagcgacaaaaagaaggaggccggcgctcccagcagggagcgcccgaccagcaagtggtgcaccgtgcacaacacctccctccacgacctcgcggactgccgcgcggtcaaaagtttggctgagcggacgaggaagtgggaggaggagaggaggcaggagcgccgtgagggcaataccccggcggctcccgccggcaaccggcgaggtgaggccaagcagaaggcccccgccgaggacatcaacgatggcgacgatgacctagggttccaggagcctgaggccactgtcgccaccgttgatgggggagcgtgtgctcacgcttctcgccggagcctcaaggccatgaagcgagagcttctggccgtggcccctacccatgaggcgacgcggcgggcgcggtggtcggaggttgccctcaccttcgaccagaccgaccacccaccgtgcgttgcccggggaggacagatcgcgatggtggtttcccccaccgtttgcaatgtgaagttggggcgtgtcctcgttgacgggggtgcagccctcaacatcctttcccccgctgcctttgacgccatcaaggccccggggatggtgctccggtcgtcccagccaatcatcggtgtgacgccggggcacacttggccgctaggccatatcgacctcccggtcaccttcggtggttccgccaacttccgcacggagcgggtgaacttcgatgtggcggacctcagtctgccctacaacgcggtcctggggaggcccgcgttggtgaagttcatggtggcggtccactacgcatatctccagatgaagatgccgggccccggtggccccatcaccgtccatggcgacctcaaagtcgcgcttgcttgcatggagcagcgcgcggaccacctcgccgtggcatccaagcccgcgggtggcgacgagaggctcagcacctccgtcccagccgccccgaggcagcggatgatcacgtgcgacgaggtcccgatcaagcaggaagacgcgctcgtctccttcctgcgggcaaacgccgacgtcttcgcctggagaccagcggacatgcccggggtccccagggaggtgattgagcaccgtctcaccgtacggccgggcgcaaggccggtccggcagaaagtgcggcggcaggccccggaacgtcaagccttcatccgcgaggaggtggcgcgacttctggaggccggattcatccgagaggtcatccatccgaagtggctggcgaacccggtcgtcgttcccaaggcgaacggcaagcttcggatgtgcatcgactacaccgaccttaacaaggcatgtcctaaggacccttaccccctgccacgcataaatcagattgtcgactccaccgcggggagaccttactcggatctagcggaaactttcgaaagtctccgcaccgcccgcataaagctgaaccccgacaagtgcgtgttcggcgtgcctgcgggcaagcttctcgggttcttgatctctgcccgaggcattgaggccaaccccgagaagatacgagctatagagcggatgcgcccccccagcaagcttagggatgtgcaatgcgtcactggctgtatggccgccctaagtcggttcatatcgaggctgggagagaaggcgctacccctatttaagctcctcaaacgctccgggccgtttatctggacggaggaggctgaacgggccctcactcagttgaaggcgtacctcagttctcccccagtcctggtcgccccggagccagatgagccgttgctactctacctggcggcaactccgcaggtggtcagcgcggcgttggtcatggagcgcgacgaggacgaccctcgctccgcgcatccccaccctgtgtcgactcgacccgggagagagcagggaggagaggcccccgagccgaacggcggcccgaggcccccgacgaccggagctggccctctgcccgcttgtccgacggtgccaggcgcccccgacccccaggatggccccggggccactgcgggaaggccgcgcctgtcgccttccgaccccgaggtcgtcgacacagaagccgagtgcgccccgcgcggcctctcggacgaaaagcgccctatagatgcggcccctggcgaagaggatcggccccgacaaaaggtgcagcggcccgtctactttgttagtgaggccttccgggacgccaagacccgataccctcaggcccagaagatgctttacgctattctgatggcttcgaggaagttgcgccattatttccaggcgcatcgggtcacggtggttacgtcctaccccctcggccaaatcttgcataaccgagagggtactggacgggtggtgaaatgggcaatcgaactctctgagttcgatttgcactttgaaccacgccacgcgatcaagagccaggccctcgccgactttgtggcagagtggacaccggctcccgagcccgtctccatccccgaggccagctcgggcccttcgcagctgcctcacaccgcctattgggtgatgcagttcgacggctccctgtctcttcagggcgccggtgcgggggtcacgttgacctcgccgagcggagatgtcctcaaatacctggtccgccttgactttcgggcaaccaacaatatggcagagtacgagggactccttgcgggactcagagtggcggctggactggggatccgccgcctcctggtctccaaggagtaccagtgctctgacccgcagatggatgcttacgtgcgccaggtgcggcgtatggagcgccattttgacgggatagagcttcggcacgtgcccagacgggataacgcggtcgccgacgaactctcaaggctcgcttcctcgcgagcccagaccccaccgggcgcctttgaagaaaggcttgcccagccgtcggcgcgacccgaccccctaggggagacggacgagcctgaacggcccccgaggcccgtcggagtccaggcctcgggacccgaggggggcgctcccagctcccttagattgattgcttggatcgctgagatccaggcgtacctcgcagataagactctacccgaggaccgcgaagggagtgaacgcgtccagcgcatctccaagcgctacgtgctggtggaagggaccctctatcggcacgcggctaacggagtcctcctgaagtgcattcctcgggaacaaggcgtcgagcttcttgccgatatccatgaaggcgagtgcggagcccactctgcctcacgcaccttggttggcaaggcctttcgccagggtttctattggccgacggctctcaacgatgcgatcgacctggtctggcggtgcagggcgtgccagttccatgccaagcaaacccatcagccggcccaggccctgcagaccatacctctttcatggccgtttgctgtctgggggctcgatatcctgggtccgtttagacgggccccgggcgggttcgagtatctgtatgtcgctttcgacaagttcactaagtggcccgaggcttatccggtcatcaagatcgataagcactccgcacttaaattcatcaggggtatcactgctcggtttggggtgcctaaccgtatcattacggataacggcacccagttcactagtgagctcttcggtgactactgcgaagacatgggcattaagctctgcttcgcctctcccgcccaccctagaagcaatggccaagtggagcgcgccaacgcagaaatcctcaagggcctcaaaaccaagaccttcaacatcctcaagaagcatggcgactcgtggatcgaggagctgccagcggtgctctgggcgaaccgaaccacgccaagccgagcaaccggggaaacgcctttcttcctcgtctacggcgcggaggcggttctcccatccgagctcaccctgaggtcccctcgggccaccatgtactgcgaggctgatcaagatcagcatcgcagagatgacctcgacttcttggaagaacgaaggcggcgcgcggcccttcgagccgcgcgctaccagcagagcctgcggcgctaccatcagcgtcacgtccgggcccgatcactctgcgtcgacgacctcgtcctacgccgcgtccaaacgcgtgctggactgagcaagctctcaccaatgtgggagggtccgtatcgagtgatcggcgtcccccggccgggctccgttcggctggccacgggcgacggcacagagctgcctaacccatag

SEQ ID NO: 88012 - DNA, 270 bp, Oryza sativa
  Clone ID: PAT_MRT4530_86904C.1
atgtctatggatataaatacaaggccccctaggaggatagaggacacaataagacacgacagatccacacacaagccagaacaaaccaatacgccaaacatcaacatcagagataagcctagacagacccaatccagtgcctacgaaggccaacaagagggatctagtgctatctctgatctcgatgagttcgtactcgaggaggaagactactctgtcgtcgactacgtgttggttatctatgccgccaagtcgatggcagttagatag

SEQ ID NO: 88013 - DNA, 132 bp, Oryza sativa
  Clone ID: PAT_MRT4530_86905C.1
atgggcaagacgccaaaggatggcctcttacgccatggctgcgacaacctcaggctagggccgggaatggttgtcgaacacatggagcagtgccactcaaagaaggaatcagcgtcagagggaaagcactga

SEQ ID NO: 88014 - DNA, 501 bp, Oryza sativa
  Clone ID: PAT_MRT4530_86906C.1
atggcgatccatgccaggtcgcagccggacgccggcgctgacgacctctccccgtcccccaccccggccgcgagatcgtcgccgtcgcggatcttcgcggggccgccgacggcgcgaggcttctctcccgtcgccggtggccgtgatgtcgtctccatcgcggatcttcacggggccgccgacggctcctccgccacggtgagcggcacgtggaggccggatatagagtgccacgccgccaccgctctccctccgcccgttagcgtcgcaagcggcggccacgccctcccctccgccacggcgggcgtctggtcggcggaggcggcggccacgacctcccctctcctccctctgccagatcccatggaggggcgggccaactgggggggagggagggaggtggcggaaggaagggggatgcggcggcggcagcggaggtacggcggtgatcgccgcagtggacaggggccacaacgaagggacaacaagcaactgctgtag

SEQ ID NO: 88015 - DNA, 4917 bp, Oryza sativa
  Clone ID: PAT_MRT4530_86907C.1
atggccgaacaggcagtggcgcacaatctctctccgagcgctagcggtgacgacggggagcagaacccgcgccgtcgagctcgtactccactgtccccctctcgccgaggtcttgcgcgggaggaggcgctcgaggaggtcgaaagatctgcgacttcgccgcacgcgggcgatggagaaggacggcgagacggggagcgtcgtcttctcgtctacggtgatggcagcacgccccagggcgcgctccaggctgcgggcgcgctcctgcgtcacccgcccgtcatccctgatccagagactccaacccgacgttggctagatgacgtggccaatttggtcatgacggcgcagcagcgcctaggcgccggctggcggtcctccgccaccaaggccactggcgttgctactgctggctccgtgtcgtcgaggcggagggcgcggcgagcggcggccgttacccgccgttcgtccgcctttccctcgtcaacgcctccaacccaagaagatgtgcgtagggggctagatgcccgcttcaatatcgagcgccggcgcaatgatcgccgtgctgcccacgcatcggagggcgcttcctcgtccggagcgccacttcggtccgggcacgggggccagccccccgtgtccccggttggcggtgccggctgtcgagcctttgtggcgagccttcggaacgtccgttggccccaaaggttccggcccaccatcaccgaaaaatacgatggaagcgtcaaccccgccgagtttctccagatctacacgactgggatcgaggccgccgggggtgacgacagggtcatggcgaatttcttccccatggccctgaaaggactggcgcggggttggctaatgaacttgccacccccgtcggtccactcttgggaggatttgtgccagcagttcactatgaacttccagggcacatatccgtgcccaggtgaagaagcggacttgcacgcggtacagcgaggggacgatgagtctcttcgctcgtacattcagcggttttgtcaagtccgcaacaccataccgtgcatccctgcacacgcggtgatctacgcgttcagggggggcgtgcggcacaaccgcatgctcgagaagatcgcctccaaggagccccagaccaccgcggagctttttcagctcgcggaccgtgtggctcgcaaggaggaggcctggacttggaactcctccggttccggccatatcgaccttccggtcaccttcggtggttccgccaacttccacacggagcgggtgaacttcgatgtggcggacctcagtctgccctacaacgcggtcctggggaggcccgcgttggtgaagttcatggtggcggtccactatgcctatctccagatgaagatgccgggccccggtggccccatcaccgtccatggcgacctcaaagtcgcgcttgcttgcatggagcagcgcgcggaccatctcgccgcggcatccaagcccgcgggtggcgacgagaggctcagcacctctgtcccagccgccccgaggcagcggatgatcacgtgcgatgaggtcccgatcaagcaggaagacgcgctcgtctccttcctgcgggcaaacgccgacgtcttcgcctggagaccggcggacatgcccggggtccccagggaggtgattgagcaccgtctcgccgtacggccgggcgcaaggccggtccggcagaaagtgcggcggcaggccccggaacgtcaagccttcatccgcgaggaggtggcgcgacttctggaggccggattcatccgagaggtcatccatccggagtggctggcgaacccggtcgtcgttcccaaggcgaacggcaagcttcggatgtgcatcgactataccgaccttaacaaggcatgtcctaaggacccttaccccctgccacgcatagatcagattgtcgactccaccgcggggtgcgaccttttgtgttttctagatgcatactctggttatcatcagattcgcatggctagggaggatgaggaaaaaactgcattcattacccccataggaacttattgttatacgacaatgcctttcgggttaaagaatgcaggtcctacttttcaacgtactactcgaatttctttgggtagccaaataggacgtaatgttgaggcctatgttgatgacttggttgtgaaaacacgcaaccaggagaccttactctcggatctagcggaaactttcgaaagtctccgcaccgcccgcataaagctgaaccccgacaagtgcgtgttcggcgtgcctgcgggcaagcttctcgggttcttgatctttgcccgaggcattgaggccaaccccgagaagatacgagctatagagcggatgcgcccccccagcaaacttagggatgaggctgaacgggccctcactcagttgaaggcgtacctcagttctcccccagtcctggtcgccccggagccagatgagccgttgctactctacctggcggcaactccgcaggtggtcagcgcggcgttggtcgtggagcgcgacgaggacgaccctcgctccgcgcatccccaccctgtgtcgactcgacccgggagagagcagggaggagaggcccccgagccgaacggtggcccgaggcccccgacgaccggagctggccctctgcccgcttgtccgacggtgccaggcgcccccgacccccaggatggccccggggccactgcgggaaggccgcgcctgtcgccctctgaccccgaggtcgtcggcacagaagccgagtgcgccctgcgcggcctctcggacgaagagcaccctgtatcgactcgacccgggagagagcagggaggagaggcccccgagccgaacggcggcccgaggcccccgacgaccggagctggccctctgcccgcttgtccgacggtgccaggagcccctgacccccaggatggccccggggccactgcgggaaggccgcgcctgtcgccttccgaacccgaggtcgtcgacacagaagccgagtgcgccccgcgtggcctctcggacgaaaagcgccctggagatgcggcccctggcgaagaggatcggccccgccaaaagttcgatttgcactttgaaccacgccacgcgatcaagagccaggccctcgccgactttgtggcagagtggacaccggctcccgagcccgtctccatccccgaggccagctcgggcccttcgcagctgcctcacaccgcctattgggtgatgcagtttgacggctccctgtctcttcagggcgccggtgcgggggtcacgttgacctcgccgagcggagatgtcctcaaatatctggtccgcctcgactttcgggcaaccaacaatatggcagagtacgagggactccttgcgggactcagagtggcggctggactggggatccgccgcctcctggtgttaggcgactctcagttggtcgttaaccaggtctccaaggagtaccagtgctctgacccgcagatggatgcttacgtgcgccaggtgcggcgtatggagcgccattttgacgggatagagcttcggcacgtgcccagacgggataacgcggtcgccgacgaactctcaaggctcgcttcctcgcgagcccagaccccaccgggcgcctttgaagaaaggcttgcccagccgtcggcgcgacccgaccccctaggggagacggacgcgcctgaacggcccccgaggcccgtcggagtccaggcctcgggacccgaggggagcgctcccagctcccttagattgattgcttggatcgctgagatccaggcgtacctcgcagataagactctacccgaggaccgcgaagggagtgaacgcgtccagcacatctccaagcgctacgtgctggtggaagggaccctctatcggcacgcggctaacagagtcctcctgaagtgcattcctcgggaacaaggcgtcgagcttcttgccgatatccatgaaggcgagtgcggagcccactctgcctcacgcaccttggttggcaaggcctttcgccagggtttctattggccgacggctctcaacgatgcggtcgacctggtccggcggtgcagggcgtgccagttccacgccaagcaaacccatcagccggcccaggccctgcagaccatacctctttcatggccgtttgctgtctgggggctcgatatcctgggtccgtttagacgggccccgggcgggttcgagtatctgggtatcactgctcggtttggggtgcctaaccgtatcattacggataacggcacccagttcactagtgagctcttcggtgactactgcgaagacatgggcattaagctctgcttcgcctctcctgcccaccccagaagcaatggccaagtggagcgcgccaacgcagaaatcctcaagggcctcaaaaccaagaccttcaacatcctcaagaagcacggcgactcgtggatcgaggagctaccagcggtgctctgggcgaaccgaaccacgccaagccgagcaaccggggaaatgcctttcttcctcgtctacggcgcggaggcggttctcccatccgagctcaccctgaggtcccctcgggccaccatgtactgcgaggctgatcaagatcagcttcgcagagatgacctcgactacttggaagaacgaaggcggcgcgcggccattcgagccgcgcgctaccagcagagcctgcggcgctaccatcagcgtcacgtccgggcccgatcactctgcgtcgacgacctcgtcctacgccgcgtccaaacgcgtgctggactgagcaagctctcaccaatgtgggagggtccgtatcgagtgatcggcgtcccccggccgggctccgttcggctggccacgggcgacggcacagagctgcctaacccgtggaacatcgaacaccttcatcgcttctacccctag

SEQ ID NO: 88016 - DNA, 333 bp, Oryza sativa
  Clone ID: PAT_MRT4530_86908C.1
gcgcggtgatggggtggttgctgaaagcagccgcccaaagcgaagggcaacctggccatggatgcctaaaaggccacagcaaggatgaatcccgttaatcgtccacgaccacgacaactgagatgcagacgtgaaggccgcacacgcgctcagcatctcaaaactgcggtacaagctcaccaaggagaagaccaggtccatactatcccggaagtttaaagctttaacttccatgtttgcagctggttgactatactgcagattccctgtggggactgacatgcacactgtgttagagactgctacactcggaggtacactttgtgtaaatta

SEQ ID NO: 88017 - DNA, 5403 bp, Oryza sativa
  Clone ID: PAT_MRT4530_86909C.1
atggccgaacgggcagtggcgcacaaccactctccgagcgctagcggtgacgacggggagcagaacccgcgccgtcgagctcgtactccaccgcccccctctcgccgaagtcttaggcgggaggaggcgctcgagggggtcgaaagatccgcgacttcgccgcccacgagcgatggagaaggacggcgagacggggagcgttgcctcctcgtctacggcgatggcagcacgccccagggcgcgctccaagctgcgggcgcgctcttgcgtcacccgcccgttgtccccgatccagagactccagcccgacgttggctggatgacgtggccgacttggtcatgacggcgcagcagcgcctaggcgccggtgggcggtcctccgccaccaaggcctctggcgctgctaccgccggctccgtgtcgtcgaggcggagggcgcggcgagcggcagccgttacccgccgttcgtctgccattccctcgtcaacgcctccgacccaagaagatgtgcgtagggggccggatgcccgcctcagtatcgagcgccggcgcaatggtcgtcgtgctgcccacgcaacggaaggcgcttcctcgtccggagcgccacttcggttcgggcgcgggggccagccccccgtgcccccggttggtggtgtcggctgtcgagcctttgtggcgagccttcagaacgtccgttggcccccaaggttccggcccaccattaccgaaaaatatgacggaagcgtcaaccccgccgagtttctccaggtctacacgacagggatcgaggccgccgggggtgacgacagggtcatggcgaatttcttccccatggccctgaagggacaggcgcggggttggctaatgaacttgccgcccgcgtcggtccactcttgggaggatttgtgccagcagttcaccatgaacttccaaggcacatatccgcgcccaggtgaggaagcggacttgcatgcggtacagcgaagggacgatgagtctcttcgctcgtacattcagcggttctgtcaagttcacaacaccataccatgcatccccgcacacgcggtaatctacgcgttcagggggggcgtgcggcacaaccgcatgctcgaaaagatcgcctccaaggagccccagaccaccgcggagctttttcagctcgcggaccgtgtggctcgcaaggaagaggcctggacctggaactccaccggttccggtgtggcagcttcggccgcccccggatccgccgctcggtcagggcggcgggacaggaggaggaagaagaggtcggcccattccgacgacgagggacacgtcctcgccgtcgagggcgcttcgcgggccacccgaaaggggaggcctgcgagcgacaaaaagaaggaggccggcgctcccagcagggagcgcccgaccggcaagtggtgcaccgtgcacaacacctccctccacgacctcgcggactgccgcgcggtcaaaagtttggctgagcggacgaggaagtgggaggaggagaggaggcaggagcgccgtgagggcaaggccccggcggctccctccggcaaccggcgaaggttccaggagcctagggccaccatcgccaccgtcgatgggggagcgtgcgctcacgcttgtcgtcggagcctcaaggccatgaagcgagagcttctggccgcggcccctacccatgaggcgacgcggcgggcgcggtggtcggaggttgccctcaccttcgaccagaccgaccacccgccgtgcgttgcccggggaggacagatcgcgatggtggtttcccccaccgtttgcaacgtgaagttggggcgtgtcctcatagacgggggtgcagccctcaacatcctttcccccgcagcctttgacgccatcaaggccccggggatggtgcttcggccgtcccagccgattatcggtgtgacgccggggcacacttggccgctaggtcatatcgacctcccggtcaccttcggtggatccgccaacttccgcacggagcgggtgaacttcgatgtggcggacctcagtctgccctacaacgcggtcctggggaggcccgcgttggtgaagttcatggcggcggtccactatgcctatctccagatgaagatgccaggccccggtggccccatctctgtctatggcgacctcaaagtcgcgcttgcttgtatggagcagcgcgcggaccacctcgccgccgcgtccaagcccgagggtggcaacgagaggctcagcaccttcgtcccagctgccccaaggcagcggatgatcacgtgcgacgaggtcccggaagacgcgctcgtctccttcctgcgggcaaacgccgacgtcttcgcctggagaccggcggacatgcccggggtccctagagaggtgattgagcaccgtctcgccgtgcggccgggcgcaaggctggtccggcagaaagtgcggcggcaggccccggaacgtcaagccttcatccgcgaggaggtggcgcgacttctggaggccggattcatccgtgaggtcctccatccggagtggctggcgaacccggtcgtcgttcccaaggcgaacggcaagcttcggatgtgcatcgactacaccgaccttaacaaggcatgtcctaaggacccttaccccctgccacgcatagatcagattgtcgactccaccgcggggtgcgaccttttgtgttttctagatgcatactctggttatcatcagattcgcatggctagggaggatgaggaaaaaactgcattcattacccccataggaacttattgttatacgacaatgcctttcgggttaaagaatgcaggtcctacttttcaacgcactactcgaatttctttgggtagccagataggacgcaatgttgaggcctatgttgatgacttggttgtgaagacgcgcaaccaagagaccttactctcggatctagcggaaactttcgaaagtctccgctccgcccgcataaaactgaaccccgacaagtgcgtgttcggtgtgcctgcgggcaagcttctcgggttcttggtggtcagcgcggcgttggttgtggagcgcgacgaggacaaccctcaccccgcgcatccccaccctgtgtcgactcgacccgggagagagcaggcaggagaggcccccgagtcgaacggcggcccgaggcccccgacggccggagttggccctccgcccgcttgtccgacggtgccaggcacccccgacccccaggatggccccggggccactgcgggaaggccgcgcctgtcaccctccgaccccgaggtcgtcggcacagaagccgagtgcgccccgcgcggcctctcggacgaagagcgccctagagatgcggcccctagcgaagaggatcggccccgccgaaaggcgcatcgagtcacggtggttacgtcttaccccctcggccaaatcttgcataatcgagagggtactggacgggtggtgaaatgggcaatcgaattctctgagttcgatttgcactttgaaccacgccacgcgatcaagagccaggccctcgccgactttgtggcagagtggaccccggcccctgagcccatctccgtccccgaggccagctcgggcccctcgcagctgcctcacaccgcctactgggtgatgcagttcgacggctccctatctcttcagggcgccggtgcgggggtcatgttgacctcgccaaacggagacgtcctcagatacctggtccgcctcgattttcgggcgaccaacaatatggcggagtacgagggactccttgcgggactcagagtggcagctggactggggatccgccgcctcctggtgttaggcgactcccagttggtcgtcaaccaggtctccaaggagtaccagtgctctgacccgcagatggacgcttacgtgcgccaggttcggcgtatggagcgccattttgacgggatagagcttcggcacgtgcccaggcgggataacgcggtcgccgacgaactctcaaggctcgcttcctcgcgagcccagaccccaccgggcgcctttgaagaaaggcttgcccagccgtcggcgcgacccgaccccctaggggagacggacgcgcctgaacggcccccgaggcccgtcggagtccaggcctcgggacccgaggggagcgttcccggctcccctagattgattgcttggatcactgagatccaggcgtacctcgcagataagactctacccgaggaccgcgaagggagtgaacgcgtccgacgcatctccaagcgctacgtgctggtgaaagggaccgtctattggcgcgcggctaacggagtcctcctgaagtgcattcctcgggaacaaggcgtcgagcttctcgccgatgtccatgaaggcgagtgcggagcacactccacctcacgcaccttggttggcaaggcctttcgccagggtttctattggccgacggctctcaacgatgcagtcgacctggtccggcggtgcagggcgtgccagttccacgccaggcaaacccatcagctggcccaggccctgcagaccatacctctttcgtggccgtttgctgtctgggggctcgatatcctgggtccgttcaggcgggccccgggcaggttcgagtatctgtatgtcgctgtcgacaagttcactaagtggcccgaggcttatccggtcatcaagatcgataagcactctacgcttaaattcatcaggggcatcactgctcggtttagggtgcctaaccgtatcattacggataacggcacccagttcactagtgagctcttcggcgactactgcgaagatatgggcatcaagctctgcttcgcctcccccgcccaccccagaagcaatggccaactggagcgcgccaacgcggaaatcctcaagggcctcaaaaccaagaccttcaacatcctcaagaagcacggcgactcgtggatcgaggagttgccagcggtgctctgggcgaaccgaaccacgccaagtcgagcaaccggggaaacgcctttcttcctcgtctacggcgcggaggcggttctcccatccgagctcaccctgaggtcccctcgggccaccatgtactgcgaggctgatcaagatcagcttcgcagagatgacctcgactacttgcaagagcgaaggcggcgcgcggccctccgagccgcgcgctaccagcagagcctgcggcgctaccatcagcgccacgtccgggcccgatcactctgcgtcgacgacctcgtcctacgccgcgtccaaacgcgtgctggactgagcaagctctcaccaatgtgggagggtccgtatcgagtgatcggcgtcccccggccgggctccgttcggctggccacgggcgacggcacagagctgcctaacccgtggaacatcgagcaccttcgtcgcttctacccctag

SEQ ID NO: 88018 - DNA, 757 bp, Oryza sativa
  unsure (1)..(757): unsure at all n locations
  Clone ID: PAT_MRT4530_8690C.1
cgcggggcaggagcggcgcgggcgtgctcgggcgccggccgacgggaggagaggagcggcgcttttgcgcagtcagcgtgccgaaagaaaagggggggacgccagtgttcattacggggatcagagaattctgctacgttaagatgccttgcggactgataaccaccgggaatactttccagcgtacggtccagggcgcacttagcaaccagcttggcaacaatgtcgaggcttacgtcgacgacatcgttgtcaaaaccaagacaagtgactcattgattgacgacctgcgggaaacgttcgacaacctcggacgatatcgcctcatgctcaatctagagaagtgcacgttcgaagtaccgtcgggcaagctactcggattccttgtttctggcagaggaatataggcgaatcccgagatgatcaaagcaatcgagaacatgaagccgcccacatgtctcaaggaggaagccgaagaggcatttattgcactcaagcgctacctatcaaacccccctgtactcgttgccccccaacttaatgaacaattattcctttatattaccgccacgccatattcagtgagcaccgtcattgtggtcgaggcacagataattcagctcccagttgattacgccagcgaagctctccatgaggcaaagtctagatatccgcagatccaatatctgctatacgggtaccgagctcgaattcgccctatagtgaatcggattacttctcccaaccaaagncgcgg

SEQ ID NO: 88019 - DNA, 3846 bp, Oryza sativa
  Clone ID: PAT_MRT4530_86910C.1
atggccgaacgggcagtggcgcacaacctctctccgagcgctagcggtgacgacagcgagcagaacccgcgtcgtcgagctcgtactccgccgcccccctctcaccgaagtcttaggcgggaggaggcgctcgagggggtcgaaagatccgcgacttcgccgcccacgagcgatggagaaggacggcgagacggggagcgtcgtctcctcgtctacggtgatggcagcacgccccagggagcgctccaggctgcgggcgtgctcctgcgtcacccgcccgtcgtccctgatccagagactccaactcgacgttggctagatgacgtggccaacttggtcatgacggcgcaacagcgcctaggcgccggcgggcggtcctccgccaccaaggccactggcgctgctactgccggctccgtatcgtcgaggcggagggcgcggttccggcccaccatcaccgaaaaatacgacggaagcgtcaaccccgccgagtttctccagatctacacgactgggatcgaggccgccgggggtgacgacagggtcatggcgaatttcttccccatggccctgaaaggacaggcgcggggttggctaatgaacttgccacccgcgtcggtccactcttgggaggatttgtgccagcagttcaccatgaacttccagggcacatatccgcgcccaggtgaagaagcggacttgcacgcggtacaacgaggggacgatgagtctcttcgctcgtacattcagcggttttgtcaagtccgcaacaccataccatgcatccctgcacacgcggtgatctacgcgttcagggggggcgtgcggcacaaccgcatgctcgagaagatcgcctccaaggagccccagaccactgcggagctttttcaactcgcggaccgtgtggctcgcaaggaggaggcatggacctggaactccaccggttccggtgtggcagcttcggccgcccccggatccgccgctcggtcagggcggcgggacaggaggaggaagaagaggtcggcccattccgacgacgagggtcacgtccttgccgtcgagggtgcttcgcgggccacccgaaaggggaggcctacgagcgacaaaaagaaggaggccggcgctcccagcagggagcgcccgaccggcaagtggtgcaccgtgcacaacacctccctccacgacctcgcggactgccgcgcggtcaaaagtttggctgagcggacgaggacgtgggaggaggagaggaggcaggagcgccttgagggcaaggccccagcggctccctccggcaaccggcgaagtgaggccaagcagaaggcccccgccgaggacattgacgatggcgacgatgacctagggttccaggagcctggggccaccatcgccaccgtcgatgggggagcatgcgctcacgcttctcgtcggagcctcaaggccatgaagcgagagcttctggccgcggcccctacccatgaggcgacgcggcgggcgcggtggtcggaggttgccctcaccttcgaccagaccgaccacccgccgtgcgttgcccagggaggacagatcgcgatggtggtttcccccaccgtttgcaacgtgaagttggggcgtgtcctcatagatgggggtgcagccctcaacatcctttcccctgctgcctttgacgccatcaaggccccggggatggtgctccggccgtcccagccgatcatcggtgtaacgccggggcacacctggccgctaggtcatatcgacctcccggtcaccttcagtggttctgccaacttccgcacggagcgggtgaacttcgatgtggcggacctcagtttgccctacaacgcggtcctggggaggcccgcgttggtgaagttcatggtggcggtccactacacctatctccagatgaagatgccgggccccggtggccccatcaccgtccatggcgacctcaaagtcgcgcttgcttgcatagagcagcgcgcggaccacctcgccgcggcatgcaagcccgcgggtggcgacgagaggctaagcgcctccgtcccagccgccccgaggcagcggatgatcacgtgcgacgaggtcccgatcaagcaggaagacgcgctcgtctccttcctgcgggcaaacgccgacgtcttcgcctggagaccggcggacatgcccggggtccctagggagaaagtgcggcggcaggccccggaacgtcaagccttcatccgcgaggaggtggcgcggcttctggaggccggattcatccgagaggtcatccatccggagtggctggcgaacccggtcgtcgttcccaaggcgaacggcaagcttcggatgtgcatcgactacaccgaccttaacaaggcatgtcctaaggacccttaccccctaccacgcatagatcagattgtcgactccaccgcggggtgcgaccttttgtgttttctagatgcatactctggatatcatcagattcgcatggctagggaggatgaggaaaaaactgcattcattacccccataggaacttattgttatacgacaatgcctttcgggttaaagaatgcaggtcctacttttcaacgtactactcgaatttctttgggtagccaaataggacgtaatgttgaggcctatgttgatgacttggttgtgaagacacgtaaccaagagaccttactctcggatctagcggaaactttcgaaagtctccgcaccgcccgcataaagctgaaccccgacaagtgcgtgttcggcgtgcctgcgggtaagcttatcgggttcttggtctctgcccgaggcattgaggccaaccccgagaagttacgagctatagagcgaatgcgcccccccagcaagcttagggatgtgcaatgtgtcactggctgtatggccgccctaagtcggttcatatcgaggctgggagagaaggcactacccctatttaagctcctcaaacgctccgggccgtttatctggacggaggaggctgaacgggccctcactcagttgaaggcgtacctcagttctcgcccagtcctggtcgccccggagccagatgagccgttgctactttacctggcggcaaccccgcaggtagtcagcgcggcgttggtcgtggagcgcgacgaggatgaccctcgctccgcgcatccccaccctgtgtcgactcgacccgggagagagcagggaggagaggcccccgagccgaacggtggcccaaggcccccgacggccgaagctggccctccgcccgcttgtccgaaggtgccaggcgcccccgacccccaggatggccacggggccactgcgggaaggccgcgcctgtcgccttctgaccccgaggtcatcggcacagaagccgagtgcgccccgcgcggcctctcggagcgtgacgaggacgatcctcgctccgcgcgtccccaccctgtgtcgattcgacccgggagagagcagggaggagaggcccccgagccgaacggtggccaaaggcccccgacggccggagttggccctccgcccgcttgtccgacggtgccaggcgcccccgacccccaggatggccctggggccactgcgggaaggccgtgcctgtcgccctccgaccccgaggtcgtcggcacagaagccgagtgcgcctcgcgaggcctctcggacgaaaagcgccctggagatgcggcccctagtgaagaagatcggccccgccgaagggtgcagcggcccgtctacttcgttagcgaggccctccgggacgctaagacccgataccctcaggcccagaagatgctttacgctattctgatggcttcgaagaagttgcgccattattttcacgcgcctcgggtcacggtg

SEQ ID NO: 88020 - DNA, 420 bp, Oryza sativa
  Clone ID: PAT_MRT4530_86911C.1
atgccggccgacgccagtggcagccgcggggtgcctgcgtgctcttgcctccgccggctgccgcgccgccgccggatccgggtgcgccaccgccggatccgcagcctccaccatcgccaccccaacgccgtcgccatccccgccgccgtcacccacaacaccacccggcgcaactcacctcgaccgccaccgtcgcccgtccccgctgccgtcgtcgtccccgccgccagcccatcccgccagatccggccggaacggcgcggatctggcggacaccgccgtcgccattccgggcggctccccaggccgcccgagcgcgaggagacgaggagcgccccgctgccgccgtccttgcggccgcgcggcttcgccggcggtcgctcgggcgacggcgaggcggagaagggggtgggggactga

SEQ ID NO: 88021 - DNA, 174 bp, Oryza sativa
  Clone ID: PAT_MRT4530_86912C.1
gaccaatacgacaaacaaatgaactagatgagctcaaagcagaagcagagctgcactgaattatcgctcaagggaagagaggatcagggacagtgataacttaggcttcagtgcaccgcattccacgttaccaccactacactccaccccaccaccctgaaaacacaccacgga

SEQ ID NO: 88022 - DNA, 303 bp, Oryza sativa
  Clone ID: PAT_MRT4530_86913C.1
atggcgaagtgggcggctgcgatggagatgcttctgctggtggtggtggcggcggcggcggtggcggtggtggtggcgcaagcgccgccgccgccgcagtgtgaccccgggctgctgtcgccatgcgcggccccgatcttcttcgggacggcgccgtcggcgtcgtgctgctctagcctgaaagcacaacaggggtgcttctgccagtacgcgaaagacccgacgtacgcgtcctacatcaacagcaccaacgcacgcaagatgatcgccgcctgcggcatccccttgcccaactgcggctag

SEQ ID NO: 88023 - DNA, 629 bp, Oryza sativa
  Clone ID: PAT_MRT4530_86914C.1
atggccgcgcggacgcggcggcgcgggagccgaggagatgagtcgcggtcgccggcggcgatgtggggcccacctgggagtgggtcgcggggttgggggtggggtgtgggggtggagatcgcgaggaggtggggagggacaaggacggtgtccggatggacggccaggatgcagcggttcgggatgattggacggctaggatattatgcctccgtcagttgcctgtctgggtggtgcggtgcttcttcgtgggtgccgcgctcctccgcctacccgtcggtctcaccgtcctcctcgtcagcgtacgacctccccactggtgggctgacgggcaacgggtcctcgtcggcgtcggtgccacattccttgggcttacactgcgtcctcctcatcggaaacgcggaaggacatgcctttcgatggaccgttgcccaacaagtccgccgccacgccggcagcgttcaaggtctctctatctccggctcacttgtgatggacaacacgtccgggtcgtcggcggcggcttctgcttcggctccacctcgcacggcctaccctgcgacccgcgcgtatgccccagccccctgcattggctgggagaagccaaaggcccagcctttcaacgacgg

SEQ ID NO: 88024 - DNA, 3969 bp, Oryza sativa
  Clone ID: PAT_MRT4530_86915C.1
atgtgcgtggggggctggatgcccgcctcaatatcgagcgccggcgcaatggtcgtcgtgctgcccacgcaacggagggcgcttcctcgtccggagcgccacttcggcccgggcacgggggccaccccccccctgtccccggttggcggtgtcggctgtcgagcctttgtggcgagccttcggaacgtccgttggcccccaaggttccagcccaccatcaccgaaaaatacgacggaagcgtcaaccccgccgagtttctccaggtctacacgaccgggatcgaggccgccgggggtgacgacagggtcatggcgaatttcttccccatggccctgaaaggtcaggcgcggggttggctaatgaacttgccacccgcgtcggtccactcttgggaggatttgtgccagcagttcactatgaacttccagggcacatatccgcgcccagcggttctgtcaagtccgcaacaccataccatgcatccccgcacacgcggtgatctacgcgttcagggggctgtgcggcataaccgcatgctcgagaagattgcctccaaggagccccagaccaccgcggagctttttcagctcgcggaccgtgtggctcgcaaggaggaggcctggacctggaactcctccggttccggtgtggcagctccggccgcccccggatccgccgctcggtcagggcggcgggacaggaggaggaagaagaggtcggcccattccgacgacgagggtcacgtcctcgccgttgagggcgcttcgcgggccacccgaaaggggaggcctgcgggcgacaaaaagaaggaggccagcgctcccagcagggagcgcccgaccggcaagtggtgttccatgcacaacacctccctccacgacctcgcggactgccgcgtggtcaaaagtttggctgagcggacgaggaagtgggaggaggagaggaggcaagagcgccgtgagggcaaggccccggcggatcccgccggcaaccggcgaggtgaggccaagcagaaggccaccgccgaggacgtcgacgatggtgacgatgacctggggttccaggagcctagggccaccgtcgccaccgtcgatgggggagcgtgcgctcacgcttctcgccggagcctcaaggccatgaagcgagagcttctggccgcggcccctacccatgaggcgacgcggcgggagcgatggtcggaggtggccctcaccttcgaccagaccgaccacccgccgtgcgttgcccggggaggacagatcgcgatggtggtttcccccacagtttgcaacgtgaagttggggcgtgtcctcatagacaggggtgcagccctcaacatcctttcccccgcagcctttgacgccatcaaggccccggggatggtgctccggccgtcccagccgatcatcggtgtgacgccggggcacacttggccgctaggtcatatcgaccttccggtcactttcggtggttccgccaacttccgcacggagcgggtgaagttcgatgtggcggacctcagtttgccctacaacgcggtcctggggaggcccgcgttggtgaagttcatggcggcggtgcactacgcctatctccagatgaagatgccgggccccggtggccccatcaccatccatcgcgacctcaaagtcgcgcttgcttgtatggagcagcgcgcggaccacctcgccgcagcgtccaagcccgcgggtggcgacgagaggctcaacccctccgtcccagccaccccgaggcagcggatgatcacatgcgacgaggtcccggaagacgcgctcgtctccttcctgcgggcaaacgccgacgtcttcgcctggagaccggcggacatgcccggggtccccagggagatgattgagcaccgtctcgccgtgcggccgggcgcaaggccggtccggcagaaagtgcggcggcaggccccggaacgacaagccttcatccgcgagaaggtggcgcgacttctagaggccggattcatccgtgaggtcatccatccggagtggctggcgaacccggtcgtcgtccccaaggcgaacggcaagcttcggatgtgcatcgactacaccgacctcaataaggcatgtcctaaggacccttaccccctgccacgcatagatcagattgtcgactccaccgcgggccagttaggacgcaatgttgaggcctatgttgatgacttggttgtgaagacgtacaaccaagagaccttactctcagacctagcggaaacttttgaaagtctccgctccgcccgcataaagctgaaccccgataagtgcatgttcggtgtgcccgcgggcaagcttctcgggttcttggtctctgcccgaggcatcgaggccaaccccgagaagatacgagctatagagcggatgcgcctcccccacgaggccctccgggacgccaagacccgataccctcaggcccagaagatgctttacgctattctgatggcttcgaggaagttgcgccattatttccaggcgcatcgggtcacggtggttacgtcttaccccctcggccaaatcttgcataaccgagagggtactggacgagtggtgaaatgggcaatcgaactctctgagttcgatttgcactttgaaccatgccacgcgatcaagagccaggccctcgccgactttgtggcaaagtggaccccagctcccgagcccgtctccgtccctgaggctagctctggccccgcgcagctacctcacaccacctgctgggtgatgcagttcgacggctccctgtctcttcagggcgccggtgcgggggtcacgttgacctcgccgagcggagacgtcctcagatacctggttcgcctcgactttcgggcaaccaataatatggcagagtacgagggactccttgcaggactcagggtggcagctggactggggatccgccacctcctggtgttaggcgactcccagctggtcgttaaacaggcgtacctcgcaaataagactttacccgaggaccgcgaagggagtgaacgcgtccagcgcatctccaagcgctacgtgctggtggaagggaccctctatcggcgcgcggctaacggagtcctcctgaagtgcattcctcgggaacaaggcgtcgagcttctcgccgatatccatgaaggcgagcgggccccgggcgggttcgagtatctgtatgtcgctatcgacaagttcactaagtggcccgaggcttatccggtcatcaagatcgataagcactccgcgcttaaatttatcaggggcatcactgctcggtttggggtgcctaaccgtatcattacggataacggcacccagttcactagtgaactcttcggtgactactgcgaagacatgggcatcaagctctgcttcgcctcccccgcccaccctagaagcaatagccaagtggagcgcgccaacgcggaaatcctcaagggcctcaaaaccaagaccttcaacatcctcaagaagcacggcgactcgtggatcgaggagctgccagcggtgctctgggcgaaccgaaccacgccaagccgagcaaccggggaaacgcctttcttcctcgtctacagcgcggaggcggtcctcccatctgagctcaccctgaggtcccctcgggccaccatgtattgcgagactgatcaagatcagcttcgcagagacgacctcgactacttggaagagcgaaggcggcgcgcggccctccgagccgcgcgctaccagcagagtctgcggcgctaccatcagcgccacgtccgggcccgatcactctgcgtcgacgacctcgtcctacaccgcgtccaaacgcgtgctggactgagcaagctctcaccagtgtgggagggtccgtatcgagtgatcggcgtcctccggccgggctccgttcggctggccacgggcgacggcacagagctgcctaacccgtggaatatcgaacaccttcgtcgcttctacccctag

SEQ ID NO: 88025 - DNA, 888 bp, Oryza sativa
  Clone ID: PAT_MRT4530_86916C.1
atgggagtgcggtggatgatagccatggtcaaggttatggaagagtccgtggggtgcctgcgtgctttgggccaccgccgggccgccacgccgccgccggatccggggtgcgccaccgcccggatccgcggcctccaccaccgccaccctaacgccgtcgccatccccgctgccatcacccacaacaccacccggcgcaactcacctcgaccgccaccgtcgcccgtccccgccgccgtcgtcaaccccgccgcagacgccttccccgccgccagcccatcccgccagatccggccggaacggcacggatctggcggtcaccgccttcgccactccaggcggctccccaggccgcccgagcgcgaggagacgaggagctccccaccgccgccgtccttgcggccgcgcggcttcgtcggcggccactcgggcgacggtgaggtggagaaggggggtgggggtggggggagaggggcggccgggtcgtcgcctcctgagccgcccctggggagagtgacgcgagaggggaagttccccgtccctcgcctcctgccgggatccaccttgccgcttgcctccatcgccatcccagtggctgttgaatccggctgttgggccactaaagggagagcggatggtgctggcaaggaaggggatgagggcgacatcatagaagggagtgatgacgaggaagggataaagggaaccaatgcgacgaggaggaggggatggaaggcaatagcgatggcggtggtgcccctcgagcctccagatccatcgaggcatgtggagacgacggcaactcaagaggctccgcgcaagcaaatggggcaaagggaggtgacaggatgcgccacccctctcgcgtccccccaccgcacccgctag

SEQ ID NO: 88026 - DNA, 4752 bp, Oryza sativa
  Clone ID: PAT_MRT4530_86917C.1
atggccgaacgggcagtggcgcacaacctctctccgagcgctagcggtgacgacggggagcagaacccgcgccttcgagctcgtactccaccgtccccctctcgccgaagtcttgggcgggaggaggcgctcgaggaggtcgaaagatccgcgacttcgccgcccgcgggcaatggagaaggacggcgagacggggagcgtcgcctcctcgtctacggcgatggcagcacgccccagggcgcgctccaggctgcgggcgcgctcctgcgtcacccgcccgtcgtccccgatccagagactccagcccgacgttggctggatgacgtggccgacttggtcatgacggcgcagcagcgcctaggcgccggcgggcggtcctccgccaccaaggcctctggcgctgctaccgccggctccgtgtcgtcgaggcggagggcgcggcgagcggcggccgttacccgccgttcgtccgccattccctcgtcaacgcctccgacccaagaagatgttccggcccaccatcaccgaaaatacgacggaagcgtcaaccccgccgagtttctccagatctacacgaccgggatcgaggccgccgggagtgacgacagggtcatgacgaatttcttccccatggccctgaaaggtcaggcgcggggttggctaatgaacttgccacccgcgtcggtccactcttgggaggatttgtgccagcagttcaccatgaacttccagggcacatatccgcgcccaggtgaagaagcggacttgcatgcggtacagcgaagggacgatgagtctcttcgctcgtacattcagcggttctgtcaagtccgcaacaccataccatgcatccccgcacacgcggtgatctacgcgttcagggggggcgtgcggcacaaccgcatgctcgagaagatcgcctccaaggagtcccagaccaccgcggagctttttcagctcgcggaccgtgtggctcgcaaggaggaggcctggacctggaactcctccggttccggtgtggcagctccggccgcccccgggtccgccgctcggtcagggcggcgggacaggaggaggaagaagaggtcggcccattccgacgacgagggtcacgtcctcgccgtcgagggcgcttcgcgggccacccgaaaggggaggcctgcgtgcgacaaaaagaaggaggccggcgctcccagcagggagcgcccgaccggcaagtggtgttccgtgcacaacacctccctccacgacctcgcggactgccgcgcggtcaaaagtttggctgagcggacgaggaagtgggaggaggagaggaggcaggagcgccgtgagggcaaggccccggcggctcccgccggcaaccggcgaggtgaggccaagcagaaggccaccgccgaggacgagcctggggccaccgtcgccaccgtcgatgggggagcgtgcgctcacgcttctcgccggagcctcaaggccatgaagcgagagcttctggccgcggcccctacccataaggcgacgcggcgggcgcggtggtcggaggttgccctcaccttcgaccagaccgaccacccgccgtgcgttgcccggggaggacagatcgcgatggtggtttcccccaccgtttgcaatgtgaagttggggcgtgtcctcatatacgggggtgcagccctcaacatcctttcccccgcagcctttgacgccatcaaggccccggggatggtgctccggccgtcccagccgatcatcggtgtgacgccggggcacacttggccgctaggtcatatcgacctcccggtcaccttcggtggttccgccaacttccgtacggagcgggtgaacttcgatgtggcggacctcagtctgcccttcaacgcggtcctggggaggcccgcgttgatgaagatgccgggccccggtggacccatcaccgtccatggcgacctcaaagtcgcgcttgcttgtatggagcagcgcgcggaccacctcgccgcggcgtccaagcccgcgggtggcgacgagaggctcagcacctccgtcccagccgccccgaggcagcggatgatcacgtgcgacgaggtcccggaagacgcgctcgtctccttcctgcgggcaaacgccgacgtctttgcctggagaccggcggacatgcccggggtccccagggaggtgattgagcaccgtctcgccgtgcggccgggcgcaaggccggtccggcagaaagtgcggcggcaggccccggaacgtcaagctttcatccgcgaggaggtggcgcgacttctggaggccggattcatccgtgaggtcatccatccggagtggctggcgaacccggtcgtcgttcccaaggcgaacggcaagcttcggatgtgcatcgactacaccgaccttaacaaggcatgtcctaaggacccttaccctctgccacgcatagatcagtttgttgactccaccgcggggctgggagagaaggcgctacccctatttaagctcctcaaacgctccgggccgtttacctggacggaggaggctgagcgggccttcactcagttgaaggcgtacctcagttctcccccagtcctggtcgccccggagccagatgagccgttgctactctacctggcggcaaccccgcaggtggtcagcgcggcgttggtcgtggagcgcgacgaggacaaccctcactccgcgcatccccatcctgtgtcgactcgacccgggaaagagcagggaggagaggcccccgagccgaacggtggcccaaggcccccgacggccggagctggccctacgcctgcttgtccgacggtgccaggcgcccccgacccccaggatggccccggggccactgcgggaaggccgcgcctgtcgccctctgaccccgaggtcgtcggcacggaagccgagtgcgccccgcgcggcctctcgggtgaagagcgccctagagatgcggcccctggcgaagaagatcggccccgccgaaaggtgcagcggcccgtctactttgttagcgaggccctccgggacgccaagacccgataccctcaggcccagaagatgctttacgctattctgatggctttgaggaagttgcgccattacttccaggcgcatcgggtcacggtggttacgtcttaccccctcggccaaatcttgcataaccgagagggtactggacgggtggtgaaatgggcaatcaaactctctgagttcgatttgcaccttgaaccacgccacgcgatcaagagccaggccctcgccgactttgtggcagagtggaccccagctcccgagcccggcgccggtgcgggggtcacgttgacctcgccgagcggagacgtcctcagatacctggttcgcctcgactttcgggcgaccaataatatggcggagtacaagggactccttgcgggactcagggtggcagctggactggggatccgccgcctcctggtgttaggcgactcccagctggtcgttaaccaggtctgtaaggagtaccggtgctctgacccgcagatggacgcttacgtgcgccaggtgcggcgtatggagcgccatttcgacgggatagagcttcggcacgtgcccagacgggataacgcggtcgccgacgaactctcaaggctcgcttcctcgcgagcccagaccccactgggcgcctttgaagaaaggcttgcccagccgtcggcgcgacccgaccccctaggggagacggacgcgcctgaacggcccccgaggcccgtcggagtccaggcctcgggacccgaggggagcgctcccagctcccttagattgattgcttggatcgctgagatccaggcgtacctcgcagataagactctaccagaggaccgcgaagggagtgaacgcgtccagcgcatctccaagcgctacgtgctggtggaagggaccctctatcggcgcgcggctaacggagtcctcctgaagtgcattcctcgggaacaaggcgtcgagcttctcgccgatatccatgaaggcgagtgcggagcccactccgcctcacgcaccttggttggcaaggcctttcaccagggtttctattggccgacggctctcaactatgcggtcgacctggtccggcggtgcagggcgtgccagttccacgccaggcaaacccatcagccggcccaggccctgcagaccatacctctttcatggccgtttgctgtctgggggctcgatatcctgggaccgtttagacgggccccgggcgggttcgagtatctgtatgtcgctgtcgacaagttcactaagtggcccgaggcttatccggtcatcaagatcgataagcactccgcgcttaaattcatcaggggcatcactgctcggtttggggtgcctaaccgtatcattacggataacggcacccagttcactagtgagctcttcggtgactactgcgaagacatgggcatcaagctctgcttcgcctcccccgcccaccccagaagcaatggccaagtggagcgtgccaacgcggaaatcctcaagggcctcaaaaccaagaccttcaacatcctcaagaagcacggcgactcgtggatcgaggagctgccagcggtgctctgggcgaaccgaaccacgccaagccgagcaaccggggaaacgcctttcttcctcgtctacggcgcggaggcggtcctcccatctgagctcaccctaaggtcccctcgggccaccatgtattgcgaggctgatcaagatcagcttcgcagagacgacctcgactag

SEQ ID NO: 88027 - DNA, 600 bp, Oryza sativa
  Clone ID: PAT_MRT4530_86918C.1
atgctcaaagtggtcgagaacaaccaaatattctgcactgaatatggttttcacccggagaaaactcttgaagtgaagttgaacgagggctccagtagcaacgccttcaagaagactcggttcccacccgaggacgcgccggatctgggcaaggagccagatccggccgtcttcctctccaccaacgccggccgacgcctagaggggcgccggaggacgccagtggcagccacggggtgcctgcgtgctctggccaccaccggccgccgccggatccgggtgcaccaccgccggatccgcggcctccaccattgctaccccaacgccgtcgccattcccgccgccatcacccacaacaccacccggcgcaactcacctcaaccgccaccgtcgcccgtccccgccgccagcccatcccgccagatccggccggaacggcgcggatctggcggacaccgccgtcgccactccgggcggctccccaggccacccgagcgcgaggagacaaggagcgccccaccgccaccgtccttgcggccgcgcggcttcaccggcggccgctcgggtgacggcgaggcggagaagggggtggggggctag

SEQ ID NO: 88028 - DNA, 4353 bp, Oryza sativa
  Clone ID: PAT_MRT4530_86919C.1
atggcgcacaatctctctccgagcgctagcggtgacgatggggagcagaacccgcgccgtcgagctcgtactccactgtccccctctcgccgaagtcttgggcgggaggaggcgctcgaggaggtcgaaagatccgcgacttcgccgcacgcgggcgatggagaaggacggcgagacagggagcgtcgtctcctcgtctacggcgaatttcttccccatggccctgaaaggataggcgcggggttggctaatgaacttgccacccgcgtcggtccactcttgggaggatttgtgccagcagttcaccatgaacttccagggcacatatccgcgcccagtccgcaacaccataccgtgcatccctgcacacgcggtgatctacgcgttcaggggggcgtgcggcacaaccgcatgctcgagaagatcgcctccaaggagccccagaccaccgcggagctttttcagctcgcggaccgtgtggctcgcaaggaggaggcctggacctggaactcctccggttccggtgtggcagctccggccgcccccgggcccactgctcggtcagggcggcgggacaggaggaggaagaagaggtcggcccattccgacgacgagggtcacgtcctcgccgtcgagggcgcttcgcgggccacccgaaaggggaggcctgcgagcgacaaaaaaaaggaggccggcgctcccagtagggagcgcccgaccggcaagtggtgcaccgtgcacaacacctccctccacgacctcgtggactgccgcgcggtcaaaagtttggctgagcggacgaggaagtgggaggaggagaggaggcaggagcgccgtgagggcaataccccggcggctcccgccggcaaccggcgaggtgaggccaagcagaaggcccccgccgaggacatcaacgatggcgacgatgacctagggttccaggagcctgaggccaccgtcgccaccgttgatgggggagcgtgtgctcacgcttctcgccggagcctcaaggccatgaagcgagagcttctggccgtggcccctacccatgaggcgacgcggcgggcgcggtggtcggaggttgccctcaccttcgaccagaccgaccacccaccgtgcgttgcccggggaggacagatcgcgatggtggtttcccccaccgtttgcaatgtgaagttggggcgtgtcctcattgacgggggtgcagccctcaacatcctttcctccgctgcctttgacgccatcaaggccccggggatggtgctccggccgtcccagccgatcatcggtgtgacgccggggcacacttggccgctaggccatatcgacctcccggtcaccttcggtggttccgccaacttccgcacggagcgggtgaacttcgatgtggcggacctcagtctgccctacaacgcggtcctggggaggcctgcgttggtgaagtacatggtggcggtccactacgcctatctccagatgaagatgtcgggccccggtggccccatcaccgtccatggtgacctcaaagtcgcgcttgcttgcatggagcagcgcgcggaccacctcgccgcggcatccaagcccgcgggtggcgacgagaggctcagcacctccgtcccagccgccccgaggcagcggatgatcacgtgtgacgaggtcccgatcaagcaggaagacgcgctcgtctccttcctgcgggcaaacgccgacgtcttcgcctggagactggcggacatgcccggggtccccagggaggtgattgagcaccgtctcgccgtacggccgggcgcaaggccggtccggcagaaagtgcggcggcaggccccggaacgtcaagccttcatccgcgaggaggtggcgcgacttctggaggccggattcatccgagaggtcatccatccggagtggctggcgaacccggtcgtcgttcccaaggcgaacggcaagcttcggatgtgcatcgactacaccgaccttaacaaggcatgtcctaaggacccttaccccctgccacacatagatcagattgtcgactccaccgcggggtgcgaccttttgtgttttctagatgcatactctggttatcatcagattcgcatggctagggaggatgaggaaaaaactgcattcattacccccataggaacttattgttatacgacaatgcctttcgggttaaagaatgcaggtcctacttttcaacgtactactcgaatttctttgggtagccaaataggacgtaatgttgaggcctatgttgatgacttggttgtgaaaacacgcaaccaggagaccttactctcggatctagcggaaactttcgaaagtctccgcaccgcccgcataaagctgaaccccgacaagtgcgtgttcggcgtgcctgtgggcaagcttctcgggttcttgatctctgcccgaggcattgaggccaaccccgagaagatacgagctatagagcggatgcgccccccagcaagcttagggatgtgcaatgcgtcactggctgtggtcagcgcggcgttggtcgtggagcgcgacgaggacgaccctcgctccgcgcatccccaccctatgtcgactcgacccgggagagagcagggaggagaggcccccgagccgaacggtggcccgaggcccccgacgaccggagctggccctctgcccgcttgtccgacggtgccaggagcccccgacccccaggatggccccggggccactgcgggaaggccacgcctgtcgccttccgaccccgaggtcgtcgacacagaagccgagtgcgccccgcgcggcctctcggacgaaaagcgccctggagatgcggcccctggcgaagaggatcggccccgccaaaaggtgcagcggcccgtctactttgttagtgaggccctccgggacgccaagacccgataccctcaggcccagaagatgctttacgctattctgatggcttcgaggaagttgcgccattatttccagacgcatcgggtcacggtggttacgtcctaccccctcggccaaatcttgcataaccgagagggtactggacgggtggtgaaatgggcaatcgaactctctgagttcgatttgcactttgaaccacgccacgcgatcaagagccaggccctcgccgactttgtggcagagtggacaccggctcccgagcccgtctccatccccgaggccagctcgggcccttcgcagctgcctcacaccgcctattgggtgatgcagttcgacggctccctgtctcttcagggcgccggtgcgggggtcacgttgacctcgccgagcggagatgtcctcaaatacctggtccgcctcgactttcgggcaaccaacaatatggcagagtacgagggactccttgcgggactcagagtggcggctggactggggatccgccgcctcctggtgttaggcgactctcagttggtcgttaaccaggtctccaaggagtaccagtgctctgacccgcagatggatgcttacgtgcgccaggcgtacctcgcagataagactctacccgaggaccgcgaagggagtgaacgcgtccagcgcatctccaagcgctacgtgctggtggaagggaccctctatcggcacgcggctaacggagtcctcctggagtgcattcctcgggaacaaggcgtcgagcttcttgccgctatccatgaaggcgagtgcggagcccactctgcctcacgcaccttggttggcaaggcctttcgccagggtttctattggccgacggctctcaacgatgcggtcgacctggtccggcagtgcagggcgtgccagttccacgccaagcaaacccatcagccggcccaggccctgcagaccatacctctgtcatggccgtttgctgactgggggctcgatatcctgcgtccgtttatacgggccccgggcgggttcgagtatctgtatgtcgctatcgacaagttcactaagtggcccgaggcttatccggtcatcaagatcgataagcactccgcacttaaattcatcaggggtatcactgctcggtttggggtgcctaaccgtatcattacggataacggcacccagttcactagtgagctcttcggtgactactgcgaagacatgggcattaagctctgcttcgcctctcccgcccaccccagaagcaatggccaagtggaacgcgccaacgcagaaatcctcaagggcctcaaaaccaagaccttcaacatcctcaagaagcacggcgactcgtggatcgaggagctgccagcggtgctctgggcgaaccgaaccacgccaagccgagcaaccggggaaacgcctttcttcctcgtctacggcgcggaggcagttctcccatccgag

SEQ ID NO: 88029 - DNA, 345 bp, Oryza sativa
  Clone ID: PAT_MRT4530_8691C.1
aaagaaaagccgatccgattcgaactcgaatccatcgattcccaaaccgatttagccgaagtttccaaagcagaaaaggtagaggagatctcgaggatcatttcccctcttttgattcggccggagaaggaaaggagcggccgaatttggaagggaacggcggcggcggcgagctagggttcggccgggcgacggcggctcggggaagacgaacctgacaggcgggacccacctgtcagcgacagcgagggcgcgcgcggctgcggcggactgggccggttgggccgaggagagagagagaggggttttgggccgactttcggcccaaagccaaaagaagacttt

SEQ ID NO: 88030 - DNA, 618 bp, Oryza sativa
  Clone ID: PAT_MRT4530_86920C.1
cggccgcccttttttttttttttttttttttttttttttttttttttttttttttttttttttttttttttttttttttttttttttttggagcccaaaaaaaaggggttggcgattcacggatcactttttttttttgaaacaaaaaaaaaccttgcttgttttgggggggaaccccccttttttgacgggggggggttgctcattcattcggaggggttcctgaaccttttgaggaaaacggggatgtcctaggcgaacttgtcgtccaccccccgccccagctggggcttaaccctcccaaacttgccaaaattgaaggccctcagggtctccctggcctcacccaccctggggaatcccccgcccggaaagtgccactccttctgaaccttggaaaactgttcggcggggggggcaaacacccccttttgccccttggccttgcccataaacgccggtttttcctttttaaggggggtgattttgggagcatggcccttggttgacctcaaagccttaagaaattcggtgattcgccgggcacagggcttttttttggaatgttttttaggggggaaagaagtgctttttgttttttcttaaaagattttttac

SEQ ID NO: 88031 - DNA, 744 bp, Oryza sativa
  Clone ID: PAT_MRT4530_86921C.1
gttgcgctgctagcttctgggcaaagcaccactatcagttgcacgttcgctgggcaggtcatcatgcaggggtttctggacatgaagatgaagaattgggtaaggaacctcatcacccgagtcatcgccatagctcctagcctcatcgtctccattgtcagtggtccctcaggcgccggcaagctaatcatcctgtcatcaatgatcctgtcatttgagctgccgttcgctctcatccctctactcaagttctgcaacagcagcaagaaagttggacccctcaaggaatccatctatacggtggtgatcgcgtggatcctgagcttcgcgctcatcgtcgtcaacacctacttcctagtgtggacatacgtggactggctcgtccacaacaacctccccaagtatgccaatggcctcatctccgtggtggtgttcgcgctcatggccgcctacctggtcgccgtcgtctacctgacgttcaggaaggacacggtggcgacgtacgtgccggtgccggagcgggcgcaggcgcaggtggaggccggcgggacgccggtggtggacgcctccgccgccgacgaggaccagccggctccgtacaggaaggaccttgccgatgcttccatgtagccttgataaattattgcttgctgagtagtgcattagttattcctcgtcgtcagtgtataactagatgtgttctctggatgacataatgtgattcgtcattgattttttgttctt

SEQ ID NO: 88032 - DNA, 2835 bp, Oryza sativa
  Clone ID: PAT_MRT4530_86922C.1
atggaagggactggtgagatgagagaggttggacgagaaactctccatggaggtgtggtgcagagtgttagtgagactgatgagtacaaagaaaagactattgacagtgaaaaagatgggcagtttcgggtgcagccaagatggaggaaattcttggctcatgttgggcctggagctctggtggccattggcttcctagatcctagcaacttggaaactgacatgcaagctggagctgacttcaagtatgagcttctgtgggtcatcttagttgggatggtctttgcacttctgatccaaacattagctgccaaccttggagtgaaaacaggaaggcaccttgctgaactgtgcagggaagagtacccgcactatgtcaacattttcttatggatcattgcggagttggcggtgatttctgatgacattcctgaagtgttgggcacagcttttgcgttcaacatattgcttaagattccagtgtgggctggagttattctcacagtgttcagcaccctcttgcttcttggagtacagagatttggggctcggaagctggagttcatcatagcagcattcatgttcactatggcagcttgcttcttcggagagctaagctatttgaggccgtctgcaggagaggtggtcaagggcatgtttgtcccttctctccaagggaaaggcgctgctgccaatgcgatcgcactctttggcgctatcatcacaccatacaacttgttcttgcactctgctctggtcctgtcaaggaagaccccacgatcagacaaaagcatcagagctgcttgcagatacttccttattgagtgtagtcttgcattcatcgtggctttcctcataaatgtttcagtcgttgttgttgctggatccatttgcaatgcgaataatctttctccagctgatgccaacacgtgtggtgacctaactctgcaatccacacctcttttactcaggaatgttttggggagatcaagctcggtggtgtatgctgttgcgctgctagcttctgggcaaagcaccactatcagttgcacgttcgctgggcaggtcatcatgcaggggtttctggacatgaagatgaagaattgggtaaggaacctcatcacccgagtcatcgccatagctcctagcctcatcgtctccattgtcagtggtccctcaggcgccggcaagctaatcatcctgtcatcagaattcgctttgctcctccaaaagcaacaatatcctgaattcttgatttggatacagatgatcctgtcatttgagctgccgttcgctctcatccctctactcaagttctgcaacagcagcaagaaagttggacccctcaaggaatccatctatacggtggtgatcgcgtggatcctgagcttcgcgctcatcgtcgtcaacacctacttcctagtgtggacatacgtggactggctcgtccacaacaacctccccaagtatgccaatggcctcatctccgtggtggtgttcgcgctcatggccgcctacctggtcgccgtcgtctacctgacgttcaggaaggacacggtggcgacgtacgtgccggtgccggagcgggcgcaggcgcaggtggaggccggcgggacgccggtggtggacgcctccgccgccgacgaggaccagccggctccgtacaggaaggaccttgccgatgcttccatcatatgtatttcaaattgggaggacgaagattttatagcttggcatccagacttgcatggtagattctcagtcaggagtgcttattacttggctctgaatttgaagaatcaagaggatacaggtccgtcgaatatggcaggcgatcgtagatgggacctgatctggaagtgtgaagtccctcagaaagtgagaagttttgcttggaaggttgccactgactcccttgcaacaatggctaataaaacgaaaaggaagcttgagcggatagctacctgtggggtatgtgggtcagaaactgaagacacccagcatgctcttcttcgctgttcccagtcaagatttttgctgatggctatgcaaggtgatgggcactttcctgtgctcactgatgtgcgtatggataataaagcctggctgtttgatctgttagacaggctatccgaatctgaacgggcggcccttctcttggtgttatggcgaaattggtttgttcgtaatgaaatcgtccatgagaaaacccctccaacgatcgagtcttctaaaagattccttgagagctatattcagtcactgttcaacatccgacaaaagtctgtagttggttcagagaaaggaaaaaacgttctaatctgtcttggcttatgggaaagaggtccctccaggatcaagaccagcttgcaaacaaaaatgggtgagaccgcaaaccggatggttgaagagaaggggggcattggcatagtcatgagggactgggaggggagggtgatttttgcttcctgcaaaaccctgaacagctgtcatagtgcattagaagcagagttggtcgcgtgcagagagggtattgccttggcgcttcagtggacgctgctcccagtacaggtggaaacggactgcttggtagcgttacaaatgatccaagccaaagaagttgagcgctcggagcttgcctttgccgttagagagattaaggatctcctcgctggaagtcgggagtgtttgctcaggaaggttcatagaagccaaattttagttagtcatatgttagctaataaaagtcgcagtgaaaacttgtcgggattttggtgtgaaaatgattgcacctttatctcaaagcttgtaattgacgatattattcctgagtaa

SEQ ID NO: 88033 - DNA, 5849 bp, Oryza sativa
  Clone ID: PAT_MRT4530_86923C.1
atggccgaacgggcagtggtgcacaatctctctccgagcgctagcggtgaagacggggagcagaacccgcgccgtcgagctcgtactccactgtccccctctcgccgaagtcttgggcgggaggaggcgctcgaggaggtcgaaaaatccgcgacttcgccgcacgcgggcgatggagaaggacggcgagacggggagcgtcgtctcctcgtctacggtgatggcagcacgccccagggcgcgctccaggctgcgggcgcgctcctgcgtcacccgcccgtcatccctgatccagagactccaactggacgttggctagatgacgtggccaatttggtcatgacggcgcagcagcgcctaggcgccggctggcggtcctccgccaccaaggccactggcgttgctactgctggctccgtgtcgtcgaggcggagggcgcggcgagcggcggccgctacccgccgttcgtccgccattccctcgtcaacgcctccaacccaagaagatgtgcttagggggccagatgcccgcttcaatatcgagcgccggcgcaatgatcgccgtgctgcccacgcatcggagggcgcttccttgtccggagcgccacttcggtccgggcacgggggccaccccccgtgtccccggttggcggtgccggctgtcgagcctttgtggcaagccttcggaacgtccgttggcccccaaggttccggcccaccatcaccgaaaaatacgacggaagcgtcaaccccgccgagtttctccagatctacacgactgggatcgaggccgccgggggtgacgacagggtcatggcgaatttcttccccatggccctgaaaggacaggcgcggggttggctaatgaacttgccacccgcgtcggtccactcttggaggatttgtgccagcagttcaccatgaacttccagggcacatatccgcgcccaggtgaagaagcggacttgcacgcggtacagcgaggggacgatgagtctcttcgctcgtacattcagcggttttgtcaagtccgcaacaccataccgtgcatccctgcacacgcggtgatctacgcgttcagggggggcgtgcgccacaaccgcatgctcgagaagatcgcctccaaggagccccagaccaccgcggagctttttcagctcgcggaccgtgtggctcgcaaggaggaggcctggacctggaactcctccggttccggtgtggcagcttcggccgcccccggatccgccgctcggtcagggcgacgggacaggaggaggaagaagaggtcggcccattccgacgacgagggtcacgtcctcgccgtcgagggcgctttgcgggccacccgaaaggggaggcctgcgagcgacaaaaagaaggaggccggcgctcccagcagggagcgcccgaccggcaagtggtgcaccatgcacaacacctccctccacgacctcgcggactgccgcgcggtcaaaagtttggctgagcggacgaggaagtgggaggaggagaggaggcaggagcgccgtgagggcaataccccggcggctcccgccggcaaccggtgaggtgaggccaagcagaaggcccccgccgaggacatcaacgatggcgacgatgacctagggttccaggagcctgaggccactgtcgccaccgttgatgggggagcgtgtgctcacgcttctcgccggagcctcaaggccatgaagcgagagcttctggccgtggcccctacccatgaggcgacgtggcgggcgcggtggtcggaggttgccctcaccttcgaccagaccgaccacccaccgtgcgttgcccggggaggacagatcgcgatggtggtttcccccaccgtttgcaatgtgaagttggggcgtgtcctcgttgacgggggtgcagccctcaacgtcctttcccccgctgcctttgacgccatcaaggccccgtggatagtgctccggccgtcccagccgatcatcggtgtgacgccggggcacacttggccgctaggccatatcgacctcccggtcaccttcgatggttccgccaacttccgcacggagcgggtgaacttcgatgtggcggacctcagtctgccctacaacgcggtcctggggaggcccgcgttggtgaagttcatggtggcggtccactacgcctatctccagatgaagatgccgggccccggtggccctatcaccgtccatggcgacctcaaagtcgcgcttgcttgcatggagcagcgcgcggaccacctcgccgcggcatccaagcccgcgggtggcgacgagaggctcagcacctccgtcccagctgccccgaggcagcggatgatcacgtgtgacgaggtcccggaagacgcgctcgtctccttcctgcgggcaaacgccgacgtcttcgcctggagaccggcggacatgcccggggtccccagggaggtgattgagcaccgtctcgccgtacggccgggtgcaaggccggtccggcagaaagtgcggcggcaggccccggaacgtcaagccttcatccgcgaggaggtggcgcgacttctggaggccggattcatccgagaggtcatccatccggagtggctggcgaacccggtcgtcgttcccaaggcgaacggcaagcttcggatgtgcatcgactacaccgaccttaacaaggcatgtcctaaggtccaccacggggtgcgaccttttgtgttttctagatgcatactctggttatcatcagattcgcatggctagggaggatgaggaaaaaactgcattcattacccccataggaacttattgttatacgacaatgcctttcgggttaaagaatgcaggtcctacttttcaacgtactactcgaatttctttgggtagccaaataggacgtaatgttgaggcctatgttgatgacttggttgtgaaaacacgcaaccaggagaccttactctcggatctagcggaaactttcgaaagtctccgcaccgcccgcataaagctgaaccccgacaagtgcgtgttcggcgtgcctacgggcaagcttctcgggttcttaatctctgcccgaggcattgaggccaaccccgagaagatacgagctatagagcggatgcgcccccccagcaagcttagggatgtgcaatgcgtcactggctgtatggccgccctaagtcggttcatatcgaggctgggagagaaggcgctacccctatttaagctcctcaaatgctccgggccgtttatctggacggaggaggctgaacgggctctcactcagttgaaggcgtacctcagttctcccccagtcctggtcgccccggagccagatgagccgttgctactctacctggcggcaactctgcaggtggtcagcgcggcgttggtcgcggagtgcgacgaggacgaccctcgctccgcgcatccccaccctgtgtcgactcgacccgggagagagcagggaggagaggcccccgagccgaacggcggcccgaggcccccgacgaccggagctggccctctgcccgcttgtccgacggtgctaggagcccccgacccccaggatggccccggggccactgcgggaaggccgcgccagtcgccttccgaccccgaggtcgtcgacacagaagccgagtgcgccccgcgcggcctctcggacgaaaagcgccctggagatgcggcccctggtgaagaggatcggccccgacaaaaggtgcagcggcccgtctactttgttagtgaggccctccgggatgccaagacccgataccctcaggcccagaagatgctttacgctattctgatggcttcgaggaagttgcgccattatttccaggcgcatcgggtcacggtggttacgtcctaccccctcggccaaatcttgcataaccgagagggtactggacgggtggtgaaatgggcaatcgaactctctgagttcgatttgcactttgaaccacgccacgcgatcaagagccaggccctcgccgactttgtggcagagtggacaccggctcccgagcccgtctccatccccgaggccagctcgggcccttcgcagctgcctcacaccgcctattgggtgatgcagttcgacggctccctgtctctttagggcgccggtgcgggggtcacgttgacctcgccgagcggagatgtcctcaaatacctggtccgcctcgactttcgggcaaccaacaatatggcagagtatgagggactccttgcgggactcagagtggcggctggactggggatccgccgcctcctggtgttaggcgactctcagttagtcgttaaccaggtctccaaggagtaccagtgctctgacccgcagatggatgcttacgtgcgccaggtgcggcgtatggagcgccattttgacgggatagagcttcggcacgtgcccagacgggataacgcggtcgccgacgaactctcaaggctcgcttcctcgcgagcccagaccccaccgggcgcctttgaagaaaggcttgcccagccgtcggcgcgacccgaccccctaggggagacggacgtgcctgaacggcccccgaggcccgtcggagtccaggcctcgggacccgaggggggcgctcccagctcccttagattgattgcttggatcgctgagatccaggcgtacctcgcagataagactctacccgaggaccgcgaagggagtgaacgcgtccagcgcatctccaagcgctacgtgctggtggaagggaccctctatcggcacgcggctaacggagtcctcctgaagtgcattcctcgggaacaaggcgtcgagcttcttgccgatatccatgaaggcgagtgcggagcccactctgcctcacgcaccttggttggcaaggcctttcgctagggtttctattggccgacggctctcaacgatgcggtcgacctggtccggcggtgcagggcgtgccagttccatgccaagcaaacccatcagccggcccaggccctgcagaccatacctctttcatggccgtttgctgtctgggggctcgatatcctgggtccgtttagacgggccccgggcgggttcgagtatctgtatgtcgctatcgacaagttcactaagtggcccgaggcttatccggtcatcaagatcgataagcactccgcacttaaattcatcaggggtatcactgctcggtttggggtgcctaaccgtatcattacggataacggcacctagttcactagtgagctcttcagtgactactgcgaagacatgggcattaagctctgcttcgcctctcccgcccaccccagaagcaatggccaagtggagcgcgccaacgcagaaatcctcaagggcctcaaaaccaagaccttcaacattctcaagacgcacggcgactcgtggatcgaggagctgccagcggtgctctgggcgaaccgaaccacgccaagccgagcaaccggggaaacgcctttcttcctcgtctacggcgcggaggcggttctcccatccgagctcaccctgaggtcccctcgggccaccatgtactgcgaggctgatcaagattagcttcgcagagatgacctcgactacttggaagaacgaaggcggcgcgcggtccttcgagccgcgcgctaccagcagagcctgcggcgctaccatcagcgtcacgtccgggcccgatcactctgcgtcgacgacctcgtcctacgctgcgtccaaacgcgtgctggactgagcaagctctcaccaatgtgggagggtccgtatcgagtgatcggcgtcccccggccgggctccgttcggctggccacgggcgacggcacagagctgcctaacccgtggaacatcgaacaccttcgtcgcttctacccc

SEQ ID NO: 88034 - DNA, 5868 bp, Oryza sativa
  Clone ID: PAT_MRT4530_86924C.1
atggccgaacgggcagtggcgcacaatctctctccgagcgctagcggtgaagacggggagcagaacccgcgccgtcgagctcgtactccactgtccctctctcgccgaagtcttgggcgggaggaggcgctcgaggaggtcgaaagatccgcgacttcgccgcacgcgggcgatggagaaggacggcgagacggggagcgtcgtctcctcgtctacggagatggcagcacgccccagggcgcgctccaggctgcgggcgcactcctgcgtcacccacccgtcatccctgatccagagactccaacccgacgttggctagatgacgtggccaatttggtcatgacggcgcagcagcgcctaggcgccggctggcggtcctccgccaccaaggccactggcgttgctactgctggctccgtgtcgtcgaggcggagggcgcggcgagcggcggccgctacccgccgttcgtccgccattccctcgtcaacgcctccaacccaagaagatgtgcgtagggggccagatgcctgcttcaatatcgagcgccggcgcaatgatcgccgtgctgcccacgcatcggagggcgcttcctcgtccggagcgccacttcggtccgggcacgggggccagccccccatgtccccggttggcggtgccggctgtcgagcctttgtggcgagccttcggaacgtccgttggcccccaaggttccggcccaccatcaccgaaaaatacgacggaagcgtcaaccccgccgagtttctccagatctacacgactgggatcgaggccgccgggggtgacgacagggtcatggcgaatttcttccccatggccctgaaaggacaggcgcggggttggctaatgaacttgccacccgcgtcggtccactcttgggaggatttgtgccagcagttcaccatgaacttccaaggcacatatccgcgcccaagtgaagaagcggacttgcacgcggtacagcgaggggacgatgagtctcttcgctcgtacattcagcggttttgtcaagtccgcaacaccataccgtgcatccctgcacacgcggtgatctacgcgttcagggggggcgtgcgccacaaccgcatgctcgagaagatcgcctccaaggagccccagaccaccgcggagctttttcagctcgcggaccgtgtggctcgcaaggaggaggcctggacctggaactcctccggttccggtgtggcagcttcggccgcccccggatccgccgctcggtcagggcgacgggacaggaggaggaagaagaggtcggcccattccgacgacgagggtcacgtcctcgccgtcgagggcgctttgcgggccacccgaaaggggaggcctgcgagcgacaaaaagaaggaggccggcgctcctagcagggagcgcccgaccggcaagtggtgcaccgtgcacaacacctccctccacgacctcgcggactgccgcgcggtcaaaagtttggctgagcggacgaggaagtgggaggaggagaggaggcaggagcgccgtgagggcaataccccggcggctcccgccggcaaccggcgaggtgaggccaagcagaaggcccccgccgaggacatcaacgatggcgacgatgacctagggttccaggagcctgaggccactgtcgccaccgttgatgggggagcgcgtgctcacgcttctcgccggagcctcaaggccatgaagcgagagcttctggccgtggcccctacccatgaggcgacgcggcgggcgcggtggtcggaggttgccctcaccttcgaccaaaccgaccacccaccgtgcgttgcccggggaggacagatcgcgatggtggtttcccccaccgtttgcaatgtgaagttggggcgtgtcctcgttgacgggggtgcagccctcaacatcctttcccccgctgcctttgacgccatcaaggccccggggatggtgctccggccgtcccagccgatcatcggtgtgacgccggggcacacttggccgctaggccatatcgacctcccggtcaccttcggtggttccgccaacttccgcacggagcgggtgaacttcgatgtggcggacctcagtctgccctacaacgcggtcctggggaggcccgcgttggtgaagttcatggtggcggtccactacgcctatctccagatgaagatgccgggccccggtggccccatcaccgtccatggcgacctcaaagtcgcgcttgcttgcatggagcagcgcgcggaccacctcgccgcggcatccaagcccgcgggtggcgacgagaggctcagcacctccgtcccagccgccccgaggcagcggatgatcacgtgcgacgaggtcccgatcaagcaggaagacgcgctcgtctccttcctgcgggcaaacgccgacgtcttcgcctggagaccggcggacatgcccggggtccccagggagtggctggcgaacccggtcgtcgttcccaaggcgaacggcaagcttcggatgtgcatcgactacaccgaccttaacaaggcatgtcctaaggacccttaccacctgccacgcatagatcagattgtcgactccaccgcggggtgcgaccttttgtgttttctagatgcatactctggttatcatcagattcacatggctagggaggatgaggaaaaaactgcattcattacccccataggaacttattgttatacgataatgcctgtcgggttaaagaatgcaggtcctacttttcaacgtactactcgaatttctttgggtagccaaataggacgtaatgttgaggcctatgttgatgacttggttgtgaaaacacacaaccaggagaccttactctcggatctagcggaaactttcgaaagtctccgcaccgcccgcataaagctgaaccccgacaagtgcgtgttcggcgtgcctgcgggcaagcttctcgggttcttgatctctgcccgaggcattgaggccaaccccgagaagatacgagctatagagcggatgcgcccccccagcaagcttagggatgtgcaatgcgtcactggctgtatggccgccctaagtcggttcatatcgaggctgggagagaaggcgctacccctatttaagctcctcaaacgctctgggccgtttatctggacggaggaggctgaatgggccctcactcagttgaaggcgtacctcagttctcccccagtcctggtcgtcccggagccagatgagccgttgctactctacctggcggcaactccgcaggtggtcagcgcagcgttggtcgtggagcgcgacgaggacgaccctcgctccgcgcatccccaccctgtgtcgactcgacccgggagagagcagggaggagaggcccccgagccgaacggtggccccgaggcccccaacgaccggagctggccctctgcccgcttgtccgacggtgccaggcgcccccgaccccaggatggccccaaggccactgcgggaaggccgcgcctgtcgccctctgaccccgaggtcgtcggcacagaagccgagtgcgccccgcgcggcctctcggacaaagagcaccctgtatcgactcgacccgggagagagcagggaggagaggcccccgagccgaacggcggcccgaggcccccgacgaccggagctggccctctgcccgcttgtccgacggtgccaggagcccccgacccccaggatggccccggggccactgcgggaaggccgcgcctgtcgccttccgaccccgaggtcgtcgacacagaagccgagtgcgccccgcgcggcctctcggacgaaaagcgccctggagatgcggcccctggcgaagaggatcggccccgacaaaaggcgcatcgggtcacggtggttacgtcctaccccctcggccaaatcttgcataaccgagagggtactggacgggtggtgaaatgggcaatcgaactctctgagttcgatttgcactttgaaccacgccacgcgatcaagagccaggccctcgctgactttgtggcagagtggacaccggctcccgagcccgtctccatccccgaggccagctcgggcccttcgcagctgcctcacaccgcctattgggtgatgcagttcgacggctccctgtctcttcagggcgccggtgcgggggtcacgttgacctcgccgagcggagatgtcctcaaatacctggtccgcctcgactttcgggcaaccaacaatatggcagagtacgagggactccttgcgggactcagagtggtggctggactggggatccgccacctcctggtgttaggcgactctcagttggtcgttaaccaggtctccaaggagtaccagtgctctgacccgcagatggatgcttacgtgcgccaggtgcggcgtatggagcgccattttgacgggatagagcttcggcacgtgcccagacgggataacgcggtcgccgacgaactctcaaggctcgcttcctcgcgagcccagaccccaccgggcgcctttgaagaaaggcttgcccagccgtcggcgcgacccgaccccctaggggagacagacacgcctgaacggcccccgaggcccgtcggagtccaggcctcgggacccgaggggggcgctcccagctcccttagattgattgcttggatcgctgagatccaggcgtacctcgcagataagactctacccgaggaccgcgaagggagtgaacgcgtccagcgcatctccaagcgctacgtgctggtggaagggaccctctatcggcacgcggctaacggagtcctcctgaagtgcattcctcgggaacaaggcgtcgagcttcttgccgatatccatgaaggcgagtgcggagcccactctgcctcacgcaccttggttggcaaggcctttcgccagggtttctattggccgacggctctcaacgatgcggtcgacctggtccggcggtgcagggcgtgccagttccacgccaagcaaacccatcagccggcccaggccctgcagaccatacctctttcatggccgtttgctgtctgggggctcgatatcctgggtccgtttagacgggccccgggcgggttcgagtatctgtatgtcgctatcgacaagttcactaagtggcccgaggcttatccggtcatcaagatcgataagcactccgcacttaaattcatcaggggtatcactgctcggtttggggtgcctaaccgtatcattacggataacggcacccagttcactagtgagctcttcggtgactactgcgaagacatgggcattaagctttgcttcgcctctcccgcccaccccagaagcaatggccaagtggagcgtgccaacgcagaaatcctcaagggcctcaaaaccaagaccttcaacatcctcaagaagcacggcgactcgtggatcgaggagctgccagcggtgctctgggcgaaccaaaccacgccaagccgagcaaccggggaaacgcctttcttcctcgtctacggcgcggaggcggttctcccatctgagctcaccctgaggtcccctcgggccaccatgtactgcgaggctgatcaagatcagcttcgcagagatgaccttgactacttggaagaacgaaggcggcgcgcggcccttcgagccgcgcgctaccagcagagcctacggcgctaccatcagcgtcacgtccgggcccgatcactctgtgtcgacgacctcgtcctacgccgcgtccaaacgcgtgctggactgagcaagctctcaccaatgtgggagggtccgtatcgagtgatcggcgtcccccggccgggctccgttcggctggccacgggcgacggcacagagctgcctaacccgtggaacatcgaacaccttcgtcgtttctacccctag

SEQ ID NO: 88035 - DNA, 308 bp, Oryza sativa
  Clone ID: PAT_MRT4530_86925C.1
caaacaaaaacatgggttttctttttttttcccccatttgtttttttgctcccggccaaaggaaggcctttttttttttccacccccagggggtaatccacacggttggttttattgccctagggcccatttctgggggccctaggataacctacccggtgggaaacacccccggtccaatgggggatgtccacgttgcaaaacccgggggggtttgccgccgacccttcgaagttccttttcgggaagccgggaaacactttggccagggggggccaaaaatcgggggccccaggctccttgaaaaa

SEQ ID NO: 88036 - DNA, 357 bp, Oryza sativa
  Clone ID: PAT_MRT4530_86926C.1
atgtgtcgcgggggtgctgccgctgacgacgcgcagtcgcaggcgcagggccatgtggatggtggccgccgccacaaaccctacggcgcctctcgcccgcgccggcgcacgcccacgccgcccgcgccacccgcgctgtcgcacgcctgcgccgtacggccgcacgcccccaccgcgctagccgccgccgcacgccagcgccgcgctcgccgcacgcccgcacgccacccgcccaccaccgcgctcgctgccgtacgcccccaccacgcgccgcacacaatacaggcctgcgcagctgtgtgttctgcacgcagcatggcagcggtctccggctccggcaacgacgacggcaagtga

SEQ ID NO: 88037 - DNA, 492 bp, Oryza sativa
  Clone ID: PAT_MRT4530_86927C.1
atggcgcggatgagtaatttatgcctgtccggctcggttggtgtgaatcggacgtggttggacggccacgatgccgacgaccaggacgacggaccgttcgccgcctccaccgcgtcaacgagagaagcagagaagggaagggggaaacttgccggcttccccgacgacctctgcctcaccggctcacatggcgtgttgtgcgacgacgacgacgacgcgtcccaccgtagcgccctccgcctccgcctccgccacgctcctcacgtccggcctcctcccgcctccttcccgcgcctacacagcctcttcgtctacgcgcggccgctcccgccgctcaagtggcggctccctcccacgctccaggacctcgtgctcgtcaacaaccccgcgctctccggccgcctcgccatctccgtcgcctgcctcccgctcctctgcaaacgtggtggtggagggcggagcttggtggcgagtggcggtgcgcatggctag

SEQ ID NO: 88038 - DNA, 231 bp, Oryza sativa
  Clone ID: PAT_MRT4530_86928C.1
atgccgtcaccgagtatggactatggagaatccgacaaggatagaggaaaggacggcaggatctttggcccggatccagcgaacaccaccctcgccacctctcaacagctatcccctgactcgatccaccgccagatctgggccaacgtggctgaaggaaaagctggtgaggagaaagaaagaggaagggagggaatgaacgatgccgggccaccgagcaccgctgcctga

SEQ ID NO: 88039 - DNA, 505 bp, Oryza sativa
  Clone ID: PAT_MRT4530_86929C.1
gcgccccgaccaccagccaccagccaccggcatcggcacccccgatcgcgaccaccccgccgccgaacgccgccgctgccgccgccgcctctctccgccaccgccccagctcgccgccccaccgtcgagcgccaccaacccgccgccaccgtgcgccacttccacgagaggaaaaaggaaaccctaatttccaaatccaccgcttcttccgacaatgtcccgaagaatcatgaatcgcgaatccttcaatcccccctccctacccaatctcgccgcctcccgctgctggccggagtcggtaattctgtctaaccgggcgtacatcgccgactgcaagaaccctacaaccgcaacagcgcagtcaagagatggtcacaccgtgcaaatctctttctgcttcgccgaggcgcctgtgatctcatatttctgtgcgcactgctacaatcccagggttaaggttgagttcttcaccgagcccatcatagtggccggggaaggtgctttt

SEQ ID NO: 88040 - DNA, 404 bp, Oryza sativa
  Clone ID: PAT_MRT4530_8692C.1
aaaagaaaactaaatttcattcactttcgttgagtttaaaaaccaggcaaataaattcaaccctgtttttgctcggctcttataaaacgggcgggaaaaaaccggcaacccccaacaatttttcttccacatcatccttttttggaaatccctgacccccttaaaagggcaaaataaggactgccccagttcatttttacccctttcaaatccaataaaaaaataacctttccacccccggaacagcagcagcagcaaagcttctcttcggccccaaccccctttttgggaacctccccctcccgagggggggcgtcctttccccatcccaccccccggggggcctctagggactgggcaaacaaggggccgcacttctgggggggggcgaccccccccaaccg

SEQ ID NO: 88041 - DNA, 153 bp, Oryza sativa
  Clone ID: PAT_MRT4530_86930C.1
gtctgccagcgtggttccagctatagctctatgatgtatccgaacgtggaggatcactgggatagaattcagggctgtcaccacctgccgcctacctctgacaaaaccgtgggatacacaacaaacaaagccgcggtcacccacgtggcctga

SEQ ID NO: 88042 - DNA, 336 bp, Oryza sativa
  Clone ID: PAT_MRT4530_86931C.1
ggggccctaaaaggtttaaggggttggggggattttcaaccgggtacattcgcaggggggttaaatctgggcccttttcaaaagggggggtttgcagggcccacattcctccgtgccgtgaagcttaccaaaagcccctgggggttcattcacttgtcgaagttacccttgggccttcccttgaaccccattttgcccaaggggagcccccggaacagcccaaggggccacggttccaaccccaaccagaacgggaagttttgcccccgctgctaggggaaatgggaaagctccttgccctttcttgaaaaaaaaagcccctcgagggtttttccc

SEQ ID NO: 88043 - DNA, 2174 bp, Oryza sativa
  Clone ID: PAT_MRT4530_86932C.1
atggacgaggtgggcgcggccaggcggcgcgcggtcgaccgcggggccggggccggggccgggctcaacaccatcgtcatgaacgccgtgctcgaggcatgcgtccgctgcggcgacgtcggccttgcgctcagcctgttcgacgagatgcgcggccccggtgggtgcggcgtcgacggcgtctcctacggcatcctgctcaagggtctggggatagcgagaaggatagatgacgcatttgagatactggagtcaattgagaaagatacctctattgggagtccccggctctctcctcatcttatttgtggttttctaaatgcccttattgaagctggttggtacaagatttacctttttatctttcagtatataattgttattagaatactaggatgcacaggagatatgcggcgtgccaatgctcttgttgcccgttttcgccaagtcctttatgaaggccactccgtcttactatacaacttgctgatgaagggatacataaaaagcaacttccctcttggagctttgactgtgaaagatgagatattacgtcaaggtttaaagcctgatagattgacctacaacaccataatttctgcctgtgtaaaatcagcagaaattgatatggctatccgatttctggaagatatgaaggaagaagctaaaagggataataatcctgaactccttccagatgctgttacctacacaacattacttaagggtttaggaaatagccaagacctttattcagttttgaagattgtggtggagatgaaatctgcacctatttctattgaccggacggcatacacagcaatggtagatgccttgctagcctgtgggtctattaacggggctctttgcatttttggtgagataataaagcaggctggcaacaacaaagacttgagacccaaacctcatctttatctttcaattatgagagcttttgctaccataggtgatttagatatggtcaagagactgaacaaacgcatgtggccagattcagttggatcaattagccgttcggcaaaagaagaggcagatgaactactaatggaagctgccctcaataataatcaggtccatgatgtttcattatttgactacaagtatattcttcccatttttcatattataatagatggccatacaacaaatactgcaaattttctgaagagtataattggtttcagcaaactgtaccttaaggcttcccaagtggtggcagttaaagttgaaaccctgtctggattcaccaactctcttcttagacctcatgtttttccacagattgtcttgaatgatcctgttgagaagtatatgattccatttcaagaaacccagccattgcatgctgacttaatcttggaggaggttgtcatgcgattcttcaaggatcctgtagttcctattgttgatgactggggaagctgcgtgggtattgttcaccgacaggattgtaccaagatcgatgcgcctcttctatcaatgtcgagaggaccaccgctatgtgttcctacgtccacctctgtcgagcatgtcatagatctcctcctcagagaaaaatctgaaatggtggtcgtggtgaaaagaggcaacatgtacgaaggcagttacgcatccagctcgcgcccgttgggagttttctccctcgcaatcttgtggaagttcaccgctgacgcgacagacatcgatggcatggacgcagcgcaccagctccagcaggatgtggaagccagcaattgtggctgagtgcattgctagttttttctgtgactccacatctgtgattggctgggtgaaaagtcttgggctaatgaatggctttgctcgaagcgcagtgaattggttttgctctgcccatatgtgtccattgggccatagcataaagcgttgtcatcgacgaactgtagtgattctgtccccattgacagatgtaatttgatgtactacacatcaaagtgggctactacgtgtgttgggattgtggattgtgagccaatggcacagctagtttgggaaccaaaaaaaaaaaaaaaaggccctcgtcccttcttctccccctcgcatcccggggtagtccatgtctcccaaccaatgggggaagacctcacctgccaccccttcgtccttctccgggggaccaaaaccttttgcaactg

SEQ ID NO: 88044 - DNA, 329 bp, Oryza sativa
  Clone ID: PAT_MRT4530_86933C.1
ggatagaaagaaaagggtttatttttttgtagcatccaaacaatacaaaactttcccattctttatttttaagggaaaaccgaatgcaaaactggcacacaaattattttttttccgggttatttaaaagcctagcatgatcttatttgaagctccagttttccattggacaaaaattgcagttttcagttagaccaaaatagtcagcttttttataccctgaaaaagctcaaacagggcaacttctgtcaagtaggagctgactaataaaggggctggggcattttaggatttcaggaaaatgacgggacatttttaccttttttttg

SEQ ID NO: 88045 - DNA, 440 bp, Oryza sativa
  Clone ID: PAT_MRT4530_86934C.1
gccagtcgatcattggaaggccagttttcagagaaaaacacagtaacaacagaaggttacagactacgggagactcgtccatgatcgcatcagcaagctgctgactcccaccctcaatatcaaaatcaggaaactaggtcagagatcatttgttgttcacagagaatgtgacatcagtttcagtttaagaactgatggaagtgcacagggcaacgacgagtgcacaaaaacactaggcatgtgctccggctccccagcacgaacaagaaacagatctacttatttcaggcaaaggattatctagtgacatgtcggcagcacatgagctttcggtgttaaaggcagagatagtctgcatgcgtacatgcttttctgagacacattgtgaacttcatccgtttgccatcctttctgatgaatctaagcagacttcaagccat

SEQ ID NO: 88046 - DNA, 1311 bp, Oryza sativa
  Clone ID: PAT_MRT4530_86935C.1
atggcaacagaagcagcagcaacagcaagatgtcttcttcttcctcttctttctcctctccaatctccacacaagcagcagcaactcatctttgctgctcttctccttctcttcttcttctcttcactccagagtttgcactgctatgctgctgctggttacaatgagcagcaggaagctgatagggtggccttcctccccgggcagccaagcagcccgaaggtctctcagttctcaggctacatcactgtgaacaggcagaatggcagggcactcttctactggttctttgaggcccaggcactgccctctcagaagcctctcctgctctggctcaatggagggccaggttgctcatcagttggatatggagctgcctctgaactagggcccctcagagttagcagaaatggagctgggcttgagttcaacaaatttgcatggaacaaagaggccaatttgctgttcttggagtccccagttggggttggcttctcctacaccaacacatcctctgacctcaccaaactgaatgatggttttgtagccgaggacgcatataatttcctggtaaattggttggacagatttccacagtacaaagaccatgaattctatatttcaggagagagctatgcaggtcactatgtgccacagcttgcagaccttgtctatgagaggaacaaagacaagaaggccaacagatatatcaaactgaaagggttcattgttggtaatccacttactgatgatcagtacgactcaaaaggtcttgttgaatatgcttggagccacgcagttgtgtcagatggaatttatgagcgcgtcaagaaggtgtgcaacttcaagatctcaaactggacgaatgattgcaatgaagccatgagtagtattttcagacaataccaagagattgacatctacaatatctatgcacccaagtgcaatcttgctcaaacatcaagagtagctgctttcgatcacgcactcgaagcaagcgatcaggaacaattcagtaggaggattaggatgttctcaggatatgacgcgtgctactcatcatatgctgagaagtacttcaacaagccagacgtgcagaaagcattccatgcaaatgcaaatgggatgctccctggaaaatggaagctatacatatacgaggggcatatatggaccctttttgggcctagaaccacacacacatgtacacagcccacacccacaaatatacactgcccaacagtccccctcaagatgggcgataaatatctatcatgcccatctcgctacatgacgacatacactatttaa

SEQ ID NO: 88047 - DNA, 115 bp, Oryza sativa
  Clone ID: PAT_MRT4530_86936C.1
gttctcctcgagcgaccggacgccaaaatggatcgatgactctcattctccaccaaccaattatataatacagttggctctgctggccaatcgatgataccacgccactacactc

SEQ ID NO: 88048 - DNA, 1345 bp, Oryza sativa
  Clone ID: PAT_MRT4530_86937C.1
atctgaacttcttaagagtctgaaaccctgaactttttgcaaacttctgaaggataagggccgtccgatctgatccagacggttaagatattcggaaaattaacacttgtccacgactttttgcgagaaaccccctcctagtatatggtcttctcgttccaagtccccgtctccatccccatccccatccccttgcctgcccggacttctccgccggattggccttgccggccgccggggaaggacggcctagtggcttcaatgttgggttcgtctgccgccgcgctggatccgccgacgccgatggcttccgtacggggcagtggtgctctccggcacccgcggcatgcgagcggaaacctgcggtggtccgagggttcccggggtgaactaagggtcgcggcacgagccctggcggaagctcattgagacgctcggtgaagaggcggagaggatttctcaccgttggtacctcctcctcctcctcccacctctgctcctgctgcttctttgtcgtattacaaggtcgcggttcctagggtttggatgccatttactttcctgcagtggtttctaggatttggtcgcgatttgtagggtttggacgcgactttgttgtgtgttgtcaaaagatctggaagggttgcatccgatggtattaaggagactcgttctgtatttatgtttaaggtttgcatatgacgtgagaatgagaggattaggaggatttctaaaagattttagggtgtctggtttgagcggttttaccatgtttacttgtttgctggtttacgttatagaccctttgctgtttttcaggacgtatgcttgcaaaactatgatggctagttgcaatttgggattgtttttgtgttttacaatctaatgcaaataaattctatgctcagactatgtatctttggggttgtgtacgaaagggcacgtagtctagtggttacagtgacctgagtagtaccccaagatcctgagttcaaatctccataggagcgaatttcagattaggttgtttgcggggttaagttccctatttcaatggccgtatatatccggttccggttggatgtagaggccggtatatatatccggttccggttggatgcagaggccggtaaaaaatacccttctctaaaaaaaaatctttagggttgtgtatatcctgtgggatgtagaggcagggttttaatccattatctaaaaaaaaataaattctatgtctaaattcgaagcaaatgcagtgtttggtagtggtgatgtctagctcaatcttcagatggcatatggattcattgactgcaatctgtgatctttacgttctagatcgcga

SEQ ID NO: 88049 - DNA, 521 bp, Oryza sativa
  unsure (1)..(521): unsure at all n locations
  Clone ID: PAT_MRT4530_86938C.1
ggattatatagttntatagaagataacaagggcttaattaacataatgatatggttcaaggattacaagttgagcacaagccacttcacaggtgaagataactaggagcaaacaccctttctttctttacaaaatgaaagctctaaaacctggaagggaaggtgaagaaaagtagaaaacatacaccaaagggggggagggggggtcacctatactagtcagttcatcataattagacagcaaaaaaacagtgcaaactagaaacgaagccaaatctttgatctggttcacttcacaattcgccctgaaaaagaggctctctatatgttaaacattagggcaggcacttccatggtgagttatatggcggcgactgcgggtgctagggtaacctccatggcaggaggcggctcaggccaggagaactcaaagggagcttcaatggcaggtaatggagcaggcagcgggatcttctctgggcatgattcgggttaatggaacccgaactggagaccgggggg

SEQ ID NO: 88050 - DNA, 1926 bp, Oryza sativa
  Clone ID: PAT_MRT4530_86939C.1
atggagcctgagacgtgcttggttgatagcacggcaacgcacacgatactacgggagactaagtacttcacgacactgcgtaagagggatgagaacatcctcaccattgctgggagtaatggtctcatagttggctcagggaaagccacagtcgtcctccctatgggtacaaggatcttcattgaagaagcattcctatacccaagtgctgaacgcacactccttacctttaaggatattcgtcgctgcggttaccaccttgccacaacccgtgaaggaggagaaaaatttctcttcatgacatcgtctgagggcgatgagaccacggtggttgagaaaatgccagggagcttcgatggactgtactacactaagataaaacccccatatgaatacattgcgatgcagaccatctttaagaacccaaaggccattcagatatttcatggtgttgatagatgcttctacaaggtggagccatggggaggaaagtacctcgactctaaggaatgccgtgaaatagaatggaactcaagtagtatccatactcttgacccgcgttcgccagatgctgaacaagaagttcaacgtatcatacaccttcagaacttagctaatgatctaccagatgcttttactgatctaagaggagtgtcaaagttgcatatccctgcggcaaatgcaccggagagagtagagatacccatggagggagactttactccagcccctaagcctaggaaaagggggagagacccggatggtctgattcatgctaagcggagacgtccgcaagagctgaacacagtaccgctcgcatcacgctcccattcagtagtctcaaaggagatccatcctggggacggacgccaaaacgacaaaacgcccagtagactagcatgcgcacctagtccaactggtgcatcggaaccctctcctgttttgggaaaccaggatgaggaaatgagtgaagaaattgccacagattatgccatcacgggagaattgtataatcggaagactacacatgtcgacataaattttgtctccaagatcgctgaaatagtggatcatgatcttgaacctaagtccatggcagagtgcagaaagcgctcagattgggtcccggacaaagcaaatcgcaacatgtacagtgtgaaattagaaagatcgctgtatgggttaaaacagtctggtctctatgttgatgatttgaacatcattgaccacgtagaggacattgaggaggcgactgcctatctcaagacggagtttgagatgaaagacttgggtcaaaccaagttctgcttggtccttcaggtcgagcatctccctaatgggattttagtgcaccagtcgacctatactaaaaaggtccttgagagatttaacatgtcaaaggctcatcctttgaagacacccatggttgtgagatcccttgataaggataaagacctattccgtcctaggagtgaaactgaggaagagttgggaccggaaatcccatacttaagcgccattggagcactgatgtaccttgcgaactgcaccaggcctgatattgcgttcgtggggagtagcatgacggacaacggcctcatccgccgtcgtgcccacctcggccccaaaccacccgcccgccactatggcgtccgccgcgttggccatggggttccagctccagcgccgccgtcaccaccgccgcatccgatggtgcttcggcctccgctgcctctcgtccaccgtgaccatcgcgcccgcctttgccgtatgggctgcctcttcgagagccctgagacggaggctgcggccggcaccaccgacgccggatcgagctccgccgccgcatccacctctcatggccgcttcctcagctcgacgagtggccaaggagagagaagggttgagctagaagaagccacctaa

SEQ ID NO: 88051 - DNA, 1122 bp, Oryza sativa
  Clone ID: PAT_MRT4530_8693C.1
atggcgaatttctttcccatggccctgaaggggcaagcacggggttggctaatgaacttgccacccgcgtctgtccactcctgggaggatttgtgccagcagttcaccatgaacttccaaggcacgtatccgcgccccggtgaggaagcggacttgcacgcagtacagcgaggggatgatgaatcacttcgctcgtacattcagcggttttgccaagtccgcaacaccataccatgcatccctgcacacgcggtaatctacgcgttcagggggggcgtgcggcacaaccgcatgctcgaaaagatcgcctccaaagagccccagactaccgcagagctttttcagctcgcggaccgagtggctcgcaaggaggaggcctggacctggaacccctccggttccggagtggcagcttcggccgcccccggatccgccgctcagacagggcggcgtgacaggaggaggaagaagaaattaaatcagcctataacaagaagggggcctgaaggcctcggaagaagaaagaaaaagctattcaagattggcgggggcctgggggctcactccgacgcgcccgggtcaccagccttgtcgtcgctgtcatccgcaccatcgtcaccgcattcctcgtcggagtcgagggcgaacgcgaaccgaggggccgtaccctcgaagctgtggacgatgtggtcggcggcgtcccggtcctgcgcgcgtgcgccgtcctcggttccggaagggaactcttccagcgctgcccacggggagaagtcagggtccgagaggcccccaagccgaacggcggcccaaggcccccgacggccggagttggccctccgcctgcttgtcctacggtgtcaggcgcccccgaccctcaggatagcctcggggccactgcgggaaggccgcgcctgtcgccctcttaccccgagggtatcggcgcagaagccgagggcgccccgcgctgcctctcggatgaagagcgccctggagatgcggcccctagcgaagaggatcggccccgccgaaaggtgcagcggcccgtctactttgttagtgaggccctccgggacgtcaaaacccgataccctcgggcccagaagatgctatacgctattctga

SEQ ID NO: 88052 - DNA, 2716 bp, Oryza sativa
  Clone ID: PAT_MRT4530_86940C.1
atggagcaagggagagggaaggggatgcttgtaggcggcaacagcagcagcggcggcggcggaggaggaagagtagaagagagccgcgtcgctcgggaaaaaccgcagatcccatatacaataccaccacctctggatgggccacctcaaagtgcagtagatagattaggttattacgttcgtggggacgctcaatgttgtgactacttttcttaatgttgaaatggaacttgtggaaagaggtagaagagagcatatggcctttctcaaattttgttccaagaggtaaggtgattcggaggcattagatttttaggaagaagtgaagttaagacctacaacttgttggatgtgaaagatcctaaagtacaaatgcgaaatacatgtcgattttcggagctatattatcatcgatgttgcaacgacacatcattagcacattatgaatcttgacaccggtatggaagatattgtgctctccctccaaaaggacatttcctagtgtacatgcactacaaagggaagtggctttgtgctctaattgatggtatagctggattcccctaagattatgttactagaagcacagggaagattgatgatcttcgtattagggagaatggatacctgggggtcacaaaatcagaattcattgaacatgcaaaaaagctgccctgggatggtgcatatgtgactgcccatcaagcaaaatgtggagataatgctcttcttaagtcatttcttattcttcatcggtatgttgatggtcaagctcctatgccctcagatgatgaagtaagagaagctggtgaagttatgatcttacactttccagaagccgctaagtccgacaatctctttcttgataaaattcacaagaacttcagggcatcaccagcacatgtttttgggaaacgacaaattgaaaaggcaagatcatggagtaaaacttgtggggatgttaagtcaattttccaaggagatggtgcacaaagtgaaattgcagaaaaaggtagaagagaccatgatgccacagaaaaaagttctaagaaagatgtgacagaagcagaagcaaaggagtttcttgaagaggtacggcttatccacaggacttttgataaggcagagaacctatttcttctaaaggatatgcctgtacatctgtccatagatggcccaatagatgttgcatggactgaaaatgagctaagaaggagtcgtgaacacggtttggatgatccttcttggggctttctcacagaacgatccccaaaatttccacccactaacaacaacgaacaaaatcaaccgactctgattgagaatgcttacatgacattcagtgaatgtgatgagtactccggctcaccagaccatcaagaagagatgaatgaagaatctgtgggatataaggttacttctgcaagagctggtgtaccattcttttgccaaacagcctctgaatttgaggaaatgagaatcatacccgtgtttgaatcttcgaaaaaagatgtgctgtcgtcctttcaacttgacccagaacttacagaacctcatcgacttataaaacatcttatcgcataccatgaaagtgggcatgctattgttgcactccacactcagggtgctcatcccatacaccaagcaactgtacttccacatggtctttctcttggaatggtcacacaagtcgcttcaccaggaaatacttcaattagcaaacaaaaaatcttggcccgcattgatgtttgttttggtggagcagttgctgaagagctgttgtttggggagcacactgttacagctggggcgaaaaatgacctctttactgctaaagagcttgcccaaaaattggtattatactgttagaccagtgatactggtgatcgtatgcatctggaaaaatggccaagtgtacaaatgcaggccacgattaatgcagaggtgttgaaactcctaggagaatcccgtgagcgagtgaagcgtttgctgaagaagcatgagatgcagctgcaggctgtggcaaatgccctattggagaaagaaattctcaatgcagatgagatcatcaaggtggtgcagccctacaaaagagaaccacagattaccttccaagataaggagcttgcagttaattggtcgtaacatttgctgcataaaagggcagaagatacattaaggcgaacagatggtgactgctcttttttttttgtccacttttccttttttgtaatctggatctctgcaatatggatgcatattttcttggtggcacatgaaggttgtgctcaagaagctagctaggcgcgcccttgataatctttaatttggtctttagttagaaagaaacaatagagctaggtgcaagtgcagcatctcatatttctgatgctaggattatttccgcctgtgtactgtaaatctctaatgcatgggtcactcttgttctttgcacattgttcacagcatatgctcagtgctgtagtgagttcatgaggcagagtttgcaagtgacgccgggactattgtctttgcctccttatctgtaacatctcgtcgatttcacttattagggcattaatatgtttttttttttttttgctgttagttgaagctttaactaaatacaaatgtaaagcattgcttaccttaattaattctgcgaggggcagtaacccgattgattggaatcgtgaatgaaaagcaatttatcttg

SEQ ID NO: 88053 - DNA, 210 bp, Oryza sativa
  Clone ID: PAT_MRT4530_86941C.1
atggctacgtacggccaccctcccccctcctgccctagtggccggggaatctggaccctacattttggatcccacgatgctctgattcctgcacaacaacaggccgtccttgctggcaggggtagagagagagagatggtggtggtggcgcgcaacgtgcatccagagagggatgtgagtgatagaaaagttgtgacaagcatggcatag

SEQ ID NO: 88054 - DNA, 362 bp, Oryza sativa
  Clone ID: PAT_MRT4530_86942C.1
atggcagatgacactaaccaagcagcaccagcaccagcaccgatatttggttcctcaccatttgggcagcctgctagttcacccgctgctccagtatttggtgctccagcagtcccgtccgccggagttttccagttcgggggccaacaaggttccatgcagcagaatgcggcattcccgcctgccggtggtagcctagagtttcagggtgggaacttctctttgggaagtggtggcggaggcggcgacaaatctagcagaagggtgatcaaggagcacgacctggtcggccaccatgccacacgcgctttccccttctacgctctcgcatttgccatttcttttttcgcgatcacattcgc

SEQ ID NO: 88055 - DNA, 414 bp, Oryza sativa
  Clone ID: PAT_MRT4530_86943C.1
atgccgctgatagctttcgcacttcttgatctgctcatcacatactttgaggacggttggccagtatacgccctgccgaaagactttggacgcaatagttctcgccacttgatgtgccccgcacaatccttggtgtatctctttcgctacatcttcaccttcgacagcagagaggcattgaagcaaagctttattgaggccattaccaaaccatatgctaacttctccattttcatatatcttgtcttcgccccttccagggcttcggacacaaagtggacactgaagatactacttgagctcatcgaaggtggcttgacactcaggccgaaaggcatcctgaggtggaagaaggtgccgttgggagttatgaatgcggtcctggctctgtcgtccggattcatgagtatttga

SEQ ID NO: 88056 - DNA, 314 bp, Oryza sativa
  Clone ID: PAT_MRT4530_86944C.1
tccgcacgcaaacaaagcaggacaaccaacaagtcgacaacacacccaccgtacgacgagtagggatgcgaggagggagagagaaggtgggactctcccccaactcagccaacataatagtacaaaaacaatcccacacgacgcacaacagccaccccgcacaacagacgtcaacacaacacaaccaaaacacaaaagacgaggcgcacaaactagtcgacgtaacccccccagaccacccacgacaccaacagccaaatgaaacaaaaccaacgccccacacacaaaaatccgccgacccaagcgcacactga

SEQ ID NO: 88057 - DNA, 3263 bp, Oryza sativa
  unsure (1)..(3263): unsure at all n locations
  Clone ID: PAT_MRT4530_86945C.1
acatcccatataattacaacgccatcttcggccgtgctaccttgaacaaattcgaagctatcgcccaccacaacttcctcgagttcaagatgcctggcccgaccggagtgattgtggtcgaggggatacagccttcggtcgcagaagagggcgaagcggtggcaatatgtagagaagtgtacaatggtcaagtgcaagagggcgaaagagcaacacttgtgctgaagcagtcaccgtatgttaaggtgagcaaggtccaaattgacgaaactgatccaagcaagatgatctccctaaggggtgaccttggtgaagccgaagcaaaaaacatcctggccgtcatcaagagcaacattgatatcttcacatgggggccagatgaagttggaggcgtttcgccatatctcataatgaaccatttggcggtcaagccggacgccaagctaagaaagcagaagctacggaaaatgtcggctgatcgctagggggctgtaaaagcagaagtgtagaagttactcaaggccggcgtaatctaagagattaaccaccctgagtggctggcaaaccctgtgccggtcaggaagtcgaacggcaaatggcaaatgtgcattgacttcactgacctcaacaaggcatgtcccaaggatgatttctcgctctcaagaattgaccagctggttgattcgacagccggctgcgaacacatgagttttttgtatgcatactctgggtaccatcaaatactcatgaatccggacgacagagccaggaccgcattcataactcccaacggcaccttcttccacctcaggatgcctttcggcctgaggaatgagggggcaactttcgcaaggttgatttgcaaagtcctttgctcgcagctggggtgaaatgttgaagcttatgttgacgacattgttgtaaaaagccgaaaagctttcgaccatgtgtccgatctgcaagaaaccttcagcaacttgcgtttggcagggattaagctgaacccggagaaatgtgtttttggtgttagagctggtaagctgttcggatttcttgtgtccgaaagaggcatagaaaccaaccctaaaaaaatcggtactattcagcaaatgcagccaccaaagcgtgtacgaaaaatacaaaagctcccagggcaaattgcggctctcagccgattcctatcaagagcagcccaaagaggtttgccatttttcaaaaccctccaaggggctggcaagttcagttgtacacctgagtgtcaagccaccttcgatgagctcaagtagtatcttcagtgtccacctgcattggttagcccaacggcgggtagcgagcttctgctctatctagcagctttgcccgtcgccgtaagtgcagccctagtgcaagaaaccaaagttggccagaaaccagtgtactttgtgtccgaagccctggaaggggcgaagacaagatatatgaaaatggagaagttagcatatggtttggtaatggcctcaataaagctgaaacattatttccatgcccataaaatcatagtgccttcgcaatacccaataggcgaagtgcttaggggcaaagaaatcactgggcgattgagcaagtgggcatttgagctatctcccttcgacctacactttcttgcaagtctcaagttctggctgacttcttagccgaatggactctattcgacacaacgaacaataccatagagtatgaagctgtgttgatgggcctgaggaaggcgaaagctctaggcgtttggcatttgctgattcgcacgaattccaagctagtggcaagccaggttgataaatcttttgaggtgaaagacgacactatgaaaaaatatttggaggcagttcgctccatggaaaaatacttcactggaataacgttcgaacatttacctagagggcataataaagaggcagatgctctggtggtccacattcacctagggtcttttttgcaccaagtgtgccaaacctcattgaggacatcatggcaatcgaccatgctgagttgggcgaagacccaaaagactggcgaactccgtttgtcaagtacctaaaaaccggttggctacgggatgatgaagccgaagtaaattgcttgcagctccgagcagccaaatacatgctggtctccgaacagttgtattgatctggggttctacacctttgcttcaatgcctctctgctgtcgaaggtgaagatgtagcgaaagagatacaccaaggattgtgcggggcacatcaagtggcgagaactattgcgtccaaagtctttcggcagggcgtatactggccaaccgtcctcaaagtatgtgatgagcagatcaagaagtgcgaaagctatcagcggcatggccgaagtcagtccattccccagtataagctacaaccaatcgcaccagtatggcctttcgctagatgggggcttgatataatcggcctgtttcccactgtccgaaatgggtatcgcttcaccattgtggcagtagagtacttctctagatggatagaagcagaaccgcttagctcaatctcttcaacagcagtacataagtttatttggaaaaatattgtctgtcgattcggtgtacccaaagaattcatcactgacaatggcaagtagttcgattcttaaaaattcagagaaatgtgcgaggggctaaaccttgaaattaagttcgcctcggttacgcacccgtaggcaaacttggcagccgaaagggcgaacggcaaaatccttgacgcactaaagaaaagattggagggggcaccgtagggtatatggccagacaaagtgttatcggttcactaggcccttcggataacgcctacgagacctaccaagattagctccttcatgctcttatacggcgatgaggctatgatgccaagtgagctaggggctaattcgccaagggtaatcttctctgggggtgaagatgggcgtgaagtctcacgcgaactcctagaaggggtgtgagtcaaagcacttgaacacatggcgaaatacggcaatgacactttggcatcctataacaagaaggttcgaccgacnnnnnnnnnnnnnnnnnnnnttgtgctaagaaagaaggcgaaccagatggtcgttggaaaactgaagtcaaagtggaaaggagcatatcttgtcaagcacagatctagaacgggttcttttcagctggcgacattggagggcgaagagctaagccactcctggaatgccgcttcgctcaggcggttctatgtg

SEQ ID NO: 88058 - DNA, 254 bp, Oryza sativa
  Clone ID: PAT_MRT4530_86946C.1
gaaccacacttgaacactgaccctttatcttcgtttgttggacactcacagattgccttgcttaatgcacaattacctttaggatgtagccctgatggctgatgccacgtctgaatttcttgtaacactagtagtattctgtaatctcccttgcacgctactggccactttgggcactgcttaaaataattcacgaagtgtgatttaagagttaccagctctgatagaatagttaaaaaaaaaaaaaaaaaaaa

SEQ ID NO: 88059 - DNA, 566 bp, Oryza sativa
  Clone ID: PAT_MRT4530_86947C.1
agccagaagactacccacttgacgccctttgtgccgtgcaagccgagcggatgcgcgtggggctggaggaagcgcagcgacagcacgtccgggcgttggtggcggccgtggcgcgcgccacgacggggagggtgcgtgcggcggaggccaagctggatcgcgcacgctgccgcaacgcggagctagaggagaagctccgccagatgagcgcagaggggcaggcttggataggcgttgctaagagccacgaggccgtcgccgccggcctccgcgccacgctcgactagctcctctagtccccctgtgccgtcgccaccgcagcgggggaaggcgacgccgaggacgcgcagtcgtgctgcttcgagaccccaggcggcgccgccgccgccactgccgccgacgcggtgtccagggcgacgtcgtgcaaggcctaccgtgtcacggaggcgtctgtgccgctgctctcgttccgccgcctgtgcctgtgcggcgcctacgaggccgccgttgacgcttgccccgtctgcgccgccaccaagatcgcctccgtccatgtcctcctctcc

SEQ ID NO: 88060 - DNA, 1373 bp, Oryza sativa
  Clone ID: PAT_MRT4530_86948C.1
acactctgctctgtagagtgtagattgactgactcatggatcaagccattagcatcaatgctgctacggcggcggccgcggcggcggtcacccaccgggcgagcggcgccggagcggcggcgcccttgtgggctttgacgtcgccggaatcgtccgacgagtcgtcgctgctgtcgtcggccgccgacttgtgcttcttggacggctcgggcgcgggcgcgggggcctcgacgaccttgtagagctccttgggcttgaggaacttggtgacggcgtagacggcgagcggctcggcgtcgccgacggtggcggtgacggcggagttgacgaccctggtgtcgagcgtgacggtctcgcccttattctggacgtcgtagctgtagtccttcttggactcgctggcggtggcgagcgtggtgaccatgccattgttggacttgaggagctgcagcgagaagtagtccgggacggcgtggtagaggaggatggcggtcttggccttggcggtgaggttcttgtaggagggcatgaaggcggcgacggcggcgtcgacggggcagaagagggtgaggccgttgtccttggtctcgttgacggcgcggaagacgtcggcgttggcggcgaggaggccggcgaaggacttgcagtacttcttggagaggagctcggtgaggttcaccggcgccggcggcgggacgggcgcctcggcctcggaggaggacagcacggagctcacctggagcacggagatgtcgtaggggatctccttcaccgacttcacgtacctcgacggcttcgcgctctcgtccgcgtcctccgagatgaagtcgatcttcccgcccttgtgcgacgtgatgttcacgtaccccgtcgtccccggcgccgaccccgtcgcctggaacatggaggaggaggcggtggcgccatgggagagggcgtggagcttcttggagccgtagtagtcgacgaggatgtggagggagaggatgtggcggatggtggggagggtgaagtggtccagcgacgccatcgccgagttgtccaccgccagcaccgtgatcgtctgccgccggtttatgtcgtacgccagcctcgtcttgctcagcatctcgttgaacttggagaactccgggtgcgccgccaggatcttcgtgatgttgtagctcttcccctccaccgccgccgccatcactgccaccgccaccgccaccgccaccgcaaccacccacaacctcgccgccgccattgccaccgcagctacagcctacagagaagctagctagctagctagagagagagaagaagaagaagcagtgtggcatgcagcgcgagtgagagcctgagaggaggggtatgtatgtaaatgtaaggca

SEQ ID NO: 88061 - DNA, 243 bp, Oryza sativa
  Clone ID: PAT_MRT4530_86949C.1
atggcggcagtagcggcggcaaagtcggcaatggcggtagcggtggcggcggcgaagtcggcagaggcggtgacggggggtgctcgatctgggcctaacccgaccgaacacccgacgtcgccctctccaaccactgccatgccgcgcacctgcctttccgactcgtgcactgcactggtcgtgcccgtgtgccgcaccgcgtcgcgccacgccgcgtgggcccgccgccgaccgagccgctga

SEQ ID NO: 88062 - DNA, 299 bp, Oryza sativa
  Clone ID: PAT_MRT4530_8694C.1
ttctgcacttgtgggtgtgttttgtgagtacggtgggtgtactcagtcttgctcaatttttcccaaacccagaagaggagtccctagaagatgaaggctttggtgtctagctcgtgcctgccgtcaagcgcctgtggtcgtcgccctagtcttcagctgtttcccgtttgtctttgtgtgtgctgggccttgcctcctgggacaaggaataatgcacgcacgtaaggaacgcccgttgggttatttccggtcgtgacaatttgcttgatgtttcttgtgataaagaagagttgtgcgat

SEQ ID NO: 88063 - DNA, 2442 bp, Oryza sativa
  Clone ID: PAT_MRT4530_86950C.1
atgggggaaaatcagggactggaacaagtaatgggtaaattggtagagatgcttgcaaagaagtttaatgaggctccaactacgagtagtgcagtggttcctcatactgaatcggtgcaaaaaattgagttgatgcaaaatgacattaagttggagggtgtaaaaaattatttgagttggtcaagaagagctttattgattttgaagacaaaggggttagaaggatatgttaccggggagataaaggagcctgagaacatatcaagtgttgaatggaagacttggagtactaccaactcgttagtagtagcatggttgttaacctcacttatccctgctattgctacaactgttgagaccatctctagtgcaagtgagatgtggaaaactcttactaatctctactcaagagaaggaaatgtgatgttaatggtggagacacaggagaagataagtgttttgagacagggggagcgttctgttgcagaatatgttgctgaattgaagcatttatggtctgatttggatcattataatcctcttgggttagagcaccctgattgtatagcaaaaatgagaaaatggattgagcgtagaagggtcattgagttcttgaagggcttaaattcggagtttgaaggaagaaggaatgcaatgtttcatcaaaccacccttcctaccttggatgaggctattgcagctatggcacaggagaagcttaagaagaaagtattgcctagtgccacaccatcttcaccaagccccacctatgtagttgcacaaagtaaagagactagggagtgcttcaattgtggtaaaatggggcaccttatacgtgattgccgcgctcctcgcaagcctagttatgggagaggaagatttggtgataggggtggagcaagaggtggaagaggttatgcagttctcattcaaattggatacttgactcgggtacatctagacatgtcacgggagagggaaacagggaagaaacttgggattggcgtcaggcgtgatggactttggtatttggatcgaaaggagacaagtgaagatgtatgtcttgcattgatggcttctacaagcgaagaagaggctaagaagacagatttaagttctttattcattgatcttgatgattcaactaatggtcatgatggtcaccaaatgaaagatgaaatattgggtccaaagggagatgaacaaccaaagaaggaaaagcttgtggttggttcaattccatgtcccatgggtggtcctgttgcacaggagcaagaatggaggaagccacatgaagagaaaaatcttcaagtatacacaaggagaacaaggtgtccagtaatccaacaagttgaagaggataatcaggtagaggaagatgtaagccgtgagcaaggatctttggagtcagggggagaagaagaggaagttagagaagaatctgacttaccaattgccattagaaagagtgtgagaagcaatgcagcatcactagattcagtgcaaatcccaaaggattggagagaagcaaagcaagatccaaggtggcatcaagctatgctagatgaactagaggctcttgaaaagaacaaaacatgggatcttgtaccatttcctaaagggaagaaaattgtcaactataagtgggtttatacagtaaagcaaaatcctgatggaaaggtggaaagatacaaagcaaggttggtggctaagggatatagtcaaacatatggaattgattatgatgaaacatttgcaccagtagcaaagatgagcacggtaagaactcttatatcttgtgcagctaattttgattggccattgcatcagttagatgtcaagaatgcattcttacatggagatcttcaagaagaggtgtatatggatgtcccacctggatttgccacttcacaaactaaaggaaaggtgttgagattgaagaaatctttgtatggtcttaaacagtcaccaagagcatggtttgatcggtttaggcgtgcaatgtgtgctatggactataagcaatgtaatggagatcatacagttttctatcatcattgtggagatcatataaccattcttgctgtctatgttgatgatatgattatcactggaaatgattgcttggagataactaggttgaaacggaatctaagcaaagaatttgaggtcaaggacctaggccagttgagatattttctaggtattgaaattgcaagatctcctagagggatagttatttcacagcgaaaatatgtattggacttgcttagtgaaacaggtaggcttggatgtcgcccagtctctacaccaattgatcaaaatcataagttatgtgcggagtctggagatccagtgaatagggaaagataccaaagattggtgggaagattgatatatctatgtcatacacgacctgacataacatatgctgtcagtatg

SEQ ID NO: 88064 - DNA, 447 bp, Oryza sativa
  Clone ID: PAT_MRT4530_86951C.1
gttagtacaaactgcgtgaggtcattgaacaggtccaagaggcagcattcatctggaaaaagctttgggaacctcgatccagttgaagaagaattcccattcgagcaagaacttagagatttcaagatgagaaggctttcagatgttgggccaactccagacctgctggaagaaatcgaacctactcaaaccccatatgaaaagaaatccaatcctatcgaccaggtcacacaatcaatccactcgtacctcaagctacactttgacaccccaggggcctcacagtctgaatcattaagtcagctagcacatgggatgactacagcaaaggctgcccgactcttctatcaagcatgcgttttagcaactcatgattttatcaaggttaaccagctggaaccatacggagacatcttgatctcgaggggaccaaagatcaaaatatag

SEQ ID NO: 88065 - DNA, 3186 bp, Oryza sativa
  Clone ID: PAT_MRT4530_86952C.1
atggggaaaaatcagggacttgaacaagtgatgggtaaattggtggacatgcttgcaaagaaacttagtgaggccccaactacaagtaatgcagtggttcctcatactgaaacaatgcaaaaaattgagttgatgcaaaatgacattaagttggagggtgttaaaaattatttgagttggtcaaaaagagctttattgatcttgaaaacaaagggattagaagaatatgttacaagggagataaaggagcctgagagcacttcaaatgttgagtggaagacttggagtactaccaactcttcagtagtagcgtggttgttgacttcacttattcctgctattgctacaactgttgagaccatatctagtgcaagtgagatgtggaaaactctcaccaatctctactcaggagaaggaaatgtaatgctaatggtggaggcacaagagaagataagtgctatgagacagggggagcgttctgttgcagaatatgttgcagaactgaagcatctatggtctgatttggatcattatgatcctcttggaagggtcattgagttcttgaagggcctaaattcagagtttgaagggagaagggatgcaatgtttcatcaaaccactcttcctaccttggatgaggctattgcagctatggcacaggaggagcttaagaagaaagtattgcctagtgtcacaccatcttcaccaagtgccacatatgtagttgcacaaagtaaagagactagggagtgcttcaattgtggtgaaatggggcaccttatgcgtgattgccgtgctcctcgcaagcctagttatgggagaggaagatttggtgacaggggtggagcaagaggtggaagaagttatgcaggtagaggtaacagaggtaggggttatgagtatagaggtgatcacagagctaatgtggtcactcttgaagagggttcttctggacctacaaatgttgatgttgccaaccttgttcattctacctcagctctcattcaaattggatacttgactcgggtgcatctagacatgtcacggatctcccttgatcgtgagaattgtttaattcaggagaggcaaatagggaagaaacttgggattggcgtcaggcgtgatggactttggtatttggatcaaaaggagacaagtgaagatgtatgtcttgcattgatggcttctacaagtgaagaagaggctaagtttattagaactgataatggaggggagtatatgaacaatgaatttagtagctttctttcatcagaaggaatattgcatcaaacttcttgtcctgatactcctccacaaaatggagtagctgagaggaaaaaccgtcatcttttggagacagctcgatcattgatgtatactatgaatgtacctaaattcttgtggagtgaggcagtaatgacagcaacttatcttatcaaccgcacaccatcaaggatactcggaatgaagacaccatgtgagatgatatttggaaagaataaatttggtgttccaccaaaagtgtttggttgcacttgttttgttagagatcatagaccttccattggaaaacttgatcctcgggctgtcaaatgcatctttgtaggctattcatcttgccagaaggggtataagtgttggagtccattagaacgacgaacctttgtaagtatggatgttacttttagagaatatgtcccattctatggtgagaagacagatttaagttctttattcattgatcttgatgattcaactagtggttatgatggtcaacaaatggaaggtgaaatattgggtccaaagggagatgaacaatcaaagaaggaaaagcttgtgattggttcaattccatgtcctataggtggtcctgttgcacaggagcaagaatggaggaagccacatgaagaggaaaatcttcaagtatacacaaggagagcaaggtgtccagtaatacaacaagttgaagaggataatcaggtagaggaagatgtaagtcatgagcaagggtctttggagtcagggggagaagatgaagaagttagagaaaaaggatctgacatgccaattgctgtcagaaaaggtgtaaggagcaatgcagggaagaaagttgtcaattgtaagtgggtatacacaataaagcaaaaccctgatggaaaggtggaaagatacaaagcaaggcttgtggttaagggatatagtcaaacatatggaattgattatgatgaaacttttgcaccagtagcaaagatgagcacgctagatgtcaagaatgcctttttacatggagaccttcaggaagagggatgtcacactactattcttgctgtgtatgtggatgatatgattatcacatgggatgattctatagagatagcaagattgaaagaaaatctaagtaaggaatttgaagtcaaggatttgggtatgcttagttgtcgaccggcctctacaccaattgagcaaaatcttaagctttgtgctgagtcgggagatccagtgaataaggagagatatcaaagacttgtagggcggctgatatatttatgtcacacaaggccggatataacttatgcagtaagtgtggtaagtcgatacatgcatgaccctagaagtggtcacatggatgccgtgtataggatcttgagatatttgaaaggtagtcctggcaaaggcttgtggtttaagagaagtggtcatcttagtttggaaggctattgtgatgcagattgggctagcagtcttgatgatagaaggtcaacctctgggtattgtgtatttgttggtggcaatttggtgtcttggaggagtaaaaaacaacctgtggtttctcgctcaacagctgaagcagaatatagggcaatgtcggtgggtctgagtgagatgttatggttgaggaatcttctatgtgagttgaagttgttgaagaatacttgcatgaagctatggtgtgacaataagtcagctatcaatattgccaacaatcctgttcaacatgatcgaacaaaacatatagagatagatcgtttctttataaaggaaaaactagatgagggaatgttgaagctagactttgtaatatctggagaacaaatagcggattgtctaacaaaggctttaggtgttgcagagtgtttgtctatgtgtaacaagatgggcatgatagatatctatcgcccatcttga

SEQ ID NO: 88066 - DNA, 5043 bp, Oryza sativa
  Clone ID: PAT_MRT4530_86953C.1
atgtcgacatcattagctgaagttccgcaaggaggacatatcaaagaggtcattgcagagggctcttcgggaggcctatcatcgtcaacacagttattggctacaaaacgaaagttagcagcatcgaatcctccaacagcaaagcgaagacgatcacctattgcattgccaatagtcaggtctccaggagtgcgacaaattatttcccaaaatgaagtcatcatggagagatcacaagttgctggtcagatgtccccaagtgcagagtctccaagagctagatctatgtctccagtggcaaggttcgtatcaagtccgtctgctatcccaattgagctggatgttgaaactcagccaagggagtcaactcaatcaacacctcatgttgtgactcatcgttctgggaaaagaacactcaaatctttaatctggaaagaatttaaaccattttattcttctactggaaaggtgctctatgggaaatgcattcattgcagtaaggactggaaatttgatcctgatgtagcacgtgcagaacttttaaggatgcttgttttgcaagaacttcctttcagttttgttgaacaccctggttttagaagattttgtgcaagcttgaacccgtactttagggtgctttccagaattactataaagggtgattgcttggctgcctatcaagaacaaaagttagctttgtttgaggattggcagatagaaagtaagttgttcagtattacagtagacaatgcatctgttaatgattctatggttgtggaattgaaaggaaatctcttgggtaagcttgccatgccttgcaaaggggagctatttcatttccggtgcgcagctcacatccttaatcttattgttcaagatggattgagtactatcagtggtgccatatctaggataagggaaagtgtaaagtatataaaagcatcagaagcatgtgagcaaaaatttgaagaaatcattgcacaagtcggaattgttgaagagaagcgtccttcacttgatgtgtccactcgttggaattccacctatttgatgctttcctcatccttattattcaggagggcttttgattcattggatcggtttgatccaaactttcaagatgctccactattttttgattgggacaatgcagaagttctttgcaaacatctcaagatcttctatgatgcaactgttgtggtttccgggacatcatatcccactgtttctcgctactttcatgaattttggaaagtgaaggtgatgcttctaaatgagtccaacagtgaggatgttcttgtcgctagcatggtttctaaaatggatacaaaatttcagaaatattgggatctgcagttcctgcagatttgtgttcctgttattttttatcccagatttaagttgaaattccttgagtttaggctgaaagcaggttttggagataaggcaactggtccaaatggatatctgtctagaattaagaggatagtccgcagttggtttgttgaatattcttcacaaattggtggtccaagcgcaatcaattctcaagaagcatcaactagtggagtgaatgttggtggcagccaatttgctgactggaggcaatatcttcatgatcaaagcaagagttttggtgatccctattcaattctaactgatacggttgaggacgatgatgttaatatgcaactattagggatgagatggccttcagcagctgcgaatgctgctaccactagttttgttccctgtagtttttatttcagtaacttagttcgtttagatgcactagccgttgtcatttttgtgcatgtccagagcctgctgaaaataatacaagccttgcaaaaagcaaaacaattgattgtttctcatgaatctctaagcaagattcagccttttcaggttttctgcttgcagaagtgtgtagctagcgttaaaggactggaacaagtaatgggtaaattggtagagatgcttacaaagaagtttaatgaggctccaactacgagtagtgcagtggttcctcatactgaatcggtgcaaaaaattgagttgatgcaaaatgacattaagttggagggtgtaaaaaattatttgagttggtcaagaagagctttattgattttgaagacaaaggggttagaagcatatgttactggggaggtaaaggagcctgagaacatatcaagtgttgaatggaagacttggaggactaccaactcgttagtagtagcatggttgttaacctcacttatccctgctattgctacaactgttgagaccatctctagtgcaagtgagatgtggaaaactcttactaatctctactcaggagaaggaaatgtgatgttaatggtggaggcacaggagaagataagtgttttgagacagggggagcgttctattgcagaatatgttgctgaattgaagcatttgtggtctgatttggatcattatgatcctcttgggttagagcaccctgattgtatagcaaaaatgagaaaatggattgagcgtagaagggtcattgagttcttgaagggcttaaattcggagtttgaaggaagaagggatgcaatgtttcatcaaaccacccttactaccttggatgaggctattgcagctatggcacaggaggagcttaagaagaaagtattgcctagtgccacaccatcttcaccaagccccacctatgtagttgcacaaagtaaagagaccagggagtgcttcaattgtggtgaaatggggcaccttatacgtgattgccgcgctcctcgcaagcctagttatgggagaggaagatttggtgataggggtggagcaagaggtggaagaggttatgcaggtagaggtaatagaggtagaggctatgagtatagaagtgatcacagagctaatgtggtcactcttgaagagggttgttctggatctacaaatgttgatgttgccaatcttgttcattcttcctcagttctcattcaaattggatacttgactcgggtgcatctagacatgtcacgggagagggaaacagggaagaaacttgggattgacgtcaggcgtgatggactttggtatttggatcgaaaggcgacaagtgaagatgtatgtcttgcattgatggcttctacaagtgaagaagaggctaaggagcaagaatggaggaagccacatgaagagaaaaatcttcaagtatacacaaggagaacaaggtgtccagtaatccaacaagttgaagaggataatcaggtagaggaagatgtaagccgtgagcaaggatctttggagtcagggggagaagaagaggaagttaaagaagaatctgacttaccaattgccattagaaagagtgtgagaagcaatgcaggtaaacctccactaaggtatggttttgaagctcaagatgagggtgatgatgaaaataatatatccaactatgtttcctatgactccttgtcatccacatataaggcctttgtagcatcactagattcagtgcaaatcccaaaggattggagagaagcaaagcaagatccaaggtggcatcaagctatgctagatgaactagaggctcttgaaaagaacaaaacatgggatcttgtaccatttcctgaagggaagaaaattgtcaactgtaagtgggtttatacagtaaagcaaaatcctgatggaaaggtggaaagatacaaagtaaggttggtggctaagagatatagtcaaacatatggaattgattatgatgaaacttttgcaccagtagcaaagatgagcatggtaagaactcttatatcttgtgcagctaattttgattggccattgcatcagttagatgtcaagaatgcattcttacatggagatcttcaagaagaggtgtatatggatgtcccacctggatttgccacttcacaaactaaaggaaaggtgttgagattgaagaaatctttgtatggtgttaaacagtcaccaagagcatggtttgatcggtttaggcatgcaatgtgtgctatggactataagcaatgtaatggagatcatatagttttctatcatcatagtggagatcatataaccattcttgctgtctatgttgatgatatggttatcactggaaatgattgcttggagataactaggttgaaacggaatctaagcaaagaatttgaggtcaaggacctaggccagttgagatattttctgggtattgaaattgcaagatctcctagagggatagttatttcacagcgaaaatatgtattggacttgcttagtgaaacaggtatgcttggatgtcgcccagtctctacaccaattgatcaaaatcataagttatgtgcggagtctggagatccagtgaataggaaaagataccaaagattggtgggaagactgatatatctatgtcatacacgacctgacatagcatatgctgtcagtatggtgagtcgatatatgcatgatccaagaagtggtcatatggaggcggtgtatagaatcttgagatatctgaagggaagtccaggcaaaggcttatggtttaagaaaaatggacatcttaagatagaagggtattgtgatgcagattgggctagctgtcttgatgatagaaggtcaacttcaggctattgtgtttatgttggtggcaacttggtatcttggagaagcaagaaacaatccgtagtgtctcgctcaactgctgaagcagaatacagggcaatggtagtgagtttaagtgagttgttgtggttaagaaatcttctagttgagctgaaaattttggagaacactcccatgaagctattgtgtgataataagtcagctattaacattgctaataatccagtccaatatgatagaacaaagcatgtggaaatagatcgtttctttatcaaggaaaaactagacgagggagtgttggaattaggatttgtaacgtctggtggacaagttgctgattgtttaacaaagggcttaggtgttaaagagtgtaattgttcatgtgacaagatgggtatgatagatatctatcacccatcttga

SEQ ID NO: 88067 - DNA, 655 bp, Oryza sativa
  Clone ID: PAT_MRT4530_86954C.1
atggcacatcacaaccgtccacctccccatcacctcccccaattcccagttggtcgtgccctaatccctcatttcctctccccttcctacgcgccgccgccgccgccaccgcgactcctcacattcgtccccaccacatccgagccagcggccgcccgcccgccgtcgctacctcctcctcgagccagcggccggcaccaccaccttcccatggagccagcgaccggcgctatgtcctcacggagccaggcgcagtgccatcttctcgcggagtcactggcccgcaccgccgctaccttcttctcctcatagagccagggatgtcgacaccatcgccgtctgtgtccgcttcttcgcacagctacgccagcttgcggccactactacaccaggatttgggtgtgggtggagcaagtgtgccagccactgcaccgccgtccactcccatgagaaagtcagctccatcaagatgaacgaacatccagccacttgcgcgctcctccatttgctgccgtatgaggatgaggcaggcagctccagttaggtcactactctgctgaaaaaagaaaactgagtcctgaagaaatgcacagactgttttacaaggcaaacatattgaagggttgttctatctcgaccaaagtttctcagatta

SEQ ID NO: 88068 - DNA, 867 bp, Oryza sativa
  Clone ID: PAT_MRT4530_86955C.1
atggatgcgctcgtggcgaactacgcgtccgactccgactccgacggcgatgctccggcggctaccgcgggcgaagccgccccggtgcctccggaaccttccgcgttgctccctcccccgcccctcgacctcctccagcccccaaacttcgtaggcatgattgatacttctttaccgggagtcgcgtccggagcttcccacatgtggaaggcaactatgcgctacatgtttacatccctggtgaatgtaaattattggtcgtttatcgctggttgcatgttaccgcaagttgtcataccttctgatgcaaagaaacacctggtccttgttatgagaagagccgcgtcttttgtgccggatctctatgccatcgatgcagattatgcactttccgagttgtgcaaggatgaacaaaagcttgagaaagtgcttctgagcagggagtttcatgtgcatcaaattgagtcccttgtcgcaatgcttcggcaaaagttccgctcacagcaacggtattggatggacttcaacaaatgggagcattttgtcaatgatgattgtacacggtcatttctttcgctagaagttacaagtactgggttgccagagattagtaaacagataacgatggtagatgatgtatatcgattacatgggcttcctgaattctataagaatccacggccacatatatcactggcgtgggcattgggtgatgttagctgcaaactgaaacaagcaattaaggagatcgaaaaatctcagagcagtctgggcacatctcaaatatctaatctgagatgcaagtttagtcatgtagtgtgtaaaataggcaagaaggtgtatgatatctgtaaacttgcagactga

SEQ ID NO: 88069 - DNA, 566 bp, Oryza sativa
  unsure (1)..(566): unsure at all n locations
  Clone ID: PAT_MRT4530_86956C.1
aaaaaccggggggaactgaaccttttttgttttacgaagttgacatgctcggatagcttcggtctccttccgccaaaggaacaaaaaaaaattacagcccttctttgcttcaaaacatgataaacccaatcacctcccatgttattactactaattattgtttaattttcctttcgctctatctcgaattcattcttcgattctaaagaaagaaatcggtgagaaaccaaacaaacaatacatgagccgagccgaggtgagcgattcagtgcctcccacgcttcttcgcgggcttgcagtcgtcgtcgtcatcttcgaagccggacacctcgtcgtcgtcgtcggagttttcgtcgaggtcgtcgtcgaactccccgtcgcttcccatggcctcaaactcatcgtcctcgtcctcgtccntcgctctcgctcaccgccttcgccttccgccccgcggcggcgtaccctctccgcgcgtgcagcgccgcgggggtcgcgcccgcggggtggagcaggaagcgcgccacggcggcggatgcggcgccgccgctgccaggcggggagcg

SEQ ID NO: 88070 - DNA, 891 bp, Oryza sativa
  Clone ID: PAT_MRT4530_86957C.1
ctacttgatgggcctccaatatcttgtactttggttgggctcaattttaggtggttttgatggatatgtgggcccttcaatccatgtaatcatgtcctgattgttaagaggtgtattttgtcgcatggcgggtggtttttgtccataattcacctggactaaaatgcttgtttctctcttgtctggagtctgttttggacgtgtgtgcacttgttggaaagctaacttcatgacccaagtgacggaggggccaacagaaacaaactccttctggttccacttagtcacaggattgcgaatgaagtagatgtagaatattatagcttttcttttaccttcagattgcttctgtaaagccaaggtattcgcttcagctgtttttagttcctcagttttcgtttctgacagacgcttgaattcttgcacttgctcattcaacctggaaatctctttctgatattgttgaatctcctctacactcccatgttttgcttcttctaaggtcctgctctgctttgttacagcctccatgtttttcttcatggtccgtaactccctgatatagtgatgtagccggtcaataattaacccaagaaacagagagtatcccatgagggatgcctcgaggaggtggcggctggcgagcacctggtcggtgggcgtgagctggccgagatccccgacccggcgccggatcttggcgatgctgtagccgctggagcccagcacgacgagcatggtggcggcgaccgtcttgaccatgacggggccgcgcccgcgcttggcgcggtcgatggcgagcagcgcgaggcgtcggaacggcgtgcggaagagcagcacgagcaccagcgccgcctccgcggccagcagcgtgaagagcagctggatcat

SEQ ID NO: 88071 - DNA, 5220 bp, Oryza sativa
  Clone ID: PAT_MRT4530_86958C.1
atgtcgacatcattagctgaagttccgcaaggaggacatatcaaagaggtcattgcagagggctcttcgggaggcctatcatcgtcaacacagttattggctacaaaacgaaagttagcagcatcgaatcctccaacagcaaagcgaagacgatcacctattgcattgccaatagtcaggtctccaggagtgcgacaaattatttcccaaaatgaagtcatcatggagagatcacaagttgctggtcagatgtccccaagtgcagagtctccaagagctagatctatgtctccagtggcaaggttcgtatcaagtccgtctgctatcccaattgagctggatgttgaaactcagccaagggagtcaactcaatcaacacctcatgttgtgactcatcgttctgggaaaagaacactcaaatctttaatctggaaagaatttaaaccattttattcttctactggaaaggtgctctatgggaaatgcattcattgcagtaaggactggaaatttgatcctgatgtagcacgtgcagaacttttaaggatgcttgttttgcaagaacttcctttcagttttgttgaacaccctggttttagaagattttgtgcaagcttgaacccgtactttagggtgctttccagaattactataaagggtgattgcttggctgcctatcaagaacaaaagttagctttgtttgaggattggcagatagaaagtaagttgttcagtattacagtagacaatgcatctgttaatgattctatggttgtggaattgaaaggaaatctcttgggtaagcttgccatgtcttgcaaaggggagctatttcatttccggtgcgcagctcacatccttaatcttattgttcaagatggattgagtactgtcagtggtgccatatctaggataagggaaagtgtaaagtatataaaagcatcagaagcatgtgagcaaaaatttgaagaaatcattgcacaagtcggaattgttgaagagaagcgtccttcacttgatgtgtccactcgttggaattccacctatttgatgctttcctcatccttattattcaggagggcttttgattcattggatcggtttgatccaaactttcaagatgctccactattttttgattgggacaatgcagaagttctttgcaaacatctcaagatcttctatgatgcaactgttgtggtttccgggacatcatatcccactgtttctcgctactttcatgaattttggaaagtgaaggtgatgcttctaaatgagtccaacagtgaggatgttcttgtcgctagcatggtttttaaaatggatacaaaatttcagaaatattgggatctgcagttcctgcagatttgtgttcctgttattttttatcccagatttaagttgaaattccttgagtttaggctgaaagcaggttttggagataaggcaactggtccaaatggatatctgtctagaattaagaggatagtccgcagttggtttgttgaatattcttcacaaattggtggtccaagcgcaatcaattctcaagaagcatcaactagtggagtgaatgttggtggcagccaatttgctgactggaggcaatatcttcatgatcaaagcaagagttttggtgatccctattcaattctaactgatacggttgaggacgatgatgttaatatgcaactattagggatgagatggccttcagcagctgcgaatgctgctaccactagttttgttccctgtagtttttatttcagtaacttagttcgtttagatgcactagccgttgtcatttttgtgcatgtccagagcctgctgaaaataatacaagccttgcaaaaagcaaaacaattgattgtttctcatgaatctctaagcaagattcagccttttcaggttttctgcttgcagaagtgtgtagctagcgttaaaggactggaacaagtaatgggtaaattggtagagatgcttacaaagaagtttaatgaggctccaactacgagtagtgcagtggttcctcatactgaatcggtgcaaaaaattgagttgatgcaaaatgacattaagttggagggtgtaaaaaattatttgagttggtcaagaagagctttattgattttgaagacaaaggggttagaagcatatgttactggggaggtaaaggagcctgagaacatatcaagtgttgaatggaagacttggaggactaccaactcgttagtagtagcatggttgttaacctcacttatccctgctattgctacaactgttgagaccatctctagtgcaagtgagatgtggaaaactcttactaatctctactcaggagaaggaaatgtgatgttaatggtggaggcacaggagaagataagtgttttgagacagggggagcgttctattgcagaatatgttgctgaattgaagcatttgtggtctgatttggatcattatgatcctcttgggttagagcaccctgattgtatagcaaaaatgagaaaatggattgagcgtagaagggtcattgagttcttgaagggcttaaattcggagtttgaaggaagaagggatgcaatgtttcatcaaaccacccttcctaccttggatgaggctattgcagctatggcacaggaggagcttaagaagaaagtattgcctagtgccacaccatcttcaccaagccccacctatgtagttgcacaaagtaaagagaccagggagtgcttcaattgtggtgaaatggggcaccttatacgtgattgccgcgctcctcgcaagcctagttatgggagaggaagatttggtgataggggtggagcaagaggtggaagaggttatgcaggtagaggtaatagaggtagaggctatgagtatagaagtgatcacagagctaatgtggtcactcttgaagagggttgttctggatctacaaatgttgatgttgccaatcttgttcattcttcctcagttctcattcaaattggatacttgactcgggtgcatctagacatgtcacgggagagggaaacagggaagaaacttgggattgacgtcaggcgtgatggactttggtatttggatcgaaaggcgacaagtgaagatgtatgtcttgcattgatggcttctacaagtgaagaagaggctaagtttattagaactgataatggaggggagtatataaacaatgaatttagtagctttctttcatcagaaggaatattgcatcaaacttcttgtcctgatactcctccacaaaatggggtggctgagaggaaaaaccgtcatctcttagagacagcccgctcattgatgtatactatgaatgtacctaaattcttgtggagtgaggcagtaatgacagcaacttatcttatcaaccgcacaccatcaagaatacttggaatgaagacaccatgtgagatgatatttggaaagaatgaatttgttgttccaccaaaagtgtttggttgcacttgttttgttagagatcatagaccttccattggaaaacttgatcctcgggctgtcaaatgcatctttgtaggctattcatctggccagaaggggtataagtgttggagtccattagaacgacgaacctttgagcaagaatggaggaagccacatgaagagaaaaatcttcaagtatacacaaggagaacaaggtgtccagtaatccaacaagttgaagaggataatcaggtagaggaagatgtaagccgtgagcaaggatctttggagtcagggggagaagaagaggaagttagagaagaatctgacttaccaattgccattagaaagagtgtgagaagcaatgcagcatcactagattcagtgcaaatcccaaaggattggagagaagcaaagcaagatcccaggtggcatcaagctatgctagatgaactagaggctcctgaaaagaacaaaacatgggatcttgtaccatttcctgaagggaagaaaattgtcaactctaattttgattggccattgcatcagttagatgtcaagaatgcattcttacatggagatcttcaagaagaggtgtatatggatgtcccacctggatttgccacttcacaaactaaaggaaaggtgttgagattgaagaaatctttgtatggtgttaaacagtcaccaagagcatggtttgatcggtttaggcatgcaatgtgtgctatggactataagcaatgtaatggagatcatatagttttctatcatcatagtggagatcatataaccattcttgctgtctatgttgatgatatggttatcactggaaatgattgcttggagataactaggttgaaacggaatctaagcaaagaatttgaggtcaaggacctaggccagttgagatattttctgggtattgaaattgcaagatctcctagagggatagttatttcacagcgaaaatatgtattggacttgcttagtgaaacaggtatgcttggatgtcgcccagtctctacaccaattgatcaaaatcataagttatgtgcggagtctggagatccagtgaataggaaaagataccaaagattggtgggaagactgatatatctatgtcatacacgacctgacatagcatatgctgtcagtatggtgagtcgatatatgcatgatccaagaagtggtcatatggaggcggtgtatagaatcttgagatatctgaagggaagtccaggcaaaggcttatggtttaagaaaaatggacatcttaagatagaagggtattgtgatgcagattgggctagctgtcttgatgatagaaggtcaacttcaggctattgtgtttatgttggtggcaacttggtatcttggagaagcaagaaacaatccgtagtgtctcgctcaactgctgaagcagaatacagggcaatggtagtgagtttaagtgagttgttgtggttaagaaatcttctagttgagctgaaaattttggagaacactcccatgaagctattgtgtgataataagtcagctattaacattgctaataatccagtccaatatgatagaacaaagcatgtggaaatagatcgtttctttatcaaggaaaaactagacgagggagtgttggaattaggatttgtaacgtctggtggacaagttgctgattgtttaacaaagggcttaggtgttaaagagtgtaattgttcatgtgacaagatgggtatgatagatatctatcacccatcttga

SEQ ID NO: 88072 - DNA, 849 bp, Oryza sativa
  Clone ID: PAT_MRT4530_86959C.1
atgtggaaaactcttactaatctctactcaggagaaggaaatgtgatgttaatggtggaggcacaggagaagataagtgttttgagacagggggagcgttctattgcagaatatgttgctgaattgaagcatttgtggtctgatttggatcattatgatcctcttgggttagagcaccctgattgtatagcaaaaatgagaaaatggattgagcgtagaagggtcattgagttcttgaagggcttaaattcggagtttgaaggaagaagggatgcaatgtttcatcaaaccacccttactaccttggatgaggctattgcagctatggcacaggaggagcttaagaagaaagtattgcctagtgccacaccatcttcaccaagccccacctatgtagttgcacaaagtaaagagaccagggagtgcttcaattgtggtgaaatggggcaccttatacgtgattgccgcgctcctcgcaagcctagttatgggagaggaagatttggtgataggggtggagcaagaggtggaagaggttatgcaggtagaggtaatagaggtagaggctatgaatataaaagtgatcacagagctaatgtggtcactcttgaaaagggttgttctggatctacaaatgttgatgttgccaatcttgttcattcttcttcagttctcattcaaattggatacttgactcgggtgcatctagacatgtcacgggagagggaaacagggaagaaacttgggattgacgtcaggcgtgatggactttggtatttggatcgaaaggcgacaagtgaagatgtatgtcttgcattgatggcttctacaagtgaagaagaggctaag

SEQ ID NO: 88073 - DNA, 2145 bp, Oryza sativa
  Clone ID: PAT_MRT4530_8695C.1
atggataagaagctcgagaagcagggggagagactggatcaggtgcaaaccaaggtggatttgtccatggaatccttggggcaagtacatcaggagcaaattcaagtctcgcaggcggtgcggcggggagcaccgtctccgatcgcgaccccaacccggacgctggaagggacctcgtcggtgactcgagaacggcctcagattccagctgggtttaaggtttcagccgcatcactgaatcttgtgggaaaggcagctcactggtataaagcttggaggcagagagtgggtttgcacggatgggagctctttagggatgctgtggtccgggagtttgattttggaactcatcacattaaagctaatgccatgttcgagttaaagcagacgggtacagtggatgagtacaaaagtcaatttgatgatctgttgtacaatgttaaactgtatgacaggactgagcttggggaggtttgggaggccaaggcaaatgaaagtgtgatgggggaggttgcagaaggaaagaagaagtggggcttcaggactggtagaagtaagggaggtgagaaaccaaaattctctactggggagttgtggaaggctcagcaactgaaggagtaccgcaggattcatggactttgtttcaagtgtggagaaaagtacagccctaatcatcagtgtgcccaacttccagctgcccaggttaatgtggtggaaactattgatcataaggctcttttgtcagatgaaatgcttgaggctgtaatggatgtggaggatataggacaagatcctgatatgtttctgtctcttaatgccctagctggatggggtaatactggcacaattcacttaagagccttggttcaaaatcaagtgttgccgatcttagtagactcgggcagctcgcatagtttcctcaactcacacttggtggagaaattacaattactagttcataatgttcccacaatgacagttaaaattgctaatggtcagcaaatgtcttgtcaacaaatagttcacaactttgaatggtggattcaggggaaaacattttctcatgatatgagagtgttggatctggggggctatgatgcgattttgggcattgactggttggtgaaatttagtccgatgacctgtaattgggtggacaagtgggtctcctttgtatacaaaggtgatcaggtgcggttgcaaggagttaagcctacagttgctcaaccccttcctctgcaagcagtttcagcagagcaattgttgaaatggcatcaagtcttacctcctcaacgaagttttgatcatgctgtcaccctacttccaaacacagctccagtcaatacaaggccttatagatactctccagctcaaaaagatgagattgaacaacaggtggctgacatgataaaatctgggttagtgtacaatcagtatcctctgtacaacctctttggatacaggaaattctcaattcttatgcagttgactttcaggctcaacaagttttgcaagaactggctatcacttctcctaatgagcatggctttgaattggtggggggtggccattctggtgttcaggctacatttcaacgagtgcacaagttgtttacttggccacagttgcgcacttctgttcaggaatttgttcagcagtgtatggtttgtcaacagtccaaacatgagttatgcagaccacctggcctattgcaacctttacccattccccaaggagcttggcaagacatctctttggatttcattgatggcttaccactgtcagcaactcaagaactttgtgccttctcatgttcctgttttctctgaactaccgtccacggttcagttggatgttgcgtctctggaaccctctgaaattttggatcgtcgtttggtcaagaaaggtaatgctgctttgacacaagttctggtgcgttggggcactcttcctccggcttgtgcaacctgggaagactatactgtactgcaagcacgttttccttcggcaccagtttgggggcaacctggttctcaagggggcagcaatgtcacaccggctggtatgccatcggcggctgacaaggtggataccggagaaggtgctgaagaagaagaagaaacagcaaaggcggattctcattag

SEQ ID NO: 88074 - DNA, 3900 bp, Oryza sativa
  Clone ID: PAT_MRT4530_86960C.1
atgggggaaaatcagggactggaacaagtaatgggtaaattggtagagatgcttgcaaagaagtttaatgaggctccaactacgagtagtgcagtggttcctcatactgaatcggtgcaaaaaattgagttgatgcaaaatgacattaagttggagggtgtaaaaaattatttgagttggtcaagaagagctttattgattttgaagacaaaggggttagaaggatatgttaccggagagataaaggagcctgagaacatatcaagtgttgaatggaagacttggagtactaccaactcgttagtagtagcatggttattaacctcacttatccctgctattgctacaactgttgagaccatttctagtgcaagtgagatgtggaaaactcttactaatctctactcaggagaaggaaatgtgatgttaatggtggaggcacaagagaagataagtgttttgagacagggggagcgttctgttgcagaatatgttgctgaattgaagcatttgtggtctgatttggatcattatgatcctcttgggttagagcaccctgattgtatagcaaaaatgagaaaatggattgagcgtagaagggtcattgagttcttgaagggcttaaattcggagtttgaaggaagaagggatgcaatgtttcatcaaaccacccttcctagcttggatgaggctattgcagctatggcacaggaggagcttaagaagaaagtattgcctagtgccacaccatcttcaccaagccccacctatgtagttgcacaaagtaaagagaccagggagtgcttcaattgtggtgaaatggggcaccttatacgtgattatcgcgctcctcgcaagcctagttatgggagaggaagatttggtgataggggtggagcaagaggtggaagaggttatgcaggtagaggtaacagaggtagaggctatgagtatagaagtgatcacagagctaatgtggtcacgcttgaagagagttgttctggatctacaaatgttgatgttgccaatcttgttcattcttcctcaggtaactcaaaccaagcatttatgtctatcaatagttctcattcaaattggatacttgactcgggtgcatctagacatgtcacggtgaatttggtttcgataagttctcttgttgatcatatgaattgtcgggtctcccttgatcgtgagaattgtttaattcaggagagggaaacagggaagaaacttgggattggcgtcaggcgtgatggactttggtatttggatcgaaaggagacaagtgaagatgtatgtcttgcattgatggctcctacaagtgaagaagaggctaagtttattagaactgataatggaggggagtatataaacaatgaatttagtagctttctttcatcagaaggaatattgcatcaaacttcttgtcctgatactcctccacaaaatggggtggctgagaggaaaaaccgtcatctcttagagacagcccgctcattgatgtatgctatgaatgtacctaaattcttgtggagtgaggcagtaatgacagcaacttatcttatcaaccgcacaccatcaagaatacttggaatgaagacaccatgtgagatgatatttggaaagaatgaatttgttgttccaccaaaagtgtttggttgcacttgttttgttagagatcatagaccttccattggaaaacttgatcctcgggctgtcaaatgcatctttgtaggctattcatctggccagaaggggtataagtgttggagtccatcagaacgacgaacctttgtaagtatggatgttacttttagagaatctgtcccattctatggtgagaagacagatttaagttctttattcattgatcttgatgattcaactagtggtcatgatggtcaccaaatgaaagatgaaatattgggtccaaagggagatgaacaaccaaagaaggaaaagcttgtggttggttcaattccatgtcccatgggtggtcctgttgcacaggagcaagaatggaggaagccacatgaagagaaaaatcttcaagtatacacaaggagaacaaggtgtccagtaatccaacaagttgaagaggataatcaggtagaggaagatgtaagccgtgagcaaggatctttggagtcagggggagaagaagaggaagttagagaagaatctgacttaccaattgccattagaaagagtgtgagaagcaatgcaggtaaacctccactaaggtatggttttgaagctcaagatgagggtgatgatgaaaataatatatccaactatgtttcctatgactccttgtcatccacatataaggcctttatagcatcactagattcagtgcaaatcccaaaggattggagagaagcaaagcaagatccaaggtggcatcaagctatgctagatgaactagaggctcttgaaaagaacaaaacatgggatcttgtaccatttcctaaagggaagaaaattgtcaactgtaagtgggtttatacagtaaagcaaaatcctgatggaaaggtggaaagatacaaagcaaggttggtggctaagggatatagtcaaacatatggaattgattatgatgaaacttttgcaccagtagcaaagatgagcacggtaagaactcttatatcttgtgcagctaattttgattggccattgcatcagttagatgtcaagaatgcattcttacatagagatcttcaagaagaggtgtatatggatgtcccacctggatttgccacttcacaaactaaaggaaaggtgttgagattgaagaaatctttgtatggtcttaaacagtcaccaagagcatggtttgatcggtttaggcgtgcaatgtgtgctatggactataagcaatgtaatggagatcatacagttttctatcatcatagtggagatcatataaccattcttgctgtctatgttgatgatatgattatcactggaaatgattgcttggagataactaggttgaaacggaatctaagcaaagaatttgaggtcaaggacctaggccagttgagatattttctgggtattgaaattgcaagatctcctagagggatagttatttcacagcgaaaatatgtattggacttgcttagtgaaacaggtatgcttggatgttgcccagtctctacaccaattgatcaaaatcataagttatgtgcggagtctggagatccagtgaatagggaaagataccaaagattggtgggaagactgatatatctatgtcatacacgacctgacataacatatgctgtcagtatggtgagtcgatatatgcatgatccaagaagtagtcatatggaggcggtgtatagaatcttgagatatctgaagggaagtccaggcaaaggcttatggttcaagaaaaatggacatcttaagatagaagggtattgtgatgcagattgggctagctgtcttgatgatagaaggtcaacttcaggctattgtgtttatgttggtggcaacttggtatcttggagaagcaagaaacaatccgtagtgtctcgctcaactgctgaagcagaatacagggcaatggcagcgagtttaagtgagttgttgtggttaagaaatcttctagttgagctgaaaattttggggaacactcccatgaagctattgtgtgataataagtcagctattaacattgctaataatccagtccaacatgatagaacaaagcatgtggagatagatcgtttctttatcaaggaaaaattggacgagggagtgttggaattaggatttgtaacgtctggtggacaagttgctgattgtttaacaaagggcttaggtgttaaagagtgtaattgttcatgtgacaagatgggtatgatagatatctatcacccatcttga

SEQ ID NO: 88075 - DNA, 731 bp, Oryza sativa
  Clone ID: PAT_MRT4530_86961C.1
atgtcggcgtcgccggagttctacaagccggcgccggtgttctcgccgtgcagctcgccgctgcggctgctgcagcagcagcacggggaggatcatcaggaggagtacgcccatacacactctgtgcgcgtgtgtgtctctatgatgtcggcgtcgccggagttctacaagccggcgccggtgttctcgccgtgcagctcgccgctgcggctgctgcagcagcagcacggggaggatcatcaggaggagtacggctacggcagcagcggcggctgctgcagggacgccgacgggaggggagagcaacctgaaggcgccagggacgtgcccgccggcgccgaggaagccgcgcgcgcccgccgcgccgtgccggaagcggctgttcgaggtcgaggtgttaagcctccgcctcgaggagctcgagcgcctcttctggcgccctccgccgccgccgccgacgacgcagccgcagccgcagccgcagcagccgccgcagaagcgccggaggataggagtagttctcgaaagtatggagatactgatccatctgcgtagcaactggcaagaacgcaagatggatggattcagtttcagagcttggcacccggcaaggctgcagcaggggagcctgtgctggaggtacgagaaggaataaggttagttactagagctaaagctagagtagttcggagttggtaggatttaggcgtactggcgtttttactgctgta

SEQ ID NO: 88076 - DNA, 197 bp, Oryza sativa
  Clone ID: PAT_MRT4530_86962C.1
aaaaaatgaatttcaacgatagttatattcgatttttagaatcacaatgacaataaagagtaggcggcaaacaggccatagaggagcatagtgatatcgtttgacgggacttctaaaaattataaaaaatggaacccaacaagacaataaactctaaaaactacaaggtctaatttttaaaggttcgaaacttctaa

SEQ ID NO: 88077 - DNA, 1068 bp, Oryza sativa
  Clone ID: PAT_MRT4530_86963C.1
atggaatattcaaaagaggatcataagattcactcaagtgcgtacccacatgatagtatagctctcttcaatgaaattctaaagtgtattcaggattggcagatagaaagaaatctcttgggtaagcttgccatgccttgcaaaggggagctatttcatttccggtgcgcagctcacatccttaatcttattgttcaagatggattgagtactatcagtggtgccatatctaggataagggaaagtgtaaagtatataaaagcatcagaagcatgtgagcaaaaatttgaagaaatcattgcacaagtcggaattgttgaagagaagcgtccttcacttgatgtgtccactcgttggaattccacctatttgatgctttcctcatccttattattcaggagggcttttgattcattggatcggtttgatccaaactttcaagatgctccactattttttgattgggacaatgcagaagttctttgcaaacatctcaagatcttctatgatgcaactgttgtggtttccgggacatcatatcccactgtttctcgctactttcatgaattttggaaagtgaaggtgatgcttctaaatgagtccaacagtgaggatgttcttgtcgctagcatggtttctaaaatggatacaaaatttcagaaatattgggatctgcagttcctgcagatttgtgttcctgttattttttatcccagatttaagttgaaattccttgagtttaggctgaaagcaggttttggagataaggcaactggtccaaatggatatctgtctagaattaagaggatagtccgcagttggtttgttgaatattcttcacaaattggtggtccaagcgcaatcaattctcaagaagcatcaactagtggagtgaatgttggtggcagccaatttgctgactggaggcaatatcttcatgatcaaagcaagagttttggtgatccctattcaattctaactgatacggttgaggacgatgatgttaatatgcaactattaggaagtaatgcaggagcgtgctctggtggtgggggcaaaactcaatga

SEQ ID NO: 88078 - DNA, 408 bp, Oryza sativa
  Clone ID: PAT_MRT4530_86964C.1
atgtcgacatcattagctgaagttccgcaaggaggacatatcaaagaggtcattgcagagggctcttcgggaggcctatcatcgtcaacacagttattggctacaaaacgaaagttagcagcatcgaatcctccaacagcaaagcgaagacgatcacctattgcattgccaatagtcaggtctccaggagtgcgacaaattatttcccaaaatgaagtcatcatggagagatcacaagttgctggtcagatgtccccaagtgcagagtctccaagagctagatctatgtctccagtggcaaggttcgtatcaagtccgtctgctatcccaattgagctggatgttgaaactcagccaagggagtcaactcaatcaacacctcatgttgtgactcatcgttctggttag

SEQ ID NO: 88079 - DNA, 4692 bp, Oryza sativa
  Clone ID: PAT_MRT4530_86965C.1
atggagaagggcataattgtctcaatattagctctagctagaggcccatctactcatgtatatgtaaataacgatagcaatactgaaggggtgaagcttccagagaaaaattcacaaactacatggcatcagagccatgctcctggcggccggcggcgacgaaccctagctgagggagcaagcgctgaggttggagttcttggtggtggtgtaggacgacaaggagagtttgctttgttacagcagttagttgagtgctgcttgattaaaatgggggaaaatcagggacttgaacaagtgatgggtaaattggtggacatgcttgcaaagaaatttagtgaggtcccaactacaagtaatgcagtgattcctcatactgaaacaatgcaaaaaattgagttgatgcaaaatgatattaagttggagggtgtcaaaaattatttaagttggtcaaggagagcattgttgattttgaagactaagggattagaaggatatgtcaccggagaagtgaaggagcctgagagtgctagtgcagaatggaggacttggagcactaccaactctttagtagtagcatggttgttgacttcacttatccctgctattgctacaactgttgagaccatctcaagtgcaagtgagatgtggaaaactctcactaatctctactcaggagaaggaaatgtgatgctaatggtggaggcacaggagaagataagtgttttgagacagggggagcgttctattgcagaatatgttgcagaattgaagcatctatggtctgatttggatcattatgatcctcttgggttagagcaccccgattgtatagcaaaaatgaggaaatggattgagcgcagaagggttattgaattcttgaaaggcctaaatccagagtttgaagggagaaaagatgctatgttccatcagactactcttcctaccttggatgaggctatagcagctatggctcaagatgagcttaagaggaaagtattgcctaaggctacaccaccttcatcaagtcccacctatgcaatgctacaaggtaaagagactagagagtgttttaattgtggtgaaatggggcatctcatgcgtgattgtcgtgctcctcgcaagcctagttatggaagaggaagaagtggtgatagaggtggagcaagaggtggaagaggttatgcaggtagagctaacagaggtagaggctatgagtatagaggtgatcacagagctaatgtggtcactcttgaagagggttgttctggacctacaaatgttgatgttgccaaccttgttcattctatctcaggtaactcaaaccaagcatttatgtcaatcaatagttctcattcaaattggatacttgactcgggtgcatccagacatgtcacgggtatgtgtggagaatttgcatcatataaaccatacccatttacacgaaaagaaacaattgaaactgcagatggaacatcatgcccagttaagggagagggaacagtacaatgtactccttcaatcactttatcatcagtgttatatgtcccttcttttccagtgaatttgatttcaataagttctcttgttgatcatatggattgtcgggtatcccttgatcgtgagaattgtttaattcaggagaggcaaacagggaagaaacttgggactggcgtcaggcgtgatggactttggtatttggatagaaaggagacaagtgaagatgtatgtcttgcattgatggcttctacaagtaaagaagaggctaaggtattacttttgcattgtcgattggggcatatatcttttgaaactatgagtaagatgtttccagcagaactaagtagagtgaataaacataagttagtatgtgatgcatgtgagtatggaaaacatacaagaacatcatatgtgagtagaggactccgaagtatgttaccatttatgctaattcactcagatgtttggacttcacctatggtctctatgagtggaatgaagtattttgttacctttattgattgctactctcgcatgacatggttatatcttatgaggcataaggatgaggtgtttaaatgcttccagaatttctatgcatacattaaaaatcattttaatgctcgagttcagtttattagaactgataatggcggggagtatataaacaatgaatttagtagctttctttcatcagaaggaatattgcatcaaacttcttgtcctgatactcctccacaaaatggggtggctgagagaaaaaaccgtcatcttttggagacagctcgctcattgatgtatgctatgaatgtacctaaattcttgtggagtgaagcagtaatgacagcaacttatcttatcaaccgcacgccatcaaggatacttggaatgcagacaccatgtgagatgatatttggaaagaatgaatttgttgttccaccaaaagtgtttggttgcacttgttttgttagagatcatagaccttccgttggaaaacttgatccttgggctgtcaaatgcatctttataggctatccatctggccagaaggggtataagtgttggagtccatcagaacgacgaacctttgttagtatggatgttacttttagagaatctgtcccattctacggtgagaagacagatttaagttctttattcgttgatcttgataattcaactagtggtcatgatggtcaacagatggaaggtgaaatattgggtccaaagggagatgaacaatcaaagaaggaaaagtttgtggttggttcaattccatgtcctatgggtggtcctgttgcacaggagcaagaatggaggaagccacatgaagaggaaaatcttcaagtatacacaaggagaacaaggtgtccagtaatccaacaagttgaagaggataatcaggtagagaaagatgtaagtcatgagcaagggtctttggagtcaaggggagaagaagaggaagttagagaagaatctgacttaccaattgctgtcagaaagagtgtgagaagcaatgcaggtaaacctccactaaggtatggttttgaagatcaagatgagggtgatgaagaaaataatatatccaactttgtttcctatgactccttgtcatccacatataaagcctttgtagcatcactagattcaatggaaatcccaaaggattggagagaagcaaagcaagatccaaggtggcatcaagctatgttagatgaactagaggctcttgaaaagaacaaaacatgggatcttgtaccatttcctgaaggaaagaaagttgtcaactgtaagtgggtttatacagtaaagcaaaatcctaatggaaaggtggaaagatacaaagcaaggctggtggctaagggatatagtcaaacatatggaattgattatgatgaaacttttgcaccagtagcaaagatgagcacggtaagaactctcatatcttgtgcagctaattttgattggccattgcatcagctagatgtcaagaatgcatttttacatggagatcttcaagaagaggtgtatatggatatcccaccgggatttgctacttcacaaactgaaggaaaggtgctgagattgaagaaatctttgtatggtcttaaacaatcaccaagagcatggtttgatcggtttaggcgtgcaatgtgtgctatggactataagcaatgtaatggagatcatacagttttttatcatcatagtggagatcatataaccatccttgctgtctatgttgatgatatgattatcactgggaatgattgcttggagataactaggttgaaacagaatctaagcaaagaatttgaagttaaggacctaggccagttgaaatattttctgggtattgaaattgcaagatctcctagagggatagttctgtcacaacggaaatatgcattggatttgctcagtgacacaggtatgcttggatgtcgcccagcctctacaccaattgatcaaaatcataaattatgtgcacagtctggaaatccagtgaataaggaaagataccaaagattggtgggaagactgatatatttgtgtcatacacgacctgacataacttatgctgtcagtatggtgagtcgatatatgcatgatccaaggagtggtcatatggatgcggtctataggatcttgagatatttgaagggaagcccaggtaaaggcctatggtttaagaaaaatggacacttggaggttgaaggctattgtgatgcagattgggcaagttgtcctgatgatagaagatcaacttcaggctattgtgtgtttgttggtggcaatttagtatcttggaggagcaagaagcaaccggtggtgtctcgctcaactgctgaggcagaatatcgggcaatgtcagtgagtttgagtgagttgttatggctaaggaatcttctttctgagttaaagttgtcggtggatactcccatgaaattgtggtgtgacaacaagtcagcaatcaacattgctaacaacccagttcagcatgatcgaacaaagcatgtggagttggatcgtttctttatcaaggaaaaactggatgagggagttttggaattagaatttgtaacgtctagtggacaagttgctgattgtttaacaaagggtttaggtgttaaagagtgtaatcgttcgtgtgacaagatgggtatgatagatatctatcacccatcttga

SEQ ID NO: 88080 - DNA, 552 bp, Oryza sativa
  unsure (1)..(552): unsure at all n locations
  Clone ID: PAT_MRT4530_86966C.1
agtanattgataatttttgggtgagaatttggaggggtagactcaccacctctaatgaaagggtgattgcaaccactcatccatcccactcccccaaccaaacaaaaaaatggatcaccatatccactttcatccctacaaccaaacaaaaaactggatcgccatattcactccaccaaacaaaaaactggaccgccatatcccatcccaaccttgaccgggaaccaaacacacccttagttttatattagtgttcatttaattttaaattgctattnaacctccccncccccctccccttttaatcnaaaatctcgantcctacaattgcccactctanttgtagtcnaaatctcnatccanactccctaattaatttnttcccnttnntncngccnnaaacccttttaattaaacncncaattaaaaaaaaaantttacataaccccnccccaggtttttacaaatnttttaaccnatattnggnnaanttttccttttaccngggggtaccnatttacataacacctgccccnttcccccttttaaant

SEQ ID NO: 88081 - DNA, 587 bp, Oryza sativa
  Clone ID: PAT_MRT4530_86967C.1
ggaacaaacccctttttttttactacgggaaacgtttggggcttacgggaaaacccaggggtgggttttttttttttttaaccccgggggggcccaaaaaaaccaaaaccccaggggggaaccccggaccccagggggaaacaacttggggcagaaccccaaaaaaagtttggccccccgctccagggggggggaaattttggcccggtttaacaactcggggaaccgatcggaaatttttggggggggaacggaaaaaaaaactcagttttggggggaccacggcccccccggggggaaagggccccccgcttacaaaaaaaaagggcccatgcaaaaggacgggggcccccgcctggtgttgttgtttgccccaaaaaacccttgaaaaaggctttggggggttttcacttgacccggaaggcccgggatccccaaaagggaccggaaaaaaccaggaggggtttggggaaattttactttccccccaaaaatcggggacaagggggaaattttcacgaggaaaactatggggggccctgggggcagggtatagacgggggaaaggccaaaaagttttttttacc

SEQ ID NO: 88082 - DNA, 567 bp, Oryza sativa
  Clone ID: PAT_MRT4530_86968C.1
atggacagggagtcttgtcaggttactgtcagcgttttacctgaaaatgaaccacatcttttctcttttgaaaacgtcgtaatcttggcgtataaacaattgcagcttggaacattctattccatgccatccaactcgttttctttagtggcaagcacaacgctgcatggctacgaattcgtcaagcctttccgcgtaatacacttaggtgaggtaaagagaagaaactccatgaaaaagcatgaaagcttcctccccaaccgattgcaaaagggaaaaccaaacgaacatttgatcgatcgatcactgctcactgtcatgtcaaccaagctggcagccattgcaattgcaagccaagagaagagacccaccgacagcgagctccacttgttaaacgatgatgatctcaccgacgattctcatcttttaattggtcattttcaggtgtcgcattttcgcgccatcctgctgcaaaaagccatccctatcattgatccgctgtatacgagtgccattcttttttctggacaatggaataccacatttcggggcctccatattagttgg

SEQ ID NO: 88083 - DNA, 286 bp, Oryza sativa
  Clone ID: PAT_MRT4530_86969C.1
ccggccgggcaggtctgcttggggattgccagattagcaagatcagtttcattgatctgttccacccggagaaatgcttgtaacatgtatattatttaggtttctcagtaaatacatgaccacaacctgtactgactataattttcaacctgtggccgcctcgccgatctgttccacccggcccaaaaggtgggagtctgtcacctggtgcacttcgtcatcggattttcccttcctcaactcccgtaatgtgccagatccagcgcacgggggcgtcaccgttggg

SEQ ID NO: 88084 - DNA, 748 bp, Oryza sativa
  Clone ID: PAT_MRT4530_8696C.1
ttaaaaagggtttattgcgtcagccgaggggagggggcgcgcggaccgggtccacgggagtggggcccacgcggcagcctcacggtccacggtggaccgggcgcacccgggctcgcaccggccggcgccgtgggccccacgcttcagccgcacccgagggcgcgggcggctgacggccgggccccacgcggcggccactcggcgtgcccgaaggcggccactcggcgcggccggcaggaggcggcgcccgcgcccctatggtcgccggcggcggccataggcacggcggagcggcggccgagagagggaaagggaagggggaaaagaggcggcggtccacggctcaccctaggtcgacggcgacgacgaaaaaggcggccggagcggaggaaggcggcggcgcggctctggtcgacggggtcgacggcgttcctgcggtcggcggactcggcgagggggtggacggggtcgacggcggtgcggcgaaaccggaggaggcgacgccggggcgggagacggtcccggcgagcggagaaggccggccggaggtcgtcggcgacggaggagagagagggcgacagcgcgagctcgattccagcggggagacggtgcggcaagggcggaaacgggcgaaggaggcgcggggagggtttaaatagggttggaagggggaaagagcggccgaggggaagaaaccgcgcgggaggtcggccgcatcaatgcgccggcgagatttgcgggggcaaat

SEQ ID NO: 88085 - DNA, 345 bp, Oryza sativa
  Clone ID: PAT_MRT4530_86970C.1
atgccctggaagaaactgcgagcttgcgagcttccatcttctgtacgcatcggaggaaccatttggctggatcccgcaaaccacgcaaaccctccctgccattcactagtggtacttgcatgcgaaatagaagggatcaataatctctataatctctatagggcgggcatgcgggagcgccagtcccacgctcccaacggcgggagcgtatcggtcctgcacgaccagctcggtcccgcatcaccaaacaacggaccgcatcagtcccgcttctccaacccgcgcgaccttgtgggtcccgtgcaattcaccaaatcagtggttgatttagcagcgatttgcttc

SEQ ID NO: 88086 - DNA, 738 bp, Oryza sativa
  Clone ID: PAT_MRT4530_86971C.1
atggcagcacagccggcgggtggggaggaggccggtgggggaggtgggagtccggcggcgacgaggcaacgacgcggcgccgccgacggcgctggcgcggtgctccatctgctcctgcgccctgttgcggtcgcggttggcggcgtcgatctgggagaggaggtcgtcgacaacgtcgttggcgcgcttgaggacgccgtaggcgatggcggggaggccggagaagagctggccgtaggagtgggcgaggtagtccacctgccgacgcgcgatggcgcggaggcgcgtgggcgtgacggcggcgccgccgcaggagacagtcgtcttggagaaggcgaggtacttggcgtaggtgagcagcaggaaggagctggaggtgacgtactgcatgttgctgtcgctgagcttgaagaggaggccgccacggctgtactgcgtctagtccgtgggggtgccggcctgccgggcaccatggagcatatgaagctgtcgggttggggttgtgaaggggatggccggatggggatttttgggaggaggaggtggagggagggagatatgtttgggcaaaagtctgccgcaaagacttatggtatcttagagtttcttagagataatggtcgtgtccggatcaaatcaactggcacgctaacacacccaaaggcgagctttggacctgcactggagttaagcagatctcccaagcctcgtgtttttcgtcaacagatttccctgtga

SEQ ID NO: 88087 - DNA, 228 bp, Oryza sativa
  Clone ID: PAT_MRT4530_86972C.1
atggcactggagcaggctgtggccctggtggtgcaggggcctgtgcctcgagacccaatggagaagtacgcaggccttgagggagtggaggggcgaaagacactgaccagagggtcccacattgtttttcaccatgttgccacattggcatgccacgtggacaaaaagagacctcctgaagatggagcaatatatggtcctgcaatccagctcaagaagaagaagtaa

SEQ ID NO: 88088 - DNA, 1074 bp, Oryza sativa
  Clone ID: PAT_MRT4530_86973C.1
atggtgcggccaccgccctcgctgactctgcccgttgaggcccctcctccaccctctgctctagacaaccgtcatcgaccgggccttgctcctactccctcctgtgcccgcaaccgccgcccttgggggccccagcgctgccaatgtgttgccacccttcgactgcttcccaggcgtcgtgctcctctgctgaggatgtgctatttttgctgctcggcctcgatgttcttcatcgtaaagaccccttggccgtcatacaacgacaattgctccaccatagcaaacgagaagcagcaggacgtgacgggtggtgcagccggcgacgacggctcccgggtggcggcgcgcgggctcaaggcgacgcgagctcgccgccctccccgtccccctcgtgcgatcggcgatggcggcgcggctgcggccatcatcaccgggagtccgtcggagatggcgcgcggctgcggccggcgggggaggcgggagtccggcagcgaggcggcgacggcgacgacgcgacgacgaggaccctctcgcgccccctacccctccctccacctcctcctcccaaaaatccccatccggccatccccttcacaaccccaacccgacagcttcatatgctccatgtacgtcacctccagctccttcctgctgctcacctacgccaagtacctcgccttctccaagacgactgtctcctgcggcggcgccgccgtcacgcccacgcgcctccgcgccatcgcgcgtcggcagtgcagtgaccacgagcactccgagccagccacctacatcaactcgccgctcgtcggagcgcttgcctacctcgcccactcctacggccagctcttctccggcctccccgccatcgcctacggcgtcctcaagcgcgccaacgacgttgtcgacgacctcctctcccagatcgacgccgccaaccgcgaccgcaacagggcgcaggagcagatggagcaccgcgccagcgccgtcggcggcgccgcgtcgttgcctcgtcgccgccggactcccacctcccccaccggcctcctccccacccgccggctgtgctgcctgtga

SEQ ID NO: 88089 - DNA, 2954 bp, Oryza sativa
  Clone ID: PAT_MRT4530_86974C.1
taaggataggccttcggcatgatctcaacatacatgcaccacctcctcttcggtgccattgtctaggtctatgtgcagactgacatgaaggttttggttctaatcgtcctcatcgacgacattgtcaaccctaacaattcttctgccatccctaacgacgtgcaacttcttgtttgtcgggtaatgtatgtagaaaattttcataacctattttgcaagtacaaatggttcatccatgtatccaaccttgcttagatctatagttgtgaaaccttccttatctacttttactccagtgcgtaaattgacccaatggcaacgaaacaacagtactttgaatttggtactgttcagttcccaggtctgctctatacgactgtagtatgagctagacccaagttgatcaataaaagcatctatatggacctcgctgttttgtactgtactcttgtcatcttgtttgacggtataaaacaatcccatgattgtcattcccacgatctaaaacaacttttgtctttctaggaatattcagcagtagcccgatcaaactcttactcacattcttttctacgtgcattagatcaatgcaatgacggaactcaatgtccttcaagtatggtagtcactagaatatatactttttcttccgcatactgttgatggtcgttaagtgcaaatggattattgtgtgtttctccacataggttggggcgttaactttcaccatgaccctagaaaatcttagtatagaacaggtttttttttcccaaaaggattgggccaatattatcgccactagtgagttatgatggcatagaacctatgtagaatcttgtgaggtccccatggctggatgcatctttgttgttggggacatttttggcatgttgctttgggacctagtgtctaagttggattgttgctttttccacattgtttttggttgctgaaagctttccttggatgttgagacgctctgttacttttgtgaacatgtggaatgtttgtgtggcccaaaggcatgtttttatctacattggttatttgttatcctggttaagtgtttgatacgctcttgaagttgtgttaaatcgacgtagtcggtgggttcatagtagggtttcttgtgattgcttggctagttgtcctctctagcatgccatcaagttttaaaaatagtatttttctcgataacgaaatattttcgtgtagtttcggtgtcacaataggtgtttattccagcagtacatgcatgcatgagtgtacaaagggataatgccccatgtttggctatgtcttattttagaagagccatatagttttctctggtctttgcctcttttgggaagtgggaaggaggttggatggcctagcaatgttcttttggtagtaagaaaaatagttttgacaagggacccaagaagttcaattgtaatagaaagtggagtgttttgtggggctttgatggttatgggtgtgggtacgagaaaagtttgacacagagcaggacctcgaagttgattgtgcctaaggcataacttcggtttctaaatgtgtctctttctaaagaatttctctaatgtatttctttatatgtgaatcattggcataagtagcaagtgttttttttccttgatgggattttttttccctttcatcacctagaggtaagtgtgtgtgatgccccctagccgtcatttggtaccctgggggcgcccacctccccctctagtcgacctcccccatgcctgccctactgcagacctgggaagaagggaagaagaagaaagggaaagaaggaagcggagggaattgaggtgaagaaggaaaagaagttgtagcatatgttgtgatctacctcctacataaaaattgttagcttttatcttgtagtttgttgtcagtgctctcttgaatggttgttgcacagttttctgggcagatgcacttctctgttttgtgccatgttttaggccagctaaatggaagaattcaattttgttatctaaatgaaagttgtaattcttgttctgtagatgtcagaaatgacatatttttctgtgttatgtgatgtagaattggaggtatcaaattgttaatctatgctgcttttataggaagattatattctctctggtcagcaacaaatttaaggtattttttattaatatttctccattaaaatgaatctgcagggttcttaagcataccattaacccttcgatccgtggcatgccaacgtaataactctgttgcctagggattggcaaagattctcctaagatgataggcaagtactacacaaccttcgtcacaatttctctttggtttgtatcaagaagccttacacacaggacaagactctaagtcggtgtattccttttagtacaatatgcagtcatttggacaatcatgaattctacgaaccactaaccccacacaaaaaatgtttgcttcatgtgtcgctttgggctgtgtgttctctcttctagaagcagatccttcaatatatccaacagttctgtaaaactcttgtttgtccatccacgacatgcttttagcttcattagatctagggtagcaactaactttgtatgttttgccttgcatccatcgtatagaggtgtctctgaatcactaaccaacctggtgaactttgcttgcaatcttgcattgtaagttgtctcctcaacatcatgcaacattgcttgcagaagattgtgattgacatcaaccatttcactgcccaacggataagaaacaaacatgtcaacttcattttcttcctaattttatctaccactcccttcatctataatatcgattgattcattttctccatgctttgtccaacatgtatagcccttcatgaatcctcgatatatcaaatgagagtgtatatctactcttctggtaaacatcttttcatttttacaatcaacacatggaca

SEQ ID NO: 88090 - DNA, 381 bp, Oryza sativa
  Clone ID: PAT_MRT4530_86975C.1
atgagcgtcttcgtcattttcatcggctgttacaccgctattgactggatcgccgacatcgtcatcttcatcaacatcctgggtgcgctcatgtgcttcgcgattcgtgctctagctgcttcttctccaactccgacgaactcttccttttcttcttcgacgccggcgacaacccaaactctggcgaaggccgacgaattagggttctggggtggggaggggagggggaagaagggggagttcgccgagcttagagggatggtcgtgggaggcggcggcctggtggtgggcggcggaacgggcgggcggcgaggcatcggtggcgccggagctgcggggatggaggagggcggtgggccggtgttggtggcgggggcatag

SEQ ID NO: 88091 - DNA, 417 bp, Oryza sativa
  Clone ID: PAT_MRT4530_86976C.1
cctctcagtgagccgagagaagagagaggagagggcaagcggggcgtcggctctccggtggtcgaaaggcggcgacgtcggcggcaaaacatgttcccgagcgacgcgcatccggggagggtggtagctagtcaaggtgaagagggagatggccggaacggcggcgacaaaagctcagctccggctataagagaaggtggtggtgtcggtttatctcaaggtggagggagagggggcagaggaggtcgtcgtcttggtcacggcggcagtggcgtgcaaggaagggcaaccgcggccggctttagtttcttagcggcgacgtttgcggcggctgcctggttgggccgatttgggccggctcagcttagctgggccggcagcccaagaggaaggaggaaaatagaaggaaaaaggatt

SEQ ID NO: 88092 - DNA, 321 bp, Oryza sativa
  unsure (1)..(321): unsure at all n locations
  Clone ID: PAT_MRT4530_86977C.1
tttcattgaggaagctgcggaggtagactcctagctatctaattagctagggagggatcgatcgagagcttcttcttccggggttgcgtccatgcgggacagaatagctagcatcagaatggcgacgacggcggatgcacagtaggcgtgctacttgccggactacctgcaccaccatggcacgatgctgtcgtctgatggcgtctacgcgcgggaccatatgagtgagtacgcttgccctcaaaatggggatgacttagctcagnttgcacctgtaccgaaacaagatggtcctcagcgtccacttccccttcgcctatt

SEQ ID NO: 88093 - DNA, 189 bp, Oryza sativa
  Clone ID: PAT_MRT4530_86978C.1
ttctttttatctactacatcacttctaccaaagggggggcttttatataaaatacgagggggtctcccaccaaatctgaagatgcttcttcccgcccttcttaacgtcgccggaaactactttagccatctcgaattgcaactcccacgagaaccaccacatgtcaactaccaacccaatgacgaacaa

SEQ ID NO: 88094 - DNA, 426 bp, Oryza sativa
  Clone ID: PAT_MRT4530_86979C.1
gacgccacgaggcaacctgtactcgggacggtggagccgtaggccgttagcttaggccaccgcccccgatctcgccgccgacgcccgccgccgtcgcgtatttttgcttcaggtcgtcgtgcgcactggtgcccttcgcggtcggggtcccgcgggtcgcctcccgaccccgccgctggtgtccctcccatatccctaaccatgggaggctccaccaccgtgaggatgggactctgtcccatggcgacttcgttgcctcagcgaaggctctgatcgagaagtggaaggagatcgatgttgacgacgctcttcccgactggcgatggaagccttgctgcaagatgggagttccatctgaggaagagggctatctggctcttgaaggagtataccgtaatcatggaggaagccaggtccagagctgta

SEQ ID NO: 88095 - DNA, 1074 bp, Oryza sativa
  Clone ID: PAT_MRT4530_8697C.1
atggtgcccccaatcgccgggaacggccgcgccaagtccggccgccttcctttgccgccggccgccattcccgtcgccgttcccgctcctcccgtggccggctctctcccccatcctataaaatgggatcctcatccttcgttctatcgttttagccccttcccgagcctccccgtggtcgtatcacctctccccgccttctccttctccctctccgacgccggccggcctccagccgcctctccctcctcaccggagcatcgtccggccgtgtcgtcgcctccctcggctctgcaacaccgtccccttcaccggcctcaccgtctcctcgccggaaactcgccggaacgccggctgctgttcatcgccggtgcgccgatcgacgccgccgtctcctccttcgacaccgcggcatcgccttcttccccggcatcacctcctcctcgcccgaatttcgccggaacgccgtcgtctccgcgccggcctctccttcctcctcgtcggctcgtcgccccgctgcaccaccaccttcaccaacatcgcagcggcgtgttccacgccgtcccctcctccgctcagccgctgctgcctgccatcatcgtttcatcgtcgtctccgatcgttctcgtcgtcgacgtcccatcggtcgcccggctcgtcgtcttgcggcgccgcctccgtcatcgtcatcgctgcggcgtgttccacgccgtcctcgcctccgtgcagccgttgccggctgccctcgtcgtctcctcgccggctgccctcgtagcctcctcgccggccccggtcgtcgtcgtcctcgtcctctcgtcgttcccgatcgtcgtggcgttcgtccctccgtcaagccgttctcgttcgtcgtcctcgcttcgtcaagatcgctgcagccccgtcctcgtgttcgtcctcggctccgcgtcgtcaagcctcgtgccggccgcgtctcgccttcgcccaaggatcgccgccgaagccgtcccctcgccgttcgtctccgttgcgcccgtctgcctccgccgcgcccgttcgtcgttgtcgttcccacgcctcgtcgcgtggtggtaa

SEQ ID NO: 88096 - DNA, 195 bp, Oryza sativa
  Clone ID: PAT_MRT4530_86980C.1
gcacgaggccgcaacggacgggccgccgccgcctgtgcgatctgccgcacgccatcacccgcactccaccccgacggtggcatgtctgtcggctgctcatccgtcgccctcccgccgtcgaacccctccgctggccgtcgcacgactctggggcgacggtgggaggaggcgagctcggcggcaggcagacgtccc

SEQ ID NO: 88097 - DNA, 433 bp, Oryza sativa
  Clone ID: PAT_MRT4530_86981C.1
gaaatggctggcattcattttctgttggattaagacattgacaactgatcagtttttcagtactaacagataggagtaatagatagtgaggaacaatcatcaagctagtggtctaatcaagctaaccaggcattgaagcccaggacatatcttaagtagcatgaagctatctggtctaccataaatgtacatacaaaattggtggaagatttcctcactaaaatgctgagacatatatggcacactcacaatgatatgatcatgcaaatctttgtacaaagctcaaaatttacacataaggtgcaaaacatagacacacctgggaaaaacagggaaggcgttttttacaatatagataacatacactgatgcagttttgaatcctcccccgaccttacataagaagctgccaggagctatgtcatgatcataa

SEQ ID NO: 88098 - DNA, 234 bp, Oryza sativa
  Clone ID: PAT_MRT4530_86982C.1
atggctcgcgttggcaattgtgcagcagtaatcgctcttcttgtcctcgttgcgcttgctgcctcggcagcgtcggatcagccccgttgctgcgtggactaccactcgtggggagggaacaccgggtgcggagcagatcagaaggacgcctgcaacacatggtgtcagtcgcaatgccgcggcggcgagtgcaaaccccgcggcgaccgccacttctgccactgcttctgctag

SEQ ID NO: 88099 - DNA, 420 bp, Oryza sativa
  Clone ID: PAT_MRT4530_86983C.1
atggatgctcaccggcggggcaggctagcgaggatgcggtggaagcagcagacgccggcacaggtggagctccggtcgcgggatggagatcgacgcaggcgaggcggcggcggcggcggcggcgggccaactccgggagtcgagtccgaggggtgggtgattgcgactatggtgcaaggagtcatgggccaaggagctggctttcggggcttccgcgggaatccatttcgttccgggggcgaggttcgggagcggttcattgccaacttccaaggcatttacgtctcgtcaggtcaggttctcattcaacaacgaaaaaacgagtcattgaaggactacatcagggccgagaaaccatcgacaactgtcgagaaacattttgagatgaagctgagaaacccagcttttccagattcttag

SEQ ID NO: 88100 - DNA, 402 bp, Oryza sativa
  unsure (1)..(402): unsure at all n locations
  Clone ID: PAT_MRT4530_86984C.1
aaagatgaatgcgattttgtgggccaagctttatttgagatacaacagaggatgggaacagcatcagataagagcacctcctcttaaggcaaaggagggagaggagataagataactcaccattagcgagcttactgtattggttatgatgcactggtgaaattcgacgccattagnttttactgtatgtttatgatgggctggtaaaattcaattccgtaatcagtcatggtgagagttgtctggtaactgtgaggaaccttaattttgagcacttgtctgaatttttntttctttcgaggtaacanttcctaaaacttgtcaaactgctggcctgttggccatgcaaatactctattttgacaaattagctatctgcaacttgcaaaaaaaaaaaaaaaa

SEQ ID NO: 88101 - DNA, 3067 bp, Oryza sativa
  Clone ID: PAT_MRT4530_86985C.1
atgccgacgcaacccctcctcctcctcctcctcctcccgccaagcggcggcaatctccatggctcccgccaatcctcgccaccgcctcatcgccccgatccacgccgccgccgccgccggaggaggaggaggaggcgcgggcgccacctctccctcgggcctacccagcgtgagtcgtcaatcagtcaaaatgcacgcagcctcgtcgcgatttcgcatgacctgccgatcgaactgacatgcttcctgaagcaggcgttcgcggcggcgtccatcaagttccccagcgccctcttcggcatgttctgcgtcttctccgtcctcgtcgtcctcgacgccttcgcgcccgcgctcgccaaggggttcatggacttcttcgagccggccaccctcttcatccagaggtggctgcccctcttctacgtcccttccctggtcgtcctgccgctcgccgtcagggacgtcccggctgcttccggcctcaagatcttcctcatcatttttggtggctggtttgcttcactcatggtggccggatacacagcactcaccgtgaggaagattgtccagacacagcttataccagctgagccgatgagcaagccgtctccgttcgcgacgctggaattctgggcctggggtgctgtctttgtcgcatcgtttgctgttgcgtatgttaaccccacagcgcttggcaccacggcaagaacatgtcttcctttcctcctcgcttcaactgtactgggatacatggttggttctgggataccatctggtgtcaagaaagtgcttcacccaatcatttgttgtgcactctctgcagatttggcagcaatagcatatgggtatctctcccggtctggagttgatgcagtgctaggtgattacctcacaaaggcgccatctaatcctggagctggtgacgtcctgatgggatttcttggttcagtcatcatatcgtttgcattctcaatgttcaagcagagaaagcttgtgaagaggcatgcagcggaaattttcacatcaattgccatcgcatcaacattctcgttatactcaactgccatcctaggacgggtgatagggctagagccttcactgaccatatcaatattaccgaggtgcataaccgtggcgttggctctgagcatcgtgtctttctttgaaggtgtaaattcttcgctaaccgctgcggtcgtcgtcctcaccgggctgatcggcgcaaattttgtgcaagcagccatggacaagcttggcctcaacgaccccatcgcgcgaggaatagggacggcttccagtgctcatggactgggaacagcagcgctgtcggccaaggagcctgaagcgctgcccttctgcgccatcgcttacggcctgacggggatcttcgaaaacatgaatacacctagaagggaaaatgctaaagctatcttcacgaaatctaagacaaactatgaagtccaagggaagagccaagcgcgcacggcgaggacgagtgcggggacgggcggtcggcaggaggctgcaccgcgtcagcaagaagcctttggctgggaagaagcctctgctgctaaggtggattcagacgaggatgacgcggcggaagagtgcgacgatggtgcggtggtgctcggcggcgttgagcgagaggtagcaggcgaggaggtcctgcaggtcctccagccaccagacgccattggtgcacagcatcttgatcatgctgtccaccagcttgatgaggacatcctctactattacccactggcaaagacgcaaaagtcgagcgctaaccttagtgtgcctaagaactgtttgagtccaggcaaccttaatttgttgggcctcggccaaccccacctaggccggattgttatcattttggtggagatgcggggtattcttgaatacaaagaatacaataccgtgaatagattattccaatttgcttgcaaagctgaaagagaagtgcagggacgcaacaagcataggagttcttttgcaggtgctacttccacacgacaatcaacaccacgtcaatttactacggccgttcgtccacctacctccacgccatcccatgctcaagaaacaagcaaaaatgcttcagttcagactccagccaagagtgcaacttcggtagcttccactggacgtacccgtgatattacatgtcataggtgccatggcattggacacattgcccgcgactatccaaatcagcgagctctatttgtgaatgatgatggtgagtatacttctactagtgattgtgatgatgaatatgctttagttgccactgaccatgtaggaggacaagataacgatgacatcgaggaagtccatttgcatccagagtcgctagatcagtatcctagcctaattgtcaagctagcacttagtgctaaagagaagtgtgaagagcaaaaccaacgccacaatttattccaaagcaaagttcttgtgaaaggccataccgtcaaagtgattattgatagcgggagttgcaacaatttagcaagtgaagagatggtcaagaagcttggcttgactacccatccacatccacatccgtatcatattcagtggtttaatacatgtggtaagatgaaggaatatgagggtgcttttcatgatgagatacctccaaggatgacccctggacgacagagtgaacacgatcaagaagatgggattgagtcgaggacgactccaattcaagaaggggaggatgatgaggacatcacttcgtcggaaacgcacataacttcacacgttccaatgataattccaagtccaagtccagttcggcctccggagacagcactgacttcaaacggacctagcgccttcatgccaactccgatttgggtgatcttggacttgatggaaaggttatctcgctacctttcaaacgcatccggtctcatgtccaaattcatctcgagtcaacgggaatcgtcaaaacaagacagtgatgttgctgaaaccgaacttgggccttgggccttgtaatagactaggcccatctcggaagtgtctccctccacctccacgaattagcacttaa

SEQ ID NO: 88102 - DNA, 231 bp, Oryza sativa
  Clone ID: PAT_MRT4530_86986C.1
atggggaggcttgaactatcagtcccccagatcaagcggagaatggatacccttgatatgcaaacggaagagatccaatacaacctcgaggaacacatagcacagacgcaagaatggcaacaaaatgctgatgctcagttcaccaacatcaacaacctgatgcagcaacagcacgatgaccttcaaacgtacttccgcttccagggattcaatccttatcaaggaccctga

SEQ ID NO: 88103 - DNA, 312 bp, Oryza sativa
  Clone ID: PAT_MRT4530_86987C.1
atggcgtctgccccagatggcccagaggcggaggagttgccgccgcaggaggaggaggaggaggaggaggaggggggcaaggagaagggaaaggacgaagcggcggccggggactatcttcgtgctcgagagggcctgcctcaagggagtctaaatgaactttttgcacctgaaatgacgtcgtcggatattaagcccaagctgccggacagattaccaggcgcgcttgatgggccaccttcacgcactcaagcttttcgatcagtatgggccgaagttgtatgcacgggcatcttttcgaaaactaaataa

SEQ ID NO: 88104 - DNA, 467 bp, Oryza sativa
  unsure (1)..(467): unsure at all n locations
  Clone ID: PAT_MRT4530_86988C.1
cccacgcgtccgatctaaaactgcatattttttttacttctgtgcttccatctgtatgctttttgctgtgaaatatgttaatttctttttgtatgaagttgccaggattattgtataagcttctaggttttcagtttatgacagatcatgttcacaagggtttaaaattattcaactaaaaatcccttcagaaactattgaaaccagccagctcctacttcctggtaatgccatattggacaagtgctttgtgcatcttgtacaagacttcctaaaactgtccacaattaggataatgttttaatggtaaacagatgctagtgattacgagagaaggaaaataacacaacctaatgataataataataataagttagccagtaaacaactcaatactcaccagtttggtgcacaccanatcaagctgggattggaacaaaaaaaaggacgggggaaggtatctcttt

SEQ ID NO: 88105 - DNA, 243 bp, Oryza sativa
  Clone ID: PAT_MRT4530_86989C.1
atggcgaccttgctgtttccttgccggtggcagaggatcggtaccaatccattaaaacccaagttcaattgtccaaagctaaaaatgcagttttttattagagacgatgggaggaggctgaatgtatcctctctctgggcatatgaggcattaggaaagcataggtggtcctgtgccaagatcaaatctaaccctggtgttaagaagttacggcaaacccttaagacgctgtatggaaactag

SEQ ID NO: 88106 - DNA, 404 bp, Oryza sativa
  Clone ID: PAT_MRT4530_86990C.1
ggtgagccggtgggtggagtcggggatgacgtcgacgagtgggagggcagcaggagcatcgagcgttgctccatagtgaaggacgccgtcagctgggagggcggacactcccttggctaccatacgtacagtatggcgattgaacagcttgatgaactggcacatgacaggagatattcctaggttgtagacagaccattgttgagagtaacgagacagtatccgagcccttcaacaatattaccattaagggctttttaaccttccctgcttacatttttagcattggggatctcctgtccaataggattaatgcaaggcccattggtgctttcatggcatacctctcgactgtcatcggagatgaaccaaattgtcccacgctttggttggataattagaca

SEQ ID NO: 88107 - DNA, 232 bp, Oryza sativa
  Clone ID: PAT_MRT4530_86991C.1
aagcttagtaggctagagcgtatggctgttaaccataaggtcatcggttcgagcccgatctgattcgaaatattataatgcagtagtttaattggttaaaatgtatgttttgcaagtatacgatgtcggttcaattccgatctgctccaaattaaaatttaataattattatttaaatttttcagctgttataaggctatttcaaaaataattgagtaaaaaaaaaaagctt

SEQ ID NO: 88108 - DNA, 466 bp, Oryza sativa
  Clone ID: PAT_MRT4530_86992C.1
cccacgcgtccgcctatgcctacgctccctttctactatattgacgaaacctaatgcacagtgtcattcttgcgatatcaaactctgacagaagaccctggccaagtccgatttaaaaggaggctctgatctaacgatatcagagcgtgcctaggggagagagatctccatctcggatcatgcccatgctctcaacgatgtatgcagactcgaaccgaactgcgttgatggactttaagcacagaatgattaggaagatatagcatgcgcgatgtatcttgtgaatctcgcatgttgcgccgtgatatcatgctctcatgatttagatactcggtggaagacctcccagttgagacatgcctggctctaacaatcatagtgtgggaagacatatcatgttgtgcagcagccatcttcaactaacttaaccatttttgcgcattagttgcactatatgaatttgtac

SEQ ID NO: 88109 - DNA, 5029 bp, Oryza sativa
  Clone ID: PAT_MRT4530_86993C.1
atgttctcaatgcacacaatagtggtagctcatcacggacagataaggagtggtaaaatacaattgcccaaattgcgccctccccctgaaccacttgcgacattaataaattttaatggcgatgcacgatcaaagagatttttgaggcagatacgatcatataactcgatgtttgctttcacttcaatgggtgcaagtatcgacaaatcaattaatactggaaatgcgccttatgttttcaagattaatggtgttgtccatcattggattggttgtcttttgccatctcatggttcacctccaaaatttgcacagttatatatttattatcctgaaaatgaaacacaaaacagactaaatatttttgaaaatgatggagataatgcagatagagctgatcctgaaataattgctgccctttcattgatgcttgatagtgaaaatagccttgtgcagaactttaggtatgctagagaacgactttctgaacatggcaaccaacagctaactcttcgtctcttaggctgcaatgcgaaagatgatgtgcaatacaatttaccaacaagtggtgaaatatctggcataatagttggtgatttcttagcaaaagagtacaaatttgatgtgcttgtctatgataaagaccatggattacaccaggtttcgccactgcatccatcatatatggccctgcaatatcctttattatttccatacggtgaacgaggattccatttaggcattaagtacaataattatgatggaattggaagaaaatatgtgacaatgcaggaattttttagatacagaatgcactatagactaaatgaaccaaatcctttcacatgctatggacgactaagcgatcaaatcgatgttgatgtgttttctactattgaggctaataggttacaatttttcattgaccaccaacctgagttacgagctgagtctgtagatggaattgtagatgcaatcgatggaattgtagatgcaatcgatagaggtgtcaccgatggagattcagttggcaagcgcatgatacttcctgccagcttcattggaggaaggagatatatgggtcaagatcgtgctagaatctattttgagacaaccggtaaaacaacaaatgcatcaccaaatcatgaccttgcaccacaagatgagatattagaatatatggatggtaggttcctttctacatgtgagtctcttcatcgactatttgagtttgatatacattatagaatgccatctgttgagcgattagttgtacatttgcctggcaaaaattatgttagatatgagaaagggtctaatttacgagcagtcctaaagagccctgctgcaaaaagttcgatgctaactgaatggtttgaagcgaataaaaaatatcctaaggctcattcattgacatactgcgaatttccaaaagaacagacatgggagccatcatctagagtgtggcgcccacgaactcctgctccaaaaattggtagaatttactatgtgcatccaactgctggtgagctttactacttgcgaatgatactgatgattgttagaggtgcccaaagttatgctgatgtgcgaacatacaatggcattgtttattccacatatagagaggcctgtgaggcacaagggctcctcgaaggagacaatgaatggtacctgctttttgatgaggcaatactaactgcatcatcgcaacagcttagacaactttttgtaaccatccttctttattgctcagttatagatgtgcgctcattatttgacaagtactggatacacatgacagatgatattcataatagactaaaaaaagcgctagataatcctcactgcataattccacaggatcacttgcttaaccttctattacatgagcttgctactgtatttgcaaaaagtggtggtgacataaaggattttaacttgccacacccaacctccattgcacatatcgctggtggtaacagattgattgatgaggaacttacaattgatccacttatgctaagcatgcatgcagattctttgataacacaattgaatactgagcaaaaacatatttttgatgttatatcttctcgtgttgctcataatcagcctggtttcttctttgtgtgtggccatgggggaaccggcaaaacatttctatggaatgctatcattgcaaaacttagatcacaaaataaaattgtgcttgctgtagcgtcatcaagggtggcatctttactgctacctagaggtaggacagctcactcacgatttaaaatacccattgatattgatgagacaagcatttgtaacattaaacgaggaagcatgcttgctgaacttttaattgaagcttcgcttattatatgggatgaggctccgatgacacataggcgatgttttgaagcgttggatcggactttacgtgatatcctttctcaaacgtgtgctacaaattctattataccttttggaggaaaacccgtcgttctaggtggtgatttcagacagatattgccagttgttcctaaaggttcccgccatgctatagtcaatgcatcaatcacaaattcagatctatggaaacatgtaacagtcttaacgatgaatataaatatgagactacttaacacaaacctagagcaaaagcaaaaagatgagctgcatgattttagtaagtgggttttagctattggtaatggcacaatacctatgaccacgaaggaaggtgaaagctatccatcatggatcgaaattcctcatgacttacttattataactgatggtgataaaatatctgctattgtgaatgaagtgtattgtgatttttttgcatcatacatgaatcctgaatacttagcttctcgtgcaattgtttgtcctaacaatgctacaatagatgaaataaatgactatgttattggtttagtaccaagagaagcaaggatatacctaagctgcgatacaatatcaaagtgcgctgaacaaattccagattttgacttgctatatccacctgagtttcttaattcaataaatgctgcaaacttccctacacatagacttatcctcaaagaaggtgatagaattcttcaatgcattatactcattggctcaaacattggtgatactgtttacatacctcgaataacactgagtactactaaaatgaaatggccttttacattgcaaaggagacaattccctattcgagtttgctatgcaatgaccatcaataaaagtcaaggacaaacactacaacgagttggtgtgtaccttagaaaacctatttttacacatggccagttattccaaatggcgcacatactcatctcacagctgtcatgtggtgattcaaacatacgaattaaggcaagagtttctaggctatgggactttcatgatctcaatgatgatagaaaaattgtgcacactgatcttgtcttactggatgaaacggggaacagcatacatgctcaaatgtatcagcatgtaatagtgaacttgaaacctcttcttcaagaaggaaaagtttactacattgattcattcactgtcagatatgcaaataggacatataggccagttgcacatagcctaatgatcctattcactaaatggacaactttagaagaatgtgtcgatgtgcctgctgatttccctgctataacattttcattgacaccttttggagatgttccctctcttgtggacaaaaacatcttttatgttgggcttacactgactggaagctccccatgcaaatggtacattaactttgaaatacctgaagtagtggaactgaaagaaagctttagcaccaactttcagccaatcaggtggaacgacgctcctcctgcaggattcaaccaaagcaacccacaagaaaagacacttaaagacattcttgaccttaatcctcataaacataagtacaaattagtgctaattgctggagatactactgcagatgcaacatttattctttttggaaaaactgcgcaacgcatcatacgaaggccagtggaatctctgatcgaagaaaatccaccggacagtgaattcattccaagggaaatcttagcacttgttgacaatggttttctatggaatgtcagcttcacaaaggatattaacagaagcgaagaaactctccaggttaatagtgttatatcctctggtccagcaaatcaaccaccgctgcttatgtcgccaagtacttcacagccagcatcagcaattgtatcggcaagctcaagcagttctctccagacagcaccaacaccaagtgaaacaagcaccgaatcgcaattagccatcataccagcacagggcacttcaacaccaacaaaatacactcctgctgctgcaacagatgagacaccaactagcaaatcaagctccttagtatttaccaaaaaaagcattattgtctcaggctactctatgccatctcacactgcaaagacctctactgatactaaggcaaaaattggcactcatcatgaagagaagatctcacaaagtgcatctttaactacaattgttccccgtgatacttcggataagtgcttcttctacaaggcaaaggtcaccgctgaatctccagatgagtctccacaggcagatccttcactggcgccaaagagcacacccaaaaaaagaggtagacctacagaaaccaccacaattgccaaaaaattgttcaaggatagtacccagaagaaacccactgacagtgaatgagacggatatatgtagtccatcagcaagtcttttgtgtatatgtacagaacgaaccacccaagctagaagtgtagaagcaacaagttagctgcaagcctagaggaggctaagaagcaagcccttttgttcatgacccctaggtcatgattatcattgtaaataagtaatgttatgtttaccttccttgccaccttctgtgctgtgaaatgttgttcgaacaactactacttatatggaaccaatatagttatggttgccccctacctaaacaaaaccc

SEQ ID NO: 88110 - DNA, 750 bp, Oryza sativa
  Clone ID: PAT_MRT4530_86994C.1
atgcccaagcggcgtcgcggggttcctcccgctccttccccggctctggcgacaatcgactattcccttacttataacgagatagccgccagtggggctccagggagcgtaaacgcaatcttctggtgtactattagcatgctcaaaacaacatttccagaccccttccaatttcttcatgttatctggctgaaggaatttcagaaatttgatgacaagtccagcgccatcaatgttgatactggtgttaacaaacagcttactgagatgatcatgaagtggcgtcgccctaggcagaaattggttgttggaaagccggagtataaatcaatcattgaaacaaccttggtctacaacgatattgttcgtgctgcagccatcgtgtttaggtgtgatgctgttgagaaggacctttacgagcacttgcaacatcttggtcgtcacctcaagaatgtgtctggcattgactatgagaattggggaactgtgaaactcgcgacagcttttaagatcatatgcagccgcaaaattgataaatctgatgagatgttttcagacgacgtgcgatcaaagctgctagatgatgcagacaaatacaaagatcttgtttttcggacaggtctcaatatactcaggaatgataaagtggatcaattggccgagttggttaaggtagctaggattaaagctgaacacgtgagggtgaagcctatgctcaatagatcgctgaacctcttgcaggctaaataa

SEQ ID NO: 88111 - DNA, 452 bp, Oryza sativa
  Clone ID: PAT_MRT4530_86995C.1
gtgactgtgtgttgaataaaattgcatctcttggtagcaccaagcaaatgcatgtggatagtgtagtactcacgtccaccaagcagtgttggtgctaatgcaatctggctgaaagtgtcctctttctgttgcattccatcgaacaggtggtctaactcagtgttgctgatggtcagttcgtgcattcccagccctggtcgaagaagacaacaggacaatagtccggcagcgacaccaccactggcagccattaggatcagttcaattgcttaattgtacacataatcttctctgattcatgttccagttggaactcagtttgtgttaagaaatccttgaaccagaaatttagcccaaatttccagaccattttgtgtattaaatccctatccagaaatcgagaggacgtgatggcgaggcgaagatgggaaggcggtcgacgacaaggatta

SEQ ID NO: 88112 - DNA, 3445 bp, Oryza sativa
  Clone ID: PAT_MRT4530_86996C.1
atggcgatcagttacccgccggaggatggccggtactactgttcttccgttgccgccggcgatgattcacctgcggcccatcatactaacgcccacgacgactgggactgggactgggtacccccaccccctgctgatgctgctgctgctgctgcggcggacgacgacgacgacgatggcgatccgactcctgctggtagtcctggcagcaggggcgaagacgaggaggaggagcggcagagggcgcagatggtgagcgccatgaacgggcagctgaacatgctggccagccggttcctggcatcggcgggcgtggaggaggagtggctggaggtggtgacggcgctgtcctgggaggcggcgctgctgatccagacccacgcctgcaccgccggcaacgacatggacccggcctcccacgtgaagatcaagtgcgtggcgtccggaaggcggcggcaaagccaggtggtgcgggggctggtgttccgcaagaacgcggcgcacaagcacatgcccaccaagtgccaccgccccaccctcctcctcctccacggcgccctcggcctcgactcccatctcggcttctcctccttcgactccatggagcaggacaagctcattctccgagcctccatctcccacatcatccacacctgcagccccaacgtcgtcatggtcgagaagaccgtctcccgcgacattcaggagctcctcctgcaccacggcgtcactctgctgctcgacatgaagctccaccgcttgcagagaatcgctcgctgttccggtgctcccttgctctccttctcccagcttctccatgattgccccaaccacctcaagcactgcgactacttccacatcgacaagttcttcgaggaccataacaccaccaccactactagtgctgctgccctgaacaagccatctaaaacattgatgttcttggaaggcttttccaacccattgggatgcaccatactgctcagaggcgcaagcacccaagaactgaagaaaatcaagcaagtcttgcactacacaatattcgctgcataccatctggttgttgagacatccttctttgaagatcagagggtattcttgaatgatacaaatgttgacgggacaccacaaatcactcatcagacttccattgtctcaaatcgttcacttcctactgattatgatgtcacttgtactagcaggggatcattactggaataccatgatggggatcacaaggctacagttcctttcacaaataaaccagactcgtacacacaagatgagggtacagccatccactgtgaagcacctccatctgaaaacctgctgtcctcagtctccggatcactcagaagattcattgatatattccgttatcagaatatttatttacctgtaacttcttctcaagatacaactggtcatcagaatgaacaagatactgaaaccagccaagaaacggcgtctgataccttaacaaaggatcattcttgtgagtatatggatcagttaaatgatctccaggaacaagtattcgccaaaaccaaccaaaaaatgtcacagcctgatcctttcggtactgaaaaacatcagcagaatgtggaacagtacagggccggcgaaaatataaattcagacacagatgaggctgatgatgtaatggattctcagagcatactcatcttgttatccagccaatgtgttacgaagcaggttgtctgtgaggagagccatctataccgcataaactattatgggaatttcgatgtctccttaggacgatatttgcaagacattttgcagaatcagaacctaagctgttcctcatgtggagagcctccagatgctcacatgtactcttacacccaccgcaatggaaatctaactattaatgtgaggcgtttgctgcctcagcatcatttgcctggtgaatctgaaggaaaaatttggatgtggactagatgtctaagatgtgagcatgagagagggatatccaaatcatctcggagagtgctaatatcaactgaagcgcgtaatctctcctttggcaagttccttgaactcagtttctcaagccactctgctgctagaaggctatcagtttgtgggcatttggtcaacagggactgcttgcgatattttgggttgggttccaaagttgcaaagttccaatattcatcagttgaaatttacactgcctgcaaaccgcaacgaacccttgagtttcacaatcccgatatgcgtgagtggttcgagcaagagggaagaaatgttcttgcgagaggagttaagcttttctatgaagtttctagcttaatacagcacatgaagattttctctgaggtggcaattaactgtggagactctcttcctgtcaaagaagtttcccaacttgaagagatgctaattgaagaaaaagctcagtttgtggattctctggtgaaggctgttgatgaaagcgggatgtctagctcctctgtgaatgagattcttggtgtaaattgtctctaccaggatcttctgattcgactgtacgtgtgggaccgtcgtttccatcaaattgttgagtgtaagtctggaagaatggctaattgtgtcggcaagaaggaagctgctgaatttgccggtgaaccagctgcaactggtgaaagtgcagtgccctttgagaatggatatatcaaggaaatgcagtacagcagcgaaaccttaactgatgaaaattcacggcgtgaggagcaacatatcacaaaagtgccttctttcagagtcttggaaggtacagatacgcagttgataaatcctgaatgtggggataacagggaaacatggatttggagtccattgcacgagttaagagagagttacaggcatgaactgcaggccgggtatttggaaagattcgaacttgtcaacaactattctccatctcatctatcccccctgcacaaacaatcatctgctgagttcatagttggtccaggtggcaatgtgttgtgcatatcagaggatgaaatatccagcataatatcccgcgcactggccatatcggaggaacgtcgccatcttttactagatgctctcatggttgaaggtgaggcagcctacagcagggggagtgagagctctaagatggagaaatcttacagctcattatctgaagcttcttcggcctcttcgtcgtggtcatctattggatcttcagactcagatgcaagcttttcatctgacgacctcttctccagctatgatagctcacttctgtcatccttacttcatcctgaagtatctgtcaatgggaaatcatctctcaaagggaaatactcggttatttgtgtacatgccaatcagttttacacccttcggaagaaatgctgcccatctgagcttgcatatatcacttccttgagccggtgcatgaagtgggatgctcaaggtggaaaaa

SEQ ID NO: 88113 - DNA, 2048 bp, Oryza sativa
  Clone ID: PAT_MRT4530_86997C.1
atgccccctctaccgctttcactactggcttccacccctgaggtagatcagggggagggtttcctaagcatcgactgtggcctggatcaagattccagaacagacagcctggttggcggaatcacctacgtctccgacggtgcgtacgtcgacgccggcgaaaatagaagggtgaccaccgtgtacaaggacgactggaagggccctcgctaccagacactctacacgctcaggagcttcccaacatccgttaccggtgaacggagctgctactcgctacccaccaaaaaaggggacaagtacaatgttcggctggagtttctgtatggcaactacgatggcctggacagcgcatccctgacgttcaacctgacccttggggtgaaccactgggacaccgtgatcttggacaccaccatccactacggttataaagcatacgccgcggtgttcgtcgcatgggctatgtcggcgccggtgtgcctggtgaataccggcggtggtacaccattcgtgtccacggtggagctgaggccgtttgaaagcttggcctacccgaccgacaatcagtcactctccctctatgaacggaagagcatgagatcagcttttgtgccggttggtaactccaatgaactagttttacgttcaaagagaagagacagacttcccggtgatcacttggtgatcctgcacttcgccgacttccaggataacaagactagggagttcaccgtttcaattgacagcggcatgcaaagtggaccgatcagtccaccatacctgaaaggttggtctatcatcaattggtccagtgattctgaagatctgtccatcaaacttgttgccactgccacatcttctcttcccccgatcctcaatgcttatgaggtctacagtcgcatcatccatgaatatccaatgacgttctcccaagactggatgccagccgccgtcatcggcgccgtgcgccgggacggtcgctctgctcggctgttgggaatagtcccatattacttatttagggaaaggccagtcaaggcggttcagagcttgaccaaggtgaatcacaggaatcttgtttctttgattggttactgctgggagaaggatcatttagcacttgtctacgagtacatgtctagtggcaatcttagtgattatctgagagaggtaactagtggtgaacctaccataatacctggaaatggtcacattgttgaacgtgtgaagcagaagatggtcactggtaacatcagctcagttgccgatgcacgtcttggaggttcttataacgtcaactccatgtggaaggttctagatgctgccatgatgtgcacagcagatattgctgctcaaaggccaatgatgtccgccgtggtcatgcaattgaaggaaagcctggaattggaggaagctcatggggacatgggcgacatggaaaatatagcaagagataacaaagctgacagtaagcaattcgtgagagtaggtcagtcaaatgctgagaaggagcgactagcgttggacaggagtggtagtgagctcggcgacatggaatccagcgtggaggacggtgtgagaggcggtggtggcacactcggattcggcgtggatgacgacgggagcagcggaagcaccctcgaattgcatggtggtgccctcggttgcgggatgcagagctcggccgcgggatttgatacagaggacggcgggagcggcggtgatggtatcgggcgacaacggcggtgtcctaggctatgggatctggccggagtgatgagctcgaggccgacggatctggccgtgcccatcctcggcaggggcggatctgccacccttggccacataagaggtgaccacgacattgggtggcggacagcggatccgacggcgccacccgtcgggagggcggatcagccacccctggccccgagagggtccggaaaagaaggaacaagatcgaagcggatttgatgaatgatcaagttgtatttgaagtcggaccgcgcatcggctgggcattgtatcggctggagacagaatag

SEQ ID NO: 88114 - DNA, 573 bp, Oryza sativa
  Clone ID: PAT_MRT4530_86998C.1
gcacgaggtcaaaccctaactctgcaagacgcgcgtccgccgccgcaactagcaatgcccaagcggcgtcgcggggttcgcccccctcctcccgatccttccccggctccggcgacaatcgactatagccttacttataaggagatagccgccagtggggctccaggtgctgtggactttgtgaacaatcatggcttgtacttgctgctgcttgagacgccctctggcttctcaattttctctctttgtggggtctacatccacttaccagatgcgatacaaaatatttgggcgatgttcggtacttacaggtctgcacatgacgttatctggctgaaggaatttcagaaatttgatgacaagtctagcgccattaatgttgatactggtgttaacaaacagcttactgagatgatcatgaagtggcgtcgccctaggcagaaattggttgttggaaagccggaggaataccctgcctgtgtgatgaagttgtgatggacgtaatgtgggccatgaagcgtctcattcgctattttgtgcccactgaaacacccgagctggctgaagaggaca

SEQ ID NO: 88115 - DNA, 468 bp, Oryza sativa
  Clone ID: PAT_MRT4530_86999C.1
atgtgggccatttttaggtactacatcaccggtaggctcactgagagtagtgacgtctttagcttcggtgttgttttactagaggtaactagtggtaaacctcccataatacctgaaaatggccacattattgaacgtgtgaggcagaagatggtcaccggtaacatcaactcagttgccgatgcacgtcttggaggttcttataacatcaactccatgtggaaggaaagtctggaattggaggaagctcatggggacatgggcgacatggaaaatgtagcaagagataacaagtctttgatgtccatgttcgcgggagggtcggcgattggtggcgggcaggagcgaccaacgtcgggctggagtggtagtgagctcggcaatgtgggatccagcgtggaggacggtgggagcggcggtggcggcacactcgtattgggcatcggtgccctcggctacggaatctga

SEQ ID NO: 88116 - DNA, 831 bp, Oryza sativa
  Clone ID: PAT_MRT4530_8699C.1
atgacgtcaccaccggcggcggcggctcggcggcttggacggctcggacggcgcacgctcgccggcgaacggcggcgctccggcacaaacgaaggacaccaacggatagcggacggcacggcgaactcaccggcgaccaaagcgacggcggaagaggaacgaacggcgatgacgacgaagaagaagcggcggcgctcttcggcttgacgacggcgacgatgctccggcggtctccgacggtggcgaaggggcggacgaggacggcggcgacttggcgaccacgacggcggtcttcccgagcaacggcgacggctgaaacggtggcggcgcacggctggagcggcggcggcaacggtggcgctagggcacacggtgctagggcgctacgggcgacgagaggcgaaggcgagggtggcggcgggtagaggagacaccgaggagccttttaaaggggctaggaggcaacggcgaaggcccacggcggccggcgacgagaaggaaagttcgggaaaatcgaatccgaaacaaactcgaatccacgaatttccaaacgattttagccggtgtttccaaaggagaaaaggtagaggagatcgagaagatcatttcccctctatcaattcggccggagaaggaaaggatcgaccgaatttggaaaggaacggcggcggcgcgaaactagggtttcgggcggcggcggccggaggtagacgacgaccccacctgtcagcgggcggacgcgcgcgcgcgcggcggacttggccggactgggccgaggagagagagagcggttttgggccgactttcggcccaaagccaaaagagactttt

SEQ ID NO: 88117 - DNA, 490 bp, Oryza sativa
  unsure (1)..(490): unsure at all n locations
  Clone ID: PAT_MRT4530_869C.1
gcnancnaccanttgctagggggggntcctncncccggnggnggnnnnggccaccttntnggtnggtttananccgnttncacannnacgnnggangaattgnngantccngcgncctctccctatgaggccttgttcggttaatncnaaaaanagattgaanaggggattaananaananttttnccctataatnggagtaaaataaatcctntntaaatccnccgntngcgngtnanttganncnaggcggcngttaattatttnncantcttagttggngtanagnccaattnaagttaccnnttnaatnagtcngtnnanntgatcntgcctcantntttttttttttttnntgttntgcaaataggcggggcctgcntatgcttnagtgtgcatgtcgantttggngtaattaattggncncgtgcatgnatattttgtaactaaaaaaaaaaaaaaaaaaaaaaaaaaaaaaaaaaaanaaaaa

SEQ ID NO: 88118 - DNA, 375 bp, Oryza sativa
  Clone ID: PAT_MRT4530_86C.1
tcgtccacgcgtacgctcaaacaatacagcaaatgcatatagagctagaaacccaccacacagaagatcatacactactatgctctacttgatattgctgtatgcagcgactatgctcagacagatgctgacactaaagcacacaggcagtaaaagctgcaggcagatgtgatgctgctggaacagatgctgaatacatgcggcgagttcaggaggcacatatgcagcacaggggctacgactcttattgcaatcaaccgtgtctcaactgataaactcgcaagtgatgcacaataacctgtacaaacatatcaggatgatcgcacaacagtctcactatcatgccaatatcagggctcaagctattgtgcatga

SEQ ID NO: 88119 - DNA, 1984 bp, Oryza sativa
  Clone ID: PAT_MRT4530_87000C.1
aatcaaatcaagatcgtcattcatcacagagcacgttaatcaccactgagcacggtcatttgtttgacagctaaacgatgcaaagttttggatagcacggaccttagcttctcaaataccagactagatttacaaaagatgcacaataatgtttaagccaaccgagatcacaacctcgacactcagaagaatctggattaagccacatgcataccaaacgcttcctaactggcaaaccaaattatttagcctgcaagaggttcagcgagatattgagcaagcttgtagtgatcttagttctcaggcacattctcaggcaccctcacgtgttcagctttaatcctagctaccttaaccaactcagccaattgatccattttatcattcctgagtatattgagacctaaaatttttttatagtttgcaatgcaacctgtcgaaaaaacaagatctttgtatttatctgcatcatccagcaacttcgatcgcacgtcgtctgaaaacatctcatcagatttatcaattttgcggctgcatatgatcttaaaagctgtcgcgagtttcacagtgccccaattctcatagtcaatgccagacacattcttgaggtggcgaccaagatgttgcaagtgctcgtaaaggtcctcaacagcatcacacctaaacacgatggatgcagcacgaacaatatcgttgtagaccatctctggtttgatttcaaagccataacgacttaaaaacatccgtagtccttgactcatagtgaggctgtcctcttcagccagctcgggtgtttcagtgggcacaaaatagcgaatgagacgcttcatggcccacattacgtccatcacaacttcatcacacaggcagggtattccctgaaaaaagaaacaataaaaaatgaagctcaaagttgttcgcatatataggcaaacaaggagcttaggtggtgtttggatccagggacttaactttagtccctatatttagacactaatttagagtattaaatatagactacttacaaaactaattacataaataaaagctaattcacaagataaattttttaagcctaattaatctataattagagaatgtttactgtagcatcacataggctaatcatggattaattagactcaatagattcgtctcgcgaattagtccaagattatggatgagttttattaatagtctacgtttaatatttataattagtatccaaacatctgatgtgatagggacttgaaagttttcgtcccatctaaaagagggtcttatatttactcactaaggtattttcaatgattgatttatactccggctttccaacaaccaatttctgcctagggcgacgccacttcatgatcatctcagtaagctgtttgttaacaccagtatcaacattaatggcgctagacttgtcatcaaatttctgaaattccttcagccagataacgtcatgtgaagacctgtaagtaccgaacatcgcccaaatattttgtatcgcatctggtaagtggatgtagaccccacaaagagagaaaattgaggagccagagggtgtctcaagcagcagcaagtacaagccatgattcttcacaaagtccacagcacaagaaaataccttttctccttcctttttatcctcacagcaagagagatggagagaggtctgtgagcccggtggcagcggcacggcgggcgcaacggtcggccgacatgagctagtagaggcggcactcggcgtgcgcggcggcggcggggagggcggccacggcgccgccgtcggtgctactggagccgccgcggaggaggtgtccgaggcggcctcgatgcgtgccatcctctcggtgtctgtctcctcgtcgcggaggaagaagagacagccgaggcagccgcagtgcgtccacgcgcggccctccacgacactgtagtccatgtcggcgagcacggcgaacacctccgagatgaaccccat

SEQ ID NO: 88120 - DNA, 1953 bp, Oryza sativa
  Clone ID: PAT_MRT4530_87001C.1
atgccccctctaccgctttcactactggcttccacccctgaggtagatcagggggagggtttcctaagcatcgactgtggcctggatcaagattccagaacagacagcctggttggcggaatcacctacgtctccgacggtgcgtacgtcgacgccggcgaaaatagaagggtgaccaccgtgtacaaggacgactggaagggccctcgctaccagacactctacacgctcaggagcttcccaacatccgttaccggtgaacggagctgctactcgctacccaccaaaaaaggggacaagtacaatgttcggctggagtttctgtatggcaactacgatggcctggacagcgcatccctgacgttcaacctgacccttggggtgaaccactgggacaccgtgatcttggacaccaccatccactacggttataaagcatacgccgcggtgttcgtcgcatgggctatgtcggcgccggtgtgcctggtgaataccggcggtggtacaccattcgtgtccacggtggagctgaggccgtttgaaagcttggcctacccgaccgacaatcagtcactctccctctatgaacggaagagcatgagatcagcttttgtgccggttggtaactccaatgaactagttttacgttcaaagagaagagacagacttcccggtgatcacttggtgatcctgcacttcgccgacttccaggataacaagactagggagttcaccgtttcaattgacagcggcatgcaaagtggaccgatcagtccaccatacctgaaaggttggtctatcatcaattggtccagtgattctgaagatctgtccatcaaacttgttgccactgccacatcttctcttcccccgatcctcaatgcttatgaggtctacagtcgcatcatccatgaatatccaatgacgttctcccaagacttcaatttccgacaattccacctctccgctgccacccatgcatcatgctccctgcaggctgccaagcggctccgcgttcggggtggcagcaaacctctggttcagagcttgaccaaggtgaatcacaggaatcttgtttctttgattggttactgctgggagaaggatcatttagcacttgtctacgagtacatgtctagtggcaatcttagtgattatctgagagcgggatctatgggctacattgaccctgagtactacatcaccggtagactcactgagagcagtgacgtttacagctttggtgttgttttactagaggtaactagtggtgaacctaccataatacctggaaatggtcacattgttgaacgtgtgaagcagaagatggtcactggtaacatcagctcagttgccgatgcacgtcttggaggttcttataacgtcaactccatgtggaaggttctagatgctgccatgatgtgcacagcagatattgctgctcaaaggccaatgatgtccgccgtggtcatgcaattgaaggaaagcctggaattggaggaagctcatggggacatgggcgacatggaaaatatagcaagagataacaagttttcgatgtccatagctgacagtaagcaattcgtgagagtaggtcagtcaaatgctgagaaggagcgactagcgttggacaggagtggtagtgagctcggcgacatggaatccagcgtggaggacggtgtgagaggcggtggtggcacactcggattcggcgtggatgacgacgggagcagcggaagcaccctcgaattgcatggtggtgccctcggttgcgggatgcagagctcggccgcgggatttgatacagaggacggcgggagcggcggtgatggtatcgggcgacaacggcggtgtcctaggctatgggatctggccggagtgatgagctcgaggccgacggatctggccgtgccatcctcggcaggggcggatctgccacccttggccacataa

SEQ ID NO: 88121 - DNA, 600 bp, Oryza sativa
  unsure (1)..(600): unsure at all n locations
  Clone ID: PAT_MRT4530_87002C.1
ttccctgccgcccttgttcttctttctatgggtttcctgggacctgaggctcgtgtcctaggcgacgacatcgagaaggatgctcgcaagaacgtcaaaacggcgccgggcaagtacgcgaccaatatggagggcgttttcgctgctggtgactgccgcagaggccagtccttgattgtttggggtatcaacgagggcagacaanccgcccgcgagattgatctgtacttggaaaagtacaccagtctgcctgttactggcggtattgtcaagcgcacagcgcaagagattttcagcgctgttaagcctgttgcacctgtcgcggcctaaatgtgtaccttgaggtgccttttctctctttatttatacttttcaatgtttcacatgggttattgcacacttttgtctcgatgataccaaaggaagcgcgcttttcaggacgagtcatagcatggcgtgggccaaaatgttgaggcgacgttgtttcttaggttatagctgtaccacgacgctgttatggttggtgttggttgcataatcgtctaatgctttgtgcttttctatttatttaaaagtttggataaaaaaaaaaaaaaaaaa

SEQ ID NO: 88122 - DNA, 974 bp, Oryza sativa
  Clone ID: PAT_MRT4530_87003C.1
tttctacagatgattctcccacggtaccagaacagataagtcctccaggacattggacaaatcattgggaccatctacaaaaacctgagaatcgtcgattcacatatgaggaactagcgaagttcactgatagcttcaaatgtttaattgggcatggaggctttggaaatgtctattacggctgtttagaagacaataccgaggttgctgttaagatgcgatctgaatcatcgtcccacgggctcgatgagttcttagctgaggttcagagcttgaccaaggtgaatcacaggaatcttgtttctttgattggttactgctgggagaaggatcatttagcacttgtctacgagtacatgtctagtggcaatcttagtgattatctgagagggctagaatatctacataagggttgtaacctgccaataattcatggggatgtaaagacaaataacattctcttgggtggaaatttaaaagcaaaaatagcagattttgggctttcaaaaacctaccatagtgactcccagactcacatatcagccattgcagcgggatctatgggctacattgaccctgagtactacatcaccggtagactcactgagagcagtgacgtttacagctttggtgttgttttactagaggtaactagtggtgaacctaccataatacctggaaatggtcacattgttgaacgtgtgaagcagaagatggtcactggtaacatcagctcagttgccgatgcacgtcttggaggttcttataacgtcaactccatgtggaaggttctagatgctgccatgatgtgcacagcagatattgctgctcaaaggccaatgatgtccgccgtggtcatgcaattgaaggaaagcctggaattggaggaagctcatggggacatgggcgacatggaaaatatagcaagagataacaagttttcgatgtccatgttgggtccatcggcaagatga

SEQ ID NO: 88123 - DNA, 748 bp, Oryza sativa
  Clone ID: PAT_MRT4530_87004C.1
gtttcgctgcttttgctgctggaaagaagcagtagggccttcttttttgacttttttgtgtttagtgaccgttttaccctttgaagccgtgtccttggcgatggagagtgatcgaggttgacaggtggtgaagatacggggagtgtttgggatgtattaaaaaatggtgttcaatttatggaaagattaaagtatttatcaagtgtattaagtgtgacaagtaagaaaaacacgcaataagttatttagataaatagtacaaactacatgtttaagtatgaactccctccatctcaaaataaaagaaactggatgaggcattttctagtagtacgaatatggatagcttattttttaatcctagattcttatattttgggatggaaaagtatagggttaagaaaatttaagtatgtatccgtttaaattaatacacatttataattataaatgatgaccgaagtgtaaactttttttttgaagcggggagaagatgaatttcactaaatatgtactactatatattacatttatgtagaaccattcgacatcgtgatattaaactttattaaaaaaaattaaaagggggagggggacgaacttcagtaaacatgtactagtagtatattacattcgtatagaacaattcaacattgtcattctcttaaattctcattggtacttattatctatttaaaaaacagaacgagctgtgatgttcacatgaactggaaagaagcgcatatgg

SEQ ID NO: 88124 - DNA, 694 bp, Oryza sativa
  Clone ID: PAT_MRT4530_87005C.1
tgtccttcaacctctacggtgtggacttccctaccgaaaggggccactgtagcggtcgaaggctgggaacccttgacaactattacgcttttcttgtgtgtaggtctagattatttgcataagggttgcaacctgccaataattcatggggatgtaaagacaaataacattctcttgggtcggaatttaaaagcaaaaatagcagattttgggctttgaaaaacctaccatagcgactcccagactcacatatcagccactgcagcaggatctatgggctacattgaccctgagtactacatcaccggtaggctcactgagagtagtgacgtctttagcttcggtgttgttttactagaggtaactagtggtaaacctcccataatacctgaaaatggccacattattgaacgtgtgaggcagaagatggtcaccggtaacatcaactcagttgccgatgcacgtcttggaggttcttataacatcaactccatgtggaaggttctagatgctgccatgatgttcacagcagatagctgctcaaaggccaatgatgtcggtcgtggtcatgcaattgaaggaaagtctggaattggaggaagctcatggggacatgggcgacatggaaaatgtagcaagagataacaagtctttgatgtccatgttcggtccatcgccaagatgaagaattaac

SEQ ID NO: 88125 - DNA, 2890 bp, Oryza sativa
  Clone ID: PAT_MRT4530_87006C.1
gaattcggcacgagtgtattgactgaatggcgctcttggcttacttcaccgttttcgtgttagcagcatctgttcctgccaccggccaacaagggcctccaaaaacgttgtgagtagataaagagaggaattattgcattgggatttgataactgcttatatctacggtgttatgtcagccggtgaatatttcgaagtttcctaagcatcgactgtggcctggatcaagattccagaacagacagcctggttggcggaatcacctacgtctccgacggtgcgtacgtcgacgccggcgaaaatagaagggtgaccaccgtgtacaaggacgactggaagggccctcgctaccagacactctacacgctcaggagcttcccaacatccgttaccggtgaacggagctgctactcgctacccaccaaaaaaggggacaagtacaatgttcggctggagtttctgtatggcaactacgatggcctggacagcgcatccctgacgttcaacctgacccttggggtgaaccactgggacaccgtgatcttggacaccaccatccactacggttataaagcatacgccgcggtgttcgtcgcatgggctatgtcggcgccggtgtgcctggtgaataccggcggtggtacaccattcgtgtccacggtggagctgaggccgtttgaaagcttggcctacccgaccgacaatcagtcactctccctctatgaacggaagagcatgagatcaggtgctgacgtcgatataataaggtttcctgatgatcagtacgatcgttattggtatgcgtgggaattaactggaaatgacccttattcaaacatttctacccaatcagccatcgaactgaataccacatttatggtgcccttgcgtgttctccaaacagcttttgtgccggataacaagactagggagttcaccgtttcaattgacagcggcatgcaaagtggaccgatcagtccaccatacctgaaaggttggtctatcatcaattggtccagtgattctgaagatctgtccatcaaacttgttgccactgccacatcttctcttcccccgatcctcaatgcttatgaggtctacagtcgcatcatccatgaatatccaatgacgttctcccaagactttgatgcgatcatggccattaaacatgagtacggaataaggaagaattggatgggtgatccttgttatccatctaattctgtttgggatggtgtggaatgtactaatcctggtgatgataaaaccatgaggataatatctcttgatctctccaacagcgagttgcaagggcagatatcctataatttcacattgtttagtgccctcaagtatttaaacttgtcatgcaaccaactaaccgggacaattccagactaccttcgcaaaagcaatggatcaattgttttcagctacgagtctgacggagatatgtgcaaaaaaccaataacttcgtcctcaagaaacagagcagctaccttagctgtttatgtagcggctccagtgcttgtagtcgccatgcttgttgtagcatatttgatctggagagccaaaagaaagccccatttttctacagatgattctcccacggtaccagaacagataagtcctccaggacattggacaaatcattgggaccatctacaaaaacctgagaatcgtcgattcacatatgaggaactagcgaagttcactgatagcttcaaatgtttaattgggcatggaggctttggaaatgtctattacggctgtttagaagacaataccgaggttgctgttaagatgcgatctgaatcatcgtcccacgggctcgatgagttcttagctgaggttcagagcttgaccaaggtgaatcacaggaatcttgtttctttgattggttactgctgggagaaggatcatttagcacttgtctacgagtacatgtctagtggcaatcttagtgattatctgagaggtaaaactagcatgggtggaaccatgaattgggcaacacgcgtaagagttatgcttgaagctgcacaagggctagaatatctacataagggttgtaacctgccaataattcatggggatgtaaagacaaataacattctcttgggtggaaatttaaaagcaaaaatagcagattttgggctttcaaaaacctaccatagtgactcccagactcacatatcagccattgcagcgggatctatgggctacattgaccctgagtactacatcaccggtagactcactgagagcagtgacgtttacagctttggtgttgttttactagaggtaactagtggtgaacctaccataatacctggaaatggtcacattgttgaacgtgtgaagcagaagatggtcactggtaacatcagctcagttgccgatgcacgtcttggaggttcttataacgtcaactccatgtggaaggttctagatgctgccatgatgtgcacagcagatattgctgctcaaaggccaatgatgtccgccgtggtcatgcaattgaaggaaagcctggaattggaggaagctcatggggacatgggcgacatggaaaatatagcaagagataacaagttttcgatgtccatgttgggtccatcggcaagatgaagaattaaccattgcataactagctttggaacatacagttggttctctgcttcaagtctaaaataaaagaacttgtttgcatagatgatttgttatatatgtgttaagacacaatgatttatacagtttgtattcgtaacagagctgacagtaagcaattcgtgagagtaggtcagtcaaatgctgagaaggtggttgtttacaaccaaatattatgtaatagaatcctctgctattttataaaaaaaaaaaaaaaaaa

SEQ ID NO: 88126 - DNA, 220 bp, Oryza sativa
  Clone ID: PAT_MRT4530_87007C.1
cttatctttaacccgatgtggaaccagctttccgtgcgggattcatagatctattcgtgggatccaaaccccacctacatccatgagccttcatactatcaggacatgactatgtcctcacttggtccccatggggtgaagaatgcctactgcttactgtatctttgtggtcagaattacctacacaccatatattcaccaccaggtagtatttacatta

SEQ ID NO: 88127 - DNA, 225 bp, Oryza sativa
  Clone ID: PAT_MRT4530_87008C.1
atggccagattacccccgggttttgaaccacccatccgccgcgcgcacgacgggcacgacccagacacgccgctgcgcgcgtgtgcaccacgaaacaagtcgaacaagattgatccattcgctaccaagctccggctggtaaacaggacaacacagtatgaaggggcacgcagcctcggtagttacacccagcaaattggccaatttgggcgtctaggcatctaa

SEQ ID NO: 88128 - DNA, 149 bp, Oryza sativa
  Clone ID: PAT_MRT4530_87009C.1
atctataaaagccatgtctggacagaataatcagggggcatatataaatccgacgcatgaacaaactcttctaacaaagactaacaaaagcagtcagggcaggtactcaaagctttgttccaaatttacctacttcacaagccatatat

SEQ ID NO: 88129 - DNA, 898 bp, Oryza sativa
  unsure (1)..(898): unsure at all n locations
  Clone ID: PAT_MRT4530_8700C.1
cactccgttctaccgttttaaccccatcccgagcctccccggggtctctagccccatccccgccgtcgccctctctctcccacgccgccggcgacctccagccgcctgtgccgcctcgctcgtgcgccggccggccgcgccatcgcctcctccagcgtcgccgccacctcctccacgccggcctgccctccgtttcgcgaggagacccccggaactacgttcccgccgtcgccctcctctttcattcgcgccggccacctccagccgccttcctctcctcgcccgagcgccgcccggccgcgccgtcttctccctcggcctcgcagctgcctcctctttcccgacttcgcctccgtttcgcggggaaatcaccggagacgcgtcctcaccgacgactagtggtgtcgccaccactccaccatctccagccgtcccggccgcctcgcctgagcgtcggccgacgtcaccgtctcctccctcggcgtcgccgcatcgccctccaccccggctgctcctcggttttcgccggaacgccgtcgccgcgccggtctctccatcctcttcgtcgccggcgtcctttcggccggcccttcctcctccccggctcgtcggcttgctgcaccactaccacctccggcatcgcagcggcaaggcccgcctcggcatcgtttcccctccatccaaacccctccgtggtccatcatcatcgtctccgaccgttctcatcgtcgacgtcccgtcggtcgctcggctcgtcgtctcgcggcgccgccttcgtcatcgtcatcgtagcggcgtgttcctcgtcgtcctcgtccccgtgcagccgctgccggctgtcctcgtcaccttctcgccggtcccggacgtcgacgtcctcgtcctctcgtcngtcccg

SEQ ID NO: 88130 - DNA, 438 bp, Oryza sativa
  Clone ID: PAT_MRT4530_87010C.1
atgacgccggtgaggagctttgtccaagaggccaccatcccagaacggtggctcgttgagggggttaccttcccggcggtgaccgaggcagtgctactgtgggagttcatgtgcggtgcggtggtggacttcgacctcaccatggacacctttgggtacgaggagcttccgtacatcatatgggaaggggataaggatgaggaagagaagggagttccccggcttagaggaagcccggggatgtgtggcccaatggtgggtggtggtaacaagggtagaatcaatggtgagcggtggtcggcggagggctcatcggcgtctagcatcgttggaggagtcctgttgaagcagaaggtgtggatgcatggcagcggcagctggggagtagaagagaggtgggtgttagaaattggtatttgtattgaatggtttgattga

SEQ ID NO: 88131 - DNA, 810 bp, Oryza sativa
  Clone ID: PAT_MRT4530_87011C.1
ctacaagtgtctgcggctctcgtaggtcaaccttttcttattttctccaggtggcacatgccccgcgaccatgaagttgacgatggttgcataccacgggttagagtctgtcacttttaacagcatgtcatctcgcagatagtcatttatcggtagctccttagctcccactaaatacgacctgaacttatcaatgacaaacactacggctaggagctctttttcagtcgtggcataattaagctgagctccagtcaaagttttactagcatatacgatagaatggtgttttatgtccttagtttgcccaaggacagctcctgctgcaaaatcagtagcatcacacatgatttcaaacggcagcgaccaatcagggggttggatgattggtgctaagatgagtgattccttaaggattttaaaggattttgggtactcatcatcaaagtcaaacaggacatccttagctagcaaggcagttaggggtctagcgattttggagaaatcctctatgaagcgcctatagaaccccgcattaccgaagaagctacatactcccttgacattgacaggaggtgggagctgtcgaattacttccatttttggtctatccaccccaattccccttttagtgattagatgtccgaggactattccttcacaaaccatgaagtgacacttttcccaattaagtaccaagtcattttcttgacatctttgtaagatcctgtctaagttctgcagacaataattgaaagttttaccatagactgaaaaatcgtccatgaagacatccatgatatcctccat

SEQ ID NO: 88132 - DNA, 598 bp, Oryza sativa
  Clone ID: PAT_MRT4530_87012C.1
aaaaaaaaaaccagcaaagcgggcataaattaaaaaaaaacatactttggcaagatatactatcctattttttatgagggatcccatcccatgctaagttactttttttggggacggtttattttgggacggggggagtagttccttacaaaaaatgcagtacgaggacagggactgacagggtccaaaacttcacagccaaattttcttttacccatgcaaaaggggcgagaaaaaaacagggaaatgcttgcctttgggcccattatttttaaaaaacattggggatttttttacccgggaagtaaaccaaaaaaatggcaaaaccctgcagggatacaaataggggttttgccgggggggagctcaaaagccatgggatcctataagggtgcctggcacctaaacaagccaacaagctaggccccgtcttggaaaatttcaggggggggccacgttttccttggaaaggggggccagctcctcaccctcgatgccggggtgggtcccctaaacgcccaacccaaaaaaaacctcctcccacttttttgcaggccccttccaaaataggtcttgagccatgcagttctgaaccatt

SEQ ID NO: 88133 - DNA, 468 bp, Oryza sativa
  Clone ID: PAT_MRT4530_87013C.1
ttgttttttttttttttttggtttttttttttttttttttttttttttttttttttttttttttaaaaaccgaaagaaaaaggttttttgggcagggggcaaaacaaaaacaaaaaggcctggggcaaatgggaagactccagggaaacttaaatgccaaaggggggttggtgggcagcaaaagaagaaacccctgggaaaggggtactttttcactcggaatccttttcctgggaatcaacatcagccccaggtgggaaggggggggcattcaatttttcgacgggacgggccttcctttggtcggagggtagcttctgggggggggctctctgggggggggccggttcctttttgggcgattgggccatgggaggaccagcggggagggcaacatggccctttttggacagggattccatgccatcaggggcaattcccttttggggggactcactaaagggggct

SEQ ID NO: 88134 - DNA, 1242 bp, Oryza sativa
  Clone ID: PAT_MRT4530_87014C.1
atggcatttgccaggacaccgatggttcatatgattgcaaatgccatcggggttaccaaaacagtggtgatccaaaagaacaaccctgcagcccaaagcatcactcttggcatttcctttttgatcgttggtctcctattcattctaatgatgcgccaaaagagaagaatgaatgaatatttcagaaagaatggtggttcagtactacagaaagtagagaacatcaagatttttaccaaggatgagcttaagaaaataacaaagaacaattcagaagttcttggtcaaggaggctttggcaaagtctataaagggattcttgaagataacaccttggtggcagtgaaagcctcaattgaggtaaatgacgctcgaaaagaggattttaccaatgaagttatcatccaatctcaaatgattcacacaaatatcatcaagctcttagggtgttgtttggaggtggatgttccaatgttggtttatgagtttgctgcaaatggaaatctacaagacattctccatggtgacaacaaccgtcgagtcccactcccacttgacttgcgcatggacattgcagttgaagctgcagaagggctaagatatatgcactcatccgcaaaccgcaccatacgacatggtgatgttaaaccagccaacatacttctgaatgacaaattcaaacctaagatttcagacttcgggacatccaagctgcttaccgtggataaagacttcactatgtttgtagtggggagcatgggttacatagaccctgtgtttcataaaaccgggcgtttaacacaaaagagtgatgtctacagttttggagtcgttctattagagctcatcaccaggaagccaacaatatatgatgctaattgcagtctcttaattgacttccaaaaggcctatgagcaagaaaatagtgggagggcaatgttcgacaaagattttacaattgaagaagaaatattcattttggaagaaattggtcgattagcaatggagtgcctgaaagaaaaggttgaagaacggcctgatatgaaggaagttgcggaacaacttgtgattctaagaagatctaggaagagcagacaaggaaactacaacataagtccacaacaatttgaggagatgagtactgaaggaactccattgagcttggaaactgctgttagtgtaagtagctcagtcctttctgctccatccactccagccaacaatgacttctccaacgcttag

SEQ ID NO: 88135 - DNA, 216 bp, Oryza sativa
  Clone ID: PAT_MRT4530_87015C.1
atggtccggtctgaccggcatgatgccatcggtcagaccggccgtagggccgcagtcagaccggccagaggggctggtcagactggcagtctacgaagaattgatcccggcttcggatttgttaccttgggactccccggcttcatctccagaaggccattgtttggtgaagacaaacgctcatgtgctgacctcctcggtcctccccaaccttga

SEQ ID NO: 88136 - DNA, 1050 bp, Oryza sativa
  Clone ID: PAT_MRT4530_87016C.1
atggcggccctcgaccaacaaccgctgcttcacgacggcggcgaccagaagccgccgccggaaggagcggcaagaaggttccggcgatgcaggacggcgccctcctccgagcctccgcccacggacaaggacaactcctcggcggccgacgcgcctcccaagacgctcttcaccggcggcggccgccccagcttccggctcgtcggcctcctcctcgtcgcgtacctcctcctcggcaccattgccttctacctcgccatggaccacatgtccggcacccgcaccacccgcgccctcgacgccctctacttctgcgtcgtcaccatgaccaccgtcggctacggcgacctcgtccccgccagcgacgccgccaagctcctcgcctgcgccttcgtcttcgccggcgtcgccgtcgtcggcaccttcctcagcaaggccgccgactacctcgtcgagaagcaggaggcgctcctcttccgcgcgctgcactcgcacacgatggtgcgcgccatggagatgaacaaggtgaggtacaagctctacacggcggggctgctgctggtggcggcggtggcgtcagggacggtggtgctgtggaaggtggaggggatgcgggcggtggacgcgttctactgcgtgtgcgcgacggtgacgacgctggggtacggcgaccggagcttctcgtcggagggggggcgcgcgttcgcggtggcgtggatcacggtgagcacggtggtggtggcgctcttcttcctgtacgcggcggagctgtacacggagcggcggcagagggagctggcgaggtgggtgctgcggcgccggaccaccaacatggacctggaggcggcggacctcgacggcgaccaccgcgtcggggccgccgacttcgtgctgtacaagctcaaggagctcggcaagatcagccaggaggacatatcggagttcctcgacgagttcgacaacctcgacgccgatcactccggcaccctctcccccgccgacctcgccgccgcccagcctactccggacccgccgccttccctgcgttag

SEQ ID NO: 88137 - DNA, 305 bp, Oryza sativa
  unsure (1)..(305): unsure at all n locations
  Clone ID: PAT_MRT4530_87017C.1
ggccggaannccggncgacccacgcgaccgacgcgccgggacgcgngggcggacgcgcggcgcggcggcgccgcacaagcgcgggcggacgcgagggcacgcgcaggcgccggaggaccccanccncggggggacgggcgcgnacaacaaggancccagccccgngaagggcaaacncggcgncggcgcccaccggaccgaggaagggaagccccnggggccgaagggggncaggcgcgcngagcagangctgancaacaacccgncacgngnnaaggagnatnngccgancactggacnggccg

SEQ ID NO: 88138 - DNA, 651 bp, Oryza sativa
  unsure (1)..(651): unsure at all n locations
  Clone ID: PAT_MRT4530_87018C.1
ttttcccngngggccccccgnnaagcctttccccggccccctttaaannnaaagccctcccggnaaaccgngggccgggggcggggggccaaaaccaaanaaggggggggctttgggggggggggggggaaattgggaaaaaagnaaattaattcccccggnttgggnaaaaagnaaacaacttcccaanaaaggggggggaatttccccaaccccttttccccaaaagnaaattccggaaagggggttgggggaaacttnccccgnccgnccaaangnaaaaaagngggtttgggccttggnaattggttttgaaaaaaaaaagggggaattaaaattcccgaaaagaacttaacctccaaaagggggaacaangccaaccattttttaccccccangcctttggaaagccaaaccaaganatngcctcccatttccatccnagggggggaaaangggttgcctccaaacgggaatnnacaccccaccatttggggnattgaaaaaacaaaaattccttggaaaaaacagcttccctttgtttattaatgcctaanaacnggtttaagggcccctccaatttcacctncctgcctacatcttaaggcncccccaattcaggccccccctactncaacaattccntcnact

SEQ ID NO: 88139 - DNA, 231 bp, Oryza sativa
  Clone ID: PAT_MRT4530_87019C.1
atggctaccggcgccggtgagcggtgcggcgtcggcgcgtcgctacggcggttgttggctcaacagaaccttggcatgtcatcaaccgaggtcaagagcacttgccccaacttggatgaggcaaagacaactgaggtggcgcgcacagccctatatatggccatatggcccgaggctcgatggcccgctcaaggcccgataaatttggcccagggcccgtccaaggcctag

SEQ ID NO: 88140 - DNA, 411 bp, Oryza sativa
  Clone ID: PAT_MRT4530_8701C.1
acaccagtgtgtggctggcgctgtgcgtactttccgatcccaaggctgcaaaagctgctaacgcccccaacgcttatgtgttggcgccctgaacacttgcgcctgtccccaatagatgcgcggtatatgctgcaccccaaggctgcaccacaccactgtctgcccccctggtgaccactgtctctaccctgtccgcgtgggtatttctgggtgtgatttggaatgtgtgtagccacgtaatgaggtgaggtgacacacgggagagacatacatattgataaatgtccactgcatgtcattgccgtggtggtggaccacagttggaaaacacatgccggggtgagatgaccacaatgtctggaataaaaatgtgtcatcccaatttaaccataaaaaaaaaaaaaaaaaaaa

SEQ ID NO: 88141 - DNA, 366 bp, Oryza sativa
  Clone ID: PAT_MRT4530_87020C.1
atggctaccggcgccggtgagcggtgcggcgtcggcgcgtcgctacggcggttgttggctcaacagaaccttggcatgtcatcaaccgaggtcaagagcacttgccccaacttggatgaggcaaagacaactgaggtggcgcggtctcgatccaacgatagtcaaagtgaagtgtttttggctgtacagcacagccctatatatggccatatggcccgaggctcgatggcccgctcaaggcccgataaatttggcccagggcccgtccaaggcctagtaattttggcccggccaggcccgtgctggcccggcccaacagccgtgacgtgcctgagcttctacctcgacacgctaggctggcactag

SEQ ID NO: 88142 - DNA, 783 bp, Oryza sativa
  Clone ID: PAT_MRT4530_87021C.1
atgtcgtcgcggcagccgataggatccggaggcggcggcgcgcccccggattggcacgacgtcgagccgcagtggcagccggtggacgacgtggtcaccgtggccgccgccgcagcctacctcgccgcgccggccggggcgacgctgtcgtcggaatcagctgaccggcggtggcggccggtggggccttcagccgccgccgccgccgctgccctgcaggccgtggaggcgcaaggtgcggcggcggcggagcggcactaccgtggcgtgcggcggcggccgtggggcaagtgggcggcggagatccgggaccccaacaaggcggcgcgcgtctggctgggcaccttcgacaccgccgaggccgccgccgccgcctacgacgacgccgcgctccgcttcaagggcgccaaggccaagctcaacttccccgagcgcgtccgcggccgcaccggccagggcggcttcctcgtctcccccgctgtgccccgcccgccgccgcatggtgttcccgctcccgcgcccgccgtggcgccggcgccgttccccgacctgatccagtacgcgcggctgctgcggagcggggaggacgccgccgccgccgccgccgtggccggcattgcggccaccgcggcgccggcggcgcagatcctggacttcgcggcgcagcggctcgtcggggtctctccggcgatggcgccgcgcccgccgtcgacgctgccgacgacgacgaccgcggcgtcgtcgccgagcgcgtggcctcacggcggcggccacgggagctag

SEQ ID NO: 88143 - DNA, 271 bp, Oryza sativa
  unsure (1)..(271): unsure at all n locations
  Clone ID: PAT_MRT4530_87022C.1
cccacgcgtaagatttatattgataaaaganttaacaaaatatagttgangaacctttatttganacattgtgtgattttgttaattggaatatagagaatgattagttgatatgaatggatttaacattaataaagtagtttatatagatataaatggctagaggagatgctgtgattttttataaacaatacatgcgtgtggatagaatataacaagatccatgtatggctcgatatggatctattgaagaaattctttggtaatgatg

SEQ ID NO: 88144 - DNA, 444 bp, Oryza sativa
  Clone ID: PAT_MRT4530_87023C.1
atggcgattggctccgagctccctgctcctcttgcctccaagctccttaagtttgacggggctcgacagctaccatcgtctctccccactacaagaaatatgaccttctgtgacgaattcctcgtgacatcggagctattcgtcactagcacattccattttatgacgattagtatgagatggggtggcttagtgacgaaaaaaagtgccctctgtcacactgcgctcgggtgggccagagaaggaatgagtaagatggaggaaagagagatcaagggggagagaggaaggaggagagaaaggatgatatatgggaccaacgttgtgactgacacgtggactccactgttagcaacctcttcttctcaactcaataatctcaggagcaaccaaatccagtacaatctcaggaaaataccaaagggattggatgagaaggagtaa

SEQ ID NO: 88145 - DNA, 852 bp, Oryza sativa
  Clone ID: PAT_MRT4530_87024C.1
atgaagcagagtggatcgctgctgcattccagcctaacgcctctggagtgtccgatgttgaccgtttgctggaaatggaacgctcctgctgccgccttatcgtcttgtcccgaggcagagccacgactgttcccgctcctcaacaagctcttcgctaggccggctgtccctgccagtctcctcctcccagcagacattgttcatgatgaagatgccccaaacaccacctctaaccaatcctttgtgtcagcaatacagtggcttgacaagcagccaaatggatctgtcatctatgttgcactcgggagcgaggcacctatcacaacaaaccatgtacgcgagctcgcacttggactagagctctctggtgtacgcttcctctgggcactccgtcctccgagtggcatcaacagccaaactggaacattcctcccaagcgggttcgagtcacgtgttgccacacgtggcatagtgtgcacagagtgggtgccacaagtgcgtgtgcttgcacatggtgcaataggcgcattcctaacacactgtggttggggctccaccgtggaaagcttttgctttggtcaccctctagtgatgctaccttttgtcgccgatcagggcctgatcgctcaggcaatggctgcaagggggataggagtggaggtggcgaggaactatgacgatggttcgttctatagggatgatgttgcagcagcggttaggcgggtgatggtggaggaggaggggaaggtattggcaagaaaggctaaggaggtgcatagcatcctcggagatagggcacgggaggaacaatatcttgatgagtttgttggctacttgcagcgctacaaatga

SEQ ID NO: 88146 - DNA, 327 bp, Oryza sativa
  Clone ID: PAT_MRT4530_87025C.1
atggcgatgctcaccggcgcaagagggacggcggattcggccgacggaggggtggacgaggtggtgctcgaggcggtgaatgcaacggcgtcgacggcgcggctcggcgcgacggctagcggcttgggagaaaaacttcagggtgtgacatcccacccctattcagagttccgaatcgatctccccaccatcgcgaacttccctctatcgtcgtcgtcgccgactagtgaagtgagaagggatatgaaagatttagataaatcttatgaggatatagaggatcaattttggataaattattgtggattctctaaggaaccagcttga

SEQ ID NO: 88147 - DNA, 3147 bp, Oryza sativa
  Clone ID: PAT_MRT4530_87026C.1
atggcggacctggcgttgagcaccgtgcacgcgctgctgggcgtcatccgcaaggaggcggagctcctgggcggcgtccgcggcgacgtgcagttcatcagggacgagatggagagcatcaacggcctcctccgccacctcgccggcaccaaggagcgtgccagcgaccaccaggtccgagcctggatcaagcaggtcatggagcttgcctacgactccaacaactgcgtcgagaggtacgcgcggacgcgctccggccgccgccgccgcaggggattcctcggcagcctccgccgcgccgcccgcctgccgtgggcgatgtgggttcgccgccgtgtcgccacccggatccggcagctcaaggtccgtgcgcgcgaggtcggcgagcggcagcagcggtacggcgtcgccgtcccggccaagaaggacggcgcagcagcagcagaggacgacggtgacaacaagcggccgctggagtactcgagcatgccccgcaaggtggccggaggcggcgatgcttcccggcgacgagccgcggcgatcgtctccgagtgcgggaccgatcacatgctgaaggagtgcaccgacgagctgatcaactgggtcgacatgggagtggcaccggacggccgctccggcgtggagctgaagcggccgaagctcagcgtcgcggtcatcgtcgcgcctgacgcggcggacggagcaattgtcgtggacaaggtgtacaggcattacaagccgatgctgcagccaccttcctccggctccggcacgccggtgacggcggcggcgacgtcgccgttcaagtgcaggctcagcgtcaccctccggcggccgacgaatctgatggaggttctgatggacatgctccggcagctccaatccgaaggctgcgtcgagtccatgggcgatgacgtgcaaacatgggatctagacacgctcaaggagaagatcaagaattcactgagggggaaaaggttgctgctcttcctcaccaatgcggactacctcgacatatggttcccgatcgaagaggtgctcgcctccactgactgcgaccatggaagcgccgtggtgttgtcctccaaggacagggaggtggccaacaaattgatgccccctctgatgaacactagtaccatctctgacaacatgaacaacggaagtgcgagcgcggcagcggcggcggcggtggaggtggaggtggaggaggacaaagatttggaaagcaacaattccaagtccaagtccaagtcgaagctccctctgatgaaaactgtgtcctactcccatgtcgatttccactacaagaaagctaaccaactgatgctgcagctaactagcagctacaacaccagcgatgccgtgaaacaagtactcaccaggtgcgacacggatgacttctgcgccaaggtcttcctccatgccctgcacaacaacccaaaccggacggcggatgagctcaagatcttgacggaaaacctcgcaccggaccgatgctccaacgaccccttggagaaaagggtccggttggctgccttctgctactatggcctgcctgaccgctataagaattgcttgtggtacgcggctgccttcattcgagggagctacgacatacgtagggcaagcttgacaaggcgatggatcgccgagggcttgatcatcagatcaggccagccgaccgagcaagaggaggctgagcgctgtgtcgacactctcctatctctgaatctcctcatccctaaggagcgtgagcgcggcgtaattgaaggcaaggtcaagacctgctccgtcaacactccggtcatcgacatagtcaatgggagccgaagcatcagcgcaagcaccgtcgacgacttcctggatactaaccagctaccgcttgacctagatctccacttctctatccgcaatgggatcaggatccgtcagctagacgccatggatggctccactatggagccacggccgcccgcacccaaaaagcaactagagagcgttatggagtttctacggaagctgccatcctcgtcaaggctgcgcctccttcgagtcttggatctcgagggttgtggtgtcatcatcaccaaccgccacctcaacaacatctgtcagatccgcaagctcaagtaccttagcctgcgtggtaccaatattgtatggcttccaaagaagctccaccagctagagctgcttgagactctcgacatccgacagaccagggtatgcgtgttcgagtcgacgctgccaaagagcctgaagcatctcctcgccggccgcgtggactgcctcggtgatgatgccgtcacggtcaagtcgaaggaatcattctccacagtgcgtatgcctagcggcatccctgccggtgacatgagcaagctagagatactatcccatgtttgggtctctgacagcgccaaggagctagacaaccttggcgagaagctaaagcagctaagaaagctaggcgtagtattgtgtggcggcagcaaagccaacttgaaggatctcttcgctcagatcaacaagctgcacacaacactccgatcactgtccatccgaatgaagccggtcagcagttggggctccacggaggcagtcctaatgacacctccattgctgctcgagagcttgcgcatctgtggcgtcagagactggctgccccgccggatgaaagagctcaacaacctctccaagctaaccctccgagacactctcctaaacgaggacaacctcgctgtcctcggtgcgctcaagggcctgcgttgtctcaggctccgctaccactccttcgactctggcggtctcaccttcagtagtgacaccttccccaacctcgtaggtttggtcatcgaggacgacatgctagtgaccatcacctttgctcctggaacagcacccaaacttgccaagatcatctggtcattccaacggatggagtccctaacaggaattaagaaccttcagagcttgagacgcatcgagctcaacctgctggcaggaaatggtgccacggatgattatcctcagttgaagcaagagatcaaggagcatcccggtaagcctgtacttgtttgccaactcattgatccaaagaaagggggtcaagtagctaatcgtgccattggtgttgctactacctag

SEQ ID NO: 88148 - DNA, 379 bp, Oryza sativa
  Clone ID: PAT_MRT4530_87027C.1
gtcgccgttgtctgcagcttctggaaagaaatcaagatcttggattattgccttaagcgaggaaaagggaaaagtatacaggtctgatctttgttgatcttgcacttaccttggtggttacatgcattttggggtgtgcctttggcgattttgaacaggcctagatatattgctttgctatgttgacgtttattagagtagataattgtatttctcgtaatgtggaaatggcaaagattatgtattgctacaaaattgtatagttgctcttcccaattccatgtacaaggcatttctcattgaatggcaagatcatgtattgctggaacgtgatcaaggaaactattgatcactgtgtgatagcatattgaattaatag

SEQ ID NO: 88149 - DNA, 2226 bp, Oryza sativa
  Clone ID: PAT_MRT4530_87028C.1
ccggccgggatcgtctccatctcctgcttgctcttggtagctagctagtggagatcgccggagaggagagagacgacgagagagagagagagggggcaagatggcgggagggttctctgtgtcggggtccggggtggagttcgaggcgaagatcacgccgatcgtcatcatctcctgcatcatggcggccaccggcggcctcatgttcggctacgacgtcggtatctcaggcggagtgacatcgatggatgacttcctgcgcgagttcttcccgacggtgctgaagaagaagcacgaggacaaggagagcaactactgcaagtatgacaaccagggcctgcagctgttcacctcgtcgctgtacctcgccggcctcacggccaccttcttcgcctcctacaccactcgccggctcggccgccgcctcaccatgctcatcgccggcgtcttcttcatcgtcggcgtcatcttcaacggcgccgcccagaacctcgccatgctcatagtcggcaggatcctgctcggctgtggcgtcggctttgccaaccaggcaagcaactttccaataatcttatcgttacaggcttacagcattatatcatttcatataataagctatggagttaaacaaaaaatacgcacggggaatttattggcagagttggtgcctttaggtgaatacgtgcaggccgttccattgttcctgtcggagatcgcgccgacgaggatccgcggcgggctcaacatcctcttccagctcaacgtcaccatcggcatcctcttcgccaacctcgtcaactacggcaccgccaagatccacccgtggggatggcggctgtcgctgtcgctggccggcatcccggcggcgctgctgacgctgggcgcgctgttcgtggtggacacgcccaacagcctgatcgagcgcgggaggctggaggaagggaaggcggtgctgaggaagatccgggggacggacaacgtggagccggagttcaacgagatcgtggaggcgagccgcgtggcgcaggaggtgaagcacccgttccgcaacctgctccagcgccggaaccggccgcagctggtgatcgccgtgctgctgcagatattccagcagttcacgggcatcaacgccatcatgttctacgcgcccgtgctgttcaacacgctcgggttcaagaccgacgcgtcgctctactccgcggtgatcacgggggccgtgaacgtgctgtccacgctggtgtccgtctactcggtggacagggtggggaggcggatgctgctgctggaggccggcgtgcagatgttcctgtcgcaggtggccatcgccgtcgtgctggggatcaaggtgacggaccggtcggacaacctcggccacgggtgggcgatcatggtggtggtgatggtgtgcacgttcgtgtcctccttcgcgtggtcgtggggcccgctcgggtggctcatccccagcgagacgttcccgctggagacgcggtcggcggggcagagcgtcaccgtgtgcgtcaacctgctcttcaccttcgtcatcgcgcaggcgttcctctccatgctctgccacctcaagtacgccatcttcgccttcttctccgcgtgggtcgtcgtcatgtcgctcttcgtgctcttcttcctgcccgagaccaagaacatccccatcgaggagatgaccgagagggtgtggaagcagcactggttctggaagcgcttcatggacgacgccgacaaacaccacgtcgtccccaatggcgggaagagcaacggcgccaccgtttaatttagtcgctgaactgttctatatatatgtcactgtctcactgatcaaatcacggttgagaaactacaccgatgctatgtatcagctcatgcgtggccatgtgagattgatcgataagcagctagcgacggcatgcaaacttaagggtagtgtagcaatttcggctctgtacgtactgcaagcaatggcgagtatttcaattcggagtgcttcttgagtttgtagtttgttgtatgagttgtatccttttatgtttctccgagcaagcctgacacgagttggcgcctcagtgtaacttgcagaacagaatgccatatatctgcacctttttttgccaattttaattctggagctctgaaattcgacgttttatgcatatagtcggtgaccggtgagggtacgttcatactgtatgaaaaaaataaaaaaaaaaaaaaaaa

SEQ ID NO: 88150 - DNA, 436 bp, Oryza sativa
  Clone ID: PAT_MRT4530_87029C.1
atgcagcccaactcgaaagcaaaaactcgtcgaaacaatgaaagtagaaaaaatggtggtgatgcgccgaagtgtattaaactgtcgtcccttgattacatggggatgggtcatatttatacccggactatgaatggcttcaactaaccggacgacggtcatagggccaactttcccgatactggttgcatcggtttggcttcatcggatccggtgcttagccgatatgtcgcagtcgataccattgtagccgattcgcgtggcagctgatgctgtttgtaaccgatgtgtactctgctttctcgaacgtactttttcaaatcggctttgttcccaatttcgaatccaatccatggtattaccaaatttggtcgaaaccatcacctctcttttattttcaaattaaaacttattttgaacccattcctttttcctc

SEQ ID NO: 88151 - DNA, 645 bp, Oryza sativa
  Clone ID: PAT_MRT4530_8702C.1
atggccaaccaacatgcccgttctaatggagagaagcatcaaggcaacacaaatcctcgccaagattacagtttcagcctaactccagtgccaggacagaggaatcaaaatgagaaaagaaaatgccgagtccggaaagatatctgttgcttcagttgtcaagaaatgggtcatttcgctgacaagtgcccaaaaccgagaaacatggctgccagcacgtcagtccacgcaactccccgcaatcagaagcttgctcctcagcgaattgtcatccatgcatcccgaagcagtcctatagcacgcgttgcaacagctccaactccaacgagtgcactaccacaaggtgtcaatgcaccatttcagtcccatccacctgctgacgagacagaggccagtatctgcgttgtacctttggatgttccaatacagcagctgataaatcaagtacaagatgaagaacccgagtgtaagaaagttattgtttgttacaactgtagtgaagaagggcattactcgagggactgtcctcaaccaaggcaaaatcggcccccacattttcgccaatttacaggaagcaaacatgccaatcgccaagtggtcactggagcaaatgcagtacctgttaagcctagtgctagtcaatag

SEQ ID NO: 88152 - DNA, 345 bp, Oryza sativa
  Clone ID: PAT_MRT4530_87030C.1
gaggagcgtctgggcgtggccgcaggggcgcccgcctcctcctcctcgccgtcgtcgccgcggtgttcctcctctcccccgctacacattacctctaattcttccttcgtatgctacctgtactgcaatcactactatgcactacttcctaccttcttttatcattgccaccactgctctcaatcttcacatcgtgatccccacattgtgcattcatcatatcacgaccttgtacatatatctgacatagactctatctcttgatatcatcctgcatgaacctatgaacactagagcctaagtgctgcttttccacatgataccactcacctaccagaatgctac

SEQ ID NO: 88153 - DNA, 4263 bp, Oryza sativa
  Clone ID: PAT_MRT4530_87031C.1
atggaagaagatgaagtggaagacgacaatattccggactttgctcagtacgctggatttgaaggaaatcaaacgggcgaggaggaaagggatgctgatggtaacaacgttgcggatgatcttggtcagatgttgcaggacgccaaggaggattgcgaaagtgaaaagggggcccataaattggacaagatgttagaggaccacagaacgtcgttgtacccaggttgcgagcaggggcacaaaaagttggataccactctggagttcttacaatggaaggcaaaaaatggtaacattcttccggagggaaacaaattgcccgagacaacgtacgaggctaagaagatagtctgccctctaggactggaagttcagaagattcacgcatgtccgaatgattgtatcctatatcgcggtgaggagtacgagaacctagaagcatgctctgtttgcaaagcactacgatacaagattagacgagatgatccaggagaagttgacgggcagctaacgaagaagagaattcctgctaaggtgatgtggtatttccctataatatcacggctaaggcgtttatttaggaacaaggtgaatgctagaatgatgcgatggcacgctgaagagcgtcaacaggacgggatgctgagacaccccgccgatggttcgcagtggcgaaacatcgacagaaaatttaaagactttggaaaggacgcacgaaacattcggtttggtttaagccccaagcaacctggtaacgacatcgatgtgtacctaagaccactggtcgaagatcttaaactgttgtggaagaaggaaggtgtccccgtgtgggatgaggacaaacaggaggagtttaacctacgagcgctgctgttcgtaaccatcaacgattggcctgcacttagcaacctatccgggcagtccaacaaggggtacaacgcttgcactcactgtatggatgaatcagaaagtacgtatcttaagcactgtaggaaggttgtgtacatgggtcatcgtcgattccttgcagcaaaccacccggtacggaagaaaggcaagcactttgaacataaggcggaccaccgtacgaagcctaaacatcgcagcgggaaaacagtgtttgctatggttaaagatcttaaagtagtgtttggaaaggggcctggcagccagcctatagagagcgaagatggtcacgcggtgatgtggaaaaagaactctatattttgggagttaccctattgggaattcttggacgttcgccacgcaatcgacgtgatgcacctcactaagaatctttgcgtgaaccttcttggcttcctaggtgtatatggaaagttgaaagatacactggaagcacgtaatgatctgaagcatatggaacaacgcggtgaccttcacccggaaccaaaggagaaaggaagccattacttgagtccagccagctacactattagcaaggcagagaaggatatcctcccagacaatgtccgggcaacaataacaaagctacgtgctttcatgaacgcaatttcgcagaaggtcatcgatcctgatagattagaagccctgcagaatgatgtggtgcaatgtcttgtcagctttgagttgatatttccaccttcatttttcaatataatgacgcatctgctttgtcaccttgtcaaagagatcggtattctctgtcctatgtacctacacaacatgtttcctttcgagaggtacatgggcgttctgaagaagtatgtttgtaaccgtgctcgtccagaggcaagcatcgccaaggggtatggaaaagaggagatggctgattgcgatgaggaacagatactatacgatacaatcatagagggaagcagccagtactggaacgaagaagaggggaacgacgatctaaaccagtatttgaacgaggaggggaacgtagagagggatgcggaggggaacgaggaggggaacgatgaggaggaggctagtggaagtcatccctccgctggacagaagagggcacgcggacaacgaggtgccgcgaagaagatagagggtcggcacatcataactgaggtggacgaagacggccgacctagtgccccggcagaagcagccaagaattttgtacgccacaacggttgggttgtgagggacaacgtgcctgtcagcacggtgtactggcgcagaacatgggcacgcggggataatgatagctttgtcccagactcagagaaagagatgctgtggaccacaatgctcgagatgttcacgctacccgcgggtacggagaacatagtgaaacactggactctgaagaaaatggcagaacagttccagagcttcaagggagatctctacaagaaatacatcctgaagggactaacaccgaacttcgacgtattcccaaagctaagggatcattgggacgagttcgttgcttacaagacagggcaacaatggcaagcgatgatggctagaaacaaagacaatgccgccaagaagaagtaccatcaccacttggggtcaggcggatatagcgtcgcaatgccgaagtgggaggagatggaggcaagtttgattgagaggggtatcgaaccggccaccgctaaatggccggatcgatcgaagttttggtactatgctcacggtggaacgcttaacccagttgatggctcccttgtctttagcgatcagatacgcgaggctgccagtcgactaacggacgcagtggtagcctcttctcagggcacattccgacccgacagagagaaggatgagctgtcactcgccctacagactcccgagcatccaggacgaacacgagggaaaggcatgattccctggaagattggatttaaggaggacatccacacgtacaggagtcggatgaggagcaagagagataccgatgcgaagattgcagatcttgagtacagggtatcaagctacgagctcagcatgcaagaggaggtggcaaggaaggtggatgaacgtatggccgcacatcagtcccaggatccccatccgtacattcatcctgcaatggtcagcccatcaggcaatcatagcagctgcgcctcaacggggcaggtcggatcacagagcatggacgccatgcaaacccaggacgaaaccacctgccccgttgatgagatcacgcaacggacaccatgtgagctgcatattcccttcaagaacttatcaatcaaggtggcgtcgggaatggtcatcccaacagacccttccaggacttaccactgcaagccgattccagcaggatactcgagggtcgtagttgagttggtggaagccgcgtacgaggacctcgagttggactacccaggaggagacggagaggtgaagaggcaactcaagccttggagtcctgaaaagaagatacctattaacccgagcgtgaagaacttcttcaagggaatgtccacaacaaacaaggaagcgttacagatatcggactatgatcgaacacttcagagagcctatcacaagaagtccaaaccagtccctcagcttggagaacaaccaaaccaagaggttgagccgttggtgaccagcgaagattttggcataacggaattcatttcagacaccggtctaactgtggatcagttggttggaggcgcaccaatcccgaaggcggaagtggcatacaagtttgaactcggtaaaccgcttatcaaacctgaacagctgcagtccctatcgacacagatgtacaaattccatgaacggtacatggaaatgagcgccaagggtagagagatgttcggagcgaggatcagaaaccccgacttcttgcaaggagaagatgttctctggatccatttcaaggatctcttcgatctgtaccagttggacaccctcgacgtctctcttctgagcgcatggattttaatggagattcaatgggcccgacggcggagggtctacgatactgggttcatcgaccctcggaaaatcaacaccgaaatgatcgacaagtacgagaaagacacagaggacaatctcgtccatctcctaacgcagcagcatttcaagacgtacatactactgccgtacaacacagaagtcactgtatacgactcaatgaataaagaggagaagatttttgacaaggtcttcaaactgatagacagcttgcaactgcatatgtggggcttgggatcggttccgtcaattggtccgtgggacttggaaagaaaaacttggatggaggtttcattttccatgtgcaaagcaggaccagggaactaa

SEQ ID NO: 88154 - DNA, 732 bp, Oryza sativa
  Clone ID: PAT_MRT4530_87032C.1
atggagaagacgtgccaagcgtatttggaacaaactctgtgttggaccagctctcttctgattgacttcttccaattactcactcctgcacgtcgggaggccggcgtcgagtacgaggtcgtcccgttgagcttgaccaacggcgaccaccgccggccggagcacctcgcccggaacccattcggtcagattccagtgctggaggacggtgacctgacactctaccaatcacacgcgatcgctaggtacgttctcggcaagcacaagccggagctcctggggctcggcgaaggcggcagcgtggaggagtcggcaatggtggacatgtggctggaggtggagacccaccagtacgaggccgccgtgaagcccatcgtgtggcactgcctcgtccaccagcacgtcggcctggtgcgcgaccagggcgtcgtggacgagagcgtggagaagctgagggcggtgctggaggtgtacgaggcgaggctgtcgtcgtcgtcggccggcaggtacagctacctcgccggcggcggcagcggcgaccgcgtcagcctcgccgacctcagccacgtcccgctgatgcactacttcacagcgacggagtacggcggcgtgctgggcgagtacccgcgcgtgaaggcgtggtgggaggcgctgctggcgcggccgtcggtgaagaaggtgatcgccggcatgcccaccgatttcgggttcggaagtgggaacttgccatag

SEQ ID NO: 88155 - DNA, 338 bp, Oryza sativa
  Clone ID: PAT_MRT4530_87033C.1
acaacgacctcggcttgatgaagagaaagaatcacggccagtcttgatgacggcgtacgggcccctagcaatggcactctggcgttctcctcgagtggcttcatgatgagcgtgaggaaggtggtagcaccgtcgaagatgattgagtagacgttgatggtgaccgaagaaaccgcgacgagcgtgaaggcgtcgcctgagtcctttgacagggtggcactcggcggacagtgtcaccagcagcttgacggggatggcgagcgtctgtgcgttgccaataaggtggacgagatggcctcccgctgctctatcaggacggcgtgggcggccaccggcgt

SEQ ID NO: 88156 - DNA, 4164 bp, Oryza sativa
  Clone ID: PAT_MRT4530_87034C.1
atggaagaagatgaagtggaagacgacaatattccggactttgctcagtacgctggatttgaaggaaatcaaacgggcgaggaggaaagggatgctgatggtaacaacgttgcggatgatcttggtcagatgttgcaggacgccaaggaggattgcgaaagtgaaaagggggcccataaattggacaagatgttagaggaccacagaacgtcgttgtacccaggttgcgagcaggggcacaaaaagttggataccactctggagttcttacaatggaaggcaaaaaatggtaacattcttccggagggaaacaaattgcccgagacaacgtacgaggctaagaagatagtctgccctctaggactggaagttcagaagattcacgcatgtccgaatgattgtatcctatatcgcggtgaggagtacgagaacctagaagcatgctctgtttgcaaagcactacgatacaagattagacgagatgatccaggagaagttgacgggcagctaacgaagaagagaattcctgctaaggtgatgtggtatttccctataatatcacggctaaggcgtttatttaggaacaaggtgaatgctagaatgatgcgatggcacgctgaagagcgtcaacaggacgggatgctgagacaccccgccgatggttcgcagtggcgaaacatcgacagaaaatttaaagactttggaaaggacgcacgaaacattcggtttggtttaagccccaagcaacctggtaacgacatcgatgtgtacctaagaccactggtcgaagatcttaaactgttgtggaagaaggaaggtgtccccgtgtgggatgaggacaaacaggaggagtttaacctacgagcgctgctgttcgtaaccatcaacgattggcctgcacttagcaacctatccgggcagtccaacaaggggtacaacgcttgcactcactgtatggatgaatcagaaagtacgtatcttaagcactgtaggaaggttgtgtacatgggtcatcgtcgattccttgcagcaaaccacccggtacggaagaaaggcaagcactttgaacataaggcggaccaccgtacgaagcctaaacatcgcagcgggaaaacagtgtttgctatggttaaagatcttaaagtagtgtttggaaaggggcctggcagccagcctatagagagcgaagatggtcacgcggtgatgtggaaaaagaactctatattttgggagttaccctattgggaattcttggacgttcgccacgcaatcgacgtgatgcacctcactaagaatctttgcgtgaaccttcttggcttcctaggtgtatatggaaagttgaaagatacactggaagcacttgtaataagggatatcctcccagacaatgtccgggcaacaataacaaagctacgtgctttcatgaacgcaatttcgcagaaggtcatcgatcctgatagattagaagccctgcagaatgatgtggtgcaatgtcttgtcagctttgagttgatatttccaccttcatttttcaatataatgacgcatctgctttgtcaccttgtcaaagagatcggtattctctgtcctatgtacctacacaacatgtttcctttcgagaggtacatgggcgttctgaagaagtatgtttgtaaccgtgctcgtccagaggcaagcatcgccaaggggtatggaaaagaggagatggctgattgcgatgaggaacagatactatacgatacaatcatagagggaagcagccagtactggaacgaagaagaggggaacgacgatctaaaccagtatttgaacgaggaggggaacgtagagagggatgcggaggggaacgaggaggggaacgatgaggaggaggctagtggaagtcatccctccgctggacagaagagggcacgcggacaacgaggtgccgcgaagaagatagagggtcggcacatcataactgaggtggacgaagacggccgacctagtgccccggcagaagcagccaagaattttgtacgccacaacggttgggttgtgagggacaacgtgcctgtcagcacggtgtactggcgcagaacatgggcacgcggggataatgatagctttgtcccagactcagagaaagagatgctgtggaccacaatgctcgagatgttcacgctacccgcgggtacggagaacatagtgaaacactggactctgaagaaaatggcagaacagttccagagcttcaagggagatctctacaagaaatacatcctgaagggactaacaccgaacttcgacgtattcccaaagctaagggatcattgggacgagttcgttgcttacaagacagggcaacaatggcaagcgatgatggctagaaacaaagacaatgccgccaagaagaagtaccatcaccacttggggtcaggcggatatagcgtcgcaatgccgaagtgggaggagatggaggcaagtttgattgagaggggtatcgaaccggccaccgctaaatggccggatcgatcgaagttttggtactatgctcacggtggaacgcttaacccagttgatggctcccttgtctttagcgatcagatacgcgaggctgccagtcgactaacggacgcagtggtagcctcttctcagggcacattccgacccgacagagagaaggatgagctgtcactcgccctacagactcccgagcatccaggacgaacacgagggaaaggcatgattccctggaagattggatttaaggaggacatccacacgtacaggagtcggatgaggagcaagagagataccgatgcgaagattgcagatcttgagtacagggtatcaagctacgagctcagcatgcaagaggaggtggcaaggaaggtggatgaacgtatggccgcacatcagtcccaggatccccatccgtacattcatcctgcaatggtcagcccatcaggcaatcatagcagctgcgcctcaacggggcaggtcggatcacagagcatggacgccatgcaaacccaggacgaaaccacctgccccgttgatgagatcacgcaacggacaccatgtgagctgcatattcccttcaagaacttatcaatcaaggtggcgtcgggaatggtcatcccaacagacccttccaggacttaccactgcaagccgattccagcaggatactcgagggtcgtagttgagttggtggaagccgcgtacgaggacctcgagttggactacccaggaggagacggagaggtgaagaggcaactcaagccttggagtcctgaaaagaagatacctattaacccgagcgtgaagaacttcttcaagggaatgtccacaacaaacaaggaagcgttacagatatcggactatgatcgaacacttcagagagcctatcacaagaagtccaaaccagtccctcagcttggagaacaaccaaaccaagaggttgagccgttggtgaccagcgaagattttggcataacggaattcatttcagacaccggtctaactgtggatcagttggttggaggcgcaccaatcccgaaggcggaagtggcatacaagtttgaactcggtaaaccgcttatcaaacctgaacagctgcagtccctatcgacacagatgtacaaattccatgaacggtacatggaaatgagcgccaagggtagagagatgttcggagcgaggatcagaaaccccgacttcttgcaaggagaagatgttctctggatccatttcaaggatctcttcgatctgtaccagttggacaccctcgacgtctctcttctgagcgcatggattttaatggagattcaatgggcccgacggcggagggtctacgatactgggttcatcgaccctcggaaaatcaacaccgaaatgatcgacaagtacgagaaagacacagaggacaatctcgtccatctcctaacgcagcagcatttcaagacgtacatactactgccgtacaacacagaagtcactgtatacgactcaatgaataaagaggagaagatttttgacaaggtcttcaaactgatagacagcttgcaactgcatatgtggggcttgggatcggttccgtcaattggtccgtgggacttggaaagaaaaacttggatggaggtttcattttccatgtgcaaagcaggaccagggaactaa

SEQ ID NO: 88157 - DNA, 1075 bp, Oryza sativa
  unsure (1)..(1075): unsure at all n locations
  Clone ID: PAT_MRT4530_87035C.1
tgccgattcgccatcgtgcatnccacagcatatatcaaatagcagagaagcctccagcggcgcggcgggcgtgcacagcctcaccggcgctcggcccggcagggaggccgaggccaaaggaggagaaagccatctacgtcgtatgacgcgctccggcggatgcgcacacgtgggagatgagcctgtacgcgacgccgccggggttatcgtggctgccatgactatttctgaaccatctccgctgccatcgagactcatccgcccgccgtcatccacattcatcaacatctccatctcatctcagatggactcatccattcatctacaaatcattcaagaagcgacaccaaagaaagtcttaatggccactacaggcgacgccttcacgctcgtcgcggtttcttcggtcaccatcaacgtctactcaatcatcttcgacggtgctaccaccttcctcacgctcatcatgaagccactcgaggagatcgccattcggagtgctgctgcccggtgcctgcacgccgtcttgccggagcgtaccacggatcgtcggagcacccgcggatcgacgttgccgagctgtcctgatccaggaggtctggacggagccgtcggggacgcccgccgagctgctcttgcacttaagctcgttacaattatcatgcaactgaggcactgccatgtagtgttcgttcttgccgatcaaacactgtcacactgcctgccggagcacgttggattacgccagagtgccattgctaggggcccgtacgccgtcatcaagactggccgtgattctttctcttcatcaagccgaggtcgttgtgccgtttgtccgcgacgctttcacttcatcatgctggagttgttcgtgatgtcacgtgaacatcacgtcggagcaccactgcttggtgcctataaaccatcgtcaagccggagtcgtcgtgccgtccgtccgtgaagactccactggccggcgacgccttcacgctcgccgcggtctcttaggtcaccattgatgtctactcaatcatcntcgacggtcctnccattttccttaaaaaaaaaaaaaaaa

SEQ ID NO: 88158 - DNA, 5406 bp, Oryza sativa
  Clone ID: PAT_MRT4530_87036C.1
atggcgacctccccgagcgacgacgacgaccagaacgacggcggcgcacgactggagcagcggcgacgactgcggcacgtgatggatcggcaatggatgtacgctgaccggcggtccaaaaagtttattgacggcgtgcattattttttgagagtggccgaagctgacaggcaaaagggttttattttttctccatgcaataagtgtaagaatcagaaggagtattctgcatccaggactattcatttccacttgtttgagtcggggttcatccaagctataattgttggacatcccacggagagcaagtacactggatttgaaggaaatcaaatgggcgaggaggaaagggatgctgatggtaacgacgttgcggatgatcttggtcagatgttgcaggacgccaaggaggactgcgaaagtgaaaagggggcccataaattggacaagatgttagaggaccacagaacattgttgtacccaggttgcgagcaggggcacaaaaagttggataccactctggagttcttgcaatggaaggcaaaaaattgtgttagtgacaaggcatttggcgatttattgaaactcttcaagaacattcttccggggggaaacaaattgcccgagacaacgtatcaggctaagaagatagtctgccctctaggactggatgttcaaaagattcacgcatgtccgaatgattgtattctatatcgtggtgaggagtacgagaacctagaagcatgccttgttcgcaaagcactacgatacaatattagacgagatgatccaggagaagttgacgggcagctaacgaagaagagaattcctgctaaggtggtgtggtatttccctataataccacggctaaggcgtttgttcaggaacaaggggaatgctagaatgatgcgatggcacgttgaagagcgtcaacaggacaggatgctgagacactccgccgatggttcgcagtggcgaaacatcgacagaaaatttaaagactttgaaaaggacgcacgaaacatatggtttggtttaagtacggatggcatgaatccttttggagagatgagcagcggccatagcacttggcccgttactatgtgtatctacaacctccccccttggctatgcatgaagaggaaatacataataatgctgattattattcatgcccccaagcaaactggtaacgacatcgatgtgtacctaagaccactggtcgaagatcttaaactgttgtggaagaaggaagcaaaccacccggtacggaagaaaggcaagcactttgaacataaggcggaccaccatcttaaagtagtgtttggaaaggggcctggcagccagcccatagagagcgaaggtggtcacacggcgatgtggaaaaagaactctatattttgggagttactctattgggaattcttggacgtccgccatgcaatcgacgtgatgcacctcactaagaacctttgcgtaaaccttcttggcttcctaggtgtatatggaaagtcgaaagatacactggaagcacgtaatgatctgaagcatatggaacaacgcggcgaccttcacccggaaccaacggagaaaggaagccattacttgagtccagcctgctacactcttagcaacgcagagaaggaaagtatgtttaattgtttagagagcatcaaggtaccgtctagatactccacgaatttaaagcgaataataagcacgaaggagaagaagttcacaaacctaaagtctcatgactgtcacgtgttgatgacacagctgctaccagttgtaataaggggtatcctcccagacaatgtccgggcaacaataacaaagctatgtgctttcatgaacgcaatttcacagaagatcggtattctcggtcctgtgtacctacacaacatgtttcctttcgagaggtacatgggcgttctgaagaagtatgttagtaaccgtgctcatccagaggcaagcatcaccaaggggtatggaatagaggaggtcattgaattctgcgttgaatttatcgaagaccttcgcccaatcggggtaccagaatcacgccatgaagggagactacggggaaaggggactctcggaaggaaagcaataatgacggtatacaacaatttattattccgtaaagcccatttcacggttctgcaaaaatctctattggtggctccttacatcgaggagcacttggctctagttcgcgccagaaacatcggtaagtccgatgcatggattacacggcatcacattgatactttctccgcgtggctgcgacaacatctcatgggtaacgagacgattaaccaacaactggccttcctggtgaggggaccatctggctcgatcacgacattccagggatatgaaatcattggatacacattctacatgagggcccaagacatgaagagcacgaaccagaatagtgctgttcgtatcgatgccatgggacacgatggtacaactggcacgtattacggtgccatagaggacatatgggaacatgactatgtacctctcaaggacatgtctagcaaagcaaaaaagggcaaagggcctaacgagccgaagcgccacgtggttctcccaggaaaaagaaaaatcgtcggagtagaggacaagactgatgaggattacgatcagtttgatgggcaaccccctttcacggtgacgattgaccctagcatcctcctatcaaatgaagacaccccttactcacgtagcgatcacaaggagggaacaatagtgaggagaaaagaagacgtcgttgtcgtccctcaagcggaagtgatggctgatcgcgatgagaaacagatactgtacgatacaatcgcagagggaagctgccagtactggaacgaagaagaggggaacgaggatccaaaccagtacttgaacgaggaggggaacgtggagagggatgcggaggggaacgaggaggggaacgatgaggaggaggctagtggaagtcatccctccactgaacagaagagggcacgcggacaacgaggtgccacgaagaagatagagggtcgtcacatcataactgaggtggacgaagacggccgacctagtgccccagcaaaagcagccaagaattttgtacgccacagcggttgggttgtgagggacaacgtgcctgtcagcacggtgtactggcgcagaacaagggcacgcggggataatgacagctttgtcccggactcagagaaagagacgctgtggaccacaatgctcgagacgttcacgctacccgtggaacaattccagagcttcaagggagatctctataagaaatacatcctgaagggactaacaccaaattttgatgtattcccaaagctaagggatcattgggacgagttcattgcttacaagactgggcaacaagggcaagtgatgatggacagaaacaaagaaaatgccgccaagaagaagtaccatcaccacttggggtcaggcggatatagcgtcgcaatgccgaagtgggaggagatagaggcaagtttgattgagaggggtatcgaaccggccaccgctaaatggccggatcgattgaagttctggtactatgctcacgatatacgaggctgccagtcgactaacagacgcagtggaagcctcttctcagggcacattccgacccgacagagagaaggacaagctgtcactcgccctacagactcccgagcatccagggcgaagattgcagatcttgagtacagggtatcgagctacgagctcagcatgcaagaggaggtggcaaggaaggtggatgaacgtatggccgcacatcggtcccaggatccccagccgtacattcctcctgcaatggtcagcccatcaggcaatcgtagcagctgcgccttaacggggcaggtagaatcacagagcatggacgccatgcaaacccaggacgaaaccacctgccctgttgatgagatcatgcagcggacaccatgtgagctgcatattcccttgaagaacttatcaatcaaggtggcgtcgggattggccatcccaatggaccctttcgggacttaccactgcagaccgattccagcaggatactcgagggtcgaagttgagctggtggaagccgcgtacgaggacctcgagttggactacccaggaggagacggagaagtgaagaggcaactcaagcctcggagtcataaaaagaagatacctattgacccgagcatgaagaacttcttcaagggaatgtccgcaacaaacaaggaggccttacagatatcggactatgaccgaacacttcagagagcctatcacaagaagtccaaaccagtccttcagcttggagaacaaccaaaccacgaggtcgagccgttggtgaccagcgaagattttggtataacggaattcatttcagacaccggtctaactgtggatcagctgattcgaggcgcatcaatcccgaaggcggaagtggcatacgagtttaaactcggtaaactgcttgtcacgcctgagcagctgcagtccctactgacacagatgtacaaattccatgaacggtacatggaaatgagcgccaagggtagagagatgttcagagcgaggatcagaaaccccgacttcttgcaaggagaagatgttctctggatccatttcaaggatctcttcgatctgtaccatctggatgccctcgacgtctctcttctgagcgcatggattttaatagagattcaaagggcccgacggcggagggtctacgatactaggttcatcgaccctcggaaaatcaacaccgaaatgatcgacaagtacgagaaagacacagaggacaatctcgtccatctcctaacagtcactgtgtacgactcaatgaataaagaggagaagatttttgaaaaggtcttccaactgatagacagcttgcaactgcatatgtatggcttgggatcggttccgtcaattggtccgcgggacttggaaagaaaaacttggatggaggtttcattttccaacggtgactgcttggagcctagagccggcgcgccgcacgcaggagggcaggcggaggataggaggggtgcagctgccgggttcctgggccgcggcccgggcggcgcgacggctgcacctgcggccacgggtggggatcgcagtgtccttctcgtcgtgcgccatcgtgactttcctaggcggcggaggcggcaagagctgagcttccgcgtggaggacggtgtgtgtaggaaggagatactgatggaggagcggtgccagtcgctggacttctccggcatgatctactacgatgtcgcagggaggcgcctggagcagccaccaccaccacgcgcgttgctgcacagcccgctgccgtcgtccatcaagctcgtggccaacgccgctggcggctactag

SEQ ID NO: 88159 - DNA, 948 bp, Oryza sativa
  Clone ID: PAT_MRT4530_87037C.1
tacttgaacgaggaggggaccgtggagagggctgcggaggggaacgaggaggggaacgatgcggaggaggctagtggaagtcaaccctctgctggacagaagagggcacgcggacaacgaggtgccgcgaagaagatagagggtcggcacatcataactgaggtggacgaagacggccgaactagtgccccggcagaagcagccaagaattttgtacgccacagcggttgggttgtgagggacaacgtgcctgtcagcacggtgtactggcgcagaacaagggcacgcggggatgatgacagctttgtcccggattcagagaaagagatgttgtggaccacaatgctcgagacgttcacgctacccgcgggtacggataacttagtgaaacggtggactctgaagaaaatggcagaacagttccagagcttcaagggagatttctacaaaaaatacatcctgaagggactaacaccgaacttcgacgtattcccaaagctaagggatcattgggatgagttcgttgcttacaagacagggcaacaagggcaagcgatgatggccagaaacaaagaaaatgccgccaagaagaagtaccatcaccacttgggctcaggcggatatagcatcgcgaagccgaagtgggaggagatggaggttagcttgcttgagaggggtatcgaaccggccaccgctaattggccggatcgatcgaagttctggtactatgctcacggtggaacgcttaacccagttgatggctcccttgtcttcagcgatcagatacgcgaggctgccagtcgactaacggacgtagtggtagcctcttctcagggcacattccgacccgacagagagaaggatgagctgtcactcgctggaagattgaatttcagggcacattccaggacgaacacgagggaaaggcgtgattccctggaagattga

SEQ ID NO: 88160 - DNA, 352 bp, Oryza sativa
  unsure (1)..(352): unsure at all n locations
  Clone ID: PAT_MRT4530_87038C.1
ccggccaggaatccaacacacaaacatccatatcattccatcccatcagtaaacatgcagttcaccacctccttcatcgtcgccgctttcctcggcactgcctttgccatgccacaggccgcaccagttgactgccccgagacgtcagccattcccacctgcggtgccccttgtatcacctctgcagctgcagctgctggatgcaccgacattgcttgccagtgtgctagctctgaagtgattcaggcttcagctcttggctgtgttgncggnaactgtggaattcccgnggctctatcagngcaagctgccgccgctgccggctgcactggctgggcttagatagggcata

SEQ ID NO: 88161 - DNA, 642 bp, Oryza sativa
  Clone ID: PAT_MRT4530_87039C.1
atggccagaacggcgtggcgatgcgcattggtgatcctcactggtgtcctcctgtgcgcggccgtcgagacggcggtggcggcgaagagggtgtccatccccgacgacctgcgagacgtggtggacgacgaagaggacgacgactggcgccattggggcgcggcggcgccaccgcgggacgacggccagccgcccgacctggccggcatggatccggccgccctccaggccgagctcctccgccgccacgccggcccctcgttcggcttcgtcaagctccgcctcggcgttcgccgctcccaggaggaggtgatgggaatcgcgacgaggtggaccaatgtgctgcgcactggatcggtggcggccaaattcgtggctgtggattttggcactctcatgttcaccatggacacagggcaggacattcttgagagcagtgataattgggtgacactgtttaaggtgaaagagtttattttgagccaaccagaggcttacgagtttaagattgggaatcaagctttcagaaggccaggagacccacctcttgatgaagttgtcgagatgctacagaaacagaagagtactatgctcagccaagatcctggctcgcaacagtataaatctaaagttgagctatag

SEQ ID NO: 88162 - DNA, 648 bp, Oryza sativa
  Clone ID: PAT_MRT4530_8703C.1
atgcaagatggcagagtggttgcttatgcttcatggcagttgcgtcctcatgaagggaactacccgacccatgatttggaattggccgcagaggtccatgctttaaatatctggcggcactacctcattggcaaccattgtgaggatcaaacgggggaacgccaactgtttgggacagaagttttaaatgaggcagaggagaaagtaagaattgtcagggaaagattgagaattgcgcagtctcgacagaaaagctacgcaggcaaccgccgaagggagcttaattttgaagcaggggactatctgtacctgcgtgtcactccactcaggggagtacaccgcgtccaaactaaaggaaagttagcatcacgctttgtggggccatacaagatcttggaatgcagaggtgaagttgcttaccagcttgagcttcccaccaacatgcttggcatccataatgtgttccacgtctctcagttgaagaaatgtttgagaattcctaaggggcaggcaagttcagaccacatcaaaatccaagaagacttgacgtatgtggagaagccgactcgtatcctcgaaaccagtgagagaaggacaaggaacaaggtaacagcagacaaaatttcactcaatgctagttttgagtag

SEQ ID NO: 88163 - DNA, 266 bp, Oryza sativa
  Clone ID: PAT_MRT4530_87040C.1
cttacttagcttattagctgccttacttaactagagccaggtgtcctcctacctaatctaagctagccaggtcgtaatctaattgcttcagctcacgctgaccaaacaccatctgggatacttgccggctgtatttttataaaaaagaggatgaatttagcttggcgagcctgtagaaggagctgaccctgccgtgcagcggaggagccatgcctgcccttccaataggcttgctattccatccgaacgaagaggagctcatcgtt

SEQ ID NO: 88164 - DNA, 1347 bp, Oryza sativa
  Clone ID: PAT_MRT4530_87041C.1
atggagatcacgagcagcgcgatgctgaagccggcgccgacgccgacgccgcacccgctcgccggcgagaaggttcccctcaccgcctttgaccgcgcggccttcgacgtcttcgtccccatggtgttcgcctaccgcgcgccggcgccgtccagcgaggcggtcaaggaaggcctccggatggccgtcgccgcgtaccctctcgccgctggccgcctcgccgtcgacgtcgccgccgacggccaggggcgccggcgccgtcgtcgtgtcctgcacgtcaacgacgagggcgcgctggtcctcgatgccaccgtcgaggccgaccttgacgccgtgctcgccgccaacgtcgccaccgacctgtaccctgcaccaccggagcatagcttcggggcggcggttctgcaggtacagctcacccgcttcaggtgcagcggcctcgtcgtcggcctcatcgtccaccaccatgtcttcgacggacactccacgagcgccttctgcaccacgtgggcgagggcggtgcgcgacggcgaggcattcagcgttccgtctccatgcctcgaccgcgccatcaccagcgtgccacgcagcccgccggcgccggtgttcgaccaccggtcaatcgagttcaaggtaggtaataaatccagcgattcgtctggcgccgccgccgccgccgtggagaagatcacaaacatcggcgtgcgcttcacggccaagttcgtcgccgagctcaaggcccgcgtcggcggccggtgcagcacgttcgagtgcgttctcgcgcacgcgtggaagaagatgacggcggcgcgcggcctgaagccggaggagttcacgcgggtgagggtggccgtcaactgcaggcgcagggcgaacccgccggcgccggcggacctgttcggcaacatggtgctctgggcgttcccgaggctccaggtccggcgcctcctcagcgcgagctaccgcgacgtggtcggcgccatccgcgccgccgtggcgcgcgtcgacggcgagtacatccagtcgttcgtcgactacgtcgaggtggcggacgcgcgcggcgaggagctcgccgcgacggcggcggagccgggggagacgctgtgcccggacctggaggtggacagctggctcgggttcaggttccacgagatggacctcggcaccgggccgccggccgccgtgctgtcgccggacctgcccatcgaggggctgatgatcctcgtgccggtgggcggcgacggcggcggcgtcgacctgttcgtcgcattggccgacgatcgcgcacaagttttcgagcagatctgctactcgttggaggaacatgctatcccctctcatctttaa

SEQ ID NO: 88165 - DNA, 144 bp, Oryza sativa
  Clone ID: PAT_MRT4530_87042C.1
aacaaatctaaacataaggtgggctatatttattataataggatgggccgtattcacgagattaggttattttgtgatggagggagtatgacattattcatcagtacacctcccgaagggtactaggcatcacactgaaatata

SEQ ID NO: 88166 - DNA, 679 bp, Oryza sativa
  Clone ID: PAT_MRT4530_87043C.1
attcggctcgagtatcgtaccacgtatttttcgcctatcatctttgaattctcatcgaagaaaccacccacgcacacgttcgttgattcatgttctgttccttttctaaacccaacacaacatcgtgtccttttcttctcttcgatccactacgtgcctgatcctctgcttcaggcacatactcccgcaggttaaatggcgaggatcaaacctcaggctctgctacagcaaagcaaaaggaagaagggtccttctcggataagtgccgagactgttatattttactttttgattcttgccttggttgggtttttcctgtttgcttcgtacagacattggtccagcagatcaagattacaatccgaagatcacttgtcagtctctgagggtgaaaatacttttgtggactccaagaaatctgagctgcctggatatgctgttttaaatacctctaaaggttctataataatagaactgtacaaggaaagtgctcctgaagttgttgatgaattcattgacttatgtcaaaaaggacacttcaaggggatgctttttcacaaagtaattaagcactatgtgattcaggcaggggataaccaaggatctggagctactgaagattggaacttgagaggaaaagcacatacaattactagtatgaaacatgaagcattcatgc

SEQ ID NO: 88167 - DNA, 549 bp, Oryza sativa
  Clone ID: PAT_MRT4530_87044C.1
gctacccgtgttctccgcaacgggcaggctcaccaccgttgtgcaccagccatgccatgctcgcaccacaacattgtccgcgccggcctttcgcggcccctgtcgaccttccactgccgccactcacgcaccactgtctgcttgcagcaccggacacccacaaccccgtcgccgtggggcacgcctcctagtgccaccgtgcccgcctaccaccgccaccagcctggttcctcccatctcagccgtcgtttacaccgtcctccctgcgacggcgcctcaccatcatgcccttccacctccaaacgtccgtcgcctccacgccatcaccagctcaagggttggctacccgcgttggggaggccagatccgggcagagggggccggatctgggtgttcccgcgccgcctctacgcagctgtgccctgccgcctcgccactgccaccgtcggatccagacgggagggtgtcggatctggccggcgacgccacctcgccgtcatcgcatcacctcagatctggttggagtcatgggcatcgtccgccacctga

SEQ ID NO: 88168 - DNA, 734 bp, Oryza sativa
  Clone ID: PAT_MRT4530_87045C.1
acggatcgcgatatgaccgaagtagatgtgccggtctgatcgcctggttgccgtcagtctgaccgagattgtatctccggtttgaccgccgagatcagctcctgtcgcctgtcgtagacgccggtctaaccggcgcaatgccgctggtctgaccgccggtgcgccgccggttagatactccccctctatttatacccgagataggcagcctaaagccacgaaccaaactcatactagaagtcctaatcaccctaggaaaccctctagtacaagaaacaaactttacataaccaatcataccaaatttggactccttccaaattcgactctgcatcccattcacacacaatacctccatcgtatgccatatggaatcttcaccaaccacgtgtattgaactctagccggcaacccgtgcccggtgtgaccgtacccaatccagcacagtacctgtatatcacctatgaaatccaatcatctccaaaaccacttcgcaaataaattccaaatatctaaactgataatctccaatgccaattgttcatcacaaaataataataaaaaacacctttgattttacaatatatgctttcctttgagtctatatctctcatccaattcctgtgtttttcctgtgttttacaatcctctgttttacacttacattcctatcaaaatcctacgtttttcctattcctacgttttctcaatcatgcgattcaaagaggccctaa

SEQ ID NO: 88169 - DNA, 601 bp, Oryza sativa
  unsure (1)..(601): unsure at all n locations
  Clone ID: PAT_MRT4530_87046C.1
ggtgtctgggtttacttctgggttctctattctgttccattggtctgtatgtctgttttggtatcagataaataatcttgtaaagaatatttgtacacatattcttgtgttcatggattataatgaagcagaaatatgctgcgtgttagattgcatatgttcaggcagaaagcataggatatttgatatgtactcatgtagagtgtggaaacacatcagataatatgtaatactgtggtgtagaaggtctatggcccaggccttggcagctagaagaaaatcaggtgtcccaactggggaaatgtcaggagcagagatgtgaatgggaaaaacttagcactgtttacatctattttttttccgtgctttttagggccactaccatggcatatggaggttcccaggctaagggttgaatagaagcttcacctgccggccgacaccacagccaccatgggatctgtgctgcatctgggacctacaccacagctcacagagacaccagatccttaactcaccgangcaggacaggtttgaacccgcatcctcatggatgctagttggattcgtttctgctgtaccatgactggaactcctgtgt

SEQ ID NO: 88170 - DNA, 356 bp, Oryza sativa
  Clone ID: PAT_MRT4530_87047C.1
ttctttcgtgctatgggtggcggccatatcctatccgatttcaccggagacagggtgcccgcgggggtgaacccctgcgggctactgcgggtgaggtgcgttggacgcgccgtagacaggagaactacccggcaacaccagcgccacctcgacttagaaggtgtgttcgagatctccgaggacgacgacgacgacgatgagccggagctttacgatgatggggaagaacacctgcccgcacaatgcttttggtggcgcaaaaactagggaggacctatgttggaatgacaagaagacatctgctgtagctacaggccgcggaagcgcgatatggatgttgttcgcggtgcttgatt

SEQ ID NO: 88171 - DNA, 447 bp, Oryza sativa
  unsure (1)..(447): unsure at all n locations
  Clone ID: PAT_MRT4530_87048C.1
catatttgaaaactttcaacttgagagttgaaaactttcaactcagattcgaaactttcaactcaagaatcgagattcgaaaactttcaagttcggatttgaaaattttgaaaactttcaatttgaganttgaaaactttcaactcgagantcaaaaacttccaaatgcagagttgaaaattttgaaaactttcaactcgagagttgaaaactttcaaatcgagagttgaaaactttcaagtgcagatttgaaaactttcaaactcaaaatatgccaaagataaaaaaaaatcaganaaaagtgaganaaaaaaggaaaaaagggtaaaaaaaacgganaaaaatcgtagcggaggcgcgcgcaccggcgcagggcgctggtnccttcttgggccggaacgcgcgcggcggnggtccgcctacnactagcgggacaagccgttaggt
